United States Patent Application Publication US 2013/0034624 A1 - sequence listing, part 15

SEQ ID NO: 47770 - DNA, 1718 bp, Bovine  19866881054653
  misc_feature (1)..(1): n is a, c, g, or t
ntagaaggcagatgaggatattcttagatcttgccacctgtcacactccccaggcatactctagaataaaagcaatgtgtcatgggaggcctttcacacgaggcacaggggagttacttgtttgatgagtagtgcatgtgacaggcgttgcagactgttgtcacagagagaaatcactaggctcttctttgggctttatcattattcatgttcctccaaggactgctccgggacacctgctgtctgcctgctgggagaccatggcctgtgggcctgtttgctcacctcccctggcaccaatgttcattgcctaggaagttggagttaaagctgggtccccaagtgggctgggtctgatgatcccccgggcaagactttgcataaataaagattcaggattgactcttgaggaaggtgtgaattaccctgtctcctttctttgtggctgggctgcactattggcagaacaaacaacatcgaagtcatgaatatggaagtttctgggagatactccttcctccattcaaggcactaggttaacaaatacccgcagcccaaccactgtttcctttagttcagggcatatttactgtgaccagaaactgcagtagtgacgaggacaatcacagtggtggtgggacagggacttgacgctggggttggtgtgtgggcctctgggttggatcctgtaccacctacctccacgtggttctgagtgtgcagggaaaggaaggaaggaccagtctcagccgagctcacagccataggagaactgattaacataaatcatttaaaaatgtgaccatttggacacaaatcttattttcttatcaaaatagaccctagtgaaaatgactgctttgttgatgaaaaccacatttctcccacttgcggagcaaatccggaaccaagggaattctggggcatgcgtctccctctccactcaaaccccttttgagccttcaccatacagtctcaaggacagagagtagtgtaataagggggacacttactttgcagaatgtgtgggcgcgcatgcgcgttcatgctctggagagctgctgagactgtctgctgggtgaggagtggaggttgctgagagctaagatgaactggactgcgaagggcaatgtaggaaaaagaagaggcaagatgacaaggctgggagggggaggaatttatgggaaagaatagaagtaagaaggggactttttctgtttctgtcatgtggtttgtggttatgtcctggatgtttgttcaatgtccagtgaaatcatcatttctcagtgagaaataagcagtgcatttggattatttttgttacatttgaaaatttttttgagtgtggcccactagtatccacgcggaatgtggtaagaacagagtgctatagacacaaaagagaggacgtataagagggagaaaacagaggaaaattctactgccacctctttcccctctacacgatggcagatcttcagggtccaccacccaccaccaacaggaacaagttccaatgggctggctctgcatccatgtcccccagccccaccctctccacgcacacacctatcccacctttccaccttcctcatgattggctataggaaatcctggggtttcaagcttttctcaagctggtcctggcttcctcatccaacccattgaggggcctggcacctgagctgggtcctggagcaagggaatgaatgggttgg

SEQ ID NO: 47771 - DNA, 1245 bp, Bovine  19866881098901
  misc_feature (1)..(1): n is a, c, g, or t
nctgtataatacacagttacaccaacacaaagaaagcaaacaccaccttacagatgcagatgattccctgaacaagataagattatctcactaaagacagtaaattacccaaaggttacagtttatgttcctatagtactttcagcagtgttgtatctagcccagtaactactttctttattaaattacctataatacctaactcttcaagtgttcttcaggctggctttgatgttttatttgttccctcattaactggtgagctgaataagctctttgatgtatgtttgttttatatttgcatcagtcatgatttgtaaccttaggaaaattatactttaacagtttaaacacacacaaaaaataagatatctccctgaaggagacaagagctttgtggccaagcaaatgtaggctcaaactgaagcctttctactcatgtcttgggacagaagttacttcactcttaaatctccagctttcacacttgtaaaataaggataatatctaccttgctaacgttatgaaaattaaatgagataatacatgcaggcatttaacacattacataatcccataaatggcatctattactactgtaaatattgataatattatgaataattcttggggtatctgcccatagtgtcaccttgtccttgcctataactgactagaacaaagatgaacacaccagggcccataaaaattccatctctctctctctctcaggaatttagaatagggattcaaagatattagttttcctttgttcattatttaaactaaagatatgtcagcttggacctgaggctacttctgtggggtaaccacattcagccacatgcctgaagttggtttttaaagagattaaatgcaaacagtgaaagcaataagcaccgaggcaaaagaaaaagagcaggaaagaaggaaaaaaaggaaggaaggaagagagaaagagaaaaaggggcccagctcagagagggtttcaactcaggcagccctaggccctgccttcagtagcacaaattgcccttgggtacttaacaataagcatctctttacgattgaagctgaagctatgatgaaattgtatcacacacagtcaggtgaactttgactaacactaatgttattgtaactactattattactactattactatcattattgttgtttagtcactaagtcgtgtccacatcctttttttttcttttttctttttcctttatttatttacttta

SEQ ID NO: 47772 - DNA, 1017 bp, Bovine  19866881294029
  misc_feature (1)..(1): n is a, c, g, or t
naacattctgagttatgtttttcttgctgtggatgctttctagggagatgagttactgacggtctctcctctgcagaaagtaaccatctaggagaacagcactcgaagatcaggtccagagggtgtctgatgcagtgcaaagattgtgggatatggaatcagtatcttacttgctggggacatcagcaagcaacttcaccactctctctgatcatgtcctttccactgatgattggaagcaattttcctctctcactggagtgaggaatataccagccatcaaaagggtgtcattggctttgccagtagagctgaatgaccccctgtgtacccactgcatcttatcagtctgcatgaaggccctttaggcacctgctatcctcttcccgaccctgtgcaggagcagttccaggtgaggtcccccacccagctggccccaacatggtgaatgatctggacctagagaggctcttgcctacacactcacccttgccggtccacaagaccaggcctgactcaaggcagtacctaaggaaacattgaaatggagacccaccagctcttgactgaatgctgccaattatttttatgaatacttcagaagtcaaaatctggcagaaaggaaaagcatacagagatatttaccccataaataaataaatcaacctttcttccttgtgaatagcataaaaatgtctttgctttagtggaaactttgtaagtgtgatcttggctttttgccatcagcagatgtctataataagctaaggtctcagacagagatgaattgatttttttttttttttttttttacctcaaagcctcacaaaagacagtgtgcctgagagttcactagaaaaacaggatttgttgttgtttctagttttattatttaatggcaaacagtttaaagcttcaagtaattggtttttttgtgtttcattgactgcctttgattaccatgctaattatattgtaaacagactcctagattctcagacagtagtgactttaatg

SEQ ID NO: 47773 - DNA, 910 bp, Bovine  19866880447202
  misc_feature (1)..(1): n is a, c, g, or t
nactgcagcatgccaggttcctctgtcctccactatctcccagagttcactcaaattcatgtccattgagtcggtcatgccattcaaccatctcatcctctgccgcccgcttctcctcctattctcaatctttcccagcatcagggtcaggtaatagccaatgaatgcggctataccaaaatgacacgggaacttaacgcctggatctaacttgcaaatgtcacccggacaattttttgaacaccaccaagtgacaagggtagagcgacctcatctcctcatattctaatcaaataaatccaaggtctctcacaggctggtgcctacgcttcccttagtgcctttcctctggagtgtctcccagcttagggaagactgactccacagaactcaagtgattcatcagggactcacagagctggaggtgaggtggagtgttactcctctccgaacacagcacttacctaccctgtcaccagctcctggtgctgaaaggaccctgcccttacaaatggatggggcattgcccaggggccacacggaagacatccaggtttccacccaccctcactgagacaaacagtggagagattcgatagagaccttgcagaatccaaaaggttaaaaggaataataaaggaaactgccaattgtaaatgaattatatttggctctgaaagctgagacacaggctatattataaaagacatctctttgcgttgtttaccatcaccctgactaatgcagacctttttttttttttgttttaaataatcttatgcaaattagacaaacacacttccttccagttgattgctatctgcaaggagtaatctaactgcagagggactgagcaagggctgagcagagcagacaggagaaaagggtgtcgtcgtcctgtggcaggcag

SEQ ID NO: 47774 - DNA, 2434 bp, Bovine  19866880478809
  misc_feature (1)..(1): n is a, c, g, or t
nactgccaagaccagctgcaggaatggggaggtgaccaaaggctcactcccatgacttaccccagtgcaacaagcgtttacatcttttactcttcatagaaagatgaaattggaatgtgagtgcattgagagaagaggaggaagagaagttgaacaaatctgttcttttaaccataaaatcttatttcagtccagtaaaagacaaaaagaatcaaagaaatcagaggaccaaacaccagattttatacacgtgaagcactcagtaagtattggcaaagaattgctatttttaaatgtaaaaattacagactacatgcttgtttccctttttcctaagctgccttaagtttgaggttccccttgggtgaggtctgtgtcttttgggttcactgggtctcgtttggttctggcatcacagtgggtgctcaatagacacttagtgactgaataattaaacaaatgcccgagataagtgattatggtgattactgggcaagttgtaattaaaaataaaaaaagctgagtgcattttttttttttacgaatgtctctcttgggagtccatgagtgggaggaggggagagaggggcttcttcccaaatgctaagcttggttctcaaatctcatccaagttgaccaacttgccaagcctttccacccccaaattccctcatccctttttgtaaagcacgtgttatttgtttctgactatatatatatatatatatatatatatatatatatataatgtatttattgtagaaaattcagaaagtacagataaacaggaagaaaaagttaattgtctgtaatcccaccacccatgaataattcactgctgatgtttcagtgtatttcccgccagtctagggtttttgtttgttttttgtttttgctttgttttgttttatacaatcagcacactgaacattccaggttttttttaagtctgctatgtgtatgtagggtttcccaggtggctcagtggtaaagaactcgcctgccaacgcaggagatgcaagaaactctggttcgattcctgggtcaggaagatcccctggagaagaaaatggcaacctgctccagtattcttgctagggtaacttcatggacagaggagcctgtagagctccagtacatggggtcacaaagagtcagacatgactgagcacataccaacacatgtgtatgtgacatgaacattttctcccatcattaaatgctattccacaacacgatgttgtgtagacccatagcagagcttgatcataatttacttaaccagtgccccactattggaaactttggacatcaaattcgttcccaattcatttcattactacaaataatgctaatgaatatccttgtccataaatgatagtgcacattccttcaagtggaattgttgagtcaaagagtgtgcacgcatttcagagctttgattcccagttgccagtgccccctccccattaggctgtatgaacttgccctccagccagcagcctgtgagcaagtcccatctctccaaatgctctccagcttttggtattctcactctttttttttttttttaaacccctgttaatttaatgggtgaaagagtctgtgattctagtaatgaatccttattagaaccgtgctggccacaagcaggggctgtttcaaggtttgagcggccttgttcagacccacagcttcgggcagagatgagaaaaacaaatgcttagtagtgggtagttggaggggagagcagagatctcttacaggttctgggggagcttctagactgtctacctgagcccaggcttcttgggcatgtgctcaactcttgggggcagaggggtggggtctgtcagtctcaacagaaatgagctcctgcttcctcctacctctccgcccacaccttgcagacacctctctcgacagagaagccttagggatttctatgccataaatactacctgtttttcaagctcagcatccacactttgtacctgctttcatttccccgcctgagctatcactcagccctagtcaacggacagactgttttgctctctgattcaactttttctttttctagttggttctaactaatttacttttttggtatttatgtttacccctacctggaaacaagaagaattgaaggtgactaattttttccttttaggaaatgtaccctaatcccagtctgatctctctgatccttttcagctttgatatcctctttttttttttttaatagctttaaatttctggggtaaaaagattaactcacattcaatactaacagttcagaaaaatacaaatataaacagaatgcagaaaatttcaaaacacccacagtctgagagccctgtattggggtgtgaactgggactttaaaaattaaaagaatgaatttaagtgaaatccaccagttatatctttt

SEQ ID NO: 47775 - DNA, 1071 bp, Bovine  19866880552675
  misc_feature (1)..(1): n is a, c, g, or t
nctctcttgcagctactcagctctgttagttgtaacacagaagcagtcatagacagtacgtaaatggatcagtttgactgtgatccaataaaactttatttatagatactgaaatttgaatttcatatgattttcatatgtcacaaactcgtgtattctttttttcaaccatttgaaaatgtaaaaaccattgttcagcagctgtacaaaatcaagttgcaaagtggatttgacccactggcagtagttttctaacccctggcatagcatattgtataagtagcaccctcccccagcttagaaataaatatattatgttccaaaaactttgtttggaaccgaggaagcattttcttataggatcattgtcatctgtgttggttacattcccagaccaatctacaagcctgttttaccttcagtgttctgaattccagcagtacaacttcatcctcaggaataacactgtctctgagggaatatggatttaatattccttcctggaccagaaggaacacagactttccccagcactatcagaatttccttcttcctgttctcttcatttcgagtaccctgctccttgggactttaatagggtggtgtggtcacaggaccaaaaaggtttgtgtgtatggttaggtgggagaaaggtggcagggaaagaagaatgaaagaaaagagaagataccaagatgaatcacacacagtcagagtagcattgctctgtgaaaccttagttatgtgtgtgtatatgaactgggtcacagtgaaagtgtatttatttcttactgtgattggtgatcagaatgtttgaaagcctgtgttctaagggtttgaggtacagatcccgagatttttttttatccttttattgtatgtgagagccaaatgaaaaatataaagtaagcctcttgaccacttaggacagtgtgtttctagtaaagttaccttatgaggtggttacctgttttacagatgagaaaacagggtcatgcagctaataagcatcacaattgagatttgaacccgtattcttaccttgcttaagaatatctgcttcatccaata

SEQ ID NO: 47776 - DNA, 1264 bp, Bovine  19866880623105
  misc_feature (1)..(1): n is a, c, g, or t
ntaataaaacactaatacagcgccttgtatccaggggaagagctaaaattaacatagagcgagcagtgtttgctattacattcaattacctttttacttgagatttacattctcatccccttaatctccatagtagtggcttcaaaatcattcctcccaggctctgcccttccggagcccccacagctggaagccaggcctcctgcccatatggcgctcaccccggcacggcgcctgcccctttcaccacagctgcctctcctcacagggtaccacttctcacccctgctcttaattttctcacatctcagcctctgagcactcaaagcaaagggctctgacatgaggcacattcagacatgcagttatcaataagcaggtgcacggggcatggggttgggggcatcacttcatgagcctctgaagactgcccctggcacaagaaaggggcaggcagagagttcctgggagccctgggaaaactggcatctctggtttgacaggttgtgggggacggtttgctgcatggcgcagctggggcctctggattgtggcaggaagctcagccgtccagaagtagaaagggacaaggaaaccacagggtccaggttcttactcaatccacagacagtagagctgagggcttaggaagtggctgcttgtgggtgacagaggtgagcctagaacaccctcatcctgtcttaccatccagcactttccctaacagatagtcaccccaaacacagccacaaagtgtctgaaccaccaggagggcccctttgtttcctgtaagcggacaaaagcaggactccttgtccttggggactggtcagccctgctgtgagtcatcaacagagatgaccatgtttccaagtggcacaaagtcctggttccaaatctatcactgactagctgtgtgatcttagacaaggtacctcccctccctgggcctcagttttttcatctggagaacaagcgcaaccatccctgtgctcccttcttgagaatggcccccgtgactgaaagatcaggaagtcacattcaagcccatggagcctcagaagtttgacagcaaatccgtttctgagatggtctctgcgaaggctggtaggagtcccaaaatgaggccaacagggctgggatgctcatcagggtctcagacctcagtatcttgagtttcaggccaggccacctcagacctccatgacttctttttttttgggggggggggggggcaggggcagtgcttcaaggcaggtgggat

SEQ ID NO: 47777 - DNA, 1937 bp, Bovine  19866880653707
  misc_feature (1)..(1): n is a, c, g, or t
ngtgtgagcctcaccctgctaaataaagctttggtatttctgataaagcctcaaattccttatcacactgacacaaagtgcatttaaagagacagacaccctgtccctcccttcccaccagcccctgccccctccactcagttcagatttccagcagctcaggctcttgtggatcagacaccaaatacggctcctccgggaggatgtggggggtgggggaaaccaaggggcgggagggctgcccgctccaactcccacccacctgtgtcagagcggccagcaccctgaccagggactcaggtccacagggagtggcttgtgcttcccgtcccagctctggagccagagggagcaatcaatagacacgccctgcaacgggtgggtgggggcggtgagaggggggtgacttcatgacagtgtagtcctgtgctaggacaatacccagcagctgctagaagaacccccagtaaaccgccgggcccaccaggctgctcggccactgcgcacacatcaggtggcctgagccactacggtacccaagcagagtacaaggacagggccaagaggggtcaacgatacccatgaaacacagggctgaccatgttcctgtcaggcttgaccacgggttcagcaaagccctgattccttacacagccctgcaaggtggtggaactatcaccccatttgggtattactcgctcagttgtgcccgactctttgtgacaccacgcgctgtagcccgccacactcctctgtccatggagttctccttggcaagaatactggagtgagttgccattcccttctccagggaatcttcctgacccagggatagaacccgggtctcctgcattacaggcagattctttactatctgagccaccagggaagctggcagaactatcaccccatttgatagatgaggaaatcgaggctggcctgaggcctcagagccagcggcaagcccagctgcagctctagccgaggctggccaacagctctgccgaacgaaagactcttcacttaatcgatttgcagagttcacgcccacctccccatttacgatcccaccaagacaggccttcctgtgtcccagtgccccccttccacctccctggccctagcttgtcagcccaggccctgcgcccacacacagcctgttggttgaggaatcaaatttattatttttaattattttgatttatcaaagcagcagctacaatcatattaaaccaacttggcttcttggcattgaacagatacagctgccgccggactcccccacattctataaaatgcccaggctgtctgtgtgctccccaaggagggcacccaggggcccttctccaaggaccccgaatttgaagaccaccaggcctcccccgtgcccggctagaagcacacgcaaagatgctgagggccagagaatggaaaaggaacatgctggggctgagctgccaggtgctttgggaaatagtcacctccatccctcagcccggagacccttccagagtcttgacccactgggagtcacaaacccctcagctggcatttgcaggggctattatcactagtggtaagaatcctgccaatgcaggagatgcaagagatgtgggttcaatccctggatcagaaagatctcctggagaaggaaatggcaaccctctccattattcttggctgggaaatcccatggacagaggtgcctgctgacagtctaaggggttgcaaagagttggacgtgactgagcactgctatttgaatttttgaatataattatgtctcaggcctgcattggggcactcaacagagaggaaccagactgctcctcagcccctgcccacaggaggaatgatggcccactttttgcaagggaagaaactgatattcacagaagagaggtgatcttcccggggtgcatagctcatgaatacag

SEQ ID NO: 47778 - DNA, 1216 bp, Bovine  19866880681583
  misc_feature (1)..(1): n is a, c, g, or t
ncccttccctccctgcccccctgctctccagccttcccttccacccctggcctgtggcagccccctccccaccatctctgactccctgcctgccctccctctgctccagcgcagcctgggcctctggtcccttccgtctcccaggccggcagtcccgcggcgagctcctgcaggcgctctgagccttgtctgtccaccccgcttgccctcgcctccttcccacctcactcttttaccctctcccctctcttctactcttcttgctctcttttataattaatgattagttttaattggtttgcttaggcagcctgacagcaaattaacagaagccagctcagggctgccaggcttgggcgagagaccactgcacttcccaactggtcaggggagggcaagggcgaggctgacctccagactctgcctgggcctgtgggctggccaggcgggctctcagcggatgagagaggccacacctggtctggcgcgggggccaatgggaagaaggcaagaggatcctcgcatacaatccaggctcacttttgtcatctttctctgtgggcttttgttctctttctcctcctcatgtccccttccatattctcattcatgttaggcatcgtccacatcttctgagattaaggtcaggtaaaaggagggcaggggccctgtctttagacggggacagggcttcattctgatccttccctgtagctttatggggttagaagcttgatgggtctgggccaagatcttgctctttcacatggacaggagggagcaggtaacaaggcttgttgtcattgttagctcagctgctggtctacagtcagctaccgcagcccagaaaccaaacagatccggttctgtttctgatttgccctgtacctacctctgcacagagctcaacctcttgatcctcagttttctggtcagaatacttaaacattagatgaatgcatggatgggtggatgggtggatggataggtggatgggtgaatgaatagcgggcagagaaagtggccagcatccctgagcatggtactcctcttgcttagcttagaagggttgcacttattcaaccttcctaagtgtgggggctcctcttccactgtgttttcctactctgtacctccccccggccttgcagaatcctgccttaactatagcagctttctgattctccaccaagcccagggtgtgcccagtcactca

SEQ ID NO: 47779 - DNA, 1299 bp, Bovine  19866880697739
  misc_feature (1)..(1): n is a, c, g, or t
nctcgatcctgactgtgatttagagtttttagaatgttaggccgcaggaaaccagagaggcatcctacctttcttccaaagagagtttaccccgcacttaaactggagtccgaggacttaatcacccacctccattatcgtctaaaatgctgcttcagtcagtaattatctatttccaagttgaatcccaatagagtaagttctggcaggaccttttctgggcagagaattccaaggtttgatgggcatctggggaagaagagccctctgtggatttaaacttcacttttcacatttcccgttctcagggtcaggtgtacacagatcacgttcacagagcttggtaccatctctgatggggtgagggaggaggggatcttataaaggagtgagcgtgtgccctgtccctaacattagttgagaaggaaagggggttggctctctggtcttgggggccgggagtgcgtctggaggggagggaccaaggtcctggcttcctccagtcctgtctcccacaggactcgctgcagtgcagggttggagcgctgggtttggggagctcacagctactgtagtcttggctttcctagcaaatgtcacttcagggaattgcagtggagccctgtcttgaattataatcttgactttctctttttttaataaacatctctttcccgaaaaggcaaatccaattttgtttttcttttaatattatttaatatttaatatagaaatcgaggtccctgtagtgcatgtcacttcagtggaaaatgagggttacctctaaaaacatcagctgagtttgttttattgtgaagctgcagccctgagtagggccctggtcccacctctgtaactgacaggttaacctgtgccctctgatttcagggctggggaggccgggggagctgatggcatagggtttgcaagggtcttttgtggttttgtttgtttgttttttgtttctttgagatctcttttggatgcttcagagtctgaacatggagtcattaatgagaaacatgaagttattagaatcatttatcattttctttgaagcttgtgctgccagtttgtgtaatttacaacatttctttcttttatcgggaatttctttggatgcaagagaaaagcagctgttcaccttcagagtattagaataaatgtttttgttttccgtccaaccacttgattctgcagatgacatcaattgcggagtcagccacacatgaagataattggactgtgtgtggggtttaagccctcatagaaggaacgggtctatatatagaagcagtt

SEQ ID NO: 47780 - DNA, 1186 bp, Bovine  19866880719430
  misc_feature (1)..(1): n is a, c, g, or t
nctcagaacctggagaggcacattaatcaacccattccaccagcactaacggtgggaaggcacggggccggccctggaccacgcgctggaggagacgtggatgccgggctaactctaatggtcaccattatgagcagcagcagcagcagaaggcagggctcctggccttggcctcctgggggagggtacagtagtctgagtgctgccctgacacaccaatgtcatgggtataaccagatcctcagagcagcaggcccctggccaagctctgatctcttatctccttccagggccaactgggtgtgaggctgcaaagggggaggggcaagaaggtaggcaggagggcctggctttagggagctgggtcgcctgggccaaaaagggcagaaaactatggttgcataatgggaagcaagagttctgctcttcaggttgggggaggggagaggtagaggagagtgaagagcacgaggcaagagaggcaagggactggcggaagtctggaaggcgtgggtgacgcaggaaacatcgtctgcccatctccatctgtccaaatacctcccatcctttatcaagttcaaaggccactccttcacaaaactccctgggctctcctctcgggcgctcctctgcctggtgggacaggtaaacacatccgtctccctccaccaggcagaccccagaaagctgggaaggaccaggtggccttcattgctgcagctcctacagtgggtgctccccagtgcttaccaagaactgcaggccccacaacctgcctggggtttcttccccttctgggggtcaccagtatgtcctcgtgagtcggggttatgaggatgctacactgtggtcagacagccagaggggtgagcgctggaccaccaagctgccccctgtcccaactcatccccaagaagcggccccttccccctccactccctggggccaccagccctcctccactgccatctcctcccccgaaccctggcccagctaccccggaacagctgctgcctgccgtggggacccacaggctgtaattactacagagcaacttccttccccccgaagatgaggaggaggagaaggacaaggaggagcaggaggaggtgtggcagcaccaggtggtcaaggtttgaaaaccagtgcggggagggcagtgtaaaggacacgccttgggggctgg

SEQ ID NO: 47781 - DNA, 1742 bp, Bovine  19866880728945
  misc_feature (1)..(1): n is a, c, g, or t
nccacggtgcttggtgcacacagcaaaggtgttcggtgtctgaaagagatgcaggagaacaagaaggttcctatggatactgaacaatggtggccacctgccacattcagagagcacacggcccttcacacagacggttcagagacaccaaacacaaaacagagattctgcaccaaatgacagggttcagaactcaaaagggcaggccatgaacggcaatgaacagtggagagggcaggactgaccttcaccatggcctgctggtcctcgctatactccacctgggctgtggacaggttaatgatgccccgctccacagggtctttgttcgctgttatagatgaagacgtaagggcgacggaccacgacgaaatgtttagcccagttgctggacaggggctccttgaaatgcagatatcctttcttggagaccactgagctgaaaggacaggtcagcagaggttagttcctcagaaaaataaagtgatcataagctgaagtccatcaaaacagactgaggccatgtccctaggttgaaggaaacaggcaatgatctattcggcaggccatgccaggtgagggggacggagatacacctggagcagaacccagtccccttcccatatcccaggttcatctacatgagacttgagcagaacagctggaagtgaattcccactaatctgtcttctaataccccaggatctctgttccatacagtactcaccctggtctaatttcttcaatatctggaacaagattgagaaattcatttttccctgctcgggccaaatagggtgtttccacaggtgggacaatctgaaactgttcaaattctgggcagggactagaggcccgggaattggcttctggggtccttgaaaagagacagaggttaggaagaaagggagtaccaagagcttccttgaggtcaatgcacaaaacaatgcttctccccaaacaccaaggaccctgccaacatcaggtcctcagagcctggctaagaagacagagctggcatccaaaaggtaattaatcccacgtccactgggtgtcatccttcggcagttattaacacaaaggaaattctcactgatgacgagcgagtctctcagtctcccctcttgtccggaaggcctctgaacaaaaggctgaggagtatgaacaccactccctggtgtgctcctgtctagtccccaggccacacctagggcaggggttctcaaggtgaggtcccccatcagcagtatcaacttcatttgaaaaagagtgttagagattccgattctccggctccagctcagacatgtggaatcagaaaccctggactgggctcaggcacctgggctctcacaagcctcccaggtggtgctgatgtctctaaagtctgagaaccactgcctgaaggaccagtgcagcacgaaacaaatgagaagaactgggttcccatgtgactgtctggagcaaagctgctgtgagagacagttcctgcgctctgcgttgttgtctttgtagagcagcttagtctaatcaattgtatctcactaactccaaaaagcccatttttctcacacttcactgctcctcgaactggggtgcatcttataattgacggcatgtcacactgcagtgacagtgctctggctttcttgcacactatgtgttaagtcacttcagtcatgtctgactctttgcgaccctatggaccactgccttccaggctcctctgtccaagggattct

SEQ ID NO: 47782 - DNA, 1864 bp, Bovine  19866880791000
  misc_feature (1)..(1): n is a, c, g, or t
ngtgtgtgtgtgtgtgtgtgtgtgtgtgtgtgtgtgtgtgtgtgtgtgtaaaaaagtggccggactatattctaagaatgctgggccagggagaggaggctgcccgagccggggtgggtgcatcactaacctgccaggtctaggaagaggagtccaggctcagagcctctggagccccaccccatcccctgcccagggactcgagccaggggcagcagctttaatgaggagatgctgctgcgtgactcagccctccaaaggtgcctccatttattttatttttccatcataaaaaaacccaagctgcaactcggccagattccccggccatgggggatgggggaagaccggcccagagaggactgactaactagccccagtgccctccttagaggggagacttatgggttcgtctgggttgatcccaaagggaaaaagggcctgggatggggtcccccaagggctctttcagacctgccctcactgcctctgtctcctgttggaggagaatggctacgccaggcttttgatccagagtaatgctcatgatatcacataactagtgctggggttggttcaaggggccacttcgcaacccacagctgcctctctcaaatgctttcttacgaagagcaggtccactcaacccctccccagggtgtcccactgaaccctctcgggaaaattagtttgggagtcagagaaccagagaccttaaaggtcatctgatgcttgcgtccctccaaatgtcacagccagcctctgcttgaatggtaccaggaaaccctcaacttccgaggcggcccagtctgtgcttggctctgactgctccttcctgccaagatggcaccgaagcacctaccccttgcagcagactggcaaaaccggtgctcaacctgacagttggtagggaccggccccaacttagactggtcgagtgggtgtatctggccaagtaaaggctcgaggaaggaaaacagaggacaacctgctctgccccaagcccagcatggaatctcttccttcagaaacaccacaaaaaccttcccagtccccagtgtacactggggtgaaagtgtaaccacagccagcaaggttcctagaagcctctactcctggcaaggccctggccttcaaccagtggcttacaacagtcctgagagtctaggggtggtctgacactcagacccagcaggggctgggctggggaagctgaagtctttgttctctggggttagaagtctgcagcctttcctctccttccttgagactgtgaatcctcgaagcacatgaccactacgctattccactccaagaactaggctactaagccaatctgtcttagcctcccttgaccccatcactcctggcctcatccacaactgagcccatggccaggatacaacgcggggggtttgtatgccatgaaagggggtctgggtctagagtcccagctgagctgatcccagggaaaaagaagcaggcctggttcagtgagcaccactgatccctcccctgactcaccttgacgacacagcggcagccacagggctcagtgtgcagtgctggccctcgtggttcccgctggggtccctggtcatctctttgaacttgctctcttgcccattttgccctttacctggcagagtccaccttgggtcctctgatggacagctccagtcctggagagcccctccccatcttctcaggatctccctagggagctggggggcacttacaactagatcctcaagaatcaagggcataagttccttcttaaagcttaaccgctgtttcaaaatcattttcaccctggcctccaggttttctcagggcctgggaatcagcctagtggggcctaatc

SEQ ID NO: 47783 - DNA, 1742 bp, Bovine  19866880800296
  misc_feature (1)..(1): n is a, c, g, or t
nccttcccaccttccttaaccagaaggcccagttgccgtgttccctttaatcattcactgtatctctggttcaaatgtcacctcctcagaggtagctgcagtcgccctacctgtcccctctgtcactctctattaagtcccttgttttatcctcctctaaactcgttaattgtttactgaattatttgtcggccgccacctcccacccccatctcacccccacccccaccaaggctaaacctcatgaaggcagggatttgggtctgtctcattcacagctgtaaccctgggacaatgtctggcacactgtggagtttgggaactgtttgtggaatgagtgagtgggggaagagttggtagcaggacccttcagggctgagactgcccctggggtcagtggctggctggacacagtgcccccaggtgctgagccccagcctgctggaggagcaggggccaggaattggctggcaccttccagtctgatctgaggccctaaaagagagcgcagcagcccacttttattcttttggatggtaagttggagccaggctcaggatggctcgggaggacaggaggccagggtggcccgtgtgtaacttccagcccagaggaacaagggtccccttgtggtagcctcaggaacccaactctatagccaatggaactccttctcagacttccccgagatgtaaggcattggaggcgccccagaagtttcaggatgagcaaaagagagcctcagctttctatcaccacgtcacctttgctggagtcctcaggaaaccccaccaccctctgtgctgcacaacggggccagcccgtgaagtgaagtctggccgcgggggccctgcacctccctgctctcccgctccggtgggttgggctctctgaaaggcccctccaggctgacggctgccttgggctccacgcccagcccaaggagggagggcagaggagggtgagggggacgcccaggcttgcagcggggctgtgcctccaccgctaatgaaaatcggaaaccaattgagcaggacaaggtgcccagccagcaggttgtgggaacaaggggcctaatggatgtggctggggggtggagggggaggaggggagcggatgcctcattgatcgccccatggctatatttatccaccttgggtccgtggccccagcagctgggtggtgcagggataaataaatggccactaaaatattcatgagttgtacatgcacatccgtggtcagggggaccgccaagggccttctcttccttcctttgccccatctctctgcagaagcctttcaggaaattcctcccacctgggtcaggtgaagtgtggctcagccctactgggcatgcagccggcttggggaccctgagggagcgcctcctcccctgggctggctgacggggtacattcgtccctgccttccctttgtcctcaccttggctcccatgcccacatccctgtcccttagtgatggattggacatgtttggccttgctttttgcttgcccctctgtgtccccactaggctgtgtactccttgggaacaagtttatggttcactggtccctatttcccatgtggcctggcagggtgcctgacaaagccttgaggggggcattgcatgggatggggaacacctcagaggtagctttgaatctcagctctggtctgttttcaaaagtgatttaacctcactgggactcaatttcttcatctgcacaatggggctaa

SEQ ID NO: 47784 - DNA, 751 bp, Bovine  19866880802074
  misc_feature (1)..(1): n is a, c, g, or t
naattgaacagctgttgttttaaacaactcccccgttatcaagtcttttaaagacatttagtttagttttcacacttagttttgtttcacactaaacaaaaattcttattgctctcatgtttcagtggtttatctaatatttaattaaattagatcattgtaataacaaacaactgcatagacaggtttgggaccaaatactactgatacttgaaaagcacaaaactcagctctttggagcaaattgtctgggcctatgcatgcatactaagtcgcttcagtcatgtccaactcttggtgaccccatggactgtagtcttccaggctcctctgtccttgggatttctctaggcaagaatactggagtgggttgccatttccttctccactgggcctatgagctacctctttattttagaataacgctcaatgagaaatggatgtcagtctttacattctagggttgtgaagagcataagttcatgtggtaagtggctaaatggagtttggttaagagagcttttgttctttctgcctaaaggtttagtgtttaaagtttaacttacagagctccagttgggtgtattaagtatacgtgattagaaggtacttgtgatacattgatagcagagtgcagctgataagagccattgctccttttcttcctggtcctacatttctcttacctaattggtttggttttctcataactccacagcaacttcctaccatttccaatagtaagtcacct

SEQ ID NO: 47785 - DNA, 1274 bp, Bovine  19866880876056
  misc_feature (1)..(1): n is a, c, g, or t
ntagaattttaatgaagagggatgggtccctgatgttctctgctttggagcataactgaatcccagcatttacttcaggaatgtttgtggggatcctgcactggtgtcagtggttatattccacatttatcaaactcataagtcctgccgaactaattttaaaagtttaattctcattgtgagtggattctttaccaactgagctatcagggaagcccaattttaaaagtagctaattataatgaaaaagaacaacaacttcaaatgcataggaatctctcttaaatgttccttgtttttcttttttcttcttcttttttttttaatgcctttggtctgttttggccttcaaagtgagccatcctctgaattctgttgtgagaaaactcctttcctacatatctccaaggaaggagagtattttccatgctgtgaatgggggaagatacggtattgttacagtatttaatggattgacggctgtgagcttcaagcatgagttctgtctgtctgctgggcagcactcaacatagaatgctgtgttttaacccacttggctcaatgtctgtttctgacacaaccgcttttcatgctgctggaaaacagaaaaccacaggctgttaactcaatactcttcccttctggggctagggcgggggcacaagggggttcaaatcaagttactccccactggagagacacatgccctccttccagctgacagttttgacaaggattctagagttcctggccacttgaattaaacatcagtgaggggtgccctgtggcccgcttatgacctgggcatttactccttggaccgggagcagcctgccaagtgtctcttgcaggctccctctggattccctacctatggatgtcttctcccttcccgggcagagcccttttgagaggagcagaaggatcatttagtgctcgtggcctgctcattccttggcttctctgctgagctatccagcaggggtgccaattcttccatttagctgactattatatagcccttaaaagggaagggtttattttagctggctgctatattgattgctatagggacgtttctattttcactggctgctatattgactgggaaaaggaaaggggccgtattgccgggagctgtcatattgactgttacagaaaagatctgtatttaagcagtaccagtgcactgggatctcccaggcaggatattaatgctaattcatccgctcaccccctgctggaatgtattgtttaaatctgtagattcccac

SEQ ID NO: 47786 - DNA, 1425 bp, Bovine  19866880920901
  misc_feature (1)..(1): n is a, c, g, or t
ngcccaggagatgaggcaggcaggcagtcctgaggttggaagagccaagcaaatcataagcagatataattagaggggagaggttttggacggatatactgttgaccatggacaactgcacaatagaaagataaagtagaaatactagaggttagatacagtgcaggtagattacccagagtgcagatgaattatatggattgctggagggcggggggatgtctgcagataaattagaggcagcggctcataggtgtgtggacagaagggggaatcttcatgtatcattaacagagatgcgcctgctctctcctcccagtgactcagttacagatgaccctcgcctcagtccaggagctgctgattcagcagcagcagaaagtccaggagctggcccatgagctggctacagccaaggtacttgtccctgaccctccggcccctccaggctcttcttgctcatccttgtgccaattcattgcgcgtctgatgctcttttctgattctggttacactgctcttgtggagaaaggaggcggtcaccaggcaggcgatgcggcattcagtgacgagggctgtcctttctgtctctgaggcccacccccctgaccgtggcagcacacactacagttctggtggtagctggtgtagacacgggatggtctccacctacaagttaggtcacaggccccagcgttgccaagaacagttcagggaacagggtgggagagggtgcccaggccctgggctaaaatgtggctgttgccaagttctctaaaccctggtcttggggtccagtaactcctgaaagatgcagacccacctaggatgaccgaggcgggttcattgcctcaacttcccatatctggaacccccatggcaatatcagatcctgggatcacactgcccaggttaaagctctgtgccacgtgctggctgtgtgaccacagacaagtcacttgccatctctgattctcagttcccttgtctgtagaatggatctgtaaccctacctccctcatcgtgtacacctgctgggaacagtgcctggctcctgtcagctcccaggatcgcagcttttggtctgggctctgtgtgtgtgtgtcacggtcttcctgactcagcctggtccaggagacagtggtccacggcgtcagctgccctcccttcctccatccccacctcccatgtagctttctggctgcttccatgcaattctcaccccaaggagagagaagtggcttcctccggagagccccacctgagcataccgctcgaggtccctgtgctcttgcgaagagggtgcctgggaatcccctcgtggggtgcctcacccacggaggtgctgcctctgcacatgggcatggttaccagtggccactgccagccaccacgcaccctccccatgggcagcagtccataaag

SEQ ID NO: 47787 - DNA, 1325 bp, Bovine  19866880922599
  misc_feature (1)..(1): n is a, c, g, or t
ncttgggcctggattgttttgacttgagtcagtgaagctgaaatattgagtcacagcgggccctaaacttcattaccagctctcaacacagattactaagggaaaaaagttgcttttaattgctttttccgattagcatttctggagaagaaactagtgattaattacacctttccctcccttcaaccacccgtgccgcagaggtcccgacaccaggctaccatctgaagactcaggatcagaaaagtctcatgcttatgaagggccaagaaaccaaaccaaactgggtggtgagctgaaagtggagaccatcctgggggctgatttaacagagcaagcagctgatggtgtggggaggcccgggtgggcccatccaagggtcctcttatggcttcagcatggtgtccactgggctgaaggacttccacaaggactaggactatacctgggtgcattctagaatcagagagtcccaggaagctgggagaagatgaaattggggagcctgaagatctgcaagagaagacgatgtgattgcagccattgggactccccttgggtgcaaaacccactgttgcttctccaatgccagtgtgttctcccagtggaggctccaaggtgacaggacagaggcagggtggaagtgtcctcctctcatccacaagacatcaaccccccaaaccatgggccactctctgtcccttttggagtgagcagatcactctgggtaggtcccggcagtccggccttgccggccctgcctgatccctttccctttgggtcagtgcctggtggaccccaggggcttccaaccctgctaggagggagaacttgggaaggaggcgcaagatgggggtgttggcaacaccaagcagaatcctagcacagattagaagccagaacactcagtaactcttcctaaaccatctccccatcacgtctctgcccagctccatggtgttgtgaccacggagtccactcatccaggctgccacctggggatgggggggacaggtggaggacataggcccccactcccctcagccagaacctccctctcccaatcccgcccctccacactcccaccccagctgcaggctctggagcggccggccccacatcagatcaaagccctggagaacggagttagaactgtccagtccagttatgagtgaaggccatggatctagtgcaggccacggaggcagaaagcagaagagcctcccacacatgcacagacacacacggctgcccacccagacgcacccgcccccagggctcagcccggtgttttgatgtcggcagacacacccggggaagactgg

SEQ ID NO: 47788 - DNA, 1133 bp, Bovine  19866880930253
  misc_feature (1)..(1): n is a, c, g, or t
ntgtttcaaggaggtgagaaatgaagatgagtccaggttgacaccattttcttcctcctctgtccaatcctaactaaacttacacgtgcaggactaactagtggagtcacacacaaatccaggcttaatcaggctcgttacagaccctgcaaaatggcgcttaatagcctgtacttcataagggttgtaatgagcattaaacgagataataagcgtaatttgtcctcggcatgatggcacacactcagtaattgtaaagtaccgcttacccccagtccaccccacctttggactacaaacgccttcagaagccttatcatccactgcttcctaacaggagtgagcactttcaaggtccccgaactggagtgggattcggctgcacctatgactgaaaggctggagtctggctgagaaaaccaaactgggcagcaaggacagattaccagccattagctcggtggcgtctgttgtttacaatgagtccccttcctaccaacgcactgagagtccaagtatatttcccaccctccaacttagcaggggaagcgcaaaggtgactgaaaacgaagaggctggcagcagggtggcccgggaggctgaggctgcggggaagtgggaaccctgcgggagtcaggcccctcccgggacggaacggccgggaacgatccagcctctcacccctctcaagcaggagccctcgcagctcaaggctggggggatttcttaagggtcccgccaccgctcctgccaagcacaagtgggaccccaggggccggcaggcgagaaggggggggccgcgggcgcctccgagccccggctcgggaatgtgatcaaagaggggtcaccgtgggaggggccgggcggcgaggacctggagagggggcgggacccccggaggtggctagaggtcgcgggcgcctgtttccgaggctcaggatccccaccgggctcccagccacccgccaagccaccccccccaactccagcgggggtccccgccaccactactgggcaaccccactccccttacctggctcggctgctcagcctgctccgaggacgccatctttttgaggcctgactaatctatcgccgtggggcgaggcttctcccaagcgccctcgctctcg

SEQ ID NO: 47789 - DNA, 1524 bp, Bovine  19866880935781
  misc_feature (1)..(1): n is a, c, g, or t
ntgggccagggaaagggacccatgtggtctgagcaaggggccaggacctctggccatggactaggtgttctgagtggctggagccagggtgctcccaggctgactcctttctcctgctctcgagggctgcctgtccattctgtctgaccgacttctgtccctacctcctgaccccgggtggaagagaagagaaataagagagggcccactcagatccctgcagcctggaattcaccaatctgtctccttgaacagcaactgccacataacatctaacattcaaagccaccatccttccagttacaatcccggatcacaccatctgtggctctggcttggctctctctgagcatgctttgctgggttgtttagactaggaattctcagtcctactgccccgtaattccttcccctgggggtgggagggcagagtcggccactcgagcaacacaagtcttcctaagaacacctggctgctctctacccctgaaagcatggtgtggttaacaccaggcaaggggctgggtcctctctcagacgacacctacacaaacaacccagtccccagatgagagccctcacgcaggggcaactgtctgcagagcagcaagtcaatcttgtacagttcccaaggtggccccgttacttccagaagagatgagggccagtgatgagctgagcggcaagggtttcccattcttccagcaaaatccacacttacacagaaacatatctgacaaacgtgcagccacacaactgcctcccaggagaacgcccgttcatttagattttctttctgaagagctcttcgacccatccgttcatttccaacagaaacaagtcagaatattttcaactccccttcaatccttcccagcaaataggtggcagcacccctttctcaggagattggcagtaatgaaagcttttagaggaggcttcctacaaaaagttcaaaatgcatttgcatcaacaattgcattttatcttgcaaaatggcaggcccagggatgtgtccatgggttacggtgaggatgtaggtggggcccggaggtgttggggatgtaggccaggcagcagagttaccatcctggccctggagggctgaaagaggactgtactccatgctgccattggaactgtccctagggaagcccccttcttcaagggcagccctactctgggtctgtctccctttgaaagtgttagtcgctcagttgtgtccaactctttgcgaccccatggactgaggctgccaggctcctctgcccatggaatactccaggtaagaatactggagtgggtagccattcccttctccaggggatcttcccaacccagggatcgaatccaggtctcctgcactgtaggaaaattctttaccatctgagccaccagggaagaccccatctctttgcacttggaaacaaatccctaagtgtctctgggcctcctgttgccccactggtgaaatgggacaactccctgtgtctctctccaagggagctgagaagaagtggatag

SEQ ID NO: 47790 - DNA, 917 bp, Bovine  19866880953257
  misc_feature (1)..(1): n is a, c, g, or t
nctgttaggttttgatcaagtcatggtaaaatgttggtcatcacatgcctatggtagtaattgattctggaataattgagcacttaattaacaataaaaatcagatgcctcggtgctttctaaagatagagctggagtatgaaaaatgattttgatggggtgcctttgaagttggaggtagcttgataggatcacaaaagtattcagagcagttttgtggaaatggcagtcttataatatgaagaagtttaaagctgttgcttgtgattgttacgcttataatttggaggctgctgtcattttaacattcatctaagtattctattatcatgtgatcacctttatattttttaggacagtggcagctaccaacatgaatgaaacaagtagccgttcccacgctgtgtttaccattgtcttcacccagaagaaacatgatactgagaccaacctttccactgagaaggtaggagaacatcagtgtctgggcttgagttgtgtggaatggaggtttctgtaagcctctcttgctacctttggattttgtggaagggaagaaagtgcccttttacttaatggagggtatcttatactttatgcttgtcatttatattccactctataccagttctgagtgtgggtttttaagtgaaattgcaaggtagaaaataagaaacaaaccaagacacttgagtctcaaaaactactccatgcaagagggttaagcaattctgaagggaagaaaatccttcctttgtttgttgattggaacctctcaattaccttactaacatctttagtatatgtattttacttttttgagctctgataatattactgtggaattaaactgtttaagcaaacaagatgtgtttaattttgggggataaaaataactacacagcatttttggtgtt

SEQ ID NO: 47791 - DNA, 1034 bp, Bovine  19866880960256
  misc_feature (1)..(1): n is a, c, g, or t
naaccctctgtgttgcttttgtccgttaattcccattttgccacaccaggggcccaggcagacgagttaccaaggaacacaaaattttaattagtgtattttaatcattcaggctttccgagctaatccacatgccctagagaattcccgagatgcagctctgccctgctttaccatttattgttgagtctattataattactgttagcaggtggggactgggagatgtttattatgagtttttcatctttagtataattaccgaaaaaaacaaaataaaaagatgtcgttgtattttgtttcctagaatttttttttttccaggggagggcatggccgtgggatttttttttttttttttcctgcttcttcccaggcaggtgacttggagtttctgggctggaagatagtcctgaagatcagcagagttgtgctcagtacccctcaggctcaggagaggtgggcagtgccatctctgcctatcacccgctggaccaggctccaggggtgtccctcctctgcttccttgtatatatggaaagggtcagatgttgaggctgagagggtcaggggtctatcagttctgctctgggctggcagctccccctggtatgggctggtctggggctctaaccagggtgggcccgtcaggagtgagaacagagctttgcatggttataaatacaacagttaactcaaccctgaatattcactggaaggactgatgctgaagctgaagctccaatactttgaccacctgaggaggagagccgactctttggaaaagactctgatggtgggaaagatggagggcaggaggagaagggggtgacggaggatgagatggtttgggtggcatcactgactcaatgaatatgaatttgagcaaactctgggagatagtgaaggacagggaagcctggtgtgctgcagttcatagggttgcaaagagttggacatgacttagcaactgcacaacaacttgtattgagttcttagtacatgctaagccctgtgtcatactcttttacctg

SEQ ID NO: 47792 - DNA, 1702 bp, Bovine  19866880971956
  misc_feature (1)..(1): n is a, c, g, or t
nctggagcatcagtcccttggccctgggggtggtggtgacacactctggggaattgtatgggtcctgccttgaaaggctaagaggctctttcttctctgtccttcctcaggatgaagtgacaaccccaccgcaagagaggagcctctaggacccacgacaaggtaaggcctgagcccttctggatccttacgtccttccccctgctggagaccatgcacctggtatatggtctgagctgggcccagtcctgctgagcacccagggtgggtctggaagatggagataaggaatcggaggcacactctccatttgaacctggcaggaaaagataaccctggtagaagtgtctcagattgataggctggaaatgggctggggacctgtggatcactgactgtgggcatgaaatctgttcaaggcaacatcaggctaaggtgtcaggtgcctggcaggaccatgcacagctctccatagtgctgccaccccctctggctgctgcctctctccctggaggctctgcttgcagcttgtgcttgggaaccacacggacttgaaagccctagaagtccagtcctgcctctcctgggagctgccgccccaccccctggcctcctcctccctccatgggacgctggcagggaagaggccccagactctgagcccagagcaggctgctgtccttccttcccctggcctggctgggccttcacagactgtcccagtcctccagtggctggaggaacctcgggggccactgggcctcggccccaggcagtgccgtgtcagaggtgaccggtggaacgccagtgttatgtaaatagcggggcctgcccggcgggcgagctagctggctgcagccatccatcatccgtgcgcggcggggcgggggacagacacagcaccgtgcgcctggctccaaacctgtttgttttccctttgtctcacgcgttttgggggcccggctgtgaccggctccgggttttgtcctgctggccccctcccccgggaggatggggggagggaagagattcgcgcggctcccaccgcggcatccctttcggacttcaaaggctcccccagcattgtctgtgccggcgggcagtggccctgaaaacgtgatcagaggcggccggtgtagggcaggcccggcccgcgccctgcgctctcgctggggcccgtggattcctccctttgccgccagcaccaccctggttacagctctgctccctgggcctctctcctcgtctttctctcccctggcatcccttctggccagcccaaccttgcggctgcccactcccatcctctcttagccatagcccaacacctctctcttggcatcaggtctcctggaatgttgagagctgcaactctctgccccttcatgccatctgaagcacagtggagggcttttgggatgctaggagctgggaaggactggtttctgaatatctgtttcccatgccagccctagttttcttcttttcctccaccctcttcgggtaaggagaccctgacttgccctccgcccaacctttctttgtacttcttggcaaggttcagattggctatttctgtcctgaaagtcagccccaggtgcttccattctctggagcatggcttggcaaaatatggccagagggttaactttggccccctgcctgtttttgtaaataaagttttattggaacatagccacac

SEQ ID NO: 47793 - DNA, 1328 bp, Bovine  19866880988712
  misc_feature (1)..(1): n is a, c, g, or t
naggcatatgtattgaaatctattatgtatataaatgttttattttcccattcctcaataatttcccacagaagtaagtggatgatggtgaaaggagggggagattcctttctcatttctctttctgtgatataacacagagcaactgtcgagcctcacatggaccaggatctgggtctgctcagatggaggtaggagtaaacacatgctcaggttcaaaccctaatcaaattttaatcctccccccattagccccggaatctttcccttgattacacacccttgtttacggctccttgaatcctagatgctaaagaaaacttcccaggcacgtggtttttttggatgttaaactttaaagcttagagattcctaccaggagttaaggaaagtttctgatggtcaggattagtatcaggaagactggcaaaggctggctggaaggcattgcaaggatgttttcttctctggacaccaggggaacagactccacaaagtatgactgctgacctttcctttctgtcttccacagagctgagctcatattcgtaattactagctgagtgaagtataatgtgatggaagagtcttaatagcatcctcattttcaaacacagcagttttcagggacctgtaagtgggtcagcgcactggtggaagatgcctgcctgaaaggccagctgaccttcaggatttaaggttcttctagaagaaaagaatgcttactgtctttcagttttgcttagagccatacgtatacattccttaggattggggattttaactttttgaaaaaataaacgttatctttggctgcactgggtccttgttgctgtgtgtgagcttactttagttgtggcgagtgagagctactcttcattgtggtgtcaggcttctcattgcagtggtgtcaccaagacagcactggtgcccaggctctagggtgggtgggcacaggagttgtggtgcatgggcttagctgccccatggcatgtggggtcttcccagaccaagggtcgaacctgtgtcccctgtactggcaggagggttcttaaccactggagcactggcaaagtccagagattttaacttttaactaagtaatatctgaaggaattgaggctacattaatggcacctccaggaaatccatcaagtttaagcccaccttagttcaggggccttagaaaaatgtaaactggcatcaactgcatgttagactagattaacatgctcatcattagtaaactagggtaatttcctaccatcaggtttttggtcgactttagtcctacctggtttaattcctgggttggaaagatccactgg

SEQ ID NO: 47794 - DNA, 1265 bp, Bovine  19866880998545
  misc_feature (1)..(1): n is a, c, g, or t
ncgagactcagagaaagacgcgaagtgtctgcaaggtgcaaagtctaaaaaacaaaacaaaaaaaggcagggggggcggaaaaaggagggaggcactgcccctttaaacgttttagtgcatatggagtttgatttctgaaagagatcagtttaacatctccatagaaaccagcaacagattatcatcaacacaataaataactagtctaataaattaaacaggaggcataagatcgctggaaacctgattactgaagttcaacaatattccccataaactctcgttaaccgcctctaaggtggctaacaagatgggggtggtggtgtcaatctctccaattcgccggattccggggagagagacggtggccgctgcccggaagggaaaagtttcccaccttgccctggagagagtctcagagctccagtgaggtgaaagccagaatgccgaagtttgggaagtgggaaagaggctgggcgtcagcggaggcagtgcgaatcgccggagatggcgcgggacgcgacgcccgcccgggacgcacagcctcgccgccaccagggcgcaaacccagagctttgcgctcgggcgccgaatggcccagcgccccctctgggcacgtggagcgcagcccgggcgcagcccccggggaccaactacccccctcaccacgcccggcgcagctgctcctgctcagcccggacagctccctttaggacggcgacgtgtgtgtgtgtgtgtgtgtgtgtgtgtgtgtgtgtatgtgtatgtgtgtgtgtgtgtgtgtgtgtgtgcgcgcgcgcgcgcgccgtggggtgggcggcgggggggggggcgcacccaatttgcccagcgatccgttttccagtcccctcgcgcgctctcatcgcgcgtctgtaccagcttagaggcgccctaaatttaccaactttaccctacgactaccctggcctttcccccctcgccgtccctatgtctgagtgtacgggatgttggcgggacaaccacacactctaagggtcgtggcctcagactccgccggggcagcgacgcataacccggagtcaccccttggtccagccgggtctgggggagctccaggctcgttggaggggtgttgttgctgcttcgctggtggacaagtcatacacaccgtacatgcgcccgcaccctccccagcgtgactggaaggaggtcctggccgcacccagggcccacttcccaagctgaggcggtcaggaggaacttgtgggaagggtaagcggcc

SEQ ID NO: 47795 - DNA, 604 bp, Bovine  19866881004186
  misc_feature (1)..(1): n is a, c, g, or t
naattcctttaactttgatgacccctttcttaagtatctcatttggccctcacaacgatcccgtacaataatcacagacagttccaaaagacccaagctctatcctctgacccatggcagaatcaattcactacatttcactactgaatgaagccacagggaaaactgaacattttctagaggaatagtttttctccccacagaacaaaacgaacaccattcagtgaaaagaacccacataagtaatttccacaagaaacaacagatctcaatctgtactctgttatataaacatcttcaagaagaactgaacaaaagaaaaaactataaaagaaaaatacttacgggtccaattaccagagaccaaatttttggtcctgaccagtttcttccacataattaagtaatggttaagaatgctcacctccagctgtacaactaatgctttccataggaaaaggcaaaaaaatactctatcttatttcttgttttttgggaacatgtctgttgtctgtctctcacaccaccaccagaatgctctgaagatcttgtctgctagctctttcatcagataccttaaaatggtgtctgatgaaagagttta

SEQ ID NO: 47796 - DNA, 880 bp, Bovine  19866881054952
  misc_feature (1)..(1): n is a, c, g, or t
naggaagagataactccagatttttaagaatcagaaagcaattaactcagtggaaaccatttactgtaacttcttctccatcataatgcaagttataatcacattatggatctgtctacagaaagtcaaattccttaaagtaatgtcacttctgctgaatactacaggatcgatagagccaaacctcacacacagcaggaactcaataaatgtttcctggaggtaactgtgatggtggtacccggcatgataagcagaggatcgttaagataacatttatcccctgtcttttaactgatatagcctcttccctctgtttcaggagagggatctcttttgtgtttttcaaaagcatttccgagacaagtataaacagtgattacatttgccactgagtctaacacaacaactcagagtaagccaatgctgattattttgactggagccaaaagtccttaactgggggtgattctgcccccatgggatatctgacaatgtctattgccacaactggagggaagggctactggcactttatgggtagaggccagggacgcagttaaatacctgtaacatttaggacagcccccaaccacagggaatcatctgcccccaaacagtgcagaggttgagaaaccctggtctatggaaatattctgtcccctaagcccctgagatgtggatataagtctctggccccattgtgcacaatatgcttctgactctctttgcttgtttgctgataaaacccaatatgtaggttgtcttccctcgtaacaaagtgccaatctccatgctcctgctaacaagaagttaaatcactcagtaagtattgtttactgttacaaaacgggaaataaaagaagatgtcctatgaaag

SEQ ID NO: 47797 - DNA, 1189 bp, Bovine  19866881080341
  misc_feature (1)..(1): n is a, c, g, or t
naatatattcaaggaaaaaaatctatttgttttgcccctaatctttttaattataagaggttgggagatgtctccttttccctgacaagtgactggcagataagaagccccccaagttagatgaggcttctttcgcttgatttcccatgtctccatctctggtcttactcctggctgtccacaaattgctttttaagacagatcagattgagacattatattctggcctttcagactccttagaaagctttaaggagtaatctgatgatgaatggcttttctggaactcagctgctaatttcagagaaaaatccatttttaatggtcaactttatgtactctttcttggaagtttttcaaaatgaaaaaaaaagagaagtaaatcacctcataaagttacaacttctcacaatggaaaatgtaatgatgtcaattaatctaagccagtgggaacctgcgctgtatgtataaattaagattctacaagtaagtgtgactaacaccgcagtggcagcagcagtagaccaattgcactgcaatagaccagtgtgatggctttgtgtttcaaagactggcagatggagatcgctagcctgaagaagctccctttagtgtcagcgttttctaacaagtttcctaatgactgaagatggtgagtcaatggtccatgtggacatcacagcacagggcagctgaggggcacacggcaaagcccagccctgcagtctgtcctgtacacacactcagccacagagaagagggggatccacggggtggccagatttgccaagggaagggacagctcacaagagggtgagcacgcagccgagtcagactactcaccccgctctcgtggccggcgaggccaccctctggggagagggcagtggtggccccagagggcagcagcagcagcggcagcagcaagcagaggggcagcatcttgcaggctggctggtacttctctccagctctggagctgctcatcctgcttggcagcccctgaaaccagtgctttgtggacttgagtctcttctctgcagactgagggggatattttcagctcaacctgcagctgtgtgtgtgtttgttttttttttttgtatatatgcctatctaaagcctgtaccccctctcccctcacattcaagtggtgacgcatgagcctgagcaatcaggcccacaaaag

SEQ ID NO: 47798 - DNA, 972 bp, Bovine  19866881082236
  misc_feature (1)..(1): n is a, c, g, or t
ngaataagctccttatttctatgaacctcaatcttccaatccgaaaaatggaggaagtaataaactcacatggcagagttgatgagaggaatgcctgagcttatgagtgtggcgtgctcattcctgggctggggcacgtgctgggggctcagcagagaagagggggtttgtgcagtggtgcagaggtggcctgagccaaggtgtggagggaccctgaggcccttactccttcaccctcttacccaccagttgcctcatttttagccttcacttttaagaaatcacacacacttgctcattgtggagaaatcagacaacacataaagattctaagaagcaaatgtaaatcctttgccatttgagccctgtgaattaactcctgagaacatcttctggttatggatttgaaaggcagagcccttctgttccccatgggtcttccactacagaaccaggaagctggacttggttcacggcagatggaatttagggccgattcgggaggcactgtcccagctgagggggtcagcatccctgagccaggtgatggaggagaacagacagggactggctgctgcggggccagatgctgcgggagtccctgcctggggtccttggaagtggcatccttggggggtgctgaaacttgagagtggaagaagggccagtagcattttggaggacagactcttacagaggggaggatgggggaggagaaaaggaagggggcagggagggaccgtttgcagccagaaacctgtgtctgtgaggggggctggtggaatgaaagatggtggtgggctctgaaaatgtgtgtgtcagcagtgggcagaccccgccaacacttatagctgccatgcagggaggcactttcagggcgagtggagaaagggccaaatagccgggtcgagcgataaatctcatcagaacctactcacacaccgagaaccccgtctcctccagccatcccag

SEQ ID NO: 47799 - DNA, 1033 bp, Bovine  19866881136412
  misc_feature (1)..(1): n is a, c, g, or t
ntttacatggaaaagtggtgtcaaaaattcaaaggagaagttgtgcagaggaggctggcatctgtccagggtcattgtggctatttcccctgtgggccctcctccagatcactgtctttctctctgcagagtctcggggtcatcccaaagaacgcatgtcagtgagccgcccgactcggggttcctggctttgcaggcggtggggcctgatgtcacagcgcgtggggcggggcaggcaggtgaagcctgccttcagggttgattaagagtggggggccgggggatgggccaggcaggtgctcaggtgtccccttgacgctccacagcagctccaggttccaggcctgtggttggaagtggctgcctgtctcaaccccacggctcccgtgggtgtggagggcgtgggcggggtgggaggtgtgatctttgtagggaggacttaggtggaaggagtagttggtgtagagatggaatttatcttcttagtttggttttaatggaacgttttagacactcatggagtagcgggccactcagtgaacccacatgctctggccacacggtgcagccgctgcctcgggcctgtcctgcccgaggttattctgaagcacattccagacagcatatcatttcacactgcagacacttcagtttgtatctgtaaaagatgagggctctcttgttgttttattttttcataaccaggataccagttacacctgaatacatgtcatgtttccctaagatcgtcagctatccaaatagagttgcaaggatgtttgttttaagggagttgtcatttcagcagagatccaggcaagcagaccccagaatgggacgcagcaaaccttcccgagggggttgggtcctcctgccatctcagcgtctgagtttggaggggtgggagggaggtgccacactgatcctcaatcccctttgctgtgactttcaggccaccacgtctaccaactggatcctggagtcccagaacatcaatgaactcaagtcggaaattaactccttgaaggggctt

SEQ ID NO: 47800 - DNA, 1640 bp, Bovine  19866881150572
  misc_feature (1)..(1): n is a, c, g, or t
naatctcccctgcacctggatcgtttgtccgtgcctaatttccatctcccgaactttatgatttgtccctcgtttgatgagcgcttctcccatcaattgtgccgtaagtgcttgcagagaaagaccccctgcactgaccccatctcagatggacgggcttgggcttctcgtcctgcatgttgggtggagataccccccccgccccctcctcagttcgtccctcaaagggcagcttaaagacgatgctgtgcccgcaccctcccacagtgatgcgaggcagagctggtcccagggtgtggctgggacaatgtgaggaggagggaagtaggaagggcctgtggctggctgggatctgggggggaagagtcctgggatgggggtcaaggggcttgtgttttcatctctgccctcagctcgctgggtgacctcaagcctgttgtgttccctctctgagcctcactttcttcatatgacactcaaggaaagtgctgtccatcttttacagttatagggagggtggagatcattcattcactcacttgtgctttcacacattcgaacatccctgggaaccgttcatctactttggaagcactcatgggacacctgctctaagcgcagactgaatcagcaggagccttgcaagctggcgcagctggaaggaacctttttggttaaaagccagggcctttgtgtccaggagatgtgggttttaaatcctggctctaacgctgatgagctctgtgaccttgggcaggtccctggacctgtcttagtctcaattccttcatctataaaaagagggggagatgagtaattgtacggagagcacctaacacacagcacatgcttgacacacaacgtccactgccgtggctgttttgtcattgtgaggacacagagggaggcagtggctttcttaaggtgcataaggagtcgggaaatgtgagtaagaggatttggagaaatgtgaagaggggaacagaagcacagggccaaaggctttagcctgggagggactatttttccagcctggcctcactggccagctgacacatttagaaatatcagatgaaccccaggaaaggggcagagaggaggttacgtggaactcaaaaaatttttttcaagatattttattttttggtcaccccgtggcgtgcaggctcttagaaccagggatcggacttgtgccccttgcagtcttagccactgggccgccagggaagtccctggaactcaaatttttggaccttacaaaggaagggtgatttcagggactgttctcaggaggccttggggtcccaaggaagtgcctgttccccaggctggggcgaagacgtggagtttaggaaattgggaaacccagctggcaggtccttccccaggcagaattacagatctgaaaggcttcccggctgtgacgtgtgtacctgtgagctttgggacactgagttcaaccctgtccaagccacggcaggggcaggccccttggagaccaagctggggaaggggaacacctagtttaatgctcaggactgacccccacctggaagaaaatggagggttcagccagcacagtgatcgctgtgcctggcattcacaggatgtccttagctcccactgtggaggccagggag

SEQ ID NO: 47801 - DNA, 956 bp, Bovine  19866881285839
  misc_feature (1)..(1): n is a, c, g, or t
natattaaaaattgccaatcatatcattttttatagtaaattgctgcccttatgcagtagaatcagctttattgaatttcgccaaaaatgcgtttataattctgcccatacacacatgatattcatgtccttgctgcccatgtggaaatgtccctttttacgatgttaaacaaattaaatcggctttctcctgagccgcctgcctcacctttaagatccactctgaggagtcgaacctttgcggagcagcatgtgcctccctcagctctaatgtcagtgtgcagaacgctggagtctggcaccataggaagccttgcacaggtttggccttgagattattacagcttgtaccaggacagttaatatatatcttgtaggctgagcgcttacacggccttatcgtaattattctgttttgagggaatggtaggtatttgtttaaaaggatctcatggtgaaccaagagtacacaggtacagttagttctcagctgtttacttgtaaatatttatcatgaaagtttaaaccagttttcctttaattccctgtagctgtactccctctccaaccagtgtgggattggggatgtgaaacagtttcattgttagtctaacagaagcacaatcaggaagttataatgcatttttaaatgaaacagtttttaatctgctttttagaatcgtttgcttcaagttttatctctccttttcatatatctattatatatattattattattattatatatattatatatatatctacataggtaaacaaaaaattgttggttcccagacagtgttacatacaaaggcaatatgacacagtggaaaaatcatgcatccactgaccatttattaaatgtacattttctttgtgtctttcttttgtgctaagcactgaaattagaaaaataaggtttaacgttagcctagtgtgattccacagtatgcgaa

SEQ ID NO: 47802 - DNA, 859 bp, Bovine  19866881319211
  misc_feature (1)..(1): n is a, c, g, or t
ntttgtccccagcagctcgggcagtggctgagccaggtgaccctcccgtcggggctgggcctggagcccttgtgtttctccctggaggcctggctggcaggttctccggtggctccacggagaggctgccctctccccctccctccctctcggaaatggcagctgaaaggaaagtcagccactgagcccagggccacgtgcctccctcccggggcctccgccctgggaggctcctgagcgtcccgccccacttgaggttgacgagtgagcagactgggtcagtgggactgaccggaggggagagggagaggctggccaggaagggggaggggggaacagcggtgcctgtgggtgctgagccacctgctctgcctggtctggctctgaggtctgctcggggcacgctggctagtgaggaccttatttctttctctctctcgtgcgctgatcctttgcaaactcacagaggtctgtgcttccagttattactttcaaagtagatttccaactggagagggagagagaaaaaggtctggggaatgggggaaaccctctggctgggaagtgtgtcttgggaacgggcggagatgagttaatattccgatcaaacaattaaaaatagaaaatgctcccgcggcaccagctgctgaggcttttcaacaactgtcaccagtgggttcatggggcaggtggtgctggagaggagcgtttccacacatagcaaatatcagacacggtggtgtaccccccacttccctcccaggacccaggccagttgtttgggggctcccagtcctccttgaactcccctccagggccgggagccaggagtctgtgcagcttcagggccgcgcttctc

SEQ ID NO: 47803 - DNA, 1114 bp, Bovine  19866881393067
  misc_feature (1)..(1): n is a, c, g, or t
nattaaagttaaatatatgcttgttctgggccctagcaattccattactagataatagacccaaaggcatccccaaaggaatcagaattggcagtattcatattagacaggttagaaattccaggttagaaaatattaagaatgaaggttaatttataccattacaaagttcattccacctagaagacataatcttgaaactttatgcacttaaaatattttaagtaaaagcaaaagctattagaaagataagatttaaaatcatgtaattgaaaatagtagcacatttcagaattgaacaggaggcaaaaaataagaatatgaaataattagatgacaccattaataaacatttgatgtataaatacataaaatcgtaaataaaattgaatattcagtttttcagtactcatgatccacttataaaaagttatgtaaatcggccacaaagaagaatttcattgaggtccaaaaggcagaaatcatgtaactccctttctgtgatcatagggcaataaaacaaaaatttacagtgataagccctgcaagaaaaatttgtccacttggaaaatttaaaacactctactacagaattcctttcctctactctgtttcaattttcctgatgaccttcttctagcttcttgagatgagtacttaatttattttctttcttcctttttatttatataggaattagggagaaatggcaaatagtactgtctgatattccctcaaaatagattcctaaaatgaagtattaaatcagagagtatgatcttttttttaagactgtgagtacatagcaaagttttccaaatagttgtactaattcctttatcagggtctgcgagtacatgtctcaacatacaaaatgtgtttagtctctaaaaagcaacaaaatagcaacaagaccactttctcagattgttttaatttgcatttatttgattaataacacaattgagcctttaaaataagtatatttctccttagaaatatttatccaatcctttattttctactgggcgattagtgctctacttattgatttttaaatgccctttatatattaagaatattaattcctcgtcatgtttgtaaacatttcccc

SEQ ID NO: 47804 - DNA, 840 bp, Bovine  19866881542186
  misc_feature (1)..(1): n is a, c, g, or t
ntttgtcttctagaactttctctgtcgttccgaatagcattttttcctcaaggttaaggagccaaagccccaaacacaatgcccttgggggtagtgaagtgggaaagattgaactcattttaaagacgagggaagtggggctgcccaggcaggacttctgggccccaaagctggtatctggagacctcaagggctgggcctctttcagggatcaagatcaatgaatgatgggaccaaggggaaactgagccatctgggaaagggtgaggacagtcagggtccggctggggaaacccccaacccccaaatcccagacaagcagagtcatagagttgatgctgaaagtgacttcatccccactgtggactgaatcctctcgtgggcagaaacacgtggtgagaagcaggggaaagactacttggaagtctagttgataccctagctagacgggggaggcatgggccctttctagtctgaagggggagggggcatgctgctaccaccagccacgccactctacctagttcaggaagaaataaccaactttcccctggacccagagctcagccgatcccggtgggctgcccagcatctcggggggccaggcccgcaataaaaatcccgcagtggtgactgcagtggtcagagtcaaagagaaagaaggagagagagagaaagagagagaggaggggggaaaaaacccctctagtgcctgacattctttttaggatgcccataaaagataatgtgacctgtaaaatctgcaagctgcttcccaaccagtggcgcccgggccccacgccccactcccacctccactctcctgccctcgggcccagt

SEQ ID NO: 47805 - DNA, 808 bp, Bovine  19866881657444
  misc_feature (1)..(1): n is a, c, g, or t
nacacacacacacacacacacacacacacacaaacacacacatatacacacagagcagcagcagataaatttatttttagaaggcagagactcaaaaatgttaatttaacaatggattagttaatgaatgaatactatccaaagttaattaagaatcttcctaattatagtctaatcaacataaaatatttttcaggagacagccttaagttctaccttatgttaaatttcagaagtctccacttccaacattttccaacagacccacagatcccacagttcctctggtgaaaattccctcacctacccttagtagacaaacctcctttaaaatcatctcagaaaagctagcaatgtgatacagaacacatcagcatttatctctgggacaaactggaggtatatcactactgcttttcttaacaactaaaggcccaggttttctcaaaaacagttaactaaaaacgtatcctgccctcaaacatacacccagtctgctctgtgttgaatgaaatactttagatttacaaataaaccactgccacctgcttccagactggaaaggcaaactctcttttgcctgactcttttttattaacatggtttgaaacaaactgaatgtttccctcattttgtaggctgttatggaaatggcttgaaaaatagttattaaaccaagttattaaacgaagttattaaaccttcagtaagaaagaggcaaaccactttcttacccgagaagggaatggcaaaccacttcagcattcttgccttgagaaccccataactgtataaaaagcaaaaagat

SEQ ID NO: 47806 - DNA, 3094 bp, Bovine  19866881742547
  misc_feature (1)..(1): n is a, c, g, or t
nggaggaggtctgcaggcgcaagagaaggtaacgtgcagtgtcactatgcggccggagaggggatcgctgtacacacgtgtgtgccaattagagaccacaagacccctatcaggccttcccaggaggtgcagtgtaaagaatccgcttgccaatgcaggaaacgcaggcgactcgggttcaatccctgggtcaggaagatcccacgaaggaggaaatgtcaacccactccagtattcttgcctaggaaatcccatgcacagaggagcctggcgggctacagtccataggatctcaaaagagtcagacatgaatgagcctacttatcaactcaaaatcacaagccagctcttacggtccagagaggacagcaatgaaaaccaggtcctcctttcctagaaacagagcaaagcaatagcgcagacacctgaacacgcccacctaacaacgtcaccggtactatgctgactcctcagtacagcctctcttttaataaaggggaaaattacccaaagtgctcatctagttctgaagacaaagaacaagattatttgcctccagcatcccaagcttagccttattagtatagagaacaggcagcttccatttaggaattttgtggaaaatacgcactccacttggttaaaaacaaaaccaaaaataactgagcacggtgttcccttcaacactggactatcctattcctccagccctggcctcgagtttcacaaaaaccaccccttaagggaccccacccccaccccaccccaccagagaactcttccttctctgaataatgaaggctctcttatactcccagccaggcaattctgcaccaaaattatatacaatttttgtactgtttgctaaaattatatacaaccttgtgccatttgctaattgtcttgcatgtaacaaataaatgcattttcttccccaaataagatatataaattacttaggaagaaggcttagctttattcttcaattgtctgttcctcctgagcacccaggagacagctaacacatatagcctgaggaacctccctgcgggggtaggggtgagggtgtagataggcccttgggctgagtgctagggggctttctgtgtgtgggtgccccatcacctctctggcaccctgtgactctctctagcctgctgccagttcgcagcagctcatcctgtccccctgaccagccacaaaagccgctgctggccctcggcagcttctctgcctggcaccctcctgccgcctctcccaagaggcagaagtagctcacacaagagcatacaactcggctggtgccctcatttaatcaggctgctgcaaatggttggccaaaagcaataagggcatgactgagaaactgtgggagtttaatataaaaaaattaataaaaaaagaggggaaggaggaagggtctaccttttaatagggccctaattacccaactcataggatcaacccaaatgagatgggagtttatttcggggtttttttttaattattgtttttttatatatatataaattgctgctatgtgttttctttcctctgagcaattatgcagcaagtatgtaaagaggggaaaaaatattaattaaatataaggtaattgtggagttggcctggagagaatgagtctgaactctggacgatcgctggctactagggtttgaagactgctcagggcctcccagaaaagaaagaaataaaaacacaagcaaccaacatgcaatgccgaatgcagcaggaaacgaacagtggacagaaacattagcagagcgaaggggccacggggatccaagcacccagtagtcagcgatgccaccaactgctcagggctccgtgctagaaagaacgcccaaaagatggtccagctgctcttctggtgatcagtagttaaatgagtagataaaaatgtgaaaagagactgaggaataaaggactgaagaggactaggagtgttcaatttgaactttagtccaaagtcaaccacaacttcagtctgaggggcactgaggcaggccccatgggaaacaagctcccaacataagggattggccaagcaaagcctcctctggctttcacaccaccaagaccacaaggaagagcccacgcaataccaaaagagagaaatgaagccactaagggagtggtgggaagtaacccatacttgggaagagcaggtgacatgcagggcaacagtgactctctccaccagtccccgcagggctggcatcacccgagccttcctccagctcagccagatccaactcacctcctgccttggaaagtcttagcacaggccggaattcagacttgttcataccagataagggcctcacgtcacctcctcccactacctccagaaggagagggaaggaaaacgggtaaaactacaggccctgctgaaacaaaagcttggtggtatatccctaagcttgctatcactattcaataaaagaaaaagctctgcaaagttaaacgtaaagctggcccctctggaaaactcatctggagaacaagtctttttttttttttggctgtgacacacagcctgtggaatcttagttccccaatcagggactgaacccaggctccagcaatgagagtgcagagtcttaaccactggactgccagggaatttccagtacagaacagggcttaatattcagccaagaggatttgcagtaggccttgaaatgcaaaacagaaaatggggcaggcactcaggctaagaccaccaaggcaaatgcactgtgtaaagaaaattagcttcagcacttagtaggcctcttccctatcaattgtgtaagcagagaatgttggtagtgagcatcacaaacctaattacaggccaggcagaaacagaactctctctcttatctgttctccaaaggccacttgaagtgtcctcactctgaggaacagaatggctatttcagacaatcaagcagctcagctccttggtcaggtccagcaaccttgcttcagctcagccaccataggtttctggcatcccactgattaacaataaataaaacggtgcatcaccagaccaaggatgggtgctcctcattccagaaaagac

SEQ ID NO: 47807 - DNA, 801 bp, Bovine  19866881744173
  misc_feature (1)..(1): n is a, c, g, or t
naccaggtgaatgtgcagttgaggcaggggtcacctagcatctcccccagtggtgagaagtcacgggaggtgtggcagggaaagatccaaatcccagaggataaagaggtggaagatcaggccaggtggggagaggacagagccctaatgagcagatttcataaaccacctggagtgaaaacaaaaacacagacgtgcacattgcccaacttcagggctgtatggaaaaggggaaaaaaaaacaataaaaaaatccacatcttaatacaaaaatcctacacgatgtgttgtggcacgaaaatgtttttcattgcatttttcatctgtgatctcacacagcctacgacgggtacgcccaacgcaggaggtatctgatggtacataaacagggcaaacatacatacaatgaaccaaaacaagggcagcaaagattcaggttggtccgagctgacatcgcatggtttcaggtggcctctggagatggctacactggctccaagcatgggccccccttagattcctgagggaggaataaatggggcaagaacaagctccagtggaaagaaacatgtggagttctgagcactccgaaccagcggaactgcgggccagctggctgtgtggctttctccactgagggtgctgtcccgccatcgacagaggccggagagggaacgcacaccccaaaggcccctcctgtgtgtcacttaccccacagttactatctgtctcctgtttgctccacccctccccccttttaattgttggatgagtttacagagctgtgtgccaaaaacaatc

SEQ ID NO: 47808 - DNA, 854 bp, Bovine  19866881907491
  misc_feature (1)..(1): n is a, c, g, or t
ncattaatcctagggaaggtgatacaagaagtcaatggcaccccactccagtactcttgcctggaaaatcccatggacggaggagcctggtaggctgccgtctatggtgtcgcacagagtcggacacgactgaagcgacttagcagcagcaacagggaaggtaataaagtagaattaccatcatcatttataaaggaacattaggtgttgtgtgaggttattttggtagagggatgcagaaaaaggacagaaacaaaaacaaaacctatacctacaggtcagaggaagagaagatggcagaagactcacccattagaaataagttggtttcaaagagcaaaatgctgaaattctagtttagcccagatccataagcattatataaagtacataagcaactgtactgaacgctgaggaacttgtactgaaaagagtgagcagaccgtaaatgaaaccatattgacagctgcttcaaataccctcaacttgtatgactggaaggactctaaggagactacttaacccctgtttctgtatcaaagcaaggaaggaactctatgcagacaatcgtccggccattcttaaaggtttatcaaccaggcaggagcacttgatcctcgcagagcagtgtggggaccagcccagagcctctgcgacggcttgagcatgtgcccacataggtgatgagaaaacccaggtctgcaggaaatttacaggttttgagcacgtctgggagaagctagaggtcagtactctggagctttgtcctggaaggcaaagctcagtgaacaaagtgtaaagaaaaagtaatcagccattttaactcctgggcaaagagttctgtcattaacaat

SEQ ID NO: 47809 - DNA, 2046 bp, Bovine  19866880518970
  misc_feature (1)..(1): n is a, c, g, or t
nctattaaatgagcagaataatattgttgaaatcatttaataacataactatctttctacatgctttatctcttcattgttgggttcagagtaacatatctgcttttttaagtttctccacaaaaagagataaaatgtaaggtggatagaatatcagactatacagaatgaaaataaacagatacctagatgttgcccaatatacagatgcacaatattaaatatattcaattgaaatgttctctttaacggagttttgttttgaaatgggaaggtgggggtaaacacaagtattattgctgtactgattatttaaatcaaaagacaatgtatataacactataattacataaaacatatactgttcctcactgtttagtcagtataagcatagacacacatgtagtaagtttaagaatgtatgtatatacatgcatatgtccttgtactgaacagattttgccatggaaacattctttgtattatcaattacaattcattccctttccttagagactctaggtactgtactatgctggcctggtggataattcaagttctttggctgaacatctgcagtagtcacagggaaaaagcatatcccatttagagttcaagagcaggaaccaggatattattattttttaataaaaagataaatttttgtgaactctagaaaaacacataagtcatgtcctacattaggaacatgttaggaaagcagcgtcctatgtaactgcgttagtaatgaaagcaagttttattttgaaaatttacatacattaagctctctgctctgggctttaaatgtgttatgtcacttagctctcacagtaatcctacaatgtagattccaatactatccctatttgcagatgaagaaattgaggcttagaatggtttagaaaagcaaagcaatgtagttgtgctgatatgttggctttttcttttaaagaacatttttttttggtaacactgtaaaccaacatttcaggaaaagcaataaaatctgcatatattgctagaagaatgccctcaccactgtgctagcatccaacatttatgagcactcactatgtatttcttaagtttaaggacatgagtatgtagtttttgtgttacatatagcaatgcctatctaatcagtagcttagattctttttgctctacagcagtcaaaatagtcatttctttgctttatacatattaactcatttaattttctaaataacccattattactcagattttacaaatacggaaacttcaatattaagatggcaagggctctgtacaatgtcacagggctagaaatcatggagcaagtactgcaggtagacagtctcaggtatgactttccctcattaccattaccatgcttctctacaagtgtgttctgacttgaggaaaaaactattataccagcagagagatccctagcagagagattgactttcatatattaatttttttaattaaaagtatattgaaataatgtttattgatatgtgaaagcaaatacagtatcaagacagcaaaggtttttagctagttcttttcctttataattcaaagtttattaaataacacatatatgtcctagttttaaaattctttcactgaaaaaggtaatgattttcctatgctctgctttcaatatggatagctctacttttgtgtagaaaataaatcatccataatttaccttaatagctaaattattctgaagtacaaacaagaatcaggaagctactctgcatggatggttttgaaaaatgtagtaacataacattaactgacaatttgatatacgagcatgtgtggagctggagattttaaaaatcaccgtaaatacattggattttagtaaaacatatataagcaaataaaatgaaaatctagactgtgataagcccacacattgaatagaataattgcatgacaacatagtgtccaagtttcactaatccatatgcttaatttttaaactcatttcaggtggcttaagagaaatggaacacggtcttaatagaatattagtataat

SEQ ID NO: 47810 - DNA, 783 bp, Bovine  19866880530775
  misc_feature (1)..(1): n is a, c, g, or t
ntagcaaaccaaaagcaaaaggaatatagagcaatactcactgacagtgtatatcaaaacatattttcaagtaggctgaaaaagtctttggaaatacacactcttgtcccccagagaagcttctaaatatcctgtcttctcagactatgaagtaaagatattgagagttgtagcatagataatatcaaacactcttataggaaatcgtgcagtttactgtaagctgtttattgtagtaagctgtttattatttatataaatctagtaactgcaccattattctatgtatgatatgttttcatttgttatttttgcgctaatatatttgtcaatgtttaatacatgctcaaaaatatttccaaaatatttatttaaaaataattgaaaatatttgatatattgtgtgcaccataacaaacaccaaatgaccaaattttcaattttacttttttagtttctgaagtattttatggtttgttgtgtttcagcagtttatgggcattattaatgtttccaaaaataaagcagggttaggtatactcattattatataacaaatgacatttttgcttgctaagaaaatttttcatggcctagaaataatttattaatagtgattcaaataaatttcagcatgccatattctgtcaggtttctatgccccattttattttctagtccttaaaaatcagttcagttcagttcagtcgctcagtcgtgtccgactctccaaccccatgaatcacagcacactaggcttcctgtccatcaccaactcccgga

SEQ ID NO: 47811 - DNA, 1369 bp, Bovine  19866880538077
  misc_feature (1)..(1): n is a, c, g, or t
nactgaaactcaccagacataaataagcatgtttttaatctacaaaatcgtttatcaaatcttagctaaagtattcatttttatgattatattttaaccgatatcccaaacaaccccctgaacacagagaatgtgggtgtgacttataaaactgcttgcagagatacagttaaattgctgtgtgatcagggtctgattgggtctgattatgaaagctctctttaatgaatacaaatgctttgctagactgttcaaattccttcttatattattatgtattcactataaaatgctcctttgtgagacactgaaaaacttcatctattttcttttcaggctcaaatgcatgaattttcagtttaaaaaatgttaaaaataaatgatattaatggactttcatggtttcttttaaaaataattaactagtaggctgagacacaagtattcaaacaattggtcataattttatagtatcaagtatccttttatcaaatagcttacacagcttatctacacatatataggtcaaatcatactccacaaacaaaaggttggaacactaatgctgattaattttctttgcatttgaagaagaatatggactttagctaaacttatctttctagtccataaactatagatttatgacacagaatataaggtaataaatcaaataaagaaacatatgtgtctatggtcaacaggattgcaatcctagtgggtcaacttgatattgttcagataaagaagaatcacagttagactgtttttaaatattactaataaaagtgattcacatagacctttactatcagtgattttaaatttaccaatttaacgtactctcttttctgtaaactttacccatccctctaagatccccatctcgtttggactttggaggaaattactcctcaagttttatacccttctctagtgaattattgaggtgcattcacccctaccttcaaagggatgaatgcacctacattcttccaagtcttgattctaccacctagaatatatctagatttctcatctctgccctaatggttgtcctccacattggttatctccacataatggttaccctaaccactgctcaacaagaacttctttccgggaatgaatagtaataatatctagaatgtaagttgttcacaaaaaaaataggataatgtccatttagagcactcagctcagttactgacaagtaagaactcactgcactaccagtgtcttccttcctctgattttcctttcaagaccagactttacaaataaatgtctagagctatttcatcagctctagatcaattttttttcatcagcagttttaaatctgcttcactaccccagttctacaaaa

SEQ ID NO: 47812 - DNA, 1004 bp, Bovine  19866880553459
  misc_feature (1)..(1): n is a, c, g, or t
ncctttccttggtggcagcactggagctgtatttcctatatgctgtctaggtcagtttatcagtaccacttactacatcatatttgtcttaaatcaactataactcaaaaaaatcagtttaattaaacactgacaccaaattacttttaaaaacaatgtatgatctaagtttaaggatcattttggaagttgcctcagagtttcacttaaaatgaacttcatcagaccaaaacgaaagcagcaagagtgcatatttttcttctatgtattttgcaataagcaatcttaaagaaccgagcctaaaagagtttttattagaatggcctttagttagaattctgtaatgcagaagacatggttcaatcccagatccggaagatgccctggagaagggaatggcaacccactccagtgtctggtctggagaatcccatgagcatgggtacagtccatggagtcacaaagagtcagacatgactgagtgactaacactttcactttagttagaattagcaaatgatttctgtctagctagtaatagaagtgttgtagttgtataaattttttttttttctgacactgcaagctaacatacagaccaaatagcaaaagaataattattagtaggatacagtaaacccagaggcaggaattcatataaagtggacatcaggataatagagtgagagttagctatgtagccaagaataattaatagagcaaatacagaagaatttaggaatgtaataagtaaacagaatttcagtgtttctgatttttcccatgagcttgaaataaaagactacataaactcccatttcctttctactgaagtccttttgttctcaatactactgaagtgcagttatcaagacaaacaaacaaacaaacaaaaaacacttctttttcctgattatcacattagagcaactaggagctgacatagtagggctggttatccatttggaagagtttgctcccagctgggttcttcacaatttaat

SEQ ID NO: 47813 - DNA, 1079 bp, Bovine  19866880648364
  misc_feature (1)..(1): n is a, c, g, or t
nttttgttatccatgaattcaaatactggcagatgtgtttttctatcattagtgtatgtatgtacgtatgtatctatctatatgtatatatatgtgtgtgtgtatatatatatatatatatatatatatatatatgcttttatactttaggagtcggacatgactgagcgacttcactttcacttttcactttcatgcattggagaaggcaatggcaacccactccagtgttcttgcctggagaatcccagggacgggggagcctggtgtgctgccgtctatggggtcgcacagagtcggacacgactgaagcaacttagcagcagcagcagcagcagcatgagttgacaccccctttgggctttcctggtggctcatatagtaaagaatctgcctgcaatgcaggtgacctgggtttgatccatgggttggaaagatcccctggaggagggcacggcaacccactccagtattctggcttgcagaatcctcatggacagaggagcctggtggctacaatccatggggtatcaaagagtcaaacatgactgagagactaagctcatgagttgatacagttttattcgcttcccaatctcagcaaaaatatgcacatatacatatgctaagtgaaaaaattaaaaattaaaagaaatgtattaatgaaagtggttctctccaatttccagttttgtattttgttttagctcactgaaatgctgccagcagagtgattttacttttatatggcaaatccaggtttcacttaccccaaataactccacaacttttatcccttacacttattttttgaacaacatgtttctacattactccttaaaagattagaaaccataggtggttataaattagaaatagcacctcctatccaatttttattggtttaatagtttatattgatggctatttcttcataaaactagagggggggaaaaaaaaaaaaaaactatttcatgagcaaaatgacaccattataaattagagtcccgaaaactgcaccgctttcttcaaactcaatgttcttttaaggcaatgatagctccctaaggaatgtccat

SEQ ID NO: 47814 - DNA, 1932 bp, Bovine  19866880900144
  misc_feature (1)..(1): n is a, c, g, or t
natattaatcacagggattgtgactttagtaagatgattcttatataggtggtttatgctttttgatactcaggcattgaaaaataaactaagccttaaagatgtcatgtttgctcacactacgtttttatgattcaacttttcattttggtttgttttgctgtctttccttaagggctaaccattgctttacccagcagggagaagagagctcacccaccaggttccctccaacttgcactgatgagctcttggggctgtttacattagccatgcaaatttgaaaaaccccaactgcctcctggtgtttaaatctcacaacccaatttgtttctgaggctggtgcacttagcagctgtgccacagagctttgcccatccctaagacaaaagctaagaaataaaaaataaaagactaggcaaaataccccaatgtcttagacagatcactgcatcgaaggaggtaattaatgaccctgaacagtcacagccaacctattttcagttataatcaagatgaaaacgtatgtgtcaggtattttccggaaccggaccatatgtataatagtcgctcacaagcacactttgaaaagttagtaatgacaaaatgtatgtgcctaagcaatttcctccctccccatcaacaatagctttttcttacagtttattttaaaacatctgtttctggcagatttaagaagatatgagtttggatttttaaaaatcccactgctgttaaaacaacaggaaaaagaaaaagtacatatttatgtatgttggctgaaaatgtccctcagttgagccgtttctgaggaaaagtgcctttaacacaagtctcagagactatgggggtgtaaataaaaactcaaaaaatgaacatctctgagctttaaatctggaagtgagttggaactgacactgctattacaaggaaataaccttggagtctagtattccattctgcatttagcacactatattagcatatgtataaaaaattccctgtaagaccctttgcaatttagccttaatctgcttctcccttcatcaaataaataaataaataaataacgtcaatacatttcacaatgtttttcaaaaacatagatacctttgcattgctatatgccatagatcattattcatgatgatgatcctgccttgacggcgtcctcattctttaccttttagtcttacttttatttatttttaaatttattatttttaatttgtattgaagtataattgatttacaatgccgtgttactttcaggtatacagcaaagttagttgtacagatacatatatccacttattttctcatatgctattgctaagtcacttcagtcgtgtccgactctgtgtgaccccatagacggcagcccaccaggcttccctgtccctgggattctccaggcaagaacactggagtggattgccatttccttctccaatgcattaaagtgaaaagtgaaaagtgaaagtgaagtcgctcagtcatgtccgaccctcagtgaccccatggactgcagccttccaggttcctcaatccatgggattttccaagcaagagtactggagtagggtgccattgccttctcatataggtcattgcaaagtatggagtagagttctctgtgctatactgtaggtccttattatctattttctgcatcagttcagtacagttcagtcgctcagtcatgtccaactctttgcaaccccacccaccgtctatggggtcgcacagagttggacatgactgaagcgacttagcagcagcagcagcagcagcaagcctccctgtccatcaccaactcccagagtttactcacactcatgtccatcgagtcggtgatgccatccagccatctcatcctctgtcatccccttctcctcctgccccaattcctcccagcgtcagggtcttttc

SEQ ID NO: 47815 - DNA, 2255 bp, Bovine  19866880926421
  misc_feature (1)..(1): n is a, c, g, or t
nttttgcttaatgtctggaaatttttatagcatgccaactgggtaactgaactttaaggagaaggtaggaaaaaagaatcaacatgagtcttcaacatcaggctcgctgctgctgctaagttgcttcagtcatgtccaattctgtgcaaccccatagatggcagcctaccaggctcccctgtccctgggattctccaggcaagaacactggagtgggttgccatttccttctccaatgcatgaaagtgaaaagtgaaagggaagtcactcagtcatgtccgactcttatcgaccccatggactgcagcctatcaggttcctatgtccatgggattttccaagcaagagtactggagtggggtgccgttgccttcttgtcaacatcaggcttactgcaacacaaatgactttaaataaatatatttagaaatagcttctggacaatgattccttccatacctaagaaaaatattacttcaagctacaacctagcttgaagaccattgcttggtttctttcttgtattttgtctgtgtattgcagaatctaactagttttattttccctcctgagatactcactcatccacacatacacacaccaacactcccacacgtgaaggctttttaaaaatttgctagtcattttctttcaaagtagaatagatcatagattattaaaggcaagtatcaggctatgccttcaaatatcatttgtatagacatgggatttattatatacctaatgcaaccaattgaactttgaccattaagaggtattttttgtgtaggccagaataccagcatttttatcctggtcctgctactttccttctgttatatataggaattgctacatgactttcagatcctctatctagtgactataaaataggcattataataacctttatctcaggtaatgtttgtgaatattaaataatttaatacttcaaaaagcacttacaacagtatcaataatggaatcagagctcaataagcattaaaattcttcttaagctctctgtcatctccagaataaatttttacctggaattagaacaagttctcctatcttctgtcattttgaatctttcttaacttccaaacccaaattaatactaacatctcttaagtcttgagttttcatggttctattcttccatatccagttcttcttgtaaaagaagagatttttggattgtacactccatcttcaaattactcatacttctccacacagttttctgatacataacgatggcaagtaggaactctctacaatctctctttgtacatcaaatagtatccaaggtaagaaataggcccttagctgaatttcattataaatcacaatagatttttctttaacaataatttagaaagatgttttttcataaatgtgtaaaaaattgttactgaactttagatcatagttatcagattgtgttcagggccagcaagtaccccagatcacatctttcatgaaatttgcaaaagaagaacaataaaattgttcaaaattaaataattaaattaaatatgcattgaatttggtgttttagaggagtaaatattcaattaaatcacaataataattatatttttaaaaaacctgttatatagcgttaatgtaaatgtggagagcttaatgacaaaaacaagtctaaacaaataaatcagattaaagaatgattgctacaaaaacatgtggtccactcctgatttccaccaactcacttgaaatgtcattcacctcaacatcttcagaaacttagcacaaatatctttgctctttaatttacagaaaaaagcttaaggcagccatttattatgaaatacatttcctagtattttaaatgattcatagcatacctcttttttgaaaagcaaaaatagcaagctaaacccagcagttccagcacataaatcatcatgatagcaataaaaaagggggtgtggaaatgttgactgtgttctgcagaacatactggtggagcgcagcttggtgtgcagagtttgaatggactaatcacatcatttttatattaccttaaatgatgcattctattaaaaaatgttattattgcccagaccatttcccttcataaaatcctgttcttctcatggtgctaccataaaatcttgattaaatgaaatttcagaggaatgattatttgattcaaaaaggtttaaggaaaagcatccctgttaaaaatattttaaaaatatataattagtgtcatttaaaaaatc

SEQ ID NO: 47816 - DNA, 719 bp, Bovine  19866881044645
  misc_feature (1)..(1): n is a, c, g, or t
ncagtggtttataagcttttgtcccataggtaagaaagggcaaaggaacctggcactatcctgccttgtgcatagcactgtggcttctctgcctcaagtctgggcacaggaggttttctgtggtttcctgctgtgccctcaatccttcccatgtacatctgttgagattcgtgggggagagcctgctaattggtgataatttccactctatctgtggcttccggcagtattatcttcattgtagaccatacgctacttgacttccatcaacttacagaaaacctgatccgaattcttcctagtttttgtgacactctatctgccctaggtaaacaagtgcttatatcccatctgaccagcatgaccaaacttaggcaggttttctggtgactctaggtccctgaccttgcatttcttacagtgtttactttagaaaacttttaactataaactatttcatctctttgagatgcaaatcttttaaaaagcctcttgccagttttacaacccaggaatgtctttctcaaggaaattagagtgctccttctgaaatgtattcatcttgaaagatagtgtccctgttccccaatctctgtggaagagtaggagttagcctatcttcagtggatgttttgccccaagtcgcaaaattacttcctgtcataaaactacgtgaagtttatttttcctttgtgaaagtgaaagtgttattcactcag

SEQ ID NO: 47817 - DNA, 1888 bp, Bovine  19866881055382
  misc_feature (1)..(1): n is a, c, g, or t
nctgtggtcctagtgtgattagattgactagttttctgtgagtatggtttcagtgtttctgccctctgatgccctcttgcaacacctaccatcttacttggatttctcttaccttgggtgtggggaatctcttcacggctgctccagcaaagcgcagccattgctccttaccttggacaaggggtatctcctcatcgccgcccttcctgaccttcaacgcgggatagctcctctaggccctcctgtgcccgacccagacttcgtcataaattctgtttgggaagatattccaaatctaactgaaatactactgtatttccaagactcctttatcaatacaaaggaaatgagcttgatggaagcacctgaagaacagatgtggattctataaggggaaagggtactgatatataatgggcttggcaaagatatctatagagccatatttttgttgagttatctctcatttggccagctagactctagagaggttttgtgatgattttcccccagcacttatttatagaggccttggtgagctgccatactgaatcttcctgaaacagtacttgaatatatctggccacataaaatcagtttcagagggaaaaaaagaaaaggtttttttttctaagtgtcaagaaatatatttcttatttgagatattttatagtaatattatgatacattttatcacatcaggaggtaaggtgtctttcaaatataaaaaacctccttaaaatgaaccacgtgccatgtaatgtattttgatgctacatttgcaaagcctgtctaatagtgtcaagaaatctaatattactgaaacagaatgcttgtaggaattatgagcttggatattaagtgctaagaactcttcagtttaatgaataaaagaattatcttgtcactaagagaataaattcaagccaataagcaccatacactgtaggtctgagtgaaaataattatttcctttgagaaaatcaaaatagatcctttaaaactgtaacctgcattagattttttttttttctaaatcctgcatggatttttttaaacacctttccaaagtagtctataatttagtttttatacagttatagtacaggtcattaaattaaccatcatttctgccagcacatgcattcagtaaactgaactttttcctgcctatcctagacaaagtatgtggtcttctggaactttttaaaataagtgcttttttggaactgtttaaacaaatttattataggtttaattccttcagagataagaatttagagaaatggaaactatatcaaggagtcacaggagtctatgtttgtaagattatagctgtttccacttatgcaccatcttgcaggatatattatcaacaagatatgacaaatttaaatgcaactgctgaagcagatcggactagatacaaattggtggtactttaataactggatagttagatttagcaatgggtacctgtgtgagccaatctcccaagtgtgcaccaaagggtaaagggaactcaaggaaatgaaccaggggattctagaaaaaatactctcacctatactaatggaatgggttcccagatggctctagtggtaaacaacccacttgccaatgcagaagacacaggttcaattcctggatagggaagatcccctggaggagggcatagcaagccatttcatcattcttgcctggagaatttcatggacagaggagcctggtgggctacagtccatagggttacaaagagctcccaacagctgaagcaacttagcatacatgcatactaatagaatgttctggttttatattgctaggcaatctgaaatattttttgttgtattaaaagttggctcttgctggtgatatatatcttatt

SEQ ID NO: 47818 - DNA, 838 bp, Bovine  19866881149744
  misc_feature (1)..(1): n is a, c, g, or t
nagtgcctgacactatattaatacaaatacaatgatactgccatttcattaatacatcgaacataataaaaatagagtaaatacagagtaaataaattgaaaatgtgagatattgcattattcaagaaaatggcaatactgtatgaagaagttttggggaacaacattaaattttcaagggaatgttcatttaattcttgcactgatcccaaaataacaacaaacaaacagacaggcagctgtcatgaagctataaagtatacttcctcctccaaatacttttatgtggccaatggaaactttggaataagatttaattctacttctgacaattcatttctctcttaatggtgagaatacacagaatttatcaaacctgctggactgattccacatctttaatctgaggccatgtctagaagaatgattgctaatgtaattcaagcagcaaaaacatatttagtcaagttagacatttgcataatacataaatttagacatagccaaaaaagagattccaagcctgacatcccaatatggatcaataccattatcatatttctaataaaaatttctcactgaggttatatgatccataagaatttaaataaattaacatcacaagtaatgataaattcaaaaaagaacatttagattgcaggcaaaagaaccttcatttatttatttgcactttaaataaccaataatacagctgacattatatatatctatttttcaatgataaaaggatatttaactaggtcacattacttttacttatgaagcaatttgagaaagaaaaagaagtatgttaatttaaaacggcaagtctattctg

SEQ ID NO: 47819 - DNA, 1355 bp, Bovine  19866881174967
  misc_feature (1)..(1): n is a, c, g, or t
ntaagcaacaatagtaagagaacagtgggataaaaaggaatgttcatagattagtgagatttataaaaaatagatgataatgatgataatcgatactatttattctgacaatatttgttgaatgtttaggttacttcatggttggcatagtgctaattactttatattcattagcttaattaatccttctaacaacctgaagaagtagctatgatcattcttcattttacacatgagaaagctgtgtctcaggttctgcttcttgtccagtgacactcagtggaaaattgcagagctcaaggtctaacccggatctcacttgctagaacgttgattgtgcaatataagacaacagacacaatgaaaaatgtcccctatccaagaactttgttcccagcacatatacaaggcttatctatacattaaatacattaataaattgacctttatttctatgtatcacacttgctgtaacagactattctttgtgtgctccaaaaatccttagtaaaggtaaacaccagttgatgaaaagcttcataatttaagtctaaaactttgtgtcattaggcctctcatctcttctccaaacacagtaaaattttagggaatattttaaaattagtaaatgttgcccagaaagaatgatataaaaatttgtggcatatgagaacaccacttgtgggttttcaaaagggcattacataatctgcaggaagtgagctccctgacttacgaatggatctgacagaggtcaaattacagtttacatgtctgcccctcttaagagaggattaactcttataacattaacttctctttatcatccacaaggatatgtcattccctaattgttaatagtggaacctttctcaactaagtcaaacactacttgagaataagaataaaacagtaattgcattagttttctatcattgccataacaaatcactagcaatttagcaacttggaaaacaaatttatctgacagggtctgtagctcagaagtccacatggactcagcaagtatcacaaggctgaaatcaagcagacagcaaggctttgtttgttactggagtcaaaagacagtgagtcactcaggttcttggtacaaatcatttcctcacaactataggaccaaggtctcaatttgcttttcttactgttgcccaagggtcattatcagcttctagaggccacctgcattttctcgtacctcgttcccttcaatgccatcagtgttaaggtgaatccttctcatggttcaaatttgcctcacctctctctcatctcccctttgcctctgttctcctctgaatttatctacctctattgtttccatctgtaaatgttca

SEQ ID NO: 47820 - DNA, 1674 bp, Bovine  19866881279880
  misc_feature (1)..(1): n is a, c, g, or t
nactaagttcatacttgtcttactttccctatgtaagtgatgcttcccatataaagtgatacgactgaaccctttggaaacgttatcgtgatcatttgaaaagtaaccagccaatgatcttatgaccccagcataattgaagccgtcagctattctttgtccaggaacaaggccctggatggttagcagaaggggcgatgaggtggctcggcctcacattcaggctgtcaattagactgcattaaggaacacttttagcagggttaatgccactgctagagaaaggcaggcatctgaagatagccagtacttagaaatattctacattagaaaccaacttctccatggatggaagtcaatgtatttatctcttactctatggtaaggtcatggctccaattacaatgtaaaaacgcatgaattctgaatggttttcctttgctgaagaccacagatttttttttttttttcttttcctgactgcacactaaagatcaactttttaattgtctgggtcagatatgtgggaaatagctattatattcttcccttccacagtaaagaatgagatctttgaataaaatcccttctgaaaaaatggaaaaaaaaatgtggagctctgttgcactgcagcaaaatttgtttttcactaagtctctatattttgagaggaagggaaaaatccatcactgttaacactgataaatgggtagaattttaatattcatatttctgattcaattacagttactgtgacataaaaggagatggcaaactattatgttactttgggatatatgaaatccatacaaaacccataagggggaaaaatattcttagaattgttattttctttaaatactccaaaaatgttctagtgcattatgaaatataaaatgaacttattttaaattctcacttcatttgaagctaaaatttatctttgtcaatactgatctgttatagagatagtaggagatcaagaattcagggaaatgtattattataattgtgaagaaaaaatttaaaacaaatattcacttaccaatgttaaatttactgatatttggtgttggatgcaataaaagggctataaaattaaaacgctttgttaaaaaaataaattatattgttcaaattttcataaattaagagaaataatagtttcagaaaataaaactttaagaaagatatgtaaaacaagcacaagctttggccccaaattcttctcggaaatcaaattggaagctaccaatgccaaaattcaatgcatcagtgtatcagaagtctttctaataaccacaaggatatttgtcaaaagaatgagggacttggaattagacaacctggatttgaatcctaactttgttcttgctagcttttagaatttggacaaataatttaatctacttaagcctaggcatctcttgtcctaaaataataaaacatagcacctaaacaatcctatcatcaactgcttatttggctgatggcttagaattgaaatgtctggaaaacatgaccaagcattcattttatagattaactctagtttcttcagggatataactgtttatttttatggcccttcttcaaattccaattcagctgtagcactgttccaaattactgtcaatagtaggatttaaaacacaccccagattttcttagaat

SEQ ID NO: 47821 - DNA, 846 bp, Bovine  19866881613869
  misc_feature (1)..(1): n is a, c, g, or t
nttttagttgcttaacagttttactgacatgtgacaatttaaaaaaatcgtttccttataagataagttaatttatttgatgcctatatcgacacagatcatataacttcaccacaaaaatgggtaaaatgattaaagttaataacacactcaagcgtaaacatttgtcagtcactatatgtcacactcctgtatgaattattacctatttactcatagacacctgaagtagaattttcttgaattacagctcccaaactccaaaaattctaatgatttttgttatttaatcaacctaagcagtgataaggcagtcaaataataaaacaaaataccaagagctttccagaacattactgtcacatagaagttagacatctcttccaaatctaaaacctttacatttatgacagttgcataatcccattttattttacaaaaataaatctcttgcaccagttcaattttacttcttttatattgcacaaatgaacagtcttacattccactaaatttttgacatttaatgtaataattatcttctattggatatgtgattagtaattcacagttttcaaggttctgattgatattgaacatgcatcccattataatttactggaatcttttcaatagcagtgaatcatggtataaactagctttgtttatttcaagggcatttttctaatacagaacaaaatgaaattgaaaacaagccaaattttaaagagagtactattttggtttcgtgaactgcattccttgaatggtacaagtaaaatgactgtctagggtgtaacaaatacaatgaatcaggaaaggtgtcttagtcttcaggatttccta

SEQ ID NO: 47822 - DNA, 980 bp, Bovine  19866881723546
  misc_feature (1)..(1): n is a, c, g, or t
ncagacataaaggcaaatgtgcaaaaggctgctcatatttatagcaatactgacacatgatcaatgttatactccacaaacatgatgacataaattatttagaagtaatgacataagcataataaatcatgctataaatcaccattttccacattgcatttgaaacgttgttactgtggaggaaaattcatgatgtatcttatctcatgattgatatctaatgaataaaggaattatttaaaatgcttaatcttaagagtctctaaaatcaacacttaatttactcataaaaagttaaatcttgtattatcagctaaaaacatcagaaagttccttaagtgtttacttagttaaaataatgaatctctaattccccatctgagaatatggtatgctatgctatgctatgattttttggataatcccacacactcttaacaaataaatctaatttaagggagatggacttacttaaattttcggaacacccacctcaacaagaaattactctatggccacaaaagtactggaaaacatcataggctgtctttcctgccttctttggactttactacagataaagttgtctcagtagtatctttaaaactatcaacctagacctgcccccaaaatgcttcttttaattaaatcttctatttttatatagcataattatctaagcagttgaacttgacatattcctactattaaatttattaacatctttgtgatgtttattattgttctttgcatatctttagggaaatttctaaaattctggtaggcagagtcaataaattccaagattttttacacaaggtgatttacaataaaggggagtttttagtcccttgcaataacaaaatagaatactgctgccacttctggaaatgaagaagccaaacaaccactagggtttctgtaacataaggaaaagaaaggaatagtagaaggatcacattaaactaagagacatatag

SEQ ID NO: 47823 - DNA, 2697 bp, Bovine  19866880159078
  misc_feature (1)..(1): n is a, c, g, or t
ncgtgagtagttcttgactgactaggtggccaagtattggagtttaacttcgcatcagtccttccaatgaatattcagaactgatttcctttaggatggactggtttgatcttgcagttcaagggactctctagagccttatccaacaccacagttaaaaaccatcaattcttcagggctcagctttctttatagtccaactctcacatccatacatgactactggaaaaaccatagctttgactggacagacctttgttggcaaagtaatgtctctgctttttaatatgctgtctaggttgttcatagctttttaaaattttttatttaattagaggctaattactttataatattgaattggttttgccatacatcaacatgaatccaccatgggtgtacacgtgttgccaatcctgaacccccccctcccaactccctctcccataccatccctctgggtcatcccactgcaccagccccaagcatccagtatcctgcatcaaacctggactggcgattcatttcttatatgatattatacatgtttcaatgccattctcccaaatcattgccccctactccctctcccacagagtccaaaagactgttctatacatctgtgcctcttttgctgtctcgcatacagggttatcatttccatctttctaaattccatatatgtgcattagtatactgtattggtgtttttctttctggcttacttcactctgtataatcagctccagtttcaaccacctcattagaagagaagcaagagtcttttaatttcatggctgcagtcatatagataataatttaagtaatagaagcaagtaagattggcaaagaaaaacatagagaaagaaaacaagactaggcagaaatggaaaaatcaagaattttacccaaacctaagttatttccagagaaacatgaacaaaattgcctagatagtaatatggtcaaatccaggggacaaaaaatgcaagatgacagtattgtttaaaattgtcaactactactaagaagtaaaaagcttactgcagagaactgaaaagcaagcaatagaattggcaattaggagatttattagggaatataaaaacaatattaaacctgtacccatcttttcaaggcttataatctatttagaaactggtacattatgaaatatttcaattaattccattaatatctatttgaagacccactataagctggaaaatataaaaatataaggccaaagttaataatgcaggcaaaaattattagagtcctgcagagcaatcctaatatttgcttcagtagccaaaggaaacccaatatgatcagcacaggaattttgacctggtctgttttccaacctggatcagttcaccaccccctcccaactttagacaacaggtggttcccagctccccagaggtcatcatattactgctgaacttaatgccaacacctaatcacacctatagcccagaactcctaggttcaagcgttccttctgcctcagcctcctgagtagctccgtatacaggctgtaccattctgcctaacagtgaaagagaaaaccagataccagttattaacaagttcatggaatctagaaaaatggtatggatgaacttattagcagggcaggaatagatatgcagacatagagaaaaatgacttgtggacacaggggagaaaggaaagggtgggaccaactgagagagcagcactgacatatatgcactaccatgtgtgaaatagatagctagagggaacctgctgtatagcacagggagctcagctcagtgctctgtgatgatctagagggaagatagagtggggggagtaggggtgggaagggatatatgtatacatacagctgattcacattgttgtgcaatagaaatcaaaacaacattgtaaatcaacagtcctttaattaaaaaaaaaaaaaacatgaaagaagggagaactatgattaggaagacaggagtaggaaagacattctgtcaggtacaaattcataaacagaaacaataatggagcttttgcctatatttcaatgaaagaattccattgtatttcttcctttggaaacaaatatatagaaaagtaaaaagaaaaaaaaaaaagaaaagtggagagaagcagtatctaaagaaataaaattgaataagctttagtgatacattcataaataatccacttatcttatccaatgtgacaaaatcaggaatcattcaaagaacagtatggccattaatgcagttggaatagagtaatgcctactttaacttcatttttaaagtatattttggtttattggataaaaacatttgagtattatgcaatttattatccaaatataaatgattctattagtacaaacaaggtctccaaatgctcattttctgaaaagaagttcagcagtcctgtttatgtgagggtcaccttagtggtgaattatatgattttattgccttgttaaatgtaatctatataatcatgtaataaatcatagtgaatatatcttataaataatacagataatcctcaaagctataaaattaaaattttcttgtaattacatgatacattttttgatatatcactgaagccacactgtagttctctttggatactaaattctaaataaaatgcttttttccacccagagggaggtaggggagggaggaggga

SEQ ID NO: 47824 - DNA, 1557 bp, Bovine  19866880410101
  misc_feature (1)..(1): n is a, c, g, or t
nttttttaaatgtcaagggagaatacaactgtgcctcaaagcataaaaaaccagtgaaatattttgcaataatttctatggttaggatgagtacaaagagacttggagccctaaggaaggagtaatggattctggccaaggtggaggagtaggagttggtaataaaaagacctcagagagaagatataatttgagctatgccttgaaggataaatgaattccacagggttaaaagagaggaaataatatttcagagaataacatgagcaaaggcccagaggaactagagagcatggctaactcattacagtgttagaaatctttggggcctagaatatagggttcttggaagtggagttggagaaaagtttacaagaaacaagtctaaaagagaaattagagctatgagtattttcattaagaggttggaatttattatatacataagggggcaaagaatgatttaaataaagaaaaagtcaaatctatatttccacaaaaatgattcaataagcatcactgaggttgaattcaaagataaaactattacaatagtgtagctaataaaggaaaaatgatggtttggattaggggtaagtcatgtcaaggatatttttgaacagaagaatttaaggatcattgcctatggagggtgtgaaaacttagggacagccgaatagccaaagcatcattaaatgaacaggaaatacaatgaagctgcaagaaatgttcactttcaagagtagcacttgatttctctgtaaagcatcacagatagatatacttaatagatggctgggatatgggtcaggagaaatctgagaattggaaaaatataatataaaataattggagagtaatacaaggtactggggcttccctggtggctcagtggtaaagaatgtgcctgtcagtgcaggagacttgcagcagactcgggttcaacccatagattgagaagataccctggagaaggaaatggcaaaccattccagaattcttgcttttgaaatcccatgaacaaaggagactggcaggctatgggggttgcaaaaagaatcggacaacgcttagtgactaaactaccactatgaatacagggtactagttacacaccctgaatctagtctgcaacctgtatctgtaacctgactccaacacgaataactgcatcttcataacatgtgatttaatctctcattttcctactctgtgatatggaaacaatataggaatttatacttttgggtatggtaaaagaatacaaattaattttctagaaactcaaagcatttcaataaaagttactcattattatcttatcagtttagttcaatcactcagtcgtgtccgaatctctgcgatcccatggactgcagcacatcagccttccctgtccttcaccaactcccagagcttgctcaaacttctgtccactgagttggtgatgccatccaaccatctcatcctctgctgtccccttctcctcctgccttcaatctttcccagaatcagggtcttttccagtggagtcagttcttgactgactcaggtggc

SEQ ID NO: 47825 - DNA, 1502 bp, Bovine  19866880558566
  misc_feature (1)..(1): n is a, c, g, or t
ncttaagggagatcaccctgaatactcacgggaaggactgatgatgaagctgaagccccaatattttggtcatctgatgcaaacagatgattcattggcaaagtccctgatgctgggaaagagggcagcaatgaacggaacattcattgcatcacagaagcaatgaacatgaactttggcagactccaggagatagcgagggacagggaggcctggcattctgcagtccatggggttacaaagagtcagacacaactgggtgactgcacaacagcaacaacatctaatcttgctacatttctttccacttaactctgcacatttcatgagaaaactaagattttgcttcagaacatagagtatgtttcctgtttgttgattttgctttgtagcattttgtcaaagtaaatcatacccagattttatgctgagtcctgaaagtccttctagaatcactgaacatatggtggtggtgggtacctctgacaattagataataataaaaataaaagactggataatctgcatagtcttgttggacagcaatgtatattttgttaataagccagattttctactgctcaaaaaatttccgggcttccctggtggctcagtggtagagaattcacctgccaatgcaggagacacagatacaatctctggtccaggaagatcccatgtggactggagcaactaaccagtgtaccgtaactattgagcctatgctctggagcccataagccacaactactgagctcacatgacctggagcccctgctccgcaacaagagaagccactgcagtgagaagcccatgtactgcatctagaaaatagcccctgcacactgcgactagagaaaagcccacgcaacaaggaaaacctagcacagccataaataaataaataaaattatataaaaaatctggctgtcaaccatgctaaatgtgacacatttaaaaataaagaagcaaaagtttccatgttacagaataaccttttggagaagatatcagcattcataagctttttatttaaagcgaacagcactttgggtaggttgcctctgtgggacaaactcataaattatgagaggaaaacgctctcccctgtgacctagggttctcaggccaacaaggcactcttccagactccagtttattcatctgagatgacaccactgggaagattcacatcatcattaaaaatgtgtttgtgtaaatcttaccaaggctgggtagggattaaatgaaagcctctgtatgaatctcaaaatagctgtgccaacttttaacttcacacatcaggatgctactttattacataagcacttggataaacacactctctcatccatatcaaacatgcctttcaagcacttctctttgaacatctcttctcttaactccaggtggcatgaagttcagtcaaaaacagttctgaagaagggaaagaacaaaatacatctcaaaatacatttcaaaaatatagcactgcagaaaca

SEQ ID NO: 47826 - DNA, 1643 bp, Bovine  19866880766120
  misc_feature (1)..(1): n is a, c, g, or t
nctagagaaaactggattaccttttttttttccttgaagagctgctttgtaagtggttacttcaaaatgtatatacctgtttttatcttgatattctttatccaaattcaatgaagttgtttaaatcttacttaataagtaatctatattattattttattttttttctatattattttttaaagttgtgccttttgatgaggttttaactctagcctttcaaaagtcttaatctatagaagtaaacaaatattttaatttcaggtaaaatgtggttaccaaattagtttgcagactaattactattcagtcttgcaactattaggctctggttcacaagaacaaaaagagcattcatacagagtaaagtaagtcaaaaaggaaaacaaacattatacattaacgcatatatgtggattctagaaaaatggtataggtgaatctattttcagggtggaatagagacatagacttacagaacagacatgtggacatggggagacgggatggtgatgggatgagttgtgagatttggacacacacgatcatgtgtaaaatagatagctagtggggagctgctgtacagcacagggagcccagctcagtgctctgtggtgacctgaaggggtgagatggggagggtgttggaaggcggctcaagaacaaagggataaatgtatgcatatagctgattcacttcattgtacagcagaaactaacaacattgtaaagcaattatattccaataaaaaaaggggaaaaaaagaacattcatagaaagaaaacctgggttgtcatccagccttcatttctaaagagctctgagatcttaaatacttcatttatctgttttcaattatctcatttttgttaaatggatttactattgttacaaggaaaaaaatttaaaaaccaatgttacactaaattagttgtcatttttatctttctcctggagacaactcagggtcctgtttgaatacctgggagccaggctgcctgagtttgccatttctgaaccatcagcttgggccaataacctaggttccctgtgcctgtgtcccctcctctgtaaaacaggggtaacagcaacagtatccatctcattgggctgtcacatggactatgtgagaagcacttagagcagcactagcacgcggtaattcctcttccctcttgtaacacctgcctattatctactgctataatggcacagatttactaagaagcagccagttcacaagttttgtattacagctggaaataacttgagagagaaaaggagaacttcaaagggagaggactcaatccatgcatactttcccccactgtcagaaatgcagtgtctgctgaggattaagtacatgatgtgggttctcggggaggcaggtttggtgctgtaatgaacaatcacacaatcaatacagacctgggagaggtaatcccgacctctgctttacccactcctgatacgctgagctctcatcccagttctcaaatattgcttcttttccccccacccattaaatcaataaaagcttcaaaaatcttttagagctatagatttaggctataaaagtttcaaaaaatttaaagcataattatagcatcaagaccatcttgcatccaggttttaaccatgt

SEQ ID NO: 47827 - DNA, 1436 bp, Bovine  19866880783462
  misc_feature (1)..(1): n is a, c, g, or t
nttgatgcttttgaactgtggtgttggagaagactcttgagagtcccttggactgcaaggagatccaaccagtccattctgaaggagatcagccctgggatttctttggagggaatgatgctaaaggtgaaactccagccctttggccacctcatgagaagagctgactcattggaaaagactctgatgctgggagggattaggggcaggaggagaaggggacgacagaggatgagatgactggatggcatcactgactcgatggacgtgagtctgggtgaactccgggagttggtgatggatagggaggcctggcatgctgcaattcatggtgttgcaaagagtcggacacgactgagcgactgaactgaactgaatctaataattgaaaatatacacagagagattaaaagtcacacaagaatcaggtttttaaaaatgcccaaaaaataggagttgatacgtaatatcacactacagaactaaacttagctaaagacacattattgattttcttaaactacaggtatttttaaaagtattgagaaattaacagtttataaaaataaggtaaaaatttcaggtgggagcagaaagttaaaaccatgttgtactttggcaaaatcttttaaaatgtcatgcccttaaaataacgtcttatgagattgttcttaggccgaatcatacacaagataactttcaagccatttcactttgttttcgtcctcatattggcttcaaagttgtccctgggggacaaaattaatctcagttaagaaccattgctggggcttcccgcctatcaaatcaggagacataagagatgctggtttgatccctgtctcaggaagatcccccgaaggaaggcatggcaacccactccagtattcttgcgtggagcatcccgtggacagaggagcctggtgggctaccatccaaaggctcacagacttggacacgactgcagcagcttagcacacattagcacacatgcacgagaaccattgtcacctacgtttgtgcgtgctcagttgctaagtcgtgtctgactctttgtatccctatggactgtaccccgccaggctcctctgttcatgggattttccaggcaagaatactggagtgggttgcccttttccttctccaaggtggtctgctcttttttgtatccagtggataccccaaagtttgctgcttaaaccaggtagtgtatatttttattaatttttcctaaaaaccctttgatgaacaaagccttcagataacacacacacacacaaaacacacacaaattctcaggatagaaaaatcagcacttttttttcttttagaaaattcaggtcagcctgtgtcctctggtcaaggagggagtcagccactattgccagaaaacgaaatgaccatgaattctctcatatacaatcgagatgcattca

SEQ ID NO: 47828 - DNA, 1118 bp, Bovine  19866881055581
  misc_feature (1)..(1): n is a, c, g, or t
naaaagaaagaaaatgttttccaaaagaactcaacccttatttaagtaggcaaagatttttaacatgacatattgaacaagataatctttcttagaaaatgaaaatcttttgtaaatattaaacaagacttacaatttccaactcctctcaaataagaacaatgtatttttgtcttaaggatttctattggtaaaagtaagtagatcaaaccaataaaagaaaaggattaaattcctctgactcaaggtaatgcaactgttttcaatagcaagtgaattgagtttaattttgcttttgcagggggaatgatggcttctcagggaatttcaaccttttacaaaacaagtatagcacattcaacaaaaagaatatatacttatatctccttatttgagatttctgtacatatcattaactccctagctgaaaatttttattttgtaatttcagaatcactgtacatagacgttaactctcatagcttttcagggctttattttcttatttttagagagcacataaaggaataaagatgaaatgaactaaagatatgtccagagttcgtatcatgctgctgagagttgtacatattacttcttataattcagattaaatgtaaaaaaaaaaaaacttcctcataatgatttctttgatgtaaaaatattgataaaaaaagaagtactggatttcttgctctgaagtcttctaaatataggatttttcttagcaactgtatataaatggccttgttgatgaacaaggaaattactggatcagtccctaaagaaataattcccttgatcacaaaatatgttattacattataatcccaagggattccagatgctctttcctgattctgttagagctaccatcccaccataaaaaagaaaattatagtttaattattacggatgtttgttttaaaagccacttattatgagatgttgcaacacagacagaaatggttgactggttcagtttttctttgttttcttctcacaattatatagatagcatgagatcaaatctaaatattgttatccccacttccctcaaataaaaataaaattgataagaagagtatttatctgttcaaagggaggataatcattct

SEQ ID NO: 47829 - DNA, 967 bp, Bovine  19866881093479
  misc_feature (1)..(1): n is a, c, g, or t
ntaggtattgttatattatttcctattacaagatgagaaactaaaacttggtaaaggttatgtgaagtgaagtgaagtgaagttgctcagtcgtgtccatctctttgtgatcccatggactgtagtctaccaggcttctctgtccatgggattttccaggcaagagtactggagtgggttgccatttccttctccaggggatcttcctgacccagggatcgaatccaggtctcctgcattgcaggtagacactttaccctctgagccaccagggaaagtttatgtaacttaaccaagatttattcagctattaagaaacccaaagtacatttcagtctacatttgaatctactctgattcaaagtaattcagacctaaactcaactgaacaaatatcaagcaaacaaacaaaaccagtcaaactccatctgttgatctggttctaattttctcatacaatttgttaacaatttgcccaacatttcttgagtataacaggttatgaatttagtatatttcctaaatttaaatctatatattacagaaaatggaaccttttggcttctcacattcatctatggagaaaccctacttactaatttgttacaaagagaagaggccagtttcccacagagacaacatatgtgattctaggcatcactttatgcagctgccactgtattagtggaagaagttaaaaagtgaccattactctgtttttttaattaagtcagcatacacagggtgattattgacttgcattttatagaaagttgcattacccatcattagaatttcaaatcaatgtaacgtatgtttaatatatatgatgaggtgcacacacttggcatttacttctcaaatgaaatttaagcaaacatgaaagaggtctgcagcgttattcaaaattaattaagaagctttctgactacagcgatccacagttctgtgctatcttcaggtgtac

SEQ ID NO: 47830 - DNA, 1420 bp, Bovine  19866881133258
  misc_feature (1)..(1): n is a, c, g, or t
ntgataaacttgctccactctggaatatgaaacttgtggataggaggtcaaatttctcttgttagaaaaagaataataatagctcttggctgtttaggttgaaataatatgttttctctgataattaatctgataataaaaagctgtggctagttcttataagaggtaaattttgcagactaagaaaagctctgtttggtgttaacagttcaaggttgaaataactttatgctgatgtagcaagagctaattcattagatttcaactaaacaaattggtagtctgtgaatttgagatgaatttgatgtagctggtgattttacatttaaatatataataaggtgaaaaagaaattgctactatgtcttattttgctttggaaaaactgagtttgaacaagctggtctcaatttgagtcttgaatttcatgctgctttatctaatttcaagaaaaattactgacccaagttcattggaggaaattattttccacaccatgagctctttttcagactattgttcaaatgaactacaacaaggtaaatgtttttcaagagaacagaagtagagcactggagagaaaattagtaatttttctattgtctataagtgaaaatatatcttttaattatgaatttaactttaagaataacttgatcacatttataaatatgtccaacaaaagagttcaatttagtttcaaagagctgaatgatgaacattaaaaagccatttttgacaaatgtttggcataaacattcgcatgaaattcttgttattttttcggcttttggtctgattctgctggtaatctttgtcatgactaagcaagctacttgaataatctttctattacatgctctcatgtttaaaatcagcttatgccttataattaaaggagttttacatctgatagctatgggtttgaatttatataagtccattatttactagttgtgtcattttaaatttatttttaagagttaaccacttttatttcaggtacttttatgtagcagagtaatatgtttaactattttacagagatataaatgcaaacatgaaaaacattgacatatatggtaattctatacacatagtttttgttttttgtattctgctttttttgtataacaacatttgtaaatatgtctttcactagatatttttcactagatattcactagatatatttcattagatattcactagatatttcactagatatcttttttaattgctaaattaagttttaacactgtatggacataccataatttactagattgattccttgtttttggacacataggtaatttcttacttccccccgcccttcagctttattgagacataattgacatatcaatataaaattagtaagtttaaggtgtacattagttgttttgatatgtgtata

SEQ ID NO: 47831 - DNA, 2137 bp, Bovine  19866881159871
  misc_feature (1)..(1): n is a, c, g, or t
nctggatgtagaagcataaactagtacatttctaccttttcacaaaaatataaccaatatgtacaattattgtattaaaaatacaaaagggatacagactccaccaatgtctttctaaaagacatacaggtacaagtagtatcaaaagtatgaggaaatcaccagttaattgtacattctgcacttgacatcacagagcgaactgaggttacagtcctatgttctacggtgacttaatgcttagataacatttgtgcaacttgtgtagagcgagagttctgtctttctatatgcacatgaggtccatagcctagagaagaaaactggcaaataatgcatcttacatgtaaaattacaaatgcatcattgacaatgtaatacataagcaagtagacagatgccatgatacaggagagaatcattaaataaagcactgacattgctttgatacagtgaaaaaacactgcaattcgacttttaaaattggaagctatttacgtttatctactgatcaatatgatcagctgaatttaatggaaaaaaaatccaagaccagcagttcctcacatctgagtactactcggattggcagccttcacttttccggagtctgtgcaaaaacaacacaaaaatagagtggagggttcagtccttctggggttaatagcagctgtgagcaggtggttgctacactcaggccttctccatctcagcgtccgtaaagccacttacgggtcagtctttggccaccaacctgccttgcaaaggctggcggatcgcaccgggttttggacctttttgatctttttcatgttaaaggctcgtgtgttccctcgtgccgatcgatcgatacagggaggctgtcttgaaagagcagtatgaacggctggcgttagtgccaacaccccaagctgctttcactgcaatgctatccagttataaacgtttctctttaaaaacaaacaagagaagccctaaagctaaatgaacagaaatcaaagaaacataacttaaaaaacagggggtctgccgtcggtctcgatggagcagggcacgcccaagggtgacgctgccctgtgctccataaggctcagacacaggacgctagggtcccagtccctccccggccatgtgcaaacagtttgtacagtagagctccagcccctggggaaggaggggcgggagccctggaatctaggtaattggctaacatctcatgcttccaggatagggcacttctgggggcagccaggacacaggaagaggggctgtgccccgcctcctctcttcctggtgtggccacaccctgtccggcatatttggtttttgagaaacccaggctggcaaccctacttaaaggttcaaaataatactgtaatcattaaatggatataacatttactctctgaacacaatctttaaactcattaaaaaggaaaaaaaaaaaaaagaggacattgtaaacaagcggacgagcactgtactcaaaggatttcgtttttgttttccttggtgggttaaaggccccaagtagttccgtggctgacttttctcacgattccaatgaaaccaagtgctaggactggattgaaatctaaaagggagatttttaaaaaatccttcccggcgtgggtaagtgcagccaggttgaatcatcggtggcgatgaccttggaatctggaatgatgctgtgttacgtggcaggcagcgacggggagctcggagacggctgcactgtgcattcaagcaacgaagtcggaaaagtgccagggcggtttcttcacagtatttcacatgcaaaggggacaggaagaggggtcaggagccccatgctgcttttaaggcaggaaaggaggcaaactggtccaccatcctcagagtgtgagttccaaggctccgacgctagggggcgtcttcttgtgctctcctttgggcggtttactcgggtccagagaagcccgcacctcaaacagcagacacttgttcatcttctgctaaaacaaccgtcaaagaaagaaggaaatcaatgagtaagcaagtcattttcttgtgcttagagagaatacattcaccgatatgctaaataaaaacaccatagctgttttctaagtctaggtcactatactgcagctagtcg

SEQ ID NO: 47832 - DNA, 1859 bp, Bovine  19866881254887
  misc_feature (1)..(1): n is a, c, g, or t
nttaaagagcccaaatttaagcattaatttacttaatgcttaaatttgggcttcccagttggcgctagtgataaagaacctgcctgccaatgcaggagatataagagacacaggtttgatccctgggttgggaagatcccctgaaggaagacatggcaacccactccagtatttacatctagatagtccttcacaaggcttccctggtagctcagctagtaaagaatccacctgcaatgcaagagaccctggttcgattcctgggtctgaaagttcccctggagaaataataggctacccactccagtattcttgggcttcccaggtggctcagatggcaaagaatctgcctgcaaaatggaagacttgagttcgatccctgagttgggaagatcccctggaaaagggcatggcaatccactccagtattcttgcctagagaaacctcatggacagaggagcctggtgggctacagtccatgagattgcaaagagttagacacaactgagtgactaagcacacacacacattccttcacagagcaattgcctaaaaagtaaaataaaagacttggccatcattaaaaaccacttaaacaatctgtggatagttcaggaaagtccctgaataaatctctcccctaaccaaacccctgaaagaaaaaaagaaagagaaagtgagagaaggggaagggtagaaggaaggcagtgaaggagagaggaagagaggggggaaaaggaagaaagggagtctatgaaaatttctatttgaagcattctcatctgcaaccatttcatttatgcatattaaaagataaggaaacagagtgaagattaaagtacaaagagaaatatggattgattgatggatctatttatttataatgcttaatttagagtaggagacaaacatgaatgcaaaagatagtaaggtcttctcagtatttctcccactttgacaaaattgttgtgatggaagagaacaacaacaaaatattgtgtactaagagtgaatttcagctttatgaaataaagtctattaacttacagatgttatgtcagaaatagctgtgtagatatattcaagagaactgaactatgttcacataaaaagaaatagtgaatggtgtttttctaaatgtgaagccatgcaggaccctgcttttcaatactaggaaatctgcaaagggactgctgagatcaatgtaattatccagaaggcattactgaaatagattttaaatcctttgatgtaattgcttgctgagtttgccattacagcagctctatccttttgactgattgagggcctttaacagctcaggttttactgagactgccaacatactcatgttggaatcttaaagttagacagatgtttgatgtttaatttaactaatatggcacaccttgagtcaacaaaacacattttgtgttaatgtgaaaacaaaacaaaaggtgagggacagaaatgcatgcagaattaatcttcctgtttcagcagacaagcctttgcgctttgacttattaacatgaattttgatttgaaaaccctatggcatttttcctgccccttaagaggagcagtcttgattccattggagtatttagaaccagaactcaatgaataaattaaaagtgcataaaatccccaagcaaagtgtaaggaacattgaggtgaattgttttttcttatggacagtccctattttccatgactctttgaataattcttattccttatgacacttctctcttttttccacaacttcttacgacaaaccataaagtaccttattagcttgtctttagattcactctcctcctgaagaaagacagatttgaccaaagcattttat

SEQ ID NO: 47833 - DNA, 875 bp, Bovine  19866881262435
  misc_feature (1)..(1): n is a, c, g, or t
ntttaatttactggtgcaggtaactcactgagaaggcatttaaccttaaagttaatgatatcagatctattccacagtgtatgtgcctccaattgctttctacagcactgcacaaactaatattacattctcattttagtagtatctgtgggcagaggggagacattatcctcaactataacctgtataacacgtttgccaacttcagctgccttcagtttcaagagctgtaggtgaggaaagcaggggcaggaccagatgacctcagagagtggattcaaggagaaacctctgagagccaagagggagggtctgcttcagttgtgtctatgccagagaagcttcattttgcctttccatatttatacaaatgccacctttaggatgtgcaggggggttttgctggtgtatggagatgtgtttctaaagggggatggggaagactacagaagtactagacatctttggagaatttaccatcatctcagagggggaagtcctttctaatcataattttaaaagtcctaagatttttaaatggataaatttagctacctacatagcaaataactgcatggcaagattcaactagcaaagtgaaaacatgaaaaactggaagaaaaatacaaccatgttataaaggtttatctctcatttaatatagagagtttccacaaatcagcttcaaaagtctaatagcaattagaaaaatggcaaaaaatatgagcgcatagttcactttcaaaaagtaaatatccctcttgaataaatgaaataatgcccaagctcattcatagtggaagtatgataccaagataccagtatttattatcagactagcagggacccagagatttaataacatgctgaggtga

SEQ ID NO: 47834 - DNA, 1422 bp, Bovine  19866881281647
  misc_feature (1)..(1): n is a, c, g, or t
ntgttctgagagttaatgaatctctagtgtctagaacagggtctggcatttgataaattttagttgaattaataaattcactggggagaggctaattaatttcaaccaaggggcagtgaagaccttggatgacatccgggaaatgtgactttaagttaattagaagacattcaggtggcattgtcaacatggtgatatgctacccagatcctccctcgaggaaagaccagctccccagctgcaaggaaagctttcaacagagagtctgcagtcatgagctgcttcaggatctgcctccaacagccagaatcacactttccctcacatggcattgtacatctactgtacaaagtgggagtctaagaatatggtcattcagagcaactgcaggtctcttctgataggcagtaattgctctgaagcatcccattgagtcagctgagattttctcagcctgaaccatgatccaacatttctctctgcccaagcattcttcctctcccttcctctcataggtgtcaatgcttaatgataattttacacacttaactctgttctctgcatccacttctggagaatgcaacctatgacagcagggtcatgctccagagaaatggacatgtcaacttggacttgaggagagaggtcttggcatggatgccttttagggagtgatcgccatacatggacaccaaaaccctatgaatctgtacttttttaacagggagaagaactgtgggaaatgaaaatagaaaacagaaatagtaagaaagaatctgaagaaatgccagcacttaaggatgaaaggagagtccacagtgtaacacactgacccgggaagataggatggaaaagcatataccatattttcacttaggtgacattggtatccttgaagagaaggatatttcaattactgtattatgaattgtgtgaacaagaaaaggggatggttaaagatattctttacattcaagaactttggacaaaaggagagtattgctacaatggcaacacataggtaacaagagggacatagagaagagaagaaaaataccagcaaaaggcaggcatgtcagggaggagagatggcagccaagattaaaaactgccacaggaaaggaggtgacagtcactgccaggagtgatgtgtaagagaagagcataatgccggctgcaaggattcaggtaaaacaaaaaaggctaaaacacctatgtaaagttgacataagcagtagcaacctataggaagaacacatttagaaagcatgcactgtttcatcctatggaatatacctgagagatttttttttcctaaaaatgaaaaacccaaggagctattcaaacaggacattatcaagccatggaaagcttaacaggctactgtcctactgttgcagacaaaaaggtaatattttgagg

SEQ ID NO: 47835 - DNA, 738 bp, Bovine  19866881312126
  misc_feature (1)..(1): n is a, c, g, or t
ntagaacctgttgcatgtaatcctctgcctagcagactgtcaataaatgtgttgagagcaaataatatgacaatgtaaatcacttatgtgacacatatataatgtacttctctgagctggttttgacactgtatacgttgggcattgatatttcattatttcagaatctttttctttgcacaataaagtgttaaattagttttaagagtcttgaagtcaaagaggtttgaggatgtttgaaagtatagtaccgtgtctggagtattaagtgtcagtagcaagagggattatcttggctcatggttgaactatttttagctgcaatattgggcagtgtcagagtataaagaatctccttaatcagagttgtcgtttcaataactacacagtaccatgaatttaggggcatcatttgactcactgtattttgactcaaattaaaatgaaaaaaaatcattgtatagttaagtagtttctgatgatttgtattttgtaaaaaaggcaaaacaaaacaatagttaaacactcaagctactatcttaaattaatgaggtagttctggctttaagaatttttggtctgggctctttccaaagagaatgaaaatataattgccaataaaattcaaggaattttgtggttggaaatatatggtaaacaccttctcttagctggtctggaggttaggtttctaagaaatagagtactaggtaattttttctcggcaagcattaaatt

SEQ ID NO: 47836 - DNA, 724 bp, Bovine  19866881366497
  misc_feature (1)..(1): n is a, c, g, or t
naaaaaatctgaaaaagaagagatacatatatatgtataactgaattactctgttctacaccagaaactaatgcaacattataaatcaactatactttaattaaaaaatatagaaccaaatttaacacatgcaggctaagtagaaaaacatttagccatttcccacttgcatttcacttttcactagtttgaggttgttggttggttgttgttgtttttttttttttttttttaattcttcttcttatcagaaagctcctatttttcttgaattcctgccttcctttgaccattccttccttgcctctaccatgctgaaatccactatgctcttactttcaggccattcatgcacatctaaggcacttctgttctgcctacaaacaggattttgctaacatgttctccttaggttccacccattattgcaattattgctcaatcttctttctgcctctacttcaatgtctttatagagttcactacccattcatttttctctcaactttttcttattccttgcttttaggagaagaataagggaagaagagttgctattgttggtttttttctttttttaacagaaaaatccatttttatggaggatttggagttgctatttgatgtacagccagatagagtgcccttttgaaactggatggttttctatataaaagagcacacaaaagtacactttctaatgaagagcatcaaaatctactaa

SEQ ID NO: 47837 - DNA, 906 bp, Bovine  19866881480320
  misc_feature (1)..(1): n is a, c, g, or t
ntaatccttgagtcaggaagatcccctggagaaggaaatggaaacccactccagtattcttgcctggagaatcctgtggacggggagcctggagggctatggtccgtggggtcacaaagagtcagacatgactgaaaagacttagcacggatttctattcagataagagtgatgcagaaaacaaagtcaagtgcaaaagtcacagagatacatagattttgtttgctgctgtccattgaagacccctctgaggagcattctggggtctccccatggacccacaggtcacacagcagagactgtcagggaagcgatggcttgccagacctcttagcggtgcgcaaacatcccagtgggtgcagcctctcgctttgccgctctgcctgggaggggaatgagtaatgtgatttgaattggcaaaaaccatgattttcactttaaaagggatcttttattcttgaaccaaagccaattgaaatgccccgagcctgggcctttttattcagacaagaacaataagatcaatttccaagagaaaatgaggaaaggggagagagagatggcagctgaggtaataggctgtaaaggacaaagtctgaaattaaatattatggcttaaatagtcctgcaattcaaaccaccctgtctctctcccacctccacacccccacaatcttgcattaaagaaataaaacaaaaaactcgtcacagcaaaagggaagacaatctttttttctaatagcagaaaattctctctgcgacatgaatttgagctatggcgatttgatttctatggagataaagaggcagagaaagttagcgctgtttggaacagaatggaaatctggggttgaggaggaacggagggggaaggaaagctcacgcgtgctgccttattaggatggg

SEQ ID NO: 47838 - DNA, 1105 bp, Bovine  19866881498355
  misc_feature (1)..(1): n is a, c, g, or t
natcgcagcacgccagggcctccctgtccatcaccaactctcagcattttattaatgaaaaattgggatcataagaatgaactactttgcttttataagtgtatgattattaaataccagatgtacaattgataataaaaaataatatatttgggataatgaaaacatgaaaaatttctgtttgaagatagtctgaatatattcaattcacttgtggcatatagaatattgtcctttttgtatgtattattataaatgttcacataagaatcagggtaacctcccggttgccttgccatgttctggtatctgtcttgtgtgtttttatatctacagtcaatgaaaaggaatgttagacatatgccacgttctgtgatactcatcctcatataataagaactgcaatattagttatatatgaaggaaaaatacccttttccatttctaaatatgaactctcagtgttaaaggtcaatgttttcttaattcatttttagaatgctttcataaacatttcccagcatgactactttcctgaaaggtgctgcctcctgaatttaggaaggacatgattcattgaaatggtaatttaccaaatgttcggttattgtatctgcttatcaatattccttttagaatgcctgcaggagatgcaatgtctcattttctagtcccaagggacatcaggcaatttatgcataataactatctgttacatttctctaacacagtcactttgcttgtaaataataactgtgttttacttataggaatgtttaccaggatattaacaatttgttaaagccctgacatggagaatgtaaaataatataattcaatttgaaaacctataatttcaagtgatgtagttttaacacttttcttagtcaaggtaggataaagcaactttcctgtcagagatgattggataatgtgatacattacctgattaccaaatgattctgggaaaacaacccatttctctatattaatctgacttgtttagtgttcttcctctctctgcattcagatgaggtgctcaacacccacctaattcttttttatgtgcattggctgtttttttacaacatcattttttcctaaa

SEQ ID NO: 47839 - DNA, 1030 bp, Bovine  19866881501243
  misc_feature (1)..(1): n is a, c, g, or t
ntcaggcatcttgccgggaaaggttccatgggcagaggagcctggcgggctactgtcccatggggtcgcaaagtgtcaacatgtctgagcaactgagcatgcatgcaaacaccacattgttgtcattaaaaggttactgtgcttctgggccctgttactgttggggagtcactagagggaggagactgtgttgctctatcacagctgccttcaagtctaggtggaaatttctctccattctcaggagcctgtttgaacagggataggagacacatcaattcagttgtaaaggatctgtaaaacaagccaggtgaaaaacagcaggcgaattacagactatgccctggagaagatgtaaaatggcgtgttagttttatacaaacatccaaggggctggatgtctgcaccacagccccagacttacagaagcaggatggatgaatgttatccacaggaaagcagatttcgaaccaacgaaggatgaacacataacaacatatagttcaaatcataatggttttaagagattgtgagctcttatcactgaagtttccaatccttacatcatccatttatttattcagtcaacaagtaatgatttagtgccttctgaatgctctatgtaactgtttctatttaactccctagtgtcttccctcatcactcatcctttctattatcaaaccaagggcaccgtgacctttcattcatcatcagaaacatccattctctttccttcctagaatactctttgcctttcttaattcctagtcatctttcccaagatactttccctgatatcaaaacctgaataaaatcccacatccctccagctttattgaccataaactgacaaaccattaaattctcccattatgtgtgccagtcaatgagttttaataaatagatgtagttttacaaacaactctcccatttggctttgaaatgtttctgttatcccccaaagttgtagtatatccatctggaaggaatctccattactagaaccaggacaccattgatatgcttt

SEQ ID NO: 47840 - DNA, 1526 bp, Bovine  19866881742411
  misc_feature (1)..(1): n is a, c, g, or t
nacagagattggagaaaagaaaatattgggaaggctgttattgcaatgaactcctaactggtctctctgcttccattcttgaatcttcaatcaattctcaatacaacagtcagcatgatcctgtaaaaacagaagtgaggtctcaccgctaatatgacccatccaaatagctttctctttcactcagagtaggagccgaagttaccacagtggcctaaggcctgatgttagctgccactcgttcttgctccattacttttctcttttcatcccctactgttgtttcccaaactcactccactccagctatactgttctcttagttttttatttaatttaccagacacactctctcttcactgcatttacacttgctggtctctgaaatgcttttcttcaagtgctcactcaatttctcatttaattgtatttatcacttaaaaaaaataaaataaacactttcttggagctgagaatgcaaaaatgaacaaaacattataaaatcactgtcttcatggagcttatatataatgaggtcggtaaaaaagaaagatatatattcatactttactactttactattactttactatttactagaaatgtaaataccaaggagaaaagataaagaaggaatagagagcagaaaatataggggatgagaagtacatggagaaatgtgaaacagagtgatcaacttctacaatgtgactcaagtgttaaaatttcaatgaaactttctctactctattatttaatattgcaaagctgctcgctgacaaaagcttttaatatctcttccctgaattattttttgctatagcaactctcagagaaggcaatggcaacccactccagtacttttgcctggaaaatcccatggacggaggagcctggtaggctgtagtccatggggttgcgaagagtcagacacgactgagcgacgtcactttcacttttcacttttatgcattggagaagggaatggcaacccactccagtgttcttgcctggagaatcccaaggatgggggagcctagtgggctgccgtctatggggtctcacagagtcggacacgactgaagtgacttagcagcagcagcatagcaactctaactatctaacatagtttacattttagctattaagaagggattttttactattttgtttgcctttgtatacccacaatctagaaaccatgcctagcacatggtaggactcagtaaatgcttgttgaatagatgaatgaccaaagtaaggaaatattatgatattaatttaaaagcagaatggaaacatcagaccacctaagccaacagagttgagggcagtaagtgaaaataattaatagggaaagttgacacacttgaaattaacacagtattattaaacaacatgctccaatgtaaaataaaaattaaattaattgaaaaaatgaaatatattcagaattctctgacaacaaaaatagttttcaattttagaaaaatacatatatggagatatgagggaaatcacacttg

SEQ ID NO: 47841 - DNA, 1026 bp, Bovine  19866881897716
  misc_feature (1)..(1): n is a, c, g, or t
natttaatctctctctggggcttcccaggtagatcagtggtaagggattcacctgccaatgcaggagatgtggatggaacccagggttccatcccctgggtcggaagatcccctggagaaggaaatggcaacccaccacagtattcttgcctgggaaatttcattagacagaggaacctgtgggctacaattcatgaggttaacaaaagaatcagacatgactgagcaaataaacaacatctttctaacctcattagaatgtcaggatgtgagttcataaagtattattattacataatttaagacatgatgttaaaacattttgagtaatgtagtaaagtgagtagccaacaaccctatggacacagtcattaaatttactgtacttttaagaaatataaaagattggtaggttgactatctcttatatacaatttgaagtatataacaaaaacaagccttttcagaagacctagttcagaccatttcttataaagtgtgcatatatatatatatatatatatatatatatatatgttaacatctaccatggattcagtaagacttgaaaacattactagccctaagtatagacatatcatgaaatacatataattataatgtaatctattttctttattatttaagcaaaatttcaagagttaacaatatgatttctaaatatttccatcaagttaacacttcatattattctctttggtgattgcctccttgtctttttctttgttgttatttttattagcaaactgaaaatttagtaaaataatgttggatgttcctatcttgctaggaaaattactatcaatctgagattgtcatcaatattgctgctgagatttcttattagaccttctggaatatgaatttcttcctccaaactccaaggctggagtcatccaacatatatgcttgtctggatgctaccaaaattttatctgagccagtttacttcatcaataatctcaaggctgtaagacatataatacaaccctagaaaagaggcaa

SEQ ID NO: 47842 - DNA, 1669 bp, Bovine  19866880417098
  misc_feature (1)..(1): n is a, c, g, or t
ntgctctgttaagttgcttaatcgtgtctgactctgtgcaaccccagagacggcagcccaccaggctcccccgtccctgggattctccaggcaagaacactggagtgggttgccatttccttctccaatgcatgaaagtgaaaagtgaaagtgaagtcgctcagtcgtgtcatactcttagcagcctgcagcctaccaggctcctccatccatgggattttccaggcaagagtactggagtggggtgccattgccttttctgtaagtgctaaataagttctacttatcattcttactctcctattcttttgaaacaatttataaactgtttctacataattataaaataaatttttaatgaaatgaaatttaacattagaaattatgtaacataaacaaaatggcatgttttacaattgaatattaaaaaatacttaactaaatgaaaatgcatcctccataaagcactataatttctgcaagggcatagataaagttacattcaatcattatatttctatcacttagccagcgctaagtgggtgcttagtatttattgaattggacctatgcataataacctggtacaagggcttccttttttgctgtcatcattttgaaaatacaattaatgtaagctaaaaattaattttaattaataacaacattaccttacacatagtggccactcaccaagaatttgctgaattgcctatgaaatcaaatagaaaaacacacaaaggtcatggaaataagtaattaccttttgagaggtgaatagggcaagatgaattattcatcaccattcctgtactactaaataattgttaataaatgacttatcaaatgtcagcaagaaaacaccacttaaatatgtaagtaaacacaactcatggtgatctcaattagccagtaatttaaagattatgtaacaaacatacaaatatatttattttcttagtgtgattttttttcagggaaaaaaataaaaaacttgttaagtgccttttttttattgccaggcatttttactacatgataaagaaagaaaacacatgccaaaagcaagattttatttggagaagtgacagcctagtgacagagaccaatgcttaatcaaataattgtaatcctgagaaatggatgctgtatgatatgtccaagggatatggaagcacacggtgtggaatgactgtgtcagaaggatcggggtaaacaaaggagatttttcacttagtaggcaatgtttctcatgcagaaaaaaagagaagatacagaccaagaagtactgctgtgagttagtaaatgcacttggtaatacttaattgcaatttcatcaatgatgatgataaggctgaaagacagatgttattatctttatgtcaataaattatttaagaaaaattaaaatttatatatgttaaaagatgaagaattagattcagtatcttcagtctttaagggcaatttagatcccactatcttaggcaagaggatatataggaaggaataaaagtgtggaacagcactattgaatgtggctggcatacagactgtgtattgcaggcagtacctatggagagatggcaaccagtgagactataaataaaggtaaacatacatttgggcacaaagagcatctatacttctagtagaatttttttttttc

SEQ ID NO: 47843 - DNA, 1082 bp, Bovine  19866880503297
  misc_feature (1)..(1): n is a, c, g, or t
ntctatggggtcgcacagagtcggacatgactgaagcgacttagcagcatcagcagcagcaacacctcactgcttttgtgtttttaataagcataggggtctggtccatacaagagggttagcaaatggtattaactggaatccagggattttgtaaggccttttttacttatcaaatatgtcggaagagtggtgacatttttccccactaaaatgtctgtgagaacttgggataactgtatgtgtccatcatgtccttcacatattagctctaggtcacaaaatattcatatttgtgcatctttatgcatttgcaagtagaaattcctccaggactttgtaatagcctggctcagtcctctaactgtgaggctgatcaggaaattgagaatttgaggaaactcagtgggaattacaatgtccaatttaagtccaactggacatagttttcattgggcacagatagaaccaaaatataccacctttaacttgattctccacaggctaatttagttttcctaccaacttttgaagtttgaaaagcatgttacagtaaaatctccttcatcaagtaaagaacaggatgcaaagtggaattccattgctgtgtttaaatagagtatcatatttttaaaataatgagaaattttcaaagaagaggactcatctatgtgtgctgaaaactaatctgtttgatttgcaaatatcattctttctaatgggaaagatttgaacaaggtaattttaggcaacaagactactttagctatttttgtctaaatttaaatttaaatgaaagctcagcaatcactcctttcaaactagtgtttttcattgttattaatttattttgtcaacagtgtattatagactaaatcagtggtgctttttaaaaatagtattgttaagtaaagggtttattttatttcttatctgattacataatgcaagccacttctgaaagcttaacagaaaattacaaaggcttctctgggccaagataggggaactaattcaattataataaaaaggatttaaacccaagccataagagttcttgcttttattgattatttttcaag

SEQ ID NO: 47844 - DNA, 1396 bp, Bovine  19866880522767
  misc_feature (1)..(1): n is a, c, g, or t
nttggctttattgtgcttcacaattactgtgttttttataaagtagagatttgtgacaaccctttctcaagcaagtctattggcatttttcaacagcatttgctcacttcatatctctgtcacagtttgataattctcacaatatttcaggctttttcattattattgtatttatcatggtgatctttgatatacatattgtaattgttttgatatttttttagcaatagaatatttttaaaatatatacattatttttaaggcataatgttactgtataatagattgtattatagtgtgtacgtagctgttcactaagaaaccaacaatccttgagtaacttattttatttttatattcattttattatattgtcctggagccgaacttgcagtatcattaacatatgtccgctttggcaaatgtttgtcttttgtcaaaaaatggcaaaatgaaaattgtagaaacaagttatttcttgggcaggttcctcttattaacaataagtaaatcaatataaggattgaatgatctcttatgaaattatcagtttacttttaaaaagtaagaccaatttttattttgtttttatttttgtgacaatgtatataaatgtgttttatttttactaaatgatagctgtgaaatcaactcaatagacttctttatacacttgtaaacttactagcagctttaataggagtaacagctgaaaaaacacccataaatgaaaggaacattttaagaaatatactaagctttatgttcaacggtttttaggataatgttcacaataaaattggaagaagagagtatggatttccctaaacatagagattgtgtcagtattcccataatgttaataatttttaaattcaattaatacaatgtgacatatagtgagtacaggagaaaccttaagaaatccattaaaattaaaaccagttttgtaaaaatgtgttctctcttaaagtttaaaatatctgtctcttaaagactattaaaactttttcttcttgctatttaagttatagagacacataaagttgttacttggctttctgctcagagtgataactgaatgcatttctatagatctcctcctttcaaaattatattgatatgataaaagtaatattcaaataaaatagctccctggcatctctgggacacagaaaattttcgtagactagaaacacttaggaaattgtgtaagatggaaaagatagattggaggggttgagaagtggaattccatacctccgtttcactgtgaaatttccatagttactctcttcgtcaacttagtggtaatttcttttgacttttcagttttgttcatgttccccttttggaaactgctggcatttactgtgtgtttttttctcctcttaca

SEQ ID NO: 47845 - DNA, 1181 bp, Bovine  19866880895641
  misc_feature (1)..(1): n is a, c, g, or t
nccaacttgttgcttttacttaacaaaggcccctgacataccttcattttcccttgtatgattacttattaaatccctatggtatgacatttctcattaaaggaataaatgaatgtattttcatacctttgccaatgtaaaatgatcaaatctctgcattaatgactcacatcaaagacattagtctaaatcacaagtcataaaatgagaagccatattaaaataaaaagtataactataatggttgaaaataagaacaaaaagatgtgtatgtaggaagagctactaatcaaaattactcactcagaatttcttacagagggaaatgcagaacagtttaaaatgaatgaacagctcaatgagcaggcaaatgagaatgattagaaaaacacattctcttactgaaaaatagaaatatgtaaaataaagtatatatgcattttacacacagtttgttggttttctttaatggattctggctttttagctattttttaaagttagtactttaaaattaaaattcttaggttgacttactgatccctcaatttccttttctcattttccttcccactgccaaaagaaaacaaaaatacaaagttttttgctctactctagagccatctctaagggaaattacaagggaaaccaagagaatgtgtatgcctgcttatatgcaagagtattaggcagggtttcctaagaaacagaaccaatacattctctctgccctcctcatatatgtattataggaaatggcgtacatgtttgtggaggaaaaaaagtctcacaatctgccttctgcaagttgcagaacctggtgcttttataccagtaaaaaagctgatggtacaaaatgatgagttttaaggcccaagaacctggagctctgatgtccaagggtgagctccgatgtccaagggcattctagctcaagaaaagagagaattcatccttcctttgccttttgttctatctgggtcctcaaaggattggatgaggctcattcatattggtcagggcagatctctttactcaatctactaaatcaaatgctaatttcttccagaaatgccctcaaagtcacacccagaaataatggtttatagctatccggcatcccacagtccagttaagtttaaacataagttaaacattcacaacagcacactttacatata

SEQ ID NO: 47846 - DNA, 793 bp, Bovine  19866881089383
  misc_feature (1)..(1): n is a, c, g, or t
naaaaatactccagttaacactgcaagaaaagagtaaggtttcaatataaaagtattaactccaaaacctatgctacttgattatattacaattctttttgttactttaaaatttaataaaaaggtgaaaaatacaaaattacatgtagaattatagtaaaagctggagttgtttatgggtcaggtgcaggataaaaggaagcatttcctggattgaagcagttcaacatggaaaaaaggtagcttaagcaaacagtttatggagtatttaaaacctaaacaaaaaggttttactccgtatcagtatcaatattttcttcaacactgaacaaatacttcagtgattctcagaccagtatatgagacaaaattactccaatgtgcaaaatcccattttcatgcatagcatttaaatcagatcactaaaaacatacagggtttgaaaactttgaaacagtaaggtaattccatccaagccaaagaccagaatgaaaaagcatagggacttaaaccactgtgcagtctttcagtttgtaaactctagtttttattagttcatttgagaatgacctaattttcaatgatctctcaagcacatttacctgtttcatccccatatgctcctaataacttatctaacccagctagtacaagtttgcattactcctggaaacattctgagaagtgatagcatttccagtgaattaggcatgccttttattctcgggggaccttctgtgtttaaatgaatactcacacgcttcattacagtatctctaaaatacatgcaaac

SEQ ID NO: 47847 - DNA, 1508 bp, Bovine  19866881162092
  misc_feature (1)..(1): n is a, c, g, or t
nttgatatccctatcctaaggcactgacagtctttaatgggcagcatgcctagtagatatggatttagtatgaatatatagatggaatatttctacttaaaccttatgccagtcaagttaaacttttgtagatatgttatgttattgtctctgaaatgtgtttggttgaaatccaaggaagtcaaatgagcgctagtcttagaaatggtttaatttggcagacactgccacttccataaactgttcaacaaagtcaattcttggaatcattataactttaagaataggaattaaagaactatgcggcagatgttatatgtagctgcagtaaacataatggaaacatttgcacatttcattataaatagtactatttctccaggtgcctttccatagtttcaaatgtataccatggcagattggcttatccattcttctctactcttgtctcaacatattctaaggtaacaatgcattgctattatcaggaaatctctaaaagcatcagttaaaatggatagtgtcaattggtttcattaacaatttaccaaaatatttcagaaaaaaatatgaccactccaaaatgtggtcataaagacatctctcgcattttaatcttgctagctagctttatctatctagatttaggtaaaaatatttcaagctacagagtagttactgctgttgttttcttacatctgagacttacagaattaatttgaaaacaaaataaaaaacagctaaaatagaagaaacagtgtcaagaaatttatcacagtgtactagggatagaatggaaattccttctgcattataggagtttggtatgtattttgcaatgtgtaaatggggccattggagacctgcaaattaaagatttaacatcactgccaactgaaagagacaaaagttgagtacacagactttttttattgttagttattttctttttctccaacaaagagaatgtactttttcccttttttttgtgatagagatttagaacaatgctgcactgtaaaactgtatacattgtaaaatgctcccatttatgaaatttaacttgctttcaattagtttcttatgagtaaacatttgctttgaaaagcaattctctaatttgaatcatccctgtttaaaggaaatattggtagtttcctgtacagtgtaattctatatttttttctatgtcacatgggatttttattattgttaagtaatgctatttggaaatttattggtttatcccaacataaaagaaaaccatgaaatttttaagtgctatgaaatgccattaaactgtgtatagaggatcaaagttgatgaatcataaataatttccagcatattatacatcatggaaatgataaaaattttaagaggtaagcccagataatcattgtagaagactgtgtaaaagggattggaaaagggaaaccaatgccgtagtccttgactccctctgtgaatccacttgccaggtcacctgacacataatccaatcattt

SEQ ID NO: 47848 - DNA, 1620 bp, Bovine  19866881056454
  misc_feature (1)..(1): n is a, c, g, or t
ntcctgtaggttctgtgagctgctctagcaattaataaaaccctaagacgggcatcctcggaagctctgatttatagccggtgattttggaaaggaaataaggatgaggggatggttgttggtggagtcaaccatgtgattagaagattgaaactttcaatcccatcccgacctacagagagaggagaggggctggagcctgagttagaagcatagttgacaaccatgacccgctgttagcatctggagttggaagagcggaggggaagtcttgcgagactaaacccttaacttgaaagccaaggcagggggtctttggaccctccagtccaaagccagatggtcagaagctcaggtgacaacctgggcctgggactggtgtctgaactgggagaggggcagtttggtgggactgagccctcgatattgtaatctgataccatccctgggtagatagtgtcagaacggagttgaattatagaacagacagctggtgtatggagaatgtcttgatgatgtagggaatacccccaccctggccacagacattggaaactggtattcagaacctaaaatatggatgagttggatagaagtggagagagggagaggagccatggatgcctcccagggcttgggtctgagctcttgcattggatagaatggtgcattttgtgctacgcaggggatgttaaaatcacattcaagtctgacttgaaacatttacaaattgggctgcacaccctctaagcgagtttatcatattaatgaactccttcccaaaataacccccagcatgacaatgtcccagcgaggagagaaaccttatttgcagataattcacaacgctgactcactagggttcagagatggggattttaattattgttgttaccatatttttcacagggatgaacatgcaacagaacaagagggaccagcaccatgctgtttctgagagcagaaccccagtgccctctgggacccccaactgcgtacaactgggttccgtactttgagcttctccagtgatgtagaatcttcccagagcagcccaaatcatcagctcttgacagaaaggggtaaagaggagtttggaggccatgtccttgagaaatggtcaaagggactggggacattcagcccagataagagagggttcagggaaagtgtgagagctgctttccactatttcaccttgatacacaggactatgatcaggagatacagggagtatgatttcagtttggatttggaaagtacttttcattaagccctaatgaaatgggggaaattgtggagatcctggctcctaccacttacccttccagcaattctttagctgaccagcctataagccaagatgggatctagcttctaccatgtccatctcttcctgcttatccagcttgaattccagagtccatcattttaaacattcgtataccctccactccttgatccactcactcttctccttcattctgtgtttctgagataactccaatcctagttagatctcagtctatcttgcacatgtatacaaagttcatcttggctggaaaaaaaaatacattgaattatgttgcctggtctcacttgaaattcatgaccaaccaa

SEQ ID NO: 47849 - DNA, 1554 bp, Bovine  19866881121233
  misc_feature (1)..(1): n is a, c, g, or t
nggcgtttatcaggggtcagtcacagagtcacctccttgagacacgtacacaattcctgactcccggaaaagaagcacagaccacactgttggcacactctaagtcccaggagcccttcttctcactcctgggaatggtgtgttccctccccaaatccaagttccccaaggccaagcccaggactcacctagcaagcaagcctttcagaggctagaagtctcaggccagacatgttcactttttctgcacaggtggcagaaaatatccacctgccaatgcaggagacacaggagaccagagttcaacccctgggttgggaagatctccccctggagaaggaagtggcaacccactccggtattcttgcctggaaaaatcccattgacagaggagcctggtgggctatagtccatggggtcacaaagaattccgcacagattagcagctgaacacaccctgtctttggagaaggagatggcagcccactccagtattcttgcctggagaatcccagggatggaggagcctggtgggctgctgtccatggggtggcacagagtcaggcacgactgaagtgatttagcagcagcagcagcagcgccctgtcttggttctgctatttaggggacactaggtggcgccgctgagctgacataattttgtcttgtgtgggcttcccttccaagagcctggtctgtaaagacttctgtaatgttttcctcccggtgccggcgtgttcagtagtgtggggctgtctctgcaaatccctaaggagttaactagcatgaattgctctgtgatgcaacggtgtgtgtactctggcccatccacccatctatgtatgagcattgttacagccctcctgagaaaaatttgacatggattaatgacaacctctatgaatcaggcaggaacattaatatcgtaaaacaggctacaaggtaatttgcctcccattgtctggcaatttcctgtcgtcctttggagctcttctatggcagtccctgcggctgggcattgcacggttcagttagtcgccaaagcttggcccctgtgttgctggctggggagatagtggtaagttattcatggcttcgtagacctgagaagtaaacaagtctagaacccttctttcacaaggcagaaacaatgatgtcaaaaccccccacccccaccagtcaccccagcttctgtttgtgtgttgtttttttttttttttttggaattcttgtggatccagcactgtcctttatgttcatcttcacattttaaatcctcatggtaactctttagggaggaaaatgatttcatagatgaggggccaaaggcacagagaggttgagcgacttgctcaagatcacccagcagaaaagtggccaagctgagagctggatgaaatggattccagggcctttaaccactgagaacccggccctcagaggactgaacaatacaagtgagtccaaacccatgacttctcagctctttgttgagtctctgttcctttaaccctgtgacctctatttatttctttgcagtttgggctctagtta

SEQ ID NO: 47850 - DNA, 634 bp, Bovine  19866881311131
  misc_feature (1)..(1): n is a, c, g, or t
ncgctgagaagagggcaagggggtctggttgagcaggaggatcgtgttgggtttctgccgtgacccctgcgggtaatctcagcctagggtgtccccgtggccgcggagttcaaaagccgccgcctcttttctccccagatgcgcaccggctccaccatgtgagcagcttggcctggctggatgagcacacgctggtcacgacctcgcacgacgcctctgtcaaagagtggacaatcgcctactgaggagcccccctcacaccaactcgacaccgaatcagggacgtggggtgaacgcagctccgcctctgtcactcctctctgccccgcccctgccccgcctcccaagggaggggcctcacctcggtcccaccccaccctgcctcctgggggaggggccgcacctcgtgcccaccctcggccccgccccctggagggagggggcccaccgcccacctgccagctcgctgggccatcctgtctgtcccaagttctgaaagctttagaccctgaccgtttgcacatgggaaattaagcgggcaccttcaaccacgtgtggcgcctgactcagacccaccgcttgctgcgcagaacattccagaggcagagcctccaaagcacacagaccctcccgt

SEQ ID NO: 47851 - DNA, 985 bp, Bovine  19866880687041
  misc_feature (1)..(1): n is a, c, g, or t
ncctgtccatcaccaactcccggagttcactcagactcatgtccatcgagttagtgatgccatccagccatctcatcctctgttgtccccttctcctcctgcccccaatccttcccagcatcagagtcttttccaatgagtcaattcttcgcatgaggtggccaaagtactggagtttcagctttagcatcattccttaaatttcatactttagttaaatgaaatgaaaattgctttactacacagagttctattccccattaagatgttgcaaacaagatgttcttatgtagagaacaatgtgaaacactttttcagagtgtctggtcttcttgattttgctaaagcaagtatgatcatgtttactgaagggttaatgctgccccactgaattgttacattagagatgctctgagctactgcttttagctagagtgaataagataagaccttttctaaaggtgaactaagatgtttaaaagtctgcttattcaaggcaaacaaaactcagaggattcattaagtctggagaacaccagaacattacagaatcttatttctttataaaaaggcatatatgtatctctttttacaaggaatactcaatttcatctaaagagaaatttggtgatcaacttatatttacacagcctttagtctgaggtgtgttttagttttaagtcagcatgcaagtccatgtcctcccattatggagaagtaaagtcatcagttaaaaaaatgtaaagatcctaaaatgagtccatacttccggagacattcacgtgtaaacattaaaaggcgtacaacctaggtggccttttcagcagggacagggagagggctttgagaaagatgggcagaaatgatatttcagactgtgagctgcttgtggcacaaatactgtgtgcttgtttttaaggaactagggcttctctactggctcagtcggtaaagaatctgcttacaatgcaggagacctgggttt

SEQ ID NO: 47852 - DNA, 1594 bp, Bovine  19866880861345
  misc_feature (1)..(1): n is a, c, g, or t
ncacccatcgatgcaatctgtccgcagagaaacaaagcagcactgctgccatccttgtagaccttccacaacgggaggggacggggtcagcactgcaaaagcgaggggaagaggactgagggaacgcagaccatcttaatgtacacatctatgccttcaagacaaaacaaaatacactcagagcctttcatgcaatgccaacaacatggatgtgacctcttgaaaaacttaagacatgggctctaatagacattaagcaggaaaaaataagctgatttcaggaacataaaggacactgaaagccaaattttttactaaagtattattgaaaattgaagttctaatttgtcatttgcaacttttcaaagaaataaagcaaaaaagcaaaaccaactgtgggaaaaaaagaaaaaaaatctcacaagtttctccccagagtcaaaggcagttctggttacatgcactttgggatgctcttccccagagcatggctaaacggaaatactgggcagcatgctaacttctccctcatgccccgcaccaactcctattcatgccatcgtctctgctcttctctgcgctccatttctctttttgcaagctcaagaatggcagctgacttatctctgcagcccgagtgctggcacagaaaatgaatggtacattcttgatgggtgagtagctgaacaaaaggatgaataaacagaaagccttctctcaaacagcaaaaatgtcctgtgagatatgacaatttaccacaacatagaggcctgtgagcacaaggaggaacatctcctggtggatctcactgcctaacgcagtgcaaaggaacagctctccctctctctgtacataaggcagacgagacaattctctgatagcctatgacagaaaggaaacaatcacactggctcaatgatgagttccccaaatttaaaaccaagggggaaaaacaccttcttaagcatatggtgttaaacactctatgcaaatgaagaatgaagatcactttcacacaatgattcaagtagactaaaggatgcagagagccttcctcttcctctccattcccaccccaccagctccttgtgccaatcatgtggcacttcctatacactgctctctctatatacctggatgccacaatgaggctggatgctcctcaaatgcagtgatatacttgttcctatgcctctgagtgtctagaaaaaagcagatgtactaaaaatgaggacgagatggttggatggcatcaccgactcaatggacatgagtttgagttcactgtccaagagacagtgaaggatagggaagcctggcgtgctgcggtccacaggatcacaaagagtcagacacgactgagtgactgaacaacaacaaattctctctatccatcctgtcctcttctcgacttgtaatgttcaaacagcaatctctcaatcctttaagacccagatcatatcattcataacatttttccaaatcccctcaactaaagtcaaaggtctttggctttggacttctctcatggcccttctcacattttgatgttatcccacagctttctgtggtcatgcactatgtgaagcttaag

SEQ ID NO: 47853 - DNA, 1525 bp, Bovine  19866881096791
  misc_feature (1)..(1): n is a, c, g, or t
nccagataagcagaggaaatgagggcctactgcagaagcacggaaaggcaggaaggaaaagatggtgccggctcaatacagaagatgctgttctgtttaacaagggatgaaggccttcaaggaagcggaaggaaagaaccagtgaggggggggcacgaatccctagagttctaaagcagaaatataatgtccaaattaaataattcaacatttattgagcacctactgtatgccaaacactctacttttctctagtggcacattggttaaataaaatagcccttactttttagaatcttttggttttagtaggggagacaaacaaaaaaataggtaatcatattatgaggcagatatgacaaactttattatgcagctatgaaaaaacttggtaaggattttaaagctaaacaatggactgggataaggttcctgaaaatggagattactgaaattagttttgaagaatgagtaggagatggcttcaggaagtagttatttcagaggaagaagcatcatgcagtcagtcgggaatgaaatgttaaagattcagtatgtcagtatttatacacatatatatgatctctggacatatcttaagacaatactaaatttatttatacatccccatttttgttcaataacagactgagcgaatgcctaaaactgagaaacaggctttaattgactgtaatagttgacatgaccacagtgcaagcaaagggccacttctcctttctaaaaccttctcctctgtctacttgtcagcacatttttctgatggaacttggagatgacaggaaaaaaatatcaccacaggaaacacattctacatgtgactttccatatttcacttttggaagagggtcattagcaaaatagtaatcttaaaatttctaatactggaatggcttcttctcatcttttagccatcatctgtaaagcacattttttttttcttttttggaaaaagactatttcagaccaatatatggcaagtagtataagaaatgctgtgctattcatcttatgctgcagttggtcactccagtgagcaggcttgacagtttgcagatgaaaatgtaaacactgagctcaactcagttattctgaggccaaccatttctgacagtctctacaatgtgataaacaccgtctgtctacagttcctctgtatttgaaagttacaacaaacattttgttgaaatgtaaacaactgacttcatgactggtgaagcagtggcctgcaaatttatctaaaatcaagaaaacaaagatcttgtttgacactggataaaccattagtggtcaccaagggagcagctttgggaggtcataagtgttgtcatcagtcttgaaaaaatatgcaccgaaggtattgtcacaacttacttgaggcaagaataagtaatatgagagacaaaagaactacaaaccagtagaaaaagggtaaattcttcttttactctaaaggacagttttaaccagtaaaaaaagggtgaagctctctctttaaaggatagtt

SEQ ID NO: 47854 - DNA, 1175 bp, Bovine  19866881372017
  misc_feature (1)..(1): n is a, c, g, or t
naagaaatggtctccctcttctttgaactctaaaacactttgtctgcacctctcttaggagaagtatcaatttttgccgtggtttgcattgacagcttcttgttcttttatctcctctcacgctagtcttttcaaggtctctaccgtggctctctctcttccacaaggtagatgagaagtctatacacacagcgcacacatgttacatgagcagtcactttgtgtatctgaattttgtggattttttttttttactgtagcaacaaagcattttataggagtatgttactgcatggtttcttgaaaagctatgaaaattttacaaatttgtaagtaaagcttctatttgaatatttgggccattaatataagaaaagtttgtgtaaagctaattatgttgatgttttgaaggaacttcaaaccatagttgtataagagtcttatttaagttgcgacagtcatttcagtcttatgagagtcaggaattgatggcatgtaggaggtggctaaggtaggaaaggttatttattttaccctgatcacacacaacagttgggatttttgatagttgatttatgcatgctttttttttaaactaagacactaaagtggcaagtatatcatcctctccataatatatgagaacatgctgtaaatgtgatttttcatgtataaagcatgtactttctttttaaaaaatgagtagcaatttctcttctgtgttctcaaaaccctctgattatacttctgttatagcattaactgtgggattatagtgatttgttttcctaacacagtgcacttcccacctcagtactgtcattgggtgcatacccctagattaataaggaaacacagccttaagtgacacgaaactgtttattgactgaatgaataagatgactaactgtagtttggtgtgttgttgttcaatcgcccagtagtttccgactctttctgaccgcacggactgcagcacgccaggcctccctgtccctcaccatctcccagagtttgcccaagttcatgttcatttcatcagtgatgccatcagccatctcatcctctgacacactcctctctttctgcccttgatcagaagtgtagtttaattcccatgaaatacagttgtgtatggttgcttatgtcttctgaagcacagagattcttaatct

SEQ ID NO: 47855 - DNA, 4152 bp, Bovine  19866880358608
  misc_feature (1)..(1): n is a, c, g, or t
ntgaaagaagttaagcattgtaacaaaatacagatattataattttcattttaaaatgtatgcaaacattttaatgagtggtctttaagacatatatttgggagaaggctgttctggataaaggaagattaagcatgccttaaaataatgcaaatcttgaaaatgagtattttcccttttgtaatttctacactatttaatttttaactggcaatgcaacaattgactgtttgtaaaagagaaatatatatgcatgtgttaccatacatgtattactttgagatattgaatctgatcaagttagaaatgaaaacacacaagacagaaaaggtttgtactagtaataaagaaaacacatatagcaaaggttttcctcagttttctttattacaacaatggagacacagaagtacagaaaataaaatgacatttaatatactatgaaactcatgcataggattacacaaagtgctggatattatgtcacaggttttaaataagagatgatattgaggacaatacatatataacatacattttattttaagaaaataagctatgatgaaaacaaatgcaattaaaatgatcagaaataatcactttaaaacagaactgttatatataaaatcgatgttaagatgtgagataaaaaatattcttgaaagaagttcatgaattatggatgttctttaaaaacagtcattttcaatttcttactttttagggaaaaaaaggatttactagagatttatttcactgtgcccatttagtacatagataaatatggcataatttaaaagttatgttatctctgaatattatgcaatgttcccagtttataactacatttccattacttgaaaatggagtgataaagaataactaaattcaatttgaacatatacaaataaagaaagtttacaatgtatgtaggcttaagacaaccaacattagattagttcatacttaaaatttaattacacttgaatgagtatatctttaaaaagtagctggaataatagtctacaacaaagacaggaggacatcagttgcagttcaaatcacctcagattcactactagaacttttgaacatatgtgttttccctggctattttgtttttcaattttgctaactagtagctaaaaactgatgttctagaataatccactctttctgtaagatttacagacaggtattttaggcttccaattacttacttaataaccatgagggagggggaggatgactaccagagatctgtatctgattcataatcttaggtaagataaaaactaaggtgtttggaaaataaagcattgatattagattctcatctctgatttatttcagaacaatgaaattagattgaatccattctcctaccaaaatactgagatgctatttacttttataatcattatgtattatattaaatttttaagcaccatgtagtagaaagatatactacatacatcagcatgaatcatatggctgattcatgctgatgtatggcagaaaccaacaaaatattgttaaagcaattatctttcaactagaaataaataattaaaaaattaaagatgttaactctagaggattagtttagatggtggttgggcagaaaatatgttaattagatatttgaaactttttccttttagttaagacctaatatttactggtaatatcttctgcattctaagattatcaagcattaatagtgattaaatactacctcatttttaatgacataatcagctgatttaaatataggctttttaccaatttcaatttatattgaaatcattccagggcaacttgtagaatattcatatctccaatcatttgaaaataaatttaatctacccattcaatgcattaactttgtttaaggttttatgacatatatatatataccacaaattctgaaatttaaaaatttaacagcaattaacagaaaaggaacagaagaactgcatcttatttatccatggcccgaaattgagagggaaagagagagaggaggagcaaagggaggaagggagagagagagagaatagtataaagaaaaattaagaaggaagaaatgaaaggaaataaaaccaagtaagagaaagcttacttgatttgtacttattcaaaagtgggttaaaggatactacattatgtctcatagatttgaggaataataaaatacataaaatgacaaatttaggtatgaacttttcatctagtatctttattcggtgaatggaattctaatatataagtgctatgaaatatgtaaatgataatatttaatttaggtagtgcttccctggtagctcagacagtaaagcatctgcgtgcagtgcaggagacccaggttcgatttctgggtcaggaagatcccctggagaaggaaatggcaatccactccagcactcttgcctggaaaatcccatggacgaaggagcctgataggctacagtccatggggtcgcaaagagtcggacacgactgagcaacttcacttcacttcagtgtcctaagaagttatttatttaaaactcttagtgctactaataaaatagttggggcgttttagataattttatgactagagatgttgcttaactactataaactgaaaatacacataatattagttatttttgaaaggtagatacaaacatatttactctactgcattagtgatgcaaatattcatcttgaattgttaaaatcatttgtaatctagaaattttattattttattcatgtgtaggtgtataatgaataaaaagaatgcttttcatatatctgaaagtaaccacccagatctaaaagttcatggcctaattcctcctcaaatattttattttgttcaatataaataaaaaatcataaatctacctgtctggattaaaaaacagtatagaattttccttagttacattataatttaaattaaatataattaatgggaattattaaatagaaaatataagttgtataagcatctccaaattgtataactgatgaattactatgcatacttgtaattttaattattaatattaaaagaaatgctgaacgcccaaacagtcaaaattatgtgcaattatttttacataattgacatatatatataatatgttaatccaatctctagaatttatttatttaacattattaaacccttgagatactttaagctaattaaaaaaaatttaaggaaaatgaagtcattaagagtttcaatcattttcatgtctaccagcaaagaacgcaggataagtacataagtacatttgcataatagtttggaaaaaatatgggtatagggtttataaaatgtttttattctcaatggataacagtattagaacagaaaagacaaaaatgaaattaacttaaggttctcccatataagacaatatttttcataggaaaggttttattgctgcctcttaggcataatctgttaacatatctgaaatgtagtttgatcgaccttagagcaatctgataaataattagagcttgaattggggtcaagagatcagtagggataaatgataaatggataaaagaagataaacttggaaagggttggaagaagaaaaatgatttcaagtgtatataaaaacataatcagaatgctctatgtgcaaataatggtaactatgcataagcaaatcaacctaactttataactggtataatatggtctaagcaaactgttaaaatgatctaacatttgacgatacaatacatacaacaatgaacataggtacatatttctgattaaatataatgaataacataaaactcaccttacacacaagttcatatttatacatttaggcacaaaattttattgaaaaatccactggattaaaaaaaaatattggatgatgctaggagaatttttacatcttggttagcaataatcacatttccttagatctacagcagatttcaattagacaaaacatactgtcagacttgatggttgtacataacaaaagtaaaactcaagtaataaaaaatagaattcagcaacatttacatttattacaatgtaaaataacaatcagacaaggtaatttatgctctctaaggtttcactttttgaaatgcaaccgctgcattgcttatagtttt

SEQ ID NO: 47856 - DNA, 3207 bp, Bovine  19866880409858
  misc_feature (1)..(1): n is a, c, g, or t
ncttgggaggcaaagggcacagagaataaaacattcataatactctcacccccactcttttacagatgaaacttcctctcctgaacttacagaagtggatcagcagggctggacggttccacagccatgagattcctgtgggtcgatgaggacagaaggcccatgaatagggtcctaaccctgcccatcctgtgctctccccacttccagcaaacaggctccaggtcttgtacactcacactgtcatttttgcgcttgcctttattaataattgtgatcaagagtggaaagggaatgcaagcatttttatttgtttaatgtcctcatagatatagaatattggagtgagttgcatgccctactccaggaaaatcttcccgacccagagatcgaactcatgtctcttaggtctcctgcatttgccagtgagttctttaccacgaaagcctcctgggaagcccattttaggtataggagtttatacgtgttaatctcaacctcctaatttatccctcccatctctttcccctttggtaaccttaagtcagttttctatgtctttgggcctgtttctgttttgtatgtaagttcatttgtttctctttttctttgttttgtttccacacgtaaatgacaacgtgtgacatttctctctgtctggtttacttcacatagtatgatcatctctaggtccgtccatgttggctttgctttgacttttgcttttaaacaaacacctccgattttcttttaaaagtaatagaagtttccttccatgcagttggaacaccaggtctgagaggtctacgcagagtaattgtgaatgaattccgtccctgtgcagttacagtcttgttatacatcgtattccacatttcacttgcaattcaccaaaacccatagatggcagaattaaagctggagataaggagctgtcccactctgtcagctgcaaaagtcaagttgatatcttacttctttaaatagagagattataaagtaggttaataaaaaataatcacctgtcggtaggaaaagatagaaaaccactgcgagcatcaatacacatgcctgctggaaaggctggcttgatattcttgttaaactcaagcaaggtcaggcaaaggagtatcattttcttaaatccgctgctcaaccgactaagaaatctgtgaaaagagtgtttgcgacgagatttatggaggttttcctcaggatattgatgtatgtattgtatccacagccagagtaaagatgatgtctttaattatgattcagacacaccaaagagagtgtggaggaacaaatgacttttgaaattaagattgatttctctttttttgacactctgtacagatacacacgcacacaatcttttccctctttatatgtattaacacagtgacattttactaatatgattataatttggattttcaaagtcatttcatcaagatgcaaagataaattcattaataaattagacactgaatgtaatatagatatgcttttttaaactagatatatttacatgtggtgttattctttaaaaattgctggtcttctcataacatagatggcagctaagtaacagaatatttgatcaacaagaacattctggcacagccgtaactgataaacaagactgctgaattgaaaagcacacttggaattcatgttgtgtaagcctagcgcctaagatcggagaaagtgatggcaccccactccagtactcttgcctagaaaatcccatggatggaggagcctggtgggctgcagtccatggggtcgctaagagtcgggaacgactgagcgacttcacttgcacttttcactttcaagcattggagaaggaaatggcaacccactccagtattcttgcctggagaatcccagggatggggtcgcacagagtcggactcaactgaagcgacttagcagcagcagcagcagataagatacattattaataatgtaaaacacccttctttcattagggaaaatattgtccttctgcacattaaaaagcaaatttatccaccttaaaaataaacaggtcctttggttatcacctgttataaatgatatacctttgactcgtggataacaattcatgtaagttagcatgttattaatattagtaaaaatggtagtatgtaaaatactaaggcagctagtatgccctatcttttttctttctcacatccatgtgttaaactcttttggaatcactgacactttagagaaaattggggatcctgtcacttagttactcaacatttttatctatgtttgcaatttttttttataataagcaacaatatatctgaaattaacagaaatttaggaagaagagaatttgttctatttctggaaggagtgtgattccctgagaaataagtcattttcagagttagcactgtctctgtaataatgcacaatatacatttgactagaagaccaaagtcatttcttctcatttcatataccaaagggcatctttctctctgtgctacaaaaatatattacacatttctgaaagaaaattcatttatatcttggctttgattcaccacctacggaagattcatttaagacattagatatttgactgagacaggttaattggtatattagccgttcatgtagtattttcagtttctatcactgcattaagatgactggagagcaaagtgtctgagtgtacattattctttaaatcttttacataaagacactctcagaaatttgacttgatatggtatcttttacctttctgaaggttaacttaagaactgcgtgcttgtatagtatttcagtatttttataaagtgattattcatagtgctgattgtcctttcattaatcttaatcaaatgtctatctgaaaactattatcttgagtttagtacaaaataaatattttgttgtaaattttatctgctgtacatttgaaattatacaacatatatcatggttactttgtggctttacttgactagatttcattgtcaaatttagaattcagttgcagcaaacaatacatctgagttggtcataattcctttccttcttcctcacatttatgcctttgaacgtttttagggtcattgacgcttttggccttttgtgaaatggtggttcacgtcagtcaggcactcaacacttttttgtatgtgtgcaatgttctacaagaaggtccaggca

SEQ ID NO: 47857 - DNA, 2219 bp, Bovine  19866880419035
  misc_feature (1)..(1): n is a, c, g, or t
ntttttaatctcccaatatcccaattgccatagtaaagtttccagcattcagaactctttaagaatagtaaccagttaaatctttccccctagaacactacaagtagctcttgcaaggtaggattcatagatgaacacatagatccagagaggtgaattccttatccagatttactcaacctagtaagcaggagtcaaacccagttctgcctgaatccagagctgaggcccttgaccacatattgcagtcttcccagcaactctgtgggggtgtaaatacccatataagaaaggaggaaacaggagctcagagaggtaaaggtggcctaaggtcccatgggaaattaggtggggatcaagcctgaattcgaagttgaatttgtctgactgcagactgtgcccttaattgctgtgctgagatcccaatatccagtgatttccaagcctctgtatcctcaacaatcccagggcaccagggcctaaaaagataatgacagctagtgatttatggaggagaaggcaatggcgccccactccagtactcttgcctggaaaatcccatgggtggaggagcctggtaggctgcagtccatgaagttgctaagagtcggacacgactgaacgacttcactttcacttttcactttcatgcattgaagaaggaaatggcaacccactccagtattcttgcctggagaatcccagggacaggggagcctggtgggctgccgtctatggggtcgcacagagtcagacacgactgaagcgacttagcagcagcagtgatttatggcatttagtgagatgatgcgccagtgctttagccacaagaactcattaaacacctagtgaagtggacataattatctgccttttttcaaatgagaaaacagagacgacaatgatttgcccaagttcacgtggtgaatctggccagagcagaatttgaacttgagcccttctgatttcagagtcctaatctctgcccttgtgctgtgtccattcaagaggggacagagagagagttaagaaataaacaataaaagaacaagatatttggagaattgtaaagattcatgcaaggaaaccaaaccagtcaaacctaaaggaagtcaaccctgaatactcattggaaggactgatactgaagctgaagctccaatgctttggccacctgatgcaaagagctgactcactggaaaagaccctgatgctgataaagattgagggcagaaggagaaggagatgacagaggatgagatggttggatggcatcaccaactcaatggagatgggtgaacttcggcagttggtgatggacagggaggcctggcctgctgcggttcatgtgatcgaaaagggtcagacatgactgagcgactgaactgaactgaactgaagagaaacttagttttatatttagttgaagaaaatgtattttccaatgaactgatttcaagctgctttcaaattttatggaacaagggtctagataaaatgtagtccaggtacaagggcaagtagattgactataattacatatcaacagaattctgttcaattgatccaatttaacctgtaagaaggtctctattcttaaaaatgacttgcatagactgaaacatgacataggtgaaaatgcaaatgactgcctcacgggtatttgtgaattaaatcaatcttggaaagagagcaaaaatattggatttgacaagatctcagtaagttaaaaggatgagctcaaatggacaagatgaaatttaataggggtaagtacagagtcctaaactgagattaaaacaaatcagctgtgaagcatagtgcaggagacctcagcaggtctcctagtattagcttgtgtgaaaaaaggaggtaggaaaagacttgaaggaaaaaagtggcaaatcaagtgaaatttatgaattgtttaataaaatacaatgtccataataaataagattgttatcccagtatcagatactactgtgcattcatcatctatgatgtcctagaattagccagttttaaaaagagacctagctactctcagctgctgttattgttcagttgctaggtcatgtccaaatctttatgaccccaaggactgcagctcgccaggcttccctgtccttcactatttcctggagtttgctcaaatccatggccattgagtcagtgactctatttgctaccatttccacccttgccttcagtatttc

SEQ ID NO: 47858 - DNA, 1210 bp, Bovine  19866880425135
  misc_feature (1)..(1): n is a, c, g, or t
nctaatgattaactaatgatgaggggaagccaatgtggagaataagtcaagtacccgtccaacgatccagctgacatctcatcagtggctgagtcttcaacagtcaagaatttaaatatgaccattttggaccttgaaggaatcccagtgctccacttgacagtgaaaagaattcccaatcaaccaacagaattataaggaatactaactttcttttcttgttagctttaaagtttggtcttatttttacatgaatagatcactgaaacaacagaggaatggtccctctttaggagatttctgtgctgcttccaagaaccagagtcgcttccctggtagctcatgtggtaaagaacccacccccaatgcaggagaccctggttcaattcctgggtcaggaagataccctggagaagggataggccacccacgccagtatttttcggtttccctggtggctgagctggtaaagaatcctcctgcaatgcgggagacctggttttgatccctgggttgggaagatcccctggagaagggaaaggctaccccctccagtattctggcctggataatttcatggactacatagtccatgtgttgcaaagagtcagacacaactgagagacatttacatttcagtccatggggtcactaagagtcagacacaactgagcgacctcgctttcacttttcactttcgtacattggagaaggaaatggcaacccactccagtgttcttgcgtggaggatcccagggatggaggagcctgtttaatatgtaatattcaacatttgcataagcaaaaccgagtataaagcattacatacacctcatgaaaatgatacatacaaaaagagttatttatttctctatgaagtaaattcactttctggttttaataaaatagtccatatatatcatcataaggtgaaagcataaggatgattttttgacaaatgttacacataaaagaagatcacaactgttgggattcattaaagttaacatccatagcatgttgggagaatgccatttttgaactgactgaaatttctcattagtatttccatatcatatttttttttgtaaggcaaaggagctcatgaggggaagaaaacagaaatttacatgacaaattaagtctattttagatatatgtaattttctactgctttcaaattagtcttagaaatctatcaagcaaacta

SEQ ID NO: 47859 - DNA, 1461 bp, Bovine  19866880452833
  misc_feature (1)..(1): n is a, c, g, or t
natataaggcagacctgtccaccaccacagtggctaaggaagcaccctgaacttggtccaactcaggcttaaaacatccccatgtccatgtgactagcatggcctctggtggcttgattcagagcttccagtcaaatcttgttttaaactacgtatcttccctgtctctcatagctaactctcaaaagctttctagagcaaaaatagcaactcctgtttgtgtaattatcttgttccaggaaattgagagcacccatatgatgctccagtttcccataagctttaaggattactgttgtgttttcatttctctgtcatttccttatgtgcttagatggtggtgctaaaattaggagtaggggcaaaatgagaagtcacaatagtaacataaatgcttattcttagatcttacttgctatgctgctactgctgctaagtcacttcagtcgtgtccgactctgtgtgatcccagagacggcagcccaccaggctcccccgtccctgggattctccaggcaagaacactggagtgagttgccatttccttctccaatgcatgaaagtgaaaagtgaaagggaagttgctcagtcgtgtctgactcttaggcctactaggctcctccatccatgggattttccaggcaagagtactggagtgggatgccattgccttctctgtacttgctataaggaaagatcttatttccttcgtgtcaagaaaagctataattaatatgtgacattcttaataattattcttaggataaggtacaagttaggataaccgacaagtccaagtttaggagctgtacttgtttctggtcttccccagtgtacacttgatgttgtctggctgggcaatgcattggggagcatttatggcaggattgcagccatgactcccgctgtcatgatccattcgcctcacttacagccctccctgtggtctatcctttctttctcactgaagagacctaaatttcctatccctcacccaaatatacctatctcatacctattattttaggaatgagacaatagtgatatagttattatagttggagaagactcttgagagtcccttagactgcgtggagaccaaaccagtcaatcctaaaggaaatcaaccctgaatattctttggaagaactgatgctgaagttgaagctctaatatttgccctgatgtgaagaatcaactcattggaaaaaactctgtttctgggaaagattgaaagcaaaaagagaaggggatgacagaggatgagatgatttggtggcaccacagattcaatggacatgaacttgagcacactgcaggatatagtgaaggacagagctgcctggcctgcggcagtccatgatgtcacaaagcgctggacatgacttagcaactgaacaacaagattatagttagataggtaaatagtattggggaaccaggaaagtcaatcttttccca

SEQ ID NO: 47860 - DNA, 1153 bp, Bovine  19866880553502
  misc_feature (1)..(1): n is a, c, g, or t
naaacctaaaagcagcttgcctaggggtcagggtataataattatcctttatttgtacccctggcttttttttttttctgagcacccttgatgatgctagttcatgatcattgaatcaaattgaactgtaattttaaatgtcacactcaacctaatttaatgcagtaattaaaatgacatatagcttcatcatttttcactgttcaatttagataccctccctcattctcacttttactgaatgccttacacttgccactatgcttagcagacaggaggacactattgagaagttatcatgtgagattcttttcctcgggacatttacaatgttaatggggagagaagaaatgtatgcttaagatttttcaaaccactctcaaatttctgtacaagaataaagtctagagaattatatttttggtgtagatgagtttagtttagacagtgtcagttaaatgatatcagatgatggaaagccattcaaatggaaaagccctgcaggcagttgaaaatgtgggaatgatgctcagagaatgatgaaaatgagaggtggcgatgaaaacaatacaatacaatagctattgcatacaagtggatggattttaaaagaagctcaactatatagagaaacgaaaaatgagtagggatgaaaatgactgaacaaatttaagaactttgagtcaaaccatggatgagaccatgactctacactatttacatatgggctatggtacaaatcacttgccttcactgagagtctgtttcttctttaagtagtaaaatacagcaaatacactttgagagggtataaaatagctcaaagttgtcaagccataaaacaagtatcaactactgacaccatcaaaagagtgacagaatattctgttaatcaaataaacataagtttactggtgctactgcaatgagagagtctgtgcattgtctcagaagggtatattcaaggaaggatattcataggatttggaggtccaatataaagcagattatttcaggtctttcaaagagggacagtaatttcatttgggcaaagattgtggcataataatttaaaattaatggacacagtgagatgtggttcttgataagtacaaatgtttttcaataatcaagtgttggccaggttagcaac

SEQ ID NO: 47861 - DNA, 1400 bp, Bovine  19866880645118
  misc_feature (1)..(1): n is a, c, g, or t
nctattgaaaatatattcttagtcttgaaaatgtaatatatttatttacaaaataaagccagactttacagcctctacttattgtcatcacttgaaactggttatttttactggagtttgcagcatagaaatggacaacacttttattcttaaattttcccgttttacctttgaaactgataatgttattcaaccatgcatacagatttttatactatttggcatattcattctagagctataaaaatctgctctttgcataatgagacttcctttaatatccatttaaaagcccacagattttttagataggtgagtaactgaggataatttatagcttcaagaacgcccagtacacttacattggcctgtgtatatgtgtatgtgtgtataactgattttcagtctaatagtctgctattgttaagctgtctcaaatatcttcctgaatagatatttattgcagaggtctagttgtcaagaatttcccacagagctgtaagctaaactgtactcagtacctttattcaaatatttaaattgtgttaacatttaaaatatataaaaatcatgttgagaattttttctgtgtaaaataacattttataaaaagtaagaagaatattttttacataaattttaccctttatgcatataaagctcatcggatcctctggataaaaacaaaggactcaattttggtagaatttatattttaacatatttatagtgaaaatgtttctgttatcagaatatgtttaataaagcaaatttaaaacatagatattctttaaaactttatccgtataagacacttccttatctgttccccagtaacctttcactcttaaccttcttctttttttttttaatcctcattccaaaattctgagtatttagtgctgctcaacatgcaatgtccctttatgtctctgtgtactataatatactgattcctgtgacttgaatgctctgttttcaggtgatctttcctctccgataatacaacttttaatacctatgagatataatcttagtggtaccttttccagttgcctcggatacaacaattaggattcaaggatagagaagaaacattaaacactcaattttccaaggaaagggccatcaaatcatgcaaaaattagtcaaaaatatttctaaaaatgatcactctagatttgttactccaaaaccatcatccctattcccacttatttttcttagactgcagaaaagagtaaatgggaaatcaggttacttaagaatttctgcctaattcctttcttactctcaagcagaaacttgagattcatgctaaattgcttcagtcctgttcaaccctttataacaaacatcatggactgtagcccgccaggctcctctgtccatggagcctg

SEQ ID NO: 47862 - DNA, 1874 bp, Bovine  19866880813361
  misc_feature (1)..(1): n is a, c, g, or t
naattagggagatgatatctgcgtgaggggctgtgcccatgttgcctttttggagccttagttgagtttgggacttgcaggctaggccagccaatgtgattagattgcctcctgaggactaccaaatggatttctgggcaaacataactcattaatcattattaaatacttaatatttttctaagcttgtatccaactacttctctatatttacagtcacaaatcccaatggaatataaaagaaagagatgcaaatccatctgacagatagggggtgggtatagaatgccaaaaaatgcacattacaaaaaaaaaaaaaaaagataatgagataatttagaagaaaaaaaaactttgtctactaaggagaaaagaccctgtatgggactcagactgaacaggatcttcatggtagagtaggccagccatttggggtagaatgtaaagttgttcattaacctctcagtattatcattcggtgatcctggaaagatgacaacaataacagaactgaatcactgggggcacaaatagttctgctttgtaacctctttttacacagttctgacatgcccaagggaataagttttcctattttcctaagagagaagtaaaaaccacagaagcagtcagagatgacgatgaacttagaggagtgactgcaaagggaatgacttccctaaggtggtcagaggtcaataagactggtcaaggaaaacagcagttcacacagcagaccacagcaggtggattggtgcagaataggaggaacacagacaaaaaggcacagacatgttaagggaaaactaggtcagtgatgtataggccactaggcagtaatttagacttttgtgcgacactttactttggggattcctagggtcacagcagaataagagctaaaggcttttatttttgatgggtgatgtctcatgatccaaaaaattggagacaaaatgctaaaatccattttctatgattcttcaactaatacattttaggatacttttgtttacaccaagtaaaatatctgatcaatattgttaatatcaaacattggtctctttcctgacaattgtataactcattcaataaaagtgtgaaaatgatttcagagtactaatttttaataagatagaagattttatattgtatagagctatatttttacatgggaagcagaaatatattttggctgtttaatgtaacctctacttttttttttcccccccactaaaagccagagctctgttcaactaagcaaactaattaaatttccacaatgtttttgtaaagccctgtttgcttacagttagcccaaatgtgctaaaaacccaccaatgttctaccttcttttgttgcaagtaaacttgccctagaaagtgaatttagggattattatactttttccattacaagctgtttgtgtaaacctttccacattgtcaaaataaatacgttattgaaggcaagtgaaatagaaagagactaaaaaaaataaagttgatggattaggtcagcatttcccagaagaaattttttaattctcttatgtttggtagtttcttatcacagtggactatacctctactttttatcaattacctgaggggcacttttctgcaaatactttcaattctatagagtcctctggcagacctccctattacctttggctctttatctctggattctatcagacactttcaagagaactattctgcaaccaactctccaaacccgagcactagactgtttcagatctttttcctgtgaaatagctaaggatcccaagatacctatttgaaaagcaagcaccattttgtaaaggcaggaaactctcaattcactcagataagaagtctttctataaa

SEQ ID NO: 47863 - DNA, 2160 bp, Bovine  19866880861941
  misc_feature (1)..(1): n is a, c, g, or t
ngactgcttaatttcgtgaactgttcagttttataccttagaagccatatgaaaacagcacagtgaatactaatatatcttttcaaaaaataaagtgcagaaaaaagagatatctcaaaagttaacattaggtcaggggtcaatagagaaagaaaaaaaaaataataataaaaaaaaaaaaaagttaacaaactcctttagttacatatcaatttctctttacttagtatctctcatattaagctgctatagagcaagcaaaaaatgagtgtgagcccagtccctcggtaatatccaactctatgcggccccatgaacagaatagccccaccagagtcctctgtccatgggatttcccaggcaggaatactggagtgggttgccatttcctcctccaggggatcttcctgacccagggatcgaatccgtgtctcctggattggcaggcagattcttcaccactgctccacctgcaaagccctcaagcaaaacataagtgaaaccaaatttccaggtcactgagtccttactgaaggatcagagatgtcttgtaatcttaaacacattccctgagctccattgcctctgtttgtgcatttcattggcagtcgctttttgttgcagaatttcagtaggcttgggctcaggaggtggacttcagttaaggaaaaaaggaagttcctgagaacagaaaaaagagaatattcattcgattacaattcataccagaaaatagcccctttaattttatataagctgtttgacaaagattaatatggatattctttttctttagcttagaagtattttattctgtttctaataaaaagtgattcaaatgcataatatccacactaaaataacattggcaacctccaaaaaatttataataaaactttaatgtcatatgtgacaattattaaagatttcctgataccagttttgttttttttttgctgtttcaagtggaaaagaaaataaggaggggaattaaaaggaaaaggattgcttttgattttctcctgaaaagatggtgaaaacaaaaattgatggtcatgtttcactgtaattaaacgagcagcagaaaccattatttatagctgtccctaaggctatactgtaagttaaccccattttcttgacattttctttatataattgttcttaatcattttgccattttgtggaaatcactaatccatgtgtcctaaatggaaaagtatcagctcaattacttcactaacattttaaatcttatctactgttccaaatcagagagttgaacacttgatgccttttctgaattaatgttataattttacattaaaaaaattaccagaggtatcaatttaattactgaacttcagtgagttttcattcttatattttgctatagagatgttttatctatagaaagtaaaaatattacgataaaaagaggtttctttctttacatagttcgttttaacatctttatggtttagcccaaatttggatgaattgctctcaaataagcaaaactcctctgaatgattgacaacttttgtagacacagctgtattatgtattatgatggcagaattgattatttaactttaactctaattttactcttattacaattataaatacatttggagaaaggtaattttcataaagataaaatcattatgcagtctttccttgatgtgattagcatttgttttatttgaaacaacaaaggtacacttatttcagccagcaaatatgtagctttaagcaaaaacactttgaattatgtatcttccagagccctttagcattaattcaattaagaaccactaaattactcaagacaccaaagaaccccagtttcgagggaaccccagggaattagaattccctctccagaaggctagagaagagagtgggtatctccacttttaacaaatgccctagttgatagttttgggaatttcatttaaaaaaaatagagattttgaaatcccatgaattgaaatgacttcatttttcaacacctgaaaaagtaattcttcaatcacttgaaaccaattgcagatttttccacgctaaataactattacatacagtttctgaatgattctaattgagagtgtttattactttgcacttccaaatacaaaaatgaatttcatagga

SEQ ID NO: 47864 - DNA, 2023 bp, Bovine  19866880880049
  misc_feature (1)..(1): n is a, c, g, or t
nattttaaatgtttccttcccagtatcccagaatgcaccaaattgatctacagtttacctaattttacatgaacaattgcagttggatttcaaacagaagacatgttttcatagcagatggcatattcattttattaggcacccaagtttagactgctatgaatctgtaccatgtatctggagttaaaaatcaagttactttagattttgtcaaatatatttcaggactcctcttcagttccctggctgttgataaggttttatctttgttttgttgtaggtttctggttggctttcttacccaggttcatgaagtcttctctgtgtttactctataatgacctacagctgagcaatggcaaaaaaagaggaaaaaccatgttttcatatatcaacaaaaatatggactggagaaacaatggcatacagataaatctgtgcctctgaaactgggtttctttttattgttaagcagtcagaaaatagagagctcctgcgagttctttgttcaataaaaagacatcatgacccaaatcaaacaatgcttcatattttcaacaaagccatttggcttttgaaatgtgagcattaactacgtttattggtattgttcaataccaatatttttggctatgctatgcatgtggaattatgtgcacttaccagagaaaatattagaatgtattcttgaaaggatcaggcttctgaactatattgttcacacttatttcacagattgatgtaattggcctggcttgcttcccagttatggctaatatttcaaagcacctcagattcttctaagagtcagacacgactgagcgacttcactttcacttttcactttcatgcgttggagaaggaaatggcaacccattccagtgttcttgcttggagaatcccagggacggcggagcctggtgggctgccatctatggggtcgcacagagtcggacacgactgaagcgacttagcagcagcagcagcagtagattcttctagtgtggactcaagcttgagaactatgggactagagaagtgcttctgaaagcataattcacatgtaaatcagctggatatttttgtaaaacgtaggtgctgatcttgtagatattgggtgagttctgaaagtgcctatttctacaaaattcctagaggattccagagctaccattgcctatgctacattttgtgtaggcaggggccagaagatatgacagctaagactgcagactcagctaaatgccaaagttttagccataattataatgcccaaccttcttttgaaccatataaaaaataaacattacaatggactaattcctattgcaaaattttgggtgattgtttttccaatggaggtttaagatgctttgccaaatcaatacacattgtttatgtcacctgaactcatttttctaggatccaatggcgaataaatatgctctgagaataaaaatacttatctactaaattttggaaagtattactaaatcccaaactgcttatgctgtatggtaataacatagtagaaattgatacatccatatgaaaggactgtctgctgggaaactgttaaggaatacattccctgaataatcgttgcatataatctttacgttgaacatcaaaaactaaatattactaaccagaattttgtctattgttctcttttgaaaaatactttccaaaatatacaactagcactcatttttaactgaatttaaaattcggaagcattttaaacagttctatgaacaaatattggagaaggaaatgggcaacccactccagtgttcttgcctggagaatcccagggaagggggagcctggtgggctgccgtctatggggtcgcacagagtcggacacgactgaagtaacttagcagtagcagcagcagcatcatgaacaaatattgggcgtaaaattatttaaccgagaattttgtcttatattgatagctttactgtctgaattttcaaatacatcaaagtgttcgctttagtttcgtattgtgagagc

SEQ ID NO: 47865 - DNA, 833 bp, Bovine  19866880902998
  misc_feature (1)..(1): n is a, c, g, or t
nacacacacacatacacacacacacacacacacacatatatatatatatgcctatggagaataaagaggcagcttgaaaaaagtgactatttttctgaaggcctgacccgtccttctcgttttttctcttacctgtttctattacaacttctatcgatagtgttgatttcctatatgaaataaaattgaaccataacaggcagctgggatgtaccttaaatacacctcaaagtgaattgaaatgtctcagttccttctcatacttcaaaggctgcaggcacttctctctggcagttattttgtgacactgattgccagatgatatgggtcctgagaaactccatttaagaaatgtatgaagagatagctgtatcagtctgtcaccatcaggccttatcacctgcaagcaagtggtcaagcttaaagaatagtgctgatcataaagaatgcccaaagcagattatgataggaggttggacataaagatggaacacgtcgccccggattcatctttatactctagagtcaataacaggtattaataaaatatatattttgagacctccttaagctatttacgcttagaactgacttcataggattataaagaatacaatgcattctgttgctttcctattcatgttcctgagcctagaacacattattttcctgcacatgactattcttccacaaaacttctttgctctgagttagtataagatattggagctttttggagaaggcactggcaccccactccagtactcttgcctggaaaatcccaggacggaggagccggtaggctgcagtccatggggtcgcacagagtcgga

SEQ ID NO: 47866 - DNA, 904 bp, Bovine  19866880908123
  misc_feature (1)..(1): n is a, c, g, or t
ncctcctattgatgcttttgaactgtggtgctggagaagactcttgagtagtcccttggactgcaaggagatccaaacagtccattataaaggagattagccctgggatttctttggaaggaatgatgctaaagctgaaactccagtactttggccacctcatgtgaagtgttgactcattggaaaagactctgatgctgggagggattgggggcaggaggggaaggggacaacagaggatgagatggctggatggaatcactgactcgatggatgtgagtttgagtgaactctgggagttggtgttggataggggggcctggcgtgctgcaattcatggggtcacaaagagtcagacacgactgagcgactgaactgaactgatgacatatatagcatatagatgtgactttgcatattgtataactttgggaattaaaatgcatgtatgctaattaatttggctcagttcatcagggatgtgtgagggaattcaagctgtaacctagatttattcagcccatgttacaagtgctttaccccactgcagtagggcagatggtggctaggtctctaatgacaagctgtctggaaaatcttgccaatttcattcatgtgaagcatgtgccaggttgtaaaagggtttattccaggtaatttaaagaactgaagtaaagattctgttttagtttttcaaacataatctgtgttttggtagaaaaacttacataactgagagcatcatgttgatcagtatctgcttatggcctgttgatcaatataatttgatcaataaatttgtgatcaataaaatttggccctgaggttccaacactgacttcattacttggttagtgtctacattaattgatggtacaaataagaaaaaaatgttgctaattgt

SEQ ID NO: 47867 - DNA, 1393 bp, Bovine  19866881053918
  misc_feature (1)..(1): n is a, c, g, or t
ngggaagcctggttggccgccgtctatggggttgcacagaggcggacacgactgaagtgacttagcagcagcagctttgatttagtattattgatagtgatactaacgagctcacctattaaatacaaattttagcatcaactcttaatgataagcaacccatttttacagagtttagagatttgaaaggcaaaaattcaaaggactattccaaaattacatttgtcttatcttatttctagcaaacagtctctggatataaaatgtctatcataagaatgcctgtttccttgttccaaattaacttaaaagtcatgctcacttcttatggaaggctatgtaaaaatgtaggctattgttgctattttatagaagtttttattataaaagttgatattttacaattgatttttttttttttttctgtctcttttagctactgcaaaagggactagacagacaccagagggagctcaagttaccgaaccttattctcaggagctaaggtgacatcagttagggaatatggaatctacatgtacagcttgctacatttaaaatagataaccaacacaggcctactgtattgctagggaattctgctcaatattatgtggcatactgggtgtgtggggagtttggggcagaatggatacttgtatatgtatggctcaggtgctttgctataaaactatgaaacctgagactatgacaacattgttaattccctctactccaatataaattgaaaagttaaaaatataaagtgatatcatttgccatcctatttagaagcagtcgagctaatattcagaatcaacccaacatacctaagaatagaagaaaaagcaaatagcttaacttactgaggtttacatagcaaatataaactgcaacatagacattcaccatttaatactaataattggtttaaatgactttatttctaattgaacgccaaacaacatgagcaattcttaaacaacttggaatctagagagagtgaagggtgaggtgcgagataatgtagaatcctgtaggatttgaagttcagtgtggttgggatgcaaggtctatcatggcctggttgtaagaacatacaaatatgttgtattcacagtctggcattctgctttattattttataggtgatgaaattgctctctaagctctttttctcttctgcctcctaacttctcagattttattttttccctacaaagagtgcatgtaaaagaaacaatacctagcactaaggcaattcacattttatcagggccttcagcaataacaaaatagagattgcaatatttcaccgtactcataatttagtggtacagaggcactttggaacaagcacacgaggcaaaagacaaggagcacctgtgtttgg

SEQ ID NO: 47868 - DNA, 2374 bp, Bovine  19866881057325
  misc_feature (1)..(1): n is a, c, g, or t
ncacttgtactattttataataaaaaggacatatttgtcaactacatctattaaataaaagctgaaatctaaatgcattgtacaaaaaaagaggttaaaaaatgctaagtattttaccattgtgcatgctcagttgctaacttctgtcggactctgagaccccaaagactgtagccatcgaggggatggcctctgtccataggatttttcaggcaagaacactggggatactactccaggggatctccctaccccaaggagatgtctcttgtgactcctgcattgacaggaagatggattctttaccactagtgccacctgggaagccacatttcacccaaggtcatcctaattaaaagatgaactagaaataagaaatgaaatttagtaaacgtctgcctgactgggctcttaatattgcaaagtcttctaattggtattaatattacaacagagatgtcaattccagccttccatgctgcctagtacagattgcattttattagtctaaagacacaaatgatttgaagtgataattaaaatgtttctttagtcagtcctattttattccttgtcaactgattcaagatcacatgccattgtccagtgttacattccacactttaagcatttttctaatttattttatacctataaaatatttatggctgtttatattttcaatgtaccttgggaagttatagcaactaattgtaattaacttcaaattggcttatgatataacataacatttccattaatttagtaactcaagctcacaggcacaacaatttctaatgtaagcagagttatttcataattcagaggcatatttttgcttatttttcttggaaaaatgacagtcatatctttcttaaggaacacattaaatagcaaagctaacctgatatatcatggttttgggtttaattcttcttgacaaaggatatgaaaaagaagagatcagggacttccctggctaagactctgtgctccccatggaaggggcccaggttcaagccctatccagggaactagattccacaagtgtcagtcactcagttgtgtctgactctttgcatccccatgaactgtggcccaccaggttcctctgcccatgtagttctccaggcaagaatactggagtgggttgccatttccttttccaggggatcttcctgacccagggatcaaacctgggtctcccctactgcaggcagagtctttaccatctgagctacagggaagcccaaatgccacaactaaaagatcttgtatgcctcaatgaagacccaatgcagccaaataaaaaaataataaaatactaaaaagaagagacaaagagactacaagttgggtatctccttggtgacatgcagttttcttttaactgtaatacttttgcagtcaaccaatttcaacgcacataagttatctaattgtctattatttactacttgtattgataggtttagctttctaccattatgtggtctcaatttcatactgcctgaagcacttttatgctattcctgactttggaatgggtatctggaatgggtacctgaataagcctacttaatccatagctcaagtgcacactgctggttatagttatctgtggattcataacgaccttgtatcccgctcctacttttcagattcttattgagttgccctacttgacaatctagttcaaactgggctctggttttgctcccttgtactagaatcccagccttgataccccgcttatagcatgatggattcagtagaatggctttagttttcatcagccctgcagttccattcctgagccaccctcctagtgcccagtcatagcaaaattgagcaaacacaccgagatctgaaatagataacactctgcttcttcttgactgcccaaactcacatcttctccaataaatagggcaactgtgttttaacaaaatattgtgttttaacatattatcattcacttgtgaatattattcacatggagcaatatgctatgtgatgtatgcatgcaaaccaatatgactgtatgatccatatacgtgtttgttactatttccccaattttactttaaaaaaaaaattttacaggggaatttattttcattacaaagaaacatttacatgtcacttctgaggtccttaaccagtagggttctgatgttctataaaaacacgatttaatttatagaaagtcagtatgcacacagtttgattacgaagttcagtttgcactgtgccgacttttgctttcattggattcataatgactgcataataaaatccaaatcctcttaattagcacaaagggttcttctgttatttatatttctagaagactcacacaataaattgtttt

SEQ ID NO: 47869 - DNA, 1793 bp, Bovine  19866881327328
  misc_feature (1)..(1): n is a, c, g, or t
ncaggttacagcattggttttgtcaaatttctaacggttccaaagcattaacattaccattttatataacatctctcaatttaaaaatgctgacttgatatttgttaacctcaaatataatctaagaatatttggtaagggaaaaagttcacaataagaatcatcttctgcaatttataggataactagccagatagcatatttgaagttgtctttttttttttttaatattgaaagctaagcacagattttatcaaaatatcatgctcctttaatacttaactatatacattcacaaaaatgctatagtgttagatttaaaaataatatttagatatgaaataaatgtttttccacttgattgcattaactagaaacacttatttaaaaaaaaaattgttaatggacaattctggaaagctgcccaagatgtgtgtttagtataaacttatgccataaatggattgctgtcatccatttaaagattatttcaatgaccgagacatagatctctcacctgaatcttctccagaatggataaaatttagaataatgtgaggcaatattaaaaattcattgaaatgaaatccatttggaattattttgacttcaattatcagcatatctcttcacagataatagaaaatcactcaaaaatagagggaaaaaaaggttctgaagatcataacacaaactgacatatgtagaatactcactcaacaacagaatgtattttgtttgtaagtatatatataaagttcatcaaaaacaaccatgtggtgaattataacaaagcttcaacaaaatttaaaatatttaaataagttgaaatattaaaatatttgaagtaattcaaattattttatctaattatgggattaaaatggaaatcagtaataaaattatactagaaaaaggtgtactacctgaaaactaaataatacattcctaaacaactcataggtcaagaaatgaatcagcatagataacagaaaattactgaactgaattataataaaatataccagatcaaaacttgtgggatatagtttaagcaatgtttaaagaaaaaaaatatgacataggcatatataaaaagaagaatgggtgaattttttaaaaaaaactttttatttcaaggatgagtgtgaaaaaaagaaaggaatactaaaatgaaaacaaatgaaggacatttgaaaactactgtagaatagagaaaaagacaaaatcaaaaattagaattttgaaaagactgaaatttgttaatttgttaatccttaacgagattgatcaaggcaaaaaagataaaaaacaaaataacaaaaataaaaatggaaaagatggcataaatatagatctgtaatacaaataactaaagatcattatgaataactttgaagaagggaaacataatttagttagaatgaacaaatgtccatagattacaatttacttaagaagtgatatataaaatcttactagtgaagcatctgttaaagaaattaaatttgttattttaaaaatgttgccacaggaaactccagtaccagatgcttttaatagtaaatttttataactattttaaaaaagaaataactgtaatctcacacaaaatttctgaaaaaaaaaaattgaaggtgacctttacttttatgaggctgacagaacaataaatcctaaatcttgtcaagaagaatcatgatagaaaatatatatatatatatatatatatatatatatatatatatcaacacaagccatatagaagcactaactaaaattcaacacccttt

SEQ ID NO: 47870 - DNA, 785 bp, Bovine  19866881332309
  misc_feature (1)..(1): n is a, c, g, or t
natatcaaacatgtattgaattggcactttcataccatgaagagggaatgaccttatacaaggatggattaaaatgctttggaagttctaaggaaacctgctgattcacttaataaaatcaaatgttgggtatccaaggctagcaaaggaaagaaaattgtttttaccactctgactcttgtcctcaagactttcttctcaaggtctgttaataatagttactagtctaaggatattgaagcagaaaaagacatagtgttcttcagggttcctgcctgatgttgtaaaacttgcctgtgcttctcttatatattaatatgcaatgtatcccaaatctatagcacagtgctttgtatataacatacacttgatacataatttcttaatgaatgtaaatattagagaccagaatgaagcattaaaaattgtttttgcattatctcggggataaaacaaatgaatgcaaacatcaatagaaaattaatattctactaaccttgatcttagtgatcaagatggacttcattcgaaagatagacttaacaagctgtggatggttatttcatgacctcaatagagaacaagataataataaaataagattatctatacaggaaatgcacatatacataaagactgttttctgtaaaatagggtaaagtatatttactttatacttccagattgtttgtaaaaccttcatcatgcaaattttgtttcccttttatgggagttggtgatggacagggaggcctggcgtgctgcgattcatggggtcacaaaga

SEQ ID NO: 47871 - DNA, 1278 bp, Bovine  19866881364828
  misc_feature (1)..(1): n is a, c, g, or t
ntactcagtatttggttctattttttttgaaatttcgaaatacactttgtaaaatcttttggtgggtgtcttgtgttgactgatatttccagtatgtttaatatttgtacatttagtgacactatcattgttattatccatgtgaaccactttagcttatctgcctaaagttagcaattctgtgattgaattctccaatcttttatcttccacactacaaacttgctgcagtatttgttaatgtcattcattaaacattaaacatgtgcaataaaattttattgaattgaaagatgtatgtcttgactcttatctgttggagtacaatagacacaaatttatttgagtttggggagttttattttaaggccacttagctagtatatgaccaataatggccaccacttttcattgttctaccactatatcagagttagaggaacttgttgcagacaagaagaaaattaaaaatgaatttttcaatttaaattaaaagttaaaatctgtttcattctggaacatctgcatttcactaactgtgcttttgatgaatgaaaatctatctaggtattcctaaaacaattactgtgaaagtgaaatataactaccctgtaatttatgataaattatttttttatcccctgagcaactctgcattaaatggaatgagtaactatgtaatcatattgtttatcataaccaatgcttgctctatgtagattcatactgccatgtaattataatattaaagtataaagtaggataaatgcaaattcattcttattcacaccttttttcttcgattgtccagttcaacttgattaactttgaggagaaatttgttctgctaatgcttattacttcacaaaagtatccccacctgccatctctctctctctttttttttaaatatgtgtttaaactgactttacagtcctcaaattgtggaaggaacaaatagagggatgacagatggaataatgaaaaggaaaaggcacctgtatgtgagagaaatcttttgttaatgcaattaaatagaaattatcatttgtcttgtgtgtatggagttccctggggtgaagaaaggcaatattattttcattttagagtgtaaatcctcaggaggtgagagtttaactgattttctggtccatatgctttgttcttccctgagatttgacattacctctcgtaaaacggcagtctttctttagactaaggagatgtgtaattataactgaaattagatctctaagtcactttgctctctttccattt

SEQ ID NO: 47872 - DNA, 898 bp, Bovine  19866881796957
  misc_feature (1)..(1): n is a, c, g, or t
ntgaagttctcacgctgttgtgaaagttctaggctccacaaccaacgtcgcaacctggggatcctgaaaagggactgagtatccccagggaatctgactttgaaggtcagcaggatttgattatagaacttctacaaggactgggaaacaaagactcttgaaaggcacaatcaaaaccctgtgtgcaccagaacccaagagaaaggaacagtaatctcacaagagactgagccagacttgtctgtgtgtgtttaggagtctctggtggaggcctgggtctacagtgtcctgccatggggtcaggggcactgatacagcagttctggaaggcctggcatgcttggattaagtccttttgaaggagatcagcattactacctattacccctcccataggggaacacagccccacccatcagcataaaattggattaaagacttactgagcatggccatgcccaccagaaaaagacccagttttccccacagccagttcctcccaccaggaagctttaacaagccttttatcctcattcatcagagggcagacagaatgaaaaccatagtcacacaaaactaacccaactgatcacatggaccacaaccttgcctaactcagtgaaactatgagccatgccatgtagggccaccccagatagacaggtcatggtgggagagttctgacaaaacatagtccactggagaagtgaatgggaaaccaattcagcattcttgagaacaccatgaacagtatgaaaagtcaaagctagccaaccataatacagagaacagctttgaaaactcaacagtaaaataaatcttcattagttggttagctcaagcatgtctgtacttcttaaaaccccaaaagggtaatatagcaccaaacacatttcca

SEQ ID NO: 47873 - DNA, 1216 bp, Bovine  19866881929516
  misc_feature (1)..(1): n is a, c, g, or t
ncacacacactacccttttaagataataaatataattatcttcaagtttatattattaaatagactcagtgctttcttatgataaagtctttgttgaatttatgtagaattatatggaattatgggccaatgtttgaatatatatctaaatataaaattcagatggtggaaactccctccagaagtgtatagaattggcatccgtcctataggtttaaagaggtcttgattccaccacaaaaatactgaactttattatccctagtctctatgccagtttaaaaagtaaacacaagttttacattagtttaaatcatattctctgacgctagtaattgtgtccgtgtatttatcatattctacatatctgttcgtgtacacatgtatgtatatatttatctatctatatatccatgagtcatctccactgcaagtcacatgatcaccacccctttccacttataagagacacagattcagtccctaggtcagaaagatcccctgaaggaggaaatgacaacccaccccaatatctacctgaagaatcccatgggcagaggagcctagtgggctacagtccatggggtcacaaagagttggatatcattgaagtgaggtagcatttgtcttttcactgttaattgaatttaactacttttttgtaaaaaagattaaagctttgtatgttataaatactgactatgttttcctagtttttgcttacttttcaattctgcctattcatcagtatttaatgcccagaatttaaaatttttgtgaggtccaatcagtcaatcttttcttttatggtttctgtgtttggtggtaaagagtgatttgaaacaagagttttctttttcaataaacttttattgagcacttgtcctggcttaggggcagagagagtcaattaagtgcttgtcccgcatgaaatttcaatctagttgtggagacagaaaaataaatgtacattcacacaacattaagaaatgttttaccaacagcaatctacaaataaatgcaaattgatacagtgtaaatggagaacatatgtgctaagaataaaggaatgggtaattgaatggaacttttcaagggagggaaattagagataaaacacacaaggcttttaaaattctcatgacaccatttttcattggttctatgcatctatggattattccactttccctatattggaacaagctgaacattg

SEQ ID NO: 47874 - DNA, 1990 bp, Bovine  19866880166883
  misc_feature (1)..(1): n is a, c, g, or t
ntatataccaaagtacatgaagaagtcaggttgacagttatttcccattagttatttggtcatcagacatttttatggaagggcaatgcttaaaacagaatttgaattaagtcattcagattgtttttttttttttttttccatttgcttcattcttttactgctgaactcctagaagggatttcatgcagagaaatacagaataggatccaaatattccctctttttagataatcctatcccttgctaattatatggacatagctctgtgagacagaaacaactgtcttactgagattagattttatagttctcttgtctttttatacaaaataggcatcttgcttacttggtttccattgtgaagaaggctgtccttgcattttagctttctctccaaatcttgaataagagcttcttttgatccttgtatttcgtggtcaggagtttttggtgtgagcttagcatttgcattttgggatgacttaacatttatgggttggcctactgagggttgttgatagctttaaaaaaaataaaatatttttttttatttatttacttcacaatgctgtattggttttgccatacatcaacatgcatccgccacaggtgtcattgtgttccccatccctgaacccccctcccacctccctccccataccatccctctgggtcatcccagtgcaccagccccaagcttcctgtatcctgcatcaaacctgaactggcggttcatttcttatatgatattatacatgttttaatgccattctcccaaatcatcacccacctccctctcccacagagtccaaaagactgttctatacatctgtgtctcttttgctgtctcgcatacagggttgtcattaccatctttctaaattccatatatatgtgttagtatactgtattggtgtttttctttctggcttacttcactctgtataataggttccagtttcatccacctcattagaactgattcaaatgtattctttttaatggctgagtaatactccattgtgtatatttttaatatactgtctaggttgatcatagctttccttccaaggagcaagcgtcttttaatttcattgctgcagtcacctgcagcatcatctgcagtgattttggagcccccagaataaagtctatcactgtttccccatctatttgccatgaagtgatgggactggatgtgatgatcttagttttctgaatgttgagttttaaatcaattttttcactctcctctttcacttttatcaagaggctttttagttcttcttcactttccgccataagggtggtgtcatctgcctatctgaagttattgtatttctcctggcaatcttgattccagcttgtgcttcatctaccccagcattttgcatgatgtactctgcatagaagttaaacaagcagggtgacaatacacagccttaatgtactcttttctcaatttgaaatgtgtctgttgttccatgtccagttctaactgttgcttcttgacctgcatacagatttctcaggaggcaggtcaggaggtctggtattcccatctcttgaagaattttccacagtttgttgtgatccaaagacaaagtttagtattaatagaagttgaaagacttttcttagttttcatcactgtcacaatcaatataagccccttgaaaacaaacttttgaaccataagtagcagcacactgtaactatgtctagaattcttatgatatccattactttaataatctgaatcattatcttgatccttcagttcatgtgcaaaatgccaaattttgatgaggaatacatttttctattttatttttttgtgcatgcttggaggcagaattaacaaaaagatcaataagaactctcaatgagaataaacagaataagaaagcaaacccccttttctctaataagccaagaaaagagacaataccatacttacgttaatgcatacctaatgtgtacctaa

SEQ ID NO: 47875 - DNA, 1024 bp, Bovine  19866881432061
  misc_feature (1)..(1): n is a, c, g, or t
naacttgctatacagaccaaatcatgtttctccacttccccaccttcccagtgacacaacaccatcattctgctctcttgccttcgcctagacacactccttctcttgaagcaaactgcttgaatcccactctacccctccttccatttggcaagagaggaaaaaaagaggtcttcatatgaatagctatctaacagaaatcaatttgaagcccacccgtcagtggtcttatttctggagaagtcttagtagtcagaatgtcagtcttagaatactatttccctttcagcccttttttcaacaaggaatatcaaagcccccttcacaaaaagagaaaatgagttttctctacaccttttcccatttctcagttctttgctgtcccccctacatgtgcttactaaagctcctagtcaaagttcacatctaaaataaagaggcttgcaagagaagctcatgtaatcccactccttaaatatcactaagacatctgagatattgtttagatcatggactcttactttgacatgccagcataggtagatggacaggcaagcacatcagatgtcactgcttggcagctgataaaagtcagtggtgctataatactaagcacagagccactagattagtctgcgagggaaggggatgcctcttccttccctttagtagtaggtttaacccagctggcactctctggaactcgggtaagtcccttctttattcctgcttcagtttggggttttgtttttgttttttgtccaaatcagaacagtatgtaaaaggtgatcttcagataaaacgttcaaaagccacaagatcataatggcattacacaaagatttgaaaagaatgagacctgttcattccactgaaactataaggcattaaaaaaggtagaaggaaagatagttgtgtgtcattatttttcaatcatcagttttctttgaaaaaggacacctggcctaactgtaactgtgcaatgtcctatatttcaaaataccctcagttttctgtttaagtt

SEQ ID NO: 47876 - DNA, 1816 bp, Bovine  19866880255158
  misc_feature (1)..(1): n is a, c, g, or t
naagagttccagaaaaacatcacttttgctttactgagtacgccaaagctttgactgtgtggatcacatcaaactgtggaaaattctgcaagagatgggaataccagactacttgatctgcatcctgagaaatctgtatgcaggtcaagaagtaacagttagaactggacatgtaacaacagactggttccaaatcgggaaaggagtacgtcaaggctgtatactgttaccctgcttatttaacttatatgcagagtacatcatgtgaaatgctgggctagatgaagcacaagctggaatcaagattgctgggagaaatatcatcagtaacctcagatatgcagatgataccacactcatggcagaaagtgaagaactaaagatcctcttgatgaaagtgaaagaggagagtgaaaagttggcttaaagctcaacattcagaaaactaagatcatggcatctggtcccttcacttcatggcaaatagatggggaaataatggaaacagtgagactatttttgggggatccaaaatcactgcagatggtgactgcagccatgaaattaaaagatgcttactccttggaagaaaagctgtgaccaacctagacatattaaaaagcagacacattactttaccaacagagatccatttagtcaaagatatggtttttccagtagtcacgtatggatgtgagagttggactataaagaaagctgaacgccaaagaattgatgcttttgaacggtggtgttggagaagactcttgagagtcccttggactgcaaggagatccaaccagtcgattctgaaggattcagccctaggatttctttggaaggaatgatgctgaagctgaaactccagtactttggccacctcattggaagagttgactcattggaaaagactctgatgctgggagggattaggggcaggaggagaaggggacaacagaggatgagatggctggatggcatcactgactcagtggacatgagtctgagtgaactccgggagttggtgatggacagggaggtctggcatgctgcgattcatggggtggcaaagagtcagacatgactgagcgactaactgaactgaactgatggtttatggaactttaaagagtaagtataaaaatgactcaaatccccacatgaaaaagaatattgatttgagggagtgtgaaatgttaatgtgtctcacatcaaagaggctcagcttaaatataacaactagtaacacagcagagagcggaaattgtggctcttcttttctcccccaagagtctctgatctccccctacagcctcagagcacccttcacatgaatcgcaagagcctcactagggttttgatctgcatgtttctatgaatcccagagtgaccaagtttatcaaatcactcagaaataccttaaatatttatcacagggccatattgcctatcccaggctaactctggccattgtttgcctcattatgtgtgctctgttgctcagtcatgtccgatttctgcgacccccatggactgtagcccaccaggctgttctgtccctgggattacaggcaagaatactggggtggattgccatttcctcctccaggggacccaggggttgaactagcatctcttgagtctcctgcattgacaggtgggttctttaccactagtgccatctggaaatccctggcaattgtttgcctaattatagttagagcaaataaagaactctaggcattttagggagaaggcaatgacaccccactccagtactcttggctggaaaatcccatggatggaggagcctggt

SEQ ID NO: 47877 - DNA, 1774 bp, Bovine  19866880349527
  misc_feature (1)..(1): n is a, c, g, or t
natcataataacaactatctcatcatgtgaaggtgagaatgaagcaaattaattgtttgtaaaccacttataaacaatgtctgacaccttataaatgccatgtaagtgtttgttaattaaaataaataatggctaaacattagctattattgcttctttcacttttttggtattatttcttcttaaagctaccatccaatccctctattgcctttcatcactaaatttctcaaaaggatggcttacactgcagattctccactaattgcctccagttcctcaagccactataagactgaaaccaccgtcttccaagatgctaatggcgttcttgacctatgactccacaaagtctcttttcctttcatttgccttctagtatctgacttagaacctcttcctcccattggagaatcaaatccagcgccttgtcagccatcattgctccacgtactccatcccttgacacagccttcccaaaggttctccttgccttcttacgctcctccctctccctggtgatgccatccttactcctgtcttcagttattgcccacatgccattgactctcacacctacgaggcctgacgttttccccctgagcactagcccaaaagcctgactgtccagacagagaagatatcctaccaaatattcaattacaacatgtgaatctgctccctctcatgtgttgccacaagtctctgtttctggcatttagcctccaaagtttgaaatcttagtctttgttgttctgtacccgtatgtgcctttgcatttcacaagtaagtttcacctcccttagtgcagttgttccctatgacgaccttaagaacattatttggtgagtgatttagtaagtctcaatttagatgcgtcgtctttcctcagactgacaaaacgagtatatttgccaattattttaagaaaggctggtacaactgcttacaaaggaagaaaacaaggctcatgaaagttaggtagcttgtcaaggtgttggaagggtcaaatacaatagtaagtgcaatggaagcttcatgaaccataaaacatgatgaaaataccaggttttaataattactaataaaatattaaattattgttgaaacaacacatttggtaaatgtcaaaggagaagtactgtatgctcattcagtcatatctggttctttgcaaccccatggactgtagtctatgaggctcctctgttatgggatttcccaggcaaaaatactgttgagaattactcggtgcataaaatatggaggggagagaaagatttcagtttgatgaccttctaaatgaccagaggcaaagtctagcagttgccaacctggctgggcctggatgatgcattcggagactttatcttcacctccccatattccgggtgccacacagtcactgaggatatcccagcattatttgactaagtgcctgagacacaggcctctagaatgtaccagaggaagccaccaaaagctgtgtctcattacttcttgtgtttttaagttatttaagaaaaattaatcttgtttatttttattgtaataggttgacttacaaaattgtgtttgttggtggtgtaaagactcttgtccacttatactcatattatagctattcagctgtgctttttttttttcacatgtaagttattacggagtgtttagtacaccactcttgctaaagtaggtccatgttgattatatatttgcaatgctcctttccccagactggaaaaatggacatattgccaatgctgttaaagga

SEQ ID NO: 47878 - DNA, 751 bp, Bovine  19866880677908
  misc_feature (1)..(1): n is a, c, g, or t
nagctcggcttagaaccaggtattagagcaggaatgtagcaggtcccacggtgtgattgctcctctccaggcaagttagtgcccacaccaggggagggtggggaggagaacagaacagaaacacaaggctcccagctgattctggagctagattccctccacagtggtgcctcagccaaactctgccacatcagtcctctggcctggagtttgacacccactgccattcattagagtcaggtgacaatgacacatgcgggccttggccagcaagcatcctgagatagataacaaagtccagccgccagcgctgtgctgcacctccccagaatgagatcagagctcaggagggcacgtggcagagctgcctggcctcagggagttgtgcccaggccctgcctgcctctctgcccggtaggaggggctggggctccatgcgggacgtcctggtctgaggtggggtgccttcactccagggcagctatgtcaggtgaggaggccaggctgactggtgtgaccatgtgtgctaccacctgcccacccttcctagcagacaactggaggtttctcactgtgagtcttccttcccgggcagactgggacggaggactgccttcgggttttctcccgcagacggaaattcaaagccaacaggcctctccccgagagactgcagacccaggccaaggttcccaggaaatggccagctcaccctgtctgacaagtgacctctcctgacaagtggccaatt

SEQ ID NO: 47879 - DNA, 5586 bp, Bovine  19866880679383
  misc_feature (1)..(1): n is a, c, g, or t
nataaattatctatagagctatcttgaagattaaaatggcccaatgtacatgtagaaggtaagcagagaggtatttgtgggtgtgttttaatatgaatgctgctgtagcatttacttttaaagaccagttagagataaaattgaagaattaacaagatgattccagcttgttgtggatgattccaatcaacaaggaattccagcttcacttatcccgcaggagtaaatacttcttttgtgtgtctatgtgagcatgcatagaggttgaaagtcagtggtgacttgtgtcctatttgattatgaattttcaccaggtggcagcagagtattatgagacatcacagaattcagtgtcctactcagaccacagagtagagaccagcaagcgatggtggcttgaatatctgtccactgatgtcggttgggtgttttaagtttcctgctattattgtattcctgtcagtttctccctttgtgtctatttctatttatgtatttgggtgcctgtatgttgatgagtgtaaaatcctcttcttgcattgatctttttttttttttaattaaaagtattgatttatttgtctgccctggatctaagttgcagcacgtgggatctttgttgaagtatgtagaatctttagttttggcatgtaaactcttagttgtggcatgtgggacctagttccttgaccagggatcaaacccctgggccccctgcattggaagcatggagtcttaaccactggaccacgagggaagtcccttgtgttgattttttcctcattatatagtgtccttctttacctttatgcgctttgttttaaagtctatttcatctgatatgaatgttgcaacagagttagcagatgcaaactatcacatatagaattgataaataataaagtcctactgtataacataaggaactatattaagtatcctttccatatgatggaaaagaaaatgaaaaagaatataaatatatatatatgtgtgtgtgtgtgtgtgtgtatgtgtgcacacacataattaagtcactttgatgtacagcagaaattaatacaacattataaatcaaccatacttgaataaaaaagagtaagtgagaaaagagaggggttggcttattcagggcagtcctcattctgaaagcagctcattagatctggcaagtcaagctccaatatgagttcaaaaataccatctccatataaaaactagcagagaaatgtcaggtggatgaggggagagatgcttggagaaatcaacatgggagtgacaagagagtacctcactgagtcagtgtgtgtggaagttcactagtgggtatgaaattcagggcctgatctgtatgttggaaggagaaccagttgtctgtctagtttgcctggtgaagtcctgaaggtgttctgttccacagtttagcccaggctcaccattatggctcatctgggtcagcttttgtctctggaagatcactgttataatgtaagtacaggacatccctccaacccctttgggacaaaagtttaagtcttattaactgagatcaattcttcgattagtttatgccactttgaaagagtgaattgtctcaaggaagggagtggaaaccaatagttttaagccagaagtggagggaaaggttaaagtcatactacaggatcagaatttagggtgaattcccactcctcattttggctgacagctaggagctggcctggccctatcaggtaggatattgctggagctggccctgtactcttggctaggctgtggtgttctccggttgaacagaaacaatttcactcaaccccaatatctgacaaggccagtctgcaaccacagtgggcaaggcaaaaaaaaaaaaaaaattgttactcaggtctgaacacagatacaaatgagagcactgtcaaaagtgagcaaaaaaatgaccaaacatgctaataatctgatgaatatgagtgagtgagttatatttctttgctgattaaagtttggccatgtttcactcctcataccttcttctctggtggctcagacagtaaaaatctgcctgcaatgcaggagacctctgttcgatccctggatcaggaagatcccctggggaaggaaatggcaacccactccagtattgttactgggaaaaatcgaatggacagaagagcttggcgggctacactcacggggtcgcaaagtgtcggatacaactgagtgactgacgcacagcacacactcctcacaccttctaggtaagaatgatcaggatacgcagtcatagaatcctggcagtatcctgcccagaccaaggccttgtttccttaaatcctccctccaaatcccctaacacaaggttcagtaagagagtgctggatgtttgggaagaggatagaattggagaagaacatgccccaggaaatggaaagaaggatgaggacaaaaacctctctgcttcacaatggggccttgggaaggccctcatttctctgtgttcagcgaccagaagccaaggaccctggctgcatgtgttgctgacattcatcctctgttccatatctgagcaaaggagcctgtggtcctgcagaagcctggcatctgggatggggagtgagttcattcagcccactgcctcttctccttcctaagcagctgactccttcttctgatgtggttttgtggttagacagtaagcagcacggctcatgtggacatggtgtgctttcagtttctgaaagtgagtcatgttgactttcctcttgggagtaagagtgacccttgctgagaaggactatatgactagaaagaagaaacaccaaggccaccagtgccagagtgtttaccactgcaggtagtcactagtttctgggagtggtatgtgtcatcgctgtaagcaaggtgaactaggaagaggaatttggttttgaatcttcaagtatttgccaatgtttgaagtttttattctcactcatccattggagtgatgccaatggcaaaagagctcaggatctatcagattagatcagatcagtcgcttagtcatgtccgactctttgcgaccccatgaatcgcagcacgccaggcctccctgtccgtcaccaactcccggagttcactgagactcacgtccatcgagtcagtgatgccatccagccatctcatcctctgtcgtccccttctccttctgcccccaatccctcccagcatcagagtcttttccaatgagtcaactcttcacatgaggtggccaaagtactggagtttcagcttcagcatcagtccttccaaagaaaacccagcactgatctccttcagaatggactggttggatctccttgcagtccaagggactctcaagagccttctccaacaccacagctcaaaagcatcaattcttcggtgctcagccttcttcacagtccaactctcacatccatacatgaccacaggaaaaaccatagccttgactagacgaacctttgttggcaaagtaatgtctctgcttttgaatatgctatctaggttggtcataaggatctatagatggactcaaataaatttatattcgatcagctggtatatgatggggagggtttccaagaggattatttgctattgttacatctttaatccttgtgtctactaacaagctcatgatactggaccactcataaaggtcctaagaaatcatggcatacctgttgagaattgaagttgaacttgtaaagagccaatagacaaaagaaggactttcttctttgtgggtccatttggttaatctttcatgaaagaatgtaaagccaggaggaagctatgaagcagtcatgtcactgcttctgggcccttgataagcattgttctttaattgtagcattctttcacactgagccaggatgtagcctcaagacatttcttatctctgtgctccagacagccactacaccagatcccagtgggcatctagaacatcccaacgtctgttctagattctcagtttaactttgctcttgagtatccaggttatgggagtgccacattgaggaggttgcatttctttcctcaataagtaaatcctttttagttgaagaaaagagcaaagggaattattcttgaattctgcatcactgatccatcaactattacctattgccttgttaagttatttgggtgagattaagagagttatgagaaaaggcctattgtggagaaagatgaggcattctaaacagtttgtgtctataagtatgcaaatacggcgggccacttcatggggctgaattttcaaggcaatatgacattcaattctttttaggtattaggcctgtcatttggtagttgctatgaggtagggggtagcatctattagggcagattagattcagtaaggagacttattaaactgttaacattttagaagatttagcatgtgatagctatttatgcatcttctataaaatgtacttttaaaatcataatatattattaaatacagtgccacctgagtcttggttgcacttaatagatataagctctagattatatcatcaggaaagggacttattggaaggcaactgcttcagagaagcagcaagaaggttagaaaacagacttccatcaaaagacatttgctacacttatgtcagactgacacaggagctctgtgcttgtctcacttctcttcatacctggagtccttactcttttgtaacatgaacccatttggctatcaaatgaagtctatgaaccacttctcagaatattttaaaatctgtcagataaagtatgcaggcttataaaagaaaccagttatactgaaatatggttatcaaaatattaaaaaatcccatgtgtgggatatatagcaacatatatgcttctttattaatgcattagataaacttaactggtgactctaatattgcagcttcaggaatgatgagcataagtgtatcttgggtatctgttagtagtttacaatatctgtaaggattataaagaagatgaaaatacttaatttcaataggagacaaggtcacaattactgctaatactactggggttagtttattgcctacattcttaattgaaggacatgaaaaattgtagttagaaattagaggaaataatagtgtatatattttttcaattcaatttcatggatttccctttattctgtttatagattccaggttaagaattcctattttagactgtgaactcctaattcagctttgtgtgtatgtgatccccttttgtgaaacatctgtatgtattcctctatgtatgtataaccctaaccctaaccctaaccgtctaggtggatagcttttttgtctgtaatgagtggaacattatttttccccccaagcactcatggaaataactgaaacatgaagcaacagatcccaaccacagtacagatcatcattcagtactggtggttcttggcttgcttctgtctggaagaactcccgctcagctcctctgctgtcgtggtactccttgttttcccagtcatatcagccaaacgctatggtgcagtctcctatggttccactgtgggagctggatgctattttgggttga

SEQ ID NO: 47880 - DNA, 1523 bp, Bovine  19866880688946
  misc_feature (1)..(1): n is a, c, g, or t
ngtcacactctacttatttttctcaccaccagttcctagcacagggttttgtgcattaatgagtgtttgataaatttttattgaacaagatttaagatttcttgagcctcagagtccttgagggtgctctctgaagtctgctctagttcttagaaaattaaatatggttttagttggggccaacttcctggaagagagaagacttgagctgtgctgtgaagaattgggtggatggtgtttgaatgataatcagacggaacactaacattgtgtttctgacacagagtagggggagatgagtttgggttggtagaattggcttattagaaacttctgatgaggggcaggtggatttgggcttatctacacaggcagaagaagcacttgagattcttgaacagaggagtgatattttcagagccatcctgcaagaagaacaatccagcacaagatacaaaaccaactacgtgggaaacaggtgggaatcagtgaggccaaggagatatcaaggctgttcaacaggggccagatgctgagggcatggatcagagtggcagttgagtgaaaaaaaaaaaagagtttgagccattagaggaaaaataaacaaagactgattgcatgtcataacaacagaaagcaaagagtcatgacattttcagatacagcagcagaaagttagggatataatgaacaaaaaaggaatttggagaggaaggatggtttatgggttagcaggtgactttagtttcaaatcttttaatttgagatgatgaaacattgcaatacttcataggtactgctgctactgctgctgctaagttgcttcagtcgtgttcgactctgtgtgaccccatagacagcagctcactaggctcctctgtccctgggattctccaggcaagaatactggagtgggttgccatttccttctccagtgcataaaagtgaaaagtggaagcgaagtcgctcagtcatgttcgactcttagcgaccccatggactggagcctaccaggctcctccatccatgggattttccaggcaagagtactggagtggggtgcctttgccttctccgtcatagatactaggtatgcttaagagatgctgtatgcatttgagtgggtgaatgaatgaatggaatcttaatgaaagagttcatcaggcatatggaatctctgactgaaatctcttgtcggatagaccatgtctggaactgtgacttagatttataaattatcaacttagagttgtgagaactactggagtacatgaacttctggaggaatttttagagggggagagaaaggcagaggactcaggtgtgagcctggggtgctttctttctctgaagtaaacagaagatccattgaaagccaatgagtgtgttaggttagctagatacagatctgttgctctgagcctgaatagtctataatacagttacacagctctcaaatataacagagttgttggaatctatcagaaaacaaatttgcagtcataaagctacttttcaacata

SEQ ID NO: 47881 - DNA, 1309 bp, Bovine  19866880735573
  misc_feature (1)..(1): n is a, c, g, or t
nttctagttccttgaggtgctaagaagaggggttaagagctgtttttgctcttgcacctcaaattctacaagtataaaggaaagtttttttgcttcttagttttgtttgtttgtttttaaaaatagtgttgataacacaatgttcatcttttaaatgcttttaaatgttcctgttagctaccagaatcacaatagcatcgttgaccacaaaacatgctttcattctaatggggcctggagcctctgctctaagtctaggtggagacagacacagaattgcatgtaaacaaaagttcatgaagtgcgttgcagatgctctcctccagccaactcttcagagcaacttcctgttctcatgaggaacaaaccagaatgaattgctttatgtagacaggataggagaaagatagtgtcattttctcatctgagattatgacttgatactcatctacttagttcagatctttaacagaaaggggaagttctgataaaaagctagttatgagggaagatgatgcatttaattttagaaacattgaatttcagaatctagtgagtttttggaacacagaatccagttttgaagtgcgtatcattaggctttgaacacatggagtttaaggttcagcgagattttcctatggaggtgtccaactgtcagagctgacatagaagaggtatcagggccagagttacagatttggtcattacttgtatgtttgaagctttgtgaggtgatggggaaactcctggactgccaaagcagggattgaggattgagccttgggttatacccaatttggtacatggaaggagaaagtgaaaccaagaaaaaaaaagatgaatagatatggtagggagattgtgacaatatagccttgtgcatgcaaacaccgatagaattctgagaaggcatgtgtgcttatgtaactaagcaagggcttgtgtgcccacaaggcagaaagccaaactctggtaccaattatttgcagcaaagcaaggatttatttgcagggagtcaagcaaaggagtgggagacaggactcagagccattcaaccttggtctttcagttagggatattgttaaggggaagaacagaaaaactgggataaatcatcatcctgtgacatttcttaatcatgtttttaggagtcaagaagtgtccagtttatgattctctagccaggtggcccaaggcttaggggtctctgagctcatcttgtcctggaaaagcaactttagtttgtatattaatattgaaatataacaatagcaactttagaccatgacaatatttacggacaact

SEQ ID NO: 47882 - DNA, 1720 bp, Bovine  19866880785180
  misc_feature (1)..(1): n is a, c, g, or t
nggcatggttcctacaaactcgctgattgggcaggatgcctcaggagtaagggtgaagtaggggcagaatggtccttatacagcaaccaacccagattcagatcagatcaacacctgatattggatttcagtgacgccaggtttcaaatttctcaggaacctaacagaaacaaacctctcttgagaatgacgacactatcctagacctcaaacaggaaatttgtcaaagtctagcagataataaaaattaatcatacgtgtggggagacgagataacacaggtgagaaacaacagaaataatgcttctaaatatgcttctaaatatggttgccaaacacaactttagaataattctgcttgttattttcagggagacagaggatgagatggctggatggcatcactgactcgatggacgtgagtctgagtgaactccgggagttggtgatggacagggaggcctggtgtgctgcgatacatggggtcgcaaagagtcagacacgactaagcaactgaactgaactgaatagatactatcaaaaatttcagcagagactggggactatttttttaagtagcaaattttaaaaagagctatttaatttgagaacattaatgacaacccccaagtaaatctccctgatggtatcagacagctaacaagtagagaagaattataagactaagagatgcttatatggacattagattcataacaagtagggaaaagtattaatatattgttttcaataaatgatgttggagcaattaaacatctatatgaaaaatgtgaaatgatctttatttcacacaacatatttcattgattccatgtatattcatgacctgggggtgaagaaagaattattaaagaggttactgaaataactgctccagagagaaaaagcatagtagtagaaaaaagatgtagagaaggaaaagttgaagaaaaagagaaaaggaaagttgatggtataagtttccagaaaggataggaacagattatgaggagttgacacttgtaatttttcatacatcttaaaaaatgacctgattagtcccaatgcttcagtgaaagtgttagtcactcagttatgtccaattctttgcagacccccatggactgtagctctccaagctcctctgtaatgggagaggagaatcatgggattctccaggcaagaataagggagtgggtagccattcccttctccaggggatcttcccaacccaaggatggaacctgggtctcctgcattgcagaaagattctttactatctaagtcaccaaggaagcttcagtatatgaagagatttgtatagtacatagttttagctgagtcacatggttctttctctctcttgccacttacaaaaaaaaatcttttgactatgtttggtaatcaatatcctgaccctaatcatgaatatcctattatgattctttctattcttgtatcacctctgttgataagatggaaaagtattctatctctggttatatccggttgaatcctgaggtaaagaaaagcagtaaatacctgctcctgagaaggtatatttctgagaatgtattagagatacactggttgagatggaagaggttgtatgtaaactttcaactttcagatatttctggcctaaaattccaccattatcaattcaagcttttgtaataaactctgactagtctctcttcaggttacccacatcagaaag

SEQ ID NO: 47883 - DNA, 831 bp, Bovine  19866880791077
  misc_feature (1)..(1): n is a, c, g, or t
naattgcatctttgttcctacccagcgagctggacggttggtgctaggagagcactattgctgcaatcaccagggttcagttagagagtaactcacacttgtttccatactggcctgtgcacatgctctttgtttgtgtatatgtttgttatttatccaattgaaatgataagtcattcaaaggcagggtcctagtacctaaaccctttcatatcctcagagcccccaatattaggatctcacctcctgtttttttcattctgcttagcaattgagaaatgaacttttcttccttcttagtatcgctagaatgtgagtagttcccatggcgatatggtgggagcgtgagacattgttctcatcctcatgaagtgacacatttttctagagagacaagaattacaaatatgaaacaggggcagtgcttactaaggtgctaaattgaggtgggtttgagggggacatggctgaaacaggattgactgtcctcgttttctctagagattaagtttttctatttctagacattctaatttaatcttgattcttaagactgtagttcatagattgactaacagaaacaagtctgtgcttcctcctcttctgggaaattttctgtattctattgggcacggtcatcctcatcctcagactctcccaacctaggaactacacccatgcaggatactccaacagggcttccttagaggagacaaggccattctgccaaaccctgtttcacatctactctttggagttacagattcttgggcatttttaggaagatgggcagctccagtgtaatatcgcagggcccaggagccaacaggc

SEQ ID NO: 47884 - DNA, 1467 bp, Bovine  19866880861395
  misc_feature (1)..(1): n is a, c, g, or t
ntgattgtctccgagtgaagtgggactaccctctgaaaaatgcctaacattttcctccaagctgtccagcggctgcaagagaaccaccctaatgtggatgactgcttgcccactctttaaaagcttaaatataacctattaaaatttaaatcagatctgactcttaagtaatctcttatagagtttaaataggagagcaaggatctttcccagcaacagctgtgtctgcctgcacctccccttttctcctgaggagctatagccgccgccctgtgcatgggaatcaggaggcctgaggaagggggcaggcctggagccagctccttgtgggggcaaaggtccagggttgtacatgtgtgtttctctttccaaattcaagcagaaattagttttgaatttttttgtgatacttaactaaactaattttgaacagttaaactcacttcatattttagggcagtttcaagaaccaaaatgacatgagattttggaattggttaggatttctcttccatagtctatatgtgcccaagaataagatggaattcaaggtactcctccaacatggttcggtgctgaggactgtttttagaaactcagtgtgcaagcataaaaaaactcacctatttgcttctccaaagatgatgctgtatgcctttggctggtggactggcaaaagagaaaagatatataataactatgaagctctttaagcaaaggaagaactgtcaaataaactaagcactggaaaggaaatctaagcacgcagaacctctcctaactcagactctggccaagcaattgtgcctgtccatgcctcagttttgcgatttgaaatagttctaatacttttaagcacttccagggaaatttagtttgtgcatttgaacaaattcacttctcagatgccaagttccttttctttgttgaatcaagtatgaggtaggtagtaaaggtcttcctttctcagatgatcagccaactgagaaaggaagaactcttaactgccagtcctaatttgatcctgatccctcccaagatagaaaatactccttccacccatatgagcccccatttctctgcaggtagaataggatggctagtgtgattcatttctaagacaggaagaaaggattgagaagtacgctgcaagccaagtgtggtccatgtggattcctgttgccctcctcccccacttcagcagggcagtttcaccccatcccccacccctgcaccttcagggtgtggcaatcccccaggcagcttacctctctgagttcagccaactccttctgtagatggaagagctgaaatatccccagccccaatccaaccagggccaccagaaccatgaaaaacatcacaaggagacacaggcctgtgtatgtggtccctcctcttcttcagaggtggtggcggtagtggaggcaggggtggcggtggcggtagtgttgggggtggcggtgg

SEQ ID NO: 47885 - DNA, 1550 bp, Bovine  19866881023072
  misc_feature (1)..(1): n is a, c, g, or t
naaatagggtctgcacaagactgcagcaacagtatatgggtgtgtcaaaaactgaacagatatgggtgtgtcaaatactatcgtattatttatattccagattccgttggtggagacagagatgtagagatgttgttgctcaattgctaagttatgtctgactctttgccactctatagactacagcatgccagactcctctgtcttccattatctcctggggtttgtgcaaattcatgtccactgagtcagtgatgctatctaaccgtcttatcctttgtttctcccttttccttttgccttcaatctttcccagcatcaaagtcttttccaatgaactggctcttcacatcaggtgactaaagtattaaagcttcagcttcagccacaatccttccaatgaatattcaggatgtaaggatacttaacttgaaaagtgtgagagacagaggcagagagaaagagagtgagacttgagaaatctttatagactattttatttagttctctcaggctcaataacagcaaaactagaaaggacacttgggcaaattctgagtcataaaaatacttgtggctgtacatttcatattactaaattagagcctattagaggttttatgactagttcttggcaaaaagatcagagaatgtcctttcatctgccagtgctaactgaaaaggcagtagatttttataagcaaaggcagcgggctgagcatgtaaatttcctgaagggtgcctttgacatttgcaagtaaaactctgttagaagcctagatgtgtccagtgaaaaacaatatgtgagtgtgaaactgcaaaacaatgttgtggatcatttggtcaaggtcatttcttgatccagtctccatcagtactgctataatatttacaagattactctattgggtgttttctttattttctcttctttggattgctcatgaattaagatttccataaaataaaacttttggtgataggaatgtagtcatcatggtttttatatttattacattttctacttaaaaaaataacttatgagggtaatgaatgcttgatgtagtagtcaagcaaatacaagtgaatagaccactgtctcctttgccagtcctctgccaaatttaacagtatctttccacgcctttctttatgtccataaaatgtattactttgtaaaactggtgtgacattcttctcatccctgtatacactcctttttgcagtatgactttgtggctcctctcattaagaagtcaagtccacttcttcacccttgaagctggacttgccaggagtgagttcccttgatcattggggcacgactgacaagacactgggagatcaaaggacagaaatcttttgcctttgggaattttctgagcaccacatgagttttgtcacatgtatagttatgcatagagctcctcaaaactatgaaacaagaacagtacatagagaaaggatttatgaaaaaaaaaaagaagaagaaaaaatggatttctgaagtctttgcttaacgaggtgggtgttttatcatgttgtgtgat

SEQ ID NO: 47886 - DNA, 1662 bp, Bovine  19866881057851
  misc_feature (1)..(1): n is a, c, g, or t
ntgaacaagcttggggaatatcatcttaatgaaatgataaaactagaatcattagtaatgtgacaaatcagttacatgctctttgacaagatgcaatgagaagaatgcagcatcacttctatgctatgcctgagagaaataaaactggatactctccaaaaaaaaaacaaaaacaattctgtaatccctcaaagtaccaagatcctgaaagtcaagaaaagaagaccaaagatagaggcaaactaaagagacacaactaaacgcagtgtgtaattctgaactggatcctttccttataaagacatcactgggacactgactgaaacctcagtgaaaggataagataggatggtattaatagcatatgtcagtattagtttcctgattttgatggttgctgtggttatacaggggaatatcctcatttgttaagagtacaatctagctttaaagtatgataggggcatcctgtcaaaacttactctcaaatgtttcagaaaaaaattgatttgttgtaacttttatgtaagttcaagatagaatcaacattttaaacttcacactaccatatataaaatagattactaataaggacctactgtatagcacaggaggctctactcaatatcctgtaatgacctatacaatgaccaaagaatctagagaagagtgaatatatgtataactgactcactttgctatacagcagaaacaaagactatattgtaaactaactatagttcaattaaaatttttactaaaagaaggacatcaaagaattttaataataaatggtgaattggttataccacatgttctgggctggtaagggtccccctgaaaaaggcagatagtggagtctctcctgggtgatggaatagggaagggtacaggacatgagtgcagcaaaggtggagagcttgtcccagcacaccctacccaagccggagactgagggaatgatgcatctatgcatcctcatagcagagatgtcctgatgagtgtgcatggcagtgctttctagttctgagtcatcaggtaaagtcagcttcctctgctcttctcagtataaatggttttttaagaataagcccttcccctctagagtccattcccatgtagatgagcctctagaagttggtaggggaagggaaacaactctgggtttggaacgttaaaacctggtttgaccttgggcccttggggcatcctcctttcccacctcactgcttgctctgagcatcagatgagacagttatgaaaactccttagaaagggctgtggaaatgctagtatcaccatggctcctcactatctgagctcacatgaggaaaattaagaaggtgaggggttttttttgtttgttttttgcctctgttttccttttctttattacttgtcatcttttgaaactacctttgatccagcattctcagcagctcacttattaccctgttttgacccatttgcatgtatcttttctgtctttctatcaaaatactaattgctcagccaacacaggaaattgtggatctcaatcacacacatactatgtgctgagccagtaggagcaataaaaaagattacatgcacgctcagtttctaagttgagtccgactctttgagaccccatggatgtagcccaccaggcttttctgtcca

SEQ ID NO: 47887 - DNA, 1158 bp, Bovine  19866881106050
  misc_feature (1)..(1): n is a, c, g, or t
ncacaccagggcctccctgtccatcaccaactcccagagttcactcaaactcatgtccatcaggtcggtgatggcatccaggccatctcatcctctgtcatccccttctcctcctgcccccaatccctcccagcatcagagtcttttccaacgagtcaactcttcgcatgaggtggccaaaggactggagtttcagctttagcatcattccttccaaagacttccaggagttttaagacagaaatcatattgtttcacaatcatgtgaattgttcttctctgaagagaattcattttgttcttaagagagaaataccatttttgaaaatcatctcacttcatccttatccatcaaatgtgtcactaaggttcaggaactaattacctttgtagtaccaagacaaagaaaaatgaaaaaaatgaacagtgatcacatatctccattagaaatacagtaaatttgagacaaatttcatacaccctttcccaagacacatagaaagaataaaactctaatataccctgttggagaattatcattggcttgttatgactttatgtggtttcataaaaggcaaggaagagtcattgtgctgcagtgtttgtaaaaacggggaagaaagaagaggaagcaacagaactcctggaaagctacgactcaagtggggagtgaaactcaaggggtgctgggatgctggggaaattcctgcaaggttggaaagcaaaaaactgagaggacatcagatttcaaatccatgggtgacagcgcactcaaatcagaagcttaagttagaagtagagaagagtgctggtataggaccaaaatatttgtgttcaagagtcctgtcctttacaagtcacttctttggacagttttccactaatggtagatgcttacttcctggttcacggtgatgttctcagctgtatgtatttacatgataaaaatggagagattgcaagtcaacattccattgagagttaaagctctgtggaaccatttgaatggagactgtcaatccctttgatagcttgaatccattctagcaggtcccagggagatgatcaattcctctctgaaaccaagaatccaactaagcaaaagatcaagagctccatcctaagattcacaatcctctgcatcattcctgtgaacag

SEQ ID NO: 47888 - DNA, 1034 bp, Bovine  19866881148138
  misc_feature (1)..(1): n is a, c, g, or t
ntatttttgaaatatttttattccaatgttttgagaagacagaaagctaatacacaaattacaacttcatctttatttaaggtacctttttctgggattgtacatcttcattttctagtgcacaattgtcatcttgagagtaatacgatgaagctgaagaactctctttacaacacacatgccaactgggaagcctgtaaaacatccaccgacaccatcaaaaaaaaaaaaaagtaaggctgttaaaacaacatattccataccatgaactagaatttgaggcaatagaccaatagatggttcttatcctaatgttcttgacaatttgacaatttaatgatgaagacaaatgtacataagacaaaagtttttttatttaataccctaagaaaaatatagtgttatcagcactccaagttaggcatcattaatctcacaaaggtaaaacaggaaatacttcacaataataagagtatctgacaattatcacagaaagaacagagaaagctgacaaacagctaacctcctcaaaagctccagatgccactgatattctaaattctaccaaatatttaagaacagataatgctgaagctacctaaactatttcaaagtatagaagtaaagcttccaaattattttatagggaacgtaacaatgatatcaaaaattaatggaaacagtacatatatataaatactataggttaataatacatatggaatcaaacacaaaagttctgaagaaaataaaaaagaaaaaatctccattaacataccaaagatgtaacacaccactgttatggtcaagtagagtttagctctgatattccaaaatggtttaaaatacatttactttgctatgcaaaaataccaaggaaaagaaatctcaagattatcctcaccaaaggacatttgataaatttatgcaggcatcaagatgttgaaattaataaaatagtaataagtagatatttaacatggggaatacatagtacatgcataacacataagcctaagagtcactatcataat

SEQ ID NO: 47889 - DNA, 1053 bp, Bovine  19866881166704
  misc_feature (1)..(1): n is a, c, g, or t
nccttcttgaggttcattctccttcttactcaatttaaattccatggggcgatcattataatcatgcccatgtataattactattctcccttgcccttctctcagtctgattaatcaccatcctgggtaaattcaactccccatctgctctagtttgcactcatgtagctatacaaggtcagcaaaacacacacacacacacacccaacttcactttaaattcatgactaccagtctcaagtgagcccttccttactactgctgggcatttatactaagcatccctagttcatccactcccccagtgtcacaaactgtttcatatcccctcattccatcagttcccctcactctcacatcccagctgattctttgcctcctacttccctgagaaaagtgaagcaatcagaaaagaacatccacagattcccatcacctcatctgtccactagccatctacccacttacctgcatctgtatctatacgtcgcgccttcccacttgttcccagagaccaactcttcttctcttcctgaagccagtccctcccctgtgctcacttgctcaagaacatgacctcagcagttaattctcccctttctcacatcaactattactttctactgtttcatttccatcaatatacaaacattctcccatcttaaaaaaacaaaacaaaacattttctttgccctcacctcccctttcagtttctgtcctatttcctggttcccttttgatgcaaaacttccagagagttgcctgtacttgctgatccaatttctcttctcttgttctcttaaacttacttcaaataggtttctattctcaccactccacaaatatatatatattaagggacaccaatcacctcctccttgataaatccagtcatcagtgctcagtccttgctttcttgatttttcagattttgatctaatcacagttgaccatcccctcttcctgaatcatttgcacttggtttccaggattctaaactctggatcttcctcctgcctcagtcgttgtgctttccaaatctttttggttatt

SEQ ID NO: 47890 - DNA, 1223 bp, Bovine  19866881186454
  misc_feature (1)..(1): n is a, c, g, or t
ncacagtcacggaaaccaaccagctactctgctttttgccaaaggctttcccaagatagccctccagatacagacctgttaaatgagctgcttttttcagttcctttttctcagagggtggactggggtgacctgtattatagagagatgaaagatacatgtaaaagtgacataactactattcttttttgtgggactctaaacagggcatttaaataaaagatatttttataagcataaatggcaacagtctaacatccactaatcattcaagtccaaactgcaggacttacagcagcctatatttcagaaacaggtaaaaaggagtcaaattaagatagacatgcataaattataaattacaaaacaatataaaggtcagtttataaagccctccatataagttactgcatttataactcccaacaatcctttgaggcggcaatccttacagatgccaaaatgagcttggaagttgggtgacttgtccaagaagacccgctaactcagtgtcagagtgggaccaacactcaggtctcctgagtccaaatcccgggctcttgcgtctctggctctgctgccctcaggactacaggacaaaggttgaagaagactgctaatgtccaggccactaggtcttccccagcggcattctacagttggccccagattaattcctctaaggtctcaaacaccgcgaatgactcctcattaaacaggtaattgcacacaggtgttccccaccacacgctctctgcccatctgtccagcctcctctggctcactcccctaccctggacactgccacacagcagttctgagcacacccagcctcctgcctctgtgcttttgtctgtgctactcttcctgcctggaatgccctcccaaactgatctctgtgtcaaattcctattgacactacaaacaccacctaaaatatctcttttcctggaaaaccttcccaagcctttctaatcaaatatgatttttccctccactgaaacctggaagcattctggcttcaccctattttgtccattctgactcacctttttttcaatggtaactggatgactggtcttactcctccaaataaatagcaaattccttactatatgtttcatctaccagagtaattagctcagtttctaacccagggcatgcaatcagtatatgtgcattaaattaaattgaaagattgaaaatagacaacagttctcaaa

SEQ ID NO: 47891 - DNA, 1079 bp, Bovine  19866881245328
  misc_feature (1)..(1): n is a, c, g, or t
nccagcagggtgggtcaccctgggaagagaactcttgttattgctgtagcatctctgcctcaccttctgcctggaacgaaggaatgttccagaggaagagtataattggagggagatgttccatggtaggaaatgggtggatcattttagagtacagggacagaagctccaagaaagcaggccaggcaggaaaggactgctcttgttaaatatcagtggcttgtgtgcagaccttgccaagaaggagctctggggtacatgtcacccattatctttctgcttttctcaacagtttttttctagctttgtttgtacaccgtccactgtctctgacaacctacaactggcattggttagttcaaaaagggtgaacttctctggtggtgcagtggtaagaatctgcctgccaatgcaggtgttccatccctggtctgggaagattccacatgccacagggccaactaaagtctatgtgtcacaactactgagctcacgtgctgcagctactgaaacccacgtgcctagagccttgctccagaacaagagaagccacctcaataagaagcccacacgccacaaggaggagtagcccccactcgccgcaactagagaaagctggcacaaaagcaacgaagatccagtgcagccaaaaataatttaaaaaatttttaacattaaaaaaaaaggaaaacctaaagggccagagaagccagagtgactaaagaggagaaatcttatggcagccccaaaatggccggggccctccaggttcagggtgaggagcaacaacttgggtgtcccccaggttttctctgaagtgcccaagggcctgacacctcacacggggcaccctcggttctaacttgctcttgttttgccttctcagatatcctcattcctctgccacttttctggttgcatccaagaaggatatgaatttgccaattttgttccaagttccagatatcttatcttaaggtacccaattattttttaatcgaaaagaaacccgaggctataaatagttccaggatgacagaatatgaatacaaagggtatcatatctccctaacacagcc

SEQ ID NO: 47892 - DNA, 1378 bp, Bovine  19866881285022
  misc_feature (1)..(1): n is a, c, g, or t
nctcccatacatagcacctcgttcagacttccccagggatgttactgccagcatttttgtgtagttcggtagcggatgacacattggttttacaggtataagggcttaatcatctttgaccagtttccaacagtgccagaccataatgagtgtatatgatattgcctgctaagccccgcccccttcctttgaaaactgtctctccccaccactttatctttttggacttatttcatcccattgcaatggtcataattgattgcttgatttgatagggtgcctttccaagttgggctaggtgccttcttttcgattttttagcttggaactacagtggccaaaaggctatatggcattaatcttagaagatacttcttatcagtcttcaggctttccaccatgtggaaataggcagtctgcagcagggaaaggaaaaagataactccagaaataagggaaaaggtagagagagaatccccaccaagttaggtccctgggtccagcagttcctggggtctgctatatccctgccttttttgtggcttagttgctctgggagaaaagccaggatccttcaagcacattttctttcttttttttaattgtatgaactgagtttctgtcacttgcagccaaaggattctggctcttatctggcacgtagaacgtatttgtaaatgtcagctgaacgacaaatgagtagtttctcagtgtccaaattaagaattatcatgaggatggaagatgtttggaaaggccacttggttttccctcattctgggggcaaatccacaggcatccagtcaaggagaaagtgctctttttttaaagccctcctggaagaagattttataacttccctaggttagttaacaaaggaaatgagaggaacatggacgaccatgacaacttgaatttctccttcttaaaagtctcctgccttcatgattttccatttcttagtctaaaaatgttattttaaatcttcaaatctttcatctctttcaattttcatatcacataaaatctatttgcattttccaattttttttattattaagattatatgttgctcgctgactacttttcttgaaaattacagcagcacatcattaaggagtatacgatacatgttcttttatccagcaaagatttactgagagccttgtacacggcaggcactaagaccagtgatacagaaacattacagctagttcctgagagaaaatgaaccatttaaaacctgctctaaacctgacacggaatttgatctgtctgaaatggaaataattacagctcctgtcattttcttcattgattcattcactgttcagtcattcaacaaatatttttaggtttctattttagaggtattgtt

SEQ ID NO: 47893 - DNA, 1278 bp, Bovine  19866881305137
  misc_feature (1)..(1): n is a, c, g, or t
nccgcgtgcagaacactcacctcgggacgctgggaggggccctagtgggccgagacggaacctgcggaggcgccccgaacgagtcactgctgttggggaaaggaggtaatgggcccggccggaatggcactggcggcgcccctgagtggggtcccggggaggggatggcgggtgcaggtccccggccggacgtcggtcgtgggagaggtgcgctcagcgtcggcctcctctgggtggtggggctttggagggggggacctggggacagagagagacatcagtttgctcatcctcctttccatcagaagtcatccttaaaaatttgttataattgactatgtttaaaaaagtattgtctgactaactcagatacacattagggatattataaaagggtaaaaggtgaaaggaagtttccttccccaccccttcctctgtggagacaaccagtatcttttcctgggtatcctttttatctatattctatattatcttctctctctcatatatatacatatatatatatatatatgcataaattgcttttttgcatacaacattctacaatttaaatttttttttaagcttcacattaactggactgtctttttacttcagtacttattctttttaatggctgtataacatgccattgtccaggtataatgtgcttgtttttgaaaggagctgagactatctgactctctctatccctcctgaacttaaataatccttttcctctttttgctttaggttcatattggacttccatggtggctcagacggtaaagcgtctgtctacaatgcaggagacctaggttcgatccctgggttgggaagattccctggagaaggaaagggcaacccatttcagtactcttgcctagaaaatcccatggacagaggagcctggtgtccatggggtcgcaaagagtcggacacgactgagtgacttcactttcactttcatcctccttcatttcattgaggctttcctagaataaccattttaaaattattattaaatttgtgccactatatttgtatgaactagaaattttattttgctatattttttagaggaattgtgctccttaggtatctaataatttttgtctgtggcagcatgtcatctggcggttttagcaaccttgtttgtgattgtgtatgaatttggattctctgttctatcttttttaaaaaatcaatttttattggagtatagttgcttacaatgttggtttcctctgtacagcaaaggattcagctaacataaat

SEQ ID NO: 47894 - DNA, 1030 bp, Bovine  19866881413174
  misc_feature (1)..(1): n is a, c, g, or t
naaaaagtggagaacagaaaagttaatgagaaacaaacaaatacagatgtggcactcagtactttgaactccgattcctcattttgtttttgttaagttcactgagtggcctttctctcttttatttagttatttcttagatgaagggaatacacttctctgccaacattctttcaggaaattctgtactggcctgtgtactggcctccacatgaagtcaaagtaaaaactcaaaaagagaaaagaaaatacaactattatacagggatgagccttgcctttaagaatcatattcgttaatataagctggtctagttgtattttgcacacaaataacaaagggtaaaatgtccctttaaaataattctagttgaagagcctaaatttaatcctgtattactgagttatagtttgaagatacttaaaacaatcaaaacttctataaagctctctttaaaaattgcttaaaaaaggactttatgcatctggtaccaaacagtctatggcggcagaaaaccatttataattaaatacaaccaaagagaggtcatacttgggacaactttatatatgaacattacactggcaatagtttcatgaagtaaccacttgctctctgggagcacacttcacctcagttccacatttatcactaactattgatcccttaactttatggcaaatacaattaacaaattacaagattagttaaaaacgaaaatgcattgtgtaacaaagtaggagacagtgcatgttatttacctacctcattttttaaattatttgaagaagcattcaatgcagattttggatcactaccaccctgatcacttgatgaaacttttgattcaaattctgattttgttatctttcctttgccgtgcgaagatgacacattttctatatgttggccgacaaggctatttgaaatcaaaaggcatattaaatcaacaaatttcagctgaataacaagtacacacaaatccaaactataaaaagtgtacagaatacaaagtaaaccaagaaagga

SEQ ID NO: 47895 - DNA, 988 bp, Bovine  19866881876158
  misc_feature (1)..(1): n is a, c, g, or t
nttgggcagatatttacattgatgtcagaactattttaaaaatacaaatggaaatctgccaaacagttacaataaggtccttcggtttgggtatttctgtcaggaacaattctgaataagaatcatgcagtaaggcttgcacaacacaagggcacagcaggattcacatcctgactctctcttccattaagaggcttcctctgaagacactaatggatcctctcacagaacatgtatagacatgagaaagaaattacaacaggaaagtgtgaattaacccaacagtctttccaattcatctttccacaaggagtctatgctaaatacaaagggaaagtaaatcaaaatttctcccctcccattcccttcttacaaagagtctttctctattctctggaaattcagctgggataaggacatgtgtaactactgaacactcttccattttcttactaccggggaaatgaaaagtggtaacttctcccatcaacacaccatgagtaaacaatggaggtcaactgttgagtcagaagctcaattactttctgtaagaaatgccttctgtagacctagattttcagaatcacttccttttcaatagctaagtgtcgcggtgcttcctggcaagtgtcactttgcacgctccagcagccgaaggtttgtgtccttctttaacttagtaaaacaatgacttcaagtcagtaaaaatgtttcccactctcctgcctttgatttgttcaacttgctccctttaaaaatctcattcttccccaaattaatgacactaatgtcaaatgctatcattctccatactggtaattctgggacaattggattaaaaagagttctaagtatttacaagtcagatcttaccgataagcaaagacatgactcaaatatatacaagaatgaggaagagggagtccttcaaatgttatcatttatttcaggttcagtagtacagcttcacattttcacaacaggtaca

SEQ ID NO: 47896 - DNA, 810 bp, Bovine  19866880369777
  misc_feature (1)..(1): n is a, c, g, or t
ncctgggttcgatccctgggttgggaagatcccctggtgaagggaaaggctacccattccagtgttctggcctggagaattccatggactgtataatccatggggtcacaaagagtcggacacaactgagctactttcactttcacttagaaaagaatctaacggacttctctggaggcccagtggtttaagacttcacgttctaatatagggcgtataggttcgatccctggtcggggggcaagaatgccaaatgcctcgtggccaagaaactaaagcacaaaacagaagcaatattgtagcaaattcaatagagacttttaaaaaatggtccacatcaaaaaaatcattaaaaaaaatagaaaagaatttgaatttctaacacctttatttaaatccactccttcttgaatcacagacaacattgtacttgctcacgtgattctcagtcaaatagatttcccttaaacactgagatagttcaaaagtctttttgagcaaccagagatttatagccgccagtcagtcgtgtgagaattagccagctctaagacaatatctacaacaacccactaagtgctcgtggcctccagaaatgaaggaacaatgtcctctcttggcaaggagtcttgaggagctccgtggagccacaggtagaatgcaaatctggaaaattgtgctgccaacttgcttcagctggagaaaaatctgtcgttagatgcttatcagacatccttttattgtctccgtaacaatggagagcagttccacaagcagtcattttgcatgcccttctcagcagaacagagg

SEQ ID NO: 47897 - DNA, 1983 bp, Bovine  19866880610889
  misc_feature (1)..(1): n is a, c, g, or t
ntggccacgtacctatcagctatagcatgaaataaaataccaccagtatttgaaaactacccccccttcacccagtatatctcagggatcatgtcttccctcatccccttgtcagagacgactgtgctcttcactttcttgttaattatttccagcttcgttttatagttttacacatgtgtatgcatccctaaacaaaatctcgcttgtttggtgtcagatggtactttcatgtcataaggaaagaaaacactgtcattcttcctagtatgggaacaaactgtactttttagggggaaaaactgaaatatgatgtgctttccaaatacttaaccaaggagaacgtcaaatacatgtggaagggaagacgttcagggagaaaccccagcacttgccttccccttcccaggctgcctttgtgttccatttccttctattttgtgattaaattccagccttccattattcagaatttacatgaacaactaatgtcaccagggaagtggtgactgttgtggaatttccaacctgtggcaattttgcaggcagaggcaggacttggagaaatcacccaccaagtgaagcatgtcgacaatggtgcccactaaatttctgtcctcttacccccaagacctccctgggaagctaatggcctctgtcggtctgtatcatctcatcataccaaaactttaaactcattatttgcattgattaactttaagacagggcttttaaccatttcctaccgtaatggtccagtggctaaaaataaggtatctggggagtctttggacatgaacaagctgaagtaagcatagatttacttacttttattgtgaatagtatctcatatacacagaagtgtctcaaatacatctgtatgatagaggatatcaataaagtgaatttctgcctacataccactcagctttaaaaatagagcataacctatagcttaaatctttctacagagacctcaaaaattgcttctgcaacattttatcctaaatctgctgcttctcttcacagttttgcctgcatatgtgcgtagtcgctaattgtgtctgactctttgcaaccccctagattatagcccaccaggctcctctgtccatgggatttcccaggcaagaatactagagtgggttgccatgtcctttaacagagaatcttcccaaccagggatcaaacctgtgtctcctgcattggcagatggattctttacccctgcgccattcctaagcaaaccatagtttgactttactttggggggagtttatataaataagctattatattttcctagaatttaatccttttgctcaaaactgtgttttaagaattcatcctcaataatgctgtgtctgtacctcatgatttttgctctttgtactgtttcattacatagatttatttactctgcttttgacagacaattgaatttatccattctgctttattcattcttattttgatccacacagttgtttattttttttcttttctagtttgggactactgcaaagagcactgatatgattatgggaacttgtcttctggtgtacatgtgtatgagtctctgaacttgaattccacctagaagtgaaattgcagagtcataagccatagtattcaaatttctaggcaattccgaagtgtttcccaaagtagtggttagggttaaatcccgaccggatgtggatgagagttctcattgctcaacatcctcttttaacatactatttcaccattttccccccaatctgatgcattgtgatcttatcttcttatttcagttattactgaagaaactgagcatcctctcatttattattataagctttatgtgtttccttttctttgtaatttctttttcggtctttcgtctatttttctattgggttggttctctttttcttattgattggagctcttaaatatcgaagttggtatagtgataagcaataattttagctattgata

SEQ ID NO: 47898 - DNA, 3333 bp, Bovine  19866880623118
  misc_feature (1)..(1): n is a, c, g, or t
nagtatgagggattctggtctaagtcaaagcccctcaccactatttgtcatgtccatttccagtccctgagttggaaatcagcctggtgagcactggctgtcaaattgcaccatctattgagaaacattttccaaattccaaaagattgcttgcctcgggaaagtgcttggtataagatgaaggtctgcagttttcctcctgtgtctcacctgatgtctcagggacagctttgtagcaaaggggaatatactgttgaggaaaatctttcaaagctgagtctttcccttcctcattccagataaatgatattaatgcacagcctgttacctaatgggattgcggtttaacttccttttctcaagccttttatgggaaagctcaaaagatggggcagcccacagtgcacactgaactgttcgaagagcgattcctaccaccgcaccctgggtttccctgctttcctgagtttaaatttgtaccaggcatatgtgttgaagcaatttgcaaatgtggcttaagataaacctttgctggggaatgtaagagagtagaaatgaggattgagtcttcaaagaggtgttactcatgtaattgtctcctatggaatgattaagaaaagaaaggcctggtttccactctgaactgcatttcatttctgaagaaagaaaacagatgagcaattattttgatattccaccaaccatagcgctttgggcagtctcataagggaaaaatgcagagctatgactcttgcaaataatttctattatgtaagtaccgagcctgcatcccttccttttctggcccatctctcctcccaccatgactttctaagatgtctgctcaatatgtatatccatagtttttcagagtgaaaatgttttcctggaggaactgggatcaggttcaactgagagtgattgaaaagttagaataaaattggcttaaatgagaggaacatttgtataatctcttatgcgaatgtggctgatccaggactggaatgatgagaccattgtaatcagggaccccaatactttctaccctgatgttccattattctcatcaggactcagcaccagccatcatatctgtattccaggcagcaggaaatacagaaaaaaaaggaggcagaataaggctacagcctctcctttagtgacacttcctagatatacacactactatttatagcccttgattctttcctcaaggatgatggggaaaatggatattggaaggcaggaagacagtttttcttctaggtggtcatggctgctagcattcagaggttttgttattgaggaagaagagggacataaactttcaggaatgatcagcagttccatgtatatttttaaatgagtttaggcaagtgaacaatgattacagagactgtcacatgtatcacagcaagaaaagagcaagcattgaggtgtcattctgaacaagggatgttcttatgtaccttgccctattctgtgcccagaatttaacagcaatggttgattggggggttcttcagccaatgtgggtcttgctgtgcgtcagcctaactgatcctgaaagaagtttctaaaagttgaaattttataccaactactagaagatcaattgaggatgactcagcagacccaactgagatatacgcttcttcaaacaattggcctctgcactgtatacataaatcaagaaatgaaacagagtgttgttctcacataagttctaattcatcttcactgaggagttgggaaaccttgtcaggcagatctgaaggtaatgccttgttgcaacccttgctggcactgtttcattttcaatatcacttctgtgtgcacactattgcctcggatcaaagctgattgtaatcaaagagtctcagtatctcttcctaggaaagctacatgtccctgctttacccacggttggcatcaaccaggttctcagaggaggggccctctcctatgaggacactcagccgcctgaggattatattagtcaaccctggaaaaggtttgctcttcgtgtgtgttctttggtaactctctgacaaatgctgtccaccagcttcctcgtggctctgacggtctctaagtcgcgggcagctcttgttcaatggtgcaaaatattccctcctcctctgcagccacttagcaggcagggcgtgggctggaaggggcctcagcttcctctaggggaccaatgactcagggcttgggaagtgaccccgctgggatctgggctgttttcatcatggcgcaactgtgccttcaggccccagcgaaacttcttacatccccttaaacatgcagtcccctgaaaagacaaaatgccaggaaattgacatggacacactgctatatctaaaacggataaccaacaagtcctactgtacagcacaggggactctgctcaatgttatgtggcagcctggatgggaggggagtttgaggaagaaatggatgcttgtatatgtatggctgagtccctttgctgtctacctgaaactatcaaagcatggttagtttaggactttcctcatggtccagcggttaagaatccacctgccagtgcaagggacatgggttggatccctggtccgggaagattccacatgccagtgggggcaactaagcctgtatgtcacaactattgaagccctcacaccctagagcctgtgctgtgcatgaaaagagaagccaaggaggtgagaagccagagcaccaaaactagagagtcgccctcactggccacagccagagaaagtcaatgcgtagcaatgaagaccggcccagccaaaaataaatagatatattttaaaactttgaaataaataaatgtgaggataaaaaaaagaagcatgggctgcctttgtttgttttctgcagcactttggttctaaaattgatttccattcatttgtatttgagtacagctgcttgatctcaggtaatgtagtttgggggtctgaaatcactttctggagtgggaacgattttatgcaccaagggttaaaagtgtaggaagcgtctttcaaatagagctctggtctcctagggtaacagtgtctgcgtgttgtcatcataaagccatgcggtcccctcttgaaaactttgtcatggccgggataagcgaagacactgaggcaccgctgcttcacgcaggtgacagtcaaatctcttgcttgttcgctgccaccgcggattttgaaatacctcaacatgccttctcgtaagagcttctatgcatttatcaaaattgtttacaggatgtttttagtcttttcttccaacacaggagtcacttctcaggactgttacctatcagtaagc

SEQ ID NO: 47899 - DNA, 1567 bp, Bovine  19866880655977
  misc_feature (1)..(1): n is a, c, g, or t
ntatcttagtggtggtggtggtggtggtttagtgctaacttgtgtccgactctttgcaactctgtgggctgtagcccgccaggctcctctgtccatggggttttccaggcaagaatactagagtgaggtgccatgtcctttcaaagggatctccccaccccagtgattgagccatgtctcctgcttcgcagatggattctttctgagccacctgggaagcctatcttggtggtagctttctacaactgtttcatggacatgagatcccaggtgccacaactaagttctgctgctgctaagtcgcttccgtcgtgtccgactctgtgtgaccccatcgacggcagcccgccgtccctgggattctccaggcaagaacactggagtgggctgccatctccttctccaatgcatgaaagtgaaaagtgaaagtgaagttgctcagtcgtgtccgactcttagcgacctcatggactgcagcctaccaggctcctccatccatgggattctccaggcaagagtactggagtggggtgccattgccttctctgacctggtgcagacaaataaataaatattaaaaaaagaaaaagaaaaagactagacttggagatatgccctgttatcatataggtttgcactttcccatggtcgtaggctaagtgacgctttgcaccctgggccaccaaagggcctcagcaggagaaagagtggctgacccgatccagcacaattgctgaaaacatccaggacattcaagctcacgttctggggatgggtgttgcccctttcgtgtgactgcaacactatgacaatttccagcaatcttcaggactctatcgttctgttctccagcgacagcgccgtgagccctctgctcgcattccatctctagccagtctccacccattaagtcgatttttaattttaaagcacgctgtccctgctgctccattcccgcttcggccactgtcatcgcccgcgtggagcttgtctgtgcttctcccaccccttctccctgcacactgctgccgaatgagccttatttgttcaaggactatttttatcccatccttctcctgctctaaaatctcccttggcttacccaatcaagtccaaaccctgccttctggaactagaagctgtcttaatctgctgtgagttcatctatgtagcccagatctcattatttccaaacagaaacatttgtcctcatcactttgcttttgctcacacttcaccttagcctaaaatgtcctctcccctgttttttttttcctctgtctaaacattaccaatcttttcaagatgagctctgattccttgactttccataaagcccatcattcacattctggtccgcaatgctcttctcttatctatatcatatgtggatataacacactttgaagttgaatcaaacactgttgtgaattgttctccatttgtttcactttacttccctggtggctcagacgttaaggagtctgcctgtaatgcgggagacctcagttcaatccctgggttgggaagatcctctggagaaggaaatggcaacccactctagtat

SEQ ID NO: 47900 - DNA, 1707 bp, Bovine  19866880713412
  misc_feature (1)..(1): n is a, c, g, or t
ntattcattggaaggactgatgctgaagctgaagctccaatacttggccactggatgcgaagagccaacttgttggaaaagaaccagatgctgggaaagattgaaggcaagaagagaaggggacaacagaggataagatggtttgatggcctcactgactcgatggacatgagtttgagcaagctctgggagttggtgatgaacagggaagcctggcgtattgcagtccatggggtcgcaaagagttggacatgaccaagggactgaattgaactgaagcacactgaaaaattattgttactatatataattctcatactttgaacctacactaatcaaaaggtggatctgatctctgtaaatgtgaggcattgatccacacacactttgatcagtgtcttcctaattacctgccaggatgcacaacatgaaaaaaatctgcatttggtgcaacccaccagagcaatggatgcaaagagataacagacaacactgtgacctgaaaccaggcttcctgacattaaaaaggaataatatccaagcaaagcaacaggctttaacagcctttgcttttcagtccacagctcagacattctcataagtcatataaactctgtgtttcatctacttcacctaaaacacggcttcccctggtggctcagatagtaaagaatccatctgtaatgcaggatttgatccctgggttgggaagatcccctggagaagggaatggcaacccactccagtattcttgtctggaaaataacatggacagaggagcctggctggctacggtcgatggggtcacaaagagttggacacaactgagagacaaacactttaaaacatggctacagtaagtatcggagaaggccctggcaccccactccagtactcttgtctggaaactcccatggatggaggagcctggtgggctgcagtccgtggggtcgctaggagtcagacacgactgagcgacttccctttcacttttcactttcatgcattggaggaggaaatggcaacccactccagtgttcttgcctggagaatccccagggacggcggagcctggtgcgctgccgtctatggggtcacgcagagccggacacgactgagatgacttagcacagtaagtatgcgggagccacagttcatatgaaacattcagagctgattttttgcaaatatttactatgacttgactccaaaaatgaaacaagttgagcacaaatatttatttatttttccctctctatctcccagttgagtttccagctggctatacatctcataaaagaatagacactaagataattacaatgtctattgaataatttttcttttggatagctacatggcccctcatttcctatcatcagggtgccatccagaatcattattttctgttttcggatactctgcctgtctaattaatagtacttctctctgtaaattctactgctggccactctccagccttgtggaacattccctaaaggctacacacatctcctctcagttctagtaaattgttattactgcttttcctgtaattatcccacgtgcatcacagttcaagaaaagcaaaatatgctagatttacagactcaggtggaaaaaatttgtctgtcaatatttttaggaaaaaccttagccatatcctcaaatagatatcacaaatccatagcaaacactagaaacagt

SEQ ID NO: 47901 - DNA, 1230 bp, Bovine  19866880760504
  misc_feature (1)..(1): n is a, c, g, or t
ntgttctctacctgctcttgagtcacctctgacccgggtttcttccacctgtgagatcattatttctcctccctgaagatgctgagttgtctgaaacccaactacatcagggattggtaaactgtggtctgtgagccctctgttttcacagcagagaaggaagggtttctttgtttctttacaattacaacaactgacagaaatcagaagaaaaagactattccatgatgtaagacacttacactaaattctgatgtcggtgtccataaataaaattttgttggagctcatccatgcgtgattgtgcatgtgctgtccacagtagcttttgttgcacagctgctgggttgaggagctgcagcagagatctgcagaccctgaaatatttgctctggcctttatcagaagaatgttgccgatgcctgatacatccccgttcctgtaattcggaagtactgcaattgaccatcttaacaacacgtctaatcttaggattgaaagggactcgatcacttgtctatatcattaccagaactgcagttttactctttttcaaaggctccgtgatgtcctggtgtaggcagagggacaggtttaaaatgaaaatcaacctaaaaagaaacaactcatccgaattgggtttgtggagtatctttgcgctccccacccccaccgtgacctttatgtgggcttcaggcaagcgcatgtgacaaaggggatgtatttctaatccccacctaagagcatgctgtcttgacgctgttattgtttcggtgtgaactttagaacaatcgcctctgctattttggcacatggagacttgcctccacggtaattattttgcaacccacaaaagtaattataaaatcaaataattagcttctaaacaagctgtaaccccagcgatgactcttgggaggggaatgaagctccgttcttcagttttcgtttttaggactgtcaccgtatacctcccttgcccctttatctcaggttttgtgttatgtcaagttcagtcttgactgctacgtcaagtacagtcttcagtgatgcaccagctgcccttgaggcggctttcttaaacagtagtattgctccaaggttatgagcagaaagaggaacaagcaagaaaagggaaaagtgaagcctggtttaatccttccagtgataggaaatccacttttaaaagggtgtcacagcctaccacactcaatacctggtttgggctgg

SEQ ID NO: 47902 - DNA, 1256 bp, Bovine  19866880846029
  misc_feature (1)..(1): n is a, c, g, or t
nattctcatatatttcacaaatcccttctggagaagaaaatatcaaaactacattgtgtttccctggtttggaagttgtggggcccaagataatggagaagtccatgttctttagttgtttgggccttgaaagtgacattttttttttcaggttactgtaacctcctttggcagagtaaacatttggttgcatttttaaaagctggtagcagtgaacagcaagaatccagtcacattttttaacgtagctccagaggaactatggtttaaaatcgaaagtcttctattcctatggcaaccaccagaagtgttcagctaatgctacgtgctgtgtacattaagccacgtactgtgcacctcccccaccttctgctgcctcctccccctgcgaattcatcctgaacttcactaaactgtctaccttgaaaaaggctcttttccagactcagagctgctttccaacatgcaagcaatcaagcccatgaaatctaaaagggaagactcctcccagaggaaacctttacaaacccagaggggaaatgtaccccaaaatagagacaccgtctgcttgcctgatttgacaggtttgagagctccttgtttgaaagccagacgtgaatctgtgaagagattcccttgagttacaacccttttttgggagcagctaccatgaagataacatatgtggtgagacggagccaaaacgcacccactgggcagccgcgcagtgctgggagcgcttctaacacgttctcaggaagctggagcggttagtcacggggacggaggaagagccctctgtggcgcctgtctcatggagcagggggctgactgtcacccttactgcctgctctccaaggaggactccagggttctgctctcctgaagggcttgttcttctaaagagtgagaacccaaagctggggattcaagatgcaaaggtcaagtcaaggcaggctgaatcttggctgagtgtttttaaaatttgaagagaaaaaaaaaacatttttaggcggaaatggcctggggatgtcttgcatacagtcttagagtctaagatatggaccaaatacggacgagtcattcacttctattccttgggggaaggttcagagggacattctggatcagaatgaagcatgaggccccgattggcttccctctaaaggctatcgttgtccctctgccccccatgtttcctcaatcaggatgcttgcttagtggggagttgggttaaggctctgtgggacactcag

SEQ ID NO: 47903 - DNA, 1965 bp, Bovine  19866880920615
  misc_feature (1)..(1): n is a, c, g, or t
ncccctggagaagggaatggctcccactcccgtgctcttgcctggagaatcccatggacagaggacccttgtgcgctacagtccatggggtcacaaagagtgggacatgactcagtgactaacacttaacacactaacccttgcatacacacatatagtgtgaaggtaagtcgatgaagcttcaagaagcttcagaaaatactgggagagacaacagttaagagttacgcctttgaaacttgcaagcaagcttgttcttccataccattcagtttcatccatacccatttgcatcacctccctttgaaaaccatgaagaggtttgagcgtccttgtccttcggctaattgtttagctcaacagtttgctgccacctagtgtccagtaaaaactgtcttctattcaatcatggttggtgaccaaagaacaaactggacactacttaccagagggcacacctcgcaaaaaccaacatgcatgggtcacatgataatgattcccacaggcatgctgagttgcttcagctgtgtctgaccctttgtgaacccatagactgtccccatagactgtctcccgccaggctcctcttccgtgggattttccaggcaagaatactggagtgggttgcaattttcctcctccagggatcttctcaacccgcagattgaacctgtgtctcttctatcttcgtcattggcagatggggtctttaccactagcgccatctgggatgacgcaataatgccatcatttaagattcaactctcattaatacatatctcataataggaattgaggggtggaggaggaagacagttccattttcaaattaacttagaaaaccaccttacacattttaaagcatccaaatttcaaagcgcttgaagttaattatgagaattctcatagcctcagccctaccacatgagtttaattaacagaactacaaaagatctggtagaattttggagggatttgcattttcgcatgaggtcttccatttttaaggatccttttgaatatgagttcccagaagaagggcaatttctctttcttttgtctacgaaattgtagacttcctccacttcaatcttccatttacatccagctacaattattccttcggaaagtctagttgttcctaggatatgacaaatcacatttaacatccactttctttctgagcctgagccacttatagctgttctgaagaatagatttcattttgggaagagaacacggtgctgttatgtaacatctgattgatgggagttaaagtgggcagaagttctcaaaatctgaagatgaagtgtctgaaggggaaggaatgtattatcagtaaaaaaaaaaaaaaaaaaggtgggaggacagaattgcctgctctgactaaggatgggttggaagcaccagcctctactgtagatcccatgagccaaggccagtgtccttgagaaccttggctgtgctgatgggcagtgctgactttctcagaatgcaggaaagccccttatcagaagtcctcttcagcaatccgtctagtcacaagtcaagacgtgtttgtcatacgccacactgtactgaaatatcacaatattagaactcacgaaacaagggcctcagcaactcagagccaagaacgagctaaggcaacaagaaagagaaagaaaaaattcagcctcactggtttggtcatactaacacctgtctcccttctcatctggccctttcgtctctcctgctgctgctgctgcttaatcatttcagtcatgtctgactctttgcaaccccatggacagtagcccaccaggctcctctgtccatgggattctccaggctagaatactggagtgggttgccatttccttctccaggggatcttcccacccagggatcgcaccctggccttctgcatggcaggtggattctttatcctgagccaccagggaagccccctctctcctgatt

SEQ ID NO: 47904 - DNA, 1404 bp, Bovine  19866880928168
  misc_feature (1)..(1): n is a, c, g, or t
nggtcacagagagtcagaaacattaaagaacagctcatcagaatactacccagagtgaaaagggtgtgtgttagtaaattatggatgctttaatattgtttacatagaaaatctgcagtgacatttcctctcctacccatttttaaggaaaacatcaaagcgttataatactgtgacaacataactaacaaggaactcgtttttacttacttagtatcaaaggttcagcgaccaagagccttcccttctgtactgtgggtctttcctttagtgtgaagccagtgctttgtgtaaaatgggccagttgattctgggatcatccattgcttcctaaagagctgcagcattcagacacgctcttagaaatacgtgggatgggaggaataggataattcaattcattcttcccttctgaactttatttctgagaacctgacttgccaacatctatgaaacatagaggaggcttagcaatcaatcacgaggggaggaggtgacagaagagggaggctggccaagcatccctaagcttcagtcattttgtatttcagcacaagagagcaggattgctgactgttagatttcctttgagaggcagtatgcaagcggcatattgagtattctgataaagccaagtataggtgtaaccctttaaggaaatagtcaatctggttaaaaagtgaaactccttgggtgaatattaggtaaaatttgacttacatgaaacttagaataagagcagaccttctagagcacctaattcaaacctctcatttgactcaagaagaaaccaagaccttgaaagttcacagattcatcgtcaggattactcagcctatggacccaagtattctgaaggactgaggctgcagctgcaatactgtggccacctgatgtgaagagccaactctggaaaagaccctgatgctggcaaagatgcgggcaggaagcgaactgggtgacagaggatgaaatggttggagcatcaccgactcgatggacatgagtttgagcaaactctgggaggtggtgatggacagggaagcctggcatgctgcagtccatggggtcacaaagaattggatacaacttcaggactgaaggacaacaaaattcggatactttgtccagtgttctttctactctaccacatgcctctctctctctcctcctcctcctccccacttctctctctcttatacgcacacacacacacgcacgaagttcattcaaacaacaaaacgcttaaattgaaaggacagctatctaggatttctttcttttaccttatccccacatttaatagcttcacacccacaccccaagaaagttataaagttgcccttggctttacggtgataaacctcaaacactgaaatctctagtcagataaggtctgcaagg

SEQ ID NO: 47905 - DNA, 3480 bp, Bovine  19866880959813
  misc_feature (1)..(1): n is a, c, g, or t
ngggcttccctggtggtccgtgtttaagactcccacttccccacagtgggcacaggtttgacccctggttgaggaactaagaacctatatgtctatagggcaccctcccccacctccaaaaaaaaagctacagtaaatattggaactaggttggaaggattttgctgtttggtgaggggtgggtattttaaggaaggacattccaggcagagggagcagactttaaacaaagtcatggagatgatggtatagtcaagaatgtaaaatcaaagattgggtagccaggagatgggccagaaagttccccaaaggccagctgatgattgcctagtgtgtaaggccaaggagtatggattttattcaaaaggtaacaggttgctattaaaagctttaagttgagaagctccatgattaacgtctgctttcaacgcatgctcgtgctgaaggcaggagagaacatgaatgtaatgggtggagagtggaggcagggagaccaggcagaggtccccagactcgagaagaggtgacaggtaggcttgttatgactgagcggtctgttaggggtgctgagaggagagggcagaaaacgtgtagtcaagcacggttctgggtaatttgggcgaatgggaccaaccaagaaaggaatttttataaacctgagatttattttttttaatcttcatgatcctctggtggcatgaaagaagctgaatctttaatactacttcagtttcaagcttatttgatattttcttgctccacccaggagaacatcacttgaattatgccataaagctagagccaaatgaattcagttcatttttctaaaagttccaagtagggacagacaaatgtgtactcagagaacaaatttcaagccaaaatgaccacatatagtctgaagtttggccatctaatgtggttaccactgactctttgtggctattgaacatttgagatgtagatactaccctgaattgagatgtgatgtgagtgtaaaatacacacaattcatatcagagtgcagagacttagtctgaagtaaagaacataaatgctctgttaataattttataatattacatgctgaaataatattttgaatatattggatttgaagtaggaggtagaatgagcctctcagctggacagctggtgtttgtcaagctgataatattaccaaaatcagtttcactagttttttttctttttaaatgcaacaactagaaaattttaaattacatatgtagctcacattgttttcctgttggacaacactggtctaggaagttggagttttgtggtgtcagtgttgagggactgtacagagaccaagtatttattttgcattattgcttcttcctcaccacctgatgttttctaatattttactatgtagccttattctcattaataaacaagtagttaccatagcaacggccacaccactctgtatttaccacacctggagggagagatataaacagacatcaatctgtcattcatgtttatacggttctgttttttaatgtatatctgggtcttcctttgcaaaacagagctctgagtgtaggaaaattgacttctaatttccatctatgtcactgggtttctttgggtctggaaaagaagaataattaccccatgcccacttcagagggatatgtgggtagttacaaagaattttgcaaactattcttagggcaggagcatgctcggtcgtgtccagctctttacgaccccgggaactgtagcccaccaggctcctttgtccatgggattttccaggcaggaatactggagtgagtgggttgccatttccttctccagggtatcttcccaactcaggggtcaaacctgcatctcctctgtctcctgcattggcaggtggattcttttaccactgagccacctgggaaagtcccattcttagcgcagagtatcagtctaatgtcacatagtttagtatagccgtggtatcaactattaatacactgttgcaggcaggcaagaagggcaggggaggttcctttggccgataggagtgaggaaatgcaaaagggaaaaaagaggtcagaccaagaaaagccaaaaggaggttagcgtttgttagcgtttgttccctagcctttaacagtctttttggagcatttcccatcttcagcaacaagtctccactggctaggaggagactaggaacccagagccaccactgtatacagttcatctggctttgacaaggaaaaagcaaacaggttggagtatttattatgttttttatgttgatcatttggtgactcagacgataaagaatttgcatgcaatgcaggagacccaggtttgatcgggtcgggaagctccgttggagaagggcatggcatcccactccagtatgctcacctggaaaatcccatggacagaggagcctggcggggtacagtccatagggttgcaaagacttggacatgactgagcaacgaacacttgaagtgttatgctcatttaggccccccaagtttctcaaagatctctcattcctgggtcaattctgtcttaacgtacttaccactcaatacacatcatctgaacagagatgactgatgctaagaaagggaaattaggaccgatcttcattaccttcacccaggacagtgctggctccaaatatttctatagactggctttaagaatttccatgtgcttgatagcagaggctgggggtttggccatgaagtggtgtttgcacatcaagcttgcagttttcagttgggtgtcatgcttctttgaggtagctggaggagggatgttgatgatcagggtcggggcagggttttggctgaagacgctaaagacctctccactcaatctacccctttgagatttcaaggaacttagatattgtggctaaagtaataaacattctaggttttggatttcatttgcacaggtgtcattaaatctgtgtgaagctgttcaactgatgatgagctctgtcatttgcaaatccattcactgattcatctaatctacaaaccacccaccctaaatgaaaatcaaggatactgctacagctacatctcaagatgttacattttgagaaatcccctaactcagcattgacattcagaaagtcctaaacctggagaaggaaatggcaacccattccagtattcttgcctggataatcccatggatagaggagcctggcaggctacagtccagggggtcacaaggagttgaacgaaactgaagtgacttagcacacatactgcccaagaaaactcaaacctcaggggaaataaaaaaaatacactacagaaatgcagtggctctgctgaagttgcaagaaagggtgatcgtctttgtttggtgttttgagcgtcttgccctccgctccaaggaagggagagggaggtcgtgggggtaggaaggagtgtggatttctgatcacaactcaaatggcactgtttgaattatata

SEQ ID NO: 47906 - DNA, 1587 bp, Bovine  19866880997959
  misc_feature (1)..(1): n is a, c, g, or t
nccctggcctggagaattgcacggactgtataatccttggggtcgcaaagagttggacacaactaagcgactttcacttattgagcaaagtagaaagtctgcctcagttctttcctaatatcctagaatgctagactagaagattcttttgcaacacttaagccagtatctgtacttatataaatcaagaactagcttccaagaagtgacttcataaactgtcaatccagtcttttgatatcctggcttagtgttgcttacaccatattggtagcctcactggattcaacttgacagaactgggtagagacaataacatttctaggttctggtatgactttaacctaatgcaaccctttggatatatacaacccttaagatcatgggaaaattgagttatgcattattttatgtaatcatggtaaaatgtatatagccagttaatgggattccctggtgcctcagaggtaaagaatccacctgccaatgaaggagacatgggttcgatgcctgggtctggaagatcctctagagaagggaatggcagcccactctgatattcttgcctgcaaaatcccatggacagaaggagcccggtgggctacagtccacggggtctcaaaagagtcagacacgactgagcaactaaacaacaaacacaaggccaacattaatgagtagatgcagacttctacccctactcttctatttccagccaactgatttattgaaaaacataaatattttcagtgctcattagtttatagtgctcattagtttgtagtcctcattagcaatttacgataatataaatgaaaaaaaaaccggtcttaggaaccaaaagtgcacacaaaattaatcatttttatgtgctggaaaatggaatatataactaggctaaaatagaagctgaacaagaagcaaaaaaaaatttttaaagaaatgtacccacaagcatcaaaaaaagagcaatagtagagatgacctgcctgatccagatgattccaggaaatttggaaaacatttattttgtttcactcaatctacaatgccatcagctgtaggatgtaccattattttatgtgcaccaaaaaaagaaaggaaaaaaaccaattaaaccatgacacaagcttcttaatcagctcaattataagatggatcctgctttctcaagtgttaaaatgttttttttttttaactgcatatagtaaaatcagtgaaatatgagatcttatgtttgaccacacaggaattgacgacgtctctaaacttgatgacctccccagtgagaagccccatcacacatgagattttcatctctctgttctgagaggagaaattttttaagtgaccacgaatctcccacccacccctccccaccccacccccgacgcccttctcaaaaagaagatcagttacatccattctctgctcttggatgataagagtgacaaaataaaaagtatgtgaagatatcttatacatgtggcttttttagggaggtagagacattccataatgttttaaagatgagcacacatgttaaatatcaggctgtcctttcaaagcttctgtattgggaactgt

SEQ ID NO: 47907 - DNA, 995 bp, Bovine  19866881011185
  misc_feature (1)..(1): n is a, c, g, or t
ncactacacacttccgttaaaatagctggctcttcctggcatgcacaaatagatgactcaaactgagaaacagctgctggagaacttcactcgcagaacctccactcatgacgacggatgattcaaggtcagtctcggcagaaagtgaaatgtatctgaacttcctttccttcacagtgggcagcgctgctttgggttctggcacttaaagaagggtgaggctcctgacctcattttctcagtgactaaagaagcacaccacacacactggaaagcaggattagccgggggagaacttggcagaaattaagcacccccacatgaggttccccctgcacaagaatccttcgaaacgaaaggctttagtcccatcaggtgacgtgtgaacatccccaaagacagctccgtaacacattctggagcatctgaggttgtggagatgacgcgtattgtaagcagaagcatcgtgttcataactacacacacgaacccatacccttgagtgtgggtacagacctttccttactgcagtaacattcagagatcccaatttaaatcaattccccaaggctgtggaagtatcccatttgggaagcaattccgtcaacagaatgactcatttaataaatattttagcttgcatctcattctctattatagtagacagtaaaagaccggctttagatcatctcactaatccatttatatatcccataggtgtcgtcagcttatagagtagccaaaggaccaaacgcatgtcagtgtgtggatatcctcccgcagacctcccaggagttgctgcctcctgtgctgtgtgcctgcctttctccagcatggttttcctcctaccgccatccggcacagcctctcttgcagtttcatcaaagaaaagtataattacgttagcaggactcctaattttgaaaagacattagccaagccagtcacttcattacgctgcacttcagaggccagcaagataccagagaaggccc

SEQ ID NO: 47908 - DNA, 2587 bp, Bovine  19866881052115
  misc_feature (1)..(1): n is a, c, g, or t
ntgacccaggaagctctgaagcatggattgtctgcagagttggtcccacctttaggcagggggccagccctttgtcccctgggccagtcattcattcactggctgccagctgctctgggtgggacatgagtggagggtgagtgggcataacctcccagatgaagccggtctgcatggtttagggcgggtctccagagcagtgcttctcacactttgctacacattggacactcctggagatctttaaaaaaataaccactgtacttctttcataatcagacctcatgatttaaagtgcttcctcctgaaactccctgatgtccccctctgttcctgcaagcctcacacaccttcctttgggcagctgttctgcagccctgcctcagacggggaagacacatcaactccgctctcttccagcccctccgcctctccttgttacaggatccatcaccctctatggaagaggtctttctacccatccacattgcccactgggccgggctctccctgaaggatgtggacagttttaatgtgtctctctcatggctcctatcccactgcccagcacagaggacagtgttagcatttgctacatgaatgaatggatgggcacaactgcagcacttcagatgggtggtaccgacactaatgctccagggtctccaagcaggaagtaatccttcagggatggagcaggctttgagggaaagggggaaattaaaccaggattctgaagaaaaaagaaaaccaaatccctgtaatttcctagttctccatcattctaggaccctgggggctaatttcgagtcagctttgggggtaggtttcaggaaggaaggtgaaagaaccaggcatttcggtgctgctctctgctgcctggcagaagcactaaccatggttttcaacacatggagagaaaagggctttggaaagagatcttgtcctttccccatggtcacctgaagatgatcactcacccatcagtgggccttcctctcaggaggcatctgtccttctcttgctcaacatattaaagaattctgggtgaaacggtggtgtgtatgggcacagagccatccccccagcaatgatcaatggctctgaggtccctcctcatctgagcctgacagaggggctccgaagcgtccacagagcctgcacgtggccaggactcgaatgagagccaacatccctgctgaggttcacgactggtgagacagagatgatgctcaaggcagggacagagcaagagacacctgccggcagcatcagaggtctcactctcttaaccgggagatttgctaacctgccgggatcacatttcctggagacggcaaaggctgtgcagaaaggttacatctgccttcttacaggtgggcttctggatgttgctgggtttgcttttcaccacactgctctccacaaacacactttacattctccaatggtcctgagtcccaggctttgtcatcagggcatttggtgtgtgcatgccaagctgtgatacaagggtgatgttagtggtaaagaacccacctaccaatgcaggagacacaagagacatgggtttgatcccttggttgggaagatagcctggagaagaaaatggcaaccacactccagtgctcttgcctgggaaatcccatggacagaggagcctggcaggctacagcccatggggttgcaaacagctggaccctgctgagcacagaatggcacatccatgatacagtatatatgcatgcacctgttttatccactgtggcatttaggtccagaagcaagcctggactcaaatcctggctgtgtgactaagcaaacactgagtttctttgagtcccagttttatggtctctataatggaagtaataatagtatcttcttcatactaaaaagtgtgttaactaagtgagattatcaaagcgaaaacatttagagttgttcctacaacagaagaagggatttaaaatgccgatgagtgggacttccccggtggtccagtggctaagactccgtgctctcagtgcagggggcccgggttcaatccctggtcagggaactagatcccacatgccacaactaaagattccacatgctgcaactaagaatttgcatgttataactaaagaatgcccgaatgccacaactaagacccgacacagccaaataaataaaaaaactttaaatgttgatagtatttttgttattgttatgattaaccttacaaaattgacagcctttaaaaatctatgcaagagattggaccatgcattgaggacaaaaatcaaagtcttgagacctagttctaaagaactcatagtctaaaggggcagacatattgcagagcactaaacagaagttcctgtttgacgctgggtcaccactagcctatatcgcacctttatgtgaattagaaaaatggatgctccttcctgccaggcgactggactttagacccttgccctcttgaccaggtgtccttgctcaatgagcaaccttaacaactgtacataatgactatgtatatatacatacaggctggttccaaataggaaaaggaatacgtcaaggctatatattgtca

SEQ ID NO: 47909 - DNA, 1282 bp, Bovine  19866881057867
  misc_feature (1)..(1): n is a, c, g, or t
ntgatgacacgttaactacttggttaaggacatccccacaaagacagaaaagatgcagcccgttttgctgtgctggccctagcagagctctgaggggcagatgggtgaatggaaacggttaggtccagctgggagctgtgccctcagcaaggacacagctgctttagaatcactgtttttgcctcagtcctcaaagagcgaattatgagctacgtgtaagaaagtttcaggggacggacgtggagaaggaatataacctgctcaggtgtctggctccaatgtagggcttaggtgggtatccacggccaccttccaggagcgtgaacggcagccagcttgaggattaagcattcccaagtataaggacttgcctaggtagtaaaggtctgaagaaggaaggagaaaggaatctcaactaaaggacagcccagagctagtttctggaacgtgttcagagcagtttttgacttgatctcaagtaagttcatcagagtaaatgttgaggggttcaagccttccttttatttttaggcaaaataaaaactcagccttcacagactattgtatattaaaaagtccttctaagaaggatactattcaggaacccctggaaatcgattttaaaaggttaattcttttcaatagtgcaccaactccctcctgctgtattttctgtttgcttttgctttttcccccctgctttatagaaggtacatccgagttgatgactttcttccatttcctgcttctctatgtatttgaaaattaattttgcctgtccctcccctcagccttaagcagagtctctatttccaactaaagattttaattatttaaaggtcttagggagtttttattttctctatcatgaattgtcaaaagtcctttccttgaatcccaagtttctctttgtaacgcagatttaagcattttcattcctttagttccaccgagacctttagtaaatcttaatacttccactgtatatcaaggatggtactaggcatccagaatatggtatttaagatcaccaccatctatgtaggtaacaggcacctaataacaaaacaagagtttcagtaactaatcaataataacaatgtaccaagcacttcataagcacacctccttcattctcagaaacccctatgaatgtggatctagtattatatgcattttgattaggaccctgaggcttagagaagtaaagccatctacatgaactcatgcatctagtaagtgggtggaagcagaataatataatatgctagtggctagaata

SEQ ID NO: 47910 - DNA, 536 bp, Bovine  19866881073696
  misc_feature (1)..(1): n is a, c, g, or t
ntgggactttctgagattacaattgttttgagtttggcttcaagcccagactgcacagaaatggagtagaatcactctgattccaatcttggatatctgctgaggtttctagtttttctgctctactttagggagtcaactcattcttatacatttgacctctttagttcttaactgtatctccacatcagaggtccatatattcttagtataaaatgtttgttactaaggatttcacggtttgtagacatcaacctttgtttttcctcctgatgtatttcatatggagaaaaaacaagatgttgatccattacgccctctttcaaggcatgttaaataatgtaaacatttgaatgctactaactgtagacagggcttcccagctggctcagtggtaaagaattcaactgccaatgcaggagacacaggttcggtcatgggtcagaaagatccctgcagaaggaaatgtcaacccattccagtattcttgcctgggaaatcccatggacagaggagcctggcaggctacagtccat

SEQ ID NO: 47911 - DNA, 1460 bp, Bovine  19866881109165
  misc_feature (1)..(1): n is a, c, g, or t
ntgcagtgcattctgtttatccgttcatctgtcgacaggcccttggcgttgcttccacttcttggctatggtgaacagccctgccgtgagcatgcgtgtgcaaacatcctttgagatcttgctttagttcttgtgggtgcatacccagaagtgaatgctgcgccatgtgtgtggtagctctgttttctatttttaggaaccaccatactattttccagagttactgcaccattttacatccccacccaaagtgcacagggctccaatctttccacatcctcaccatttttgcttttttaaatgtagccatccgaacgggtgtgaggagatgagcttagtttgaagaggtcaaaactcaggggcaggaaaattataagaatctagtatctaatatctggctatgagcttaaatgcttttaaaagctgccatttattcgcctcagggcacagaaatattacaagccaaaggcctcctttgaccctctgggattataagacttgatttcgttatagaggaagagtaaggatacattttatggaaaggatgaataagaaggaaggttatatttttcagagacagagataaaggtttcattgttattgtcatttttattttcaaaatagaaacttatccagaaatttcttcacaattcacgaaggacagtaacttcactgcaaattcttatatctctccactgtgtgtgatgaaagtcgttatacagagtcagcgtttccagtttatgaggaaacctggctacttggtatgcacttattctctttctttgaaacttctatggggcttgaaacaatgctgtccactcaacctgagttcctcaaatgaaaatttaggaggaaatacaattgcatccaaaggtagcaagtacagattttgtgaggttttcaactctacacttcaaacagatggagaatatatttataatgaaaaaagaatctgtgattatgtaaaacaggtattgacaaactttttctgtaaagggccagagagccactgtctttatggaaacgatgatactcaactctgtcacagcggctctagacagtatacaaatgaataaggcggctgtgttccagtaaagctttatctacaaacacaggactggagatggattttccctgtgggtcatagtttgctaacccctgctttagaagacccaagaaaaggaactttacagagttttcctgtcagttgaaagaggaagaacaaatcttcaagccctgtggcaaaaaaaaaaaaaaaaaggccaaccagcaaaagaaaccttgacaacatttctttcaaaactaagtacaaacctgtggcttttccataaaaactgtacctcagggctccaacgttactttcacatcttgatccttgatctaaagaagcttatcgtatatgagaatcgacataacctcagatgtagaaaccgaaatcctaagtcgctcaaaagctagag

SEQ ID NO: 47912 - DNA, 1523 bp, Bovine  19866881211208
  misc_feature (1)..(1): n is a, c, g, or t
ntggacatataattatattttaataaaaaatagatttataactcaacagtaaaccatgagattaagcggcccagaagctgctttgaactcgcagccatcaaaccctggcctgcccgcttgtactgggctcctgagggagggggtgatgggaacacactcacccacagtgggctgcaagggcttctgggagccaccttctctgactggcacttacacttcaaggaccagtgatgcatcagaactccaattttgataaacaaaagtgaaatccgtatttaacagaacatgacaaaaatcactgatttaaaaaatctaaagactaatggaaaagtcctgtcatgaaatcgacctgaaacacgctctgctgtagttcccatttgcttttgctgctccagcttgactattaaaaatgattttttttctcctactcgaactagcctataatttgatttctaggttcttccagggttgtgctctgaacagaagcaaaatgaaaatatttcaggggcttatttgacaagcattgcgaaagaaaacgcatggctatctgtggagtcataggttaaacctataaatttattttattaaacagaaagggaatgggtgaaatttaaagacactgtaaccctgaccctgattagaatgactaatattcttatctgatttattcatttaatttttgcttagagacatcacatacacatcgatggtaaccccttctttttggtaagtttttatctctctcaagattctgatgtattcagtgatgaatttggatccaagcaagtttttccaaaaaattcatagacttaaaaccacaaagaatgcattagcatttgaactaaagaaagaaaagttaaagttgtaacattttttccaagagagaacagtttttcacagtttttatataatctttcagaatataacatcaaatatgttttttattttattatgtattttaaatatatacaatatatatttaatatattgtatatcttaatatatacaatgtgtataatttttagtaacacaataacagtctccattaatactagactagatcactcttccagatgtctattcatacttgtagtaattgagttcatttttttcccaaacaataaaatgtctaatacaaataagtaaaggtcggatgagtctcaaataacatgaccagagtactcataaaattcgaagaagctgagtcagatcatttcaagaggacaaatgcagtgcttctccaaattcagtaagtggtggaatgtagcgatcttgccttgtctctcctctgagccaagcaacctggtgctgtcaaggccgtctttcatctcctgcgccttccaccaagtgctatatcgcttgaagaaaaatgcatgactttcttaattaaaaggaaagtgagtctatgaaaatgaagttgagcctaactgatcctgattctttcactcagactatgaacaggccgaagaagctgctgtaagatgtgacttattgaccatagctgttgtgactcatggacatgt

SEQ ID NO: 47913 - DNA, 1175 bp, Bovine  19866881223483
  misc_feature (1)..(1): n is a, c, g, or t
ntaagtacatacctattaatccttgcaagtcaatattgtctttgttttataggagagcaagctggtgatcacacagttaatttgttagaactcttgtggttgccagtgaaagtgaaccaaacccaccctggcttaagtgaaaaggataattcattggttcatataattcattggtctgggtttagaatggtttcaggcatggctggatccagggcctcaaatgattcaggggctaacctgagcaataccaccctcaaccttttattttcttctctgttggctgagaattgagccaattctcgggtgggctcttccttcgagatggcggaaagattaccagcaactccatgctatagggcaagggttgacatggtcccaaaggctggctgcctgtttgggtaaataagagtctttgaaacacagccatgtgcatttgtgtacatttgtttgaggctgctttcgtggtgcagcagcagaattgagtatttgcagcagaagcgaatggcccatattggagcttcccaggtggcacagtgataaagaactgcctgccagtacaggagacacagaagatacaggttcagtccctgggttgggaagatcccttggaggagggcatggcaacccactccagtattcctgcctggagaatcccatggacagagagaggaccctggcggctggagtcgctggggtcacaaggagtcgtgacagactgagccactgaacatacatatttatgatttggctttacagaaagagtttgctgacccctgcaggagaaaccaggtttcgttgaggtctaatttaaagctgtgagagacattatgtagttattcaagagcatgggactcaaggatctgaggttttaggataagcacagaatttacattatttagattgtccctttggattaacaaaagacttgagaattcttttaagtgcagaggttccattcccagcacaaatttgtagattaaaggaacaatagaatgtgttataaatttttgtagttgttacattctttggtggttgactgggagatgaaacaggaactttgttttgactatctcaggaagaattttttggataacatctactatctcaatgaatagaaacacctctataaatttaaattcccctcctgtttagtctgttagcagtgttctttgtcc

SEQ ID NO: 47914 - DNA, 1772 bp, Bovine  19866881224566
  misc_feature (1)..(1): n is a, c, g, or t
ngagactatccctaaatcctaggcccaaaatgtacttttgaagatgaaaagagggtagctctgctggttctgaactttagaggtcattgtataagcagctatatgactaacatgaactctgcagactctgaacaggatatgagatccttgtaacaggaagagagattttaatcaggaggtgcttccgtaagtattgatgtgaatgacgaccatgacgatgatgataatagtattataacagtgaccagtttttagacacaaagtcagccaggcacttaacctaagcactcgatacataacaccttacacaatcctcacattaatcttatgagttactgttattattcagtctccactttacaggtgggaaaattgagaaactgatgaataggaagatgtgattgtcagcaaagagaaaaaacccaggccttaaatgaagatttgtctattttcaagaataccttcccacactatgaaaatctggctcttcaaatctctatgttagtgactaatgtaataggacttcagtgatgagggagaaaacaagcctctttttgaaaaggctacaaaacagatgccagtataagtaaatctagacagcatattaaaaagtagacattactttgccaacaaaggtccgtcgagtcaaagctatggtttttccagtagtcatgaggagtgagagttgcaccataaagaaagctgagtgctgaagaattgatgctttagtcccttggactgcaagatcaaacaagtccatcctaaaggaaatcagtcctgaacattcattggaaggactgatgctgaagctgaaacttcaatactttggtcacttgatcccaaagaactgactcaatgggaaagaccctgacactgggaaagactgaaggcaggaggagaaggggatgacagaggatgagatggcatcactgactagacagacatgagtttgagcaagctccaggagttggtgatgaacagggaagcctggagtgctgcaatccatggggtcacaaaaaagtcggtcacaactgagcgactgagctgagccaaagaaaagtggtgtcattggtcttatcctaaaatgtcataaaacgtacatatatataaaatgcacatgcatataatataagcaaacatgccctggaggatatccacccaaagtcactaggacacgcagaaccagtaggatgttctccatgaagcccttgtgccccaggctacaattaggagctcagcaggtgccagtgtggcctgaaataggctcagatctgctttacttagaaaaggctatacacgtgtatggtggcaagaatctcagttttgaaaccaggaggatgtgggttcagatctgcaatctactgcctactagctgtaagataagggttctttttggcttctgggcaggaggtctgggtttcctgatttttctccagagaatcacctctcctccacttccaagtcctggcaactcaggaaagtgctatctcactcctgaggccagaggcaggcacgtgacccagcgccagccaatcagaacactgcattctccacccaccctcctaccggtagtcattcattcaaggatgaggaagttagccctgccaggcaataagactaaattatggattttgttggggctattgataggcgtgtgctctcaactgggattgcctattaggccctaagcctggtcaaagcagggaccataaattttaaatccttctctcagacttggttaaatattaaaaaaaaaaaaaaaatctagggcg

SEQ ID NO: 47915 - DNA, 971 bp, Bovine  19866881407486
  misc_feature (1)..(1): n is a, c, g, or t
ngtacatctacatatatattctcatacacatccgttactttcaattttttctataggttataaactagtgtatatattttcaagttgtatgctgctgctgttaagtcgcttcagtcatatccaactctgtgtgaccccatagacggcagcccaccaggctcccccgtccctgggattttccaggcaaaaatactggagtgggttgccatttccttctccaatgcatgaaagcgaaaaatgaaagtgaagtcgctcagtcgtgtctgactcttcatgaccccatggactgcagcccaccaggctcccctgtccatgggattttctaggcaagagtactggagtgggtcaagttgtgtgaatatatgacaaatatcaaagagctaaggaatcaaatatttttacaagtggatgagaactcaaggactttctaatcttctaaaagacagaagctggaagagattccagtgatgtatgcactcaacattcacagtcagtaactaaatccaaaagctgaactctaggatactttcagtcacatggagaatcaatgtcaggaagatcagatgcatgtcatacacaaacctctcttactttgcattttcattccttgagtcttattccctcaaaacagccagatacgcacttcatattgaccttctatcaaggagtcaggtgggagaaatggaaaaggaagaaggatttcccaacggttaatagtttaaatttctgcaggtagtcaatatctgccaaaatttaaaaacttctggtcagacgattcacgtctatagtcaacttctatatgattctttagaaatagtgtcaattgtttgcactgtataaaacattaaaaaatatatacatcaatttatacttcagcacctactagagagagaaaaggcaaataagaatattgacacttatctccaacaattcaaactcaaatccagaaatacaggttgatgcataaagtt

SEQ ID NO: 47916 - DNA, 1212 bp, Bovine  19866881426951
  misc_feature (1)..(1): n is a, c, g, or t
ntggactatagcctgccaggctcctctgtccatggatttctccagcaaggatactggagtgggttgccaagcccttatccaggggaacttcctgacccaaggatcaagcccaggtatccttcatcgcaggtggattctttaccatctgagcctccaagggaagccgttgactgattatgtttgtcaattaatgcctctcttgctatgaatgaccagctgtggaagctggaggccagatctcagttataaaactctacacacctaacttaaacgccgatggaacaaaaacgtatcaggtcatttcactgtttctggagaacagagtgaacttgcctgaatcagtgtgacacagaagagctctcagtcactgatatgaatactgggttgctggctggtgtataaaatcttagctagtgtttctcccccagtccaagtcatctgagtcattgcggttgtactgggtaaggcatcccgatttggagatgcctgcttgcctcttcgtgtacaggcaagcactcactagttgtctcatctccctcagaaaaagcatttcagttgggcgttgggactaaatatgagccagagggagccttctgatagccgttacatgggcttcagctgtctaaggactttgggagcagctaattgttaatgagtcaggaggttgccagggcaaccagcaaactgctctttctggtaagctctgcctcaagtccaagaggggttatgaaagagttgcagcttagagaaggaaggttttcccctttccctgatgtttatagaaaagttttatgatgttaaagcttttctactcatccaaggagagaaatctgagatagctaaaaagttctaatctgaattatttggaaataagagaaatggaagcagaacatattaaacaagatgatacaggataggaaaaagttaagccaaagacaaaaagaaacattcccttcatgtggagcctttaggaacacatggccatgaattcataggagtgaagagaatttatttgaaagctttttgtagctacttcgttcaatctaggagatgactacaattctgttgaataagtgtaatacagtgaagaatattagaataaagtatgaagagatctcttgagtctccatctgattgtgtaaacagaatgctaagaggaaatccaccttgcccaatagtcagcaaaggacgtcatccagtgacaggtgtcag

SEQ ID NO: 47917 - DNA, 1117 bp, Bovine  19866881527977
  misc_feature (1)..(1): n is a, c, g, or t
ncagcattcagcacacatctatatatatcacagtatgactttcatgaaatcttctaccaatgaacaacttctctggacacagcctttccccagattcttccctaaatctgccctaggaatcagttcttccaaaaagccaactgagttaacttgggttgcaaagatgaaaactttcagagtggtttgtcctccaagagatcaatacattctttggtggataaaacgaaaggattggactagtagatgattgctaaggtcattccaaaaatgtggttcttgtactctgctactgctactgctaagtcacttcagtcgtgtccgactctgtgtgaccccatagacgtcagcccaccaggctctcctgcccctgggattctccaggcaagaacactggagtgggttgccatttccttctccaatgcatgaaagtgaaaaagtgaaagtgaagtcactcagtcatgtccgactcttagcaaccccatggactgcagcccaccaggctcctccatccatgggattttccaggcaagaatactggagtggggtgccattgccttctccgtcttgtactctctgctgctgctgctgctgctgctgctgctgctgctgctaagtcgctcagtcgtgtccgactctgtgtgaccccagagacggcagcccaccaggctctgccatccctgggattctccaggcaagaacactggagtgggttgccattaaattgcaacaaccagaagagtgtcttgaggaggaaagaaacataaagaaccaattgtgttcttgatatagaagtaagagctttcagtgaacatttacgctttctaagatatcaaatctcagctgacagcaaagacaggtctgatctggaggcacatcttctgtagccttgtgtatctcctgccacttcgtggtcagctgctccagggcactcacagctcccccagttccgtgctgtctcctcctgctcctggaccttgccctcccctttccgggagcctctttctcattctccacatcacagcattcacagtgctcagcactcagccagacagaactacctgctcatcgctcagtgcttcctcggaagctactgcgatgaattctcactgtaacatcc

SEQ ID NO: 47918 - DNA, 1461 bp, Bovine  19866881581288
  misc_feature (1)..(1): n is a, c, g, or t
naattatgttttcaagtccaaggaacctgaaaatagtatccctaatattaactgttaccaatttgggataacagtgttttctccttaaagcagagaaactcctaatattccatgtctccttgagtttgacatcaagtttggcattttgagtttggcgctaactaatccattttacagaagaggcttagagaaatgaaggaacttgtccaaggtccaaaccaggactaagcaggggcagatgaggtatcttgggtgcaaaatttaaggaggcaccagttctcaggtttgtgtcagttgccattggagagtgagttcctccttaaattttacaccccagatgttttaaataaggagcacctctttaatttattaattcaatcttgaaagatataatcaccaaatacaaattatggtttctattttcttggaagtattttagagtatataaaaagatttatcctgcaggttaaattgaccaataatgtggattattgaaactgtatgttctagattatgtgtatgtatataaacatatatatacacatatttttatggatttggatagatacagatgtatatatgagtatacacacatatataccaacctgtgtacattcatactaggttatttaagccatatacaaataaaaatataagttttcattattggttttattgtgtgtttctataaacaaccacactcaacttgttaaatttctcattaacactgatttgccaagcttttgacaatgcaccaatttccataaattcttaatgagatacaaagtgaaatgaaaattcttaaattatagtaagtcatcatgtttagcagttgcttatactcatttggacccatatttaaaatgcaaaagtgctttttattatgtatttatattacaagttgatgatcacaatggaaatagacattttcaagccatttctttctcgtattacccttcaaaatgtaccatttatgatggaagtcatctgtgagaagctcattatgccagcatgagttgtttctctgggttttattctctttcagatccatcatctaagttgcttatttatcttggcatatgctttcttagcagtagctactaatacagatgcacggcagatgtcatttttattttatatacagtcaaatatctcataggaaatttgtgatgcaaatttcaaacacagatagctcccaacaactttatcacctttcaattgaggcctcaactaacccattgatataccacagttaaattgtgatatccgctgtaggttgacagtgaaatttttctctttttcctacagattataaatatatttgagtaaacatgagagtctattaattaatcagtaagcagtgagagtgtattgactgctcatgactgtggaaggcagggtacagaagggagtataggatatagtagctactctagaagaatatcagtgtaaacaagaaga

SEQ ID NO: 47919 - DNA, 1169 bp, Bovine  19866881672555
  misc_feature (1)..(1): n is a, c, g, or t
ntggagaatactattggcagagggtcctggcagactacagttcataggggtgcaaagagttggacttgactgaagcgacttagcacacatgccttgtgaacagaaaaatcatttggaaatctcaaacagtaaacaaaataaggggacaatattattctcactagtaatcagagatgtgaaaattgaaacatttaaggtactgtttttcacccagcaagagagcagaaatatttgtcactgataatatcaaccatgtaaataaagatgtaatcaaattaggacttttacacactactggaaggagtataaatggttaccacttttcaagaacacacagtgacatacagaatgcacactctttgatccagtgtgcatatttctttcaattttcacataaaaaataatgcaaggaaaaaataagtaataggcacaaatatattcaaaatcattaacttttctaacaggccagagatgtgtaacactgcatagcttgcgtatgatacaaagttaaattttaaaatgggaaaaccagaattttccttaaaacagtaggaatccatgctgggtagtttcacccctcaaattaaattaaaacattacaaaagtgttcctgcaaatgtgcttcatcttcaaagaaattcacggaaagaaatctgacaagaacaaaagaatttaggtttctgagaatttttcagaccataccactgaactagataagaattcacagaactcaaatgaaaatactgatggttttgcaaaacttctaacaaaagatcaaaaccaacaagaactaattagatgggactaaatgaactgaggagaataattataatgtgactttttaatctgaaacacggctgaatttttcttaacattttagttttccagatttaaggaaactttttctcttaggctatctatgactcacagcaatttgataaaatgtatctttgtaaacaaaaacaaagaatttactttttccctctgtctgatctctccagaatttggaaactctcactgagtattcttattttcatggtagtatagtcatttgcatgagttcaataagaacttgttctccgtgtaacaggatacaacacaatcagatagattggttacaataccaagaattgactagaatgtcatacggagagagatacaaagactca

SEQ ID NO: 47920 - DNA, 738 bp, Bovine  19866882246475
  misc_feature (1)..(1): n is a, c, g, or t
nacaacctttataatcaggttagtatttaaagaaaacctcttgaaatgggtcaactgatctattacaatccagggaggccaaagacattttatttcctacaggtccgatttcgttcaatgcttcacgtgcagagactctagtgttagaatctcctgacttttaactaatttactcggaagattgaaatactatattatttttcatttccaatgcacgattcacattggctcctcattacatctaatcacacaacgaattaagtaaggaaaagagtctccaagcacggacgacagctgatgggagagataatggcgtaagagaccagaaaggcagcttcggtgagggtaggagttttagtattttccaaatctgtcagcctcacaataacggttgagtcatgacttcacttcaattacttcacaaaagaaagaaaattatacgtgacagtcgaccacgaacaccctagagctgctaaatctgcaaaaagaaagggcagggattgtacactttatccgtaatgtggtgaagagcaccccgttgtttgaaaggcaggtgtgaggtgtgttctctgtgtgtgtgtgtgtgtgagagagagagagagagagagagagaaagagagagacagacatggaaagagagagaagagagacgagacaaaagggataaacagagaatggatagaaccaagagagggacgcagaagtaaaaacagtcaattctagtgacatcgaaatact

SEQ ID NO: 47921 - DNA, 1459 bp, Bovine  19866880210190
  misc_feature (1)..(1): n is a, c, g, or t
naacccactccagtgttcttgcctggaaaatcctatggacagaggagcctggcaggctacagtccatagaatcacaaagagtcagacatgactaaagtgacttagcatgtacacatgcatgcacattggcccctaaatggatctaaagtgaccactgctttacagtttgtgatcctaaggaagagcagccaggtgagttcttccgaagaggaccagataaaataccagacaaggtctctacttcaacgtccactgaacttactgctctgtttcccctactttcttgcatatagcatttcatcactccagctgcatcattaatgcagagcgtcctggctccgtacagacaaagagtgatggtgcgtgagaatggaatccatagaaggtcattaactgcccaaattactgggtaaattcaagcacctaaatactttagctcataaatacacctggcttctaaaaaactggggcagggaggggagagaaagagggcagtcactgaagccaaagtgacaattcaggtgactaaagagaataaggtaaggaaagagggtggatggttcaactccaaggatttagacaatccatctccaatgaaaacacttacagagaaggctctgcttataaacatctttctttaccttctttttggatggattttttaattttcctaaagagtccaggttattgaaaataaccacactgctcatgtctcttggttaaagacatgtcaaaaattctagaagaacactaacaactaaagccccaaatagcataatgtccttcatcaatctcatctcagaggctttaccgacccacagaagtccagctgcttacacatgcaatttattactccttcagcgagccctctttgggattctcagccatgtgggatatgtcataacagtatagtaacaatcatccctgggcttcccaggtggccctagtggtaaagagcctgccttccaatgtaggagagaaaagaaacacaagttcgattcctgagtcaggaagattccctggaggagggcacagcaccccactccagtattcttacctggagaatcacatggacagaagagcctggtgggctaaagtccacagggtcacagagagtcagacacaactgaagcaacttagcacaacaaccatcccctccataagaacacacttataatatcacctggaagaaatgcagggctgccgacaccacagtctatacatttcacttcctggttttcttagtcctcccctcatctggttatcatcttccaggaagtcccaaccagcaacaaaaacactgaactgtgttgcatcgaaaagatttcaaatgaaaccaaaacaaattcatctcactgctttatggctccttccttttcactgcccagtgtctgttctccttccaagcagctcagggaacagcccatcttaattgccacacacatcatattaagtatta

SEQ ID NO: 47922 - DNA, 878 bp, Bovine  19866880355053
  misc_feature (1)..(1): n is a, c, g, or t
nccctggatgaacaagtttttttaaaaaaattatttttattgacaaggaatgaattctctgaaaccagcagaagaaccattgtattttaccaataggtgtgcattacctgaataaatggataaaagactttatttgcaagagggaaaaaatccatttagtgattgaaacaactttctcttttatagctagtagtattaattagcctccccttcctctcctcttttaaaaagagcatgttttaattgttaccttttttcatatcctttttttttttatgtctgcagttcccaaattgatacttggcctactagtaagatcttaaaaataggtttgcattacttttgagaaagacagttttcaattaattaaaaataatttcatttcaaaacttagaaacctactgtgaattccgaacctaatacttacgttctttaattgcatgaaggaggaatgcagaagtaaatttggttgaatgtgtaattggcatgctcgtagtaagattactgtttcaccctcttatgcttcccagggaatatacagaagtctcaacttccaccaaaagcttttgaattctttggcatcaagtggtttaggagtgaaaatgtgcagaaagcaagtggggtacccacgggtgggctgaaggaagagaaagatgaagcagccttccttggggttctccccagatttctttgtatagaggaagtacggcaaatgttccatgtttctgatttctcctagagctagaaacctgaaaacagctgtaacattcccacacaatcaaaactgtgttgctttcacctttttccctccaactgaacctccttctttgtcatagatctgcctcaatacacagtactctaaagaatggtattattga

SEQ ID NO: 47923 - DNA, 1495 bp, Bovine  19866880360818
  misc_feature (1)..(1): n is a, c, g, or t
ntgtggggcattttttttttttttttttttttgagtatttttataagaatccacccctagcctgtgggtccagggtctagaatctcttcagatgaacttgaatatttctgagatacattgcatgttgctgttgcctgtttctgttgcagagatctcatttctcttgtgctctttttgtaccctctttccacatgtttccatgcacatgcttattcctcctgcttttgtccccataattctgagtgcatgctcagtcattcagttgtgtccaactttttgcaatccccctggactacagcctgccaggctcttctgtccatgggattttcttgacaagaatactggagaggattgccgtttactcctccagaatatctttccaacccagggatcaaacctgtggcttctgcattggcaggcagattctttaccactgagccacctggaacatcccctataatgctatcatctttaaagttcaagtgtcacttcctctggatatgctctccccacacctaggaagtagatgcttccccacctcattgcacctgatgtgctctgagaatatttccagcatatagtacttatgaccttctactgttgctttttgatgaacatgtaaatggttaaattcttaatgcctctaggccatgacagggcttcccttgtggctcagctggtaaagaatccacctgcagtgcaggagacctgggttgggtagatcccctggagaagggaaaggctacccactccagtattctggcctggagaattccatggactgtacagtccatagggtcacaaagagtcagttatgactgagcaacttgctctcacaggccatggcaagaatatttttcatctccgctggtgggcagagatggcatagtgcctggcgtgaataggtactcagaatatttgttgtgtgaatttaattgtttacgttctatagaaagcttcgggtaggtactcacagtccttggcatctctttttacatgagccaattatccttctcactgcctggaaggtttgaatttaaagccagttcagcctgctatagcagagcccatggctattgcccgcttctgtgtgggaagaagggccagagggcatttgttgagcaggacacctggaatccagggtcctggaatcccatgctttctcactttcccattatattcttccctatgcttttttcctgttcccctcaacttctctcccctaaaggcaggacttgacaaaactgattattttgctcacttaagcatcatggaaatatagcaaataaaatgatgaccctggcaagtcactagaacacagttggaacattgccgaaaacagttatgcatgtggaattagcaatcagggctctgaaatcacagctgttgcttgagaagcaagaggctggaagggccagatactgaggcttcttcctcctccatcccctgactctaactataatcatcccaggcagtgattcgcagccttattagc

SEQ ID NO: 47924 - DNA, 1973 bp, Bovine  19866880580269
  misc_feature (1)..(1): n is a, c, g, or t
naatggaattgttggatcatattccaagtagcccatttttgaaagtagtggggctgaaagtaattttagctatcaatacccacattcctctcttattttgcattcaacatagtaaaaaattacaggggtttaatgatcagctaccccactgacagttatattttctatttttttttatagctccttctccaaatttctatatgcttagcttattttcacttatatggtgacttttcagaatggtacttacaaatccctaggactcacactttgttggatcccagagtggggcaccctgatcatgctaaacaagactgagatgaagcacaatggatcagattaccagggcccttaggagagggaacttctcaaccaaaccaatagtttctagcctccaggtacaactgtgcttgagcaagagcgctcataacaatttaaagacacagtatgacctgacctacaagttctctgaaagatgaagtataaatcagcatgatggtgggtcccttgtccagaggaggtgagcagggaagccccacaggtagataaggtaaatgtgccgctaacctagtctcacatctggaataggtagtcaagacttgggtcagtcactttaccatcaacacgcatgcccagctgagcagattaaaacttcaaacaagccatccaagatggaaaattctgtatgtaccattctatcttgaaattccataagaaacacccttattagtggctcctctgctttaggagcctaaagtgctgctcagaccctgacactgggagaaaggccctccatttgaaggctacaagtcatgatttggcaggaggacagggtgacaaccatatctaatgaaggtcaccatgctgctgtctgttcttcactggtcccaagagccctggggtgaagttgtctatgctctcaaaggataattttaaaaatcgactcccaaacaggagcctgtatgtttgtacaggaagatatatcatatgtgtgtttatatacttacaaaatggattattatgagaaggaagagtgtccacaagaaactcaccaaaatcctgcttcccgctgacttgctagttggtggagctaaacttttaggaaatttaaaaagcacactaatttgtgaaatagacagcaagggcttccatgtgattctcaactataacttccaatttacaagtctttcatctgtcttcacttattatcttcccttttctctttcaacattatttgaaccacaacattcccatcagcatggagattctgaagaattgcctgaaggcttccctaaggagtacagaaccatctattcagatattttagggtactttcaaccataggacaatggtgtctggacacatgccatatgtcatatcgattggtgaaatccaatcagctcatgatcaacttgaaataataataatcgtagtacgtattaataacagtagtagtggtagtagtagtaacagtggtagtggtaataataatagtaatagtagtagtaatatttgccaccatcttgatcattttatacacattgtctcattaaatgctgttgacaagctataagatagcacttttaaaaatagaagaaactgacttctaaagccatgtagctaatacatggcagaggcagaattaaacccaggctcagttactcatactcttaactgcttctccatgtttttccttgagaaacaaagatcaggctaatttgcacgttgcacaagtgctagactgcaaccctgagattattggcggctttacccagagatgctcaagctgcagctcttagggacccaacagtcacaggcaggcagaacacagacaaagatcaaccatacacccggcatgaagccccatcatggagcttagatcatgcctgggaagaaagacacattggaggatgtggaaacttgagaggctgactctgagtggaaagtattttgagagcaaccagaacaaagga

SEQ ID NO: 47925 - DNA, 1266 bp, Bovine  19866880613976
  misc_feature (1)..(1): n is a, c, g, or t
nctgagaaaatgggcaatggctcgggagacagctcagaccaagaatgatatattaggctgctgagaaataactcatgaagttacttagaggcaggatacaggaagagtcattggaggactgtgctttctcagacatcctcatctcagctgagaggcttgggtctggctgcagggaatttacagcctcccctacaccaatatttcactgcaaatggaaggatcgagtaaacactcaggttactatggagggaacttcacagcctcctgatacctttagggaaaggagaaaaagacagcagagaaggctgctgctctaaatgtttcctggctcttgtcaccatccttgagataaattgtgattatatataagggtgaaaactcagagaacccagggagccagtgagcagggctgtataagaaacagtagttctgacttggctttttcatggcttatctcctctgtcacactcagcccctagggatgccagaccccagagaggactgtgggcaggaagttcccatagtgacagggcgctttgcagctgtgtctgtataagtgtagctgattgtcagacccatcatggctcctttcaagtgcactgcctgtgccctaccccagcagcagagacaaagtacttgaagccggagatgagccgttgcctgtgtgtgtgcaatcagcgccaatctctctcagttctttatcaacagcagccagccgggagagccaggtggttcggagagaaattgagaaagtcctcagcagtcgctttcctgtgcactcactcaccattcagatgagctgctcgccgaccaggatcccgcctgtcttttatccgaagaccctcaggactagccagttgctccgccagctccccaagtttgataggccactgtgtgctgctccacagtttctaagaaaccaacagaagaagtctgagaaactcatgatacagtatgatgcacactgtagctccatccaccataaatgaaaacgtgcttagattcatcagtcaattggattctccattcatcggtagctgtgttcattctagaaatgtatgtatagattattcctgcctggggctgaaataacagctatttgtaaccacaggtaatagaaagttcacctcccttcagtaacgcgtccccaggctgaacgggcaaagctgaactcaggaaggagtcttaccaggaatcagtggcaagcaaagagtcacaaaaattttcccaaaacatgaaaagcaaaagtaaggagagccgagtcag

SEQ ID NO: 47926 - DNA, 888 bp, Bovine  19866880620300
  misc_feature (1)..(1): n is a, c, g, or t
ntccaataatatctgacttagatatgaatataaacctctcagtaacactttcataatgagttctgaacagctctctcaatgatgagaaatatccttccctggtattccaagaatataggctgttgaaaattcaggactttgctttcacaattctatgtttttgacttccagggaagtctttctgtgaagttctggtgtgaacaacagtcacaagtgggaagagcaatgggacaaggaggaggaggaagcaaacagtcccataattttagaaagagtgtgaaaaagagaagttagacttctaggttctatttctagctctgcttctgttttctagccagccaggcagctttctattgggttgcccccaaaattcatttgagttattccataagatggtatgaaaaaacccaaaaaatctttttggccaacccaatacctttctattaactgtaaaaagtagagaaaaatacagactacatatagagcaccttgtcatgtttggatgaaagatcctgcttcatggccaatgcacaactagaatcaataatgttgggaagtccacgttgtgttgtaatatatcagcttcaaggttcacgggaatacatttactctgaatacgtaaagtcagggatggcaaaattgcatcctgaggtggaaacaccaaagatggatctcacacactaaaaagtgaggatgactatgagcagagcttgccccacaccaacctgtaatgtcagcgaaatttgtgatctgttctatcccttctcttcctacattctttcttcctcatcaaatgagccactccctatgcttagttacgctcagtcatgtccagctctttgcgaccccatggactgtatcctgccaagttcctctgtacatggggtt

SEQ ID NO: 47927 - DNA, 1943 bp, Bovine  19866880711771
  misc_feature (1)..(1): n is a, c, g, or t
nctatcacgcttacaaccctgcggcactcaaactctgtgttcttgaatatcccaatgcaaatatgtattttggtaactcatacccttattttatatgttttaatgttcagacctctgtcacagtatcttaacacaggaaatcacaggtacagagagaactcgggttgtcaaaacacgttggttgtaaatttgaggggcaggtatttaatatttaatgacaaccaacctcgatagctcaatgctgtgttcaaagctccctgtttctggttgacagaacgccaggcagaggggaatgaatgaactgcttttatcagctcttacctaagacaacacaagggctaaggaaagagagggcttgttcctttttcagatcagcccatcaccccacaaagcctctgtatttggaaaactgtgcacccatatttgctcaagtaaaatggtggcctgatttggcaacataattcccctgagatgcatgcaaagaacacaaaatggatgctggtggatgggaggaagaagggttaccttcaggactggaacttcccagattaccctctggttggagtctgctctcagccaacacctccagtggagtactgatccagaagctctaaattccactgtcagaactactgatggaaaacgcctgccctgtccagacatgatagtaaccatttgcatgagttatcttaaaacaggaggtcctggtaaggaacatgaaactaacaagctaccaccaaccagaagaatttgggcaaggtcaaaaggagagggaagactccagtccaaatgtcctattaacctcccagaatccttcttgctggaattcatcttggctgaacgatgcacacaccaccaggaaggaccctgagtcagaatgatgggccagagacaaccaggaaaactaaccccgtgatcataaaacccgagaccgcgagccacgtggcagcacagttctcctgggctcccttaccctgctactgtcccctcgggtgcccctcctcaataaaatctcttgctttgtcagcacgtgtgtctccttggagaattccttgtcggatgctagacaagagcccactctcaggccctggaaggggtccccctccctgcgacagatgtacttgagactcctcacgtcccaaccagtctcataaacctccactggtcaagaagacactccaatggagaaataaacgtccatctcatcaaaaatgaccaaatcttgagaaaaccaagctcatcatccacaaagtcaacccggaaccctgacatcacagtgatttataagacacagcaataagaaatgcccctttagaactgtctaccatctcaattcttttcctgcaagatagtaaattttccttattgtgtaacctacttggggttgggcagtctcttatatgtggcctgaagcatcccaatacactcagtcaagccagtaccagccacacagatcagtaaacagcaccaggttatcactactatctttctccatctcctcctcgactcccttccccactgctacttctgcatccaacatccctccagaaaaccctgtttagctaattcaaaacccttttttaagaaatttatgcttgtttggcaatttttcccagcatggctgtgtgtatttaatatgattaacagctttagtcattaaacagcgctttctttaagaggattgcacgagattacccttagggtctcaagcggcagtcactgcacagactcgtccacagccaaggtaatggaagttcatcatcatgtaacaactccactcaggacttaatacggtcgacgacacaacccataaaaatattcttcctaaactaatcaaatcattaaaatgtcagcttccacagcagacactccgcggcgtgaaggcccctggcccagagtcaatgcaaatgcaatctcgccaaattgtcctatttataagcctg

SEQ ID NO: 47928 - DNA, 1015 bp, Bovine  19866880717665
  misc_feature (1)..(1): n is a, c, g, or t
ntagatatgaagcatgccaggaaaatggtaaaggattgcagaggagaaggaaaaaagaattttatccagagctagtcaagagtggcaagagtctatttttgatagctcgacagaaaatgtttgctatcaaatctcatgtgggttctgcagaacattttattcagagccctaagactcctaccacattttttttttttttttacttaactctgattctctccaaatgttttgatgagggagaaaaagaaatagcttttggtgaggaaagggcagaccttgatctccagttcaaggtccttgaaattcagtctctgggagaccatgccaactatttaacctcactggaccttaatttggccatctgtgaaatggggtggacaaaattgaactacagaaccactttggtgataatgagcttcaatcagtgcttggaaatgcccagttacggtcggtctccagggagtggaacttaaaaagctaacataggggctcagagctgatgattttcagatagggctggtgggtgatcattttttcatatgtgatcttctctctaattgcaaaaagatgacagagagtagaaaagctgtggcatgagcccaaggttctgcagttcggatagaaatatccttggttattatatgcacgtggagagctcagcttcaaatcccaatgcccttattcttaaattacagctactgaagcacatcctgaattggctcctccaaacatagcagcatttgttgggctgcagagagtgacttctgatcccctcaacagctgtcacagggctcagcatggtcccctctttcgctccttttaggatatcactttgatttgggtcccaaatgtcacttcaaatctgcattccttgtttcctacttcttcagttagctagcatttcttttctatgttctgtgcattcttaccctattgtgatcatcattattgtttcagttccacaggcttgtgagagccatttgagcatcccacatgaaatggcgagataatgata

SEQ ID NO: 47929 - DNA, 803 bp, Bovine  19866880760986
  misc_feature (1)..(1): n is a, c, g, or t
ntcctagctctcaccccatcctaccccactaggtttttttcagagtcccagtttgagttcctggagtcacagcaaatgctcatttttctgcctaacctttaatgaaacaatatcccacaggaacagagggagcaggaagaaccatcatagagcagggccaagcagattcatacgtgaggtccgttctggatcgacaacctgttcacctagtctcacatgacatcctcacgcatgaaatatgcccattcagtcctgcatatctgatgagaagggccatggaaggaaaaacccatttataggtgatgtttgatggtggcagtttagtggctaagtcatatccaactcttgcaaccccatggggtgtagcctgccaggctagtctgtgcgtgggattctccaggaaagaatactggagtgcattgccatttccttttccaaggagatgcttattttcccattaataaagggaaagtatcgatactttgttagttgggagcccagatttgaaaactgcttccgggactgtttataaaatcaactcagtatttttaaactcaaatgtatttgtcttaatagacttgagggtgtcatatcttttgacatgatcagccgtaaaatgttccatgggaacagaatgaggcatactgaggggagtgggttgaggaaaactgccatcatttatgtccagaggggcacagtaaatgcttgggacaaagtcagcttcagagaacacaagaacattcacccaaatggatggaagatgcttatgttattgttgaccctgtagtgtgattaaaggaggt

SEQ ID NO: 47930 - DNA, 1998 bp, Bovine  19866880800800
  misc_feature (1)..(1): n is a, c, g, or t
ngcgctgttgtgtgttcctatctcagagttgccgtctacatttttctttttctctgttttgtctcattttcaaacaaacaaacaaaataaccaaagaactattttagggtcctttttcaccaccaccaatattagcatcaatattactaagacaacttaagcttttagatataaagaaacattgatataatatagcaatttgtttttgctgtttaatttacatttaaatctagacaagctcccacattttaatatttacttaaaatatttacttttacacatatacacagcacttgataggaatgcattgaagatgagtgttgatttacttgatttgttttttagtaagtaatgctgtctgtattgcagtgtgttccaaggcggtcattacatcagcagctcttcagtctgaagagtgtattgatgtgtaggctctgccctcacacccttttctgtactctgatggtgtcatggtagctttcaaaataaagctacctatttgtagctgtttttagattcatctctaatgcattactcaaggagaaaaaaaacaaactcagcagaccctctgttaattgggaagccccttctgtgttgcatttcaatctgtttttaagctgaagctgatttgcactttgtgaaaagtgaatctaaatcttttgtgctaaccaagggacattgagccatgttgttactgcggaaagctggaaggaggaatggataaaatggcaagtgtcttttattattattattattattaactatacagtgtatagcttggtgccacacctaccctcttccctaacagacaccattactaagtgctggtttaataaagcaacctagcaggtgaatatttagggtttagtggaattcggatagtttcacttcagtgcagtagagagaggagaatttggggatgaggccatttccagcatgctgttaaggaaagtgtgcgagctgacatacattatgacacaatcgtaattttgaagcatgatgtgtttgtgaattggctgtgtttactgtaatttgtggctgttcatccttgggtggtgttttcagatgcaggttttatcgttattattcagatatggtggggctgacagaccaggaagtgattgctattgaaaagatagtttgttactgacagtttttgggtggaggtggggcatgctgttcattcagggccatgtggggaagcacctgggttatttaggaggcagaggaagcaagggaggaacctagacaagtgtgtgtgggggtaggaagggatttgatgggaaggaaagggtgagtcccagtaaacagtcttaggattgactagttgaaaatcacttcagccaactgactctggagcacacaggctgtctcttatctggtacctggccctggaatgaatagggtcaggggatggtggcatggggtataaaaccctaatagaggaggggattggaggtgtgggttctgggctgatgggtttatagtctctaagaattagctagctctgagaggggcagtcccttcagtgtccaccaggtcccagacgccaaaaatacctgtataaagataagcttaatacaggtggtacgaagctccctgccccttggacagctggcactgatgattgcatatgacactcatctacctctgccacctccagatgccacaagctgggcaggtgggtgcatcgtcttgacctacagctgattgcattctttaccaagcagtggcaccaaagagtcatttgttgattctcttcccccttcatttttctttcaaggctcttgagaatgtgagactcctctttgttttcttactgcctagtatggcgcaaggaacgatgccagggaatggggtggagaagagggagggaggtctcatagtatttagttttgttctttttcatgcttaaacagacttaaggaattttcagagcagagtcttgtttcaagtatatgaccatttttcaattagagtcactataacctccacttc

SEQ ID NO: 47931 - DNA, 1839 bp, Bovine  19866880814254
  misc_feature (1)..(1): n is a, c, g, or t
nttttgactttgtggagtccctctgctgacctgttttggtttggccttgtattctttactgctctccctccccatgccatcctctcctccacaatttctctttctgatcagcgtgaacactactagcttgtccttcctttgttccttgggtttcttaaggtgaaactctttaatctttatctggtttcctactttgttcccactctctttcttcctgtcttgctatcagcatctgagctcagtgtcagagtagacctgcccctctttttccatcctctaccactatcttttgggctctggaatggcatctccaccctctgttctgaccactcaacctgcatgtcctgctgacactttcaactcaacattatccaaaacgaaacttactatctccctcccaaaccagctcctcctcattcccctgcttccattaatggcatccatagctcaaagctctttttccttaactcccacattcaatcaattgcttctgcagtgatttttaatatctgttccctccatcttatcccctcggcccccacactagttcagcgcctcattagtcttcgcctggtctactgggcaaaaccactccattgatcttcctgccttcacccactccaatccatcctacacacccagctatcagattaatcatcctgaaagacagccccaattcccttgttcacccccagttataaaactttaaaacacctcactgtctttgggatgaagcacaaacatttcatcctgccactcaagtaactttacaatagaacttcaacccatctgttgagatttatcaaccactactgccttattgtccatctaaaccaatgtcatagcgaagaactcaagaaaagtccagaactgggcttttgtctagaagttcaggcatgcatattattcatgggtaggggcgtgggaatgtcaagcagtggcccaaaggcaaagagggttgtccaagacaatacctgccagttgcatagttctttcctcagcctattactctggaaacagtagacactccaggaattcttgctgagcaacttgcttttactacattttaagctaggatgttacatttggacaaatctcaatcaaagagcagatgttttcttatgcttctataaatcagtgtggcttattattctcaactttctgttaatatgcactgtgttacaaatacattccctaggcaaggactcagctatatttttaatggggaagaaggaatgactttcactgcagccagattagaaacagcagtccttctctttcatctctcaacaaacaattcatgcagaagtcaatgaaaagtctgcagagtcaaattgtttaggggtcagttagtcatactgttggatattcagactcccacaaatgtgattccaatataaaaacaaaagcaacagtaataattacaatttcccagggtcataggggctttgcatgatgaaaaaatctttcacaagctttgcagacttttctcccatcaactagtttttaagttaggcaaagagggtgtagtgaagggtttggcaaactttttctataaaatggctaagtagtaactattttaggcttgtgagccagatggtctctccctcaatcccttttggagcacaaaagcagccacagacaatgtgtaaaattacaggtatgtctgtgtttcccccaacatgttatttatggatgctgagatttgaatttcatctgattttttttttctgttttacaattttttttcatatttatttctttggctgggtcaaatctttagtcatgcgggatcttttcgttgcggggcacagtctgattgtggttacagcatgcagg

SEQ ID NO: 47932 - DNA, 711 bp, Bovine  19866880840873
  misc_feature (1)..(1): n is a, c, g, or t
ncatttagtgatataaatgcattagcgtacaattcaaccctatgtaaaaagataaagatattaacttaaatatattaactctacttcaaattttaaaaaaagatatgaaaaaattcaagactgcttccttgttaaaaatatatatacatctggaataccacctttcaatttagtctttaaaaaaaacagtccttggaccacaaatgttttaaaggaataggaaaaattttaaggcaacaacagttatgttgcacaaatttaagaatactcaggataacaaagtctttgagctttaggacaaagtacacattttagtttaaggcttaaagactcctctatctagcttaaacttccttgggaattcaaggaaaagaaaatgaattactcaaactggaactacatcaaaatgtcaagttaacacattttcgcttgtaatggtgccaaaggatctaatgcctgagtgatgagggccttaggtttccaaatcattttaaagataatttcattaccaggatgctggagctttcattttatgtttttcttagctcttttctatttctgttttaacccatgcaaggctaaccaagacctgataagatcacattgcaatttattgaaaaacttgcaaaacaaaacaaaagactgcaaagaaaaatgtcaacacagaaaactacaaatcgagaaagaaaattaacaattttctcacaataa

SEQ ID NO: 47933 - DNA, 1150 bp, Bovine  19866880915830
  misc_feature (1)..(1): n is a, c, g, or t
ntttaaaaatgcttagtatcactggtaatcaagcaatgcaaattaaagctttgagatacctccaactgtttaattgaaagtgtctaaaagtttgataggaaataaaatgcatatccttgtttgaatcagagattgcagagacctccatcaaaatctcagaaaagaggcagatggcagattgcagtcattttcaaacttactgaaagagccatgttcctttttctctttcctcctcacttaattgatattgtgtcattaataaagctcacaataaaccacatcagaaagctgaaacaaaacacaaaatcaaaataccttcagaatgcttactccattctgtctattgtgacttgcttcctccgcacagtacatcttcatggaaagagcatttgttaccataggctgttttctgtttgatctttgtttttttgttttgctttatttctattcacaagacatttgctatcccagagacctaagttaatcaggaggttctgaaaactgatgaagtgtgaggagaatgtgagattggcaattgttcatgttattctgaataacaaaatctcttgagtttttggaaagaagataagaatgtactttaggtaggggcctcagacccattttctctaggaagcagagaaaaccaggaaagagaaaaagttgggcacagcagagaactttgagaactgctagcaacagataagtaatcactatgtgataaacaccatgcatttcacagagcagctctttaacgagattcactttctgctgactcattcagatctacctagtggtagaacttcaaaaataaaaaatgaagagaattaaggcatgatcccattatcctcccgggagaactgctgacttcactggcatcaatcctctaaagacttatgtaaattttcaattgggtagctagaattctattttttttttcttgtaagtatttttactgagatgctctctggataacttccatcttctaacattttctggatgaacaccctcaagaaggatcaaatggcttttattcagtttggctttcttcagaagttaaagaaaaataaccctttgtaagatacattatgggagaaggcaatggcaccccactccagtactcttgcctggaaaatcccatggatggaggagc

SEQ ID NO: 47934 - DNA, 852 bp, Bovine  19866880995277
  misc_feature (1)..(1): n is a, c, g, or t
ntgaagtggtgacactgacaccaggaaataggggcttttcttttctaatagatgtttgatttgttagtggagtccataaggacattttaaatctcatgttgctcaactcttagaaatgtggctcaacatcttgacaattgttttatcttcatgcatggagccaatagtactaaatatcagaggtccaaccttatccacccagggttaagttttctcagcagcttttggaatcctctgtcccaaagaaattgtatgattgaggcaggctacctacctggtcctcactttggcatcatgatcactaaaggagggatagtggtggttttctaaacttttttaggacagctctgaggatctaatgagacagtgagggggaggggtcattctccattcatcggttcagcagggcccctcctttgagcatcttccagtctcttgctaaagcagtactagcaattcactccttgaagccatctctggagtttctgtctaaattaaagaagaaaaggcttcatgtaatatattacaccagctgtggccattgttacatatcactctaaacaccattctgtttattcttgctatttgggagcatttgattttaattagcctgtttaaatattggcctcctttatagatttctcatccagcagtccttatgcaggcaaaactcccattaacttaaataaaagttaaaacattaaatattgttaggaggtggtttatattttattcatactgccgaagattattttaaatgtttccattgttccatcggtgccccaaggttggtttagggagaaagatagttttacttatcaaaataaaacattatacaaatataaaatgatg

SEQ ID NO: 47935 - DNA, 1627 bp, Bovine  19866881024009
  misc_feature (1)..(1): n is a, c, g, or t
ntatttgcttgtctgagttgcagagaattgcttactgagatcttcctttaaggctacttgaccataaggctgcaaatccatggagactcagaaataatttttctggtggcaactgttgttatcatttcagtaaacattggctgagcagttttatatgcctagccctgtatctggggaactcaaggtgatgcaatggaaaatgaggtagagtgtctgatctcaaattccccctgccccagcaccagaggctaactttataatacagggttctaattggaaggtcttgattcacttgggagaatgttgacacaattagacatctctgaatgccatatacctggctgaagcaggtaatgaagttaagaaagtaattacaggatgcattctgtgacttaaaatagaattctaccactaattaacatgttggaggagacagcttctatactaatgttatattggaattcaggatactcttgaccttcagataatttttagaaggtttggaagtcaagggctgggtgcttccagaaggtacagttggctcaaaaaagcttgaccactttcctaacaagaaaacgaacctggcatctattctatgagaagtattattggagtgacaaagccacaaaccacctccccaccccaaacgtgttcagactcttaaagtgagggtctggcagcagtgtttattcaaattagggttttgctttattataaaggaaaatctctgctttccagtgaatcagtccagctgacaggagtgaagtgaagcagaagaaaaatcaccgtcctgattgatgtgggctttggtgcatcacacacctctttaggaggaattagcatctcagacaggagggcttggagaattttaacattaagttgattagaagccaaataacttggtttagtcagaggccccacaggcttcctgaaggccctgtctgcactggtccagatggccttttttggctgtgctaccctcagccacacatccagccagcttcatgttccagcttcactcagagagagagaggttgcccccacctccttctgtgccccacaaatgccaccccatcttagtgctcagtgagtcctcactaacagcctgaaattggcatgtcccttcaggagtcttggagaaaggactggagacactgaattgatggctggaaggagagactacggttaaccttttctaaaggatagtcacaatagtgatacgttgttgacaataacgttgaaaataacattattacggcctggcaaggtgtcaggtactgggttgaggaattaagtaaattttcttatttgactgtcagctaaattttatgacgtatgtatgataacctccatgttgttagtgcatgcgtgttcaatcgcttcagtcgtgtccgactctttgaaacccaatttactgtagccctcaaggctcctctgtccatgggattctccaggcaagaatactggagtgggttgccatgccctcctccagggaatcttcccaacccagggattgaacccaagtctcctgggtctccagcactgctggcagattcttcactgcagatccacctgggaagcccaacgtccatgttacagagggaaatagctcagagggtataaataa

SEQ ID NO: 47936 - DNA, 2227 bp, Bovine  19866881035505
  misc_feature (1)..(1): n is a, c, g, or t
naatgatgctgatgcagcatcttgggggctcagagacaatgagcttcgcagtcagtcagtggtggggaccacgtaagaggaaagaggcatttgctatcactgatgtcctggaaaggactcccagcgtgggagtcacaacagcgggattctggccccagcactgcctaactggtactcaaaggaggctctgggaccaggggaactgacatcctatgggaacaaagtgttagaaatgcagaattttagactctgccttcatttagaatctacggagatttagtagatttagaatcatttagaatcacaacctgcattttaagaaaataatgagatgattcatacagactgatttggccaaaattctttcctctatttctactgtattagtgacataatcagtgccctctctgtacatggcactgggctagagctactgcagaaaactagctgatcccatctatagctcacatgggattaagagattgactttacatgtcatcagctacctcgtatccaggagcggtgaggggcgggtatttttggctgctataaaaaccaagggggagcaatgctcaatgagtagaatccctttaggttgtattgttaacagaggctaaaaggaaatgatctgtttatgcctttatgcaacatctttataagtctgagcacaaagacaatcagcagctgccagtaattatggtgccatgtgggtaccactgacctcacattggcctccatggttacatcatatgcttcagagaaaaatactgatcattacagggcaaacaggtagagtgagaaggaaatcagagaagcacacagctttctacataacagatgtagagggaagaggagcagagggagaagggaaagtctggtctgctatggttcaggaggacacgaaacctgacccaagtgtgataaagattaggcaaaattaacatccctttattctgcatgttagagtctgttggttcaaaggggattttaatatcagaaacaagcattatcaacaaagcatgtaagtaaatggctcttgaaatgtatcaaatttttgatatgtaatgggctcattaaatgatgcttaaatctcagcaacctgtttccctaataaactcacaagtaggtattctgttagtttctgactctgaaatgattttcattataaatacagacatattcttatggaggaaaatattccagaagatagactagaaatgttttaggtaagaagggactatgctatgtatgtttatggctgagttccttctctgttcacccgaaactaccacaacattgtctgttaatcggctaagcattctaagttgcttcagttgtgtccgactctctgcaacactatgcactgtagcccgccaggctcctgtgtccttgggattctccaggcaagaatactgcagtgggttgccacgccctcctccaggagatcttcctgacccagggatcttcctgacccaaggttcttatgtctcctgcattcacaggtgggttcttaaccactagcgccacctgggaatcggctacacctcaatacaaaataaaaagtttttaaaaagaagtgactatgttaatacccacccagtgccactgtggatatctttagattagaaaacgagaatgctttttaaatgttctatgatgtgactcccccaccccagctatagtttatggctttcttcacatgacaggaggcagctctaagaggtacaaggacaggaactacatctgccttttcgtcagttctttccacagcatttaatataacactggcacctaagtgttgagaaagaatgaatggatcagtgaaccaaacaaaacataacccacaacttatgattgaagggggagacctggtacagtatttcaaagctgcggcagaactatgcagagaaaaggacttttttctccaaaagacaaatggtaccatcgtcacttcatagccttttccagttacagaaggcacatggttccaggtgtatgagaatatatctgaggtattctgggccgaaagccctaggatcctgcaatagtcaggtcccatgttgtttctatgagctttttcatttgaaagttaaggaaactgggacccagaaagttaagcagtctgattcaggtctagttcaagttagaagagcctggactggatcccaggctggcctccccggttcatgcttctttcccctccagcatgttgacaccctcactctaa

SEQ ID NO: 47937 - DNA, 931 bp, Bovine  19866881058716
  misc_feature (1)..(1): n is a, c, g, or t
nggattgatgtcttagcagtttcttaatctggattgacagcttcagcagtgagtttaacatagttgcacacctagagatggtctgtttttcttcttttttaaaaaattcatttttaattttggggaaattgctttataatgctgtgttgtcttctgccatacaacaacatggataagccataattataaatgtatttcctccctcttgagtctccctcccttcccccatcccacctctcttggtcatcaccatagagttgtccttgaagcaccaaaggaaaagccttctgcagcctttaaaaaagcttttaagctttttttcctgaaggtcttcctgtgttgctgtgatttttctttaattgtgacaaaacttgcttgggataactttaaaacattaagctaccggcaacctacataagaaccaagatcacttctgatgttttaagaacatctttctctttaccagtcatccgtggaataatttacatcaaagaattggccattttacaaaaacaaatcctcctaattcatgtgctgtgtaaggttcctacatcatgttgtgaatgccagattagtctctataaacctctgtctccttggctgtattccgaacttgattcatcattaatccatgccagagttttacaataataatacagtaaacacgattttgcatgttgactagcagtgtagagttgctgtgcctggtggtggtggcctttaaggaaggacgaggtaatatctttgaaaagaagaaagaaaaaaaccacctctgtaagtagttctaacatagttttaactgtgatggtatatttgacaccaaataactacactgtttcttttccagctaaacgtttcatcctttcttctttccctttttctttccttgctttcgcgccttcattttttagtctcatgttttcttttatct

SEQ ID NO: 47938 - DNA, 944 bp, Bovine  19866881095500
  misc_feature (1)..(1): n is a, c, g, or t
nggctgtttccgaatgccctggactcagtacccagtaaactattcatatatttagaatgggagattttcccctacttgctcactatctgtttcttaagtggactccagaaatacgccttcaaaggatgccatgagtgtgaatgacaggccaatcattagctacctgtctctgaaatgatataagtcagagccgatctctgtgtcaaggagtgtattcctcctaagttagtgttcctctgtggagctcgtcaagaatggagagcaggtcaaagcggttaactgatacatccaagtgcagaaagctcagtgttgccacatttgaccaattacacattgacaacagcaaaagaggaggctaagagaaacacataaaggaccattattcgagactgaaagccaaggcatctcacttacctctagtgtagttaatacaatcttctcaactgaagaaaaataagcctcccacaagaattgtgtctgctgtctaagtgctaggattttatcctgatgaatagacctgattgtagaaggaatctgtaacacaaggtgaacacataataactataactggaaaacaatgagatgccatttgatcacaataactcactcaggttagagtttttttcttcatagcattctgcttctagcgtacagatctactaaaaaccaccaacccctagactgaaaggtccttaagaggtgttagctaaaaacagcacttactgggagtcagcaatgatgacctttaatgaccaaatacacaacagttagagctcacttctaagatttggtagcagcttatcacttgtgtagcattcctctgccattttctaagaatcccacatgcccttgaacctgcccgtgaacaatcaaatcctgcagagaaggggctacagtctggagcaaagcgagagccattatgtcccaagcacttctaagacagt

SEQ ID NO: 47939 - DNA, 1563 bp, Bovine  19866881131677
  misc_feature (1)..(1): n is a, c, g, or t
nttaaaaataaatgtgccaattaaagcatatataaattcagtttcaatgatttttggcaaggaagtactgttttcttcccactggcatcttcccctgatctacttgcaagttttacagaaatttttgtttttgaatgtgtttaaatgcaaattttaagtttatccacacattctgttaatgatgtgagagttctaatgtattttatttctggcttaaaagatgaagcaaaatgcaaatttgaagaacactgaaggagttttctttctgcctttttaaatgccttcaacaagtgctacccttcaggttaaatactcagaaaaaaaatgcctaataacaattactgctaggccttgacagctggcattgtatttcttgcaagtgaatatctcggggttgagtcacagaactatttgccacataaaagtgcatggatactaacttcctccaagggaaaggaaggcttgaaaacactgtggagtctgtaaagccctcatggtccagtggctcagcagtctgagaagttcacttggaagcagtgctcggatgggaaagaatgggaagaggaacacagttggcagaaggccaaagacagagcagaaaaggaaaaaaaaaagtcataatctgaattttagccgtagcagagtggtgactgacttagacattatggaatatttgacaggaaaatcaaaactttaagcactgggctaagagactgaatcaaaatgttaagattttttttttttttaaacagaagccaagttactcacatagaacatattgtttcccctgagacagacttaatagccacaatttcctgccatcccaacgtggaagcttgagacttcaccacttttccttcaagaagtggagtcaaagtccctctcacgtggactctgggcttgaccatgtaacatgttttggcaaaagggatttcacacaaggatgcgctttggaaatattatatgcagtttctctgcctctctggaaacaccactcaagacgtgatacagcttgtaaagaagaggctattattagtttcctattgctgttctaacagagtaccacaaactcagtgatctaaaagaccccacaaatctattgtcttataattttcaaggccagaaatctatcatgggtcagcagggttgaattcctcctggagtatctatgggagaattcatctccttgccttttccagtttttagaacccatctgcatcccgtggctggttaacctcttccttgcatccctgtgaccactctatctttgtcacatctcctctgactctcctgcgccccttcttaaaataactcttataattagattgggcccacaagcagaatccaggataatcttcccgtctcaagatctttatcttaatcacatctgcaaaatcccctttctcctggaaggtaacatatccatattcacaggttttgaggattagaatttagatgtcttttggggaccattattctgtctaccacaaaagccaagtacaggagaaccaaggagctccatcccacagccagcaccaaagagccaggtatgggaatgaggcc

SEQ ID NO: 47940 - DNA, 841 bp, Bovine  19866881160147
  misc_feature (1)..(1): n is a, c, g, or t
nacccaagcctacatctttctgtctgtttccagatttaaaatatcaggaaaggaactctgacccatcctgggtctagtgccactcctggagttatagtggggatgaggggagtaggatcatgactgaatacgggcatttctactgaaaaatcacaataccggaagtgaggggaggagaagcgctcccagaaaaggggacagtggtggtgttgccccaggaaaaaaggaagaggagctaggaaaacaaaacaggaggtttttatggaagaaacagtgtgacgacataacacagacaacatatacgcattagcaaaggctttttattcttacaaagcagatcaagcacgacgtgaaactttgccaactgcaaaaccaggatgactttttttcccttactaaaaatcaaaaggaaagcaacccagatgccttaattactttgattgtggaggtgaaggacagccttgcttttaaatgaacattgtatttgtccattaattgtaccaggaaattgaagagacgctttggttttatatgtgattatcttgatacctattgaataaaaaaagtagttttgcctcattagcagtaaagtatatagggataatgatggatcagtctaagtattatttccttatttctggttctaatcactatatttaataaggaagagccaggttcaataaaggatgcatctggcttcaaatgattaatcaatttttatagaactcacatgctggcaatttctttgagaaactagacaagacatcatgaatcacaactcacagcacacattccccagccctctctagcagctttgcttttgctaatcagcttcaattgt

SEQ ID NO: 47941 - DNA, 1174 bp, Bovine  19866881209397
  misc_feature (1)..(1): n is a, c, g, or t
naatgagaaaatctatctgtaatctcagtcattaccttttatttgaaattgcttctctatgagaagggtgcaaagaagagcatcattaggcatgaagcagtgaaagttctggggtgccatcatcccattctactgtcttccaaaaaccccttgatactttactgcagagtcagcttacatgcagcaagtgtgggagtacaccccccctcaccccatgtccatagcagacactgttaatcaatcacaacacttaattttcctgctgagcctgcccttggcctgagactttttctccacccagcaccaggcaaccactatccattgatccaagttggcacttaaaacaaaacttatctgcaatctccagacacagaacaatgctggaaaggtggagtgtttctacatctgatatacctaacagatgtgataattgtgggtcctaggccattggatactgctggggctccttgggttctggaaaaacccaccaggaataggacaggcctctatctaactgtataaagggccggtattctgtctcgaggcagactgattccacacatatctatatcctttcctccttcacattctgagtttcagatcctcaagctgagaattctaagcccatttgaaatagaatgagtcaggaactaccagagaacctgaaactaaggtaatcatttaaattctggataccacagagaacttcctaagagtaaaagtacatgtacattgatggacagatggagtggaacttgtttttaagatgtgatctcatatgtgttcacatttcctatgttgactataaataacagctactatttatttatctgacaaggtattaagtaccaaaggacacgcactttctttgtaaaaaattagtttactttttttaattggaagaaaattgctttacaatgctgtgatggtttttgccatatatcaacataaattagccacaggtatacatgtgtttcccctgcaatcctgaaccccaccttctacctccctccccactctgtccctctgggttgtcccagagcaccagctttgggtgccctgcttcatgcattgaacttgtactggtcatctgttttacatatggtaatatacatgttgcagtgctactttctcaaatcatcccatcctcaccttctcccacgagttcaaaagt

SEQ ID NO: 47942 - DNA, 987 bp, Bovine  19866881240535
  misc_feature (1)..(1): n is a, c, g, or t
nctcaccttgtctgtgacaatgctaattctccagattaagctgcgaattaattgagaatctcaaagtatgggggtagagctacagagtcataagattcattactcaaagatgtttatgagttgagtcctgcccctgaacccaaatgagctaaggaagtgcttttcccttcgtacctggtttctagaatcacttcaatattccttcagtattttatccattagatttattttccttacattttctgaactcagaacttctgtgtgagatggacagagaaaactgcagaccccttcaggccacagaccaggaattatttcaattattccttttcctgatgcagcccaggatataggtcttgatgaagctacatcagcactttttctgttttccttacagaacaaattgccagcagggttcctgtttacgaggatagcaattgccttgtacaaatttcccataaggattctgacagtagcttctctctgctcaggcagagagtatctgtgtcactgatgttgggcacgactccagaataagtctgcaatctcttatgtctaccgagataccctctgccaaaactgtacagtctgatttgtttgagaaactcggtttattcctgtaattatctcagaagggagaagtctaagtctgcataattatggtgttcatgcatattgaggattttttcaaggttgggtgacaggagggtgcccaggcaagggctaaaagctgaatgggaatgctgaggctcccagaaagatggggtggtggaggccctacaacatgttataggccaactccacactgaataatgccactctgaggggctgggaagagcagcagcagcagcagtggaacagccagccatcctccctaggctaattcacctgagcaaaagtaagaggagaatgaggaggcttctgtggtgacagcccagattagaacagtgactgtcgactaaggaagtcttcacatatggtgcacag

SEQ ID NO: 47943 - DNA, 1064 bp, Bovine  19866881248072
  misc_feature (1)..(1): n is a, c, g, or t
nactttggctacctgatgggaagaactgactcttggaaaagaccctgatgctgggaaagattgaaggtgggaggagaaggggacgacagaggatgagatggttggatgacatcaccaactggatggacataaatttgagcaagctccagaagttggtgatggacagggaggcctggcgtgctgcaatctctggagttgcaaagagtttgacacaactgagcaactgaactgaactgaatgccgtagccagcgacataatgtacatgggatgtatgtcaaaggaatgtttatcaaaggaattgtgttagatgtctattgtctaatcaattatctaacaattcacccaacatccatttatggaagacttgctttgttgtttgaactgtgcttacttgatactgaggagacaaagatgaagagacacaccgtcctcactctctggtagctcacagaggacacggaagaacaaacatttaaagaagtgatattgaaaaattaaaattaagatagacccataatcttaaccatctattgtttttagtttcaacatatgtgtatatatgtgttatcttgtttgatagtgatgttgcagattttgcaatgatattctctctctctggaattattatttcaatgcataattagttaaaatttggtaagatctcaagttgaattatcactagcaaagtacttgagagaataaaaacatttcctctttaaggagtgtgttcctaagaagaatatgatccttgctaggaaaacgaaaatatcatgggatcctataattaactatagtcctaatagaaatacaaattcactttgtggctaccaggcttgagcatgaatcaagatgcagtgaacttaaggactgtagccaaaagctagtgataaaactctgagaatactgattattccaggtagactgaaaacctgactgaagaaaattaattaaacaccccagaaaggccaaggaaaaaaaagcagaccttagagttttcccctgaaatcatcttatctcaaccactttcttgcaagcttatgtgaaaagactctttcaggaaagt

SEQ ID NO: 47944 - DNA, 914 bp, Bovine  19866881270127
  misc_feature (1)..(1): n is a, c, g, or t
ngttccctcttcaactttgccagtgcagattgctttccattttgaatttgcagatccacttgaacttttatctctaaaatatcgcagcatgggagaaggtattatgacctccaagtagacagttctaacttaaaactttatatttggggagtatggtcatctttttcactgggagaggtggggaaattagtaccaagaaaacattagtgtaattaagaaatgtgcaatttgcacaaggaaccatgcaaacagttcaccagcatattaatgaggtggaaatactgacccataatagttatccagtgcttttcagggagatgggcgagattacacattcagccactgacacaagtctacttaacgttgggaaaggctttggcgtagaggcaaagaaagaatgaatgtgctggtggcacaagcagaggtcacaagacaagttctttcgtggttgagtgacccgaagtttcagagtctttactattgagaaagaaatgacaacgtctaaattctcagcactgaacttgaggactgctgaggagcgtatctcaccactgggaccctgataccatttttagccaaacactgttgtgagcaagaatctggcaaacaaaataatcaggaacaaatgtgaaagccattttatttcgttttaatttttaaatctatagtgtggttgtgctttttcttaaaaagaatatttcttttcctacaaatactgctttggcttcggattattataaaattgcaattacttgcaattacaagctgatatatcccttaactccagtgtaaaagatggagacttctgaaatgaaatgcttgcttctacttggaagaagcaagagagaatagagaagagaaagccctcttatgctaaataaacaagaaatactttaaattgttttgcccctcaa

SEQ ID NO: 47945 - DNA, 1041 bp, Bovine  19866881353327
  misc_feature (1)..(1): n is a, c, g, or t
nataacagatgggcagttgcttttactctatttgtgagcaactgttgttttgaaaggttttttctttttttgtgtgacagaaagagaaaaaaaggagagggggtacaatatctggacccagaaggtttctgagttaaatttgcaagagctaaaattcttcacaaaggtaggataaaagtagtgatacaatttggtaacctctagcaaatgaattcttgctcatgttcataaggaaaaggcaaatgtaataaaaagagaaaaatgagagataccttgctggtagcattaacttgcaattttaccttaaaagccaaatatttaggtcgcaaggccttctacctctgaccgttttaggtttcaatgaagatttcatcatcatggttcttgatatgctagtggctccctgctgagataaaaccagaggggtcttcatctctaagctgagacctctggttctccttttcatcttataaaattcatttagagccatctttcctgacatctgtacataaagcaatataaaacattacaatataaattacatctgagggattcatctgaaattctatttcactgtttaataattaaaagtcaaaaacctctctgtggctttatagcagtctctatcgagaataaattttcttgataaggcatcctcctccccaacaatggaggccgttggcatattctgcagaaatgagtttagttattaataaatcctatcctctggaatgtgactccatttctgaacctctttggaggtggtgttacatattcagagttcccagattatccacccatttacaagtgttggaatttaacataagtgcctccatgtttttcattcataaaacgatgttgggcagttacctgctacacatggttgtgcaaggactgaatgagtcagtatgaatgaagtgctcagaatagagcctggaaaacagaaaacactaggtgctggctgttattttaactgctatgttttgtgttattcagaagaacctttctgtttcacagaatgagaaattctccaaaggaaaa

SEQ ID NO: 47946 - DNA, 705 bp, Bovine  19866881443273
  misc_feature (1)..(1): n is a, c, g, or t
ntctttgcgaccccatgaactttaaccccaccaggctcttctatccatgggattctccaggcaagaatactggagtgggttgccatgccccccccaggggatcttgctggcccaggaatcgaacctacatctctcgggtctcctgcattggcaggagggttctttcccactagcaccacctgggaagccccatgtatatattaaatatatgcaattttttgtatatatgcaaataaagctgtaaaaaagaatagaaaaattgaaagtatataaaataaacaattattttaatagcacattctgtatttttaacaaaagattaatactactactattacattgataatatatgcatgtttaattctagtttagaaaaaaaacaaaataaaaaataaattttaaaatcttggattttcacactactacaatttttttttcccctccaaactcttctgcattctcctttccaaagcaaaatctgagaacattacccataatgtgcattgggtcaacactatggtatcatgctacattaggtgccaatgtgtcaactggcaccatctggactgaaacacgttttcttcgcttgatgtcaaaagagcaaagacagcagaagtcatatttagtgtgctggaaacttctaagtatccatccacagaaggcttctgaggttgagaaagcagaatcctaagagtcacaaatagc

SEQ ID NO: 47947 - DNA, 2315 bp, Bovine  19866881874176
  misc_feature (1)..(1): n is a, c, g, or t
ntcatatttgataaggcacaattgcctatctgattacaggctgattttacaaatgaagaattaatatggatatcctttgttcactgagaaattactattagctttaaatgtgaaattcatttattataaataattgaatttaatctttatcacagtcctatgagaaaaattttattgtccccattttatagataagaaaacaggttcataaaggttatcgtagcctggctagtgagtagagagatacacaagtctacatgagttcaaaaggcttactctgggatcgacatgtacacatcactatatttaaaatagataaccgacaaagtcctactgaataacacagagaactctgctcaatgttatgtggcagcctggatgggaggggagtttgggggagaatggatacacatatatgtatggctgagtccctttgctgtccatctgaaactattacaatgttgttaatcagctctactccaatataaaatgaaaagttaaaaaaaaacaaaaacaaaaactagcaggtaagcagagttcccagagatggtatcatgcaaattaattttaacttcatcatcacgtgaataaagagatccctgccaaagaatctgcctgcaatgcaggagactcagctttgatccctggatcaggaagatcccctggagaagggaatggctacccactccagtattcttgcctggagaattccatggacagaggaacctgatgggctacagtccatggggtcacaaagagttgaacacgaatgagcacctagtactttactttcaacacttaaaaaaaaaaaaaggcttactctgaatcataagtaattacagtactctgaatgtaattcttacttgtatctttcattcatccatccaaccattcatgcaatcatttatttttccattcactgaattctaaaaaatcttattattcacccactctcccaccataaaccggatactgtgtaccaagaataggggatacaacagtgtgaaacagcaaagtccctgatcccctaagagcttacattcttgtagcagtagatgagaactgaaatagaaaacaaagagggtaacatgcatggtgagaagagctctgaaaggaatgaagagagcactgtgaagaagagagattaggtgtggctgagaccccactgcttttcacagggaggtctgagaagggctctctgaagaggggctaactgagctgagaccctcaagatgagaaggcggcatccacgtgcatggccagaaggagcagtgttccagaagagcaggcagggttggagaggtgtctaggagggccaattccaggcaatggaagtttattcttatgagtgcccatttaaaaatccagataacttgttcagtggaaagtatccacaatcaattctacaccatgctcttttctagaagacaggttactgaatgtgtcctctagtttttgttgattaaattaagaccaccattacatcttcaggtgttcactttagataactctcaagcctatttatgtatgtacatttatttttgagacctaggagaaaggagcctcatgtgggagttcttaggggaaaataatgggcaagtcacacatctaattagttttttcaaattatttaatgtcttagttactttttggtagccttcccatttcctctcatctactgaataataagttgctgaatgtttgtaaacactgtgctgaagagtaatgactgaaattctccataaaagagatctgcagtgtggagtggcagggtaattttgccctcagggtgttggaagatatactgcatcttgtgcactgtcattactcccacaattagaggaagccagacaagatgcgccttcctgtgacattcccctgaaagacaagaacgtatttggattcatacgacaaaataaatgtttcatttgaaattgtctaactctttcagaacaatgttataagcatcagtgtctgtcatttcaggctctaagatagagattttcttttcagatctgtaagcaactgtaagataacgcatgatgtgtggtattatttttgattgacagagccagatctgataatccaagaggctaagataagagctgctaatttttaatgttggtgtacaaaatgactggggatggtgatattcactttaatattcactctgttcaagttttgtgggagagtattatatatatatatatatatatatacatagttagtaaaggccaactatatatatatatatatatatatatatatatatatatatatatatataaaagtctctctgttgtgtctgacttttt

SEQ ID NO: 47948 - DNA, 756 bp, Bovine  19866882047261
  misc_feature (1)..(1): n is a, c, g, or t
nagtccgaatttatatcttggggataatatattaacagtggagaatctgaatttaatgacttactacatcagaaaatcttttttcttttagaacgtcatacacacctacatatacacacacacacacatatgtgctatgtgtgcatgctcagtcatgcccaactctttgtgaccccatggattacagctcatcaaactcctctgaccatgggatttcccaggcaagaatacaggagtgggttgccatttctttcttcaggggatcttccaaaaccaaggatcaaacctgtgcctcctactttggcaggcggattctttaccactgctccactatataaatactttagtgtaactcattgtgataccagatttattaatagtcaataaatatttatgaaactgaacttgatcttgcatgtctccatccaaatgataattgtgctatatttcctacccctttcattgtgtatgaagtaaagcctatccatactgtatctaccaagtcttataggctattgacaactcaacatatccaggagaaattcatcctcttttgaaccatagatggttcgtgtcatcaacatctgcctaatcatgcaagccaggaattttaaagtcatcttttctttgctctctttcaatcatccctgtccatccatttctgtcagctttgtcactactccgtatatgaccactgccttattttagtgcaccatatttttattttttattttaattttttttagtgcaccatat

SEQ ID NO: 47949 - DNA, 1430 bp, Bovine  19866882074087
  misc_feature (1)..(1): n is a, c, g, or t
ncctgtgtactctagtcctgattccaacacaaagcctcaataacttcgatgatgacttgctttcattacccatcctcacaataatccaataaaaagctctcatttcaaggcaagccacaaattcaactcaacaactcaatactgccactgcggcacatcagctgactccgatttgcctttatctaatcgatacaaagactgagctccctccctccagcggaaagcagaggccaaggacctggaatcagcaaatcagtctgggcttggacaaaactaagaggacttatttgtatgtggactcttaaagaaaccagcattctccctacccaaagtctgcccatcccaggactcaaatcgctccacacaggctgcagtttaagaaaaatgcttatcaatgggcctggctggcacctatgagaatttggtagactagatcaggggtcccccacctccaggccgcagaccagtacctccaaatcaaatcagaccagtcaaatcagcagcagcacctagagtagaaataaagtgcatgataaatgtaatgcacttgaatcatcctgaaaccacccccccaaccccaatccatggaaaaactgccttctatgaaatcagtcactgtgccaaaaaggttgaggatgactgatctagattatagataccttcagttcagttcagtcactcagtcgtgtccgactctttgcgaccccacgaattgcagcatgccaggcctccctgtccatcaccaactcccggagttcactcagactcacgtccattgagttgctgatgccatccagccatctcatcctctgtcatcccctttttctcctgcccccaaaccctcccagcatcagaggcttttccaatgagtcaactcttcgcatgaggtggccaaagtactggagtttcagctttagcatcattccttccaatgaacacccaggactgatctcctttagaatggattggttggatcagcaatacgtgaaccgtgaacttccagatgttcaagctggttttagaaaaggcagaggaaccaaagataaaattgccaacatctgttggatcatagaaaaagcaagaaagttccataaaaatgcctatttctgcttcattgactatgttaaaatctttgtgtggatcacagcacactgtggaaaattcttaaagagatgggaataccagactactttacttgcctcctgagaaacctatatgcaggtcaagaagcaacagttagaacctgacatggaacaatagactggttccaaattgggaaaggagtacatcaaggctgtatatggtcaacctgcttatttaacttatatgcaaagtacatcatgcaaaatgccaggctggatgaaccatgagctgaaatcaagattgccaggagaaatattaataacctcagatatgcagatctcaccacc

SEQ ID NO: 47950 - DNA, 2447 bp, Bovine  19866880390015
  misc_feature (1)..(1): n is a, c, g, or t
ncttgaatgtatagaaaggaagatgaccaattttagcagtcaaagtaacttcaatatctcagctaaatacttcatttcttacttgaaggaattataccccaaaatgagagtatagacacattaattaaaagtaccactaaatgcagagcaatgtcatccataagggaaactaatggatatgtttttcattatataaacatttctggtatcagtatcaagtaaacaaagaagcaacagcaacaatttctagatgaaagaaaaataaatcaaatggatattttgtgatttaacatactaaactccctttttaaagtatatatatgtactctttatcccagatctttgtatatcttcttatatctgaaagaagtgaagcttgacctctacattacagtatctaaaagagttggcaagaaaatctcatcaactgaagtttgggaaatttcttaccaccaatatttcaactctatattcagacattctatccactctcctggggaccattatttaaccattttatgagttgtttcatttatgtaatgggaataaaataaaaatacccaaaatcagagggtttgaatcatgcaatgtaaaaatatatatttatttttggctatgctgagtgtccatcactgtgcaggcttttctctggttgtgaacagggacctctctctagtggcggtgcacaggcttctcagtgcagtggcttctcttgtggagcatgggctctagagtgcatgggcttcaatagtcgcagcacatggctcagcagttgtggttctcagactctgcagcacaggctcagtagttgtggcacacaggcttagttgctctgtgacttgtgggatcttcccggatcagggatcgaacccatgtttcctgcattggcaggttgattctttaccactgagccaccagggaagccctctgaatcatgcaatttttgatatcttttcccagcttaagatttctagctctatttaaaaaaaaaaattatccaagttatagcaaaaacctatctagaaactttctccaggtgtaaatttggcaatcaactttgatggactgtactcaaaagaaaatttatgaaagctatttgcatgtggtaagaatgattctcaggtggcttagtggtaaagaatccacctgccagtgcaagagacacaggagacaagggttcaaactctacgttgggaagatcccttggaggaggaaacggcaacctgctaccatattcttgcttggagaatcctgtggatagaggagcctggtgggctacagttcatggggtcacaaagggttggacacaacttaatgactgagcgggtacacacacttgtaagaatagaagtggtatataaaatgtatctaatgcaagcagagcaaatttttcattttcatttcagaaaaaataaaataaaaataactaaaataaaattcctattgaaaatgagtattcctctatactcagtaagaaagaaaggttgatattttaaattttggatgtattttaaaattggacaagtctgtaaaatatctaaagtaatgataagtatatagtagttggtcaacattgcttataaacttaatttttatatgatcatgtgatctattaaatcacattctcaaggaattcttataacactctcactacagttttatcaaatgttgagtccccaaatgtgataagaaactcattacttcttgacagaggcagtgatattattagacagttctaattggcaataaacaattaaattgagttcaaatgtatcttttattaacttgcactcacaagttctatcaactgcttgtgcagaaatggataacagatttttgctttgttttctatacaactagccctttaagtatttgaagccaacatctttgtcatccaccagttattccttaatttaaaaaaaattaaatatcttagatttgctttatttggtttgctagtgagggatcagttttaaatttcctttctattttttaaagaacaggtatgtgttgctaaagtgatttgttaatgttgttatggaaacaaaatgaaaaaaaatggtaaagtgtgaaaaatgctggtgtactcattagaatgtgattaaatgtttaaacttccagtacattaacactgacattttatcttttaaatggtgtcaggtagtgaaggtcaacacaagcgaacattctgtttttggcccttagttagaagcacattgcacttggacttcacagcgggaaactgccagacgctgtctcctccgtgaggcttcttctaagtactggcttgcagctggctccagcatatggtagtatatggagatattttctgaggtccactgcctcaatcactatttaatgattaattactacagtctgatgtcagggtgagacagtcagttcttcaggtaaagatcttaactatagaaaaatgacagcaggcagtt

SEQ ID NO: 47951 - DNA, 1641 bp, Bovine  19866880427049
  misc_feature (1)..(1): n is a, c, g, or t
nttctgaaggagatcagccctgggatttctttggaaggaacgatgctaaagctgaaactcccagtactttggctacctcatgcagagttgactcattggaaaagactctgatgctgggagggattgggggcaggaggagaaggggacgacagaggatgagatggctggatggcatcactaactcgatggacgtgagtctgagtgaactctgggagttgtgatggacagggagacctggcgtgctgtgattcacagggttgcaaagagtcggacacgactgagggactgaactgaactgaaggactttcctagtggatctgttgttaataattggcctttaatgcaagagactcgggttagatccctggccggggaattaagatcccacttgccatggggcaactaagctcatgcaccagaattactgagcccatgcagagtaactagagaagcccacacagggcaactaaggttcctgaatgctgaaaaaaagattccctgtgctactaagatttgtgcctgagtatgtgctaagtctcttcagtcgtgtctgactctttgcgactatggactgactctatggactatagcccgccaggatcctctgtccatgggattctccaggcaagaatactggagtggattgccattccctgatccagggaatcttcctgacccagggatcaaacccatagctcttatgtctcctgcattggcaggtgggttctttaccactaaagccacttgggaagctccaagtaagacttgatgtagccaaataaataagcaaattaatactttaaaacttgtttgttaaaaaaaaatttcagccatgctcagggtatcaaagagtgttaggttaccctaaagcgaatctccatacctcaaagacatgttttccattcctggagtttattcaaacttctgtccattgagttggtgatgcaatccaacctactcattctctgtggtccccttctcttcccaccttcaggtcccgatattatttaacaaacaatactatcatcatctcagtctagctatggaaatagatatgttgataaatatctacaatataaatcatattgttaaaaatacttagcatatgctgatcacaatggcaaaagagaagcagcaattaattttggtttaaggactcatgagaggttctaactgaaaaacctttcccttaggaatgctcatgagagatccttaagattttgtaaaggcaatataattcaattagacaaacacttatgagtggccatcatgtctaagatactaaggcactgtgtaagacatttacttgcaaagtacaaagacaggaaaaacaattacttatttccgtcaaactggctgagatatcatggaagagataggcatgtacaaatctcattatgtgctcagttgctcaattttgtctgactctgtgacaccatggactacagcccaccagcttccctctgtccatgagatttcccaggcaagaatactggagtgggttgccattcccttctccaggggatcttcctaacccagggatcaaacctgcgtctctgggatctactgtattggcaagcagattctttaccactgacccatctgggaagcctttaggatggatgagaattccagaaaaag

SEQ ID NO: 47952 - DNA, 1113 bp, Bovine  19866880563025
  misc_feature (1)..(1): n is a, c, g, or t
ntctctttagggttctcatctaaaattgggaatattccaccctagagacaggaaatgctgggagggacaccaagaataccactttttaaaaataccacttttttaaaaagcagatgtgctcttcaaagatagtttctttctcatcatgcatatggctaagcaattaaataaaatctgggttatgttaagaaaaggagaacaaacacattatagacaccaaaaatattttagataactagttagtcttatagaagtactactataggcctcagtagtctttctgtagaaactagaaaatgatctcccaggacttggcaatagagcaaaattctgaggatgcaatcatcatgaatcactatgtaattaaaaaaattttaatgacatgtagaaataatacaccttctggaatgtttgtgtaagagtgagaaaacttaagaaataattgagtctaactagtacagttatcctggagaaggcaatggcacccccactccagtactcttgcttggaaaatcccatggagggaggagcctggtaggctgtagtccatggggtcgctaagagtcagacacgactgagcaacttcactttcacctttcactttcatgcattggagaaggaaatggcaacccactccagtgttcttgcctggagaatcccagggatggctgagcctggcaggctgccgtctatgaggtcgcacagagtcggacacgactgaagcgacttagcagcagcagcagcagtacagttatattggagaaagcaatggcaacccactccagcactcttgcctgaaaaatcccaagcacagaggagcctggtaggctacagtccttgtggtagtaaagagtcggacacgactgagcgacttcactttcacttttcactttcatgcattggagaaggaaatggcaagcaactccagtgttcttgcctggagaaccccagggacgggggagcctgatgggatgccgtctatggagtcgcacggagtcagacacgactgaagcaacttagcagcagcagcggtacagttatatggggcttcccagctgactcagtggtaatgaatccctggccaatgcaggagatgcaagagatgagggttca

SEQ ID NO: 47953 - DNA, 1871 bp, Bovine  19866880618090
  misc_feature (1)..(1): n is a, c, g, or t
ngtataatatatttatattaccatactatgctttatattaaggattattggtttgaaaataaaaccaccccttcctaattttgtaattattaaaatacatactttgaaataaattttatatgtataattaagtactgaataactgtgggagcaatgagaagactcaataaattttattagagcctgaattctatcctttttgacaataagaataaacaaaattgctaacttttgcatagcatttaaaatatgccaagaactatagtattcatactatgtaaattatgacatttaatctttataacaatcaaatgtagcaggaatgatcactgtgaaagttttaaatgtgaagacaatgaggcctaacaaggttaaatatttgaaaatatacatagctaataagatagtgagatttctttggtaaatcgtatgaaattatttttgaaatatgtacttacatttttctcttccccttttactttggatcagtaaactaaagttccaactataaaattgtattgctttgaaaactgatgatgcatttcagagactattttcaacaatgaaaattaagatgattttctctttctccttataagcagatggaataaagaactggaaaaaaaatgtgaaaaatgattcactgaactcactccggtattcttgcctggaaaatgccatgaaccaaggagcctggtgagctacagctcatggggtcgcaaagagttggacatgactgagcacagcatagcatacttcacagtgcagtaaataactggtaataataccttcagtatatagatcagtcagtatcaggttattactgtctcacttttatttcagaactggttatctctaacttctctttctctacacctctgttcctctttctctgtctttcttttcaagtacctctcttcctaacatcaatttccacttttctaatgtctgccacctccagagtaggctcttaaatttactatttctatgtaatatggtagtttttcagtatacttagtgatgttcagaagccatttttaatttttttaaccatacctgcagatgcaatagccaactgaaacttatttataaaaaccaaggtgaacttcacgctaatacatagtttttggagcattgtacactttttcctctcctcttccttcagatttattttgttcagaggttgtccctcctgacttttcttatatctgtataactcatttatgggcttatgaacttagtgaacttccagtgtagttacttcttagagagagaaagaaatgcattggctaggcaggcatttctcctactctttaaatttgcagtgaatgatattattgctggggcagtaggaatactctctcttggtgctgcatatatattatttgatctggtaataaatgtaaaatatagtcttacataaacatacatataagctaacagttgaaggtggcaaatgaattatagaatacaaaactagtccctggtagcctgactgtcctgtgtatatgaaattgcatactgtgtgaacagaacttctttaaaagacttcctgaataatatttctaacagtgtaaggaactgggaccttgaagtaaaccttttcatttttgaaagtgcatttactactttaagattctgtctggaatcctctgtgcatttatacgctgcttcctacttcttggcctgtgtacccgagttctgacacagtggaacatgagaaaccagcttatcgtctaaagctcatttctgactgctgatggggtataggtcagtgctagtatagactgtgaattctgttgctttgttacctgtgagctgtgtattgaaactcaagtgaaatacagtatttgaatcaatcagtcagcaaa

SEQ ID NO: 47954 - DNA, 1586 bp, Bovine  19866880696720
  misc_feature (1)..(1): n is a, c, g, or t
nagtttggattcttagacaagaaaaatatgcatttggccactttagatatttctatggaatgttgtttatttttcaatgaaatagaatatttcattatattgtgtgctggcatttttaaaagtacctaggcatggaaactctaccagttgatggtcaaggggaaatgatgattcaaaggatggtattggcacagaactgtaccatctgtaagtaaccactatgttgaaatatctatggaaaagggacatgatgatatcactagtaccttaagcttaaagcttcttggtgtattataaactgaaattcatagtgatctgaatgcttacaaagcgctagaaactagagaatatggaaacctgcaggtggaaactttaagtattgcatattgcactggatagttctctctccatgttgtaaatatcaattattaaatactaccaacaatatttaagtagtcacttttaatcataatattttacatgtgtatttataccacataaatgaaagctcccaatgtgtttcacagactatacacagctttattaataaaatgtggctgtgtctactaaaagcacatttttattcaagatataattgtaaaatgcaatagtcatagattatgctaatagacaagagaaagaacatgaataaataaaagccacagataatcccccaaacctaattttaacaactatgttcagcttcccgcttctaccaaacctttgtaagggcttgctaacaagtaataaaactgattgattggcatttcaacaacccttctttctgttgctcacctacgggtggaaatgctaacaagcacggaaatagtcaatgggtagggagtagaggaaaacagaaggaggaacactggtaattcaccacctagataatcagctcatgaataacagagagctgactgaaaagatagcacttaagtaagtactgtaataaactcagtaatcagtattcttagtggcttagtggcaagaaatagaactaccatctttacagctagagggaagtccatgatttttacagaatttatactgcaatgagaatatcaagtttcaatgccaaacatccaggatgttcaaactggagcatttagatcatctctaaaatgcctttgcttatgttaaataaaggatccaagtttacaaaacagcttaaggggcctgtatatatcattacaatgttataactgcttattgaattcaatcatgaaatttaagatatgtaatatgtgacaatgtgaattgttttgatcttcttcaaattattattcttatttttcttaactgcctgaagttacagattatttccttggaaacacaaggaagacttgtgacaagatgggtttttggggtcaatgacagcactatggcctgactaacgaagcccatccatctgtaataatactgcttgggtacacagtttattacagttatttttaacataattcctaattggaggatcacatcttatctttttgtttgctctgtcgcaaaatactacacttcttaaaaagagttggttgctaaatggcaggaaataggctatatcttcctcttaaatttctttcaat

SEQ ID NO: 47955 - DNA, 1302 bp, Bovine  19866880845691
  misc_feature (1)..(1): n is a, c, g, or t
nttgcctgccatttgatttaatcttcaaataagctccaggaagcaggtccctggacagttaatctttagttttgtagcccatgcacattttcaataaggttactagggaattaggcccagtggggagaggaaaagcatattgtcttattccacaggcagctgttgtgagctctgttagcaaattataatgttcttaattatgaaatactttgttaatagaatctcgatcatcatatctgtactcgtcaaagaaagtcattgcaaatctttagtataaagtttcaaacaattaaaaaaaaattatcttggctaataacaaattccatataaggtttcttatcacacctatcaccaaaaatcaaagctcagatagataacttgaaatattaaagaagagagataatagcatctaaagataacaatcaaaacaaaacacttgaggaaaggtgtaatataaataaagagtgataggaactgttcattttcaattgtgttgctgtcctcatcaataatatgtacacattctttttcaagcatcttttcatttgttcctatttaaacaaaaacatcaaaaaacaacaaaccatttgataaaaatcatgaatcatctggaaaaaaatcataaaagtttaatatctttctgagagccatccagaaaaaaaaaaaaataaatagaggagcataaagcaaggggacattaaccacaagttgctgacttgaagttttgggggattttttgtttttctttgtggtcagcaacagcatgcaataactcaggagcaattttcagtgaattattatacctgctcaatttattttggaacgatctttgtaagttaaggccccatttatataaacctaccagttaccttcagatagaccataagctgcataagaacactctcagcctaatttgttttagttcctctgatcttcatgtttagcctcatccactgttcctgaaaggcataaatagcaaggaatcatcttttccagaccaaatactaaataaataggagaaaatgtgaaactgagtttcaaaaaatgaaacaggtgaagccaatcaaatttgcattgactttcttggtgatatgcgacctgctggttctgagaaagactttttacctcctctgaaactacaatagagccactccctgcatgctcttcttaactttgtctaagtgccccgttaagtacttctcacataaccccagcagctatttcaattattctgccagttacctcagccttctgttccatatctttcaacatcccatgcagcagtgcttgtctcctacttca

SEQ ID NO: 47956 - DNA, 980 bp, Bovine  19866880997830
  misc_feature (1)..(1): n is a, c, g, or t
nccccaacagtgtactttttccatgtatgctgttatcagttttatttccttactatttttctgtctctattgttgacgtagtattctataagaatgactacattaatcatacttctaaaaatgtaacattctatactgtggtccaaacatacaaattttgcctctcctcttgactttcatatcaaacattgatattaggaactcaagttggaatccacaatgttaaggtgtaaaactacaaacattttggtatcaataatctaattgtttactgccatttattttgtaattattgcttagggaaaaaaaaatctatcattgctccatgccagctttaactgcagcagaggatttaaagacgaattcagacttcagccttcccctgaggctgatggacttctcctttcaaagtaggacacttctatctgatggcattaaccataaaatcccccatttcaagtctatgatatcctgaaggacaacggctcatttcatttcttatcaagaaatcgagcagatcagtcatatttcccgaatcaaatgacatttcagaaaattcatttgaaccaaaaatgaggtttcctctcggcagactccaattagtttaaaagtggtttttgatgacaattttcaaaataactgagcagtatattttttttaaatccacatttgtatgtatatgactaaatcaactcatacttcacagacacacatatgcaattactaagacacgcattcatatacaccatccatgtccctacatacacacacacatacacacacacacacagaggcttcccaagagccaaggcttgccaccctgtcaagcagtataaatctttaattttagtgatcagcattaatagtaaaatacttaagatctttcctccttccttcttttttttatcccattaccctaggtattccagggggactatgctctctcgtttgctccctaagtacacaaaattagctgctta

SEQ ID NO: 47957 - DNA, 1550 bp, Bovine  19866881058992
  misc_feature (1)..(1): n is a, c, g, or t
ngggttattattaaagaatcagaagaagttctaaaaatgagcagttcctatcctctcaacttcactgtgaggaagctgaaccaaagtttaattaactcagcaaaagagttaacatggctagaagatagcaaagcagagaccatgattcctttctttgagtattcaaatgctttttccactagatttttttttttcttacagtaggaactacagcctcagcaacttaaaatgcaggagtgttttttgttgattgctaaaatgtttcttttgcttcagacttgatggaagtaaaggaaggactcctctttttttcagatccatttcaaaacacccttcaggtttaaacacaatgcagttttctagaaattatactttgtcattaatttaaatttcaaggaggagctggtggaagtaaaaaaaaaaaaaagcaaaggaaaataaatacagttctctctgtaacagaattgtctttgtaatctctagtgtttggtgtgatataacaaacgaatttattatttctttagagagacgtgttcaagtggacaatgattcttcctcaatgaaaacttttaagaaatttgattgagatggaagaaataattctcttctatcagagggaattttgtaaccttatcaactccctattttgtgactaaccaaaatccactgtacaatttaaaaaataagaacctattcattgctttgctcatttagcactataaccagcagaaattaagcctgtcaattataagcatatgaacagcttttattatcaaagagaatgacagaattctctactttaatgagtaatggctgaggccaaccgatacttcattcacagatgacaggacatcctattgttgatgctgtgtgtttcagcctggaagttatcacttatagatttactgtgcccctattataatgtaaaagtacaagtaaacctggaacatttagccaaataacaacaaaaatgaccaggaaatatcattttattaacagtcaagcatgtggccttaaccttagcaagattctatgtaataggaaataaaactcatatgacaccataaagacagggaggaataaaaacaagcctacaactgttacatatctttttgttcctgttttcaagtaatgtgctaatagaaattcacacttccaaagatataaaccaagatacactattgaattgttaaagaacatcactattatatactgtacatggaaaaataaaaagcataaggaatgtttacttttagaaatttaccagttacttggtattctcacaaagtttgcatgttataattaagataaaaattttagcattattactatcttgtgacagttttatagcacctgtcctactgatttggtgcaattgaacttaaattggccaattaaagggtaggtgtcttatgtcaaattaaaaaaaatttttttttttttttcagattatttcagtccaactttgggcagtcagttcaaatgcaactccctgtcagagtaatttgtatttctgtcacttctcatttactccctactccttgtttagc

SEQ ID NO: 47958 - DNA, 1315 bp, Bovine  19866881122710
  misc_feature (1)..(1): n is a, c, g, or t
ncttactttgcttaacttccacccttttaaaaaatatgataaaccagaaatccacatgagcccgaatcagtgggaatgtttccctgatacagctgtgtgttctgaaattcttactgaattacttttatgtgcttctaactaccttctttcaaatttcctgtataatgttaagatgaactaatagcctatcattgatgatatgatcatgaataatccctgaattgtacacaaatctgtgttcattaccaggcatgcctttgttaatgaaaaaaatcaataaaacaaagggcttcatctaaggttcttagttaaaagcatcaggatgggggaaaaatatttttaaacaataagagtatcattacaagcaaatttagactcagtaaattagtaaaaatctgacaaaccaaggttggaaaattggcagaactcaaaagacagcaggaatcacacaaggagcatgcagccaaagccatatggtttgcacaacacctaggctgctgctggaaatctgacctccaatttttccctctctcactcgtacaagatcctgtttttcaaggttcctgattggctgagatgaagtcacatgtccaacttctggctgaatctgtgaatgaaaaaggggaagactgggcttctctccctccagcagaactgaccacctacataagtttgctgtggaaggatgagtcttaggaatttccactcaaatacgaatacacaaatatgaaatttgcatgttatgttgctataacaggtgcaataagaagagagaatcagtgggaaattggatccaaaggggggaaaaaaaaaaaactttataaattaaaaaaagcaaaatgtacactactcacagggcttccctggtgtctcaggctgtatagagtctgcctgcaactcaggagaccgaggttcaatccttgggtcaggaagataccctggagaagggaatggcagcccacttcagtattcttgcctggagaattccatcaacagaggagcctggtgggctacatagggtcacaaagagtcagacacaactgagcagctttcacttcagactactgagaagtactcacaaacatatgatttgtaaaaatattgtctactcgtgttttcctacttttcaaaaaactactaaggaaaatattattatattcacatatgtctgtttttaaatctaaaaactttatgcatgtatctatttgttttataaaattatattttacttttaattagataattactttacaatattatgatggtttctattgtacatcaacacgaatcagccgtaggtatacatatgtctctt

SEQ ID NO: 47959 - DNA, 1942 bp, Bovine  19866881138299
  misc_feature (1)..(1): n is a, c, g, or t
ntttatttcctatcccagtttcttctctttcttggacccagaactgttgcttttccaactattctgcaaaactacctagaaagctcacttttaatattcttgtcctagatattcaaaaggcggcacatttaattttctttaacatgtcacctcctcaaagtcttccatgattacccctgtgtaaagaaggaaactctcacagttgttccttgattattactgacattatattttatattgatttgttctttgtctgaactcctcaccagaatataatattcttgagcatggaaactcagtccactgtaatacccctaaatactaaaaataataactgtcacacaatggttattctgtaagtattggataaactaatggctattacatttgtttatatttatgtaaaatatgttgaaagaataaatacattgcttgtgaaaacagttcaatctgaatgcatgcacatacatacaggtgctcctaatttgctagatgtttaattagataagtgacaggttaattgggaggaaaaagcaatataacagggtaatgataaaatgaagaagatgtaaatgtgtgagagaagagaatctcaagggaaaacatgcaaagaaagcaaatgaaaataaagtggatcattggagtaactgaagaaaagaagtattgtatgagtattgtgagcttccctggtagctcagctggtaaagaatctgcctgcaatgtgggaggcctgcatttgatagctgggttgggaagatctccagggaacagctatgcactccagtattctggcctggagggttccacggactgtatagtattgtatgagtaaaacaagagaaatttgtgaagaaagtggttttatttacttacatgtacatgtacatgtgttcatgctcagtcatgttccgccaggcacctctgtccatggaattttctaggcaagaatactggagcgcattgctatttcttcaaccaggggatcttcctgacccaggaatcaaaaccaagtgtcttgcatctcctgcattggcaggtggattctttaccaccgcaccacctgggaagccctgtatttacttagcagagtggatatttgtgtgtatcaatgggcaaaacgcaatcagtagacagcctggactgtatgatgctagttaagatgggttccttaaaattatattctcctgggctgcctgcttcaccaagatatccctcccgaaacaagtgagagcaaggttaccaacaatgttagatgactggctccttttctcccccctgattcttaacaacgatagtttttcaactctggaagtcaaatcatgacatctctttaaactcgtacgtattatttccctggtgccagaaattgatgtgtcatggaaagatggcctacagctatgccttataaggctgaaaaataaataaagcgcactgtgttcctcctgttgtcaagctttctccttgtaactaaaccaggctgtcccccttcattctgtttgttctgacaagtttgcaagtcaggccatctattccctttcagagtgttctgttgataaagtacttggtcgtaggaatagtcctagagagctcatcagtgcaagattttcactgatccagctgtttatactatttttcatggcaagtcagcaaggctgatgtgagcaaccattgccagagtgcaccggaaatgatagatccaggcagctgtttttcgggttgtttgtaaaatgtattctatcagatctgctcagtgttttgatataaatgttctacttgaatcctaagaaaaactcaggaatcaccatttttttcttttggtacttagaaaatgatcatcatcacaactaaattccatttagtggaagccattagacacttgttaccaagacacgcctttaagaaaccccttccacgcagtctaagaagagttaaaaaagctgcc

SEQ ID NO: 47960 - DNA, 1104 bp, Bovine  19866881209188
  misc_feature (1)..(1): n is a, c, g, or t
nactatagtttaaaaaactgaccaaattaaactccttgtttgaaaatgttatcattattttatacatttcttaatttaggtcaatttcaatgtatttgtattcgttacttttttctcagctgttttaaaaaacacattaatttatttatagtaatgcatcattacatgttcaattttcaatggaaatatccttgtaaattagatatataatagaatatatttggcttataaaatacttaccataaatattaaaatttgcataaaactaacattaacattggagaaggcaatggcaccccactccagtactcttgcctggaaaatcccatggatggaggagcctggaaggctgcagtccatggggttgctaagggtcggacacgactgagcgacttcactttcacttttcaccttcatgcattggagaaggaaatggcaacccactccagtgttcttgcctggagaatcacagggacgggggagcctggtgggctgctgtctctggggtcgcacagagtctgacacaactgaagcgacttagcagcagcagcagcaacattaacataaaacaaaattaaataatctgatcatctggaatttcagacggtgaagcaacaaatgcgttttgattattaacctgcgatgttagttaatttgtggtggactgtctttatgtactctgcaaataaatttaagttagttgtctagggaaaacttgaccatttcccacagaaaaaccttgttacattataagttccagatttaaatagtcaataccaagaccagcaggttgtttcaaccccaaattatctctctttatgctgacatttgaaatctcaatgtacttacttgaaacatttaatcatctccctaaacccagactctgcaggatttctgtagaaagttttatgttgcaaactacataacataaaacattagtgagtgtgagaaagtgtgaatatcactttcatagatttcttcacagtctttatttcgtgcctgctactaaacccacttaatcagcaccctgataaatggtgcatccacttaattggaataattgccaaggagaagaatcagtgtagttcatttcaagactccgaa

SEQ ID NO: 47961 - DNA, 767 bp, Bovine  19866881310298
  misc_feature (1)..(1): n is a, c, g, or t
ntgttcctaatgggaatctcctcttatatttatataacactttgaaaaaattatttgctttaatgaagggttatgcaaggagatatgtttgttttttttttttcatcccttcctagtcatttaactttagatttttagaaaaagaaactacatttgatctttccttcacagaaaaaataattctcttatattattgatacagaaataattcctatactatcaacagttgtgaagcactttaaaccaaatagttccgtggttgggaaattctcccctcccccaagtctgtaaactttcagaaacaaggaagaaattgcaatgttttcttgttagactccataaaggttactttactaagtcacttagaagttacagacacatattactgttgagggaaaagtaatttgttataatcatttttaattatagttatttttaattatctgtgctgtatgtgtaaacattaaaaatacaaacagagctgctatagcacagatggttggtgcttgttacccaggctgtcaagcatcatttgaacaccactgcctcctcttctctaattgtgaggaaaagcaataaagttgcttcttggaaacaattttcatgtttgagaaaactggctgttactaaagatgggagaaccaatttatggaaaattccgtcatcctttctctctccctcagcaatgccccttgaactcctctcacttgaggcccttctcactacttggtttcgggtttgcccagtaggcaacacagacatacgca

SEQ ID NO: 47962 - DNA, 1682 bp, Bovine  19866881359193
  misc_feature (1)..(1): n is a, c, g, or t
nctaggtggcactagtggtaaagaaccccctgccaatacaggtgacataagaggcgtggattcatcatcgcgtcaggaagatcctctggagcagggcatggcaatccactctagtattcttgcctgtggaatcccatggacagaagagcctggtgggctacagtccagagagtcacaaagagtcagacacaactgaagcacaacactcatgtgacagccctcatgttgcctgatgtccacccattgttctcaaggaaggtcatcctaggtctgtgaatataagtttgacatttacttagaggtgggcaaaatctgtaggtggacatttacttgcttactcatgcaataaatctttactgagcaactactgtaccccagtcactgcctggcaaattaacccatctgtaccaaaagacctgaagtctaatagtttgaatctgaattgatcttactaccccttttgagttatgtgatctaggggaaacttcatgagtattagtttccctataacaatactcacctcactttgtacttgtgaggattaaatttaaaaattccacatagagtacttatcattcttgatacataggaagttaataatatatgttacctgtttttattactgtttaagaaacggaaccttccaaaatcaactgcaaagaatgaggtatatatttacataatagaattttaattagtacaaggtattaagaaaattaaatatctcaatttcataacccataaagcaataaaattaataagatacaatattttaaatacagaagcatagtatgtctatacacatacatatatatatgcctgaaagttcagttcagtttagttcagttgctcagtcgtgtccaactgatatacacataatatgcccaaaagttatgaaacataattaaatttttatttttttttaacagcatgccatgtgggatcttacttccccaactagggatcaaagccatgctcctggccttggaaacacaatattaaccactggactgccaggaaagtcccatgaagcataattaaattgttgtgttttaatctatagatataagaaagcaaaacaaaacaaaatgtgctgactatggcttcacacacatttgatcttatgaagcaagtaaagattttagctgaccttattagccttgatccattgctcaactgacagccaagactatcaaaaattcatggaatcacagtctcaggagagcccaagtgtgatcaagggaatatcagggaaaccggggcctggaaactgtttgtaccattgttcctgtagtaattattcaccctatgcccacagatatttggagaaaaaaaagtgagttgaggtcccacctgatgatgagaattctcctatcttgcaaatatattccacctcttcttttacctgccactggattatttcacaaaaacattgtttctctctaagattttggcagaagcctctgaactgaatatttgctggctagtctcttctttctgtattaaactctacatcgatggcagaggacttttttaatgccattttggttatgtcagacacctgcttaaaagccttcggtggtgttctactgtctttgggatgaaaactcaaggcattctaataaggcataaatcacttataatttgccccgatgactcaccagcttcatctctcaacactg

SEQ ID NO: 47963 - DNA, 761 bp, Bovine  19866881841491
  misc_feature (1)..(1): n is a, c, g, or t
ntatcccaaaattacaaacttctactgatgctgaagagtaaactccagtactttggccacctgatacaaagaagtgattcaagaccctgatgctgggaaagacttaagacaggaggacaaggggacgacagaggatgagatggctgaatggcatcgttgattcaatggatgtgagtttgagcaagcaccaggagttggtgatgaacaaggaagcctggagtgctacagtccaaggtgtcgcaaagggtgggatgggactgagcgactgaactgaattgaatttaactgaactgactgaagctctgcactcattagtttatttatttaacctttaacatagtaaatgaacttctatgttcctgtgtatagtttgttcaccattttatccctagcactgaatataatgcctggcatatagtaggcatacaacagaagtattgcaggtatatttggtagtgttatgcaatggcagaacaaaagttgtacttaggaaaagagtcctgaaattccatgcttcttttttgaattctaacagaaaattgtcactcaagccatgacacacttacatggataataagcacatatatttgtcatagactggatgaaagccacattatcctgttatattattatcctgtcactgtcctagagccacacaagcagacaaactgatatataatagggttgaaaagcaaagcaagatcccagatgaaacctagattaagagatttctctattatcttacataaacacgggaaagg

SEQ ID NO: 47964 - DNA, 2537 bp, Bovine  19866880383574
  misc_feature (1)..(1): n is a, c, g, or t
ngagaagcttctaggctgtagtatgtggagacctggagctcaaggctctagtccctgagctctctaggctggaggagaccggggctgggagctgtgcccacgcagtgaaagatgtgcgttcagtcagcaaggaccttcaccagagtcctcatcgtcttctgggcaatcaggacatgtccttgacttggcttcttttcatttcactgacgtcagcgccgccttgtcttctgtccaaaccccatcctgccaccccactgagtcactataatttaagaggatgtgggggtggacagagcgttgagccaaggaagcaggaggccaatgttctgttttatgctcccccgccgaccttccatgggaccttggacccaataattagccccaaacccttcttgtctctttatcggctgcaacagaggtcatagcaagtaactcacccagccaggagggtctctctgaaaagcagatgagctcatgcaagcaaaggtatagcctgatgtgcaaggaagaagcatttttataatgtgcttttactgaaactgtttcctttgctctcagatgggactaataacatgagcactcttcaggggggtgtgcttcaactagtaaacacatgattcaccccttaatgaatagaagaggaagtgtgtgtagcaatcagaacccagcaagcacagttgctagtagccactgtttagaaaacaacaactggaatccagacactgcagacctctttaataaatatcgtcttaattttctgaacaattgaaaatcttaagcagaggaagaagcctgtggaccaaagttcgaaggggaggatggtcagacagctgagtttctgaagacacatctttatttagcatcttgtttccacagccaagttatagacacccagcgctcatgcgaagaattgtgagagctggtacaagaagcaggggtggaaccctagctttatcatgtgcaggccacctcaataggaagggagatgattgaaaaactgaaaatcgaaataaaataataccattattagtatctgaaacatgtaatacttagagacaaatttaacaaaacatacttaatacctgtagactaaaaagcatattgacaaacctgagagaaaggaagcaaactgtaaaaaacagatggagaaatatattattttcatgaattggcagatttaatattattaaaatgacagttctccctatgttggtcgatagaatcagtgctttcataatacaaatcccagtaagcaagtgggttctgttgatattataaaagtaaggggcttaaaaaaaaaaaaaagcagttttcagaaaaagagaagagaactagaatacagctgaaaaacctacgttacaagatttcaaacattacgataaagctacagtaatcgggaaagttgaatactggcataaaaataatatgtacacccatggaaaatagagaatccagaaacactcttgctcttatatggctcactgattttgaaagaggtgccaaggtaattcaatgtggaaaggagtctctgtttaaaaatgtatgtgtgtgtgtgttgctgttcagtcactaaatcatgtccaactcttctgcaaccccatggactgtatcccaccagggctcctctgtccatggggtttcccaggcaagaacgctggagtgggaagccatttccttctccaggagatttccctgacccagtgattgaacctgtgtctcctgtattgtagattctttaccaacgaaccaccagggaagcccttttgtatgtatgtatttgttcatttgtgtaagcagatatctatttatttatcaactttactgaggtaacattcacaaatacaattgtgtatatttaaagtgtaccttgattgacataagtgtaccgtgtgaaatgttgccacaatcaaattaatgaacgtatctatcacttcacgttgttactatttctgtgatatattccgagggttttaggaattcagagaactggaaaaacatcctcagttgggtagtcagataaatttttatgaaggagatgaaatttaagtaagcttggagcaaccttcatccccgttaaacattctttctgggaccattagcctatccctcgggtcatttcaagctctttcctccagaacccacaggaaaaatggggttatttcctaacaaagctggtggcgtgagggtacacctgagagagtttagtggagaaatatgcaaaatgggcatctctccggatcgcagctgcaagattttgcagggatctagagaactgagctttgaactttgcagcttgtttctgtcatcttacattcttcttgcttgctctgcaggagcaagtatgccacaggaatatcaagatcctggaagttacaaaaacaaactctcaggaagcaagttttcttgctaaatctggtagaaaggaaaggagtcacatgtaccaggaaagatggcaaaatctataaggaggcatcactcatagagaatatgctagaaacacagcatactccgtcatcttctacccatcagtttcatta

SEQ ID NO: 47965 - DNA, 1813 bp, Bovine  19866880410664
  misc_feature (1)..(1): n is a, c, g, or t
nactgaattaactgagcccgatgatcatgacaatctgtaatcagtgaaaccaaacttcacagataacaggactctgcttgtccttgtccagctcaggcgagccctgtgtggacgtagtgtggaaggaaagagaaatgttctagcctgcagaaatgttccacctagttctgtgcagcctcaaggacacctgggttttgtttcttggatgttgttcaccttggtggtcctactagtcaggatgagctggttagtggaatgtggcagcagtttttggcttccagctctagtcgggaccctgggatctggccactgtttagagcaggtctcttgagtggttctgttatcaaggtgaacacaggtaagcaccatataccaataaaatgcagatgagggcagtagccatgatcagattactctccagagtcaatttatagcaaattcaatgctactaaatcccaatgctgaatatctaaagagccctacgggatctgtccaaaagaaagaatggatggttttagtaagctgttagaggcaggaaaggaatttatcagaattaactatacagtttctcaaactttggcttcttaaagacatagcattatttctctctaaatcttttgtaaattacaaaagttttcagctgaaacaaaaggaatgtttactattttccagtagaatttccttgcttttgatttacttttttgtaatcttaaaaatatttatttattagtttgtgtcgctcttgctgcacacaggatcttcattgcgttgtggcacacagactggctagttgtagctcgaagcctcagtagctgtggagtgaaagcttaattgcttcgtggcatgtggaatcttagcttcccaaccagggatcaaacctgtgtcccctgcattgcaaggcacgcttcttaaccactcagggaaatccctgcttttgatttctaaatgttggcatctagcataaatatcagagcatccacagtacagggggcagcagagcaagcttaccactctgtgggcaagcagatgcgtgcccacctcctgccccgggtgagtcaccttgagagaatgaaccttaataaacgttttggataatagcaggtcccacctccgaggatgcctctcaggcaagaggcccccaccatggtccacattggccttcagcccacctttgacagctctaatcgttaggaagcttttcttttggttaagccctcatcaactttcctatgcctcccatgtcttcacaaaggagacatggattttaaaatgtctttgccccggagcaaaaaagcactcagatataaatactgcatttgccaaagtcagataaaaggtggatgtgtattcttgagtggcagtaaaccagtgtgtcccatatatgcagactcatatgaacacggctggagtcaacctcagcattctattaagtggaaccacatgaaattgctaattttgtaggtagcaaatgatgaacaattggcatctttgtacagttcagccttataatgtgatggttaagaatgtggacttctgagggcttcaatgtaaatttttgacattatctccaaataaaggtagacaagcagtaatacagatacactgacaaggtttatgaactactattaattcatagtaagttattaattcctagcattgtttttattataatatttaggggcttgttttagcatatcttcatttttaataaacttgaacctcataaaaacatacaattggcttgaatttcttaatctctgagaagctttagagaaggttaatagctaaaaggcattaacctctgtgtatttct

SEQ ID NO: 47966 - DNA, 3780 bp, Bovine  19866880441668
  misc_feature (1)..(1): n is a, c, g, or t
naggagacattgggaaaggcattagaacgtgtctgattggacagggaaggattctggaagtgggaattattctaaaagcttataggcactcacagaatcttcccaatgtttgcgtatcaacatcctccttctacaatgggtgatatcaactagaatgaaggtacttaccgagaggttaagtgacttgcccaaggttacccagttagtaacctgcagagccaagatttgaacgcagacaaatgagtcttggggctgatctcatcatcatgtacgccaagaacattccccatttcccaggtggctccgtctctctcggctcattttctccaaattcttcagtaattggtgttataacctggaattatgtttttccaattatccttagcagagctctttgggtgatgttattcaacttttactgtttcaaagagttgtctaaggatctcatttaaaacgcagatgaccattctccatgcctgaaagaagatgatccagaggttctaagtgaagtccgaaaaactgtcattctattaagcactcccagtgactgtccgtaaggtgactcctataccctctttccctgggcctgtggttccacttcacttgaatcaattccttgtcatgttggatgcattattgggcttctatctaacatttccttcaagaaggaagttcatctgccatttctacagctttctttgtgtattaatagtttgacggaactgcagcaaagccaattcagtgggtgtaatctagtcaaggaccagaatcagagtcaggcactctgttgcccagtgatcaaggatgcatttgaaagcagctagaccttagggtaagtcagtaaattatggcctgtgggtcaaatgtgttttattttttgttttttgttttgttttgtttttgtatttataagtggttgaaaaaagattttatggcatgaaaattatataaaattccaatttcagtattaataattaaaaccttatcagaacacataattctcatttagtcacgtattttctatgcctgcgtttgtactataagagcagttacatagttggaacagaacatgctgctcacaaggtctgaaatatttactagctggcctttacagagaaagcttgaaggggacggaccgaccgaatcgccttccatcttgtttttcttaccgagaaagaccaggagtaaagttaaagtccctgatgagtaggtagcgggggtgtgtgcgtgttcttttcctcctattaaagtaggatagactttaaaaaattttttttaattatttttcttggctgcgccatgcagcatgtgggatcttcattccccaactggggaccaagtctgcaccccctgcagtggcagcgtggaatcttaaccactggaccaccagggaagtcccaagacaggtatttttaaacagtcggttgagctgggggtagagacactgcccctcctctgacacctgaaaaactgaacacaggtgtgtgacatgttagtgatataaaccaccaccatgagcacacacctacaggggaagagaaacaagctgttgaatcagcagggtcctctgttactgagtttccttgactatttgctatttgttcacccacgttgtcatctgccagtgtattctaatggccttgtggggaaccagcatcaaggatttaagaaagatatatgtgaggaaatccacttgacaatcataactccatctttttcctcgcagttgtctctgcctggtgttgttggacactacttgtggaatattttggcctggcttctggagccctattattttaagaaaacagtttgagaatgaatagtctaaaacacaagtgaactcttcagtcctttattgcaagactggtgcctgaaattttccagggagagaatctcaaagtgactccatcatcaaccaacaactatataattgtaccataacaatgatttttatacagtctgggtgcctggatatgtatgttcctacaagtgcctaatgtgaacatctctgaccaagtttgtttggggttcattagtgtaagcacatgccagtcccctaagcatgagtccatgaggtgacagaattcctaggatgcactttttttttctattgtaaattagaaaagttggctagggtacgtgctccctaatcatgttccgaaggtggggagaaggctgtcctggctccagttgtcaatctgtgtctagaaatttcaccaataatttctagcctgggagtgcttgacttggggacccctggagctaattggattcactgattttctgtaaaatccccgcctgtcatcagctcagcagtaggtatgatactgaagctctaatgaacccagggatagctttgagtcggtctgatttctttggagtgaattatcaggccgtaaatttggatttttagggaggaaacttcttgtattgtctcttacaacctttcattaggatccaagctatttaagaaggtgatcaggtttcatcctgaaagacacgccattcttgcagaaaggttgttagaatctaagaactcgtcagtcaggtggagcttggttagaacctgcaaggaaaatgaatctggaattcttgttaactgggaactgacctgctccacaacagcaacagaaaaacccatcccagggagtgggggagccggtgacctgggctctgggttgctgcctgagttgttttgcttcggtagctagtttctttggtgcttccatgtcagagcagaattcacttgcaaacctgttttatctcgctctgggagttccccatctctaaaaacagagactgtcctgtcacggagtaccgtcctctgggaggaacaggaatacatttggatgggctccagcacgcctggctgttctttgatatcacagatgaggccaccagtcttttcttagcagggcactcacaggagctgtctgtggcgaaggggacatgggctacactgtctgcagatagtcaccacttccatttgggcctgaagtgctgtggtctttgtcagaatcttctcctgatgttatttttatctaggtcagaaaaatatgtttacatccttatgtttagttagatgtaaatgcaaaatgcctcccttccccaaacataccccatcagccacctgaaaatccctcaaggacccaaatgttcttaagaaatgtgggtgtttattgtcaagaaagcagtttgcttttatggcgatggagaacttgagaacccgcagagaaaacacacttgtacattgctatacccttggctcagactagcactttaataccctgccccatcaaccaaggtccaattgattacaccgattttattcttgttcgagaagccctccggcccttgctgcggctcccacccagggaccagcatagacgcgcgaggaaagacttgttaagtcacgtagccctatcatctgatccctctggtgtgtctctctgatgcctggacttgcttggatttgagtgatgccaggagtgggtcgtcagtgtgttcacttgggagtggataatatattctcttttggattcaattttttttccccatttcttgagtttttgcaatcattcctgggaagctgactctctttagggcttcctccctcctcctcctcctctgggtattttctgatatttacccaccaagggggatgaggcttgtctcagacctccaattcgtagtcatccatttgctcctctctgttcactgtggattcctttgcgacgcaagctttcctccccccttcactgtgtcattgtcattgctgcg

SEQ ID NO: 47967 - DNA, 1372 bp, Bovine  19866880443701
  misc_feature (1)..(1): n is a, c, g, or t
ncagagcgtttgaaggtggacacgtagacgtcgggactgggcgcttcagccttgttccccgtcctgactgtcctctacatatggaaatatgacttccatctgtggcaaaggagcgtgggagtttgccaaaattctccccgccgccaagcttttctcccgccaaagatgactcatccgggttttaagcgaaagacctggaaggcctgtcacttgccggggccgtgtgccaagcacgggatggaagagctcacgtctttctctctgcccacgtcccactctgcacagcatcaatctcccctccagcctcaggtgaccttccttttgggagtacaaaggcaccagctcactctgggcacagctttgccagcagtcacagatttctgcgctgtggtgtctcccctctttccctggagagcatcccaaacctcctctcaccttggaatacgtgggggcactgggagccgggtgggaatggcagcgtgagggactgaaaggagctgaactttccccattcccttctctactccagccttcccttgtctcagtggaaatagagaaagggggtaatcgtgaacagtacatagaagacactctataaatggtgttgaaatatttggtctccaaacacaaactgtgatagattctcaagcatcactaaaaagactgatccttataggattcatcctggaattgttaattaaaggactcctgaaccatgggaaagaatacagtatctggtatgtagagtgtgtccacatccctgcatgtgtgtgtgcgtgcatgcttagtcgcttcagttgtgtctgactctttgtgaccctatggaccgtagcctgccaggctcctctgtccatgggattctccaggcaaggatgctggagtgggttgccatttcctcctccagaggatctttctggtccagggatggaacccaggtctcttatgtctcctgcattggcaggcgggttctttaccactgggaagacctccacatcagtgggtaatcaacagagaattatttccctatcatttctgttaaactcagcaaacgtgaagtgactagtctatgcaaacctctgtgccacattccaggccagaatgagaaggacacagtgtctgctttcaggcagcacaactgtactgggagaaggaagggttcgcaattcataaagatgtgttgagacccaggtatggtgacactccctggcatgagtcttccttgaggtgggactggtggatggaggcaaggagaggttgatttacaaagcaaggtttcgctgggctctgaagaagggctgagtttcgtaaatattgatatcgggtgttgcatgatgtacttgggtggggctgagagtgaggatggaccagcatt

SEQ ID NO: 47968 - DNA, 569 bp, Bovine  19866880467064
  misc_feature (1)..(1): n is a, c, g, or t
ngtagggaggataggataaaatgtcttggtgaaatatgcatcttagttgtgagtgttaaggatacataaagggaattccctggtggttcagtggtaaagaatctgcctgacaatgcaggagatgcaagagatgtgggtttgaaccctgggtcaggaagatccccagaaggagggcatgacaacccattccagttttcttgcctggagagtcccatggacagaggaaagtggtgggttacagcccatggggtcgcaaagagtgtcctttggtttcaaaggagcattggggaacaagaaaacaaaaaaggattcaactacagaaaactggggctttattttaaattctaagaaactgccactggaaatctccaaggtatgtctttggaactaattttggatgtggccgctcacccttgtgccgtgagctaatccctcaggttcatgtacctatccccatggggacacaaatgaacacaacgacgatgacaaggctacataacctgttgatctgtgtaacgggaagtagtttggtctcaagagaaggtctaccatgcccatcccacaaaagg

SEQ ID NO: 47969 - DNA, 1461 bp, Bovine  19866880579821
  misc_feature (1)..(1): n is a, c, g, or t
ntcagtagatggatggataaagaagatatagtgtaaatatacaatggaatactactcagccataaagaacaaaacttgccatttgcctggatggacgtggagggcattatgctaagtgaaagaagtcaaagaaaaagactgcatgacatcacttacatgtggaatctaaaaaaatacaaggaactagtgaatataacaaaaaagcagccgactcacagatacagagagcaaactagttaccaatggggcaagggaagaagggaggggcaattttatagaggtaggggattaagaggtacagactattaggtttaaaataagctacaaggatatattgtacaatacaggaaacacaaccaatattttataatagctataaatggagtacaacttttaaaaattctgaatcactgtatcgtacccctataatttatatcataatatacatcagctatacttcaatctagaaataaaagaactgtctttatcaaagtttaatcacattccacaagttgctggacgttttcttgggcatagtccatgctggtagaacttaaccgactctaaaggcaacttagcagaagatgaaaagcatatgctccccagcacacacaggtggctgcattttaaagaactgaactgttgccagagacagacagcaatttctatgggagaaacacaaggagagaagaaaacgaaaagcaagagataatgaaaagaggatacatcagaggataaagaaaagttaatttcctctagagaagccatctcctccccttccttcctgcctcatagctcctccagacaccagactcaagtctcacctccattcacctaataaaaaccatttccaccccctcctctccacttgaatctgtctcaggcgttctaccctaaacttgaacggttcctctctctctaccttgaaattgttctctgaacgtctctgcacgcgtggggctgcaagatggcagatgagtaactcatgattcatcatcaagctcacagccgagtaagtgtttgatggcccttgactctgaagcttgaactcaacaaagcagaacagacttcaacataatctatcgtgacacaaaggtcctacctgttgtagtgactagaacttaggctaacggctgaacggaagtatcttctcgcactttggttattattatttctgttcacagattttctgcagctccaaacactacgtatttggtatttgcatcacttcctgtgattcagctaaaacatgtgtcatctataacatggagggttagaaatggtcgtatacattccctcatgcctccagttttatcaatctatgattctgtacatgggataacacaaaatcagagtagccctcagtaaattagtcgttcactgattctataacatatttatttgaatggtcagtatgtgcccgatgctatacaaggcccctaggatacaaaatgtgaacaa

SEQ ID NO: 47970 - DNA, 1718 bp, Bovine  19866880589357
  misc_feature (1)..(1): n is a, c, g, or t
nctaaatccaaatgccacactcacatctgaatatccagatccaggcccattctgaattgctgggtgcaatgagcgggtaatcagtggacaaagatggcaggtctcctgggatgggagagccacacaattcagcttcctgtaaaataatttcaagagctatataaacttccctttgtgcactgaaatttctggaagccaaacgtctgagatgtacgaactgtaagtttacgaaggttcatagccgtttcctcaaatttaagatttcacttccaggatgtcaacgtaagcagcttattttgtgtaaaatctgagattcattacgtgggtgtatgaacagggagaaaaagaaagaaagcacctaaaaatataaaagtattttttgacacatgagccttacacatcttttgaatctgctggtcagatagtgttatgtgcagagagcaaagctctactatgcttcattttatccacataattcctctgttataaatggaataatttgtgaagtctacttatatcaaattttaatgattattcattaaacatgtttgaatgagattaatgtcaattttcaaatatacatgaatcaacctcacctgattcccccactaattagaaaaatgtttcagagttcctgactctaacttaagttgtccagactgatgaaaaccttcaagacagttttatatgttcacaaatttatcagcaaattcagaattttttcttgatagtggacatgctgagctgggtagaaggcactgctgtaaggaggtctttagggctgtgatggtgaggttgggtggtggttggtggggagtatgctggggtcctaggaagaggtctcggtcttgatgagcctgtgactctggaccatgaacttcaaacatgcttcttggctccatagtctgtcccttagatggcacaggatagtgggctgcagttgggtattacccctcctggtggtcagtggggtctgatgaaaccccagtaggtgaggctgaggttaactagtctctcctgagggcagccctggttaatggaacaaaatgtctggaatatttcgtgatggttgcttttccctccccaactgaagcactcagagagtttgctctgctcttccttatgagaaccaggtagatctccaggaggcaaaaactcacccaagactaggaatgtcctccttcgtcccctccaccgtgactgggcctccctggagtttttaactctcagacttgtccacactgaggctccaggaattcagttcaagttcagtccatgacagttgaagtttccctgccccagcactgtttcccaggagggttgtggcttgtgggtttctgctccagtaagtcatgattttctgtatttgcctctcagtgtctccaatttgggaagcagcagtttgtcctgtgacctcacctctgctgctgctgctgctgctaagtcacttcagtcgccgtgtctgaccctgtgtgaccccatagacggcagcctacaaggctcccctgtccatgggactccaggcaaaaacacaggagtgggttgccatttccttctccaatacatgaaagtgaaaagtgaaagtgaagtcgcccagtcgtgtctgactcttagtgaccccatggactgcagcctaccaggttcctctgtctatgggagtttccaggcaagagtactggagtgggttgccattgccttctccggacctcgcctctagg

SEQ ID NO: 47971 - DNA, 861 bp, Bovine  19866880646224
  misc_feature (1)..(1): n is a, c, g, or t
naaaaaaaggagcagaggaaagattctgattttcctctggatttctgaccaggctgaggatggtaatcccaacattaccatgcaaaagcctagcctctcgacagcgtctccttagagcaaaatcaccaaaaacagtaccaccaacctctttaccaaagttcagaaatgtttcagcatggtgtcataaaccaaggaagaagcttggatgagtttctaaaagttgaattcaatgaatgagtggacatgaaaggattttgcaaagtataaattgccatttaattgcctggtgttattattattaattaaaatctattcaacttctatttgaggctggtgtccttttctgagaaatatgcaaattgttcttagatgtagtacttaattgaaggataagagcagtttttatcagggaaggaaaacaaactggggcctagtgagaatgagggaatcaagatgactttgaaattcggggaaaaaaaaaaagtggtgacagtttaagtcaattctctgaaactaaagtaccaaacattcattcctaattttaaaaaggtggtggtggggtgggggagttttgcattggaatgctgacaaaccaacaggaggctatcaactggtttgggaaatggagagaaaagttattgccatgttgctaggcaacagattcccaagctgagttctcttcctttcttaaaggacgggtgcaatgttttagttctgtaaatactagccatttatttacttcttcactgtgaattagaggggctagtctcagaacaagactggctaagccagaaagagtccaaatgcaggcaattagaatacgattaggaaggcaacactgtgtaggaaataaataaagca

SEQ ID NO: 47972 - DNA, 1463 bp, Bovine  19866880668350
  misc_feature (1)..(1): n is a, c, g, or t
nagcaggagagctcccctccctcctcatcctactgtggaagtgggtttcatctgagcctaagatctgacagactgtgcatttgtgggcaatttgggcacacctggggtggtattagaaagcatacggtcagagatgggggctttagcttcctaaagacttggaatcatgaccctgaaatgcacagcttgggctcctttttacaattgtgcagcagaatacattaaaataaagaaagcaagggacaaaggcataagtgaaaactggtagacgggggtaagaaatcaatgtcaaaccataatactactcttttttaagttttctcagtcgtgtccaactccttgcagccacacggatgtagcccatcaggcttttccaggcaagaatactggagcaggttgccatttcctactccagggtaacttcctgacccagggatcaaaccctggtctcttatatctcctgcattggcaggcgggttctttaccactagcgccacccaggaagccctagaccattttaagcttttgtatttagatttctaaaggcatttccgaaagctcatccctttacagagcttctccactttcttatgcacaataagacccaattgtctacaaagagcttctgatctgtttctctgcatttcttaatgaagttggtaagacctggaaaggttttgtttgagaagagaactttgccaagtggggtctgcattagtttttagatttaggccagcggtctgaatgggacagggacacttggggaagggtagaactgctttgggtcagcaaagcacaactgagtaactgctgagaaattcaggacagcctgtataaaaatgagtcctgtgatgggttgaaaagtagttcccccaaatatctacgccttagtccctggaacctgtgaatgttaccttctatggcaaaaaaaatagtctttgcagttgtggttaatttagggatattgagatggagagattattctggattgcccagtgtgccttagatgtagtcatgtttccttgtaagagggaggcagagggagggtctacacatacgcgcgtgcgcgcgcacacacacgcacacacacacagagacacacacaaaggaggcgatgtgaccacgcggcagagattgccgtgatgcaaccataagccaaagagtgccgaagcctctagaagctggaggaacaaagcacccattcacccctaaacctgaggagggagctagattttgacccagtaatgccaactttggactttggaacctcaagagtgtcagcgaatacatttctttcattttaggcttcccgtttcatggtaaattgttacagcagcatcaggagaggattcaagtcccagtgggtttggggcttctgctctttgagcccgcactccaccatgctccatgactattctttttcaaaaaaaatttaatagactattcttcaaggcatcattatt

SEQ ID NO: 47973 - DNA, 843 bp, Bovine  19866880673868
  misc_feature (1)..(1): n is a, c, g, or t
ntgaagaaatgagcattcaattaaatatataactcagacaatctgttttatcaaagcagattgatcataaatcagaagaagaggtacattccgaatcacatacatgaaacagaaacttggcaacgggcccatcctggactgccatcctcccaggtctatacaaggtcaatatggtaattcatttccagaaattacttaattctagtgtctgtaaccaaatggtgatttatcttcaagtacagaagcatgtcatgtcaggtaaaactgttatttgaaaattcaagtttacactcaggtgaattgttactatatcataaaactgactcttttatagaaggaacatttcttaaacacgctaaaactggactccactgacaaaagtcctctctcgctacctttcctagagcactgtgcctacccagagctgggcgtatctctacagaaaccttccgctgcggtcagcagataatgtctgtgctcaggcaagttccaaaagtctgagtggtaaaagtctttacgctgccaagccagactgctggaggtcagtcgtaacttcctttcaaattattgtaattaataacagatttccttcctgttattgacccaggcataaatgcaggcttgaaaaatagccaagacagatttacatgatgccctaccagaaagtttccctctatggcaccaacataagccttactccagatttctggcagagcgcatctccgttgccttgctccagcaaagtgggcctacgcacactgcaaaataaactcagagaatgctcagcaatctgctggcggaggtgcttgctaagtgagcagctctcccctccgccagccaaag

SEQ ID NO: 47974 - DNA, 1914 bp, Bovine  19866880683242
  misc_feature (1)..(1): n is a, c, g, or t
nccctcccccaagcacggcttgtcagtttatattgatattcccctcccctcctctcctgttcctccacatgaggcagttgacaacggtaataaatgtggccgcactcaaggatagggctgtgacaggctcaataagaagtggactgatttgttgctttggggttgaaagctcagactttcatgaaacaaaaatattatattcggggtaatgatttatggcctcgactcctgtttgattgcaaaccataaatacttgcaaacggtacttacagcatctctagaggacattaggaacatactcaagtttattttatacagcaattactgagtcagtataagcatggccattatttgaaagacaaggtttttcccccaataagtctttggaaatgataagtttcaacagcgatctttacacactccagccttatccatgtgactctaaaggactcgaagaaacccaatgacaggtcaactggtgacccaaaagctgatgcccatcaacactctgacaaagatgtcatccttttttcccctgtaataatcaagcttcacaacgtggtctacgactagcatcaaaatttagaagccatcaagtcagtataaacttgctgactaggctcccaactcgatcagatagcctaatttcttcggctgtgaagcaggaaccatgttttcaatagatagtttggctcctggtcacactgtttctatctgctggccttttggggaatcatcttgtcactactctcaccccagactgggtcctgatttctcttgccttttcgaccacccctaaaccttggagtcacctgaataacacaccgttagctatttgtaactgaagactgtaccagccagaatggaaagaagtaactcgtgtagtgtttcatttatattagagaaacatttcaatccctggaggaacttatttatactctctatacccagggctccatgaattaatttatttaaagcagtgatattaaataaatataaatatttatttatatttttctgggatacagatttgatccctacttggaagaaaaaagacctctctaaaagcttctattgacttatagaactgggatcccaaagatgctactctgcagtgctattgaaggaaagtctccagcagatgagggcatggtgtaggtgctattttacatgtattattatattagtagggagccactttcccttccctatcttgtttgacaggcttcccagaagatagagaccaattaactctttattttggcagagatcattctaggtgttcttttaatgggtattattcttgttaaattatggatgagcttgatagtaagacaaatgccattatctgagttatttattcatgggatgtcgtctgtaacatacccacactagtttttcttcaactttggtatcgatcaatcgctttaatcagttgtaccaagggatgctaaaagacagctatcacagcttgaggaccagcatctctctttgggtctctgccaggccaagagtgaaaactgtggctactttcaaacccttggaacatcttgcggaaaacccgaacaaatattttgtccaacccaatagaagtggagggatggctcctcactctcagagtgggtgaatggacagcctcctctcaacctcactcatggaaagtcttcactttcatactgccatgtttctgttcacacattttgttcaactgtgatgttcgttggaaggaccataggcatcccgctctgccctctcttaatgatgcccacacatcttttcagcctttgctttcaaagcaagtcacaaggtctgctggctccctggaaacacatggccaagacttcagtagacaatcagcattctgtctagaggcaattaaaagatgatatagttggggctctgtttttatttata

SEQ ID NO: 47975 - DNA, 1064 bp, Bovine  19866880691160
  misc_feature (1)..(1): n is a, c, g, or t
nttgcaggcttacctacaatgttaatgtcacttttcaaatggtcaatttccttggggcagaaatgaggctttgatttaatccagttttactccagatcagcacttacagaatattatcaatgatggctgattgacaaagttaatcctcaacaaactccatttatcatccctgcttttcctggaaagtcagagagggcaggattcacagtatcagggtagatgtgagctttcaggccatcaagttgtaacaaattatgtccaacacaagtatggtaattttgtgacaactgttactctgcaggaagttgagatgagatgaccaaatatataattttcgtgtttcaacttttctgtaccaccttattatctttaaatagaaaataatgtacaaacaaaacgattaggtgctctttttttgtttcctctctttatctgtgaggtctcttcaaaatctttcagtcttcaagctgtctacaaggtgctgctttcaaatattaagggccaaagtttcaattggacttctttctcttgactcctgttatttacaggtgctgattctaaatgcaaaagttccaatttactagtataattacttaatttatatgcataaaggtgggtgccactcacaaaaattaatgcagcccaaaataccacaggtaaggccgattcaactgtgattctcacttaacgtatttagattggatggggaactccgctggctagattattttagttttgccacatctcctactgggcttccccagtgtctcagaggtaaaaaatctgcctgccaatgcaggagactcaggttcaatccctggatcagaaagatcccttggaggaggaaatggcaacccactccagtattcttgcctagagaatcccatggacagagaagcctgctgcgatacagtccatagggttgcaaagagtcagacatgactgagtagcttagcacatctcctaattttgcatcggtgccataacggggttccatccgagtgcccaggaaggaatccagattggattcttggtggggagcttcagcgggttcttcaggaagg

SEQ ID NO: 47976 - DNA, 1605 bp, Bovine  19866880692543
  misc_feature (1)..(1): n is a, c, g, or t
ncagggtgagatactcatcactgcctcccccagttctatcagaggctggtacaagcttcactttctgctcattagttttctctggcttatagatcttcccctgatggcacaagcagtaaagaatccacctgcaatgcaggagacacaggagacatgggtttgatctccaggtcaggaagatcccctgggggaggaaatggcaacccactccagtattcttgcctggaaaatttcatggacagaggagcctggcgggctatagtccatagggttgcaaagaatcagacatgactgagcacacatgaacttatagatcttaaacaaaagcagcagccaagagtctcctacccagcaaaagtgaccaagagcaggacagcagggccatgcaccctgggtctcctctccctggaggtctgcactgcttcatgctggccttgtctctttccccactccccatgcctgccagacagcccccaggcacatgcaaagtgcctccattttctgtatcactttactcctctgctcccaggccttggaataataaattctagttccctggattggttcccctttgcattatattattcaatcctttctcctccaagttttcgcttaacatagtgcgtgctcaaggctgctgtctgggtctttatcagaggagaattttaaggttttggcaattaagagaaagaaccatggaaaattccttccactgctcccagccaggtcaaacagaggagaggagaggacagcaaatattaaactaatgccagccatcatcttcgaataaaggccagaaagcagaaattattgctctgtgtcagtgcacatgtgtattttagtcagcaaatgaaactgctgtagacccaacaccccactcttctgtgtaggtggctggcccagactgaaggatggatctgatattacattctgcgatgtcgcaccagtgacttcaataaccacattttctttttacatccagatcacattaggaacccatttgctttactcaaaaaaactgtaagctgtttagtcctgagtctccggttattgttgacatttgtacatgactgagcacagtgactaaagcctctgctcttgtcaccaaacattcagaaacatttagaactgtgatttttacgttttaacctggggctcttcagttttcctaatggaagaaatccagatgataacattagacattatgctatcagattagctattttacaaaaaagaaaacaatagggaacaagaataaatgaaataacaccagtcaggtgagataattaaacccatcttcacactgagagaggaatgtcagcccattccttcttcttcttcttcttttttttttaactgtgtaagctttagctcttatttcatttcaaacagctttccatatcactgcttgttttacagatataaattggcagaatgaattaagttttgctcgcagcatttagtttagtgataatctgcttctcagaggaggggaaacgaatggggaaaaaattagcaaagtgcatccaccctacaatgccaggtctgcaatgagatctaaagaggctgagagaaaagcactgttcaagagtattacagccaggt

SEQ ID NO: 47977 - DNA, 1409 bp, Bovine  19866880725549
  misc_feature (1)..(1): n is a, c, g, or t
nttgcctgagaaaatagatgaaaaaaatacatgtgtcatgtgaaacccaggccacagtcagtccttcttatctaattaaaaacctttcagcctagctccatgggtttggcttttccatgctttctagagggtatttccaccaggatgctggagttctgggaagcctgccactgagtccaatgtgctctgcaatacggagctggatatgtggtgcctgaaccagtatgaccattttctccttgctgctgctactctaatacacttcacactactcagcaacacagggtgttgttgtttagtcactcagtcatgtccagctcttagcaaccccatgcactgtcacccaccaggctgctctgtccatgggatttcccagacaagaatactggagcgggttgccatttccttctccaggggatcttcctgacccagggattgaatgtgcatctcttgcattggcaggcgggttctttaccactgagccacctgggaagccccagcatccttgggatagatcttggttaaaagtcatttcccagtccccaaagtgcaactgtaactcatgagactgttaggagatggtgcatgaccatcatgtatttgacagaggacttagatttcatttgtgaatactttttcattaaaaatgagtcataaaaatgtaagaaagatattgaaaaatgtcatcttaacacaatggctacaatttccttattgtgcatattttacatatgacaatcatagtatcatttttaattctgattttaaaaataactttattggcatgtagttgatttacaatgttgtgtcagtttcaggtatgcagcaaagtgagtcagttacacatatacatatatccactcttttttaacattgttttcccttataggccagtaaagagtatccagtagagttccctgtgctacacagtaaggtcttaattttttaaaaataatgtttcatcacatttctcacattgttcatatattcttcttaagctatttctcttggtgactacatgttaattcattgtatactgtacccacatgatcctatggttggacatttagagagtgtcctttccccttcatgttggtaatgttttagagaatactcttcatagagctttggcttctactaaattattttcttaagataaagtcttaggagagaaattactaggtcaaactttatgacaaacttctttgttgccctattctgtgtcaaattactttccccaaaaggtttataccaattcacaatgccaactcttatccttatccatcagagggcaaacagaatgaaaactacaatcacataaaactaatcaaactgatcacatggaccacagccttgtttaactcaagaaactataagccacatcatgtaaggccacccaagacggacag

SEQ ID NO: 47978 - DNA, 1680 bp, Bovine  19866880790825
  misc_feature (1)..(1): n is a, c, g, or t
ncgctgtaaaatggctccatcgccaatgagaagagacatggttggaaattacaatactcttcttattttaactggaaataccagcagatgtcacaagaaacgtatagaactaggcacaggcaaatacagaatgctttgggggtgtgtaatagagaagagggagcgtccaccttggactgtggaggagggcgacagtggaccaggagttcagcaaggagtttggccgagtctgaacagtattaatcatcttggaaatttaaacatttccggtcaggcagttttagcatactatccataattatatttatttcacaacaggttgatcccagacatcttttcaaatgtgctcaccaatgaatctgcacgttgttgtaggttccctctttgagtttcggagggaaacaagagacaggcagcaaaattgggacagggagatggtgtccatcggcagttccccctgcagagttctcctaaccctgtgccggcttcttaatttcttgctcttgcctgtctgtcaaaagaatggagacggtatttgacagcccacacattttttttaagctgaatttttatacatttccctgatttccaaaaatatgaccactgttattctggcagaggtgtttttctccccgagaatgggagtaacagagtaaatgttctctcactcgtgtgctacactgaatcgtgctatcatgagatatcgagaagaaaatcacaaactgtctttccttaagtgatatttatccttcccaaatagaggtcgtccccggtggctcaggcggtaaagcatctgcctgcaatgtgggagacctgggtttgatccctgggttgggtagatctcctggagaagggaatggcaactcactccagtattctggcctggagaatcccatggacagaggagcttggagggctatagtccattaagggtcgcaaagagtcagacacaaccgagcaactacacacacacacacacacacacatctttcccaaatagttgactggtggggctgcgataggaataaaagagtttctaaactcacgagttttgtttctaaggatgaaagagccctgaaaccctggctgacattcaagttggaggtactgtgaatctgtggaaaaataagattttacacactgacaccaccaataagagttctgaaaggcgtgtttgtcatgaaagagttccatttggaacagcccagactgtggactaaaacggtctccatgtggcagagaatgtttgtgaatgaagtgcctttcaatgaggagaaatcaattttaacagctcatttattgatgaaaccaagtctagtctcagcagttagagagctttcttggaacaaggactcgaggattcatctgtctcacctgaacggatcaaagaaaaagcttctcataaaagatgtttatggtccctctgctcctggagtttggatgagctagcatttgataatgagttactagggaattggggcgactagaatgcctactaacatttcccattcctgttggactctgtggagttaagattattcaaatacacttaaagatgaaccctccaatggccgaatcgtggattcatttaatgtcttaattccactaagcttccttagcactaccctttgctttgggctatgctggctcatttcctgttccaacacggtgcctgtcatt

SEQ ID NO: 47979 - DNA, 1275 bp, Bovine  19866880803601
  misc_feature (1)..(1): n is a, c, g, or t
ncctgctggtcagcatttccccaaggaccctctggctgtcctcatctggttttccacgctgcttcctggggcctggcctgtcagtgtgctgctgagagggcataaatcaggaatgctctcccgtctttatctccagtgagcatctccactgtgggaaggactgatgcttcataaccaaatgtatcgatcggggtctgagcaagtctggtgtaatgctacgctgaaatggagtttgccattatgtgtggagctaaatagttcattttctgccatgagacagaaggaaatcactcagggaagcctttgagatggacgatcccaatagctgcaaagctacggagaaaaaaaaaattaagtttttcggaactgattgcaatatttcgaaagatattctttacctcttcacaaaaatcaaactttccatttggacttgtcagagtcagcttttagtgagacctatttttttttggttcttttgattaatggcaaggagccgtttttctttttcttcactgtaataaaaatcaagctgtcagagggtgcccttcaaaatagaaatcaggagatgatttgaacagaatattaatattgctcttttaaaccccagtgttcgtatcctggtttaataaactaaatttgcagccgatttcttctctagaaggcaagcgacattttgtggaaatatgagagtttccgacagaacttgatcacaatctttcatacattctttcctatttacagatagcagtgagaagaaaggctgggtctcattcttttgtgcttgaataggccagacagaatgtgtgattagatgaattttggcatctcaatcattttattgtagctattgttatcgttcagaattcatggggcataatttttaattcaagaatagagtggatttttctcttggaaaaaaaaaaaatgatttctcagtttccagcgataaggctctttaaaatccggctcggagctaactgacaacacaatggagtgtgcgttacgatgcgttgctttaatttcaccccatcatggcccgtcttaaaacttttgccagtgacgatgtcttccagaaactgtgcggccccccttggaatcttcagcaggcatcgggtttattttagcggttctttttatctgagcatcctgagttttttctgccaccaaatttgcatcagccttgttcactgaaacagtatttcaagattaatgaattaatcttctcctacaccaccctgccaagatttttagacaccttttttctcaattgggttt

SEQ ID NO: 47980 - DNA, 3045 bp, Bovine  19866880999320
  misc_feature (1)..(1): n is a, c, g, or t
nataaagatgtatttgtgagcatacgcctagtataatcttcatggctctacctatatctacctatctacttatcttcaaataatattcaaatttcacttcttgtccaccttaaaacttatgattcatgacagaaacaggaatgacaattctgatggagaaaaatagacatctcaaaacttgggatgtatcaattatactttaattaaaacagatgaaaaaataacacagttaagtgttgtgttattctctgcaattcttcatatttgttgctggtatattttgaggtatcggaagttctcaacagaatgaaattcactaaggtggacttagaatggatttgtggaagtgttgagtttaagaggatcacattcaaccctccccggcgggctcctgtagacgtcttcgtcgctggcagtcttggaataacagactgtcttatgatctttcagcatcttctctttggcactcaggcaggctgggtattgcagtttgaatctggaagactcttagttgtgtggatcttggtttaagaagaaactgtcttctcttcacttactaaatagtcttcaagttgagaacaattactctcgctgtctgatttcatctggtaaatcacaagaatctcatccagtgttaaacatgcttggaataacagacatgcagggagcacatgcaggggccccgccttctgaagttttcgtatttcatttgtttgtttttgtaatttgtaattagagtactctaatctatgatgcttgagaaatattccaggaaatgtcaaacatacatatatatgtgcatacacacacacatatatatacacacacacaacaatctttaaaaaattacctatataaataaaaagtgcaaattgtcttataacacaatgatattaacagcatgctattaaaatactcaaaaacctactggatttggcacactatctcaaagaagtaaagggaacagggaagggaagcgggggggagtggcaacagttgaacagaacacacaagtttgaaaggtctcgttgcaaactgtctccccaatattctagaggcagtgtctttggccattccattcctgtgtccaatttgttgacttctgtgattactagtttgatggaagcacagggagggtggcaatgtggatgggtacccagcaaaaatagtggcacagactcataaagttaatatatacctggtgtaggttactaactgtgtgccagccctcagggcaagtgatttctgtattctgccgtatgatttctcatagagcatggatttgggggtcaaacagaactcgctccaaatcttagccgtgccattgaactagcagcacgaacatggaaaggttattcagtctatccaaacctttgtttgttcacctgtaatcagttatgatccactgaccatttctgaagaaagctttataaatgagcatttgtgtgtgttgaatttctatggatcacattttactatgtgtgagtgctgtgtgccttaaatttcagaattatatttctattccccaaatactgtagtttctttggttttctcatggagctcatttcggaggcatcaaattatattcactgttctttctgaatcatgtccaaattctccataattcattttagttcagttccaaatgaaaaacagctccttaacccaggcctgtctgaagctgagttaaagacggggacaaacgtgggtttcttgtgtgcagtgcatcggtgttctaatgcccagtacatcccctggaagagctgccccctgttccttttctcttttaaattaattttttggaatatagttgctttgcaatgttgtgttagcttccactgtacagcaaagtgaatcagctatcatatatgcatatccccccgccttcttatttccttccagtttaagtcaccacagagcactgagtagagttccctgtgctatacagcaggttctcataagttatctttttatacatactatcaataaggagcagagacacagagaaaagagatgcttcactctgacatcacgtggacccagcagcaactcagccttccctcctccaacctaatgttcattgaacaccaatgctctgtctttacctgctctcttaaggaaaggacagtaacacgctctttgtaagattagactaagatattggctttttcttttgcaagtacatcagtgatgtttgaatttttgtatcattaggggtagagcgacctgaggcagcatgctgtaagtgtcctgattagaaccacactgaagtagaaattaagttgacttggtgttttgcaagtaaaactactcagttcaagttttttggtgaggagtgttttctggttccttggagacttttaaaccaatatcatcaagacaattggaaacaggataaaggaaaattaattcctttagtcatgttatatcggggaccatttaggtggaataaagaaggctaaatgaaaggcaaagaattctggaagcatctgaatgcaattccttaatgtcatagtgtctgctgttcatgttccagttttgtatgtattgttgtatatataacgtcctctcatatgataatttacctagtaaaaccctaagctcaagttcaagagttcgttttgaatgaggaggatggaaatcaaaggtctatcattacatctgcacctgagacaatggcagaagccttggctttttctcgctgtaatgagtgttatacatatgaaaaaccaccccaaaggatgacgatttcagtgagactccagaggaaagtttcagattgtgaccaggtttcttctgtgtctctagcaacaagtctttgtaaatattgtttagcatcttctgggtggttgctggtttccatcttaccttctgcctttgggaatctggcttttcctctcttttggtggcattaccccctgaaatggcaagagggaacatcaacattttaggaatcagtgaactaaaatggactggaatggacagatttaattcagatgacaattatatatagtaccgtgggcaagaatcccttagaagatatgg

SEQ ID NO: 47981 - DNA, 1142 bp, Bovine  19866881024280
  misc_feature (1)..(1): n is a, c, g, or t
nttagctggctgattgctgactcttctggctaacggtgtatggatctggcctcaaaaacagcagagacacaaatctccttggcattcctttaataaactgtttcctaaattatcagtcggagtgtggtctaatttttgttgtcatgcatgatttgggatacagtcttgctgaatcccataaatcctttcacatctgaatcattacaggaattggtttcactattttcagacataatctcattcaaatctggaatatgggctcctgagtcatcattcctaaatttctgaggtaatctgagctttgcgatgataatagttataattccggatttaatgtagaccctttcatcttcaaagtgcttggcaaacattaattaatgagcccttcagtccttaagaaaataccattgcgccattttaaaaatgagatgtaaagagaaaaaatgaagtttattgttcattagcttgaagcaaagtgtgggaattaaacctagaacctgctccagttatgtagatatttgaggtcatacctataccagaggacttcagcaaaatcataaattctagttatcttcttttgcaaggatatgtattttaaatgctgttactttaaagggctggaatttctttgtaggcactgatattccctctatctaaagaattaacctacaaatcttgagtactgcctaggtagtagtaacctcatattttaaagaaatttatcctggtgctcatgccaatataagagtacagctgcccagtcacagttatgtcagtacaggaatgtctagctgcagccccttcttgatcctttggactcagaccattttcacagtaagaaatggagactatctgcatgcctgatcaaactctacccaaagtccctttattggtgaagcctacatttcatatcccctgccttcaaattactcaccctaataatctggagggcttcccgggtagctcagctggtaaagaatagccggtagctcagctgccctacaatgcaggagacccctggttcaactcctgggttgggaatttcccctggagaagggccaggccacccatgccagcatccttgggcttctctggtggctcagacagtaaagaatcctcctgcaatgcaggagacctgaatt

SEQ ID NO: 47982 - DNA, 2255 bp, Bovine  19866881034336
  misc_feature (1)..(1): n is a, c, g, or t
ntcttatttaaagatctctttattctgatggtctctctagacagcctgtgtttctttcccctggaccaaaaaaaaaaaaacaaaaaaaaacctgtcatctctcccaagctcagtcatatcttgaatgcacagcacaattctcagcatgtagcatgtgtttaataattatgtgttaaataaagaaatgaaatcatgtgaccacagcctaggctgcctgaaaaacaacgatggtattactttcctaagacgcctgacttcaaaatgccatcgtatatatgtagtagttctattgctgttctctttaacaaaaaaaaaaacgaaaaacccaaaaacaaataggccaaggaaaaatccttctggaaccatctttggtgaactcaagctgctattaaacatggttgacatctcctgagtctgtgcggggaaagaccactggagtgaaccgcgtgttgggagaagaggctccctaggatctgtcatcctctgggttgagtcctccccagggagtggggaagggcctgtttcgctggcagccgttgagtaagccaaccacattctctctttgactctcaagagaggcacgtgccctttgaaccttagagagagcctctggattcacagtgaagccagggctcaggagaacgcttcagaataaacttgtaccagatgaaataggagcaatcgacctagatagttgccaaaggggcaaacgccaatgccaggaggccgggggtgggctagctagtcactgatggcagaaggggtgctgttgcctgagtagagctaggaaaagggaggccggtcttgggaatccgagagggaggggccgccccctggaggctgcacttcacttcctgtgagcacacctctccttacataatttctcccgcgaacccgcaaaataggcaagatgcgtgctcaagaggctttcctttggctaaatagcattttctgcacacatgattggcagagccctctcctctcagcccgagtctatgattggccttgattactcgacaacgggaggtcagggatgggttacccggctccccaccgcctcctctcccatccagggataatcatcaagattctcaaattctaaattcgctaagggctgattcgccacacttgccacttatccaaccaatttagcagcaaggcactcttggggcctaatttgtgctttgcatcgtgttcatccgcatcttagaataaatgaagaccgatctgatgggaatgcggggggttagttgttgtgaggctggttagatctcgggtgtagaatggatgcagtggtggcagagagagatgctggagttcggtggtgtccatgacccttctccaccttcatccccctggagtgaatgcctgccaggcctcagaagtaaacagggaaccaactgggtggcaatgcgatgactcgcagtggacacagagctgcaggaggcggtggcggctactcctgctttgcagataagggaggaagctgggacccccagagctgagtgtcctttacagactcaacaggtctcaatgccccttgctgttctcacaccagaagccacgtggtctgagttcttctggggcctctctgttaggagccctgacattgggtccatcagtatttcacagacttaccttcttcagtcccttgttgcccctctcacacccctctcctttctcgggttctctaccttgaacacttggtgctatgtcatccaccaactacacaacctattcatcagtgtttcctaaaagcctcttagccaaccggagaatcattacttttactccctggcaaactgtttcttcagtatttacctgcctcaactcaaagtgccctagcgggcactgatctaccctgactgaccctgaccagacagtgcattcccctgcctcagttctttcctgaatctgcttcttacactgaaatctacctcctctgtatcctatcccatccacctacctgttcccagtcagccggctgtctggttcaatgcaatgcagtaagatagctagagacattaaacaacagcatggacctgctttaattggtgatgtgaggctttaatccaaagcaaggactgcaataccaggaatttgagactctcaggaggacagtgggtggatgagtccaaatacatcaggtcagtcttttcagagcccctcagctcccacttgctccctcagtgccgcctactcagaccagccttagggtagacttagtcatccctcacgcgcactttgttccaaac

SEQ ID NO: 47983 - DNA, 1444 bp, Bovine  19866881060252
  misc_feature (1)..(1): n is a, c, g, or t
nggcagatttctatgtgcagccccttcgtgctgtcctgacggcaaatatcaatatgtgcaatatcaaggcaattgtcttcctttttggctcaaaaaccagattaagtacatgcgactgaaatttaaaaatttagcctcactaatgaccatccccccgcctcaaaaaagatctgtgatataagcaagtaaacaaggcattaattctgaccctgcacagccccccctctagatgtatgctgatattaataaatcaggtattccttctgactctgcacttaagacatgctcagcattagcactctgcttttcacttattttattcataattattcaaaatcatccactgaggcatagaatgatttctatggcaatttcatggtcctgacttcaaagaagtcacattattttctgagattcacccaacagtctgaatgacaaaatcagagaagtgcttatttctagctctctgcttggcagtgacccagatgagtgatggtgtgacgtgggcaaacacttcatttcgggtcctgggacctggttcggggccccagctccagacccctcctggcccggtggtgtcagatgagtcttcagtgaggccttgctttatttttgtttcctttaaaaccatagagcactgacatatatactctaccatgtgtaaaatagctcatgggaagctgctgcataacatagggagctcagcttggtgctctgtgatggtctagaggggtgggatgggggtggggtgagatggaggttcaaagtaggaaagggatatacatacacttacagctgatccacgttattatacacagaaatcagcacaatattgtaaagcagttatcctccaatttaaaaagagagagaaaataaagggggaaagagaagggggaaccatattcccattgtttccctcccttctgaaattcttcagccttgccatcaaacatttttactatgctcactagaattatgcttttatgaaacattgatatgctaaagaatacaatttcaagctacctaaccattgcataaatacagcctggaaggagataccatagtgactcacataaagttaatgaaaaagaacgactaatgcatagcagagtgttagatggtctgtttttattaaatcaatattcgtgcataatttacagagtaaaatgtactacaaagtttatcatggataacgagagtcattcccttccccacacctctttccaccaaagtcctgctgcccagtggcaagagcttcagctttttagctgattctttcagtgcttgctttcatgttgcgaaatattataattaaattcagaccggatatatcaattctcttttaaaataggggaggatttaactctcttataccaataaatacacacacacacacacacacacacacacacacacacacacagttctctgttacccattatcc

SEQ ID NO: 47984 - DNA, 824 bp, Bovine  19866881154711
  misc_feature (1)..(1): n is a, c, g, or t
nccagattccccagatggtggaaatacttgagcacaggccttccccctcccctcccctctcttaggattctttccctagaatcatggagtgtgagagttggatagacccttggagattatatcatccaggctctttgtttctttatttcttcaagtacaaatggctcacattccctttctccttcctgacaaggggcataaactcttgtaagacctactcgatttgctgccagattctctgaaccttagggaagtcctgccaagtgaggccccaatgacaaaaaattaggagaaattagtggtgggggtggaaggggtaggcgagatgggattctttgaaagccctgaaatgctagcagaaaattgatcaaagccgagatgaatttcgcccatctcttctaacgagctgctaatattggagtggcagtcctgtcaggataatttgtcacacatgtccccgtgtgggctggagccccttcagagtcatcttcccaactcactgccacaggcaacttgtctgaaacaaagctcgaagacataatggaaagggaaatgtgggcggtggagggagagggatggccacccactcctcaggtctcccagcctccagcatccaccatcattaggctggaagaacccgatgggacttccaactcatttgtgctcctgccaaggctgcagtgtccactgctgcaaatacgctgtccagaaaagaacaccacctcctgaaaaataacacggtgtcaacactagttagcagacccattaagctctgtgataagcgagatttctcgctaggcaggcggcaggaatttctctgccag

SEQ ID NO: 47985 - DNA, 1241 bp, Bovine  19866881223480
  misc_feature (1)..(1): n is a, c, g, or t
nattgaccctaaaccttctaaacccaagctgtaggcctggtttgggtttaagaagttttaagatggctgtaggaccctctctggctctttgtcctccctcctgatggagagctgaggtgctccgtgtgcggcaacaggaggcactaggaagccaggactgcatgcttgagggtctgcctgccttggctgccaggctaggaggagcagcatgcatgtgccgcttctgtaaggcacgccgcctgttggggagagacacccctgacagctggccaatgaagagccctgatgtcaactgtcaaagcacccagtagtctctgcttgcgagcagggggagggaatgagatttcactgcagcaataagagagcagacaatatgttcgacactaaaccaaccttaagtgagtcccttgaatttatttgatactgagagttctcctgggcaagctgatataattatcgttaaggtgatacttacaacgaatggcacatcattagcatagtgatgaatattgtaatctttgtgtttggtttgaacacccaggggatatcctactctttctctttaaccacacacacacacacacaaataaccttcctcatttatcactatctcctattgctaaagctttttttttaagggaccaaaatcagaaaatttgggaactggggagctctgaatgagtgtttctagaacaaaatgtcaatattgatttcatagatttctcacacagaggcccaacattgagcctgaagttgatgcaaataaggtagtgatgtgagattcttactgtaccgtgggtcagggtctatttcagcataccactaaaaggcaacagtgaaacacttcaggaccattgcactgcactctccatgtaattaagagacagttgggagtttgggatggacatgtacacactgctgtttaaaatggataaccaacaaggtcctactgtttagcacagggaactctgctcagtgttatgtgacagcctggatgggagggcagtttgggcagaatggatacatatgtatgtatggctagttccttctctgttcacctgaaactatcactaatccactataaaataaaaaaagtttctttaaaaaagcattttgactttctttacaggtttttcttttatacttttaactctgttattcacctcaagccatttaccatatcgagagatcctagagagtaagggatgaagttttagtcattcttctgtcccctacatggc

SEQ ID NO: 47986 - DNA, 3110 bp, Bovine  19866881249894
  misc_feature (1)..(1): n is a, c, g, or t
ntatttaattttaatactttaagtttaaattgtcatatgtggtcagtggtactacacaataatgccatttaaggcgtattccattctgcataagagttggaccttaaagaaggctgagtgccgaagaattgatgccttcggattgtggtactggagaaaactcttgagagtcgcttagactgcaaggagatcaaacctgtcaatcctaatgaaccctgaatattcattgcaagggctgatgctgaaactgaagctccaataatttggccacctgatgtgaagaactgactcattgaaaaagaccctgacgtctggaaagattgggggaaagagaagaagagggcggcagaggatgagatggttgtatggcatcattgactcaatgggcatgagtctgagcaaactctgggagatagtgaaagacagagaagcctgacgtgctgcagtccctagggtcgcaaagagtggggcatgactgactgaaaaccagcaaaattctgcaatatctttcagcctcactcaagtaaaaatgagttcttagttctgaaatgaaaaacaaaataaaatagatagggcccttttgtggagttgcttcagaaagaagggcagtgaaatatagtccatgacctcaacatgagctagaaaactctgccattcggctgagccacagcctggataaaaattaaatgaaccactagcttcatcattgacaaaaacctctaacacaccaacacttgatttgcactggggggaaaagtcaagttgaaatgttgcaacagccaccttttttcaagtttccagcacttcctgatttctttggtatcaaatgactgcttgtcacattcctgtgacattagcacttcctggttccataaatactggacatggacattttgggatccccaaaccaaacaaagcaaggcaccaaggtttttgtttttagtaacttaaccttttgaacctcctttgttgttcattccaatgggtaacaagggcgggacttagatccccagataatctgaaaagcaagaaagcaacacttaattctgagagttagaaagtaaacgattagttaaaatctctaattaacaactgagctttttaaacctttggtggttcagaccgtaaagaatctgcctgcaatgcaggagacccgggtttgttccctgggtcaggaagatcccttggaggagggcataggaacccacttccaaatattcttgcctggagaattcagattgcagagcattgagaaatggaagagggaagagagagtaggccagcgcctcggaagcaatccagaccttcacaagaaggggccgctgcatggaggcaggagatgggatagcacagcctgtgcatttaccccagcctctccagcccaaggtccatgggcgtagacatgactgagcgactaacattttcactttcctcacacccttaacagttgtctcaacctgaattaagttgcctctcccaccctctcccttccctgtgtctggccccttgagctccatgcacaaatgtttaagagctggtctttggactcagactgcctggagttgaaaattcacctgagtatctgggtgaccttgggccagctacttaatactctagccatattctctttacatgctaaatggggatgataacagcctcattcacagagttaagaaatagatgagttaatgttcctaaaacgcttagaaggtctagtgcatttgctattgtttactctctaagtcgtgtctgactctctttttcgactcatttcttaactgcatttaagcagtcacaattagtgacatgaaatttttgctctgcagcccactggttatcgaaactttgtctgtgtgcttcccttctaggaccttctgtttgtcttcattaaaaaagaacaatccactcacgctaagaggactgtcatgaagaacgcaggagagggtgcttgtggaagtgacattagataggaagctggtggacgttctcaaaggttcaagggtaatggcagctggactcccccagagcctcgggagtgtccacatccacatccaagtccgctttgcagactggaaatctgatgggcagcatgagaggcagacacatcccgcagcagcagggcagagggggctactgaccacagccacgccatcgtgcgctccagaaaaggcatttcctgggtggaggaggtgaccccaggtacatccctctctgcaacaggctgagggtccactccgggtcagactggttccttcctcagcctgagcactctctcccagtgctgaaataagcattgccaaaatcttgccccctagacccactcacacgagttgctgaccagcacgttgcttcctagaggcacacaggctcgctggttatttcctggtcctgctgaccaggaagtcatctggtctctttttacctttagacgtagatatcatcgattgatgctcacagggtaatctttttccttctgcttctcagggactgcctcccaagtgcctataaccaaaaggctaaaacagtatgtgattgtttcaatgcagctagtggttaaaggttatagtttcatcctgaaagcgtctgaagccattttgtccctagggtgtgtttatttgttttctttgtgtgccagtgctttccctttgatcttccagatctacactctgtcttctccaccctgcttcctgccccagaaagctggtggatatggattccatcaatggactccctgactccaggcttggcggaaggcagggagggcagggaggagctcgggttatttactacccttggcccctttctgagatattgccgtggcctatttgcattgctccagcaaacgtccctgcccctctccggaaggtctcctctattagtggcttaagaattccagacaccactggccccctccctcctgttgtctccccagtcctagtcgtggtgacttctctgctgctattaaccccaggttactaccatattcctttgtgcttctccacattttcataaagggcctctttgtgaaccaacctttgaaatgtcctaattccagtgagccatctgttccttgttgctgtcttgaatgatgcactttgtttcgggtctta

SEQ ID NO: 47987 - DNA, 2164 bp, Bovine  19866881361086
  misc_feature (1)..(1): n is a, c, g, or t
ncttatcagatgaagtaccagtatccatctcagaaagtcagagaccccagtcatgccccctttaatttttttaaactgaaaaagtagacataaaatatattccagaatcccaaataactgaaaatcattctccctggcttcttgggtacctatgggggcagagttccctcatcttattgtcaaggaacctgtcaaatgcaaaataacccatttgctcttagaagatctcaattggtgttggaaacttacatcttctagtttaatacattaaatactccaaatgtaaggatttatctcgtcttgaaaggaaatcttcagtcttggttcccaacacttctttttgagttgtcctgggcacagattcctaacaaagcgtcagagctggtgagtggcggcttggtgccactgatcatcactgtgtgtcttctctgtgtaaactttgaggactcaaaaggattgagaaaagaggcccctctaacctttcatacctcttccacttgtaacctttgaacttcatgggacttaagcaaattaaagtactagattccaccatgactcaaggtaatgaaaacctttctccaagacttcagatgagctgcagaaaataaagactgtatgtgaattttttaggtccacgatggtctgttaatgggtgtttagaggggcaccaagatcatgttaaccaggccccatcctaaggtaagtgttggtttggaactcaagtgctctgagttctagcctcagccctgctgctcattcacagtgtggccttggagcccttggaggagttgggttaaactgtctcttttaaagatccttccagggctttcttggtggctcagtggtaaagaatctgtctgccaatgcaggagacatgggttcaatccctgatccaggaagatcccacatgcctcggagcaactaagccctggggccacaactactgagcctgtgctctagagcccaggagctgcaactatggaagccttcgcaccctagagcccttgctccactacgagagaagccaccacaatgagaagcctgtccgccacagtgaagagtagcccctactcccggcaactggagaaaatcccagacagcaaccaagacccagcacagccagaaataaataaacagatgcattatttaaaaaaaaaaaaaaaaaaaagatacttcaaatgtcctgggtttaagtggacagaatgaaataccagcattaagggaaaactcagctttgggtgtgtgtatttcagaatgcaacgcatacatctttataggcaaaagacagtttttcctctggactctcagtgattagagtgtacatgcaaaaatagactaattcctgggaattacattagtcaattatatgattgtatgaaaagttcaagcagtgcgcagggcaagtttctcaaccctgttctataaagagacaaaaatccatagaatctagtccccttggtgagagttagcaattaccctcaggtgtttgcaagtcagaaattctatacctctgatgtctggcagtcccggatcctgtccactcctgaccagaggatgctatgcccttttattttatagtaggaagaagtaaatatggcttcccaactcagggaaaggctgacactcaagaagtctaataaatatacttaacacttataatattatggaattaacaatttaccaaattaaaagaagggcttctggtgcctttgttgtgtgtgatttttaataatagtgcaatatttgggtacaacttttcttttttgcacattgcctccatcctgagtacaaaaacatttggaaaactgctggcttgaattcagaggtgaaatatgcaactttggaagaaaaaaactaactgatgaacttaaagcttgggtccactgtttagtcttgttcgagccatactacaatgagatcaaaatgagaaaatctaagatatctcattctgtctctcagctgctgttttccatttgatttccaccaagagtgctaaatgttttgtttcctctccatgaggaaaattcttattttttttcccagacaaactttatgttgtatgataggaaagttcaaaataaattagattctaaattacacaagaaaaggaatatatgttggcatctcctgacctgatggggtccctggtactggtaggtgtttt

SEQ ID NO: 47988 - DNA, 1628 bp, Bovine  19866881391326
  misc_feature (1)..(1): n is a, c, g, or t
nacaatatttctgattttggttattacgcttcatactaagtgatgtagtaaaatatatcagcaatattcacatgttaaagctttcatgatctgcatggagtgacttcctgagtaaaagttaacctcctacacatacatgctacatttaaagctcatttattgaacttttgagggcttccctgatagctcagttggtaaaaaatccgcctgcaatgcaggagaccccagttggattcctgggtctggaaggtcttctgatgaactgatagaccacccactccagtgttcttgggcttcctttgtggctcagctggtagagaatccacctgcaatgcgggagacctgggttcgatccctgggttgggaagatcccctggagaagggaaagactacccactccagtattctggcctggagaatgactatatagtccatggggtcacaaagagtcagacacgactgaccgactttcactgttggacttttgagatattattgcacctctgctcagttgcgatccccatctgctccccctgaaagagcagacccctggcttcctttgcttctctgtttcctaatcttccttcatttccctcatgccagcatcaccctctgacaattatcagagattcctccttagaataagacctgtgttactcactggagtgtttctagcatctaacccaacactcactgcacagcaggaactacaaacgagtgagtgagtgagtgagtgaaggaaggaataaatgatttttcctaaactgactccacattacacatggtgcatttcaggccctatacagtggcaccttctttaaaaatcaatattggcctcttcatgggcttacaattaccttgaatagatcacacatacaggatatccgtgactttcaattaatccagagggaaccctaaaaggacttaagatgagcagcagaagatactcacagagtgtatgaagtagccaatcagaaattagaagtccctggtgagccatcccctaacgaacagagagagagcatttcctggcttacgggaaggagagcggagcccggggaagtgcctcatacagctggattagttattggaaactcgtttccttgggccagccagtccttccagacgctgagtctgtggctgtctgtgtctctccttcaggggcacagatcaggggaacggagtgggccctgtagcatccgctgctggcttccgcctcacaactccacagtccatttaaaggagcagaggatggacacagctgtgcagtgaagcaacagacaaaccccagagagcctcctggaagaggtgtcccatcctcctgagccacccaaccctgctcattgcctggaaagacacccagtaaccacttgtgtttctctccagactctgtgactgtgtttgattaggatcttgagtgaaataagctgggaatgtcttcagagctaaaagttcctttctatgcataattaatattccacctctgtggagataaattttatctatccaactctgtaaatggatcgtttccccttggctattagtatgtcgtctctttaccaaaaatacaataaaacacaaagaaaaatgataggtaaagaagaacgcctcgctaaaaatgatttaaa

SEQ ID NO: 47989 - DNA, 1053 bp, Bovine  19866881414660
  misc_feature (1)..(1): n is a, c, g, or t
nggacctcctaggggcttatctctccctgacatgggccacgttaatgacgtcacaaacaggggcaagtctactttctccaaggctgtgtctttccttctgccgacaatctcccatcatctcagcctatccagtgctgtgcttcatcccacttaggtgctatggtctaagaaacacgacctttctttcctattcccatttcacctttcgcccctatgtcatcagatagtgatgtatgacattatttcttatacatgctgaaatactcatcattgagagcaaggaaaagatcaaatctgcaaaaacaagacatgatttcagcccttaagtacaatatggtaatataatgaaactcgtcatttattgctgcctattcaactgtactttaatattcattatttctattgagacctatctatttaaacatcagctctgcacagtcaagcctgtaagtatctgttgaatgagtgaatggatgtctgatgttcagtctgaactggtaaggcggccacgggttccattttcaggttttctagtgctatgatacacttttcctattttgatatttttctttaggttctctgttcatttctaaagaatggcaaagagcggcatgcactgtgggaggtaaattttggcgaatttcacttttgggtgaatttcattatctttacctgtcagctaacttccagaaatgcatgaactgggagacggggagaggagaaaacacagcacacgatcgctgacagttggtggagcagcaagtgccccagagtgggtgtcactagcccctgcttccacgctctgatctgaagcttgtacaacagatgtactgggggttggagaacagggtgctcatttgcggaggtgaaagagcagggaaaacgcgccggccatgatggttgggggagggtggggaagccgagacagtgccgcgggctggtgaccctgttgcttctgctgggtgtttttccttcagaaatatttttaaccatttgcaaggctagaagctacagaaaacattgctaatttaccctttctttcgaaggccagag

SEQ ID NO: 47990 - DNA, 1217 bp, Bovine  19866881636850
  misc_feature (1)..(1): n is a, c, g, or t
ngtcttgggctccaagtagcagagcagcagctaattctattcggttgaacaatgagaatgagtctgtttgcggctttgttagaagtagaatcactcaagcgtggcatgaagcttgggtccaaaatgagctgtctccaatggtaaacaatgaccactcgctgttctctcggatgcaaccagaggataaggagcactttattattttaactagcatctagctaccctagtagacatcagtcaccaaatttacgcgttgtagtggtatctacagaagtgtaggagatgagaccacaatgtctctaagagtcactttcgtaaaataggaagtcaaattgaactttaatctttagagcaaagaaaagtacatccttctccctagggaatttaaaaaaaaatgtgagcaaattgtaagtgacttttaaactatacaataagcctgccagccctattcagggggaaaaaataattggcattttatgtcagtattttccatgaattatttgaaaaacagacaaaatatgtcatttatatggagctgtgtcccactgttcttcaaagcttcttctcctgaataagtaatcacttttcattggtgattggcacagttgtataaggccaacttgggcaaaatatatcagaaaagccttaggttggtgttatatgtaatgcatccagagtccttgggggaaagaaagaaattgaaaaaacaaaagaagacgctcaaacctgtcaccctggggtgacaaacccaggtgtctattcttcctctggatgctgaattttagggactgggagagagttctgtgcagataaaagccccaggcccgcaggggttacaaaccacatcttttttttttttttttggcctttgtttgaaatttcagctcttagtgaaacacttctctgacatttacccttaaattagatgaaaaatcatctcaagataagctaatttgttggagaatggtgtgtgttcctggtgtttctcatctttgtgagaaaagctgaaaacctaagcaaaaagatttccactctctataggagaggggtgttgcaaaagctcgccaatgcaatgtgttgtggattgtgtatggaaggggaggttagctatctcagagacaaatattttgctatttcttggcagaagcactgggagtgggcgtttgaagttaaaaccccaagtcctgcttctaaacgtttccatgtccttcttcttg

SEQ ID NO: 47991 - DNA, 1337 bp, Bovine  19866881808491
  misc_feature (1)..(1): n is a, c, g, or t
nagggaaattttttaaagtaactgaaagatccggtgaaaaataacataaaaagcatgttgggtctacagggtaaaattaaaggatttaactagatatcttttttcatcttccaaaacaaaatctaatcttgatcctctgtaaagccattttaggttaaaaaaaaaaaaactattacgatatttagttggcacattcatttggtgccaaatttctaaaaatttcttagtactatagatagatagctatagctatatatatatatattctctagaatcttgtgttttcttgtataagtaatacatagatcacagttaaactcattttacagtgtttgcagtctacttttactattaagctaactataaagatttagaattattatatctttgcttatatgagccattgttactgtatcatggccttgtctggcgccaactccttggtcagaaacgtaacctccaattataagattgcttctatgggaaaatgtgattcactttatgatgtggtttttaggaacacactgtggcaaaaagttgagaatgcctgcctttttaaaaatataagcttttcaaccctttataccatcagttacaacttggcaagatgtgatatgactagggttggaggttattcatggattgaatttgactaaagtctcagagcctgccccccacaagtggatacaaaaggggtaacaaatgcatatgtcaaacttaagctttagttggaaagtttggttttcccaggtggctcagtggtaaagaatccacctgtcaatgcaggagactcaagagatgcgggtttaatccctgggtcaggaagatctcctggaagaggaaatggcaacccactccagtattcttgcctgaaaaatcacatggacagaggagcctagggggctatagtccatatacacccatgttttgaatgaaagttttacttaaaatgttatcaaataaaagatttctgtaatgctaaacagcttgatcttccaaacacagattatggtcatcgttactgataaatcctggcttttctcttaaaaattcaaaacctcgttttccttttgtgctccttttgttcattaattagacttacattattggtaaaaaatctttaaaatgatattttaattgcttctaaaatcctgagatcttagttacaagattaaaaggacaaaaaataaagcttattaagtttggggggtctttttttttttttttggaaagtgcttaaattaattgaacttgtccaatcaactttttttttttttaagtctccttcatagtaatatccattgggactttaaaagttacacaaattgagtaactga

SEQ ID NO: 47992 - DNA, 980 bp, Bovine  19866881831958
  misc_feature (1)..(1): n is a, c, g, or t
nctaagtggaaccagtcgcttcagaatttattgtctactagcaaatccaaccattaaaaaataccagatcaacatctttctctttagagatcacttagttttgaaatatagtcaaatagaatgtaatcttctatttttaatttctgtttccctcctctctttatagtgtctgattttacatctcttctgacaaatgtatatattatgcattcaaaaaaattatataaagaaaatgagaaccatggtgcattagaactctaagaacatttaaaagatttagtccaactcctaattttagagatgaagatgcatgtctgagaactatttactgaaagcagggttagtgtcatagatggtgtggggccttggttcctaccctcagcccaacattttgggggctccactgcccattagtgagatgtcagatggacacacatttccattcatcttggcacaatgccattagtggttatgataattctattattaggaaaaataactaatataaatattcttatttcaaactcaaaagatggaaatgaaacagacgtattgaagttcattgcatagaacaccgaaatcattctatcagccctaccctcatatatatatatatatatattttttttttttttttgccacactgcgcaggttgtaagatcttagtttcccaaccagggattgagcacatgttctcagcagtagaagcacgtaatcctaagcactggaccatcagggaattccttgtcttcatctgtaaagtgactgggttgagtagccgatccttgcattcttctgcaactgaaatactcgagaattctaaaccttgctgaatattctctgtgaggtttgcctttttcctctcctgaaatataacaatcctaaaccttcaatttcctcaaatgcaaagcagagctaattatatttaccagggcagtggtgacagtaaacaagatgatacacataaagcacatttaatt

SEQ ID NO: 47993 - DNA, 939 bp, Bovine  19866881910020
  misc_feature (1)..(1): n is a, c, g, or t
ntggcgtgctgcagttcatggggttgcaaagagtcagacaggactgttctgacactcttctttaaaaaaaaaaaatctcataatgatgatctgttccttttcaaggaatcaacgtatgagcacttcaatcagtagaatgcacagaccttgaagaaaaagtgacacaaaagcactgagagataaaattgagtaaaatgtcctcagttaatttgaaaaattccaatacacccttgaaactgctggcaactgaaagaaacctcacagccacgcaaactggaattttcttttcctgtgagttcatgaagctggtggaattgcatatctgaatgtatatgctggtgtttatactggccttgaatgtgttgatcttggagactattcttacataacttattaatgttaacattttctcccaatgcaatatgagctaccataagcgtttgagtcctaaagcagcttgattcctttgtatttagtgttccataaacataatgaggagagcccatttctgtccctccccagagctgtcatttaaaacagccccaccttacacatgtttgccccatctgtctcccttcaagtctgcctttgttttgcagcagaaaaaaaaaaaaaaatgggcaaaatggagatgaaaaacacagaaaccaccatagattgaaaaatatttgaatcatgcccttaaaagtggtttaatttgggattcttggaaaaataaaattcagatgcaattaaccaaagcacgagtggatctggtttcaagacagggactagttttttccagaaagctggacacgctccgtgttgctcccagcccttggggatgtgatgcagtagagttaatgcctcctagtaaatcaggcccggggagttggccattcttcctgcaggccatagggtgccagaactcaaagttagccatcactgtttgcatattag

SEQ ID NO: 47994 - DNA, 3726 bp, Bovine  19866880484152
  misc_feature (1)..(1): n is a, c, g, or t
naagttcctggttgatgcactgctgaagcctaacttgaagggttttgagcgtttacaatgtttttaatattttttatctttcaaatataaaagcacattaaatacatatggaagattctgcccctatttttccaagagttatatatgttcttttttcttcttatcttagtacataggtaaaaagagtgatatttcaagtattttctagtaagcccatgggttagaaggtgatggagctttagattcatgtgcttattaaatccaaagcagtcttatgtctgtgtgattcacctgttacttttatgcaaacagtttaatgtgacacaagtattaagctattgaattgtgtatttatcataaagtaaattaaaaaatgatctaaacagtaggttcacagcaagtattctcctttccatctatgtaattagcatacatgtcagatatctctgtatttttttaaaatcttattcttgatttgttttctttacaataattttcatatacaattatttttactctggtccataaactcttttaaatgacctgaattcattttaacgacaaggagggcactaaatgcttatattacatgtttattggcatgaaattttaatcaaacacatataaaataaacaactatgagtaagcaactgtcttccattatgagcacatatccttcatgtttcccaaattaaaatccctcctgctatttagttagaatatatttctaatattctctgcctgaaaaattataattttctgtacttattattgacaggaagcattttacttatagtttagctctttgtctgttattaagtaagagcagcccactctcagttagtagcaacttccatattatcgaagatgccctttaaaatatgtggaaactgagtacctagtgttatacagaggttgagttggtcaaacaaccattatgtgatgtgtttagtgaattaattttattatttcaactctgtaatgtggtagctttcactggcagatacagttcactattgatacctttttgatctagggtttttgtacgctcattttgaaggaaagttttcaacattctgattttcttcacttatcttctgtaattttagagaaataaattgcctcagtaggttttatgagatcatttcagtatctgcattatttgaaagacttaatggttcaccgaaaatcagagatacattttgtgtttctgaatttaaaatattcactccattggaaatgaggccagagtgaaactgagatcttattatattagtgacaacagtaactgtgatagtataatttagattcattaatgtattcagttatataagacatttactgagagcataccattttgtcaggcatttgaagtaaagtagtgaacaagtagatgaaaacacatatcctgctataatgctataatggagactgtattttataaaatgaatacaaactctgtgtttgtgtgtgtgtgtgtgtgtgtgtgtgtgaacacactgtgtacatgcattgggtgagggaacaataagtgctgtaggaataaaaatgaagtagggaaatggagtctttatttgtagaaggaagttcctgtttaaataggttatttaggggagatctcactgaaaaagctatagtggaatacaaacgaataacatgaatgagggagcagtgaaggtacagggtagaaattctagccaaagtgaagttcaaaaacaatgacattgcaatacattggggaaatgcctttcaaattattacaaatgcaatggagaaagttaggaaaaaatagtaggttaattcaatgaagtaatgggggatctgattgtgtgtgtcttgaaaaaaataaacgcagtgccataatatgaatcatggtttgctgatgtggtaaaaaattgactgatacagataagaaccaaagtaaggagatgagttaggagattatcttaataatccaggtaagaaacatgatgcttagatcatcagctttgttttaataatgttattaagaagtcctttgattctatatattttaaagttagtcaaaataatttctgggagattcaatatgagatttctcagagagggatcagagatgactccaagaatattttcataagagtaactaagaactgtaagaactttaacagaaaaaggcttttaggttccttttgtctaattttgcttttatttatttaacccttaaatttaaaaacttttgcatagcaaaagaagtcattgatgaaacaaaaagacaattaatttaatggtagaaaatatttgccaaataactgataaaagattaatatccaaagtagcaacattatctacaatagtcaagatatagaagcagctaacaacagatgaatgaatacagaagatgtgatatatatctaatctcacagtggaatattacttagccataaaaaaggaaatttccctatttgcaacaacatggatagatccagtgggtattatgcttagtgatataagcctgacaaagaaagacacatactgtatgtgatgatgttaaaaaaacttatcgatacatgcatcatcatggaagtatcaaacgtattttgaaagtgaatgaaggcaaacaaaagattacatgttacacttggcgattgaataacacagggggttaggaatgttgaccctccatgtaattgaatatccaggtaaagctttatatttgctctctgtctccatagttctccatgcacagattcaaccaatcacaaattgtgtggtaacttagtacacatttgttggaataaaatctgcatataatgctgctgctgctaagtcacttcagtcgtgtccgactctatgcgaccccatagacagcagcccaccaggctcccccgtccctgggattctccaggcaagaacactggaagtaggttgccatttccttctccaatgcatgaaagtgaaaagtgaaagtgaaatcgctcagtcatgtccgactcttagcaactcccatggactgcaggcttaccaggctcctccatccatgggactttcccaggcaagagtactggagtggggtgccattgccttctccactgcatataatggatccatgcaattccatcccatgtttttcaaggccaaccatttcttttaaattctagaaagggcacagttatcataaaagaaagcagattaagcatttcatgaagcaaagagatagaccatgggcttccctggtacttcagctggtaaagactccacctgcaatgtaggagaccctagtttgattcctagcttggaaagatctggtagagaagggataggctacccactccagtatttttgggctacccactccagtattcttgggcttccctggtggctcagctgataaagaatccacctgcaatgtgggagacttgattcgatccctggcttggaaagatcccctggagaagtgaatgactactcactccagtattctggcctggagaattccttggactaccaactgaatatggtatagtttcttttaaattctagaaagggcaatattataataaaagaaagcagattaagagttccatggagcaaagagatagatcaaggtagttgcctgcaaaaagtcatgagaacaatatttggggcagtgggaacattctgtattttgattgtggttgtgcctatatgactgtatatattttaaaatacccattggggatttttaatgtttataaactatttctc

SEQ ID NO: 47995 - DNA, 1443 bp, Bovine  19866880633175
  misc_feature (1)..(1): n is a, c, g, or t
ntccaaaaaaaaaaaaaaatgaatggttagttttaatagcctcaccttataattaaaatcaacaacaatattaaaaaatcttaagatattagaagagagaatatcaattattttccatcaactcatggttataggtttatcaagtaactggctatatcacactcaaataattcggacatgcctctggcactagaaaactaattacactctttttttacacttaataagtcccataaatcataatgtttaattttgcagcacaataattcatctcaaaaatgtagcttttcttggcaggaaaataacagaacctttattcatatatgaaaagttactggtctataaatttatagtattaggttattttattgttttcatcacttgagattcatgtttatacattgttcatctttcttcacaggtacacttctttattaaaactaaatgtaaacaaaattcaaaagtggctccatggcaatgccactcatttcagttccatggcagtgccgctccatgacagttccacaaatttcaaaccaaacagttctgctaagttgatctctgtaggttcattcctgcatttcacattaagacaactgaagacctttgaaatgtagttatgagagaaagacagcaaagcttctgaaatcctctatttaggaagcttagaatatattttattgctgtttggacttcatttggtttgagggatatacattcatatctttatgattattgaggagtttcaaaatatttccagtagaaatttaggagtattttaatttttgtgccttctgttagtatccatatacactacttcagaaaatatttatgtgtcccacaatttttttaaaaaattgctgaaatatgtataatttagaatcattgtgtctcaggattcaagaacacacaatgagttgtattataagcctttcctttattcctctgttccagtgcttggaaaactacacatcctgatgaccaaatcagggctaccatctggtcagcctgttgatttgtgaaatgtctctggctgctctcatgccacagtggcagaggtgagtacttgcgaaagagactgggtgtcttgaaaagtctaaaagattacctaagtggctctttagagaacatgtttactgactcttgctctattaaatgccatttaatatacatggttactggagtggaattgtacacagtttaacgtataaaatgagagaattggattctagaaaacaagtggttgcttaacatcgtatagtaaactgaagttaattctggtactcagctgatgttatgttatttggaattcagtgtgcttcctctactgcaagaatgtgagaactgcttgttaagctgtgcaagctagacatcatttaaaattaggacacttagggagtgggagggatttgggagaaggcataaaacatgtataatatcata

SEQ ID NO: 47996 - DNA, 790 bp, Bovine  19866880675959
  misc_feature (1)..(1): n is a, c, g, or t
ntcatgcgaagagttgactcattggaaaagactctgatgctgggagggattgggggcaggaggagaatgggacaacagaggaagagatggctggatggcatcactgacttgatggacgtgagtctgagtgaactccaggagttagtgatggacagggaggcctggcgtgctgcgattcatggggtcacaaaaagtcggacacgactgagtggctgaactgaactgaactgatgttgcattattattgaattatttccaatttatcattattagatttgttgagcacttgaaagctccattatgattttttttttctaaatatgtgaaaatgagtattttagaaacaaaatatattgtggtgtaaccaaccaagtattaatactccagaaagcctagagtattaatgaaagctgcagtattaatgaagagataatctcaattttatttttgaggttatgaagttaattcaaaccagtgtttcactggcaatgtttcaaactataataaaaaatgccatgacaagaaaaaaatgagttgagtactatagatgtcacatttatctttgctcttgcttctaataacttagaaaatccactgggtgtgttttcatatatacattcactgacaccactgtcatacaagcagtgacaactggacagttcattctttcctcattggtggctgaaagtaattcttttttctagatgggattttaattcacagaaagacatatcaatcatctactgtcttggactatattgtcaaggtatccgttttcatatcaatcagt

SEQ ID NO: 47997 - DNA, 1385 bp, Bovine  19866880841930
  misc_feature (1)..(1): n is a, c, g, or t
nacactggagtgggttgccatttccttctccatgcatgaaagtgaaaagtgaaagtgaagtcgctcagtcgtgtctgactctaagcaacctcatggactgcagcccaccaggctcctccatccatgggattttccaggcaagagtactggagtgggctgccatttccttctccaatgcatgaaagcgaaaagtggaaatgaagtcgctcagttgtgtccgactcctagcgaccccatggactgcggcctaccaggctcctccatccatgggattttccaggcaagaatactggagtggggtgccattgcctactccggcaggaactacaaggatggaacaaagttcatagccacttagggatatcccatatcagctttaccttgtgaatatggaagagaaatataattaagaaaaaaaatcaaacacatatcataaaatccctagggatatcttatccttccttaacacaaatactttgttttatcaggcaaatctgggtaaacaatctacctggattttggtatggtattttgcaaagtctcttatagcaacataatggacagaagagaggaatgtagactgcattatagtacagctgtgtggatgcttaggtggtccagtgagaagggagaccctgagtgtatgtgaggggtcatgcataggacaacaggaaatggaatgaagacacaggagacatttttgatcaaattttagataatcaatttgctggtgtgaacatattagaaacagaattcatattcagaagaatgctgaaaggtagattaatggatcaaattaatgagactgaactttgaaggaagaaaaaaatataatacaaagtataatacccctttctgatctttagtgaaacacttcaagtgtttttccccccctcacattattgttttacctcaagggataatcttatctaattagtgttcatttagtacctagaagtcaataactggaattaaaagaatccctagattcatttccagagtatatgatcaaagaaaactaagaggggaatttgagaattacccctcccggcaaatgaagttttatcacaggtaactcatccaccacaagttcatatccttgagcccttgacagattaaatgtttattgcctaaaactgaaaaaaaacaaaaactttaaaggaagagcatgacactcgcctttcagtcccaacattttccaaggtttggcaaccttctaagctttgaaatatgaacaaaatgtaaagactaacagattctctcagtatgatgaggctagctggaatccctacagaggggcagtggctaatggatgtaagtcaagaagtggcagaggaagctcaggtgggtggagggtggggaagacaacttgcactctgctctgt

SEQ ID NO: 47998 - DNA, 1127 bp, Bovine  19866881061299
  misc_feature (1)..(1): n is a, c, g, or t
ntatttatctatttagaattccctgaatgttgtgtgccctttgacaaattgtgcctgttatgcaatgttcccactgcttggcctactttacattcacaatctgctggcaggatttctaattacccttcaggactcagcattaatgtcacctttctctgaaatctttccttgtacccttggcaaaaatactgtttccttcctctgtattcttacggtaatctgtacatatatctactatggaacctatcaaaacacaccatagtggcttgcttatgcaccctttcccactttgacagccctgctgttctctgagattctgccacgcatggactatatattgttcaactttttatccctagggataagcagagagcttcagatagagtcagttctaaattaatgcttgaaatattttttgaatgcatgagcacatgcctgatttcctgtcccaaatatattccagtgtaaccaaacaatagagctcttgaaaatcttcacaaattttaaaataagaaagctttcatatgtgacattatggtcaaatattccttctctgaagcaatagccttctttatatgcataataaataatcagacagaattctgccaatatcaactttatctagcttaatttttttttagtttttccaagcttctatattaatctattttctagaataatatcccagatatagtttacaacccttttgttatactatttccatatcaagtcatggtattataattacattgtaagaaatatgatttcactggataaaacaaaattcatttgagcttgatggataaaactacagagctacttgcagaatcgattccatcccactggtatccaaaagtagttcagagggcacaccagaggcaactgataccttatcacaaatgaaaccctgtttctcttaatgcttacgacaaaactcactctcctgggcactcatgcctgactgtgcttgaaatttctgctgtgggaattctctggtggtccagtggttgaaactgagtgctttcactgccatggcccatgttcaatctctggttaggtaactaagatcccacaaatcacacagcttgtccaagagagaaaaaaggagggaggagagaaagaaacat

SEQ ID NO: 47999 - DNA, 1254 bp, Bovine  19866881156145
  misc_feature (1)..(1): n is a, c, g, or t
nttgcagaagaaattattgcttcaatatttatatctctatttctctgtgtctaatttaatgactcatttaacatgcttgtaattcctgagataatattaaaaatctgttgcataattatgcctcagttcttacatggtatttaaattccaggccattatatattattgatctactaagattataatttgaaacttaactccttactgtctgaaattaactaatgctgaaagtatgtttgtcctcatgataaattatcttttcatttgatcaaagtataaaattgtcagtaaagaaggtctgtgttatagaagcaagatggtgataaaatgccaataaattttagaaacacaattatctctgaaagcaagttcttgtctggtgttaagtcgcttcagtcatgtctgctctttgtgactccatggcctgtagcccgccaggctcccttttccttgggattttacaggcacgaatactggagtgggttgtcatttcctcctccaggagaccttccagacccaagattcagacaagcttcttctaggtctcctacattggcaagctggttctttaacactagcgccatctgggaagcctctaagttcttgtctagggcacatcttattagattgctacatttcggaagcttctgcagctgcatgtgtctttgttgatataaggtacctaaaatagcattatctccatgacccagaaagtcagttaaaaggcagccttggttgtaatgatatcatccacatttaatgtctgcaccttggaagtaaagaggcaataaaagcttccccagtaaccctaaatactaggtttaacagcagtgttatacatcagagaaaaaatacaacaatacagttttgccttatctcctgtccttcaatatttctacagattactttttaaaattctaaatatgttacttacaaaatacttttaaaatgtgttgttttgcccaaaatttatgttcagagcctttttcagaggatcagcttcacagattcctccaagtgctcccacaggaggtttaaaaatgcctgcttcagaagaactgcttaacatggtcctccagtagtatttaatataaatgagcttacctaaatctactttgaacttttgaggtaagcttacttgcatataggtgaatatatttctgtttcatcagaaaattttttaaaagtctgaattaattaagctattgtgtgatgaatggcaaggtattatactacagaaagtcacaaagcagg

SEQ ID NO: 48000 - DNA, 1488 bp, Bovine  19866882070970
  misc_feature (1)..(1): n is a, c, g, or t
nagaataagttgtttatgcaactataagtctccttctgtttaattgcagcatcaatagcttccatgaaaaatcattgagcttagaattctagcagagtaatggttagacattattttgaaatttctttcttaaaagtccaaagcattaaattgcatggttataaactcacagctcaaataaaaaatatcaagtcatgcaaagcaaatattattcctgtaaaaaaaaaaagtcacataaatagagaaaagctgaatcaagtggaaagcttggcaaatacgtaaatatgataacaaaagctatttccttagcaaagccagattgatgcttcctgttcttataaaacaaatcatattacctcctagaaatctcaagctttataaaaatgtatggtttaagaaagaatgatctaggtaaatgcacatgatgtaacatatgctgaactttacctagtgataaaaattgaaaactgtaaaatcaacaacggtggatttgatagagtctttagaaacagtgctgagtaggttctgtttatattgctgtcatcacatgtaccaagaaaaccagattctgcagaaactaccactccttctcccaccagaatctttcataggcatacacacctataacttgtcaggaagcaattcctataaaggtgtgcatgagtgatggaacttaaacacaactcaagaaggggctcatctctcaaattgttcttttggaagaggatgtaaattagcacgttacatgtgggcagggatggaaagttgatcataactgtagaccgctacattctatctttgggacattattgtgggaataaagccctcagcctgaagtgtttgttttaccttggtcttctattttaaattgaagtatagttaatttaaagagtatagttaatttatgctagtttctggtgtacagcagtgattcagtcatgtttttgttctgtcgctaaatcatgtctgagtctttgtaactccatggactgcagcatgccaggcttcctgaacttcgctatgtcccaaagtttgcttaaattcatttccattgagtcagtgatgctgcttaaccatttcaaactcttccgccctcttctccttttgcctttaatctttcccagcatttatacacatacagacacacacacacacatatatatacacacacatacacacacacatacacacacacacacacatatatatattatttttcagattcttttccattataggttattttgagatatcaaatatatttcccatcttatacaacaggaccttgttgtttatttatttcatatatgtgtatctgttaatcccaaactcctaatgtattcttcctctactttttccctttggtaaccataagtttgttttctatgtctgtgcgtctgtttctgattataaataagttcatttgtatcatttttcttagattccgggtataaataatatatgggggtctgtctttgctgacttcat

SEQ ID NO: 48001 - DNA, 1503 bp, Bovine  19866880070565
  misc_feature (1)..(1): n is a, c, g, or t
nttcagttcagttcagttgctcagtcgtgtccgactctttgcgaccccatgaatcgcagcacgccaggcctccctgtccatcaccaactcccggagttcactcagactcatgtccatcgagtcagtgatgccatctagccatctcatcctctgttgtccccttctcctccctcccccaatccctcccagcatcagagtcttttccaatgagtcagctcttcacatgaggtggccaaagtactggagtttcagcttgagcatcattacttccaaagaacacccagggctgatctccttcagaatggactttattaatttggctttattaatttgccagtctaaggaggaacacagtaatctactgcctcaagaactgtgtcccagtccctgatgagttgctgttgttcagtcacccagtcatgtccgactctttgtgaccccatggactgcagcacgccaggcctccctgtccctcaccatctcccaaagtttgcccaagttcatgtccatcaactatacttcaatatacttcaacagaaaaagagaaaaaacttcttcttcagcaaaagtgaaccctatcccaccccaacccccaaaaggatcacaattagtatataagcaaagttggtccatcttggggcctcttggactatcttatcttcttgtcttttccataggaaagaagatgactagatccagaaagttacagagattcctgccctgcacggagaatgggagatttctgcctccttatctcatttcattagtattgtttttaactctgtgtgttgtattattaaccttcacaaatcttttgctaaattatatgaaatcaaagatgataagagcttgcctaatgatatttaatgttttaggaaatatgataaaggatcagcatgtaaaataaaagttggcttatcttaacaattttcttatgcttacttctgttaaactaatgtgcttttacattagcaaaattatgattttttttcactataagaaaccatttcactgtaaacacatgattcaggaaattaaaaataaaagttcatctgatacttcagtgtgtacacagatcaattttagttaatgcatgtagaactaataactaaaagagaggaaacaaagctagagaaacggaaaggagacaaaaagggaagtgtttctgctcaagtacattttacgtttaccaggaatttttttaatattcaagtacatatccatgtgcagatggctgaaggagagtgtttaggactaagtaaactatgcttctttcatgtgtaatataaataaaaggacatagtccactgatccattataagcactagttaaaaataatcctgacccttcagcatgaagcttatgcaatgtactcattaggacttcattcagcctaaggcaagtcaaaaagggttttaaaaatccacacataaaattcagaatataggataccccagctatagttgttagtattctgttctatgcttttggtgaataaaaatg

SEQ ID NO: 48002 - DNA, 1720 bp, Bovine  19866880126431
  misc_feature (1)..(1): n is a, c, g, or t
ntggtacatatacacaatggagtattactcagccattaaaaagaatacatttgaatcagttctaatgaggtggatgaaactggagcctattatacagagtgaagtaagccagaaggaaaaacataaatacaataaactaacgcatatatatggaatttagaaagatggtaacaataacccagtgtatgagacagcaaaagagacactgatgtatggaacagtcttatggactctgtgggagagagagagggtgggaagatttgggagaatggcattgaaacatgtaaaatatcatgtaagaaacgagttgccagtccaggttcgatgcacgatactggatgctttgggctagtgcactgggacgacccagagggatggtaatgggagggaggagggaggagggttcaggatggggaacacatgtatacctgtggtggattcattttgatatttggcaaaactaatacaattatgtaaggtttaaaaatgaaaaaataaaaaaagcagagacattactttgccaacaaaggttcatctagtcaaggctatggtttttccagtagtcatgtatgtatgtgagagttggactataaagaaagctgagcgccaaagaactgatgcttttgaactgtggtattggagaagactcttgacagtcccttggacagcaaggagatccaactagttcatcttaaaggaaatcagtccaaatattcattggaagggctgatgctgaaactccaatattttggccacttaatgggaaaaactgactcactggaaaagaccctgatgatgggcaagattggaggcaggaggagaaggggatgacagaggatgagatggttggatggcatcactgtctcaatggacatgagcttgagcaagctctgggagttggtgatggacaaggaagcctggcatgttgcagtccacagggttgcaaagaattggacttgactgagtgaactgaagtgacaacagcctccattttgggcatacaatctgtgggtattaattagaaaagcctgcacatcactatttccttatcatcttcaggaactgttgttctttgtccttcatgggacagagatgataaaaacttcaaggctctgaagtttaaacacatattcatgcattcaaaaagcatccaggtggcacttcttgccaagagagctagactgctaatttgacacatcaaatgagccttttgaactgcaaagggttaacccagcctgccagccaagctgggggagaggagctgactcccagatgccagtgctagcaaaattcatcctggagcttagcatctggatgctccacctgccaggcaggccccagcaggtcctttttgtcactggaccagattaaaagagaatgatgagcagaagaggttctgcaccaccagggacaaaaaggaaaatggcaaaaaagccatcctctgccaacagcaaggctccccaccgcctccaggtactaatgtcctggaaacactggacaggagcgtgtgttaccttgtccagacaccacctcagctgtctggctgctggaggaaggctcgggaacatcagaaaccacagggtaggccaggctgaaccagtcccagaaccttcagggtgctacctgtcaagttttcacctgagcagacaggatttttaagtatgttctttggtttcaggctccggcaacatttgtcaggacacccagcccccatctccac

SEQ ID NO: 48003 - DNA, 979 bp, Bovine  19866880173318
  misc_feature (1)..(1): n is a, c, g, or t
ncctgggatttctttggaaggaatgatgctaaagctgaaactccagtactttggccacctcatgcgaagagtagactcattggaaaagactctgatgctgggaaggattgggggcaggaggagaaggggacgacagaggatgagatggctggatggcatcactgactcgatggacgtgagtctgagtgaactccgggagttggtgatggacagggaggcctggcatgctgcaattcatggggttgcaaagagtcggacaccactgagtgactgctttgatctgatcttgaggccacagtagaactggtctcttccacttattcaacatctaacataatccagcagttttgctagttgctgcatttctgggctagtctcttagacttctggagtcacaggtgctcaggagaaactgcagcggggtctatggtctgacaggcttggtttggtgccaaggccgctcctccatgatattccttctcagtcagctaactcctctaatcttcaggctgcccacctttcaaactgggataggaatactttaaatcacaggttgtgaggagtctcaaaattcccaacgcaaaaagacttcactgacatggagcaaacagagagcaaaaccccctacaattccccctcatttcaggtttaggacataggttcccagcaagatgtgcctgaaagcaaataaaacatccccaaagtgcttaggcattacaaaagacagatgtcacctatctgataacaggtgggaggagagagaaggtgaaatgtggaacttccatgggagattctttaagtagatatattctagtattatgactctttttgtagttttgctctggggaaagtggtttctctttgcttgcttaacctgtgttgtagaattcctgtgtgcagcctggcaaattattgccatatcctgtttcagagatggccgctcttctgtcatgggtagaaattttccagtgcataaaag

SEQ ID NO: 48004 - DNA, 3881 bp, Bovine  19866880406041
  misc_feature (1)..(1): n is a, c, g, or t
natggaagaggaggaagaaggaacagggagacacaactgaaacatcctttttaaacagaaggagaaccaggaagataaactgcctcaggagtcaaatagggggagtccaatcctaaattcattaaaggcaatgggcactaaggaaaattctggatttaataattgaaaagttactgatagaccctgagattattattcgggatagaaaatagatgatagggagttgatgcactcagtgagaaatggaaggaagcagatatcaggctcagggaagtctggttatgaaagaagggaagaaaaaattgtagcatctggaccatgaagcttagtggagggtgttctaattgccattgtcattggagtgtttggagaatgttgagtaagtgcaaatgcataatattaaatttatgaaacaattcacccaaagccagaaaaagtattcccagtactaaacatggcttggttatggtaccaacaaatgtttattgaatttgatctattaaatttgacaaagaggctaagaacaggattcagtttaaagttcaaaaattaagtttgggatcatgttgggatcagaccaaaggagaggtgttcctggggctctggacatcaagtttaacgcttcacagatgtacacgtgtgaccatctgtttcaaaggagaggaagaaagacaagcctaccatctcacaaaactgttgcaaaaattaaagtatgtatgtgaaaaattaaagtatgtatgtctaagctacgacagtcattattcataaatttattttaattctatgtgatgtaacacaagactaataagggcagagaaagtcttaaatttgcagctttaacccctgtatgtagaacagtacctattatgtagcagatgcttgctcattgcttatcaattgaagaatggccattccttatatataaaataagttaaatcaatagaaaactctgtagagtgatttagtcctactccttaaaatgtcaggctctccttagaggaatttaatttaaaggttctgaaaataatatacagtcacacatatgaaagggtgttttaaaattgagatggtagaatacacaaatcattcctttaaagataacttcaagacctatgtccctagttaattgccattaatacttgaaaatcaagtcaagcattatctcctccaaaaagtctgccttgactacccagtctcggctaaatactcaccacaaccccaccaccgacccaccacacccagaccttctgtaggacagtgggaatatccctttcacagcacccttcctgttgctttgaaatgtactggtgtcatcccaccagtctttaagtcccttcaggtcaattgggttgtcttattcttctaatggctgctatttactaacatagtatctggcatgtagtagatgctaaataagttttcactggcgtgaactgaattcatgatgactttcacagatggtatcaattttataacctaattcactcatgcattagctttcagccagtttttcagctaatccctgttcatacctggaaggaatgataacatatcatttcataaagactttcaggaccactttcaagttaccaaacatcattttaaaggaattctgatcagtactagcttaaattagatatcagaaaatgcaatgcatacataagtgtttgcagtgtttatataaagctaaactcaacagtttcgtccgtctcctttccttgaactgctgggtaaagcaaatgcatttctattagagccagtttgttttgtgagattttgccaacaggtgctccagcttcttcattctatgtacactttccctttacttgcttgattactaaaactagaattctgtattaaagaatttacttgtgatctctataaagactgatctttacaaataaggctttgtgggattacatacaaagtgaaaatttaaggaccaactgttccccagcaatgtacaacatgtggtcagttgacagtgtcctgacgttttcttacctactcctttgctcagtactgaaattctggtggtggtaagggtggggaggggaacagggagagatattccaggcacgcatctttatattcacaactctcagtatgccaaacacatacaaagtcccactctaagaaaatacagtgtaatctttcccttccacatatgacatgccagcctatgtccatatattccagataactctctctgataaatatatactttgtgttacccatctgtgcaaccgccatacggttttaaagccccacagttcacagaaaactgtcttagagaaacaaacaatggaaaaaacatataaatatctgatttatttctctgaatagggacctccccagaagaaaatatactacaacatcttcaaagcatgcggtttatttttgagagaagagggtgagggtgaaggaggcatcatttttctgcagttttaagtggtatctctagtgatatttgcaaaagtatttatgattctcatgagttttaaaaagttggctttgctatgtactaattaatcttaaactcccccaatactgctttactcttcttttccccagaaattcataatataggcatgcgcacgcacacacacacacaacacactttatttccctggctaattacaattgtattcattatcttctgtccttttccctcctccatatctcttgccccaacagagcattcttgcacattttattttgtcttatcctgctgaacatccccccactattattactctgcagcagcccctgctggtaaaacgcatcattcagtttatctgtccttagctgtgtgtgtcaggctggtgctaaatcctcaacaggccatgccatggtctagccgtgggcgacctgcaggcccggtggggcctcaacagggctgccaaccctctgcaggggagcaactgtgccttgtttccagtgtggaaagagcaccagagaaacacataattttcaggaggttttatttcccttgtttctagagcacagaaggaaaagggggtttgaaactgtttgtgactaaaatgataaaagaaaatcaatgcagcaaagcgtagactaccagaaaatctttggttgaagcacaagttgtgacatgatgtcaaaaaggcattcttttcacagagaaggcgtattaaattatgcgagtgctgactgcttctccaaggactgttgatagatgcttaggaggggaaaaatcttccttcctggttgaccttaaaaactgtcttactccaggccttaaatgtttaaatgtgaatataaaacactttttcattgatcctagaaaaaaaatattctcaacctgttctctttggttgtggctcatcatctgcccatgcataaagatctatgtatgtgtagatgggtagatagatgtatagatatattaattcttagctaaagagtaaatacatttatcattcagaatgacagaactagagtggaaaacacccaggtgattgcaatttgctttgccatgcacccatgaaaagtccctgtagtggaaagaaaatagagcaagcaggttatgataatagaatatatctatttttcctcacatttgtcactatatttaagccaatattcccaaacagggtaaaatgtatacatttgtaatatggatacaattcccccaggactttgattgtggcaaaagctgtggaactaatctacaagcaggtcaatcatgtcacagagcaaacaaggcgttgattgggaaaaatagaagagaacaatgggggacaggaaacaggacacagaagacaaaccgatttgagaatctggaatatgtggctattttggtatcaggaaacctatctttaaaaggaaggagaataagcctagaacaggggagacgc

SEQ ID NO: 48005 - DNA, 1045 bp, Bovine  19866880418538
  misc_feature (1)..(1): n is a, c, g, or t
naaaaaaaacagtggattagaaagagcccttaaaattagaaatatggtagcagaatacacaattcaataaaaggactagaggatgaaattgaggatctcagaaaatagaaccaaaggggacagaaaatagaagaaagaaaagaaaattagaaaatcaatccagaaagtctaatatcaaactagtaagagagacataaaaacaaagatgaggaaattataagaaaaataataaaagattttccagtcatgagaatacttaaaaaaaaaaaaggatcttccctgttttccttcttgggaggcagctggaagatgagctcaggcaaatagagagtaaacagagaaagaccccgaaaagtgggtagccatggaaaacagcaaggagatcaaatcagtccatcctcaaggaaatcaaccttgaatattcattggtaggactgatgctgacgctccaatactttggccacctgatttgaagagctgacccactggaaaagatcctgtgggaaagactgaaggcagaaggagaaggggacaacagaggatgagatggttggatggcatcactgactctatggacatgagtttgagcaagctccaggagattggtaaggacagggaagcctggtgtgctgaagtccatggggtcccaaagagtcggacgtgactaagtgactgaaaataacaacatcaacaatctaaaacaagaaggaagaaaacaaagccttagatgtgcttgggaggaggagctgacaacttgatctagatcgacatctagttaaaaactggaagaatattagggacaattacagagaaaaggagaaacaattaactttaggaaaagataatgtacaagaaaggaaatgtaactgtagcacacttgttgactcagtacagtatttgtgtagctataataacagaaaataacaattatgagataatattgacaggaagaagggatgggaagcaaggatgaatggggctgaggatgaggcagcaatgttaagtctcagccaccgtgtatatgtgtgtgtgttctgtgtgtgcg

SEQ ID NO: 48006 - DNA, 806 bp, Bovine  19866880433046
  misc_feature (1)..(1): n is a, c, g, or t
ntagatgtcatctcatcccagtagatggcagataaggaggtttgtactttgcagcagtatcatgccaagctatataggagcctgaggcaaaagcaaaaaatcagttgtcctggggctacctttattttaaattttgatattttattcatcatggattttttggtactacttttggtttaaatattttcttgaaacattatctctattgttcctccttacatttggcacccaaaacaaaagggtgtgaggatacataaaagggtcttggggtctcgccctagtcctggccatgcatttcagagtccagccctggctatctgcatgaattctgccaagttcatctgcctttctggaccttagagcacctgagatgtgtcaccagatgatgtttcctcgcttcgcattattatctgacagttgagaaagccagtgccatgtacgatgcctgaagagctggcattaaacaacaccagagcagtcttgctgttgtcaaaaatgccagccccaacctgcatggggcaggctcataacagagctggtgccatcatccttgaggtgggagccacttcgacacgtcaaagagctccaaacggggtaaataatcagctgtgaaccctttaggaggagttttcttcttttttaaaaggaccgtgcacaaaactacgaaaacctgcagatatttaataagaaccagcatctgtgctttgcctgcttccaattacacagcattatcctagtgccagactggggctgcttacacgcactgatgcttaaagcacagccatagcaaaagctggactgacatt

SEQ ID NO: 48007 - DNA, 1733 bp, Bovine  19866880460880
  misc_feature (1)..(1): n is a, c, g, or t
natataaacatttatgagccatggggcttccttcataactcagttggtaaagagtctgcctgcagtgcaggaaacccaggtttgatccctgggttgggaagatgccctggagaaggaaatggcaacccacttcaatattcttgcatggagaattccatggacagaggagcctggctggctacagtccatggggtcaaaagaatcggacatggcttagtgactaaaccaccagcaaacatttatgggctgaatgtagaaccctagtcagataggtttgtcatgaaaatgagaatagacaaggaaaagacaaaacaagttgaatggaagtttcagccccattatatacttacaatcattgagaggaatcttaattttctttgttttactttcttctccaaagaagcagaagtgctgaaagcagaactttgcagaataaagtttcttattttcttacaacttacttgcatagtactttaaatggatctagatatctgttattgtcctaagctcttcctccgggtttaacttattaaactgtaatggttttatttttttagtattttatgtgttcttgtttattcctgtaagaattttttgaaggacacttgtctttcatcagaggaaaaaaatggagtatagtttaatttttggaatgttgtttttcgtgattctgaccatggccatgaaatgcaacagcccagagagaaggcagcaatcaaacagtatttggagggatgtgatactctttcagtagaggaattgtcaaataattcataaatataggcaaatttgaccttatttactttttatagttgcaccatttaattgaatagcagaccttttctgacttgcataagccttaggagaaagttaaatatttaataaaacttggcttttcctaaaagatttttttttactgtctcctaacaacttgaaatgcaatttagaatgaactctttagtagctgaattgtttctgaaggtttggtaaaacaaagtatttatcaggaagacagaggaatagatgttcagccttctctccactccaccctgtcgatctgctggacacttcccgatgaatgttctattgaaaaactgaatatgtaaaatcctgaacttctttttcctttccttgctttatcctttcatttcttctttccatccctccctcctttcattctacagttaccaaatctctgtatgtatcatccacatgaagacctgtgcctgtaactcagcttctctacaggaaacagtgtctgtcaactaaaacaatttcacagttaaaaagttgagaattatgttttattcagtggacaaatctgaggtcttaagcctgggacactcctggtggctcagatggtaaagaatctgcctgcaatgcaggagacctgggttgggaagatcccctggagaacgtttgatccctgggttgggaagatcccatggagaatggttatccactccagtattgttgcctggataattccatggacaaaggagcctgatgggctataagccatggtgtcacaaagagtcagacacaactgagtgactaacactttcagcttttaagcctggaacacagcatctcagataactcttgagactgctccaaaaagacaaggttgggacatccaggatatgtaggaatttttgcaacaaagaccagagagttggaacatccaaagtataagagtaatgttaattacagcaaagtaatagctcaagata

SEQ ID NO: 48008 - DNA, 1413 bp, Bovine  19866880505986
  misc_feature (1)..(1): n is a, c, g, or t
ntttctggagaataatactgtgcactaattatgtgggaatcctgagcaatagaacatactgcagacaaggcaattgcaaagtgtacattgagtaatcagacggtaacaagagatgccagtgtaaatgaggaagaaggcagaagatgcaggaaatggatgagaaatcctaagagaaaaaatcctaacagatgatgacagaatgtaacaaatttacaattttgttaaggtgcaccacagaaaactgctaccagaaataaaataccaagatgaattacttgtaaaacaggagacggcactgcccaatctactgctagtcaaatgactctagtcgaatccaatgccctgataccattccgttctctgatggaagaagaaacaaaacagagaaaaaaggaaagggggaaaaagccgcgtttatgggcacacactccccaatactatataagcaaatccaaccctcctccctttctgtttacagcatcaccacagtatataagaaaacatgtctacttacagggacttttaaagcttctatcacaacatgccaaaggtatgctgggtaactaagcatgtgactgacgcattctgtggacctgaaaattgcctgtagctctaacctaaacaacccctttctataccctctctctctaggtttccctctaaagctttcagaataaattctggtttcttttgcaatacaacagagaatacaattggtaacaatgagatactccctaatggtgaaacaagcatgacattcctgacctacctcataatttccttaaagttgttttcagattcagtcacacagacaaaaaccaaaatagatccctagaaaaatatttaattctccacaaacttcctccccaatcttcctaaattagtgtttgtcaaatgtcttcagaaatctgcaagatattgaagatatgttcattttggcatcatttctatattaacatgccctcaagaaccatatttctctgttacaaattatattgttcatcttaatgcaggcttcggaggtagttcaggatttttatacactttggcttgtacagagtaataaattgtgtttcaaacacaaagacacatcctgaacacagccaagtcactgggataatccatggtttatcactctctacctcaatactttgtccactgaactatgatgtcagaaatctaagcttgatttgtttttaagtacataatccattaactgtttccatatgccataactggttcagttgagaaattatttataaaccagtttattgactctatctggcaaagaggacacacctgttataaaatgtgattacttcagaaagctaacaattgtggaatcacattttcataattaatcagtctaaacgaattagactattcatatactttcagaaagccctttaatcc

SEQ ID NO: 48009 - DNA, 2516 bp, Bovine  19866880568187
  misc_feature (1)..(1): n is a, c, g, or t
nctttgtttgtgaaccgtacagggtgggcagtgcttctcgctcacttccaactctgctgagttttcttggtgaacacctcagcatctgctcaatgaagagggcaaagaaaatagcagataagttgcaaggaatcagacacaaccgagtgactcagcacagcacagctcagcaagtgaataatagatgaaatcaaattagatcaccggccatcaccagatggcaagagcacagtcatgggactcactccagggtccttaccacagctctgccctcgaccagccgggtgggcgatgagttccaagctgggaggctgtatcacgacatggagctgagcgctgggatggctggtgactcgctctgcacggatgttagtttctgttcagtttgacacatggttctgttttatttaggccctctggctttgctttaatgacttgagagaaacagcagattttcattcctttttgcaaatattttaacacttcaagattgtcattcgcacagttgttacatcagtaacaaagcaagcctgagcggggctggagcaggggtgggttccagggaaatagcctgtctgtttcttctttgcctcatctgccatgtatatttcagatgtaaactggagatggaaatgtttccaagttttcttcttccagaagtattgatctcttgggcagaacataaagtcttcaccccttaagctttatcaccatgctttctctaccttatcaattcaaatggatttagcatgcattatcagtagttagatcttgactttctttctacttctttctcctttaaagcaatctatctagttgcaaatgtcttgttagaagagattatatgattgttttttgggtttgcagtctgtttgaagaactggcagcatacttggggatttaaaatgatgtcttaacaggaaacagcttctctgttgaaaacctgatttctcacataactgctttttctttcttcacaaaaatttttctacatttgatcacattgctaccaggatatttggttttatttaaatgcagcaacacaaacatcactaatctggtttacgcaaattcatttgtgcactccctgtcaacaatggctttatcagccatcagaatctaattgaaatggtagtgctgcatgtagtcatccaataattagaaaataaacagattgaaaattcagaggcatttgaacaaaagccatcaaagtaacataaataggagaaaaggtaattaaagagctttctctcttcagctttcagcattacaggtttatttaaatacagctgtagcaagagacctgagctggattgattggacaaatttgttggctaatgctgttctgaaatatgccccattaaaaatgtggcaaagaaattaaaaaagcatgataatcatggcacctcaaagcacactttattccccctctgagaacctccatggcaatgcatacatgtgacagttaataatagatgaccaaaggcactgccctttatcatctaaataccaaatcttcagagacctggggaaaaagagcagtctggtccctgactataaaattgtgacgtcagaaggttgctctacacaggctacaaacctccacttgggcttttctcctgctggagaaaaggaagctctctgactatcagaggcagtaatgcatgaatgcaagcagtttagcaataagcaattcaaacttctgaaagagaggtaacaaagcccaaagaataagccctggtcatgaatgtatatatagtcccggggctggttggcatagcaactatttctgagaacctggtgctgcttaagtaaacagctgaagcacagagcatgcctcagcgaaagctgggtccatctgtagtattagcatgcaaggatcagaacaggaacattttctcccgcgaatcaatgatattttggtatttcctcctaataactctactattctcagtgtctcatggcaaggctgtagttctctttgttttttcatacaggcatttcgttgaagagtctcagtataggtgaatctgactgaattggtttgggagtaactaaaagagtctggggcgcccctggtggctcagatggcaaagaaaccacctgcaatgcaggagactccaggtttgatcctgattcaggaggattctctggggaagggaatcttcagtattcttgccttgagaattttgtggacagaggaccctggcgagctacagtccattgggtcgcagagagtcatacacaactgagtgactaacacacactcactgaaaattgtccaagatcagcatctttcacctgttatttgctaagagcttccaaagaaatcaaatcaatgattcaacagcaactcatgatgatgatccaacaaaaaccatatctgctgaaggttttactgcaaagttcagcacaccaggtaattgcaaaggttttggaatcagaccaacttaggtatagtttctggctccactatgaaaaatgatgtgacattgggcatatcacggtcttttagg

SEQ ID NO: 48010 - DNA, 2458 bp, Bovine  19866880580131
  misc_feature (1)..(1): n is a, c, g, or t
ncaaggagatccaacccagtccattctgaagatcaggcctgggatttctttggaaggaatgatgctaaagctgcaactccagtactttggccacctcatgtgaagagttgactcattggaaaagactctgatgctgggagggattgggggcaggaagagaaagggatgacagaagatgagatggctgggtggcatcactgacttgatggacgtgagtctgagtgaactccggtagttggtgatagacagggaagcctggcatgctgtgattcatggggtcgcaaagagtaggacacgactgagcgactgatctgatctgatctttatgcttttaatttcttttagatttaccaaggaataattgacaaacagaatttatatataagtaaggtataaatttgatgttttgatatatatatggcagaagtttgagctgtgactccctcggcggtgaaaggaggaagcattgtgagcggtgtcgctctgggcagtgagtcagcagagggaaggggccagcagcttcactccccttgttcctgtctcctgattcttaaaggagttacaacggcccagtcaggtctcaggttgacagttccaacaagtatttctcaatatgattcataacaaaacttaagggttgaaggatcttgtgtaaaacatacacacagaggtgatgggccaggaatgaagagaccttacctcttgttctgatattcatcattcagtttcctcatgtgcaagacacgaggacagttttgaaaggcttcttacattaaaattgtataattctgtcaaaaccaccgatgtaaacatttccgtgttccgttgaactatcatgcttcattaccctattgttatttaactcccatttcaaaattactgggtttccctgatagctcagttggtaaagaatccgcctgtaatgcaggagacctgggttcgatccctgggttgggaagatcccctggagaagggcaaggctacccactccagtattctggcccggagaatttcatggcctgtatagtccatggggtcgccaagagtcggacacgactgagcgactttcacttcacttcaaaattactatgttaatatttatctgaagatatatttatctgtcaaagatatacatgtatatgtgtgtatttatgtatatttacacatactatatgtaatataattttaccattattaggaaatattaagaagtattggggcatatgccattatcagggcttccctggcagctcagaggtaaagaatctgcatgccataggacatttgggtaatcccaggtttgggaagattccctggagagtgcatggaaacccatgtattcttgcctggagactcccacggacagaggactctggtgggctatagtccatggagtcccacagagtcaggacacagctgaagtgatctcacatgaatgcaagcaaagcacattttaaaactgataatggtatgcataaatgcttaattctgtgtgagtgaatgctgtagacagacaagtctatttgctgaactggagggcctgtgtgttaaggggaggtgggggtcggggacagtaagattttggcaggaaaggcactccaggggccactttgccccttaaatctttgctctccaatgaattgaagactccttagaagggaagttcttccttggggaagagttacacaccttactgcaatgcttatgtccatacctagaggagctctattagggagcagacggagagagaaggaggtagggagacagaagggtggaggtgcgcgcagaaggcccaagcttttagtctgtctgccttcagctaccccagtgctgtatccggctttcaaggattcccatttgaggtgaccaccccagaaaaacctagaatgaattacctctattatcattctctcctaacattagatataaattgccacagataaaaattactttacagcgaaagtactcttaaggaagaagttcattgtctaacaaaaataaacaatttcatctgaatctgaataaaagcagtaatcttcaacaaagagcttctttcaatactaaactcatttcacttgttttaaagtatctaacctcagcaatatgtcttttgtgctcattaaaagaaaagctttgatgtactttttgtttccagatatgttacatcttagttttgctaattttggtttaaaaaagaaaaaaaaacctctcacaaattgtgttttttttttccttcggattctaacaggtaattcattttgttttgtatttttgttaatgcttggtggatattctaataagcctcaatgcatcagatgtaatggtaaattttgacttaggtattcgcttctgattatttccctactgatcattccaccacttacaagagcacagcaattcacacgtattaagaagaaaatagaatacaccagaatatttctctttatgaaatatccaa

SEQ ID NO: 48011 - DNA, 1603 bp, Bovine  19866880605386
  misc_feature (1)..(1): n is a, c, g, or t
ntgtgtttattaagaatgcaagctcttttctttgcataattcattttctgtagctactcttcctaatcaggtcgttgcattctgtaataagcgtcttaataggaatgcatgactataaaaataggctgaaattcaatacacagaaacagtgagcttcagaccagctagcagaaagatttattttagcaatatagctctgtggaggctgctgcctggtactttttatccagcttacaacattttatctccttatgttggtcagagttagtcctaagagtaggattcatctttaggaaatcttgagtgtcaataaactatactggccttcctgaaggctccagccccatacattctgaggagtaaggcacaccatcccagtaacatattggttctttccgactctacactcgacctgcctcttcagtcaatttgtccgtccctctcctagtaacagtagagtcatagcatttgcagggggcaggtcacagagctgtaagcagggccattaaaacacaataatctttgggaatcgtccacgttcacagcaccttcccctccctgccactgcttttctgaatgcaaatacagctaaacagaaccctatggagcatcccccaagttcccttccccatatcctctgctttagctcctctctgaagtacatagataatagtatctgatgcgcaaatcctgaactgttttcagttcagttcagttcagtcactcagtcgtgtccaactctttgcgaccccatgaactgcagcacgccaggcctccttgtccatcatcaactcccggagtccacccaaacccatgtccattgagttggtgatgccatccaaccatctcatcctctgtcgtccccttctcctcctgccctcaatccttttccagaatcagggtcttttcaaatgagtcagctcttcgcatcaggtggccaaagtattggagtttcagcttcaacatcagtccttccaatgaactgttttacaaatgctaaaatccccaccaaatggaagaaattaactactctactgatgaccatgagcacatggccccaggtcttctggtgcctgaggactgataatgataatccctgtgacatcatcatcaaacagtcagagaattgtgtatgagccgatcacatagcctgggatgtcctcccctcatcttgcctttaaaaatgctttgctgaaacccatcgtggagtctgggctctttgagcactagttgtcttgaactccttgtgtggagccttaaacactgcaatttcctttaccataaaccaggatcaacagatggactatactgtgtgccagtgagtggaccctcatttggttgggtaacactaatagccagttttatggtgcctttcacaaaattcccttgccctcagtgagggattagagaattttttgagaaataactctttcagataaagagatctccagatactgacatttctcttttaccaaaagccttgttttcttcagaactaaacatcatccagtttagctcatgggtgggagaagtcatgccagtgtgcaccatgctccactgatggacaagtcatactcaggaacactgaacttctaaccagcaa

SEQ ID NO: 48012 - DNA, 3490 bp, Bovine  19866880613222
  misc_feature (1)..(1): n is a, c, g, or t
nccaaggagaccatacagccaataggacagtatggaggccacatggttaaagctgagttagccagaggagagtggtggaaaatgaggcacaaaacatcggggccgtgttacatatgcagaaacttgtcacctatagcaaagacttaggctcctcctccaaggtggaagccagaataaggttacagggagagacaaagcattctccaccttatgtcactgcctgcttacacgtgtgctcagtcgtgcctgactctttgcaaccccgtggactgtggcccaccagctcctctgtccaccgcatttcccagacaggaacactagagtgggttgccatttccttatgtcactagctgctatgttaagaacagactgcagtgaagatgagttgacatagatatcacttcttagtattatcaaattatttcacaacattttacatttttacatgcctgtaagatagaacataaacaatacaatgtaccttttgctaacacatgaaaaagtggttagaccaatatacatcacacttgaaaattcaaactttttgagaaactcacgagagttagcaactcaatgaaatagcatattgttctgatcatgctgtgtttttattagttttcataaattaaagaattgcagagttatttaacatagctgacattctactaattccaggggaatatgggtaacaaacgcttctaagagaatcactccgagttcaagtccacttaccttcccactctacagagaacacaatcggtagtagatgagtggtttttcccattaatgacaggatttggtattactattttgatgtagatttgaactaaatgaactctatcccttgaataaacgagagttactgtatcacagaatatgtctgcacacttctggcattttaacattatcttagttcataatataggcactatacattttttactatatcagaaatgattccattttccttcccaagagcaagacctacaggcaaaagtagttttttctttcttttcacagatacatattccatgaccactgttctcatgaccaccagcttctttccaaaagtccctgatgaattttatcccacaaatgccaaacagccctctcaccctgcctcatgcctagcttttgaaacaaactgcaatagtgtcatatcaaaaaatcaccttgtacaattccctagacccgggattgcagttttcctcagagaggtggtaaccagcagcaaaaacaaataaacccttgcagatggtgagtccctctccagggagaagactgagataaacagtcaggtttgcatattttgttgtgccctcatggcctcctgtgttacatttctgattcacaccctgggtgatctcatctagttccagagctttaaattccacaagtatgtgactagctcccgaatttatgccttcagcctgacttccagcttacatcccaactgctttctgtataggtccactcacacagatgtttcaggtgatcttccctccctgagtctgcttctctctcttaagtcttctcctattctctggaaataggatctcctatctatctaattgtacagggcaagcaccttggggtcatcctggactcttcttattccctaaatccaacgtattggataccctggcttccttaattttgaaatattatatagcccttcgtaccatggacactgccatcaagccaccaccctttctcaccttcatcattgttctagcatgttaagtggccattggcttcaatttatgcccctaccccaccacctgttcctcacacagctgacagaataatcaacctgacctaaacctaaagcacagaccagataacttcacttctccatataaagatctccagtgatttcctagcatgacggccatgggccccacaccctgcaggcacggtcctggggcctccctctcctttctcctgctgcccgcccctccactcgctctgcatcagccaggcttccctgtgccaagccccactgaccccaaagcccggtgctccgcggcctctgtctgtgggcagtcccccgagccagtcactctggtgcttgctcagagggcagaggccctccccaggcatttgatcacacacatgtacccgcctcgtaccaccatgggctgaggagtactgagggtcacctgacccagagctttcatttcttatctattgtcactatatgcgactacaatgtaagaccaaggaggagtaagagacgtattccctgcaacaaactcagaatccagaaaaaggccaagcacagaggaggtgtccaataaatatttgtcaaataaatgtacaaatgagtgaatcactgctgaaccaagaggacaggtactgaaatgaaacacatgagatagtggtttcgttaccaatataatctcaaggtctaaattcatccatacaagtctggtaattcagacccactaaccaaaggctagtggacatggagccactttctcagaatcatctaaatgagaactcaaattaatatcagaaatgttcttaaatatactcaatctaccaacagtgaagccatgttaagttcaaccataaaaaaaagtctctaattttctgtatatttcagtatatttgcctaaatcaataaatctgttatacattattttatactaccaaaaatcatgtaaagaaaaggtgtaaatggccttttaagagttttgtcaacatgtacctccaccatgtcatatgtaggcagaattaagatgcaatctgtgagagaaaaaaaatcttcagagaaaatactaggatgggtgaaacagaaatttctcttacctgacaactgatgtttaactacttaaacctacaaaatttctgtaagttttgctaaaaattcaaacggcgttgtgatcattttgacttggaccactgactgagatgaaaagcagaaatcagattataaggaaaatgacagcagcatgacatgtctcaagaatttcaggctacagaccaatgacaactgaaagcaagctaaattaataagctttaaactaggtggaagaaaagccatctgtgctagagagcctatattaagtactggatcctggtagaaacatgtcaagaaggttgcaaagcaaagagacaagaataactgaacaacagctgaatgtttatgatcttaagagaagcagacctttaagatttaaatagctatggacagagttataacagtttattattctaaacaaacatcctcctgggatggtgaaagatctgcaaatgaggttgccaaagtgctgtctagagcatactgaaatgtgaaggacctgggacaaaggctgcaactgaagacaaacagggctcctatcttccaggaggagagactggagagatttatgtcactgacagacaagactgaagaagaatactaaggagaaaaggaaacagtaattacaagaagccaaaatggattctaaaagaagaaaccgataattctgtaaacatgaacgat

SEQ ID NO: 48013 - DNA, 1565 bp, Bovine  19866880637769
  misc_feature (1)..(1): n is a, c, g, or t
ncatgttccaaggtcaggatgttttctgggagctagaaaagacagacttggaaagcactaccctcatttttatcttattgaaatatgtcacctggacatggcagaaagaagaaaaattaccattgaaacagttagtttcctgctttttgagactgaaaagatgattgcacatgattaggtcatagaagagtgactgataaatggtcatatattcaaatattggtcatatattcagcttttctggaataattccaagaaatcagcctgttcctgctctccatcttgaccatgtttttactggacgtgagagggtcaaagccagagccggccttggattttagggatgtcaacaggctgctggctctccgccctggagcgttctcctgctctctgcttgttatgcaggtcaaacctgagagcccttctgtgagctggctgcaggccttccatctgtctgaagctcagtggaacttcaggtatcacaataggagattcacatgcactgacaggatttttatttcacctgctgttgatggttgataaaggagacaaaagtggaagtgccatatactcaggctattccttttctatccaggattcactgaataaatatttattgaccacctactaagtgccagacgcgtcctctccttggtgctaaggatgctgtatggaatgcaaatggacacaattctgactagtacagttggggagggatagaaagacagtaattaaataatttttgaagtaaatgtagcatttcagctataatcagtgttaaggagaaaaagtgtattatgttttgagaacaggtgagatgttcttttctcacttggtgaggttagggaggattcttagaggaagtgacatctgagttgagatgcgactgatgggtaggaactcactaggtgtagagtgggaggaatgggttaaggccctgagcagaaaggaaccaaaggatggttgtgggcttgcattcagagaatgtggtgaagtgtgggtcaagatgagccctcagaagggaaaaaaaaaagaaaaaaaaaaccctttaccattcttttagagaggagttataagttaatatttatgaaagatcactcactgcagtatagagaatagacccaaggtgggaaaaatgattattgggtaataacagttaagggataatttcagtggcccagctaatcaataaaaataggctggagtaggactgtggcagtagagaactcacactgcattttggagacagactagtaggacgtactgatggattaatgtgcctcaggcagagggaaagtgaggagcgacagatgatttccggaacactgcttcgcaactgtggcgatggtggtggcagttagtgttcaatcagaaggctaaaggggaaaaccattttggtctgttagggccccagattaatacaataatgtttttttttttcatttcatataaagttcagaactcctaaatcattatttttagttttttaaaatttgtaaacaaggtatttgtgaaaagtgtatttgggatctttgaaattgtcatttaaattatcatgactacat

SEQ ID NO: 48014 - DNA, 1064 bp, Bovine  19866880757375
  misc_feature (1)..(1): n is a, c, g, or t
nttactttatgtaaaatgacataaatcagaaattaagtttgagaataagtacagtttttgacaacagtacattacaattagcattaaatgtattgactggtctatgacacggtgctgtttaccaaagcaatcttgtcgtgtctgctcttctgcttattcaggtggaagtttatgacattttctatgctaagtatcttaccttatatctctttttctttcacgttggtaaatagaaataagttttcttcttcaaagatacagaacagaaagggatcactagaaagccattaatatgtctttcaagattaacagatgttaataaaatgaagtaataaaattgctaattagatttggaaggtagaactgtggcaaggaatattttttagagagtttaaaaaaattacttttcttattcaaaggaggtagattagaatacaaccctggtgttgggatctggaatggcctattttctttggaaggcctctatttgctgatttattgaatcctattttcattgcttccttgggacagaatactcagttttcttagattttattctctgttgcaaatgacaaggcttgaaattatttgatttcaattgatgcctttttcctctggaaagctgcagaaaaggcagcaggcagcaactatttatgcatttatttcattattagtgcccatataccttccaactcttaactgctgcaaataagcatttcatatttgccaaccttcacaatgatactttggtcactatcaactactactgccttttcataggtgtgtgtaatccacacatatatgtctttgcagaaaagaatattctgtatatgctattggaagaattttgaataaaagtggctataactttgatttttcagatagaatgcaaggaaatacaattttagttttggcctattgtcaacataatttgaggtctagaaaattataagcctttcattaatgaaccagagaaggcaatgacaaccctctctagtactcttgcctggaaaatcccatggatggaggagcctggtgggctgcagtccatggggtcactaaga

SEQ ID NO: 48015 - DNA, 1069 bp, Bovine  19866880785349
  misc_feature (1)..(1): n is a, c, g, or t
ntgggtagcctttcccttctctaagggatcgaacccaggtctctcacattgcaggcggattctttaccagctgagccacaagggaagcccaagaatactggagtgggtagcctatcccttctccagggcatcttcccgacccaggaatcaaaccgggggtctcctgcattgcaggtggattcgttaccaactgagctatcagggaagccctgtcgtttataagaagaataatctgagaaacagattagcttttatgctgttatatgtttttgagctttttactaacatgaacagattagatctgtagggtaccttgtgtatgtgaagaggcagggtgattttcttctgtaaatcaaggaaaagaagaaacaaaggaagacgggctttcactataaatgttaacagtgatacttgaaagtactactcagaattgtggaggcaaataattgtgtaattagctggagggatagaaaaacaaattgcttcattttaaaggctggaacagctggtggttttgacagcactcccccaacattttttggtaaattcccaatgaagttttgttgtgtttttctttctacataaacataatcaacacaataaagaagaaaatgaaccgatgactaagagcatcagcacatttttttcttcagatgtgccagatctttatccttcactgaaccatcaaatagagactggcaaattagaacatccatgtttatttaatcagctctctccaccctgactttggactccacctccccaattccaaaaaataaaacttgagggtgccgaataaaaagaagtgtccttatttgacatagtgtaactttttagcaagaaaatatacaaaattttatataaaatactttaaatgccatgttttaaaatgtaaattaaacatttaaaaggaattcaatttgcatgtacctatctaaccttagaaatagcataaagcatcaaaaccagtatatttggaaatggcattctagcactttacaggcattgagtccgcctatctttagtgtgtggtgggcaaactacgtcagaataagtgcgcccacatgac

SEQ ID NO: 48016 - DNA, 3070 bp, Bovine  19866880851212
  misc_feature (1)..(1): n is a, c, g, or t
nctggatggcatcactgactcgatagtatatgaatttgagtgaactccgggagttggtgatggacagggaggcctggcatgctgtgattcatggggtcacaaagagtcggacacaactgaacaactgaactcaactgaaattagagtgagttaggtttatttatgtgcatatataaataatttttttaactctaagattatttgttcttgttcttgacctggtttggttgtccttaactgaaaatctaagtaatacaatagtattacagtacagtctgaactctggagataccattttgaagctgataggattatttctagcagacaataaaatattcttacttttcatacttactactaataacgaataacagcttcttactactaataaggacttccatggtggttcagacagtaaataatctgctcacagtgcaggagacctaggttcgatcccggtattgtgaagatcccctggagcaggaattgcgatccactctagtattcttgcctggagaatcccacgtacagaaggtaaagtccatagtgtcaccaacactttcactttcactactaataaagagtttacttttttaaatcctttataaaatgataataaatgtgtgctttagtaaagggatataatttctgatcagcttgtttattatgtatgtgttcagacatcttataccaaaacccatagccagtgtgctcagcgagagttcatttctctctctttacgccaacttcaccacatccccagataataatttaagcagtctgagtaaattgaatatcattatgcttactgtacgtaccactaattttgttttcagttagactttttccattttagaatttgtgcttactgttgttgtgggaaaaggaaactgaagttttggaattactgaattactaataatagttgtatagcacaacacagttgaggtaaagagaatgttatagacttggttttgaatttcagctttactgcttatatgctggcagttactgagtctctttgcaccttggtttcatctaatgccagtgaggagaatttatgcccaccttataggatgactgtgaaaactgaatttaacaagccatgcacaacactgtgtactcattaaaagttaactgttattattgatgataatagctggttccatgctgacaggagtgttggttgagaaggggaaatatttgagttttgaaaattttagcaaagatgaaaggaagattgtcctctgccaaattctagcaactaggcctcactgtcccatgctgcctgcacatcctgcccttcctggctcgttaagtgctcttggatcagatccgcagagtggtttacatgactgtgagtggcactgatccaattatgtagctcgcctgcagagccatttagtggtagccaaggtagcttatttctatgtcatttagattaatttttccatttaacttgtattactaccaaacccattgcaagatatttccagttttctgctttcaaaatttacttttaaaagcagtgataaatagccttctgtttgattttaaatggttttctatagctacacaattttagcttcacataaaaattgcttagatgttgttgctccttcctccataaaattgcaaacacctagggcttggttgaatatccaggtgtacggaagctcaatgttaatttttcaaaggttgtatatatttctgatatagcaactgattgcggaaaaaatgggtttgtatattgttgcagcaatataagtaacagctgcctcttaaaataggaaatagaaaaaccaagttaagaggcatctaatgtgatcactaattattttaccggagttttcaaagaatgtatcaataatgggtttttgtttcaggctatttgcatccagaaccttggcttccaaaattaagaaatcagctcttattaattacacttaaatatgacggcggcagagatctttgtgctgtgaagcgagagcctgatctctggctgtttggatctgtacttggtgtaatgtggtgcactgttctcagccaaagccctgtgttgtctgggcaactcccgttgccatagcaatgaaattcttttgcgggagcagggcgaatgctaattgtagccatttgttgttccttctgtcgatcccttaactagcacagttgtagagcagccagagattctgggtgaacagcacggagtgcccccaaaagcattactgctgaaggcaaccggctgctctgcttaaaaaatcactggagcagccgccggtgcaggcagtgccgctgtgtgggcagaagcacagcgtggctccggcctgacaactgttgagctgggcctgggagggaaagagaaggctgtttgaaacctgttgagaagttgctgatgacatggagattaatttgacatcagtccctcggaggtaggtaggcatatcataacaactgtttatccaggctaaaagcagtattggaatgcccagaggctgtgggagacagatcagtggttcttcctttcatttccatccgaaactgcattactgtggcctaaggtaaaatgattcatttggttggaaccaaccaattgtaattcacataggtattagattcagttaatattggtaactccccccctctctttataatcccttatttttagagactcatgatttagctgccagaaatgagttgaaactgaaaaacatctcaacataaatgagaacagactccttttgaaaaataaatgaccaagtaatgtctaccaattatgtggtctatcatgctactttaattcaagaaaatactattaacctagctcataattcattgtaaggtctaattgctataggtacttgggtaagaaaaaaaatattataatggtaagagaaaacatgtgaggcacaattatactattacattacattttccctctagaagtgtactgacccataaagattggtcaagttcatgagacttttaaaaactagcttctagtgtaagcatactaataaatttcaaggtagtttttataaggtataaatttaatgtatctgcctcttaatat

SEQ ID NO: 48017 - DNA, 1974 bp, Bovine  19866880902179
  misc_feature (1)..(1): n is a, c, g, or t
ntgctttagaaagatcctgtggctgccgacagaatgcatgaattagaagagaggagacagaagaaaaattatgttaacagcaaggaatggtcaatgtggcagtttaaacaaaggggagttagaaagcaagggtttggcagtgtttttctagcactgtcagggaaggagcagtcaatctgcggttggaacactgcggcgagtgcagaggaagtatataatggtggctacgggcctgggtctggaggcagacagacctggctttaacctcagatccatcactctgtagctcatgagatctagtacaagttaccaattctaactggacaagttcctttcctgtaaagtaggaataaaacctgtgagcatgtgaactgtttaggtctctgcctattaggtctggatgctaaataagtattagttttaacgtgacataattaggtgtgccatgttatagccgtgaacccttctagcaagttaccccatgactgggatgtactacctacaccccatagtctgcacctcttttaatgtgattctctgcaagtcagcagcttgttcattactaactcgacttcctacatacctgactcattagtatcctggctgccagtaaaagcatatttcccgatgaatattaataagataataccctgtctacatttagactcctgagtttggttagctggagtcctcgctgggaaacaccagactcagaggggcgcggcctctaaggctgtgctgagccgccccgggggagtggcctccggctgacctggacgcggcccccgctgtgcacgtggactccccgctgctgtgatcaaccactcttccacagggtaactcttccattgctgcaaatgtcttatttatcttacccccttccctccctcccacctcccgttgaagatggatatccacatagaataagaaatcaccagggctgtttcacagtttcgcgcttcaaatgggtcaggagtgatgcccgccgaggcatttgatgtgtttttcttttcatctgtctttgggggaaaggtctgtatgttatagatttaacatttttagaaatttaataggctcatttagagataaatattttaaacgggcccacccatgagttgctttaactataccttattgcggcattatcacagaggcttcaaacctcaggggcccagaaaccttttaacactctgtttagtaaacgataaacttggttgatgatctgagttcactctcccttagtgcagatcaggctgccgaggcgagtgatacttgagtcatttgaatgtcagtctaaaagcacgaaggtctctgccacacaccatcagcaccccagctcatttacgcttgtgattggcttacttcacagcccagggccttccccgagctgctgtcattctgaccccgaggctgcccttcacagcctcctgactccaatccccacatcctctttcaagccgacgcagagcagaagttgaccttgttccatcaactacttacccacacagacccaattaatctctggttgccagtcagtctacctcactcccctccttgaatactgtagaatctccagaagggatgcttgggctgcgtttgcctccacatgggatgagctgtggctgaaacagatgctgtctatggaaggatttgagggccctggagaccaaaggcctcttcttgtggagtgttagggtgtgggaacctccccgactcctttcctttgctcctcagggttgctttccaaggataagaaattcctgggtaattaatcaattgcttctaacccaggagtctgccctcggacaaattccgccaaaaataaggggatatggatgatcatgggcaccaagaaggcattttgcatgtctcaagagggatgagggtgctgggtgcctaagcatagtgagtgtcccggtgagttcaaccacggccggattggcttcagtcggggacacgaaaacataaaccagt

SEQ ID NO: 48018 - DNA, 675 bp, Bovine  19866880902252
  misc_feature (1)..(1): n is a, c, g, or t
ngttctggtctttgcagtgtttccttgttgtgctacgctctgttctacttctgaaggctgtttctgcaatgctttggtgcacatggttttgcctgagggtgtgtgatgggatctgctttagaatgtgctcacctggtgtattaactgtgataaacccctggcaccaagcaggcaaaagccttcctggtctacaaaactttctgtacctctagccctaagtttatcagacactgtatttggcgcaacaaaggcaatgtctaaaaatatgttaaaagtgaatgccctgttttgtcaatgaaagcattctttacgttattccaatgggaaaaaagatccttgaatttattaaatatcagcaacttttctctgaagagcccaaagtgcttcatcattttcctgtttattctgttagaacctgtgaggacgcctgctggcaaccacctgtgactgtctttctttttcaagtagaacatcgatgtgactagacagcctttgtgatgtcgttcttactgtataagataagaagcgtacacggcatctccaaggcgctaaatccaaccagcagcaatgggcagattacagcttagaaatgctctgtcgtcatagtgtctgaagtgagggtcctgcatgttccttcatttcagaagaaagggtgaaaggctgagcatcacattt

SEQ ID NO: 48019 - DNA, 1843 bp, Bovine  19866880906696
  misc_feature (1)..(1): n is a, c, g, or t
nattgtttttttcgtagcaacttacctctaacacactaggtattttattctttagtttatctcttctctcttctatagaatgtatcctccaagagaagttgagttttgtctattgtttttacacctgcaccttcaggtctcaaaaacggtggaaagaataaaaggatgaatgtgtgatcaatgtattggtaagataagagaagcctgaataataattattcttaaataagataatttgtctttccaagaaatacttaaaaattctaccaccatttagtgggtccttatcatgtgccaaacagggttgtgcattcaaaaatgaacaacagcacagagagtaactatacacaatgtatatacaaatgttgagtcattatgctgtacatctggaactaatataatattgaatgtcaattacacttcaataaaaaaataaaacagcacattttgtacaccaaagacacagactggcaaaaaattttgattataaaaaaagtcctttcttggcatgacaagagagcaacaatgaatttttaaacctatcaggaccctaattaacaataagcccttcaaaagtttctttgaaaactcatattctcagtccctgatagccctcagattctggtcagaacaatctgtcatttttctatttcagggcctgcagcgtctttgttttcaatagtggctggaaaagtttcccctggaaagtagatatggccttaggaaaaaaaaaaccgaatccctttggagcgaggtttgataaaaaaggcaactcataaaatttctgatcaatgagggaagactatgaggtaaatgggatttcttgtggggtttgtaaattggctctgaaggcaatttcaagaaactggaaaattactaagagtgaaatatggctgaagtaagtatttcaggatttcgtttatagtccgacggttaactgtataattttcaaagtatacaatgtgcactggaaagtgagaagtaagaatacatggaagaagagtacgtggaagtacatggaaggttatggcagatgaaattactcagatttcacaaagtcttttctagatttatcatggtgatcatttcacaatgcatgcaaatgtcaaatcacgatgtagtacacctgaaactaacataatattgcatatcaactttatttcaactaaaaaaagaattgattgagaaaaacaaacaaaacatcccacaaaaaacccaaacaaagcctgtatctctaggcttagaatataacacttctctgtgccaatgtcactaagcaggtctctaacaattctattctgtttcacggaactgaacagtgtccatactgtttataggcttcctcactcttgacttccctggtggctcagatgtaaagtgtctgcctacaatgcaggagacccatgttcgatccctgggttgggaagatcctctggagaaggaaatggcaccccactccagtactcttgcctggaaaaccccatggatggaggagcatggtaggctacagtgcatggggttgcaaagagtcggacacgactgagtgacttcacttcacttcactcttgatactgctgttatcacttaagatacatgtatgcatgtagttcttatatcttataattcttagacacatttaaacttaaacttaataatacataaaatgaaaaaaatagtaaagaaatgaagccacctcttcctggcttcagttgaggacttactagatcaaacagagaagaagaaatgagagtcattaagaacacgagtagaatataaactgtggaactgaaagctggctgcaaataatggtgcttaagttacgtcagtatattttcttaatata

SEQ ID NO: 48020 - DNA, 2971 bp, Bovine  19866880942081
  misc_feature (1)..(1): n is a, c, g, or t
nccacacatcatcagtttaagaggttatttcttttgttatctagattcttaaacaagaattcttaaaacaagctttagctgtgaaagatctctgtttactaacatcagtaaacagagtggcccccaagagataacctctcttccttctctgtcttctctctcctattagtcattctcagatgttgtggataatttagttatatgagcacttttggacagtaagagaattatattgctttcttcaaattgaaactaccaacaaaaatgttaatattttatattaataacatattttctatgggaatattttgattgagtagaattgacacatacatataaatgaagtaattatgaatttattattagcagttattgtggaaataatttcagaaaatggttatatccatctgtctgagaaaacagactgtaacacaaagtgaaatcatattcattacatgaaaaaagtgattagaacctactagtagagccagctgaatgtgtttctcccaagctccgagtgtaggttttaatgcattttaaaatgtttctggtctcaaaacattgaacagctgacaatttcccccaagagaacaataccttgaggagaaaggcaattagaatacggattgaccagcaatcagtaatcattacttggtacattaaatgtagcatgttggcacctggttaagtaatttagaaaccagttaaatatctggaaaacagggctttctcaagttaactgtgaaagctcagagaaataaaatggactttctcacagttacaacatatcaggaagaaaagtgctgagtaaggtttgagaaggttaaaattgggtgaacatattagaggtaattggaatcaaagggactgaaggagaaaatctggtatttatagaaagtttaaatcccccacagtttataagttacaagaggagaagatatatttcataccaaggttgaatatttctgtgaaagtagtttaaataaactgtacaatacagaaaaagcttcccataaaattcttaaagtagaagacaagaaatgaagattacttacaaactggtgaggcaagaactacaaaatcccttcactgtgccatccttcccctgcttccctccccacaacaccgtgccttccctccatctccaccatgaaccggtccagctctaaggaggccaccccgtcctctgacccagaccacacagcctcccattcaaggacaagactcctgcgacccactcaccatcttcttacagcatcaacttctatctgtgtccctgggttcttctctttagcaaacaaatgcactttcatcttaaaacaaacaaataacctttcctggacctaaatttttcctcagactaccaattcattcttctccttcctcttatatcaaatttccttgaaagaattatctataatctcagtttccaattcctcttattcccttttgaacctgtttcaatcaggtatttgtccttccctttgcagagtctcctccacaataagaaaaccaatggtcccgtctcagttctcacctaacttgactccctccgtggtagtgagccgtggtgtcactcactcgacctgagatcgccctgcttggcttccaggacatcagaacgcttggtcttcctctcagtgttctgtgtgtctcctcgccgtcctgagcccttaagtgttatcacagcaagtcccagggctcaggccctgagcattacctttctgcccacacttatttttgaggtcagccactcagtctaactgtttaagtgacatgtgtctattgagaattcccaaatttgtaccccacaagcctaacctatatctggaatacattttctgaatattttaaagctgtattgcttttataatctccccccaccccatatactgtctttcttctggacttaaaaaaagggggggactctccttattgtggatagtcaaaaactaaaagttcattgtttcaaaaaatctatattgacatgtatgattttcttaactgctaagtatgacggctataaaaatgaataaatcacctctttccataaactacagataactatgtgagacatatataaacttattaaaatctataaaaaatacacaggatctatgtccatttgaaacaaaatagcaattaaaaatgtttttaaatgggcatatatctttttaaactatttattttaattggaggataccttgggctgcaaggagatcaaaccagtcaatcataaaggaaatcagtcctaatattcattggaaggattgatgctgaagctgaaactccaatactttggccacctgatgtgaagaactgactcactggaaaagaccctgatgctgggagagattgaaggtgggaggagaaggggatgacagagaatgagatggttggatggtatcaccgagtcaatggacatgagtttgagtaaactctggtagctagtgatggacagaaaagcctggcgtgctgtagtccacggggtcacaaagagtcagacatgactgaatgactgaactgaactgaactgaactcagccttagtaaatctgattctctgcttaaattaaccagcaatggttctgccacttgaaagtaaaagtcctgatggataccctgttcaggtaacactaccagtttctaccagtatgaacagtttcctatctgtttaaaacaacctctttcagagtaagtcctcagttgtacagactgatgtcctctttcctttttcttccacaaaaagtgcctaggtctgcatagtccagtagagcagccattagtcacagaggctattgagcacctgaggtatggttattctgagttggagatgtgctgtaagtgtgaaaaacaactgaatttcaaagacttattacaaaaaaagatgtagaatacctccttaacaatgtttcatattaattacatattgaaattatattatgaaaatattaaggttaaatgaaatatat

SEQ ID NO: 48021 - DNA, 986 bp, Bovine  19866880980202
  misc_feature (1)..(1): n is a, c, g, or t
nacagggcactgacccatttgctataaatgctgtgtcttttcaaagctctgtactcaaaagtgctcatactaccttagggagattttcaagggtgtgttaggttatgctgtaatttgtgttataccccagtgagactccagtgaaccagaaaaacctaataatatataaaacacatatataatgtatgtaataatacaataataaaagcttatagtatctcatattttgagttcttactatagtatgtactatatattttataatattttataaatatatttatgcagttataatattgatagttatatattatatataactttatataatattttatacagttactcttagaatattttatacagttatgatattttatacagttaattttcaaagggactccttaagatcagtgtgttaagtatttacattgatgtataaggaaactaagactttgagaaggttagtaacttgctcaagatggtactgctgaaagtggttctgtcgggttataaatggaggcagggaggctccagaactaccagcttctctgtttgctaaagcaaagccgttggagcttccccaaaagcaatagaaagaagatctctgaggaagaatcactaaaatgttcccacaatcaatcatctagtgaagaaacatcgatcaagtgatgaggaaagctgggatttagacaggaggtctataaatgtaagtaatcagccttaggttctaattggaaccctggtgtaaaatttcatcctgcagaaacctactgagttcaaagcatcagtcacatctctggaactcacttccagcttctaggaactactaacgagggaatcacaaataatgcaactgggatctagaggctggaaacaggctgtttgctgtttcaggactctgacctgagagttgatatgtgtaagtcatactcttgaggtctttcactcacttttcagttaaaagaaagttattatgcttgttc

SEQ ID NO: 48022 - DNA, 1293 bp, Bovine  19866881061608
  misc_feature (1)..(1): n is a, c, g, or t
ntatcctttaagatagggaaactcacttatttcctttaattccttatgtgattcttactgtagacttggttctacagtcccacacagttgttgttgttgttttctgaaactaaatgaaaagttggaaattgttgaaaagttgaatgggtctcaaatacagagaatctgctagacctgagagagagagagagagagagagagagagagagagagagagaataaaagccttaaaccacgaactgggctggatccaacatgaccttggcagaatacagatttggatgacaaagaaagttagaaacaaaaaaccatgaccaacccaccatcctgagttaacttttccatcatttcttgagtaacataaaagacacaagaaccgggaaagtcgctgagaaaaaagaaaatataaatgtatgtaatccagcatctaaatgaggaagtatttcagccaacagctgttatgtttcctgagctaagaaggcaaggctaaggctctggctgacagcccttggggaaaaccctctctgctacaggaaatatcagttatggttcagaaagaggcattatttcctttaagtcagtattgatcctccatcacattgtggttctaatgggcactgggttcttagaagtgccaattctcagatgaaatatgaaatagagctcctgccttttgtggtcaatggtgagcctgtggtagtttgacaggaggaagaatagagaactctggtgtcctaaattgactgcatctcttcagtcttcctgaaatttgatctctccttacagttctttaccttttgctcttaactattactttgacctattaagcagctgtttggtttacccagtaataccatttctttggcaggagaaaaaatgacccataaatataattttaaagcactactgggcctacatgatagtaaagtgtgtgacaaatatatgtttttaatctatgcaataactgaagttactgctggccacctgcagcctttacccctgtggttttccttactattgatttactggtgctataaataattgtcttttctttgcttcatttttgctgtttattttactttttgtattgaaaacatataaaaaatgatcaaaaagataaaaaaagataaagatcaaaagggcattttgtatgtatctaaaaatcttttaggagtgtcaagaaattcttatagaaaccaattaagtagaaacaaaaatgataaaaaaagattactcccccaatttaaacaaaagaaagcagagatgacagataaaagccatttctgaataaag

SEQ ID NO: 48023 - DNA, 1743 bp, Bovine  19866881073155
  misc_feature (1)..(1): n is a, c, g, or t
nattttgaaatttgggtccatccttcccctgaacaatattagaaaattatccttatctttcgtcagcccagtccataaaaacacaagtgactctctgtagcataaaacaatgcacttgtaacgaaaatgtaaaaaatgatggaaacagcaaaaagcaattccagtgcaccattattttaaatactctagcccaggaacttctgggaataggtgcctgagtgattcagccaggcctgcattggctctgaaacacattcccactaagctgtaaatgactgatttcagatcagcctttgagctgaaagcaggaagagagagagaacatgaatatgtgggatgcctggatggagcagtagcaaaatagtcaaggcagtagcaacaatagtttaaatctctcactaggagagtttaatcgtgttgacctccttcagttcacacgagtcatttgcttcttatattaccagatgcactgccacctcacttttgtcagtcccctgtaaggattcaggttgaagagcactgtaattagctatttaggctaaaaaagctttctccccaacctaaattccctcttagacaggaatcaggaccctaatgaggaggggtgttgttgttgctctttgttcagttgctcagtcatgtccgactctttgaaaccccattgtcagcagcacgccaggcttccctgtcctacaccatctcctggagcttgctcaaactcatgtccattgagtcggtgatgccatccaaccatctcgtcctctgtcgtccccttctcctctgccttcaatctttcccagcatcagggtcttttctaaagagtcggttcttcccatcaggtagccaaagtattagagtttcagcttcagcatccgtccttccaatgaatattctggactgatttcctttaggatggactggttggatctccttgcagcccaaggaactctcaagagtcttctccaataccacagttcaaaaacatcaatccttcagtgctcagctttctttatagtccaactctaacatccatacatgactactggaaaaaccatagccttgactagatggacccttgttgacatagtaatgtctctgctttttaatatggtgtctaggttggtcatagcttttcttccaagaaacaagggccttttaatttcttggctgaaatttaatttcagtcaccatatgcagtgattttggagccccagaaataaaagtctgtcactgtttccattgcttctccatctatttgccatgaagtgatgggactggatgccatgatctttgttttttgaatgttgagttttaagtcagctttttcactctctttcatcttcatcaagaggctcttgaattcctctttggtttctgctgttaggtggctgtttctaaacattcctgttcaaagtccaagttttaatttttaattgttgttttttgttccagggtatggctctttcatgatttatttatcactcctattgattggcatcttttccctcaattttttatggtcatcaacagtgctacaatgaacatccatgtatatgatgtaatggtgtgtatttaaaactgagtggtctttaaaactgactgctgaaagtaaggaagggaggctgtattctgggcaggaatttcagccacgtaggaaaaatgctactgtttcccagagtcacctttagagaaaaaatgcaggtggtagagtgggaaaaaagttagaggtgagaatttcctttt

SEQ ID NO: 48024 - DNA, 1776 bp, Bovine  19866881159053
  misc_feature (1)..(1): n is a, c, g, or t
nacaaagaggcaagtacgttcaaataaaaggcattattttctataccaacttaagacccagaatatgaaaatgttttctataaaagcacaaacctttactagctttgtccaaatgtcccaaatcatccacaaaattcaggatatcaggatgcttttcttcacatatttccacaagaaaatgaagaagtgttgttttctgatctgctgattttgtgtcctttagctaaacagaaggagagggagaaaaaattacagagaatcaaaaatattttgataatctttttatttaaataacgttaatcctgtttttttacagataagaaataaatcagttctaaaactagttaatgctgtatttgaaaagccaatgtttaaacacttgaaaagctacttatcatatactgttctttggtctaaatcattaatatttcccataaagaaagaataagcttaattcaatctagtatgcaatatttcatggggggaaaatatatggtaaaatgctcaggaaaacaggacaacctaagaatctatacaatattagcacttaaagcagcctcacacacttgttcattttttcatttggcacatatttatagaatgcctgctagatactacaggatttggagattcagcaacaaataagctgttcctcaggaagccgtttagtgtaaaaaaaggaaaatacacatttcttcctatgtgacgaagagtatggtaaaaataatcacacagtgtgcctaggaggacagggtacctgaactgaacagcagtagacaggaagtggtatgtggctgcagaagcaaagcaaaaacctcaaaggcacagtagcagagcatttgaataagaccgaagatgacgaagaaagtggcacttgagaggagtctaagtgactccagaataaaagtgtatgttggggggagggggaagtagagagagtagaaagaaatctgagaaggaaaaagccagaaaattaaaataaaggcagaccattctgcggataaagaattctgatccctaagaaccgggaggtttttaactagatgagagataatcaggcgtacattttagaaagatccttctagcacaatgtggataaaagattagaacaagggtaagcacagagcaggaagaatgatttttaaagctgcagtaataatccaggcagtggaagaaaacagactgcactgcggtaaggcctctggcatgagataaggggacgaggtgggcacggaccggcacgtgacgccattcacagaagctgaacagggagggcgaggagaaaggcctgggcagggcagagggaaaggattgcttcagtttcggacaagggagcttgaagcttctactcaacatctaaatgcagacattgggaaaggatggagatgtatgtaagtgtatattatatttcatttcttaacttatttttcattattgctgactaagtttttcaggcatgtttttcctaatcatttgtaaatatgaaatttaaaaatgatacatacactgtatatctgtttctgtactgcatggacatctatgctttacacaaaaagactgtaagacaggaaagacaattttgctccctaagaaccaactttttatcccttgagggtgataaactgtagagagcatacttagaatttaagattatggcatctggttctatcacttcatggcaaaaagatggcgaaaatgtggtaacagtgtcagatttccttttcttgggttccaaaataaatgcagacaggattgcagccataaaattaaaggatg

SEQ ID NO: 48025 - DNA, 1357 bp, Bovine  19866881229935
  misc_feature (1)..(1): n is a, c, g, or t
ntgcctgctgagaaatccaaatcccagagcagaaatgtattggagaccactggagtgtgtatgaaagggtgaaatgacgggtgatattaccatgaagatgtaccaaatgtcatatggccccatgtaagaaaaaagtgacttatttctgatgtaagtcaaataagttgcatgcatacaatacacagtaagaaggaaaatttaaaaactggggagatgtataatgggagtctcattcagcaaatagtaaaacttctttacttgcttttgtctcaaaatgtatctcccagagttattgaaagcaactgggaataatgattactttgtatttgagtaacaaagagacagtatttggcaaaattgaaattgttatataactacaaggacgtggccatatcctttcaaggtatatgattccaagggaaggaaagagtagtcattgcatattccctggattctgggaaagtagatttcaatatgttcagaaacatggtcagcacgattttgtggcatgaaaattcagagggacagctgtctcaagaagagtgtgataattgaaggcttatcatttagaatagggattggttatactgaacatggctttaaagatgaatgctggaatgggtggatgagagctaaaggaaaacagattttcagctcagtgtaagaaacagcattctaactttcagaactgtccaaagataaaaatgggctagcgtgggaagcagagttattcatcacttgatgtagccaagcataagctggatgacttcttacctaaatgtctagataagagttgagcatcagataggtattaataattggagtaggtgatttagaattcttttcaatactacatgtgccaattactgacaaaaacacttgctatgacaaagctcagctatttatctctacactggataccagtgctctcgtaataagcgtctgtttaaattgcgcacgatagtttcttcccattctcttaatgattactcaaactgtcaattaaaacttctaactgctttctttctccaaagtacacatatttagattctgccatttcagctatacacacttcatctgatggggtgcaacactgaaattgtattggctactgatctcactatagtcacttacggtggcttagtcgttaagttgtgtctgactcttgcaaccccatgaactgtagcccaccaggctccctctgtccatgggatttccctggcaagaatactggagcaggttgtcatttgcttctcaagggatcttcccgacccaataatcaaaccctgggtctcctgcattggcaggtagctactttactgactgagctatgagggaagccctatagtcacttaaa

SEQ ID NO: 48026 - DNA, 1611 bp, Bovine  19866881233338
  misc_feature (1)..(1): n is a, c, g, or t
ntttaagtcaactctgcttagctatcaaattttcacctatcaaatgataaaatgatcactatagaccctattaactttctaatttaatgttcacttaacaaacattcccactttttctatttgttacaagatgcaaagcactgtgatccttatggattgtcctttcaactaaaaaggttaaaaacaaatatctgtgtaacattttacactttacaaagcataaaagctgaaaaccaagttctggtttattaattatgaagaaaataagaaagccttatcaacaccacttaatactgttccatgcagtcatttctttaaaaaaaaaaaaggctgtattttaagtttttggtcaatatatagcatgtgaaacgcaatgttcacaaaaatcaactcaaaggattcctagggaatatatacacagctaattttaattagcatacaaataacaaatgctaaaaattatttcagtcatcatttcaaaatatgtgcaaactgacacaaagagaaagaacatgtgctgatgaatactggcccatgcttatcaacatgaacagctactggatacaataatttgatcatacttaaaattgcagctattagtctaaaaaacataagtacctaatgctgctgtgggtaagtcgcttcagtcgtgtctgattctgtgtgaccccatagacagcagcccactaggctcccctgtccctagaattctccaggcaagaacactggagtgggttgccatttccttctccaatgcatgaaagtgaaaagtcaaagagaagtcgctcagtcgtgtctgactcttcgtgaccccatggactgcagcctaccaggctcctccatccagtattggagtggggtgccatcgtcttctccgaatacacatattaaaaaaaaaaatttaaatgacaccaccactgccaggcacatctttcaaataatgtgtaatataaaatgagagaatgtgaaaatctcgtacaatagaaaaaaatgaaaactgtaaaacaaaactgatgctgaagtgtggtgctgcactgggggtcaacaacactgtgtctattgttgagctgaaacacagaatctgcctttagataccattttaatgttcaatcaaaaactgtcaatcagcaccatttgtttgtaatccctcatcagaacccattgcctcagtctgatcattcacaggaaagcatgcagagagcgtatctgcaaccacttaaccttcatcaaccaacattcatgcacactcattaacattttttttatcccactttcgagcatgacacagctcataccggaataataacttgctgataattgttcaagacaacagctggacaggcagagtgcagaggtgaacactctcatagattatggggtacagtaatgcattacaattagtataaagactcatatgctcattttcaatagttttcaaaaaaagttaagaaaatgtcattagcaaaagcagcaattctagctttaactctgcatagctcactccctgattcttttaacactttacgggtttgaaataaactgatggcaagcatcgaccctagttactgtgccacttcatcaatagaagcaataattctgatgcagcaacat

SEQ ID NO: 48027 - DNA, 708 bp, Bovine  19866881268843
  misc_feature (1)..(1): n is a, c, g, or t
ntttggtaacagagccaagtattaaataggccttaccatgacgtcctattgagtctctataaagtatccttctttttcttagttctgtcctctgtgacagttaagagaagctggccagtgccttcctcattataacctttcatatccttgaaggagaatattaagttttctcattctcctttcatctgtctaaagtcctgattctcttggcgtttcctcataatcatatatccacctgctcatcatttttattgctcttccctgaagcccattttcaatttcccccccttcccactcctgtccccacctctgttcctaagaggatgtgaggggaaggggatgtgcccgcagaaactttttgaatgcgtaactttgacggctactctcctaggtctttcatgtaacttcacaggaactggtaacttttttttctcagtttttattttaaaaattataatgttacatgaaagggtagaaagtattggtcactttcttcatatttattcaaacatagtcaactgcatcctttggtaccaaaaatattcatttatttagtcctcaaatattgattgaacacctagaaagtgccaggcactgtgaagactgtatctggaggatgtggagttcccttttgttcagctgattttatttaggcaggtcctaatcacttgagaatgtggaaaatgtttccacaactctaccaacggt

SEQ ID NO: 48028 - DNA, 1430 bp, Bovine  19866881277708
  misc_feature (1)..(1): n is a, c, g, or t
nggatgaaaagatgattttctagataatctaatccacacactgactatgccatttaggtagaaactgcaccgcctggctgaggtcagcacctgccaccccagtctgtccacaaagcctctgttcacagaagccctcatctaaccaaaattaccctagcttctgagacatcagtcatagttagctgttgtgacccaccaaggtcaaaatcaacctgatctctatttacaaaagctgaataaccagtcattcagaaaacctcatctccatactattttaactctcaatttccagttcttgtctatttttcaatgttcctagccaattcataaagttgctaggctttttaaggggccaataaatgaccttttttcatctgtcaagatgtgagtggaagtttcaactaaaattcacattatcatttactgatcaatctgaactagagacagtggcttggatttaatgctaaatgtctttctgaattcaacttaatttgccatacaacaaactcacccccttcaatgaaatggtgaaggtgaaaatcagattagaattggatgaaaagtgaatagaaggtaaagaggtagagatagaaaataaagcttgatcattcacaaagttgggctcctgagagcaatggagaaatggagcatagttgatgggaatgtcaggtccctgaaagactgcattttaagaaggaaagtagtgaggcatgtttacacgtacgtggaaataagcaagagggaaagaccaaggatgtaggaaagtgtgcgcgtagcaggaaaggtgactgagagtccctgagagtgtgtgggcgaggctcagagccatggtggagagaccgccctccatagtaacaggcgggaacgcaacagacacgaggtaaaggagcttaggtttctagatttagctgtgggcagattgagttttcattctatgttttctattttctgaatgaaaaataaagtgatgtattcagcaaagaatgagagggtgggaagtgtgaaagacagaaggtttgaaattaaaatcttgctggggagcatagttactttagaaacatttctgagtggtggtgaacgtccatccatggcatcagatcagatcagatcagatcagtcgctcagtcgtgtccgactctttgcgaccccgtgaatcccagcacgccaggcctccctgtccatcaccaactcccggagttcactcagactcacgtccattgagtcagtgatgccatccagccatctcattctctgtcgtccccttctcctcttgctcccaacccctcccagcatcagagtcttttccaatgagtcaactctttgcatgaggtgtccaaagtactggagttacagcttcagcatcattccttccaaagaaatcccagggctccttcagaaggacggtggatctccttgcagtccaagggact

SEQ ID NO: 48029 - DNA, 1725 bp, Bovine  19866881314030
  misc_feature (1)..(1): n is a, c, g, or t
nttatataagaaaatattgtaactttaccattggaaaaactgatggacatcacccttagctaaatattacatattattataatatatgtacacatatatttttcctttagtatacatatatatgaagaggaagagagaaaatatgatgaagcaaatgatacaaaatggaaatatttggttaatctaggtaaagagttttttgtatttttgaaactaaacttgtaataaaagcattttaacattccatttacagtaataaaaccataaaatacttaggaacaaatttttaaaaatctgtgggggtctccctggaggctgggctgtgcatatgtggagcaagatttgccatatggcacctgttgcacagtgagagtaggacagagataccaggggtccatcattcctaggagtcattggagttctggccctgccagagtagaggtaactctcactaacatacttggcattcactcaaacaactagtaaggttgtacctcaggaaacatgaccaacatcctaaaggagtacctacactaaactgaccctagcaaaattaaatctacagtcttctctgggaagaatgagtcctaacaagttagaggggccagggaaacacctcccactttccacagaatgtgagactaagccttttaagactataagtaagcctatggagaaacttaaaggtgattacccaatgattgatttgcctgctaaatcaagaaggaacattcttcaaagtagtattatacctcagtagttattatggcattttattatttaagaagttgtagctcagctggtaaagaatctgcttgcaatgcaggagaccctaattaaatttctgggtcaggaagatccactggagaagggaaagtctacccactcattctcgggcttcccttgtggctcagctggtaaagaatctgcctacaaagcaggagacctgggttcgatccctgggttgggaagatcccctggagaagggaaaatatacccactccagcattctagcctagagaattccgtggactgtatagtccatggggtcgcaaagagttggacaggactgaccaactttcactttcacagttaataaaatagaatgtatagtcaaaggaaaaagcagtcaaatcaacaagaggggcctgattttagatttcaaatgtaaagactttaatgtggatattataaatatgtttaacgaactaaaggaaattatctttgagaattaaaggaaagcaaaactgaaaagttcagtaactgaattaaaatattcaatttgtaggttaagtatattggaaatagacaatctaaaacacctgtaattgtagtcccaacaggacaagagagtgagattgtggctggcaaaatatttgaagaaataagggcaaagaaatgtcaaattgagtggaaaaaataaacttatggttcaagaatctcagtaaactacattcaggataaatataaagaaaaagacactttggcacattctagtgaaactgcttatagacaaagatgagaaagtaatttgaggctaaaggaaacatgaaaaattaaggagatggatatagctgattttctagaaataatcaaaagccagaagtcaacagaatggtgtatttaaaatgctgaagtaaacaaactctgtaaactcaaaattctctatttagtagatacccttccaaaataggggtaaagtgaatacacttttaattatgtgaa

SEQ ID NO: 48030 - DNA, 747 bp, Bovine  19866881326538
  misc_feature (1)..(1): n is a, c, g, or t
ntctgtagcaactcacaccctcccacattccccaaacactcattttgagatagccaggataaccttcctcatttcctgcccagacagttgtggagtgttgtaattcattgttagacagctgcagccttcctccttggaaaagaatacttcttgtcaagggctgcagtcattctcaaagttttagtttgtttcttaaacagtgatgtacccaccagatgttgaaatagcctagccctagaaacctcaaagacaggccacagctaacatgtgcatccctgcttagaggtcagtactacaaacaccctccctaggttacttataatctcctctgcttcagcaaacagtctaaaccactcctgttggcaaatcctgaaaataactccttactagctgagcaaactttaacctttccctacaagcagataagaaaatgccacacagctagaaggcgaggggtagccaattttaatccccaactatctcctgcctccacaaaacagccctgctatcttctgatctttactatgaaactgcggagacgagaggagagaaaaagctgaaagaagataaaatctctccactacgcgtgtgtgcatgtgcatgcgtgcacacagtcatgtgggagggggacaaggcacaaccacataaagactgaaaatcacctcagatgacgacgaggaggtgggacttgggagactctggggagcagagatattagagtgagtgggcatgttggagagggctaag

SEQ ID NO: 48031 - DNA, 1676 bp, Bovine  19866881332898
  misc_feature (1)..(1): n is a, c, g, or t
nagtcagtttcctgaatgaagaagccacttcattgtggagttaactctactgtggcaaaggtgtgggcttaaagctgtccagatcatcagacagtgactctcagcacatagctcttgctagagacatgggagaaggttgtaatgagtgaggaatttttgcatctttgagctaagagagttgctgaggtggatgaatgaacccagaaaatgctatcaagcactggatttgaaccttctttagactggggacagaaaaaaaacaattgaggggaaaagagttaaaacctaaaatcagctgcttttcatggggttagtcatctacgctcaatcactagcaaaagcttctggtttctctgtctggcatattaaaaaaaaaaaagtgaacccttcggggcttgaaaacctattcatctgacacaatggcaccactgaaaattcatcggttgatgacctgcgcatatcatttgtaaaaattgcttcagtctgagttacctttcaccagctctgtaagtctactcactaggtcactagaagtgagtagaactttgtgacaaattctgtttccatgacaatgaatgaaccagtgaaaatggggaggagaagaaagatctgtattctgtagaatactctcaaatgtttgcctgttttcttttttagccgtttagttctcgtggctctgttccaggactctttaatttgccagtagctgtttttcctacacagattacaggagtaattcatcagtgaatgtttcactccgtggtcccatctaatgcaaggaaacataaaaatgatttttttccagttatgtgtttttgtttgtttagaaagaatgtaataagcttttttcctttcttttttcacaatctagctttaatgttcttattcgctcttatttattgactattactttacacagactacaactgcaatttgtaagttgtgggatctgcttttaaatgccaataaatcccaaaaaggcaatgatttttgaatttattggactaaaacccagagggggatgtaaagagaaaaggaacattaaaatatgtagacccaatacacgctacaatgaaacaaagtgtttaggaaaaattaagagagcaacagagcctttcctttactaaattaccttaaattggcttacatatttacatacagtaggatgtgtttatgttatttcagctcttatccacttcctgaacttagtgatagcgctactatttcctgggggagagagggaaaattgattccaatggttttagtttttaaatgatgaaaacagcaaaaagaactcatgtttgcaccaggaaaaaaaatatatatgcaactatttctttctgaggtatgaaataagaaaaatatcccctgaaaccatgtattttcaatttagctttagtttgtatctcaacaagtaactaagctcatttttaaagctaagttcaaataataggattttccccttgccttccttttcaactaaaacaaagaaaattaaccagtcttcaattttcaagtgttcattctgccattttgtagccacagacttaaaggacaattatttcttttccaacttcattcatttgctcagagcaggaagaaatgttactcctaaatgttgtagaactgccagcaatgaacaaactaatcagatttcatcttcatctgagactaaa

SEQ ID NO: 48032 - DNA, 784 bp, Bovine  19866881349021
  misc_feature (1)..(1): n is a, c, g, or t
ntccctttctctttgtctgctcttagtggagcctctgcataaagagagtctagaccaaaaggcaatattaaaaacaaaaggttagagatcatcatgggacattaattatgcaaaagaaggcaaactgaatttaatcagaagcagcagactcagggcaggaagaattttctctttttgacagaagcagttagggaaacatttatggtaataccatagcatctgctgattacagtcaaagctgcaggacaccaacgttaaatcactgagccatcctgacagctcctgggtactcaagtcacatcgaacagaaatttacagtgaaattcatccaagtctaaaaatcagccaacatgtttaaaccagagagaagtaacttagtttggattaaaaaaaaatttttttttaaaaggaaattacagctgataaaacttttcatctaatatatgtcctcaataagtatatattttaaaagaacacattaattttcagatctgttaatgtactttgagataataaggttttgaaatttggagaaaggattttataaggtcaaaaatataagaagtagagttttaactctttttacaaaaaggacaaaatctgacatctcagtgctttgaaatgatatatctaaaggattcagcataattaattagaataataacttttgaacaattaacttggttgctaagcaaatgtaagtaaaactaaaagctcacagaaataatgaactacaatgcagtgtaacattaggagattattctataaaacgcctatagaaaga

SEQ ID NO: 48033 - DNA, 928 bp, Bovine  19866881399754
  misc_feature (1)..(1): n is a, c, g, or t
nagagaggtctggaacattctctctcacagtcttcagaaggatgcaaccctgctgatacttggatcccagacttctagcttccagacccatgaagcagtacatttctgttgtttaactgactcagtttgtaattctttggtaaagcagccttaggaaactcacgcactaactgacattaagtctaccataccaggttaggatagttccaccaattgggagtctttatttgggttacatgggatcccaggttagcgtgtcacttcatgtaaaattgcaccacccagactttttaagaccctctatttatttttcctccttagcacttactgtctaacatgctgcatatttatttgttcttttttgtcatctttcccttcactagaatgtgatcttcgtaagcgcagggagtgttgactgttttgcttaacaatatccccagcttgtacaagtgcggttctcagatacttgtgaaatgaatgactgaaaggattaatcgcctcctcttctttgtcatctccctgcatcccatatacacctcaacacccatcttactcggaacacaactgctgcacagaagaagaggtaaagtgagagtacgttccctataaggtgctgggaaatttgcctaatccaggatctagtccattccagatcacaggtggtaggagaataagatgatcgttctttagggcagattctttcacctttcatttctattcatccctatgtcttggggtcagcccatttcaaatcgatgagatttcagtaattctggggtaaatagcatttatttcataaaggatggcacagcaattttgaatgtccatattttgcttgaaatctgtttttagactaactgctcataaggaaaagtcaacaagctgtaacctgcctgggctcaaatttccacccagtacatttggtagg

SEQ ID NO: 48034 - DNA, 1088 bp, Bovine  19866881421106
  misc_feature (1)..(1): n is a, c, g, or t
nttaaaaattgaatatttatagcaaacttgtattaaacaagttctattgacatcattttcaaacagatttttactcatgtatctgtgtcacattttggtaattcttgcaatatttcaaactacattattattatatttgttatggttattcatggtcagtcatctttgatgttactattataaaaagattacagctgactgaaggctcagaagatagttaacattttctagcaataaagcatttttaaggtatatacattagttttttttaacataatggtattacacattaatttactacaatacagcataaacataacttttacaagcactggaaaaccaaaaacttcatatgactttcttcactctgatcttcacttcattgcagtggtctggaaccaaactcataatatctcaaaggtaagtctgcatctgtcttgaataatgaacatccaaaagatatttgtaattcataaatcatttacacatgttctgttaaccatcttatacaatttgttctttgcaggtatggtcagataattccatcaagtgagaaaatgttctgccataatgacagattaaaatgttttcttcataaaaattacataagggaagggtagataaaaggcaaagcatttcttcaagtatacatttaatcaatcaaaaaatatagtgcaattacccatgctgagtagttgtctaggtactgggcatacatagagagatatagcaagcatgattcctgctcccttgatatctatagtctagtgaaataaataataatcaaaattaagagccagaggaatatgttccaaatgaaaggaatgatgacacccagaaaaagaaataaacaatgtggagaaaaacagtctatctgatgaggagttcaaaggaacgatcataaagatgctcagtaaactcaggagaagagtagataaataaagtacaattttaaaaaaagaattacaaacaaagctgaagaatataattactaaaataaaaaagacaccagaaggaataaacactagattagatgatgcagggtaatagattgacaaaccagaatacaaagtgaggaaagcatccaa

SEQ ID NO: 48035 - DNA, 3005 bp, Bovine  19866881521110
  misc_feature (1)..(1): n is a, c, g, or t
natttcaccagtttttctactaacgtccttttttctgttcctggctccaatcaccccgcctttcctctatgtgcttgccccacatacggcctttactcatgtcactgcatcactttaaaaccttctcttaccctcactctccccccggccctcttcactatgtgctttctgtccactattcagatcccagttccagaagtcacctcctcagaggaacctctctgaaatctgggtctcgggctggtttctgtgtatgtatctttatacaaccacgtgtcctccctttataacactttctctttaatgtgattatttaattttgtccctatttgtcacaagactctaaagacccatgaaagcagaaagtgggtctgtttttcttaatctttatatccccctagatttagcatggtatgtggcatatcatatgtattcacaggatatgttgaattaataaatgaataaatgactgaaaagagaaaagttaagtgataataggaggaaacacattacagaacatcaaaaatgagtaacccaggcaatacagatgatcacagagcttcaaaagagcgaaagatctaagtgagttcattttaagcaaggaaatggtatgattggtgtgacatgttataaaaataatagagcaataggggggatggattggttaagaagaagccagaaagtttaaaaaaaaaaaaagttaataatctagctaagaaacactgagatctcaaaactaagacagagggtatgctgctgctgctgctgctgctgctaagtcgcttcagtcgtgtccgactctgtgtgaccccaatagacagcaagcccaccaaggctcccccgtccctgggattctccaggcaagaacactgggagtgggctgccatttccttctccaagacagaggtatagagaaaggaaatactgaggaggtcaactcaacaagcacttggcagtaacatatattagaataagaaatccccaggggattaaacagctacaaaaattagttgagtgaaaaaaaggcatggatatctggaatacagtgataatacttccaggttaaataaagggctcgtgatgcaagcaatggaataaaaacttggatagataaattctgcttctgaaaaagtcaaggagattggactttattctattagtaatgagtcattaagcaacagtgacatgatgaaaaggagatataggatgaagagaatttagacaaaagcaggttcattgagaaactgatgaagaaacctaagcacgtgctttagagtgtcagcattagaaataaagaggaagtgacataccccaccacattctatgaaagaagatcgatgtacaggtgcctaaatcagcgtccagatactataggcacagagtgttttattctgaagagcttcatttgacttggtcttctttctagagaaagcaccctggaagactagtaggctttacatagccataaatattcattgaaaacccttcatatgacaagtacatggagcatacaaaacacgtacgtatgtaattctcccttggactttcagttttattcctgctttcaggagaaatgcatgcatgtgatatatgtctgtggtcatgaacctccacgacgacccccgcgatctccagttcacgctctccagctccgcccagttcacgcgctgcataggcccctccctgtcgcactggggatggactgggaaaccagtgaccacggcagaactgacggcttagcatttcccagaggacacataaaaaacagcatcttccgttttggctttctctccttcctcagatgactcactctgggagaaaccagctgctgcgtcatgagtgcgttcaggccacgtgtgaagaagtacctggagtagaagggaagcctccggacaacagccagcgaggaactgaggcccgccaacgaccacaccagtgagcttagaactggattatctggttccagacaagccctgctgcacagccgctgctgccaacagcctgactgcagttggagactgtgagcctgaaccccctccccgcttaagcagctccctgcttcctgcccctgagaagctgtgagagagaataaatgtttgttgtttcaagatgctaaatttgggggtaatttattacacagcaatagataaccaaagcaactttatactactgaacattgaaaactaagcaagggaatcatgtttccatttttgtcctagctgctaagagatataagctaaatgttatttctgattgtggttggttttctcagtcaatacttgttgatttatcttcttttcacctccttttattttttgtttcccatccactgtccactggtttttattttatccttcttactcatttattgtaaagcttctaaaatctttttggatatagatgcacggtaaaacagcaaagtaagaacagtagatattaagataaggttccaagcactatcagagggatcacaatctcattgggagtgaaaagtgatcaagcaatgtggcacagtatattactaatgttcaagcaaagattgctgttagatttcaaagaaaggggataccaggaaagttatatttttcagtcaagttccccaggagcagactttgagataggatgtgcattatgaaaaagctctcaaaataaactgctaaggaaatgaggaaagtaagacagggaagaggaagaagctatttcaaagtctcatggaagatgactccaaccaggtcctgcatgagaaggctggaacgtgagaacacttcagaaagaggcctgagctcccatgcttctctaccggtcacccaccggcccagggcctctgaaggacagggacgctcccagcacaccccctcttagggccccttgaacatgcaggcaaaggcgctgcagcagcttgagggaagtcctctagagacccagaaactgtcagtgatccgaagaaagagcacgctgaaaccaaatgaggacacagaaatgttgaagcgatctgagggcaactg

SEQ ID NO: 48036 - DNA, 798 bp, Bovine  19866881533412
  misc_feature (1)..(1): n is a, c, g, or t
ncactcagctttcttcacagtccaactctcacatccaacctgaccactggaaaaaccatagccttgactagatggatctttgttggcacagtaatgtctctgctttttaatataccatctaggttggtcataactttccttccaaggagtaagcgtcttttaatttcatggcaaggcttgtagctgctccaaaagaaagatcaccgtcaggattccagcagagagaaccctgcgctgaggtgagagccgtttactcagggagggaaggtaggtaacaccatttctatgtgaaatggatccagtgactcggccagagcgatcttcacacagaatgctgaagaattcaggagagctgcactcaccaatctttctctagcatttcatcagggttgaatgacagctgtttctgaagcaatttggacatcttgctttctcaggaagactcttgttgagatgtaagcctggtatttctgaatagaatgttcaaagattattgatcacggaaacacctttcctccaaataacttcttactgccagtccggtcagcagtggtgccaggtggggctaggggtttgctcacatttttgacctgaggcttgggttgtgatgttcctcatcccatagctctgcttcttagttttatcatattgagcttcttcctgtggaccagatacatattaaaaaaatgggcaatatgaaaaaaaatattttcaagatttctgagagctagccatctttcccaaatgctgagactgaggtgtatctaacaggcagtggacttctagcatttgtgagtt

SEQ ID NO: 48037 - DNA, 796 bp, Bovine  19866881625823
  misc_feature (1)..(1): n is a, c, g, or t
ntttttagccatgaaatatttttaacctcctgctttctctaatcgatataatttcagggaaaatttctgttatagaaatcacaaccccattctatgttgaactgattgttctgtgacagtttgattttagatatattatgtaacttagtgaataaaggaatcagactgttaataaggggtttcccaactgagcctgtaatgcttgctgtggcagcagttggggtggggggtgggaccgcctaaagtaggaatatgaattgggaatatcagtggtgaaagctgagtaaaaaaaactcaggaatgttttttaaaaaccaaaggagtatttgaatcataatttgaatttgagaagaatgtcatggttaaagtgaggggttatataggaggtaatattcttacttggtttgagatcaaattggaaagagagtaaactttatgtgtttatattctaattaatataatgtgatttaattgttatagtagtggatcattttgtttctagtttatgtatatggagtttatatatagtttatgtatatacattaaatatattatcatttgcatttattgctaccactcatgctgatacaaataaaaaattactaaaaaactttactggtacttggaattagtattttaatgtctgaattgtaaagttaattgtatgtgggattttttggttaattttttttcccgtacctactgtcaaatctgtataaaagttaattgaatgatgaaaaatatagtctttaagagaaaaaacaagtatgatacctattatgagcaaatctaatag

SEQ ID NO: 48038 - DNA, 839 bp, Bovine  19866881707280
  misc_feature (1)..(1): n is a, c, g, or t
ntgggagacaggataattccttgtgcaggactagtccatgtgtcgcagaatgtctagcatacctttcccctgtaaatactggtagcatcacctcagtcaccatgacaactgaaatgccctgagacatttccaaaatgcttcctaagtagtgttaaggcctgttgaaaatcactggcttagagagaaaataagaaaataaataattattcacataataggatgtttctaacctgaacagccaagagtgacattactaattactaccttttattggaatttcaaatgcaacaacttctaagatctgaaattttatgtcaaggtgaaatgaagggaattttgacttttaagtgcttcagaggtttggtagccaaaacctgagtcagctaaaggcataaactgtagcgtctgaattgtagcacccttataaaacttagaaaaaaatttagctttcagcctccctaggtgatccaaagccctgatttttatgggcccagttctgagtgtatatggagtttatatacattcaaatgtcttagcattgcacacaaatgacccaaggctaagatcagaaggaagtccatttgaactgctctttccttcagccacttttgtcttacctcagcctcccttcctttgtcagaataaccttttccttaagcagattaattgatagattctggttgcatttcatatctttatctggatattcatgacttgtgttttttagtcacagttagacctatagctggatctaggttacataaacccttattttgaatggtgctgttaagaaatgttaggtttttaggtggtacctcttttcatgagagcaactttta

SEQ ID NO: 48039 - DNA, 688 bp, Bovine  19866881734474
  misc_feature (1)..(1): n is a, c, g, or t
ncttacttgcctttctttatccaagaactcccattctcccaaccccttctcagctcgtctctacccttcccactcattagcatcattctttccctgacctgctctcctcttgcattttgttcggagatcaattttgcaacttactactgtctgccagaccatatatattaggtgtgtatctgtccttccctatgaactgtgcacctctggtggacagctatctcatgctacacatttctgcctcttctgcagtattttgaacaatttctacatagagcaggtaccaataaaagtttgctggagttgaataaagctcacaaattgtgtgaaatcacccctctagatgggtttctcttgaaaagttgaaactcactggctttcagagaaacctcttcaatgttctttcctgagaagatacgtcttactcctcggtaattaggaatctctcctgggtggtttttgaaaaaggttttgatttggaggatctatgagtgtgactacgtgggctaagcttcttaaaggggcaacccagctgagaatcacaaaagaaagctgaggctgcttcttttgcctatcatacaaactggcttttccttgtgctaatgagagctgcttgtgttgactgtgtaacaggaagtaccttaatcctttttcaatcgacttctaaaattagctttattttgtcctt

SEQ ID NO: 48040 - DNA, 824 bp, Bovine  19866881767903
  misc_feature (1)..(1): n is a, c, g, or t
ncttgcaaatatgtactcagagcgtgttacagggtaccacttttaagagagccctcatagtgagatgctgcttctgctgctatttagttacagtcatgttcgactctttgagaccctgtggactgtagcctgccatgcacttctgtccatggaatttccgaagcaagagtactgcaggtcctgaataaagtataataatctcaaactgcttattatccaaatttaagtaatatctttggaggattttacgaatgacaagcactctctccattcttctatatagtctgatgtttatccttttaaaaagccaagccatcagaaagcaaggcacttataccattttgcttaaactagggatagcattactataactgaaaagtacagatatatcatctgttaataagcagtttgagattacattcttttatccggacctgctcttgactaaatgcaaatttgtatccttagaaatccaatcagcaatcaggtaggtgcttgtctgaccaaaatgcccacctagaaatatgtgtatgttgttggtgctaaaattagtaattttagagaatctgtgtggagccagttaagtcagtattctagaaaaagggggttgactcaaccatcaaactcaacaccatatcaaatatatgagatgattttaacttgtttttgaaaagatgttgtcaattcagaaacaatgattataacatacttgtatatattactgatgtctgctaaaatgtttgatttctaaataacgaatcatcctaatcagtacagttgaatgatggagctcttgttctaggtagctaaactgactacctgta

SEQ ID NO: 48041 - DNA, 756 bp, Bovine  19866881884146
  misc_feature (1)..(1): n is a, c, g, or t
nggttccggggttagatgtagacatcttggacaaaagtagagtctgttactctgcccaccatgggcagcaacttgtggcaatgtaatcagagacagtagttcttaccagctctcagttacaatgggaatttttgaaaggctcactccaaaccctgtgtggtcactttcccacttaaccaccatcactgctactccatcattcatttattctggactagtcttcgcccacatctatgtactcctccatgtctgcagctcgtatccatacttgggtggaaattagggtaggtggactatgactccctgaatatgaggtttccaagaatggtgtctggattccctcataccattgtcttgggcaagaaagctctaacaggaagtcttttttctagccaactgtttcaaactctactaaacttacatcagagattgtgtgcaagaaaaaatgcccatgttataggcaatatcacaatttcctacccctctctacttaaaattttgcagactggtttattgcagttaattagagctagcagaatccattctgtatcagttaggatgacttcaactgcaagtaaaagaaaccctgatttaaactggcatacacaatatgaaaaattactacttcacattacaaaaagcacagacacagataagacttcagggttagttaattctgtggctcagaagaataatcaaggttcgaattttgttctctctctcttcaccctgccattcttggtattgtcaaactgg

SEQ ID NO: 48042 - DNA, 1066 bp, Bovine  19866880509424
  misc_feature (1)..(1): n is a, c, g, or t
nagggacaagaatctcctgcatagcggactggttatcagtctcactctgctactgctgtgtacccttgaactccttcctgcttaattaaaactgtgggaggacagcatcactgcgatcagttcagcttcccggatcgaccgtgatgctgattccacattcataattaattctcctcagtgttaagaatggagacttggctgattaaggattctcggtggattattggagatgtctgaattgctgaaacaacaggcagccatgcaatgtctttttgatctacataaatatgggatgtggaagaagaaagaaggcatttttcttttccctccagaaatcttacttgacattttgcaaggggcatttattagaatgtcagtttgataaaactgtttgcaggagtcaccccgcatttgctactgagctgtaacaattgttaggagccttaattactctgggcaggtttaaagaaaaaaaaaagaaaagaaaatgttatcagacgatttgggcaaaatacctccaagaaagtagctctgcttcctcttgcttcctgttgtgttacagtctctctgatacactcctactgaatctgaactctgggttagtacaaagttaccaacagttgtcatagcagatgggaatgtagtggtgtggatcagagagacaaatcttatgggctgcagagatgtcttcaaatatagaagatgatataaagcttgggtgtaggattttaatatatgtgggtcagacacgactgagcgacttcactttcacttttcactttcatgcattggagaaggaaatggcaacccactccagtgttcttgcctggagaatcccagggatcggggagcctggtgggcttccgtctatggggtcccacagagtcagacacaactgaagcaacttagcagcagcagcagcattgctttagtagtagtaataataatgatgataaataatggccaacatctgattgaactcactgtgaattacttaacgttctaagagctttacacatagttcattatctaattttagtctcaggtacaggggattttttttttc

SEQ ID NO: 48043 - DNA, 1210 bp, Bovine  19866880652636
  misc_feature (1)..(1): n is a, c, g, or t
ntttgaaagagttggagatttccatgttctcaccaggaaggtcagacttcatcatctagtgagtggcaaagatgttcaacacgggaaaaggtaagtgtaccctcttgcagtagtcatggactgatatgagagttggaccataaagaaggctgagtgacaaagaatttatgctttcaaactgtggtgctggagaagactcttgagaatcccttggacagctaggagatcaaatcagtcaatccaaaagaaaattaaccttcaatattcatcggaaggactgacactgaagctgaagttccaatactttggccaagtgatgtgaagagggaacacattggaaaagacctgattctgggaaagactgaaggcgggaggagaaggggacgacagaggatgagatggctggatggtatcaccgactcaatggacatgagtttgagcaaagtccaggagatggtgaaggacagggaagcttggcatgctgcagtccatggggtcacagagttggacacaacttagtgactgaacaacaacactcaaccctcagactacatagaagaagactttattcactgaacaaggagtccaaagtgagaggagaaataggaagttttggaattaagtatttatttacttctaagaatactaacttggcgcattgtgttcataatttacatttaggtttctaagtaaaagcctgaaattaataatatcaaactgtgacttcatactgtgggccatgctcaacctactttgacttgtgcccgatgaaattataatacatttagcattgtgtttattacataggcagatggatatcattagggacaaattttccttactttatgctataatgtgcatttttacaatggtttcacatttgccagataatcaaagactatgataaaaggatgcatattatagttctctccatgccctttctagtacagaagtgtcaaatcataacattacaacaataaatcttgacacatgtctcctgtaaaaatctgttttgaactagagcatgagaaagatagaaaagctaggaaatctaatgaataatttttggaaaggctaactaagtgaagaaaatgcaaaccaaagacattaaaaatcaatttagaaacaaatagcattttgtcagacttaagaattattcattaggggctgaaggtacatcttatcaccaagaaaacgtaagaaaatgaag

SEQ ID NO: 48044 - DNA, 2988 bp, Bovine  19866880669462
  misc_feature (1)..(1): n is a, c, g, or t
ntgcactttatctcctatgccggatgttcatgcaaaagtaaccctggagggagtaggggggagaactttgaataatcttcatctggagaaagggaaatgaaagcattcacagtctttcacccaacaggccctgagtgacgaaatccagctcatattgtgataatgttccaaacaaatcaagacatctgattaaataacttgaacctttggcttcctaaagttctaaggactatcagttgaagcattgtggcataattttattagactcattggagctataattaaccatcggagagaaacaaaaaaatttttaaatccattatgattaattttcacaggatgtcttggaaaccttacaggaggcattaggagtctgcctatttataattaacagatcgcaaacactaatgcattttcccaacagggactatttaaatggaatgttttgtttgatgtgggacttaaatacctaggcgtgagtccgggaaagctgtgttttacagagattttaggacaatgcactatgttctgctgatgagatattcttgtcattgctcctgtttgaagcgatcataagggaacatccccttggcttcctttgactaagacagcatgttcattgtggcaacttgaactgtatgctcaccttggagagaaatatgcaaccagtgcagacacaacagttcttatgttaagtgctggaatctagtatctaaagtatttacacgtggaattttatgatcacctcactcaattaacccaaatgctaatgttatatatgtatatgtatacttaggtgtatgtatatatatatatatatacacacacacacacatatatatatatacacacatatatatacacacacacacatatatatatatatacatatttaatttttattgaagtatagtctatttaaaatgtgttagtttcaggtgtacatcaaagtgaatgagtaatacacatacatatatatatatactttttctttagattattttcccacataggtccttacagagtaggtcattacaaagtactgagtagaatttcctgtgctatggcttcctgggtggcactagtggtaaagaatccacctgccaatgcaggagatatgacagacgcaggttggatccctggatagggaagatccccaggacaagggcacagtatacagtaggtacttttagttatctattttctatatagtagtgtgtatttgtcaatatcagtatcccaattattccctcccccacccccttgtaaccttaagtttgttttctatatttgtaattctatttatgttttatagataaggtcattcgtaccctttttttggattccacatataagtgatatcatatgatatttatctttgtctggcttactttactcaatatgacagtctctaggcccacctatgttgctgcaaatgacactgttttctttttatggctgagtaatattccattgtatatttataccacatcttctttgttcattcctctgttgatgtctgttgtgaataatgctgaagtgaatactggggatcatgtgtctttctgcattatggttttctctgggtatatgcccctgagtgggattgctggatcatatgctagctctatttttagtttttttaaggaatctctaaaattcttagaggaaaatataggctgaacactctttgacataaattgcagcaaaatcatttttgattcaccttctacagtcatgaaaataaaaacaaaaataaatgggacctacttaaaaacttttatacagcaaaggaaactataaataaaatgaaaagacaaccttcagaatgggagaaaatatttgctaatgccatatatttatcagatacctctagtttccagaccaattccagaacattctttctatgtaaaaatctaggattatcactccacgtacaatatggacttcttcaaggacagccactcatttttttttttttaatcatgtggtaaaagccattgtaatctagccatatcttacacatgagatctcaatccattatattttctaatgttccagtcttataagttaaggtttcaggacctcacccatatgctttccaatcctcctgtcctttctcttctcaatctgaaaagtttctacttaatattcaaaacctttaaaacttgaagcacatctgtaactcttacttgaatctcttttggtccaaccttttctattgcctcttcatggctaacagtatatcccattttagtgctaatataacattttgtgtgtgtgtctattgctatgcctattagtttatgctccagcccttgaaggaattggattgtgtatccccaaaacctagagaatgtctgtcgcatgttctttatcaccttggaggatatctgactgtaagtgatcactgaaaagacttgttagtgaactgatcagcatacctgtttatatcatcttgcacaaaacaattgtgttttctgtgctaatatttaacatggtctcaacaaaggatgtagtttttatgagctgaaacttgagttgataagtggcagctgaattccgtaagtagatctaaagtatagagcagtaaacttattttagaaatctcactgaggataccaattaaaaaaaagagagggagaccatgaaggacatgttgaagaagttgttattgaaatatgaccttgcatttttattgtactaaacctggaatgcatgtaaattaggagagggggaagccgaaaatactttagatattggtgtgtaatgaaccatggacattttgtatggaacaaactagatgtcagtgacgagagactaaactaattgacagatcataccttacctgaaataaacattgtagttgtaacaacagaattttaatttcttttaagttcctttcctagcctgaattatgtatagctatagatgttaaataagaaagaaggtctaaaattccaaacttcattcctttccttttcttag

SEQ ID NO: 48045 - DNA, 1738 bp, Bovine  19866880671164
  misc_feature (1)..(1): n is a, c, g, or t
nttcaagaaaccaaaccataaaccagaaatttcgaggcagtaaaacaatttgggacgagcattctattccactgaatggtatgcttctatttcagagagcaactcctaaattgagtgtcttgcacagagatggcacagcagtaacaaattgtagaatgattttatatatatatatgtacacttggaaattacaaagtagaaccaagatgtgctggaaaaccagctctatgagggaaaaaaaagaagaaaaaaggcaaaaaactcggtttgtagtgttttcctcttttgatggtttaaatacttgccctatggcccattttaataccaattttaatgaccaattaccattttaatgtgtgtcatagcacagaggtgggaaaagatgggcacaatgttctcttacaggctggtacaggctggctccagtcccctgctagttaagtcccctagatttgcgttcatgtgatttggcaaaagaaatcatgccactgattttctgtaggttaatcagctgacttgattttgatgtggacttttcacggcaatacaagagacccaggtttgattcctgggtcaggaagatccactggagaacggacaggctacccactccagtatccttgggcttcccttgtggttcatctggcaaagaatccgtctgcaatgtgcgagacctgggtttgatccttgggttgggaagatcccctggagaagggaaaggctacccgctccagtattctagcctggagaattcagagagtcggacacaactgagcgacttacactctcactttcacttttcacaagtaatgatgacaaagtattactttttcccaggcaggctacttgtaggaagaaaaattgtaagaatacctccccaggagttcccatgcttttgaaagcagataaaaaccaaggaagaccttgaggattttcctgaggttgaaaaagaattctctttaactagggccacctactttggggcctgggcactgttaagcatgccttgaagaatccttattcttagccactctaaggtcaaaaactgaataggaaagccttaggcaaagcactctttagtagcatggtatattaactcttagaatttacaaaatccttccagtcccccatgttgctgaactattttttaagtcaagaaatttagtgcacagaaatgtaggaaaaaactaaagaaatcttgaggatagtttatgattaaaacaattattcattttagaactcttatgggtcaaactctgagctggaaagtctcacttattttatatttgtatttgtgtgtttactctttagggtaaaagtggaaattctttcatttaatgaagatggaaaagggcatctcaagttattaaaaatattttactaacaacaacaatccgttaaacatatactatatcctagacaattctcatttaccattgtagttagtaatcaacaatatttctattttatagatggaataaacgtgactgtggctgagtgttatgcatgaggtcatgaactaataaagaggaaaaactggatcactagtcagtgtttcttcggatttgttgcttaacatgtgttaattcagtcagtcagtccataaatgtttattgagcacccactaagattcagccattcttcttggcttcagggctatagcagagaaccacaccaatacaaaattcagctcttttaaaatttctgcattttaattggcagagacaatcaacaaaca

SEQ ID NO: 48046 - DNA, 682 bp, Bovine  19866880723140
  misc_feature (1)..(1): n is a, c, g, or t
naaataaaaatttagcaatatatctgagcatggaataatactcttctttattcatggatgaagttactaagttgcctttttaaaaagttaagcaaggaaactctaagtgtaaccaaaattcagtaccaccactttcacatgctactttcccattttttcaaagactaagaagctgggggaaaaacaaaacacatataaaatccttgcaaccttctgaattttatcagcagtcttctgagtatgaaatatacatattcttttcctgaatgtatgccttaagttaccaattctcaaaataaatctgctataaactttatcttctccatttcataagtatccaaaacaaaataaataaataagtaaatattccaacctttttcatagaataacccagtgacatgtttcatctttacaatgaaatgcagctgtagattccccattaaaaagcaaatcctcaattttgaagtcttgaatagctcggtacttcaaaaagaattgctgctgatgaaatttatggcattgataagagtccaattcaaaaatcttaacttggataaacaggattttcatttgatgaagaactggaatagatgggcattcactttaaacccaatgcctatcagtaattttttttctgaagtagtaaaacaagttttgagtaactacttggactaggtaatat

SEQ ID NO: 48047 - DNA, 2179 bp, Bovine  19866880866888
  misc_feature (1)..(1): n is a, c, g, or t
ntgagaggcaaaggagaccaggagtgactgctaatgggtatgaggattcttttttgaagtgatgaaatgttctaaaattagatactggtgaccattgtacaactttgtgattatgctattcaataaaacccctggattatatattgtaacagggtgactttttggtatgtgaataatatcttagtaaagctcagataaaaagtaacatcagatcagatcagatcagtcgctcagtcgtgtccgactctttgcgaccccatgaatcgcagcacgccaggcctccctgtccattcattaataaaaaaaaatagaaattgggaatggtggaaatgaatgggaaaatcatgactaaatagtttatcatcttaagcctttcaggtttaacattcagtataaagtatttttattttaaataactttggaattaattattttaattaaatgactacagtttacttaagcatttctttgtttcaagtataggtgattgctgactattcactagtatatagttttttttttctttcttttttcaacgggaactgggaaaagtgtctgtggttaccaatacacacttagtatcatggtcagtattctaggacctgggcatgtactccaggaaataactagcagctggcagcctggttatcctaatggttgtcctctcacctggatcactgctgttattgtaactcattctagattcctgcagacttacagtgacatggctaacagcaattgaaactgtctttcatatactccttatttggggcaaaatgttggtgtccattttttttatcattgaaaacagatttcaagacttctcacagctaaatgtggcaagcaggtaattcacagacttgtagacaacaaactctgatagtctaggatggagaatagggcaacaggttagttgaaaagcttcatgtgtctttttactaatgcaagatttagtacacttaaggatattataatgagatcaaatcaaatttacaggagaatgaacaaatgagaatagcaaatggaggtcaaaatgcacttccacagttctctgttacaccagttagatttacaaggcagggacttaatgtaagttgatgtgtgattgctccagttttaaaacgatgccattcagcttacatctgatttcattaaggctgttgagacagcacttgagtaattcaaagagaatagaatgggaggggtagagagtgtgtgtacggaagtgtattttgatcctgcactttattgttataacacgcgtgggtctagcaactctttaacatgtagtctgttatgatttcatcttgtataactgcgagctaacagctttgcctctcaaagaagtgatgtgatcagcccactaaaccttttgccatgtgagacattcactgtgtggtggagatgattcagagagtagacttagacacacagtcacgtgacgtgttgcttaaaccaaattaaaatgagtgtgctaacactttgtcagttttcatctcttcagcctcatagctatttataaaagggagatgtttgtatgagaagaggtcccagttggggattaacgcccaagtctctacaaaattttacataaaataaacaaacattgtcacaggatttgatgttttactaaatcatttcatggaataattaacacatatcctgtcataattccatgagaatatttatattatagagttgacactatatagaaactgagaatcaaagtgattttaacttcacaataatcaaagtgtaaaagcaagaactaggaaagaaagtaagaaaataaaatcttatttatgaagcccctgttccagcactatttgagaagattctaaagtgttaacacattaaatcctctagaagtcacaggaggtggactttgttattttcatttcatatagaagaaagccgaaggtcccacgtcacaagcctaggttttagcagatttgcaatttagcgcaacaggttttaagatttacatttttactgtagaccatatattctaaacatagtcatgatgttgagaagatacccagccttagcttttgttatgaagatggaatcatcactgtcttgccgatattgatcagttttttaatacaacggtcaccctcatgtttgatttgctacatgtgttttcaaaaaggtaattcactgtttggtcagggcactg

SEQ ID NO: 48048 - DNA, 1584 bp, Bovine  19866880895771
  misc_feature (1)..(1): n is a, c, g, or t
natatacggagatatttccctgttcctgtcatcttttccctttgcccttttaccaactgggggtcacagaagatgcaaaaaagtcagtgttgggcacagctcctgtcgctgatgtttattcagatcaccatatcaccagctagcttgctagaacttcctgattgcctgcttccctccctctggctctttatacccttagtgtcaccctctactccaagttttctgatacctgtcttgggtctaccttcttctttggtgacatatccgaccgctttcaaatcttcaccttttgttccagtctcaggtccagacactcacatggttttatgataagccacgaaggacttcattgtctctgctatctcctgccttgtagtgtgaagctgtaatactcaagtctcctgccttcttgccaagagtgaggggtgggaactacctttcataataactccaagtctttccaacttgcaaccctagttataaactttacaactattttatttctctgtcatttgatgtaaacatcttttaattaggataatattcctgtctgcaaaatttggatcatgttacaactagcattagtttagcatttgctgggtatctagagccttatatttattatcaaaaatgtaatgacctgaaaaaaaattatacaaacgttaaagataaagacaaccttagagaggttaaataaatggccaagatcacataaaagaggcctggttgaatcagatacttatgtttggaaatatggtatttgccttctaagttatttaaaaaattatataatagtttcccttacaggagaatacctggggttttgtttggatatgtaagaaaaagctttgtaaactttaaagctctatgcaaatgttaattgttgctgtgttctaccctaagattatttatggatgacactgcatatatttatgtagctcagtataacaaatagctgattaaggggcaatcatttctcaattttaaagccgaaattttgtggatgcttatgaaatagcgctccaaaagcagatgtgtgtggccgcctggttggtatgtctggtgaaatacagtagaacctgactaaattacactaatgagttggagacccattacaaattatcacatttgcccaattagtgaaggagcaatgtagagaaaaaagactgctagggaagcaaagctggtatggcaagaagacaaaactgcaagtaagcctaaaagatgttaataacacacaccacacaggcatgctcatttgtgtgcacacacacacacacatgtacaaccacacatccctctgcagtaggtgaagttgatcatgaaatatacaaatatttgtacaaaatggatctctgtgtacatagaaatagttcagtttctttctctctctcaggaaaaagcaatcaatggaagttcattgttttatgtttccaagaaaactattttgttttaatggaatcagaatgtggtttacaattggaacattgttatgtggcaaattgtagtgctacatctagttaaattttattatatgctttgaggtacaccctaccatcctgagcacttcagtaggtattatta

SEQ ID NO: 48049 - DNA, 1189 bp, Bovine  19866880950829
  misc_feature (1)..(1): n is a, c, g, or t
nagcataaaatatacgctctgtgttctttttaaccattaattaataactcaagcgtaaagttagccgttctgtggtgacttaacccagggaatatattttggcaattacgagttcaatcgcctgtctaaactcagagaaattctttgtagaggcagtgatccaattctttctcattattttaccaactagaataaatcacttactaaatgatgctaaattgtattagcaaatacagagcatataagataaggctataagagttatcctaagcaggcttttaagctttttattcttcctgtcatatgttgtagatctcacatgttgccgacctccacatttccctctttcttgatgggctggaagtacggcttttcatttcttaattgaagtgtacacctagggatattatcccacattatcttggctgtttcaagaagatattgggattagaaggtggttatctactgaggcaggcactactcaagactgacacacttcctaactaaagctttaaaatttgttgatgaatgcctatcgatatagaagacctgtttcatttcccttttcttggctaagtgaatgtctaggaactatccaaagtctgcttatgtttctttcttgggttttctatatttgtcatatcctttgcctaagactgaaaatctcttacatggttcaatgtatccgtaaaccctttaaaactctgccaatcaccctgtctgaaagccagcttccaagactcctgagattttcaaaaaatattcctaagaataaaaagggttaaacttttccagatctatgagctcttccaaaggaacagttttatgatagtgcagtgctactgctaagtcacttcagtcgtgtccgactctgtgctaccccagaggtggcagcccaccaggctcccccgtccctgggactctccaggcaagaacactggagtgggttgccatttccttctccaatgcatgaaagtgaaaagtgaaagtgaagtcactcagtcgtatccgactcttcttgaccccatagactgcagcccaccaggctcctccatccatgggattttccaggcaagagtactggagtggggtgccattgccatatggtatttaccagtctagagtaatgtttggggattcagattatggagaaaactgccgtagaatcctcaatgtgctacttactctg

SEQ ID NO: 48050 - DNA, 1297 bp, Bovine  19866880951813
  misc_feature (1)..(1): n is a, c, g, or t
ntttctattttgcaaataaattcatttgtattatagtttaaattccatatataattgatgtcatttgatatttctctttgtctgccttacttcacttagtacaatcatctgtaggcccatctatattgctgtaaatagcattatttcattcttttttagagctaaattgtattgcattatatatatatatatatacacacacacacacacacacacacacacacaccgcatcttcaaagacagcatctttgacttctctttctctgaatcactaaatcctgtttgtcctgtgagtaacaagtattttgcaagtatttgcctctacactaaagtccatctccccttttatcaaccccttcatatcatcaccacctctcagttggacagttccaacagcttccttatagcttcctgtttccacacaccccacatgctaccaatcattttcataaaataccaacaaggattctgagggaggtgatcacctcgccagattaacttcatgccattctccactttgctcaccaatctcaagccactggggtctgtggtgttttcctaagttgctaaatctgaaaatccctcttccatctggctgaactgttcacttccatggctttgaaggtcttgtgcttttgactccctcagtaatcagcataaacacaacctttaagaagaggcatttcttcccttcctcaacctaaggtgtccctcaattactaactcatcaccctgcttatttctctttctgtgagcatattcttaccgcaatataaaatattccattcatatatttacttactttacaattatgttttttctactatgctctgcatttcatcagggcaattaccactatatgtcctttcattatccatgcaccagtctttgtcatatagtatgtaatcaatagttatttgatgaataaatgaatgaatgaaatgaatgaataaatgaataaacatgaatagccactacccaaagagtcataatatttaaaaaagagctgatgctataaacccagcctccaagctgactcttccttatcacttgctgttcattaagagttattaaatgactcgtcatctttactattataatgcttcttgtctaatggaccttttttgtctaaattaaattatgtctgaagtgcaagctatgcagatattttgtccattttttttctttccgagttgctttttctcagagctggcatgattagttttggacattgattgccccttctgctcccatagtgaactaaagtttcattattctccaagtaggggaaaatata

SEQ ID NO: 48051 - DNA, 1691 bp, Bovine  19866880967611
  misc_feature (1)..(1): n is a, c, g, or t
ncattttccccacttccattttctttaaagaatagtagactaatacaggggatgaagcctttcctctcctgacaaaagacaagtcgtgtccccattaaagagtccaccagagtccacttagtgttgacatgtgctagatggatgccagggagccagtaaaggccaaaagattcctggaatgaaagaggccacttatgtgtgtgtgagaatatatatatatgtgtgtgtgtatgtatatatataaactaaacaacaacaatcaactacttatacatatagttgatttttgtttagtcactcagttgtgtctgattctttgtgaccccatagactgtggcccaccaggctcctctgtccagaggattctccaggcaagaatactagagtggattgccatgccctccttcagtggatcttgcctacccagggatcaaagctgcctcttttaagtcacctgcattggcaggcaggttctttaccactagcggcaactgggaagccctaaatatgtacatataaataataaatttttttcaagaaaaattgagaaacagcaccttttttcttaacttcctgtatcttcttcacattattttttattctttgggcctcacatatattcaatgggtacaaggagaatgaaataagaaaactgttgggtttattaagatttctttcttatggcacaccctgatgtagttcatgaggcaagaaaccaggaatagatttatacaggggagaaagacagttattttcgctcgcaggtagaactaactggttgttaaagagcaaatcattcctttctatttagccagattgctgtctctcaattgcttactaaatcatggaaatggagctttcttcctgcagatacaatttttctttgcagtcaatacatagtcaatgcatgttaatacagtcaagctcttccttcctcctccatttcaacttgaagtcccattaataatggcgataacagcaacatttgacatttatacagcctgaaggattccaaaaagatttcaccaattactgtgaatagagttctgatgagctgcagcaacttctgaggcaggaggagaataagcagaaacacaaagttgcagtaagggagatcctgcccaagggtatgccagtcgtcccctctaaaaatggaaaaacattactcacaaccgcacacaaaaaaatcaggtcttttactttgaaaatattgaaaatatatcactggaagtcaaacgatattgagctagccaactgacatgagacatgggaaaagcgagaacattccacggcaagcttatttccagtggattctatttttatgattattaactatctgactggctttaataccaattggaagagtggagatgaaacaggccttcccagttgtcctgatatttcaaaagttcccacatacacccaaacagtgtaagagactggctaaggttcagtaaaacatttgaacatgggttatttcaattcaataagcaaaatattcccatatgaacaaagaacaagcgtttccagaatatttaaatatctaacttttaatccttatcaaaaacaaaacactactaacagcagaaacaaagcttttatgagacctatgaaattatactctctttgaagaccctgaaactatattttactaaaaatgtatgggcatcttcagataagtaaccattcag

SEQ ID NO: 48052 - DNA, 1525 bp, Bovine  19866881046071
  misc_feature (1)..(1): n is a, c, g, or t
naaaatgtattagttatatttaaattacctttcccttttaaacgtctcctttctatttaacaagtatttagggaatatttcctgaagttatggtgccattatgttatatatttagtcttccaccagaattttttttatcctaagcttcagggtttttttttttttttttttttctctcagttaaatgcatttgtttgaagttcattgagattggagtccagcaggttacttttttggaactcaataggaaatgccctgcatctttagatacactccgatgctgtgtgtggaattctgagttatatattttgtacccaaagtttctgtagggaagagagtcaagcctgctctcataaaaatggccatcactccaggtgcaaagtgcatttgtatggctcaaactgtgatgaacatttgtgatttaaaacataacttgcatgcaattttttatttgctgtggtggaaggatggagagagagggttttaataagagtttgggtcatggcagtattttactatctcaactcctaatctctttgatattgaactaggccaaaggagctgaaaaaaagaattcttgttagatggaggaaactgctttttgctatttgctttctagcttctaaaagattctggtgcattgatgcaaaaaattgcaaaacaatctttgcatttcatttggcctctttcctggtatacacagtcatgggcaatttttattaaaagttatatgagatggatgtcttcacggatatagctgatatatatggtacttgtcccaaagggaaagaatttattgaataatgaactgtgctttcttgtgaattcttctaatctcatgatttattcacgaacatggctatgtctttatgtagaatcttggtaagagtaaagacttataaaagcccaagtaagaatctgttttctgcatctagtattttgcctgtgtaaggtcaagcaaaatcaatgaaagagagattaatgaagtgattgctatccatttcctatgcttgataactttgtgaatcaaatatttacataaggtatacagatatctttgccattttaaaacattctttctcattttaaacatattaatctaccaaaattttggtagattaccacagacacctttaattggatgtcatttgcttttattctagtaacagactttggtaggggtcttgcagggtatctcagttttacagatgaagaatctgactctaggaaatgtgatgttaagcagtgtgcctgaggtcaaaagttagtttttaaaggagctggaattcaagtccagatccatcttttttatgcaagctttgtttttcctatttggtattctcagtgctttgtataatgtcaagaacttagatggtactcagttcagttttatttgcccttttaagatgtaattttaattctgtctgagactcactttggatcatctgtattctccttttgacgcgatgtgtattcttattctttctgtttgttgtgtctcaggttcttttctccagtctatact

SEQ ID NO: 48053 - DNA, 800 bp, Bovine  19866881062014
  misc_feature (1)..(1): n is a, c, g, or t
ncatggaactgggttcatgggcccaagaaagaaggagcatgattgaaaatgatggtgagagagtatcatcatcttccttagcgtaactatagctggagaacctttgagtcattgctgccaccttcacttaaaacaaggaaacaaaactactattctcccatgaacagacactgcaggagccaacatatctgtggaggaaccagctggacttgatcctgtcctgccacgcatcaaaaaccttgtgaggcccgttacactgcacaatctcctaagcattgatcctcacagaggcagggagagttcagctgggtatttttttttttttttttaatcccacaaggagtcagaggcattggcacttagcaaatcctcttttaatttgctcactgagaaaattcaatcaagacatcattaaaagaaaagagaccagcatggcaccatttgtcaagtctatctttgagctatcactgcttttcaaggggtggtgagtgatgggcagaattatattttctggcttctgaataagcttctgtagaagagctcacaattctttttttaagtcagaaaccaataaaaaatttgtatatatatacacataaatgcattttacccacctgtaacctgctgagcccttcacacagcagtagatgaccaattaagcgacaccatagctctgcgttcagatagcagagtcaatttggaaccccctgggggaaatgggaatcatgaatgaaggatgcctgctgaaaagcagggatttctgaagcatgattggaaaataggccaggcaaaaattacga

SEQ ID NO: 48054 - DNA, 1828 bp, Bovine  19866881093241
  misc_feature (1)..(1): n is a, c, g, or t
naacaaaggtccatctagtcaaggctatggtttttccagtggtcatgtatggatgtgagatttggactataaagaaagctgagtgctgaagaattgatgcttttcaactgtggttttggaaaagactcttgatagttcctaggacagcaaggagatccaacccagtccttcttaaaggagatcagtcctgggtgctcattagaaggactgatgctgaagctgaaactccaatactttggccacctgatgcaaagacttgactcatttcaaaagcccctgatgctcagaaagatttacggcaggggagaaggggatgacagaggatgagatggttggatggcatcaccgactcaatggacatgggtgtggatggactctgagaattggtgatggacagggagacctggctagctgcggttcttggggtcacaaagactcggacatgactgagctactgaactgaactgattagataaataaatcaagatagatgcctataaataaataccacacaaactataaaacaaaattatacacatacccactaaatatatttataataaatacacaattgtaatatgtgcatagaaataggatctgcatgcatctgtgcatccatgataatgaaggctacgttcagcaagggaatagcatgaatgttcatgatcttaaggatgttctgtgtactctgatattttttaaataagtatgcattgtcattttgtaaataaaaatagataaataaaattagtaaaaaacacaagcaaattttggtaaaaatataacctagcttgtagttgtattacaacaggccctgactatgggaaatatatcaccaaacatctagaccctagcaaagtaatacaacgtgtatctgctgatggctgatcaatttgtgtcaccaataataaccataaatgtttttttaagttgcctagaaagatctcttgagtccacagtgatatgctagattcttacaagagtagcaagaatgcaaaatatacatgtcaattctgaacggctgaattaaaaatgaaagaattccagcccttttctctttgaaatgactcattagacggatgattttcctgttattaaaatatctgcaggcagtcaaaaatggattaatagcaaaaggtatattgattaacctgtaatttctattattataactaaatgatgtccttgcctgcaagtggaaagtactcagaggcttctttttcctttgacatattattgttcactttagtgttctacacagaacttgacttctactgaattattgggaggactagtatctctatcaggccactatatagttatttttaaacagatgatattatctcatcaggaggaaaaactcttcattcatttttaacactttttcctaaggaatcaatgtaaacatttttgtctttataaactgattcaaagtacacttgacttcaaatattatttaaaagtttaaaaaggaattgtagaacaaatattttcttaaacacactgtaactcaagcaattaaaataaccagtttctttttatttcactaaattttatggcattttttagtagcaactttctcagtttaaacaataaaggactttcagacagcatgtaagtgagaaggtataatctttctttcagaattcattgtcaaagacactatggagaaaagtatgaagatttctttaaaaactaggaataaaactaccataggacccaacaatcgcaccactggtcatttaactgtgagaaaaccgcaattcaaaaggacatatgtaccccaatgttcactgcagtgtatttataagagctaggacatagaagc

SEQ ID NO: 48055 - DNA, 1727 bp, Bovine  19866881108817
  misc_feature (1)..(1): n is a, c, g, or t
ntcctataaatggaataatataacatgtggccttttgtatttatcttttttcattgtctatagtgacttccccggtggctcagacggtaaagcgtctgtctacaatgcgggagacccgggtttgatccctgggttgggaagatcccctggagaaggaaatggcaatccattccaggactattgcctgaaaaatcccatggacagaggagcctggtaggctgcagcccatgggatcgcacagagtcggacacgactgagcgacgtcactatagcctttgcccagtccacccacgttacagccacgttacagcatgcaccagcacttcattcctttttagtggtgaaatacttttcttatgatctagtatatttcatttattcattcatcagttgatagacatttgggttgtttccactttataatgaataatgctgctatgagcattcacgtacaaaattttgtgcagagatataaatacttaattctcttagatatgtacctatggccagtccaggttcgatgcacgatactggatgcttggggctagtgcactgggacgccccagagggatggtatggggacggaggagggaggagggttcaggatggggaacacatgtatacctgtggcggattcatttggatatttggcaaaactaatacaattatgtaaagttttaaaaaaaaaagatatgtacctatgggcagcatttctaaatcatatgtttaacatctcgagaacctgccaacctgctttacaaagcggatgcactatttcacgatcccaccacatacgcagtataaaaaggaaactgatttaacaaaattaccatatagactacctaattttggcacactgtaactatagaggctacagattttttttttttcctgcctttttaaagagcaaataactgagctatagcattgcccttttattgcagcaagattttagcccttccagttcttcatttaaaagattatttctacccattgccattataaatttaagccaaattggagaacagagagcaactgtaacactacagagaatttaggacacagagaatagagtagtaaatgtagatacatgaaatagccagtaagcaatcaacattaactttgcatttttatgtcatggaggaaaagctacactcagataaacaacttttaggatctgtaaatatctcaaattaggagttcaaagatactctttgggataaaaatgatgtttcccctttgaatatattcttaaagcagataaaggtaggtagaaattgaaagcagatttcaactaaatgccagggcttctaacaacccactgatgagaatccagctgttcttctctgcttcttacattagcaataataatggtaaagaagatgccttccttatttgctgacagttgtgttgataatgcaggaggcaaaatagcatttctcttctgggccatgttaattatggaatgctgacaagagttcaaaaataaatctggatccttcaagtcaatgccccacatcaatataaaatgaaaactcatgatacactgacaagcatgagagaagtgtagagtttacacaacacctattttttcaataagtagaaagattcatggcagattattaaatccaaaatgaataataggtcgtaccagaatatcaatttagagatctaggtaacatctctctatctcttatatttctcatctgatttgttgaagcagaaag

SEQ ID NO: 48056 - DNA, 1129 bp, Bovine  19866881120478
  misc_feature (1)..(1): n is a, c, g, or t
naatctgcctatgatgcaggagacccaggttccatccctgggtcaagaaaatcccctgcagaagggaatggctacccaatctagtattcttacctggagaattccatggacagaggagcctggcaagatacagtgcatgggattgcagagttggacttgactgagcaactaacactttcactttttctcattttttattagattgggcctacttagataatctaaaataatctcatttcaaagtttttaacttaaattatatgtgcaaaagaattttttgttatataatctaacaaattaggatgtggacattttgggaggggtacaattttctgcctaccacaaaggtttaaatgtcctatgtgtgcgtgggcttgtctgagataaacgaatgaatgttagaagtaaacaggaaagtagctactcatggatttggaaaaatctaaatgcagtgtaccctattagcatgggggaaataatcgtatgcctttctcactacaaaaataataggaaaaacttcatacttagcccagaactgtttctgatctccataaaccaatgcataaaggagttcaaaaccaagctgctgtcacctaagaacatgaaaatgctttgtgggcttagaagtaattgaacaaataaaatgttttcctttaatatcttcaccaagttatgattctgaatgtttgaccatatctgctgaacctgtcctaagaagatgaatacaaatatggatgtgtgattaaactcgactgaagtggatttaattaacctggagaagagaaaaatcaaggagtatttgaaaggtctctttattttgataaggggctaatatgaaattagaaatgtgctgtgcaatcttagggattgacgtggtcccaatgaacacttgctttcagaatgttgagttctagtcaacataaagaaagtttttctaataatctgagcagtctaaacatggataggactgtatcataagatcatatccttcctgttattagaggtcattgagcagtgaaggataagcccttagtaaggttgtttggggtatattttaagtactaaagggttatatattgtttttaggaatgtggttcctttttccaaatcaaactttccagttctataa

SEQ ID NO: 48057 - DNA, 1554 bp, Bovine  19866881221929
  misc_feature (1)..(1): n is a, c, g, or t
ntgggttcctggtatggatgctgtgactttctaagtgaattcttctcaggcattcacaaaaagaacagtggtctacactggcctcttggcgatgctatgaattcccgtggatttggggtggaggaaacactgggatacagaaagagctaaccagtgtttcagcaagttagctcaaaataactggggtgggtgtttgcttttcacatgggtaaatttaattagctttgtgggtggctcagaactgatacagacctcctctggctgtggtacaaaattatccagggccacatttagcatttctcaaaacatgcctcaatctccatcaaactcgcatgtgcctccatcaggagaattttgaaccagtacagagaaaattaaatttaaaataaatttaataaagtatttcttcaactctataatctgcacttagaaaattatcatctcttggtacatacaattacaatatatttgaaaagccttttcagaccacgttagctgctgtggtttgttaatgaaacacacacacacactccatagcacttataaaagggaaaatattaagtgctgaaacaatattttaaagaattaaagtgaaactactcccttgagtaaaacagatgctttctctactccttggctttgaagaaagaagatatgcttattaccacttgcctcttaccctacctgatttttgaacgtttatagcacacataatcagaaatgtcaataaatcgcagggcatttattttctaaatcattatttacgaatcagaaatatgacttagattattccgttcccaagcagatccagctgaataaagggactaaggattgggaccttgtgctcagttgctaaattgtgtccaactctttgcaaccccatgaactgacacctgggagttacattcctctgtccctggaattttgcaggcaagaatactagaatgggttgtcatttacttgtccagggtattttcctgccccagggattgaacccctgcctcctgcattggcagagagactctttaccactgggctacctgggaagcggccagaaactagacagctctaaatgtgagcataacacttggttcacacgagtgtgtacatattcaacaattgcttattaagactttctatgaactagttaccgatcagacagtagaaacaaagcttctgccttcctagagctcatattccaggaatggaagcagaatatacatacatacatatatatatatatatatatatatatataataggtagaaaacacaatttcaggcagttgctagtgctatcacgaaaaagtaaagcagtaatgcaggcgtacagtgatggcaaggcactgatggacatttgaacagagatctgggaaagtgaggcacagcagagatccacataattgagggaagggctttagaaacggggacaggaaatataaatgacttggtttgcatgtcaggaaacagcagggggttgaagtggctggagaattgaaagtaaatgggaagagcattgagaagagagacggagaggggatcatgtcagatccac

SEQ ID NO: 48058 - DNA, 1730 bp, Bovine  19866881313592
  misc_feature (1)..(1): n is a, c, g, or t
ncttcagtcatgtctgactctgtgtgaccgcatagacgccagcccaccaggcttcccatccctgggattctccaggcaagaacactggagtgggttgccatttcctttctcccagttcatgaaagagaaaagtgaagtcgttcagtcatgtccgactcttagtgagcccatggactgcagcctaccaggctcctccgtccatggtattttccaggcaaaagtactggagtggggtgccattgccttctccaggattactgttcacggagtcacaaaaagtcggaaacgactaagcgactgagcgcacacgcgtgcacacacatacacacacacacacaccgtcactggtagagtgacttgtcgaactttttttttccttttcttccagccaaaataactagctcctgtgttgctgagttacttttcctttcccctgaacttgtaggagcagatcagcttctgcaagtctcagctaaccatactgcaagaaagaaagttattgaggggatggccttcgcatgttttcctttaagaaactcaccataagcaaggaatgaaatgtggcaatcactattcaggagagtgtcaaaatcattcagaaatcaaaacaggctattggagttcacaggttctttaatatgcacagctactatcttccttttagcttaataaggggttgtgtatccttacaattaaagataattgcagagtgtaaaaactgcattgtgattatagaaacacagactgaagcttagtgatgacaagacaaagacttcatcaactgcacaccttggaagttttaagtgtttaaaatataattcctcctctatacagcttttttctttttatgctgagttcccttctttcttaattcccaacaagaatacattgttcaatgtcttgactcattggaaacttagctgtgagatttccttacatttttttttaaattcataagtatcaatggtgcttctttaaatcatttagaagttgacttgttctaaaatcaggttttactgcattattgttttgtggtttctctggaaaccctgtcaaaaatatctctctacatctcattttgttaaattattccagtatctttcacttcaaattatttgggtagatagaataaggtatttagatgctatgaaatatgaaacacaggtacttttatgtgatcaagcgcagagcttcaatttaagagcatagcatcagaaaaagcaagggtagtgttttgctttttacatactgaataggctagactatggcttgataagcatcatgctggatatttctctttgagactatttgtataaaaatttgtagagctaacttacttggataatagactcagcaggaggataaaagaaattgtaaaagaaccagtttatctttaaattgacaaagaggccaagttcaatcataagtttatatgaagtatcaagagctgcaatgccacaagccacagacattttctctgtcttgaataaagtatgacttctcaataaaacaacaaattggcaaagaagtaacttttaagcagcttcagctacttgtcatcgtttactcacaaggcctgatcagctttacttatcaaagaaacattgatcaattccctcaaactaagtacatgaagtcaacaaagcaaagggactcaaaaagtggtgaacaaatactgtaaataagaatttccaaggaaagttcattggggaaaaaaacaaacaaaaaaa

SEQ ID NO: 48059 - DNA, 959 bp, Bovine  19866881351439
  misc_feature (1)..(1): n is a, c, g, or t
naaaatccccatctgattttctttgttgagtcatcttttaaaggggtacataaacaatgtaggcatagcaggactttctgccataaagagaacctgcacgactccctctgagggtgaagttttgatgtttgaaattggcaattggctgtccccacaacggggtcatagtgaaacttgaaatttcaatccctaacaggtgaagttggaacccagtgatcactgtgattaaacgcagcttccctgttccttttccaaaatgattgtgctatcgtagaggtagcttagtgggacttttcccacaccactcctctgacctccctaatccttacaaacagacccagacacccccaagtgtgcacacagtttaagtaaaagcagcatgtttacaatgcagacactctcaagacaagtcttgtaagtttccttaaaaaaccagatgactcttccccaatgcttcctagacataaattctggagccttacctaaatctcttctctctgcaagttgcaaaatagctaaaaggaggtgcatttcatgagttagtgtgagtttctctcactggatcacgtaaaatgctgaagtcatgtgggtctttcataaccatttccctggtgcattgccagagccacagagtctaatgagctttccggatgggatgcggcaagctgaggtgtgcatcaggtgcacttgtcacaggcacagacctccgaagagactggctttcaggtctgatttgcaagctggatatgcccgtcactttggattagcttccaatttaaattcagctgttgtcatttccgtcttagcatcacatgcattctgacggaaggccttgaataaaatcacagttccagaaaatcctgtctgttatcataatgctaagaagccactgtggtagactaaaatgaactagacatcaagtatgttgccttagcaatctatctgcctttcctttttca

SEQ ID NO: 48060 - DNA, 845 bp, Bovine  19866881356420
  misc_feature (1)..(1): n is a, c, g, or t
ngttgaatgcgagggttaagtgaactagtctatgggaagctctaagaatggtacctggcctaaggtcagcaatcaaaatcgagtatctgtatcagtattgctgagaactgtttctgcacgcaatcttcacagcccaaaatgcctttgccgtcaagttagcctgtgggagaacgttttctggattcctccctcagaggtgatgcttatgagatttaggaggcatctcaccaggggtggtctcccttttctctctcccaccctccctccctccttccttctgtctctctctctgaagcagccacacacaattgccagatcaaaatgaatcctcacttttttttttttttttaattctccagatgatggatagcaaaactaaaataagtcctcttgagataatgttttttgagtgtccagctggtggagacaggaaaagcaatttcaatgagacaagagcctctgagaacagatttggagagaaagtatcatcctggtcttctagaaatagaagtgccatgatgcagactgcaaggaattcagattatccgcagagggacggtgctgctcagtgaaaggggaaatgacggaagctacaagggcagaaatggccttgccaaatcccgatttgaccagctagcctgcagaaaccagcgtaggcctgattgggtgccatatcctgctttgcacacttaacatcttgggcgaggtgtgatttgtggtggaagcaatttggtgccaaaatccttgcacagtgggttattttcagctagctctaggatttaccgaatgcaaaaatctagagattgatagccaaaccatactacttcgagagacaccacttccct

SEQ ID NO: 48061 - DNA, 1026 bp, Bovine  19866881365163
  misc_feature (1)..(1): n is a, c, g, or t
nccggctttaagtgattgcatttctaagggtaatgttaaggtagagctggatcagtgaggcctaatattcctcccagagattaaggtttgataccacttatatcagaaacttctttatttaaatactgccccaattttgttccctagtctcctaaaatgctcctgaccatatcctgaacacacgagagagagagagaaaaaaaaagctagctctcttaggaagcatgttcaattttttgtgggactggctggtggggaaaaatggtttttaagactaaaggttgggagaagaacacacagtatgtgggagggtgcattgcaaggagtgtatgaaattacagcacaaaggatcaaagagaaaaattgcctttagagtgacaggctctccttcaaggagaagaaaaaccaaataatttatgcctgcggaggtaccgtagggctcatatattagctggcagaattcctcaggattgctataactgaggcttttgcagggaggacctattaatcctttgcatgctttgccattaatattgtttattgggccacaagaaggggacataaacctttaatgtcactttttcgcactaaggattttttccttaaaaattcaatgttgtctgccaatttgatacggcactttaaggtgattagagaagcagatggctgattcttaatgactattttttttttttttgcatcaaccattgattcgttatttaatgcacacggcacagaatagcaacattcctttttaatggagttgaactgtgctgcaaataggcaaaagtttttactgacaaataaagatttgacttagaagggtctagaaggaaaacagagcgctaggactcacaaactaaccaaaacataaaattctggaggagagggaggaagcagagagaagcccagtactcactacgcactcagtgtcaattgtgaaggaagtgtcaagcaaggattacaaaaagtcttcaggttaaaaagcaaggcaggcggctatgcttcaaatcaccggacagccat

SEQ ID NO: 48062 - DNA, 1146 bp, Bovine  19866881421208
  misc_feature (1)..(1): n is a, c, g, or t
natggacagggaagcctggagtgctgcattccatggggtagcaaagaatcggacacaactgagtgactgaactgaaaatattacaaactaatcagtaaactctgtaagatgcaattttaataagaactgttataaatcaagctgtttgtctgcttcgttcattgtgaaaacgggcacctgaaaagagagtctcgcccgtggttggcacacagcacccacttgttagtgttgcttttcttatttactgcaagacctatcaagacaaaaaaattccttatcctagaaatatctaaaataaatttaatagttttgaagtcattttcttggctaaactagaatggataagacattagaaaatgactcaaaatattctagatagagcattaaagttaggtttatggacatatctggaacttaaatagcaacaacccacagtggtctttctacgtttcttctttttgaacagttttgagaagatataataacatactacacaattcacccactgcaagtgtaaaaatcttatgattttcagtagatttctagagctgtgtaattatctgcacaaatcaattttggaacatttccatcaccccacgatgttgtctggcgcccgtttccagttaatccctgctcatccctgacagccattgtctatacttattatgtgtttggacaagctgactcttcaagccagcaaggagtgaccctccaaaggaaagagtttccccaaagaatatagtaaatatcactgccttctgttccttttgctttctgccccaagtttatgtcaatcacagtaactcacctgagacaggcagaaataggattgaggagaggtgtagacatagttgaaaccatgcctgcgactaggcgaaaagaaagtgatgggactgctgtgctcagatgtggttttcaggggtgtgtgtgtgtgtgtgtgtgtgtgtgtgtgtgtgtgtatgtgttaaagagacaaaaggtggtacctgtcttaagggaaacgcaccctgagtttgggagtacacgcagcataacaacgcttaaggaattgatagtaaagccttcttgactatatctaaccaatttccaagccttttcaactttaggtctaaatactttgaatccatcaattttcctccatctcca

SEQ ID NO: 48063 - DNA, 744 bp, Bovine  19866881533709
  misc_feature (1)..(1): n is a, c, g, or t
ntgcaggcaatgttactttagagcgacagctggatgggggaaactggtcaaaggctgatccacagcatatggcctcaccagtttcttgattcccccacacataacattcttggcaaggtcaagggcaggcaagaaaggattcagtaaacttttgcaggtgatgtgcgctagatgtgtcctgcaagtcagcatcctgtacatgcagacctaggcgccagcccttttgtttaaaagacaaagattttactttttttttttaagtaaggaacatgaaatccacatggatggcactgatatgttgacaatacagatcgtcaacccgatagaatttcactgttcagtcttaagttgtaatttttggaaaaagatgttgtaattagtactagtatttctaagtctaagctttgcccttccacactttaaggagtgtagctaaatagcaaggataatattctaatttgttatttgtcatttagatggagtgtagtgttgtattactttgtcttcagccagcaaatactgagtctctgttcccccaggaagcttatcatcatctaaacacatttgtctttttgatcaagctaaatggtaatccagctccgaaattttatttacagataaggttaatattagctaaaggatcaagagaaagtcttgatgtcctagaaaatacagaatagtctcttagagtagtataagataatttttcatcctttttattccctctttactcatcttttatag

SEQ ID NO: 48064 - DNA, 747 bp, Bovine  19866881546097
  misc_feature (1)..(1): n is a, c, g, or t
ncaacctataaatctcggaactggcaacaagtatctgaatttgactgatgggacccaggataaatggattcctggtaatagaaaaagtttgctcatgcattctgcttcctacccatgtacccagtgtatgcagggatctaggtaccgttcattcactttgaatatggatttagagtctcttcttttatggtcttcctctaatacacagcttttatcacctaagtatcaaatcgtaggggatgtctgagtggcattgtgtcactatggggattgtttgataattgacaacagtattaccatacataacactcttccatggaatgagtttggaattttccgggaaagaaaaatcttatatctcttttattactaagccttgaaagaaaatatatacaaataggctaagtgaataattcctcagcctccaaaaggttaacttttcgtcttctataattgagtctcatgttaaattacctctcttcttttgataaggatactcagtgagctccttaaggtgaattaaaggtagtatctgaataagtaagccttggacagttggagaaggcagggaagtgtgaattatggagcactgtaataccaggtgttaccagcagatgtcacaaaagcagatgaaggtaaaagaattctaccagtatttacaagcatttaatttagtaaacacagattgtaataaaatgtgcaacattaatctgaagtgtgatatttttataaaatgcaaaggtgcaa

SEQ ID NO: 48065 - DNA, 760 bp, Bovine  19866881558167
  misc_feature (1)..(1): n is a, c, g, or t
ncctccgtattctggcctggagaattccttgactgtatagtcctggggtcgcagagtcagacgcaactaagtgactttcattttcactttcaagccgttggccagcttctcagtccaagtcaagacagtgtttccaaaagccaccgccaaggtggtttcaaacttagtcacttgagatgaattttaataaactttctttccttgcttcctgcttttcaatgtctacttaagaacaaacagaaagtcaactccagtactcttgtcagtttgagcccgataaaaagacattaacattccaataagcaataatgttcttttatggcatttcagtactgaaaaagtaagtagttctaagaccgctgtgactgttagtacttaaatggccaaattatcttaattgtctcagaagtggtactaaagtttgaaaaagagagaccgcacaggtgagaaagagggaaacatgccaacattatcctcagcctttagaagggaacatttgtttgcatttcactcaacagcaaaccacttcccagtaaatcaaagcccaaagaggtccgggtggcaaaattatatggcacgtgctacccttggctgagttgtagtaaatctaactccgttagtgcagaaagctgctgtgaagaattatgagaccatttgatttcaatttaatcaacttagagttccaggctggcccattttgaggctgcaggacattgcgtcgcaaggcctgagacatatttttactgttaggcagaaagct

SEQ ID NO: 48066 - DNA, 2016 bp, Bovine  19866880928708
  misc_feature (1)..(1): n is a, c, g, or t
ntgaactccctggtatttttttcattgtttctttgcagacatgtatttgaatactgtcactgtagccactaaatgacacttaaaagacagcaaagaaaaacttgccaaattgggagaacatttccacatttatgttttattataaatagtatatcacaattttcatgtaattttaggcaacatggttatatcaaattatgactataatttcctgtttcttttattttaatatacatggtgtcacttgttgaaacacatagccactgatagtttttctcataataaaatcatttatttactctctccttaactaacctgttaattcatttatctatgtcattttcagttttcctaatttcattcaagccttggattggttttatttaatttttaagatattatttgacttttaattttttgtagtccattttttataaatttagtgttttataggttgcaaggattttaattttcacttaaaaaaaattcctaaccatcctagaatttcccatttccacagcctctttgatttgaatgaaaatacatactggaataatgtgaaatactactttaaaagcttctcagatatagtaacacaccattcaaataggtttgtttataatgaatataaagtagaaatgctaagttgtttactgccaattttgtgtatttttaaaatgtgtttacttttcatgatgatatctgcttttatgttctgtttttacagaattcattactattgggaattaatccagacatacgtagaagatgactgactcagggaaattaagataacctgaaaaaatacaaatagccccctgacattttctggagtagaaaatgaagaataggcaatatgatttttatatacaagaagatgcaaagtaaaaggaagcatcttaaaaagctaattttaattaatttaatcttcttattgtaaccctgatagttaaccccttattcttttctctttccagaaatagggccaaggtccgcaccttgatcactggagtcctatctctattttagttttacagccatactagcaagctgtcttctacatttaagaaatgtaaactagttaataaaactgtgagaaccttgacttttacatttcctaggtgttacgggtttcaatttgcagtggcagcattgtattatcatagtttattttccctatgatttatcaaaataaaacaataaacttgaaataagggtgtgaaatagagagtagaccaagaattttattttattgcttaattttttaaattgaagtagagttgatttacaatatagtgttaatttcaagtatacagcatagtgatccagcatttttttagcagaccattgtcagttattgtatttcctgtgctatacactatatccttgttgcttatccattttatgtatagtagtttgtatctgttaaccccataattctcatttgcttggactctgtagttgtggcacatgggctcccgagtgaaagggctctctggttgtggcgcacaggcttagttgctcctcagcatgtgtgatcttagttctctgaccagggattgaacctgtgtcccctgcattgcaaggcgaattctgaaccacccaggaaagtccctgtttgtatatcttagatattaacccttaattagttacattgtttgcagatattttcttccgttccataggttgtcttttcattttgttcctttgctgtgaaaaaaagtttttaagtttgatgaggtctcatctgtttttgttttttttttttggctcttatttattttgcctcagaaaactgatctaagaaatagtatacaacctaatagtacaaaaagtaattgcagctttggactgtgaatattaaatcattatcactaggctcatgtttattaatcaaaataggaaccattacaatcaatgtatttttgcaaatgagaagtagtttgtttattcctgtagcataaaaatccatgcttcaggattcaacaaagtctggaaagcattttctgcctcccg

SEQ ID NO: 48067 - DNA, 827 bp, Bovine  19866881036535
  misc_feature (1)..(1): n is a, c, g, or t
naactggaaaggctgctcaactttgcctccagtagagggtagagggtagatgtccatgtgtggccttcagtctttaggaacagacagtcacatgattggaacaggaatgtaggcaagagaggagtgcaggaaaagtgttccttcaagtaactacatggaaagaataggtggtaagtaaaagaattataacatcttggcatcctaatgagtccacagtacaggtgtcgggaaactgaaataggagtttgacagggaagtaaaggcttatttgcaataagagagcttcagtaattttcttacccttttcacttctacagcagacatcaacttggatatatcaaagcctttgaaagcaaacctgagttttaccaagttggatcaaataaaccattttttgaagaagataaaaaatgtagacagcaaaagcgtcctcagcaccgtcagacactgtgctgagtaaggatgcgcttccagcctccaaatgttaccgtgggaagttatccaagcttaaagttcatggtgatggagcacaaaagattccatttcaagaaaacatatggagaacgatttcctgctttcaaaaaatttctgttcatactactcagattgtggtctccgtggaaactgtcccccatcctaataaaccatgcctgttggcatctttatccaccctcagtggaagccttaatgtcaaagcagcgcagaaagtacctggtaagtcacagtaaaggggcaagagagatgtcaatgacttgttaacatctaaaactgcataatgttgaaggtttgtgttatgtaggggcaaaaagtttcaagaaccattagag

SEQ ID NO: 48068 - DNA, 867 bp, Bovine  19866881083369
  misc_feature (1)..(1): n is a, c, g, or t
ntgttttctgagatttcctggtttctactggtatttatgcttagaagaggcaatctttctatcccctgctaactcctcacaggatgggtgttcttttcacagctgcatttcatatatgtaaaatcaacacccaactcctctagcatattttcaccagtcgtactttagtaggtaatatactaggaaggtaattatttttaaagagcccaaatgacctagaaatagagtatgtaaagtataagacatattattattaagcaaacaaagtaattaatgaaaaaaagactgtgaggctacagactaaaatgcgaacagaggtttgtattgtgtgaatatgatgggtaatggtattattttctttatttcccaaatgttcttcaaggaacacatattattactaattacaaaagagaaagtatttacaactatctataatataaaataggaatcagaatacaaaatggtatgctatgattatgaccccgtaaaggcatacaatgatggcaaaaataaaggtaaaaaaaaagagaaaacagttcagctgcaaggtgttggaatagtggattttttttctctctgttagtgtcaaaatggtgcttgggaaagaaagggagggagggattatatataaggaataagatgatgctaaagcgaatctgtcaggagaattcaaaggtaggacattgaaagcgatgggcagcaacatcaatatgggtccacagcacacataccacatgacccaagaaactgttccacttatggtgattcagtgtctttttcttgtcattatgagagcataacagaaagatagaacagatatgtaatctagaaggagcgctgaagaacacattgctaagccattttttc

SEQ ID NO: 48069 - DNA, 1409 bp, Bovine  19866881293061
  misc_feature (1)..(1): n is a, c, g, or t
naaaaaaaatgtaaaatagaaaatgaacaaatagtatgggtgggacttaaaaagaaaaacaacaacaacccagcaataagctgtgcccacaaaacagtttttccatccacacaaaatgaccaagcaccttcttgggtgttccctacagaatcctcttcctctgaccctgctgcccaagggaaaagagtatttttggaacacgtcactctcaaaaaagtaaaaaaccacaaagaacaaattcttttatattccccaatacaaccacttcttaaaaattcagtaacaattaaaataaatggtagtaattttagaaatgtttccatataagataaagaacagcttacttgcagggttaaacagcgtaaacattttctgtcatatgttatatagttaaacaatattttaaagatttttattttcatttgtaattttcaatatacaaatactgctaattccaaagaccatcggaatgattttactcctgaaggagaaacacaggattacagattctctaaaaagtacaatctggcacaggtctgaggaactgagagttggtctgtatttccttgaatggaatgaactataattttttcccaactatatatcctcaaccacaggactgtattgtacctcaactgaatattatggcctaatagtttgatttaagtatcaaaaaaaaattcttttggctaaaggccaaattcaaaacattttttgtgtgtgtgtgtagtggggggagtacaacaacatatctatttctgactcttggcctgcttctttctccctttggacctcatccctgacagacatctgtattttgtaacttttcctacatgctggctctgaagatactctgagttttggcctaataatccttctctgtttgaattcattagtgtgagaatcacaggactagaaaggactttgggaggtcatatagacatcaacttgctctggacaagactaactccaaacgaggaagaccaaatgatgtttaaagactcgtagacgaaatttcaagatttctctcatcaacactgcagtgctttgcatgcttcactattagaaaatgttttatgatatagttttcattttataaaaatgttacttggcagacatcaggactttctataaaatgaagtaccatacagcttacatttttagtccattaaagggatatttaagactgaaataaattatttgttggactccaatggaccataactgggacagaggaggtacctagcttatgtgacactgacatcatttactgatagtactacaaatgctatagatgttttcattcaatttggtctttatatttaatctatcttgctgctgcttagccacttcagtcgtgtctgactctgtgcaacatcaatggattaaagcccagtaggttcctctgt

SEQ ID NO: 48070 - DNA, 813 bp, Bovine  19866880703536
  misc_feature (1)..(1): n is a, c, g, or t
nctggacctgttttgttttgttttgttttagagttggatgaacaaagagatttacaaaggtcagatatttaatgagttgactgctttggtagtgaaacaccaaatgagttgccagaatgagatgtcttaaaaactcaagagaagggttgtcgcacatgtaggtgtaaacacagataataaaatatctgatgtgtttaaaaatatgcactactgaaatgaattgcaaagtcttatttaacataaatcttcacattttaaagttggtctttgttaagtaatgaaagttcatattttatcggttttcacacaagtcattacaatacctggagaatacaatatttgcttctaattttagttttaaaaccttttataaaaaactaagagctacttacaaacactagcacataaatatacattcattgtggagaattcaacacaaaatatatgtggatttttttttttaatgttggcaatttgatctctgattcctctgcctttttaaaatcatcttgaacgttgggaagttctcggttcatgtactgttgaagcctggcttgaaggattttgagcattactttgctagtgtgtgaaacgagcacaattgtaccgtagtttgaaggttctttggcattgccttcctttgggactggaatgaaaactgaccttttccagtcctgtggctattgatgatttccaaattttctggcatattgagtgaagcaacgtcttcttttacagcatcatcttttaggatttgaaatagttcagctgtaattccatcatctctactaagttttgttcatagtagtactt

SEQ ID NO: 48071 - DNA, 789 bp, Bovine  19866880346722
  misc_feature (1)..(1): n is a, c, g, or t
ngtgaatcatttgtaatatgtttacatttgttatctggtctttcctttaatagatgcctataagaaaattttagaaaccacaatgactccaactggaatagacactgctaaactttatcccatcctgatgtcatctgggcttcccagggaaactcttggacagatatgggccttggccaatcgaaccacacctggaaaactgactaaagaagaactttatgccgttctcgccatgatagcagcaacacaggtagacatcctttagaaggttaggtgtatattttcaatataaactgggagaatatgaatcctttttcctacaacttatagaactctttgaacattaaaatttaggttattttcaggatagagttcttcagaatgtactgtttatatgatatgcgtgctagcacaatactcttttatttaaaggctttactatattaacattctctgacctaactgtaatccttttgagcttgaaagttagtaatagatgaagtttctctgtcctttgaagtccttgtctaaaattccttagatatagataaagtgtactcggtctggcagcagtttttctcatattacaaaatcattgtaaaggatttgattacagtgaattaaccaaacttgtcagagtgaaaatgtcatattgagtgtgtgttggccatttctttgctacatattagatttacattaaccttataacttactttctgaagtcaaattcctgcgtcctgggagagtcagagagaaaaccccagggctgcagattttacatttaggtct

SEQ ID NO: 48072 - DNA, 3195 bp, Bovine  19866880387208
  misc_feature (1)..(1): n is a, c, g, or t
naggtggttcctcttttcctgtggttgtgtgattttccataaatacatatgcatttaaaattttttctctcattgataccctgataaaaatgcagctgataattttttctttctcactgtgttttttgcaaagcatgcatgtactcgttcatttattcagcacacacttactgagcactatgttccaggcaccggccaggaccctggggatgcaaagatggaagatgcagttttttggagataaaatatttgaaggatccagtttcattagctgtgcattcggagggcttatcatatgctaagtatcatgagaagaattgaaaagagcttgaatagttccttcagaaaacttaatgtagtgagagagatcacatattgacatgaaaaatactcaacactggtagagcgagtgtgaattaatgcggtgagacctgagtacagaaattcaggggagatgtaaaatggagatgcagcccacagggcctgcaccctgtatctcacgaaagacagtgcactttttttttttttaagatgtatttgttttcgttttggctgtgctgggtctccgtcactgcgcaggctttctctggccgcggccagcaggggctcctcttcgttgtgttgcttgggcttcttgttgcggtaacttctcttgttgtggagcacaggcttagcagttgcggcacacgggcatagttgccctgcgcatgtggaatcctcctggaccaggggtcaaacctgtgtcccctgcatgggcaggcagattcttaacccgtagaccaccagggacacccagacagtgcacagctggcgtgctttggaagatcgcctggggtcttaaacaggacacagctggggacactggccgctttagtctccaggacctggggtggctgcaccgccagacctgtcacctctggccacgagtgccttatttctccgtgtaccgtgacgggagcagtgtttggaagcaccgcttcatggcctttgatttgtctctttctccccagatatgtacgaccaggtgctgaagttcggcgcttacatcgtggacggcttacgggagtgctcgcagcccgtgatggtctacatcccgcctcaggccgagctccgaggcggctcctgggtggtgattgaccccaccatcaacccgcggcacatggagatgtatgcggaccgcgagagcaggtagtgctccttccttgcttcctctcactgcccctggggagcctcccgctgtcgggtgtcctccggagagcctgtctaaccgaggggcctttatctgactcagactgtccccagagggctccagggtcacaaagctaggctttctaggtagcatccgccagcacgagaagggagccaggctggagtcagactttcccatgtgatcccccaccctcgattcttttactgtgaaatcctccatccgggccctccaacttgagagactctctcctattggttgttcacatcgacctattcagtatctttttttttttaagttttttttttttcttaatatggaccatttttaaagtctcctttgaatttgtgacagtattgcttctatttcatgttttggttttttggccatgaggcgtgtggaatcctagctccccgactaggaatcgaacccacactccctgcattggaaggagaaatctcaaccactggaccgccagggaagtccctcactatctccttcttaggtatgtggcagaggtggcttacagcgaggtggggcagaagcactgagctgttagtctggagtcctggagtcttcaccagaccctgccgcaggctagagggaaatcggagcggtcctcactctccctgagctgcttccccttgtctgtgggatgagctggatgaccatcgaggtgcttcgcggcacccacgttctgtggttccaacccaagcttctcccccagggcagtgcctccctcgaggcttggacagcagtgttcgcagctcgcagagaactgcagtgaaaatcccaagcttctgttaggcatcggcgcctgaaacaaaatggaccaaatccaacttcctttcgtgattggttttcagccttttcataaatcttacaccatatttccttgacattttccacgccagtccctatatccagtcattttgttagagcacctacgtctcccccctttcccccaaatttcagcctcttatttcaatagctgcttaagagaatccagtggttttattgtcaaatcgctgtgctaacgttctatacttaaggactgacctttaagtcccagcttagcctctgatctgataccaggttatacacatatacacatacacatatcaaccggtgaatgtgttagtcgctcagtcgtgtctgactctttcgaccccatggactgtagcctgccaggcccctctgtccatggaattttccaggcaagaagagtggcgtggggtgccactttctactccaggggatgttccccacccaggcatcgaacccacatctcttgcattgctgcatcggcagattctttaccacaggcgccacctaggaagtcactgtgtgtgtgtgtatatatatattcttttttttttttttttaataaaaccttctacacgtcaaaaattatatatatgtaaaacaatatacatatgtatattatttttttaatgtgtagaaggtttttttaaaagaaaggtgtttagggtgaacttcctggtaatagaacgtcatcagtatgtactggaagtgaccctgaagcccctcggcctgtcatttccatggcggcaggctgaccgtttcctccccagcttggcctggccccgtgagcccgagtgcaaacagcaggctgccgtgcgtgcgtgggactggtcggcacccactcccctcgttgcacagcatgcatgatggagattgtccaactgtcactgcacctacatcaacttttttttttttttctttttctggaaaatgtgacttctttcacccttctcagctgtagatggtggaacctgtatcttctccctttgagatggaagtagactgatgtcataatgagaatgaatttatttgctttctgccaggcctctctcgcagcccacttagactctctggtgcctgctcttcccctccggggttacttctgtgaaccgtgggtgggcagaaccatagcgaagctatttccggtccacagacagtaaccg

SEQ ID NO: 48073 - DNA, 3083 bp, Bovine  19866880434273
  misc_feature (1)..(1): n is a, c, g, or t
naagagcagtgtcgtttagaaagtatgaccagaattgctcttttatagaaagaagcaaagaggtggggtctcctgggcagtgagagaggctcagcttgaccccatgtggcctttgaccccgaatcctgggggtccctttcactggggtctgtgagctgcacccagaatccggtgggatgcctttcacccttgacatttccaagccaatcacccatccctgataatgcaggaatgttcctctggctggtggacctctgccagctcaagggctcgtcccagccaccaacagagtaaacattactcaaccgaccagggccctgtcacacacattcttcccctgtgttcctaacctcacgcagagcacagcccggccctgtcgggtctggaaatgggaatcgaaaaatcaggcaggagcgagagtgcagaggagaaagagcttccagaaaggaaacaaccacgtccatcaattataagcagacagagctgtcttccctgtgaagtcaaaacacactgggctggcaggggtggtggctgcgacagaaaggaattaagccagtcttgatgggtccagtaccgcatccttataagtcctctcctccttttcctaaagaggagccactttttaatttttagttgccgcctgtgggatcttgagttgaggcacgtgaactcagtagcggcatgtgggatctggttccctgaccagggatcaaaccctggtcccctgcattgggacctcagtcgtagccactggaccaccagggaagtcccgaggagttccctttcttgaggagagaggcagagacacaaattattcagactggtgaacttataagacactcatttggggatgaaagaatgcgaacaattcccccggcttgaaattgagaactcaaaacttgaaaactttccaagaggctggcattgctgcctcagtttcctcgctggccacacaggaccatcgccggttcttattaacattttcttctctccgaggatacagatggatgtttgccaaagattaaaaatctgaaagcctgggagtaaaaatctgaggcaagatgaaagcaatttaaacacggggctggcttcaattccagatctctttctccccgaggtggcttagttaggagtccaattcaaaagaggagaaacacagacaggcctgcggggacggtaaacattcttgaactcaaggagtaaaagttgagtgatacttcagggaagcccacaaactggttttcttataaaaatcaaagcaaacgtaaccaaggaaagaaaaaggcttctatcaaaagcatcttggctgagaaaagaagcaaatgtgcatgcacctgagaaatggctcaggtagggaggtggacagggcgccagcagctccgcctgtcctccgcacaaagcccagcttggccaccacgcctgctccttagcagagagagggtttctgctggcaaacgccagagggtttgcagggagcacgccagcctggagatgcaattgcaggtggaagccacccaggttaaccctcgagaagctgagaggtcttcacacctgtaagtgttttacacggtctgcttctcagtgggttccagatgcccactggacagagtggaaagccaaggttcaaagaggaagaagtcattttcaccacctcttacctagggtctcccagcaaagaagagctattctaaagctgacctctctcctttcctgaaagccccacattgaccccagatacacactgaccccagaatgaacctcggggcttcccaggtggcgctagcggtaaagaacctgcctgctaatgcaggagacataagagacacgggttcgaatcctaggtcaggatgatcccctggaggagggcatggaaacccactccggtattcttgcctggagactcccatggacagagaagcctagcagactacagtccacagggtcgcaaagagtcagacacaactgaagtgacttggcatacacacacatgctgagtctcccatgataatgcacaaatagtttgaaatgactttgtctcttttcttgtttcttggctgcatctctcactggaacataagcccgatgagtgcaggaccttgtctgtcttctccacaatctccttcctcagaaccttgcacagactatgctctgccctcgataagaggacatgaggaatgaatgcatgacctgcccttcaacctgaccaagcagtggagaagtgacgacagtatcactgatcctctgaatctcttgagttttctgaggttgatgagacacatgtatttttaaggaggaagaagggggactgagagagatggagagagagagattaaaatacaatcaaaatgaagagagagcattgatgcatttcagcaacttcaccttggaaggtgcaaaatgcgggtgcctaggagtaagtatgacacagcagctctttcttttcccaccggagaccccagatagtgctttatctagagtggaaagagccagtgggatgcctgtggggagcctacccattccccacttcctttttttaaaaaaagctttttattttatattggagtatggccaattaacagggttgtgacagtctcgggtggacagtgaatggaatcagtcatacatatatgtgtatccatctcccccagactccctctcatccaggctgccacataacattaagcagctcctggtgctagacagtaggttatccatttcagatatagcagtgtgcccatgtttattccgacctccttaactatccctccctctcccatccttcccatccttccctacctcttgaggcctaagcatatacaaggggcctttaacagcgtgggaataggcacctccattaacacgagctgaccatttctaaagggtttaggctgctggcaggaaccccaaatgtagtcttgccatgttagaatgcagttttaggccccttgggttaattcgggggtcaggaggatcaattactggggatttaccatggcaacctgggtaactcaaacggctttttatccagaggagtctaaggtgaaactaagaaggggtaacgatggacatcgttaggcctaaag

SEQ ID NO: 48074 - DNA, 1510 bp, Bovine  19866880450651
  misc_feature (1)..(1): n is a, c, g, or t
ntacccttgggccaaataatcaaaaaaaaaaggaaaagaaatttacagaagatgtccaacttggtgtcatttaaaactatctcacagtaagttaaccacagcacatctctcttactagctgttacttgttgaagcggttctcttacaggtctggacatccttctaaagctcacaacacctccatcacagatgtagaaaccaaggctcagagcacggtcactgaatgcctaataaatggcggaacccaggcttgaacaaaagactttgttccactcatccccaggattacttgggacccagacacccgagcggtgagtgtcaggagtggcactcctgacgtgatgccatgacctccacggtgagcatgaagatgtttcagccaggttaaaggggccttcctgaaagaaccttatgggaccagagaaggactccaaattaaacccacagtttgataatattcataaaaatatgtgtaaaaactgaaagcagagacttccctggggatccagtggttaagaatctgcctttcagtgcttgggaagtgggtttctggtttgggaactaagatcccacgtgccatgggcaatgaagccagtgggataccactactgagtccacttgatctagtgccttcgggacacaactactgagcctgctcgatctagagcccgggcgccgcagcaagagaagcttatgcaacacagctagagaaacccagcgcagccaaaataaataaaaatgtttgaaaacttgaaagcagtacagaggaaaatagttggcctagcatttaggggaggaaatgagtggatgttttattctgtttatatgttcttaaatgttttcatgccaaggtcttaacagcaagcctcaaaaacaaacaaacaaaaaaacccaccttggtcactgactggggctttatcaatgtatgtaggtgtttttctctgtctcctacctttgagtaacttctccaccccaccagttctgtctcggtttcatgatgcttgcaccttgttgaaaccacaacttcccctccggggattgctgagtgctcaggagggaatcatggggaggactttttcagcagaggtgagaggatattggaatatgacatcactattcaaatggcgaaggagagagggagagtaccaagtgccaaggagaaaaccagtgggcttttatggctctgtttatgggaagcgctccaccggccgaaaggtcaggagctgacgtgtccaatggcactggagcatcacatgaaaaaacagaaccttataaaaattcataagctcaccaagcacccacttgacttgggtaagggggtggtggtggccagaatgttgtcaggccccagaaaaaaagaagcccagtagctagctgaccccctgaggacctagcacggtgctaggtccttctagtaaaagaacactcataacacttctttcggtggtccagtggttaggaatctacctgccaaggcaggggactttgggttccatccctggtccaggaa

SEQ ID NO: 48075 - DNA, 2206 bp, Bovine  19866880560395
  misc_feature (1)..(1): n is a, c, g, or t
ngagagaccagcgaattctacctgtatattcccattttgccccttcctgttcagagctgtgagcggggctgggttagccccgggatcaagacctgccaaaggctgaggaagggagcagccagagccatcacctctctgggacccagctggcctgggttccatttagcttcagctacaaagaggagaggggcagacttcccagggggctcactggtaaagaatccgcctgacaatgcagcagatgtaggttcgatccctgggtggggaagaacccctagagaaggaaatcacaatccactctagtattcttgcctggaaaattccatggacagaggagcctggagggctacagtctacggggtcgcaaaagaatcagacactcacttagcaactacacagcagaaggaaaggtggaagagattcttctgaaaggaatatgggaggcaaaatggctctcagatttctgctttccttactagagaagcacagaaacaagcctccgcaggcacctctgagctgagcgacgggcctggcagcgcctttgaaggagcccccggaagcggggaggccgaatctgaccactgggctcccatcctccgcccggtctgcctttcatctcagcccaggcgcctcggctctattctcattctcctgctgtctctttccatttgccctctccctgactgatacactgatctctcggtcacttggctttctgctccactgcgtccatattactaataacacctccgccacggccagtttacctcatgaaggcaggagcacatcattacaaaataaactcataactttgacattctagcaaatacacgccgtttgttatttttatggctttagtctttctaacaggcagagggcattacatacctgtttcctttctatctttaaatgtgtgcacacatgcacactcgcacatgcaccaggaaacaagacagagcaaaaaaaacaaaaaacaaacccaacccccagcaaatgtccagaacagtcagacgacgggggaccctggtggaggcagaagccctgtcactcaggaggccgcgctccgatctggctctggttttatggacgtcataaacccgatggcccacagctggtccttctgggacagactgcctctctgccagaagtcgttcggtgtgatcagcagtatttttaattattaaaataaaattggaaagggggaaaagaaataaaaaggagacactgcactgaccctgaatatctgatacccagagagtatgtcaggggcccagaatgccttgctgcctagaagcaagaaaatagctagggctattttgtactcagaaatggtatttcctttcccatgaaaccctgtctctaggacttgataaggtccaaccacttagaaccccacgcctctcccaaatcagtaatggccccatcgagaaccaatctcagaaaaagggactgaaactgatgaagagatgcttagctgttcaaatacaccttcctcagacatctttaccccctcatttcaaagaggaagagagcctccagaactgggttcctcctggaggcttccttgtccacccattccaccccatattcttacatctaatgggagtcagatctggaaggagctaatcacttagcatgtcttccctttaccagtggaaactcaggttctgacatcttggcattgttctgaaaaggcagcagtatttctacatttcttctcctctgaggaagaaaaccagggcttactacagccaagaacatcatcctgggctaaagaaatgtttgccatctgagaggattcattgcatttgggaactaaagataaaaattatatggcagacagagtgtccgaagagctccttctggtcagccttatcgcaggaggtaggcggtagtgggtgggggcaggtgcagaggggaaggacacgcaaaaaatgaagcctgcttcactaaccacaaacaaatgccaacaatcatggctacttaacaactggggaagagaaagcaggagcctccagttcatcttcaatgactgtatgtgtgcagcatgtaccaggagaatggggcgcacacagcagctcctgactgataggggtcggggctgactcaagtggttttaatgattttggaatacttcacaacaaaagctccaactgcagaagctgaatctgggcgaagacaaaacccattctgcccaactctgaaa

SEQ ID NO: 48076 - DNA, 1478 bp, Bovine  19866880561131
  misc_feature (1)..(1): n is a, c, g, or t
nttgtcacatgctattgtgcaggaattggttagtgacggaagggaacactgaaagcgcgagggccagggtgccacggaccctctaaaatacacatacttgggtgaggccggcctgccagcatccaccgagggtcatacggcgccttcgtgggcacaaactcgatgactctgtctattggatccttggagttcaggagaggaactgaactgtatacactctagaaggcgatgggagggaaagagcacagcggtcagtgaacaactcgtaactcagcaacagtgacagacaaaaagagcaggacccacatacggaagcacacccgttagtctcatccatcagctggaaggaccccaatcgagagccaggccctaagaaacaggtacagctctcaagtctcacgtgggagcctggtagaaagtggggcgattggactcttgacttcagtgcgcccaggctctctgggaagtcccctagaggggtggacaccgatgacaaaggggaaagccccacaatgagaacgaagccttaagaagctagggtctgagcccagacaggactcaaggcttccctggctggatatcatcagaagggggcctgacccctgaaatccaaaggtgtttttaaagaaaggtaggaggcaaaagatggctttaagaaaaaaaaaaaagaaagaaatcaacagcttctagagaatattctgtaagaaaaaaatccttctcccataaaggagtcccatatgctgaggcagtgagctgtggtgaaaaggccgggttctccgggcctttcggtgccggcagcaagcggggaggactcaccttcggcatgtaagacagccagtgcaggacggtgaacaccccctcgaagtcgtcacagacggtgctgtgcgtcaccccattgttgtgcatgatctggatgccccccagctggttgttggaggtgtatacttccctcccgaggacctagggaaacaggccagacaaaagacgttcatccagtcagagagaaaggcaaggtctgtctcgtaactgccactaaaatggattcttttttctgcaagacagagtctggcctccgagggctgtgtcgagggactgtctggacctttgtcctaaaaagaaaactcagaagacacaaagggcattttagacaatcacatactctgctgcaatttaaacaccagcaagcccctctctatcagccgccacagacgcgtggtggcatcctgggctctggggggagaccacagtggtgggtaacgctggggccccgagacgcaggccacgccacgctgctgcccgcagacgcagaaaggggagtgcctggctgctgacaccctcgagcgacgagtctcagttaaacaggagcatagagaggtttggactcctcgttttttccaagggttacttttcccctttatattttgatgtttcaagtgaaatcctgaagcaactcatgacacatacatgaagccttgagc

SEQ ID NO: 48077 - DNA, 2157 bp, Bovine  19866880580320
  misc_feature (1)..(1): n is a, c, g, or t
ntgtcattcactgaatatttaccgtcccaaacacagtgctgagtacctctcgtgttatcatatttgttccgccaacaaccctagtgttattacccacgttttatagacgagaaagaaagagcttagaacctggccaaggctacaccgcaattaagtgccagagctgggattggaacccggtcattgcaaacttcaaagtcggtgttccccacttccccccccagactccaccctccgcaataagccccaccccacacaccgttctgtgctatgatcctcacgggtgcccagtggccttcaaaaccccagggccggaagcttcaccacctcctgccacccactcaatcctgacttccctcaccctactaggcagcatcaggggagtgctgaagagaaaggggaggggagtttcaaagtgaggtgctccctgggttaaaaaatctggctttggaggccctgggttggttgagggggggtggggatgaacgaacatttttatcaacttaaatgtcactggcagccccaaaacaaacagggtcccacccggcttgctcctttatgaggcattcaatcaataaaatgagagcagggctctgtcagatttattggctgggttcaaaccgaacacctcttccacccgccggaggctgggtcaccggctctacctttccgttccaactctggacggcccccgttttccccggtggggctacaatggttcattgtttcaggcaggccttgtgagaagttgtgtttgttttgcctcttatcttatcagctccagagctacaatggcccaggtgtactcaccattttaccatcaggtgagaggagattgtggcctgggtccaggctggctggagagacttgctgtaaaaccgactggctagtcaccatggcgctgttgccatggtgactgattgttgaggaggaagtgacctcattgcttgcctgctggctgtagcgcactcctgcaaaacaaggcagacccaacagtgggatattagtgccacctgagcccccgggatcacttgttttctaggggagctgacaagcggggaaaacactgccctctttcccctgtctttctgtgagacatatcagctgtctttctctagggcagaggttgctcggcctctgcttgaagtctggaatggaagctccatgagggcagagtgtttttatttctgtgttgttttgctccttgctgtattctcttggttggtgttgtttaattgctaggtcatgtttgattcttttgcgacttcacggactatagcctgccgggctcctctctctgtgggattttccaagcaagtatactggagtaggtggcccttttcttctccaggggaccttcccaatccaaggattgaacctgtgtctcctgcattggcagacagattccttaccactgagccacctgggaagccccttcccttggtagccacatgataaatatgtcaaatgaatgaacaaacagatggatggattctacttcttgttgcttctacatagtgcttttaggttttaggggctttcccatcccagctggagtatttcttttgctcttcaaaataccttttagaaatgtttccctggcattgcttggctaggtagggctgcagagtatgaactgacaggttttacagagaggcattggcccagtgacccttgaaagtgaaagtggctccgtcgtgtccaactctttgtgactccatggactgtagtccatggtattctccaggccagaatacttgagtgggtagccttttcccttctccagggtatcttcccaacctagggatcgaacccaggtctcctgcattgcggcagattccttaccagctgagctacaagggaagcccaagaatactggaatgggtagcctatcccttctccagtggttcttcccgacccaggaatagacctggggtctcctgcattgcaggtggattctttaccaactgagctatcagggaagccatgacccttgtaagggccacaacaaaatgcatcgttctgtgtaccaccattctggccaaggcccagtgaccgatgggacaacagcagagcacgatggggccagggctgtagctaggacgctttggtcctggaactcacattcccttcagtggggtcccctctggctgactt

SEQ ID NO: 48078 - DNA, 1396 bp, Bovine  19866880620990
  misc_feature (1)..(1): n is a, c, g, or t
ncccaccagactcctctgtccacagaattctccaggcaagaataatggagtgggttgtcattcccttctccaggggatcttcccaactgagggactgaacctgggtctcctgcactgtaggcagattctttatcatctgagccaccagggacgctccctacacaagatatatactctttataaaaaaaaatacaatgtttgaaaaatctacaacagttatgttgaggtaagccttcccaaactgcacacggtatcacttttctggtgcagttagctcttcctcacaacttctcatcccaacagccatatgaatgtggtccacctacagtcacttcacttttttatttggtaaatatcgtttctttttggctgcactgggtcttggttgtgccacatgggatcttttcgctgtggcacatgggttctgccttgaggtgtgcaggcttctctctagttgagttgtacaggcttagctgccccatcgcatgtgggatctgagttcccccaccagggatcaaacccatgtcccctgcattgcaaggcagagtcttaaccactggaccaccagggaattccctcacttcacttttcagaagtgtgaaaatgtgcacaactagacaggtacatctgtgctcaggtaagtttatgtgtgtaacagtgaatgaattctagagatgactgggttggaatgctccattcacagaggaaaactgtaattcagagaagtcaagcagctttctcacgttgatacatttaactgcaggggctcacctggaacccacttctgttgactcccagtccagtgccctcttcagtgtaactcactgaatcagtcctagttgtctgcactactctagaaatacttttccttaatagaaatctcggcacgtctttatgttggtgtgtaaatctatgtgcttgtgtcagtgagcatgcgtgcgaatgtctacgtgtctccctgtgagtatttgttaagcatatcacctctgtttatgccctttctccaggagaaacctctagttaattacagttccttatgtctccactagcagtgaagtcaggtgaagatattctgaatcaatcattaacaagcaaacttggtcctctctccaataaactctattcctgggtcctgagaaaatgtggcagatcaattagggtggaaccagactcgcccagggtcaaacttagttctagggcagtgaaagcattcagagacaaggctgtgagtggcggtgtcagaccagccacatacagtctctacaaggagaatgtgctcaagctaacatggataccatcttggttttcagcctaatcattacatcctacgatgttaccaagaaaggtaagtactcttctagccgactgtcctgagaaatcctaagagaggcctaga

SEQ ID NO: 48079 - DNA, 3441 bp, Bovine  19866880725785
  misc_feature (1)..(1): n is a, c, g, or t
nctttttcttgcagatcatgtttcaggcatatggagacaaacagggcccattacatggaatgttaatcaacactccgtacgtgaccaaagacctgcttcaatccaagaggttccaggcacagtccttagggacaacatacatatatgacatcccagaaatgtttcggcaggtaaaggtggctacctgggggtgcgggctctgacgtgtgccagagagacaagatttttcctgaattttcatcagatacagcttacactgaaataggacactttcaaaaggcaggaattgtcttgacgctgttctcacttctttgtcttctggggttgagactgctagctcagatggtggatggttctttatgaatgaacaggaagaatgatgaggatagaggcctctgttgagtagagaagagtaaacagactacgcacatctgatggtagtttatgatgacctctgtgaggagttaccttcaggtgtctatttccaaagcctgtattcaagtcaaaaagaggtttgaaattctggttctcattttccaaaataacccaggtctctaactgatagccctaggttaatatgatgagaatcagtatataacatatacaaatggatatagagtgcatggtacacattttaaagtatcagttcttttgtgggagatttattacagtggaacaaaaactagtgtgagaaaatacgacattatgaatctcatcctccgtatgaaaataaattcctttgatctgtatggtgaatcatgtctaggctgcagatttttcttccatcaatagaaggcaagaaaagtatatcaccagcagaaaatgcaacagataaagaagaaggtatcaaaagaatactgaatttgtccttaaaaaaaaaatctatgaatatagaattttcccaactcttctagtcaaaaataccagcgttactacatttgaattttaataaagtaatatgtgtggtcttagtaaatagtctatttgtaattcctgtattattcagaaatacgagagatttccattatgtagccatttgtttacaaggtctctctctcgacacatagctgtcttcattcagtattactagtactgtcagcctataagttgagtgttgattctgttccctagtgctggcgccataaacagaaatcactttccatataatttatcctatagaatagacgtaagcacagtgatttgggcttgtaggtatgaatgaatcaccttggatttaaatgctgctctgagtcaagcagaaaaacaaccgaactagttcccacttcatgccgcattcgttttggtaatatgaaatttgaaatggacatcagaatggtttaaaaatgatgtgtgtctccattctctcatatctgagcagacttgatctatatatgtacaaacagtcatccacctctagtgagctaattcccacgtatggacatgtagctttgaaaatatactagagcatgcatcccctgaacctctagtagaaactctatccttgtgttcttgggtttgctttgtattagctgagtgtcagtcagtttcctggttatttttctatggctaagtttctctaggatttttcttccttttttaaagaggtgttgctgctactttagtttttaattttcccaggacattgttaggtccattgtgtttgttaatggtctcctactgattcatgatccctcagtagtttaatgttattggcaaagcatctgatttggggcatgtaaaaaatgttatgtgaaaaataattacaagtctattttaatggagaatgagaactctagaatttggtgtaacatttagatgctcagtagaatgcttggaagagaaagagcaaaactaaattgaccatgttttaatatttattttgttcatgttgaaatgctgattgttactgattagtcaaacttttctcctcctctagtccctgatcaaactctgggaatctatgtcctcccaagcattccttccaccgccccctctgccttcagacatactgacgtacactgagctcgtgttggatgatcaaggtcaactggttcacatgaacaggcttccaggaggaaatgaggcaagtcctggagattcccctccccactttcttatctctgtgcccacgaataccaactttccaaggaggtggtcattaaatagtataaataagatctgagtggcataggcagcattggtagaagtagtctagtcttattgaagtagaagttgtagtcctattggcagaattctttagccagagaacacagactggacagtgaggactatccttaatttttcaggtgtgataataagattacatttttttaaacagtattacaattttgctttataaaaaagagtattgtcttctgttagagatgcctactaaaatagttaccgatgaaatgagctaatgtctaggagttgcttcaaaagtatgtagggatgtgcgtgtgggagtgcagatgaaacaagactggtcatgagttgttaattgaagctaggtgatagaaacacaggaatagattattttctctatttttgtacatgtttgagattctgagatttttctatgataaaagccttgaaatatttctggatgttttttcttatttggatccttactggtgtatggtttttagtatgtttttcatgctcaggtgattttatctagtgctgttgtgagcatgagagattattttcttcataaaaggactccatcagaaccaggagtttaaacatcaaatgagataacagagaacctgtgactcatgtgtttttggctttagatccctctttcctctagaacactgttaataatgatgtaaagtcatattctgccccatgcattgagattcttcctgattctaactatgcttctaaagtacagttataacaacagtgataacaatagtaataagcctaaaatgagatatgtttttattttaaccttagaactcatccctagataaaactggtcccttagaaggagtaatctctacctgagtgttcaccataaacagactgggtagacctttggagataaatgcaattatttcctgttttattcaatatcttttttttttttttcaaaaaattttgctaaacgtacaaggtgcatgactatttattaagtataccagggctgccaaatttaaatcgtttagtattaagatggatgcgagcattggacccaattggacttgtaggagttctaatctaatgcctcaacagttagcagaaatgaaaggctggggaggcaggatgtattgaattttgacaagagtaggtatatgcgtacttgttggcacacaaagttgcagcagagggtgtgtgccactggtgcgtagcatctgcttagtgaagccctcagcagaaagaaaagcctcatcgtgccagacttaaattctgattattgaacagtgtcgtcttcag

SEQ ID NO: 48080 - DNA, 751 bp, Bovine  19866880834203
  misc_feature (1)..(1): n is a, c, g, or t
ntcggactgcagattacagagccgacattcaacaaagtacagtttgggacaagaccatcatggggaggttttcctcctttctactcataaacatgagttgtcagcttaaaaagaaaccctcagacagaaagagaaagctttctctcactataacctctttatttcaaatctatctgtaacgtttgaaggcaaaacataatcagaaaaccaacctcccaagcaggtacaaggatctgagctggactcctgggattacacactggtttagttctatttctactaacactgtgatgtgaggtactatggttcttgttttagttacaagaggtgttaggaatgaatgcccacacacaattaacaatagcttatctagcacataactctgcagcacaataccaacaacaggagtattttaaagccgggtggagaagaaagcagacactaataaaactgaagatttcctttgttcttcccctcttttcacaatgagaattcagttcaaaaacaaggctccagaatgcccgtgcggtcctttggcccgccacactcctggggagcctcaggctttggtgatgtatccttctcggatgaggaaatcatagattttccgggttttgttcacgtctatcttgatgagtgctcttgcctgtgccagtctcaagcctccttgcttgttacattcgttcaatagagcagacttgtattctaaataggctcccgggaccaacctcaccatctgacagagctgaaa

SEQ ID NO: 48081 - DNA, 899 bp, Bovine  19866880859947
  misc_feature (1)..(1): n is a, c, g, or t
ncagcggggcctcggcagtgcacaggtcgctggtgacccctctctgtcccacccaagcctcgccactgaggaatcctgcccaggtgaggcgggggagcactgtcagggccggggaggaaggacagtgtgacacacgtggttccaggctctgctgcaggctgtagcagattttttaaaagccacgaaaatgtgattggaatgtgagatggtacgtaggaaccagctctgcaggcctggggcgggatggagccccgagcgtagaaggaggctgaacttagccattgcccctcagactcgcagccagaagagcaactgaaatcctgtttcccagccctgcctcctcctattagacacccttaataaataattatttgcatttttataactctttttaaatatttatttttcaaattttttggccaagtggcatgtggtatcttagttccccaaccaggggtcaaacccacaccccttgcactggaagcatgaagtcttaaccactggaccaccagggaagtccgcattttaataactcttaatgcttaccaaacacagttcatacctacttttgtttcactttcatagtgactccacatgcacactatttccattttaagatgaaaaaactgaagttgagagtagctgaggaaatcaccaccggctacatagctgtgaaggctcagagccaggattaaatctaggtctgtctgatgcaagaccattgctccattccagaggcagcccaggtgtgtgcacgggcttgtgctggaagatagaaaaccatccttcccattttttctccccagactcggaggcaagggccgcctgacatagccagagggctggggctctggggctcaggagggggagaaatgggggctaggggtgggtgggaagta

SEQ ID NO: 48082 - DNA, 1304 bp, Bovine  19866880886793
  misc_feature (1)..(1): n is a, c, g, or t
ntgctcccatagtatgaccttggggacttgcttagaagttattttagggctatgttggctagtggtcagcattagaatatttttgttatttgaatcaagaactatcttctggaaacgtgtaggtttcttaaacactgagcaattaaacagaattttcttttgctgcatgcttctttttcttttaaaacaattgagtaatgagtttggcttttttaagtcaaaccagaatactggagtgggtagcctttcctttctccagggaatcttcccaacctagggatcgaacccaggtctctcgcactgcgggcagattctttcccagctgagccacaagggaagcccaagaatactgaagtggttagcctatcccttctccagcagatcttcccaacccaggaatcgaaccagggtctcttgcattacaggcggattctttaccaattgagctatcagggaagcccttttattcatttattttggctgcactgagccttcgttgttgaataggctttctctagttgcggagagcaggggctactctctagtagcggtgtgcgggcttctcactgtggtggcttctctggttgcagagcatgagccttagagctcacggccttcagtggttgtgtcacctaggctgagtagttgtggctctcaggctctagagtgcaggctccatagttgctgtgcacgggctcagttgccctgaggcatgtggaaccttccgggaccagggatcgaacccatgtcccctgcattggcaggtggattcttaaccactggaccaccaaggaagtctcactgccttcttctttagcatcttcctcactgtacaaaactaaagaaggtgtacgttatcttgcaggtcatagggcaagtgtatagttgcaatcaaggatagctaatcaggcttacctcaaatgcaggacacactccggagctctgtctcatttaattgatgtaaatagtgtacagacttatgcattacaagcaattaactataaaaatgttctatagagtactactgtaatcaaataaaactcacaaggttactctgatgcatatttaatgatacatataattgttattgtgctgcatgataattaaaccttaaatgttaagctgtttacataaatggtctaaccagttgtttttatgcagcgaaacacattatttagtgtttgctcactttattaattttctggaatctataatcatgccaaggacagcagttttccctgaagcactttactattaaatcatgcactcatacacacacaaacatactcttcaaaatgacacag

SEQ ID NO: 48083 - DNA, 1374 bp, Bovine  19866880919608
  misc_feature (1)..(1): n is a, c, g, or t
ntaatgtcagcaaaacttcttgatcagatacgggcatgttcgcctccacgccccccggttttctttctttggtcgtattgtcagcctttggtcctcccaggtggctcagggggaaagaatccgcctgccagtgcaggagatgtgggttcagtccttgggttgggaagatcccctggagcagtcaatggcaacctgctccagtattcttgcctgggaaatcctatggacagaggagcctggtgggctctctgtccatggagtcgcacaagagttgaacacgacagagcaactaaacagcagttttcagtctcaatggtatttatgtctaaacagtcctaagcacaaagcagccaaatcaccatcaagggaaagaaactgccaaatagataggtgagtaggcacagtgaccaggctggacctctgatcttctaactgttaaaggctgtaaataatgataattaatacatacagcactctctgtttgccaggtaccgtttaagttcttgatacgtgtgaactcacttaatcctcacaaagctctttgagttgggcattcctatgcccattttgtagatggggaaattgaggagtggaaatatcaaggtcaagttataacctgcaagtggcagagccatctcaagctcgtaatactactgtgcttcattcatctgtgctcttaatactactagacttacggtatctaccatcttgaaccttttttttctttttagatttcacattttttataatctatgacttaatcacattcctgagaagtggaaatagtcattttcccattctgccttcagggaaatgtacaaaggagtgaagtgacttgcttcaggcttcctggttgctgactttgaccatgaggtcacacagtcatccttttttcatagccccgattgtgtccatctcagccaaaagcttcagggcaggggaatgacttttaagaagcttcattctggggaatacctgattcacaggtttgtgctcgtgtgcttgcttgattggtttccccagagttaaggcctctgagttgcttttcctgccaagaaagcagtaagtgccttctgtcaggaaaacagaaacatgttgccagctattttgaacagtgttagaaatacactgcagtgggaaggagctgcctctgactgctgcccacttcttgcaatattttaaggcagccatttggagactttgttatcagtcccgagtgtaatcacagggagactagtcatcccccaagactgggatttcagaggcctggcagcagtggagaggttatgggtggtttgggttggttggttggtttttaaggagctctgggtctttgtgtgcctactctactcaactctccagtcactttttaag

SEQ ID NO: 48084 - DNA, 1949 bp, Bovine  19866881025193
  misc_feature (1)..(1): n is a, c, g, or t
ncctgtgagtctgctctctcacgcatgtgtgccaagtcgcttcagtcatgtccatttctgactctttggactataccccgccaggctcctctgtccatgggattctccaagcaagaatactggagtgggttgccatgccctcctccagggaatcttcccaacccagggattgaacccaattctcttgcattagcaggtgggttctttaccactagcaccacctagaagccctctgatctctatacctttggcaaatattcctatcacccaaagaaatataaccatattgaagacttctcaaggacagaagattatgcctctctttactggcttaacccagagcttcatacctttgacaatattctttgtacatgctctatatacaaagcctcttaagtgcagcagagagatacacaatagatgcccattcactcattcatccaacaaatgtcttttgcacaccgacttgagctgggcacagtggtgggtactgcatattccaagatgtcttgaaggaattgcctgcctgactggggagacagaaaaattagcaagttatcgtgaccaatgtgctatgtcagtgttagaagatagagtggtaggacagtggaagaaatcttgtttgggtggaaatcagagacgtttccctggaggacacttgaactgcgtcatgaatgaatgtcagttcaccaggcaggtggtggagggggtgggaagacagttcagacctacggcctacaaaatgcaaaaagaaagtccagatcaattccagtatggtctcagcccaaaacttgttttctgtgtgcccaagacccccctgcctgaaattctcttgccctggctctgcaaatcgtgatctgacacagtgaaatatgttctccaggctgtaggttcttgggtcaaggtaatgggtcactagccagccagtgcctctgagaagtgaactaaggcctgagaatcagatacgtgggccccacatctcagatgagcagagcggaggcatggggtaaggcatgtgatgtttacgttcagaaactgcaaagccactagcttgtagagtgtcattatgtctgcaggtggagggtaattttcctgttactcaaggactcctggtcaggctctgattggtctctggggaattgttttatgacccagagccaggcagtgctagataggagatgtggtttgctgggcagaaatttacaaggcaggaaattgcttcactgggcacaaccattcattagaaacacctttgggaaaaggagcctgggctcctggcaggtctgtcccaggccatgtatttacatcagcaacaacctgtgttcctggttacacaatgtggcagcgtcactttgagtgggggatctttgccccttggaagaataaacacattcctcactcgcaggggaattagcagacctcacaagacttttcagtggctcccctggaggtcttaatgtcataagaaggtgactctacacatgattagctatacaacctaactgactctggatttggttgaattgtgtgcaggctaagatgcagagaatctagtgctgaagggtgaaaagggtggcaatccaagcagctgccaaggctacactagatttcttatgaacaatccaggggttcaggggtcactggtcagtcttcagggaggaggagacaggctgcggggttgtttagatggattccaaagcccaggtttccattgtccaccagctcttggccgagttctagagtttagagctttcaggatgagtgccatcagaccagaacagatcctaaggagaaaagataagcgtctgtggttagagtctccggaactatgggcatctgtctggcgagttatgggagtttccagccccccgctattcagtagagtcaagagtcacaattaggccccactctgccctcactcccctccccgtgtaaaccccatcccaggc

SEQ ID NO: 48085 - DNA, 1638 bp, Bovine  19866881062443
  misc_feature (1)..(1): n is a, c, g, or t
naactttctccctaaaaagtgtgttacttttattgagtaattgttcaatttatgaatgtgattatgttttatgcacagttatgttcattttctgcagcctgatttaaaggagaaaggagttaaagcagccccagatggaccactctaccactaaactccactgacaaaagaattccttcaccaaacccaaaagactggcataagaaaatttcaaacaaaaggcaactgatattattgctagacagaagctacaccaaaatctttcttccaaattagttagcacagatcataattaaaacataatatgattacacaaggttttgcaaagcaagtattattcaacttgctaaagcattatgctccggaaaacacaatattttgaagggtagacccacactttcttagtctcaatatgcaatctccacacccgccccctccaacagcatactttagttactgaaagtaatctctcaggaattctattcaaaatcttcaccttcaatggtttaattttctttctgactcaaatttttaaaaggaagtgtcaaaatataagaaaaaaattaaaacgatggaaataactccttttccccaaagtttttcactattattatactctaaaatggtaaaaaaaaaaaaaaaaagcgttcaaatttggcttactcttgtggctgactttcatgggtctttctaaaaaaaattcttttcttaaaaatgcagagttaagaacttgcctcatggactaagttaaaaaagaccaaaggaaggtggcttcataatacattctgaagctggaaaggtaatgcaccctacagttagaggaggaagtactcaacttcacccccaaatcaaactcagtccgggacactccagtattaacaatgagcactttccactgcagagattatctatatttggttcacatatactctgttcagaagtccatctcaatatcttttgataatttataaatacttagttattaacagatgtggccctctttccccaacactaaactgaggtctttcctctctctctcagtttaactcctggttgaggcaggctccaagatgtttacaaagcaataaaatctactcagttttgtcactagaggtaagaaataaaatttctaacatgtaacataatgtaaggtttatactttttaaatgttttaagttatattttaatccagtgccatgttaaacagttatatcagtggaattataagaagaaaaggctaaaatgtaccaatactttcttaggaaaaaggtgtttgaggaaacaaaataaacaaaaaggaaaaaaccctcaaaccacaggagggtttaaatttgatatggaccaggtatttttctttggtctaaccctggagaagtataaattacacacatccccacactttcaaaatatgccaaagaattatttattaacgtaggacttacagatcacaaaagagagtgatacagaagagctggaaaaaaagtcatcagaataagcatgcagatcagtatttgcagaggaatataccaaagcaagtttgaaaaggcacattcacacagaaaatgtcccaattggaaaaaaaaaaaaaaaaagacatcagaaaagcagccaaaaaataataataaggcgctgattaaa

SEQ ID NO: 48086 - DNA, 2075 bp, Bovine  19866881121196
  misc_feature (1)..(1): n is a, c, g, or t
ncctttaaatttcccctgtgagacaatcttgaagtttgtggtagataaaatcatagtaaacaaactgcctgtgaacactggtaaaatagaaaaaacacctgtctgaggtcctctcctccccgtctttgtactgtaaacccgagggaagttcctgtttggccatgaagattctaacaacttgctgatgtttatgaatctatataacaatcaccattcctttgcctaagcacctggctcccacaaaggcgggaggatttgttgggtcactataattcccaagatgaaaactccacaattgtgacttgctccaacctgaaaaataattacctgaattcgaagtcatgggaacagaaggactcaggccagaatcactacaaaaaagaagaggaatttaaacttatgtcacatcgaagaaagcaattcccaaagcccatgatcccgggtaacatttatcaggtcagctactttgaagagaagtaatgagacagactagactatgtttttacaggctatcccaactgtacacaactcaggaaaggaaatcaggaaggaaactgcttagatttgttaagaagacatcctggtatggcacatcacagagaccattcatgagcaaaaagcaggcatttgatcttccagtgaaaatcacaccagtagatacagaagaaggtgtggcaagggaatacactaatcttaaaaaataaggccaaagtagcaaagtaggattctaggaggccagttacatttctcaaaactgtcagtactgtactgtttgagacagcctgctcaagttttctgaattcttctagctacctaattattatagctctgccatttagggtagggcacccatgggactgtctgaaaatacaggtaaaggccgaaagctccatgaaggtgtccccggactaactcctcacatgtcagcctgccggcggagccactgctggcaggcgcctgctgtccttggatgtacttggaggacctcagagagcatggtgcgcttgaggcgctcctcttcacgagtcttcttgaggtgatcgtaggtcctggcacctgtaggtgttaaaaaagtgactacaatgacaaggtagtagaactaaccaaagggcttcctaactcatcaacaaacagttcatcttttttaatttttaatttttgtggccttgctgtgaggctcgtgggatctcagttccccaaccaaggatcaaacccaggcccatggcagtgaaagcgcagagccctaaccattggacaccaggggattcccagtcgttttttaatttcctttgaaaaactgcttccagaattatttttctaagagcaaacaaagtgatttcccctagtttgaaatctcttttttgataagaaatgaaaatgtgtttattccttttctacctttaagaaatttgagagagggaatccccaaaacagaaaagtacaaagaaagttggagttgctcatatttccatcccctaaaagtaacttaatactgttatatttacttcctgctctattttttctatccatatattttttcaagtcacacaaatgctatgcacatacactgttccttaaaaaccagtcaggattacaaataaaaataaatcctctttgactattactattctgttcacctctttcctggagacagccagcatcaggcaacccaaatctggcatcagagtctttacacgcatcttgctaacagctgtagagtgttttccacactattaatgtataaaaatccaaaatatcaaaccagtgggtttcaagccaagttccacagaggcccaggttaccatgaaaatatctcagggattactgtgaacatactgggtggtcctgggctccacaagacttcaacctaaggagttccacttttatttatggattagtactccacattaaatttaattttgtaaaatttccaatgttagaaataaagagccattttgctgggctgaacttgagcactgggtgaacgggtgacagctttcaaccaacaggaaggaggaaatgctgaagaccatccccaaaacaacaacagaacaacagaaactgctatttattga

SEQ ID NO: 48087 - DNA, 1027 bp, Bovine  19866881177906
  misc_feature (1)..(1): n is a, c, g, or t
ntgcactgagtgttcaagttataaaaatagcctaatggtccttgccaccaattctgtccctgaagatggaagagtgtttgtaagtgctttgagatcctccagcagaaaactatcacattccactgatgacatataaacattcatacttggcacttaccttatttttcatcaaggactttaaaaaaccaattttgaatccttttagcctagcaagataggaatttcaagtatggaaaaagacatattatgaaatacatggtaagatagttttatttaaaattattgtgtacatttcttcttttagcctctaagagagcgtatttagttacaagtctttgaaatgatcttcaggaccaaagttgagtccctcatgagaaaaataggctaattttgaaagctaggtcttcctgccatggaattacttctaatgaattcctaacccttttgggatatgtatagtttttttcaaattccctcttaatgcctgtcattggagctggagatttctcattgattctgactcatttcactagtagcaaaccaaggcccaatgaacttgactaacttgggaaatcctgatgtatcccttggccaaccaaagcagcacttgcggagagggcccctccatgcctttctaaaagtaagtcctgggacttccctggtgctccagtggctaagactttaccctccagtgccaggggcatggatttgatccctgcttggggagttgggatcccacgtgcctccgtggccaaaacaacaacaacaacaacaaaacacagaagcaatattgtaacaaattcaataaagacttcttaaaaaatggtccacaacagaaaatcttaaaaaaaaaaaaaaaaagcaaatcctaaagatagcctttaagcaaaaggatatacttgctagcattttcatacatcttaatttttaagactttacagaaaaaggctgtgatatagtaccctatgacaagtaattttacagctccaactagaggcaataatgagcatcaggacagcaacagatg

SEQ ID NO: 48088 - DNA, 2578 bp, Bovine  19866881198086
  misc_feature (1)..(1): n is a, c, g, or t
ncttccctggtggctagcggtgacgaatccacctggaatgtaggagacgtgggtttgatccctagattgagaagatcccctggaggaggaaatggcaacccaatccagtattcttgtctgagaaatcccgtggacagaggagcctggtgggctacagtctatggggttgcagaatcagacacaactgagagattaaacaacacgaagaaccagaagagtgctcacctctgggtgagggtggggtggggactgaatggcaagggtatgaaactgctgaaattcactcaactgtgcacttaacatctatgtattttttcggtacttaaatatagctcaataataaaaggtactgggatatgggaattccctggcagtccagtggttaggactctgtgatttcactgctgagggtgtgggtacaatccctggttggggaactaagatcccacaagctgcgcggcatgggcaaaatcttttaaagtactggaattaaaaacaaagtcaggttatatacaagaattcagcacttctgaaatagttcttggatattataaaccaaatcaatgatggataaacagaacatagtctctatgctcagaagatgaacacatttagttaaatggaaaatgtaagtgcagttagtgcaaatacatagtatataaagtgtaagataaatgttgcaagaaaaagaaaacatggagaattgggtgttaggggaaagagtgttggtaaaggaaaaagatcacatcaagcagtagtgatcaagacaaattttatggagacacaggtattagagatggagtttagagcatggcaaggatttcaacaaggggagataaggcggaagggaggatctcacagacagaggaaacagaatgaacgcacacacacacacacgcacacacacccacttcgaggccttcacactcacatgcagcataactggaatggcttgcatttggattggtgtaggtgtctggaagcctgcatctagaatgttctgaagcagtcgagaattgattttatattcctggtcaagttgctgaaacgtagcaattgggtcaggaagatcagttccttggacatgaattttatgtttattccggaagaagtttagctgaaaagtaaaataaagggatttggtaaaatacattgtcagatgttgtaaagcaatagtaagtttctgaaataagctttagtagcatatgaagctttctagttaaattccaggccgtgaaagagacatattaggtacaatttccaccctttcatagaaggatgaccttcctaacaatgaaacctatctagccacactttccacatttaatgtgtcaatgccacgaagaacattattcatactcatgtgctactgtcacagtcacaatcttatataaactgctagaagacaggcactgactccatctagttgctttatgtggcacttagcacacaagtgccgatgctttctaacgatctaccctaaaagctctacttattaagactgaatgccactagaagagtcaggtgatgttgggttttttttttttttggctttcccactctctgatccagacagccaaattctggattcaggattactaaacgagctgaacaacactccatctataacatggcaggagtgcagcaaactcgacaatggcgtatttgttgtctcttctgaagtccactcctcctagtcccaagttagaaaacaggtttcttaagaattccaactctcaaatccccgtcacatgaaattcttcaaaaccagtgagtttaacataaaggataaagtgggccaattttatgtttatcaaaggcaaataaatctaaaaaaattaattctaaacacattctcaaatttgaccctaagtttcaagattttaagatactttcaagaattttaaattttaaaaatttcagccacagcacaaaggctacctttaagttttcattaaagtaaaatctagactactacaaataaccttctatcttaacaaaatcatactgtgatgaaccaaaaaacccaagcacagtgaaaaaggcacaaggccagaaaaacaattagggtgaagatatttttctcaccttttcttttcttagctgctctaactttcctgaagttagtttattttttcttttaacatttttatcttcaatctttgcttccacagatgatatccactgtatagtagaaacttcttcttcagaagtaatttctaaaatatatatttttaaaaatttaaagattttaactgtaacattctcaggtggcacaaataggccatatcttcacaatgaaagaaaaagtaacagttgatacaactagatagttttggtaactggcctagttgactttgaagtttacgtgataaaataaatatgcaagaatagctaaaaaaattttaagaacaataattagtaaagactacttctggaatttcttttaaatttttttcaacttcactgataaactgcatatatttaaagtatgcaatttgaggagttttgacatatgtatatacctgttggagttcccctggtggctcccgtggtaaagaatccacctgcaatgcag

SEQ ID NO: 48089 - DNA, 3047 bp, Bovine  19866881237623
  misc_feature (1)..(1): n is a, c, g, or t
nagccgcacgtcttctgggcgcactgatttctggtttattcgcagctccaggacacagcggttcccagggccagagactgatctctgtggacgcgaggtcaaggcggcggtggctggcgactcccacgccaagttgggaaggggccgaccaagccagcgagggacagaagtgattgttcacgccggcccggcccaggaaggaaggcgggaacctctcagcgctatcggagttcacggaggcgctcagaggcgaggaagaaggcaggaggtgcgccccgactccaggctgccctggacctgcagaagatccagggtagcgggggctttttaggacccatggctcacagtcccgtagttcctggggcagaggacacctccttcccctctctaagcctcaggttcatcacctaagaaatactgaaacctaaagcccagaggatgcggcattgtgtacactgagtgagcccacctgtgaaaccctgtattccaggaacagtgttcacacttttctgagaaggcaggcagtcggttcctagtagtaaaatctagccctagggaggttcaggattctcagaaccaggcaaattcagcgctgggcgtgggggggactgggagcttagggacaaacattcagaatgagcagggcatttgcaaaggagcttctaagcaaagtctccccactttcccaccttttaaagacagttaggaggaagaggggaatttcagcaggagtaggagtgggaatgcgaagggtcatcagatctgtctgcttggttcaggtaccagggctgaagcccagatgttgttgatccaagtcaggctgctaaggagcctgtcgttgttatttagtccctaagtcatgccctactcttttgcgatcccatggacagtggccctgccaggctcctctgtccatgggatttcccaggcaagaatactggagtgggtagccatttccttctccaggggattttttcccgactcagggatggaacccatgtctgctgcattggcaggaggattctttaccactgagccaccagggaagccccgctaaggacctaggttgactttttaaattacagggtttgctctgtactcctggaccacccacgagaaaggggtggttgtgtgcacggagctctggtgacctttacagcatctcagtgtctttccccgagaaaggggtaagaagttcatagaaacgagggctcttcatttcaccttattgtcttggagtttgttgtgacatatggcacctccttgcccctcacagttcagcccaatgggagaacattttttgcctccccagcttccctcagcagggataatgaagtgttcagagtaaatgtccctggagaacaatcgctttttctctgtccctcacttgctatcatgatagaagcagtcaagtgtaatgaagatcagtttctgtgtttagctgggaaaacccattaaaaaaccagccatcacttcccttttaacaacaaagctttgatttgtagttccgactgctgtgtgcccagtctgactctcaagcttccttatctctcaaaattcaggtgtcagcaaacccattcttcccccctaccccagccaatggaaacacacagaacgttgcccagagcacagggaaatttcctatgcatgtccaggtaatctggctagtcaaagtcagcagcttcctgtaactctcttgctcaggtatcggtatatactacctgatgcaatatgggtgctcaccaagtaactgcagctatagatctgtgggcagacccattatctatctcttcatatggaaatttagaaagaaaaagtggaaggatcccagcagggggtccttagggatgtgggtcacaaacactcaccaaatgaattatctcaaaaagcactttggttaggcttcctccgaacagaggaagccagaacataagtgaaatactcttgtttatgcttcacaaaggataaagtaatgatggactgagacagtagccccattttaaagaactgggaaaagacgatgtaggacgttttaaagaggtggcttggagctcctgtaataagttaaagaagggttgagattggggctcaggatttttgagtagggctttaggatgaaagagaaagggctccagttttactgtgttgggagacgggaagttgaaagagggcattctgctgtgattccacagcagagaatagagaacagatgttggcatcaaacagacctaaatgtgggttctgcaatctacttaaccagctgtgcaacttggataagcttgcgttgcataagcgtctgagcctcagtttccttaggtggaaaatgatcctaatactctactgggtttttgtgacggtgaaaaaataatgagttggtaactgcaggttcaagtgtctgacatgtttagaaagagacagcccatcatgaaaacatgcaaagaagtaaggcagctggtcttctggggctcttttattcccggcttttgtttttcttttttgagttactgaatttaaggagaacagattaggttcttctactcaaacaatgaatccactcgttcacatcccaagatttttctatggggaaatgtagtccctgatccaagataatttaaaatccagttggctcactagtctatgaaagttttctaggcaccgtcttggaagtttcacagaagggcacttgtggttcccatggcctcagtctcccccgtaacttcacagcccaggtgaccctgctttctgagcttgtgcacagtcttcttcctactttccatggttcccctgatttgcttacagctgggggaacccagtcctctctgttctctgatgctcccctctccacattgattcgggagagtctctagaaagcctcacaatgaaagcatctctagagttaagcatgaataccaccctgtcctagtctgaaagtggttggaagccttattgttaagagagcagcgttgcagcctagagagcattctagactgtgtcattagagcctgagttcccatctcggatacaaaactcttttccgggaactcttc

SEQ ID NO: 48090 - DNA, 3176 bp, Bovine  19866881281680
  misc_feature (1)..(1): n is a, c, g, or t
naggaaggctcagcaactgcacttcggattctaaccactgcgattaagtagtgggagaggagtttggggcagattttggactcaatcaatggtagccacgttacagagcctgatgggaggatggaattttccttgttgggatttgagttcaaaagtcaacctcctaaaaaaaaaaaaaaagtcaacctccttagttagtgaagaatggaagggcttggagaaggtgctattagtctgtcctgaaggtcactctttataaaaatattagttcaacagggactggtcttaatattattaatgtaactttctgtctttaagaggacaagagttgtttttttcaggttccttgacagacagtgcttagtgagggagcaacaaggtactgagttgtctctcctagcacaggttaagcacagatcactggaagcatgcaagagggatacccgatccagacctggggagggcagaagagatgtacctgaggaaatgaagtctaagttgaagtgaaggtaccttagcaaaggaaacttggaagtagtgcctaggggcaaaaggaggtgcttctacctggtgggagaatgaagagtaagatgggggcaataatgacaaagaaagagaaagacattggaccctgaagggccttcttcaaagagtgaccatataatttactgtacagagacacttctaagagggaaatgcaacctcgctaattatagggggataacaggtataaaccaggactgttctgagtaaatcgggacttatcaccctactcagaggtcatgttcaggtgtgtggccctctggtgaaagcataaactggacatcacctctttttaccttacacaatctttcttttgcctgaggacttcatgcatgcgtttgcttttacctgctcattttgcaaatatttgtccaggaagttcttccgggtactgaggttacaaagaaaacctacatccaaagaaacagttctaatacagttaaatcgttttagccctggtctctcctcttagcttcagacttatttatgtcattcccatatgcaggttgcaaagcagatctgaaacagaatctttcatttctcctccaaatttgtgttcctcatgttataactgatgccactgcaatactgaaggcagaaactgagaaaaacactgctttcatcactgttatccttcccctcactatgcatttttaatttctccacatctttcttaaacacaatggctaaattggggcttagaattctaatgagggcctaacatcaattgaagaggaagggtaatttccaggtgcttgaatgctatgtttctaatgaatagatccctgaatcacgtgggactgtttttcaacggtaaaacgctgatgactcatatcagtttgttgatagtgatgacgtccagatctggatacacgccctagccagtatcaaaaactttcagtttaggagaaaaaaacatgaagataagtcctaaaggtttgatgccagtttccgtttgtggaggtgagtggttgtaaaggcgtaggtgaaacaccagtacactgttaaaaatggatgattgaaagggcaattttaatgcttccactatctattctccatacaactgctagtgattctttttaaaacaaatctgataaacaatccgcctgcaatgcaggagacctggattcaatcccagggttgggaagatcccctggagaagggaaaggttacccactgcagtattctggcctagagaatcccaccgactgtacagtccacggggtcgcaaagggtcagacaggactgagcaactttcactttcactaatccaaggctgcaattaaaacaaatctgatgattcctttgttctcaacccttccatggtattctgtcacattctaataaaatccaaagtccaacgtggcttaccagatacatgatctggtttctgcctatttcccaacttctttctctaatatctagcttcttctccaagatgccaagcaatcagggctattttaattgccatttcttttctcccagaacagtttctctctagaaatacacacagctacctccctcattaatgattagatttcagcttatgatgtagaggccttttttgtctgccccatctaatacagcatcatcccatcactcttatcccattgtcttgatttttttaaaaacctgccacattattgggcattagctattacatagtaatatagtttatgtattgcttactgtcaatctcccccattattatatgaggcagaaactgattcactgctgaattcccagcatgtacaacagtgtcttctcattagatatttgattaatgaatgaataaacagattttcaggatacaacatatgtaaaactattctatatttactgacattaagcataaaaaatatctaaaagagtgtatagcaaaatgttaaattacatggggtgagctggttttcacattatttttgctcatgcaaatcttttttttttcagaacgaacttgtattactcagatactaaaagaaaaaaaaaatgaataaagaggccacgctggcagaaagtgtaaatgaattctataagaggttgggcaaatttatgaatgaaagacttaaacagatatagtagcataatggttaagctcagcaactgtgtgaatcccctttcatacatgatctagcatgtaatcccaagttattcacaaggcagcgtctaaaggttttcatctggaaaatggggatggtaataatgagtgtctaccccacaaggttgtttctgaatattaaatgagaccatgtttgctacctcctttgtacaatacctggcatgcagtaaatacccaacaaatggcagctattacaataattagtagtagtaacaagagatgttgggacatacctagccctcaagattgacatcagagtggaccaccacatcctctcatcattgcgcctcaatctgggcccctgaagcccaaagaggggatggttctttccaaagatgataatttcgacattccaggagcatctgaatcaaacgtaccccgtgtacccttaaaccattcaggcagtctgattaatccaccagcggcactgcaagatacggcttcgagaggccacccccgctcgccgtccttgggcccaggcgcttagcctcgatctccttcgaggcggtaacaa

SEQ ID NO: 48091 - DNA, 1494 bp, Bovine  19866881288663
  misc_feature (1)..(1): n is a, c, g, or t
nacccagcacagccaaaaataaaaataaacaaatagaaaatatttattatttttaaaaagtaaatggaccctcaaagagcaccctctcctggtggctgtctggccacgattccaaattccttaaatggcagagtcagtgatagacctttaggacagtattcttgactgggaaatcccatggacagaggagcctggcaggctgcagtccatggcgtcgcataagagtcggacacgacttagcaactaaacaacagcacaatacaggggatataatacgatgttatttcccactggcccccaatacagaacacttacactaatctggcttccagctcctgccatgcttatctttacttttgcttatgctggcaaacttgtcctgcctctttcctaattttctgaatttttctgtagtctgtgggagtcccattttctcaaagaagacctcttttatgtctccagctcctactgattacccttcctttgaattctactagcaatctggtcaccaccacatgattcagcatttactgggctaaaaattttttgtgggtatgttggtttcagctctctagctgaattttaattgtcttaaaagcagagagcatttcttacactttggtacagccctcaatagctgctgctgctgctgctaagtcgcttcagttgtgtccgactctgtgcaaccccagagaccgcagcccaccaggctcccccgtccctgggattctccaggcaggaacactggagtgggttgccatttccttctccaatgcactgaaagtgataagtgaaagtgaagtcgctcagtcgtgtccgactcctagcgaccccatggactgcagcccaccaggctcctccgcccatgggattttccaggcaagagtactggagtggggtgccactgccttctcccctcaatagcctaggtagagatattcgtacgggcttcactgactgaaaataaatgctggctctgtacctcagagacctctctgcttccaacgtctgcttgtccgtcttcaggtcgcgtatgggaggcaaaaacctccagaaggatacttcacagatggacagacttcaagaaagtcattgccttgaccagaacagaggctctagtcgtaagataagagaaaaaagacaagaagacctgatcagaacactgtgttcttcaactccggtcagccgtgcaggtttgtccaggattaagagcctgagggaacttcacaccaaaaggtcagaaactgtccgcaggaaggcagctttttaagtctggtcctgatgatgaaaggcaagattacacaacaagaaagacagagttcgccacagaggctccacacaatgttttcacgtggacacttgagttttcacaaggcatttcagattctcctccctccttattatccaattgcagacactgccaaggccctagctgtcctatctatatttggcagtcaccaaaacttggctgcctcttgcatgacacctccagta

SEQ ID NO: 48092 - DNA, 1013 bp, Bovine  19866881316237
  misc_feature (1)..(1): n is a, c, g, or t
ntgctaggggagcataagccccttcagcctgtggcccatcttctttgccttgtgacctcagggattcttttagaaagtacccagggagcctcagaaggaccacactgaggccgagtgcatacttgtcacgctctctgcacatcagcagtcacagtcatccctcccctccccctaccttcttgccagcattacctgtttactggaagacatgttggtgagcgtactgatgctgctggtatctgtgaccaccatcgcagatggaaaccgggaggtgtgggaatactggggaggttcctgcttgtgtgtgtacactgcagagacagagtgaagacaaggtcaaggtgcagatcccgcaagaatgtaagcacagctacagaccacccctcatcccacaccactgttcctttttccccaggcagataaaagggggtgggggtgggttggtagttatgtttgggcaaggcagtgtgatgtgatcaaaaagaatggctatgtgtttaaatcctggctccttaatcaacgcagttagcctcagtttcctcctctgtaaaatgggaatgatatctgttgtaggattaaaagagactgtgtttaaagcagtttaccaaatagataaataggtttccacagtgcctggtggatagaggtggctggcacttctgtggcgggagcactttctttccctgacttccaaagtattagatgcctggatatcagcaagtaatcctgggacttccctggtagtccagtggctaagactccatgctcccaatgcagggggccggggttagatccctggtcaggaaactaggtcccacatgctgcaactaagattggcacagctaagtaaataaagaaatattcaaagacaaacaaacaaacatcccaaacacaactgatcctggggtatatgtggtgcatctgagaatttaagtccaaaaaagttcatagtaactggcaaaatgaaggagctggcctgtttgcttagtttttctgtagtgactcaagtccta

SEQ ID NO: 48093 - DNA, 1390 bp, Bovine  19866881317437
  misc_feature (1)..(1): n is a, c, g, or t
nttgaaacaagtcctctgaattcaggaaatggcctcttaatcaaaacgcttcgagatgctctctgagatgctgtaccggcccccaaatgggactgagtggccagccgaccttgacgccacatgaacgagcctctagaactactgtgaagtcatctcgaaacccccagacatttcaggagtctgacgatagactcacagttttataggatgatgacgatgacatttagtaaggctagcactcttcatataacactgtacaatttatgcttctcatgaacgttatctagttgttttctttttgccaaaacctcctaagaagtacaaagaaataaaccaaggctcagagatgcagggtaacctgcccaaagtcacaagagatgatatgctaggactgaacttccagacttttgatcttagcttctaaatcctggacttttcccacttaaacactactcatcttccaataccgatctttttatttatttttcactgctttgggtcttctgctgtgcacgggctttctctagttgcagcaagcagggactgctcttccttgcagtacagaggcttctcattgaggcagcttctcttgttgcagagcacaggctctagggctcatgggctccgtagttgaggtgcagggacttaattgagccaaggcttgtggggccttatttcccagaccaggttcattggcaggcagattcttaaccactggaccaccggggaagtcctggcaatacccgtctttaaaacgcctatggtaatcacttctcttgtggtctgtaacagtcaggaacaagagtaaaaattaaacctacataactatattccagtcaggaaaccttcttcttgcaaacaacaggagaagagagggtatgaaagatggaatgaaataagaggagagtgaagatgctgcctcttggcagcaggaggaacccaaggggaggaaaagttgtacacactctgttctgaaggcaaagggtcagaggtgagtttcagaagggaattggtggcaattctgcttttttgttgtttgaaagtgttcttttccaaaaagcatttcaagactattgctaggagtcggaagcccatgacataaggagaggaagattccttggccaaatatgttgggggaacagctgggtttagcagaaaccccacaggacagggcttctcagaatctctcctgtgccaatgtgggcattgaaccaggacccgtcccgggcagggctgctttagaggcatcgtagaatgctaagaaaagggtctgagccaatcctggctccttcacacctgctccatgaccttgggcaattaattcagggctgtgagtcttgggttcttcatctccaaaggggaagctcccacctccctcatacagaatata

SEQ ID NO: 48094 - DNA, 2636 bp, Bovine  19866881322145
  misc_feature (1)..(1): n is a, c, g, or t
ncacgtgaccctcagcgcctgggggaggggccgcgccacctcgtcacgtgacccggccgccgaagaggggactccgggtgcagttctggttcggggagactggcggggcggtctgggcccagttttaagggagctgattcgttctctgggaagactttgtggaggacacagctgtccgagctgcagggagtcgtcgttcctgcgtttgaaaaaccatcatcttggttaatggaaatagaacgagtccagtttgaaaaactggatggtgggtacacgggtgttctttaattgctactttttacacaaaggatagatggagcctgaatgcccctttgatagcttcacaacgtccattagtgatgagctctacttttcccctgcaacttggaagattttttttggcacctgtcctagaagctgaagctgtttagtcacctggtttccgcgtttttcttttacttacaatcagggccaaaacggtggtgcatgggaaggtttattgcacctaacctatctgggcatatttttactgtgattgttttccttgtcaaactactgtaagaaaatgtaaaagttgaacgtaaactttttcaagccttgaggtatcgtttgcttattagcaagtaacgggtttgtcgggttgaaggaattacaagttggaatcaagattgcgggtggggatatcgacaacctcagatatgcaaatgattgacagaaagtgaagaaaaattagagcctcttgatgagggcgaaagaggagtgaaaaagctggcttgaaactcaacatgaaaacaactaaggtcagaacatccagccccatcacttcagggcaaacagaaggggaaaaggggaaagtgacagattttattttcttgggctccaaaatcactacggacagtgcagaaggtagcggcagtcatgaaattaaaggacgcttactgcttggaaggaaatctatgacaaacatagacagtgtaaaaagcagagacttcactttgccgacaaaggttagtgtactcaaagctgtcgtttttcaaatagtcatgtacgggtgtgagttggactataaagaaggctgagcaccaaagaagtgattcgttgcaagtgtggtgctggagaactcttcagagtcccttggctgtaaggagatcaaactagtcaatccccaaggaaatcaatcctgaatattcattggaaagactaatgctaaagctccaatactttggctccctgatgcgaagagctgagtcattgcaaaaggctctgcagctggcaaagagtaaaggcaaagggagacgggggcagcggaggatgagatgattagacagcatcacccaatggacacgaatctgagccaactctgggagatagtggaggacaggggagcctggcatgctgcagtccttgggattgcagaatcagacacacttagccactgagcaagtaatattatagttagctttatcttttactcttgcttcagggcttttacagggagacagttcataataatagttatcctttattgggcacaaatcactggttagaaactttactgtttcaaatcctcagtgtccctaagagttactattggcatttcagataaaaaaaacaaggttaaaagaatttgtaattcagaccacacagctgcaaaataccaggaccaggatccaagttaaagtgtttgacctcaaagtccttgcttatttcaactacagtgtgctatttttttccctcatgtccacaaatttcattcctcccctttttagatggaactgtgtagcagatgttccagttgatataaactgatacatacgaccaaactccatataaatccattgacaaatcaagtagatataggcttatgtagccactttaaaagatgggtgatttaaagacaggagaaactacctaaaaaaaaaagggggggaggagtatttcaaggatcataaagacataatttctgtttctgctgggaatactttgttctcttttgcatgctggctgttgtaagtctccggctgtcagccgctcctgacatttccagtacaggttagctgctctcatgtgacgcttcagcactgtggccttatgtctaacatggcacttaccacactatttgtcctttactttatccccgccactacactgttagggcagggactatgttatgaggctttgtattcctaaccaaacaatgtgtatttaaagaatatttttttgtgacgtgatcacatgtcgggcacagtgctaagtgcttctgatcttgagacatagttggtattaccctcaatttcagtaataataaaaaaaagattggcaaaagggtggcaccagtgcatccacctccagagtatattgtgagtcaaggatctgtttgcaagaacgaaaacatcacaggcttggtacagtatttcttgcaccttgcagcaataggtctccatttacgtaaattctgaagatgaacaatttttgtcccatctaaaatattttaagttggagtctacccatcctgactctagaataaaagactgactaaaggaaataagtaagtttaattcaaatgttgctgagtaaagtttattacagtatcgatgaccataactaacattcatgtcaggtgccactccaagtac

SEQ ID NO: 48095 - DNA, 759 bp, Bovine  19866881388566
  misc_feature (1)..(1): n is a, c, g, or t
ntaatatatacagtaaaaagtgaaagtttatatctactcatcttccctttataaatcccagtggtcgatagtctagactagtttttttgtacttacatatgtaagtgtatgaatgtgtacataattttatatatatatatatgtatatatatatgtgtgtgtgtgtgtgtgtgtgtgtgtgtatatagttttactttgtttttgacctatatgggattattttagattgaaccatacaaaattgccaatatagaaccattttttacctaccaaaaagtgcagtttcttttgggacttttctggtggtccagtggttaagagtctgccttgcaatgcaggggactttgttttgatccctggtcagggaactaagggcccacgtgccacagagcaactgagcccacataccacagccagagagtccatgggccacagtgaaagaccccacatgccacatctgagacccatcactgttgaataaataaagaagtattttttaaaaaaggacaaacacagtttcttttggatcaatccattactgcaaatactattctggtacttcttttctcatctaataccatatcttcaggatctttctattttaatgtatgtatattaatagacctaccagatgacagcatttttttaaagggagaaaatgccagttttctccttctctacgaataccattctcacttcaatttttctctttcttcttgaaggcagcggaggaagttggatatccagtaatgatcaagg

SEQ ID NO: 48096 - DNA, 1141 bp, Bovine  19866881406250
  misc_feature (1)..(1): n is a, c, g, or t
natacttttttttggttgagcccttacaggtaaattgtagacataatttccttttttttaaaatgaagagaaagtaaatacgaggtttatcaactccaacgagtaatagcatctagctagtatttagtaatactgttttgattcaccatatttattttttggttatcctctgttacaacgaatgaggttttctatttacttaataacaaaagactcctttaagaagttttttaaaacataacaaattaaaaatgttaattaaataatacatggcaaaaaaaaaaaagcccactcctgtaatcaagacagtggagtagaaggacgtgtgctcatcttctcctacaagagcacaaaaaatacaaatacctgctgaacaaccattgacaggaggatgttgtaacccaccaaaaaaagaatagcccatggccaaggacaaaggaaaagccgcaagtaggaggggcgcaatcacattaaaatcaaatcccatacttgccaggtgggcgacccacaaactggagagcgataatgccaaagaaggtatcgcactgttgcaaagcttctaggccccacatcagacttcccaacctgaggatccagcaaagggacagggaacccccagggaatctgactctggacagtgggatttgattacagaacttccacaggactcggcaaaacagagactctcagagggcacaaacaaaaccttgtgcgcaccaggacccagcagaaaggaacagtgaccccccaagactgagccagacctgcctgggagcgtttgagcatctccccgtgggagacgtgggttggggcagtggcatatattcactttatttcaaaggaagccacctaagatgcagaccacacttatttctaaatataacattaagctccgagtacgtagcttggtatgtagacaattaacaataactttgtaaacactggctaagaagaggcaagtacctgcatacaataggtccctgggacatctgagaactgtaattcatccctatcatgccttgcatgttaggctgcttgacagagacctaggaaatcctttgctgctgcatcggcatcagacctgctgaaaaacaaagatattgtttaaggtcgaaagtaagcactttactttcttaaaact

SEQ ID NO: 48097 - DNA, 1598 bp, Bovine  19866881425124
  misc_feature (1)..(1): n is a, c, g, or t
naaaagaggatgatagcatttctgagtttatacagctctgaatcccggtttctagtgagcaccatgtgtaagacttgcttgccatgtgcttcgtctgtctgtttcattcatggtatcaatggtttcctctcccactctaccttctagtccctggtactgtcagaagatgaagtactttttcatggtcgtctgccaagggaataaaaacctggagtgtcagtctctatagtctgtgtgagcaacagtcccatttataaaaaattccattgccatttataattgcaacagagtatattacatttgcaacagagtatttgcaacaatatatacccatatctggagtccaccctgctggtgtcttgcgccctgcaatactgcaggtggtgcatttggagatttttgagcagctcccagagttcaggtgccattgccatgctctgaacttgcttccgctcagtatgccggtaacagtgtcgggcaagtcctggaggcaccctttagggtggtccttcctgagaggctgtcctgattggctgggcatcaccacactgtccagcagtgcctgtcagtacacactgctgcagcatatcaaggaacatccagattcattacgtttttagattgaacagatccatcccctttcagcatctccatttacacgttggtcctgcttacacatactttgagacgcatgctctgcccttttgtactctgctgggatgaattaagggcttttactgacgatatgcctactttggtatagaaatgtttaaatataaaaaaggcaatttggcaaaactgtttctctttcaaaaagggaggagctatgatccttatgactactcttcccatcagcccagtaaaggaaaagatagatacctcaagtaaagttccttttatagactacgacttgcttctctttgatgaaacatgggtttttgtgtgtgtgtgtgtgttttaataatgattcactaaaccattccagatgacttagagttgttgttgtacatgtggatatctatctgtgaatccttaatctattacagttcctagagaaaaatacctccagtgttgcctagctaccactcacttggctggcttacttccttttaaaagagaggatgttttggggaaggggaagatgcaggatggtttttcacccctatgtgctcttcattcactagacatgtcctgatgtcagtgtgtgaaaaccgccatgttattatttgttaggtttttacgtggagaaatttacggggtggtaaaaatgttgtttgtgtggagggaaaatcccaaggcaagggttaccgtgagcctagaaacatgggcttctccatagtgggtcaaaaaccaagcctgctccctgcctcctgcccctggttcacctctctcccagctccttttctctgttgaggctctgccagtccttgctcctaccctccttgtctaacgcactcgattgaattaccatttagaatgtccttctcctccaacctcaaccactacggcatgactcacgtagccagtgtcagcgacgtgctgctggacaacgcgttcactccgccgtgtcagcggatgggcgggatggtctcttttcg

SEQ ID NO: 48098 - DNA, 964 bp, Bovine  19866881532018
  misc_feature (1)..(1): n is a, c, g, or t
natgtggtataatgtaaacatatgcatatataggtttatccaatattaatatctctacctgagaagtaactgcttcagtgtttttctggtctgatggttaaatacatatttatacttttaaagtcaatatttgtacaatagacaagaacagtgcctatcagctaaatacatatttaggactgtaccacatgtattacaaacatgtactaaaatcgaaagctcatatttatacagagcctttcatcttgaagggggctaaagagctttataaacatatgtacataaaaggacgtttgccactgataggcaggcaaggtatcacttcacctgctcccctgctccttccagcagtcctgggtaggaacgcatggtgtcatcagatgcaggtctgtgtcagctgcggagacacacaacacaatcacccacactgccgtgcacagtccctgaaaaggggctgcaacctgagctcagcaactgctctcctccagagcagaagcatcacggccatttccagctttgtttttaaattattctctaccaaactcaactaatcacttgacagaattgaatttgatactggaaatggtttctgaatgcaaaatactttgtctgatgatgaaaactaggctgaaaagcgcttccctctgctcttgttcgatttagagggagagagggggggaaaaaaaggggtcacaacattcaggagaaatgattcaaaatatcctatctaagaatagctttgtctcagaggattgggtcattacttcagaagacagtcgtatttgcctcccgtttaattaggacactgttaagtttttcagtcaaattactttatatggacagggtctatctatattatatacacaatggaggttttatattgaaaattctgtaactgccatataaaagcatacacaagtgcgataatggatcaggaatatgacattcttcacctaaagccaag

SEQ ID NO: 48099 - DNA, 1140 bp, Bovine  19866881575079
  misc_feature (1)..(1): n is a, c, g, or t
naatctaggcaatttttctatggatataagcaggctacaacctacctggcaaatgaagtaaaagcaggctgttgctgggacaggtggctctcctcgaaaaggaaggggcagcgtgggagctcgcagtggcttcccaggggcatggaatggacactcgcagaaacgggtacctaccctgttgtgctgtcagatttacgaggggtggtgacatttccaagtttcaacaaaggaagccattgtgttagcttatcatttgtgctgaggttccgtttagggcatttctgtgtaagtcagtaggcaggcagaggggcataccttttgttaaaaaacaacttcttttgtggaggactcactgcatcggtgccctccggttaccaagagacagctgagaactacactttcttagtgtagaagaccacgctgtttgtctcctgaggttaataccgcccatctgcaaggatgggaaacgctgacacaactcaaggcgatgtctgttttaagcagcgttcacaattatcacaggagccatacccttaatggttactcaagagctatcttttgtccatcaacacacacaccccctccccccgaaattctcagtaaaaattccaatgttaagcagatgtatttattaaaaataatgctaatatactcctggggcacactgattccaagagggtgtttgcagcagattgcattataattatttaacagctaaataataaaggcttttttttttttaaacttacagagtcactaaataatagaaggaaaggaaaagagtagggctgatccagtggagactgatgctggtatcagtgttccctaagcatttgtttggttggcagcctgggcaaagcctgtacctaaagggttaatgggggtccaaagtgatttttgcactgagctcctcccacgatgccaagaggcatggggttgagaacacagcagaaccaaacagtttattaaactgttgaaattgttaaaaatgttgaaacttgaaactgtttaaaagccagttcaagattttcataaacactattccaaaatgttagttttaaaaatgttagtagcaatgtgagcattccccgtgtcttcctcccctcccctccctctctctcaaaataaaacatgaacacc

SEQ ID NO: 48100 - DNA, 583 bp, Bovine  19866881600413
  misc_feature (1)..(1): n is a, c, g, or t
ntgtggagacaggtttctggcccttctgcattcttgagcccctgggcagggtcctctgatatcttttgcctcctcttcctccctccacccacccctgctctctccagtctctttactcctcactatcaagctttttccaattttcagatttcaggtggaggagagagaaaacggcttgtgaccttgcaggtttcaatggaagagcaaacaccaagaacagataagcagacgccagcgagattctatgacctgtcattagggatgggcttcccagctatcaaatgtttgctcacataataaaatggtggcagagccctaaatgttgtcaaaggatctagagttatttgcccccttcagagtctaaacacaaacatctgataaggggcgcgctgggttccctcagaactgaggcccggctcagccagccccgcggggaccctgcctgggggtccctgagtgactacagagccctccgtctggagggtagggcagctggaggattcttaaggacatcctccaccctaagaagatctgatccataatgggaagagctgacatttactgaggtcctactgtgtgccag

SEQ ID NO: 48101 - DNA, 1608 bp, Bovine  19866881746980
  misc_feature (1)..(1): n is a, c, g, or t
ncttttctattatgaccccaattatgtaggaaaagagatgtatatacatatgacagaaagaatataatatatattaatacctgtgatctcttggtaggactatagctggtttttactttttattcataattatttgtatgttccaacttttcaaatgcatataataaacaattttaaagcctcaatgaataattttgctttttagctagtaagtggtagagcagagatacctaaggctttagattatgcaacaagcaatcttcattgctcaaggtcataatcaacaggacagtgagaaaaaaatgatcaaattctcctttcttgaatccatggccaaattattctgatggataatacctacctggattctccttcatcttccacatgttcacaatggacagagttgagagcactgactctcttgtaatcttgaggggtcagatataaatatttgtatccctgtgggaagcacaaatagtttttaacccattatttgccatcaccacatgaccagaagacccagcaaagtacatatgatgcagtggttctaagctagctttaaatcgccaaatcatgtcttagagttactgtctcatagaatactagcatagagagtgctcctttgaaagatggaggtgtctgtttctgtatcattgtacccttgaaattaggtatcttgcagctgcaacctcaggtactaatacattccactcatttccttttcatcaaggttaaggggtcattctctaatcttaagtgatacctccattaaaaatatcaacacaaaattaaagatttgcatgaattactattcatcattttctcacaatgggaccatcataccatcaaaatatagatgggtcaaggataattgagagcatcacaaaactggagtattcaatcttaaaatcagatgtctatgctaatgatcagtaaacactaagcttgaaccgtttgcttttttaaataaacattttattttttaaataaaaaagcaaaaaaatatttgctttttaaaataaataatccctaggtacattaaaaaatcatactaacatttcatgattggcttatttttatacatacatatgcacactcacatacagagttatttaatacacatattcaccttaagtgaaggagtcactcagaccaaaagacaaaaaaagcaagcagagaaaaacacttaaaatactacaagaaactatgtccgcggtttaactgaacttgtcccacagtgagcacaacatgccagagacatgaatttgaatttgccaccgattctgcctgactcttgctgagaaggcagggaatgtcagcagtatgtcagccagccacatttatcgggcgcctactacatggaaggcaccggccaaagcatggggaaaacaggaacggacaaaacaggcaaaagtttctggcgttacacaacttatcttctagtaggagatacagaaaatacacaaaataagtaagttaaatatacgatgttaatgggaataacgtttgaggggaaaaaataaaatagaggaaggagacaggacagcttggagagtcgaccttctagaagaacagccaggaaaggctttgctgaaaatgtcacttgag

SEQ ID NO: 48102 - DNA, 1465 bp, Bovine  19866881840555
  misc_feature (1)..(1): n is a, c, g, or t
ncacgggggccggggagggagaggctagtgtccttcctatttatccaccatctttcactggagcatctcggagcacgagaggccgcagctctttaatcctccccgaggaggacgctgatttcaagggctccctggggagcaagaaataaaccccaggatcagagtccagggccgacctcctctctgcctctcaacacccttcactgcagacggcccagcctacggcacgtgagaagcaggtgggccctagaacaagcctctgtcagaactttcaaagtatttggacacattcacttggttcattttactcccgaagatccacgccaagaaaaacaataatttcaaaggacaacaaagaagctttatgcaggaatattctcctgaaacaatattcataatagcaaacaagtgtaacagtctaagtgttcaacaagagggggatttggtttagtaggcaaagactaatggaattattagttagcaattaaaatacttcagtgagatctttaaaaatgtggaaacaaccttctcgtgtagtactactaataaaatgtagcgtgcaacctatgggtggttctcaatgggtggtgtatggatgttaggtggagggggccgcatgcattttgtttttgctgctttgaaaagggtaacatttcaaacagtccagaaggacaaacgaagcctcccacctgcactgctccctggaccctccccccaccccgagaagaggccactgggtaccacagcgtgtatacacaggcgagggtgatgaaggaacacaggttaacgagaaggggatcttcttgagtggagggataatttttgttgttgttcagtcactaagtcatgtcttgcgaccccttggactgtagcacaccaggcgtggcttccctgtccttcactatctcccggagtttgctcagactcaagtccattgagtcggtgatgctatccaaccatgtcatcctcggctgcccccttctcattttgccttcaatctttctcagcatcagggtcttttccaaacagttggctctttgtatcaggtgaccaaagtatggggttatagccaagtcttattttcatttgctccttccacgtttctgtaatttttgacgtgaaataaactaagacaagaagacagccttatcttctccatcctgaagggaacagcccacggcctgctctggccccatgcgcaaacctgggccgggtgggcctgtggcttcctcatggctctggtggtgtcttcaggggctgtggtttaggagcgccgtgcaaggaggtgtcaaaatggatgaaaaggaaataagcaaacttcacacaaaagggagaaatgcttcagtcaacactgaaaaaagggccccggattgaaactctttgataacggttctcaactcatttcaaaatcagcattagccaccaaaatgtaaagtattagttttattaaaatgcaaatcaatca

SEQ ID NO: 48103 - DNA, 1468 bp, Bovine  19866880406428
  misc_feature (1)..(1): n is a, c, g, or t
ntttggatttctctggagcaccaacaattttagctttgtctcctggtgaagaaattctgtccagattggcaactttgcttcaaataaatcagaaagcttttgaagactcaacagtagcagcattgacaagtgtttctgtgcaaagttcattataaaatacagttcctgcttttaagaagcttagaattttatggaaatttttatgactgccttattgtgattcatgtagctatggagaatccatcctgattctaccatggatgaaacattggggaaaagtaatctccaattttatcttggcatttctgagctgtgataggtggtgaagtgaaagaagtagaaactccttattgttaagatttcagttcagttcagtcactcagtcatgtccgactctttgcgaccccatggactgcagcatgccagtcttccctgtccagcaccaactcccagaagttgctcaaactcatgtccaatgagtaggtgatgccatccacccaccgactcgatggacatgagtttgagcaagctctgggagttcagacttagacattgttaaatataccatttaggacaccatttatagtaaaaagaatgtgttcttgtttagtatattgggttatctttatggtttggcaggccatacctgcaattgacttctatgatatttaatcattcattcactcaatgttatagagtttctactttgtccagcaacataaagtgtatcctaggaatacaaatctaagtagtcaaagtccctaactgcaagtggcatagagtcacttatggaagacacctgaattaagcaatggtcatagaataataaaagcagaagaaaatcctaacaaatagcccagtttcttcacttgagcatattatatttgaaataaaagcactggatataatcttgtcttccaatcttagcctctcctgtaattaatatacaaacatttcaaaatggaaacctccaaaagtttataaaacacaatgaagggtatttgtgggctggaagttagttgcttcatctttgatatttcctgattctacacctgcctgtaaaactctgtcctttcattcacgttccttgcatggtgtctgacatttatttttagtcttacccttcttggttctggcttcctgttgtatctcagcaagcccttccacctacagtctagacatgaaccacttgaagttacttctaattctatgatttacacatttggaaaagaaaagagaagagacagaaggagaaacatatgtcttacataaaagttaaagtctggatatagttctttgctggggaagtttttatggagcaagtttgcaaaattatatgctgtaagatgagaaaatcttttaaaagttttaaataaaaatttagaaaataattagtaacattaaagtcatcagtaaaactgacttaaaacagatgagaaaattccagcatcaggaaaggtttgtttat

SEQ ID NO: 48104 - DNA, 1509 bp, Bovine  19866880458900
  misc_feature (1)..(1): n is a, c, g, or t
ncccactccagtactcttgcctggaaaatcccatggatggaggagcctggtgggctgcagtccatggggtcactaagagtcagacacgactgagcgatttcactttcacttttcactttcatgcattggagaaggaaatggcaacccactccagtgttcttgcctggagaatcccagggacgggggagcctgctgggctgctgtctatggggtagcgcagagttggacacgactgaagcgacttagcagcagcagcagcatgactattcaaattgctttgtggttttgtctattatatggatttaaaatttttgttattattttatacacagatctcagtacataaaccttaaggtttgcctagaacagtcccattttatgcctattgtccacaaattctctctgctttactatttgtcctgggccaaagttttatggtttggacaataaattatacggtcaccattaaatgagttagtataactttgtgaaagcacacaatacataattcaataagtatcaaccgattgcacataaaaatcttctttttttcctctagacatgaaatttggagttttgtagctatgatttattgtggactgcctgctaatctgaccccatgaaatccttttatttctattagtatctgaactgagctaagcttctcagcagtgactccaccagtgaagtgatgcaaatgccagtcaaccagacttgacccccttgagctccagattagttttattaatcaagattcacgacattatttgctacatcaatggaatctgtagcatctctcacccagagccaattctgctaaacaagttccaagaattaaatctgtgtcagttgagcaagtgaatttctctctcctttcactctcccttttaatttcttaggaataatctaactccatctcgtgtatacctcatctaagtacattttcttttctataataagaatgtactggaagatgttatctaaacctaaccagagaggagattctgtgaccaataactggtaggtggctcttaaatttctgggccaaattagtgtagagagttgatttcaatgcgttatgtgagtttgaagaaataaactgctcccatgtcccctttttggggttggattgaatttctatctcttttttagaagctaagctaaagttctaaatgttagatttctcctggaacagtggatatagtaatatctttcagggagcatgtacagatttttctgtttgaccctaaaacatcacagggtgtcacgccacatcaaacagcttgactctagaaagacagtatacaacattttttctgccctcagaacttaagtatacaacctagaaaattccctttatagaaaaagaaaaatataattgtagctatttagcatatgccaactgaaactgatctatatttataacaagttgctcaggcaagtaagcaattatttaaagaggggtggatatgtacataggcgcaacataagcaagagggtgaagtcaag

SEQ ID NO: 48105 - DNA, 805 bp, Bovine  19866880548114
  misc_feature (1)..(1): n is a, c, g, or t
ngaattatcaaagactgtatttagaactcataatgcttttgtttaatgtttacaacagtaaatagtttgaattcaataaatattattggtcattgtgtactgatcaatgcatgttacccattcaaccatttataaatgaccaatttcttctgtatgttaaaaaaaaacctggaatactttccttgaacatattcattaattccaagttgattttttaaattatgcgaacaatttgatcagccactgaacaactatccatctttgaccttctgactacttgttgtatctgctggatatttagtttgattgtatagttttatttgcttctgtatgtgtatttttgtgaattattcacagggttaagttaaaataaaaccaagggatatcttaaaaaaaatattttaggtaacaaaaataagtatattcctttaaattggtttcttaagctacacttacatgcaatatttttcaattattttagactaaatttctatattttctgtatatgcaaacataataaaggaagctttcttttcctttatacacataagctcttcttttctatgtattgtgtgatgcctcaaccttttacgacttgactcaaaagtcaactcttctgggaaacactcattggctgctctaggcagattcaagtgtttttttttttttttttttaattttacttctttgtctccttctggaggtctttaattcttttgcttgggcctcctacctagactttaaaatacaagtgcagagactttgtcatctttaagacaaagcatttagcaaagcaactgccaca

SEQ ID NO: 48106 - DNA, 752 bp, Bovine  19866880554880
  misc_feature (1)..(1): n is a, c, g, or t
nacaagaagactctcccctcgttttcttcaagcagagctctgggcaattagaatacatcaaagtgtctaaaaggacagaaccgattgctagctccctcctgatcacctgtgtagtatattctcaccactgggggccattggtcttgtggcttttgcttcctgctcactagactgttggttgatgggctgagggtgtgactttgctcatttcctttttgtcacctcacaaagccctggtttgtttgctttatctaagacctctctgctacctagctaagcctggcttcctgtccagtgctgtgcactgcatctccatggtcccagctcagttggaagaaacttgactgagggtctgaaagtctgctgagtgtttaatgacttcctcaaacttctcacttaccttcagtgctggcaacagccaggtcagaggagaaagtcctaggggtgacttaaattttagcacaataaaaatgctaagcattctgctagctgaacctgcatgggctaaggaagggaatggaaattttagggcaaagcactcgtttatattgtgtgtatgtgtttgggtttaataatatttttggtaacttctcttggtgaggagcaataagaatttgacatcctttcatggtggtgcttaagtaaatcactccttactctaaggagaagtaggatgattttggagctggtgcaagtcagaagtctggatttaaaaagcatactggtgggtccacagtcaatattagggacag

SEQ ID NO: 48107 - DNA, 1663 bp, Bovine  19866880609813
  misc_feature (1)..(1): n is a, c, g, or t
nctcatacaactcaacaatgaaaaaacaactcaacccaactaaaaaatgggtagaagaccttaatagacacttctccaaagaagacatacacatggccagtaggcatataagaagatgttcgacattactaattattagaaagatgaaaatcaaaattataacctcacttacctgagagagatgaactcaaacatagcatcttaaaccacaaggcctcacgaaggaaacttcatcttacagaaacatcttgaactttacttccaaaatgattgacaacaccattatacattactgtataaagctaacattattaagtcttcatatttccagtggtacttaaaaaatgatatacattgttaatttgataatgttcattttttttaatttcctctgcaagaagctaaactttacatagagtgatgtcttggtggatagatattttgtgtgagatttggggcacctcatctataagacaggaccaagggcagaaccaaagctactaccaagtaagataactttcctggttagttgtttgtcagcagtcattatgcacaatctgccacccagattactgaaagcatgttacacgggtcctaagggatttcttccttgttctctgtaaccttaaccatagtaatcagtgttaaatgttataaaacagcactggagctttattactgaatccatcagttaaattacagtgatcattaaaacttctatttagcaacacaatattttgactatcaaattcagagagattaatcattgttttaaatatgctctgccggcaatctgatccttttttctggtccagaatatcacttagtacagcttctgctgcttctactttgcaggctggaaattaaatgaaggacaagtggacaggactaacctttttgggaaatttttaaaataagttaatgatccatttctgaagcatgagaagctgaaggtgggtcattaaagctagtgatatttataatcagtatttgcaaagaacaccagataattggttacaacagaacagaagtaaaggcatttcagactgagacgcatttccgagggtagcaagttctgccaccaaagcgtctttgacatcttactcaaaaaaaaaaaaaaaaaaaacaacggaattttcaaaatgtgatcaagtgatgaaagttagaagatgtttgataagctgaagaagtaagaaaatattgactcagagtacagattttgttataacattggcagggccctcaagataggtttgacagtgattgaattaggttacataaattgacacatcttgctgccttgcttcatttgtctgatcaaaattgagacttactaaattgtatcatttttacttgcttctcttccctatctcttaccactgttataaaatctatgatatttgctttaattttctgaagcattaccaagatttatttttaaaacataacaaattatatcaagtgactactcaaacacttgctagagttataaaaatactatttctttgaaagaaaaaaaaatctcttcaattttcagcaacagaacctgacccctacgagtgaactcatttgtctaaagcaaggacaagtatgtacattagttttaccctttctgatgtcaaagcctaccctagatagtaactgtcaaaatgacaaattttct

SEQ ID NO: 48108 - DNA, 895 bp, Bovine  19866880616048
  misc_feature (1)..(1): n is a, c, g, or t
ntatgtatttacacacatgacactaaccgccctgagagtgtgctttgacattaaattagagattttaaaggcagctgtggatgaaggtgagagcaaataaagatagagtggtaataatgtgaataaaaatgtgcttgagtttatcattacattgatggatggattgtatttttgctgggaacattcataacactacttctctctaaatagtataggaaagaattctagctgtgtactagtgattcttaaagtttagtatgcatcagtgtctcttgagggcttgttaaaacacagatccatgggttgcactctcagagaattaattcagtagctgatgctgctcatccagcaacccggtttgaggactaccactatagatgatacccaaagaccacctcgttcatccttctgccctccacaagaggtgctgcaaacaatgaatcaggaaccatggctaccaggtcctaactgttatcaatatatcatgaatgctctaatttcagaagcagctcagataagggggagggactgagtcatgggtcaagagcctcaggagtaaaatgaaggagaatcttaaaagtgttccctggtcataggaacaggtacaaagaagtacctgggagtacaaagtgccactgggagttataaccttccccaacacaacacaggccctgcgtgttgctgtttcagggaaacagttattgttggtgctactgtgggtgtcacagctttcccagcactgctgaaactaagatgagaagagatggaacattccagagagatggaagctaagcaaaggaagggcacggggtaatggtgggtggagagcggagcagcttcattttattcatctaactctccagtacctattatggtacacaagagacattcagta

SEQ ID NO: 48109 - DNA, 1829 bp, Bovine  19866880694909
  misc_feature (1)..(1): n is a, c, g, or t
ncgaagagctgactctggaaaagaccctgatgctgggaaagattgagggcaagaggagaacgggatgacagaggatgagatggttggatggcatcgctgactccatggacataggtttgagcaagctccaggagacggggaaggacatggaagcctgatatactgcagtctatggggtcgcaaagagtcagacgtgacagagcaactgaacaacaacaaaggtggcagctgaggaagaggaggaagagaatggagcaaaggcaaaatctgaaaagaaaatggacaacaatttcccaaatctaatgaaagatatcaaccccaagatgagagacagaggaagggaaggagggagagaaagagagaaggtgaaagagacagaaaaagagaaagaaggaaagacagactgcctgcctcacctaggtatgatacattacagaagagatgctaaaaatcaaagacaaggctacattttaataactaacaaaacaaaaaggcagtatcttcaaagaaataataaaaatccttgctgactttgcaacagtaattctggaaaccagagagaatggagtatcttcacgtttttgaaggacagtaactgcaaacctagaattttatgcccaaaaacaatatgcttcaaaaaccaaaatgaacatgttcttagataaacagagagcaaatctgctgacagttgatatttaggaaaagaaatactcaaagagttctataggaaaacaaaaaaaggctcccacagaaaaacatagaaatgcagtataaagtaaaaacagtaaataagtatatatttagataaataaataagtaccaaccatataaagcaatactgtttaatgagtactgaagcataaatgaaaattaaggacaataatgtataaaacagcagcagtataatataagtacagttaaagtgttccaagttcttagcattgttaaggaagtggtaaaagtaagtattttgtgtagattgcaataagtcaatgataagtactgtaatctctagggcaaccactaaaagatcaagactgtcagaaaggataaaaaataaaacacaagagatacatcttaaatgaaagaacacaggaaagttgattgtgaaaggacggaaaaagtcataccatgctagcacgaaacaaaaaattacaccagacaagctagattttaagtattaatacagataataagggtcatttcataataattaaaggaccgattcaccaggaatttaagctaagctgatgcggcatataaccaataacacaatatcaaaatataaaccacagtaggttgggaaactttaacatgcttctcttaatggttgataaaagcagcaaacaaaagaaaacaaaacattaaacataaaaatatatgaccaagactcataaacataatgtaatgacctacacagaaataacatccaataataaaagaataaatattattttcaagtgaacatgcaacatgtgtcaaaactgctgctgctgctgctaagtcgcttcagtcgtgtccgactctgtgcagccccagagacggcagcccacaggctcccccgtccctgggattctccaggcaagagtactggagtgggttgccatttccttctccaatgcacgaaagtgaaaagtcaaagtgaagtcgctcagtcgtgtctgactcttagcgaccccatggactgcagcccaccaggctcctccgtccatgggattttccaggcaagagtcaaaattgctatatgctatatcaaaaaggaagacccctttcaaaggactgaaaccattcagaacaatgttctcaggactgatattaagaaatcacaa

SEQ ID NO: 48110 - DNA, 1578 bp, Bovine  19866880703158
  misc_feature (1)..(1): n is a, c, g, or t
nattttttaaaaaacctgggaaaagcaatagtctcaaatagtatactggagaaggaaatggcaacccactccactattcttgcctggaaaatcccgtggacagaggagcctggcaggctacagttcatggggtcacaaagagtcggacacaacggagcaattgagcacacaaatagtatgaagcaactttgaaagatatcaaataggacttctagaactaaaaatatactcattgaagttacatgtatatagaagtagaagtttgttaagtttgatttgcctaagatcactctacttgtatgtggtgaatttgtaaaaacaatgcccgtaatccttttgttatactgtattctgaatttagtgggaaaatgaataagcaaagagggctttctatttataatttctcctccagtcttttgactttatattaactaatgtttgagtcattaataatgaaattaatttagcatctttataattgtgaccttaaaaagaagcactaacacacatgctttaggctaaagcaagcttagctcattttattgaactgaaacttgaataaaactgggcctactctatttcagcttcagacccatgtcaatacatccaaaataaatatagatatttatttatagatataactctaaaatcaaattatgcacattccaatcacccttcaaaatttcattaaaaccttttttacatggcttgctttccctaaaaatcctttctctgcctaataaaatcaacaaacacaaccctcctccctgcctccatattgcttttttccttattccttctttatgatgccatgtctctattatattcaatcttattctgtttctctcatttacatctttgtgacatacttgaaaacaacttttattttttatttttcttggtccttccacctcactgtatacctttcttttttttctgaaacagagatgaaaataaacattatttaacttctggcttgaatcaccaagagggatctggcttggcaactaaccataccacactcactagccctttcctcctgttcttttaactaacatttttgcagaagtgaatcctgataaaaaatgaagctatacgattagaaaaagttgagtgagaattcagtacaaatgtagctttaatgtacctcaagctgtttgtcttagttcatttcaaatcaaaggatatttgaatcttagaattgaaatagatgttagaggatatatatatacacacatatatatatatatatgtatgttaattagtttatgtattttgatcctctctaatttaaatgccttggtgtttttattttatattctaaatttgccttaacagcttgaataacagtgaagagaaagaccgtttgttaacaaaagaaataataaatagctacaaaactatgacataatgtcctaaaagctggggtgtgatattgactcctaacaactagtcaaccacactaatggagtgttgtaatgcaacttcagtctaatgaaaagacattgtgtttttaagaatgtttggtagatgtcttcagatccatttgtactgtcctcctttcaggcttttccttca

SEQ ID NO: 48111 - DNA, 980 bp, Bovine  19866880728929
  misc_feature (1)..(1): n is a, c, g, or t
ntgggaaggttccctggaaggaggaaatgacaacccagtccagtatttcttgcctggaaaatcccatggacagaggagcctggtgggctacagtccattgggtcataaagagtcagagacaaccgagcgactgagcacacgtactgccaatgttttccttaactatgaataaaaatactcaatggaaaaataatgcaatatgtagtagttgttctcattgacgtctcatgttctagattttggtaattaactggtgagaaacacctggaatttagaattgacaagtagacatttaaggtaaagaaaattttggtggtagactttctcatggtgaacattcaagacaggaattttgaaatccatctgctttattttgaaagcggcctttgatggagctgtttccaaatgggtgagattcatttaaataatttcctccacccaaagaacttgactttgacagacatggactaaacaaatctaacctgtttttcaatatcaggatctagtgggaagccagccaaccaagtagaaaaacaactgtgtagtgcaggagaaacaaaatcacgtagagaagagccaagggaaatgtagttaaggaaggccactctgatctgtcaaaagtaggctggaattttaggagtcagtccccaaaccaactttggactcaggatgtggaagagaagaggttagtgaaacatgtatgtggaaagagaaaaaatgcctttctttaagttggttagtgagtccttcagaggtgcggcctggctgaatgccaaaagcaacaggaaaactaaagtattttgccaacccatgcctaaagactgctacttgtatgatgggactgtgttgggattagcctaggagcagagaggggtcctcttaaaaaaaaaaaaaaagtatgtttgaggcagaagtagtgccagaattggaaatttaagactaaaattaagacataaagaaaagtgatacttctattttca

SEQ ID NO: 48112 - DNA, 2785 bp, Bovine  19866880750169
  misc_feature (1)..(1): n is a, c, g, or t
ntttgaaagccctccgcgtcgcttctcctttaaatcttgtcgggaaggggcggagctagggccaggaaaggaggagcggcttctgtgggccacgcccacttggggtagcaggcgctggagacaccaggagccgttctcctcctaatccgctccggaaacgcgactggggacggaattaccacgtgaggttgacgtcatcgcccccgcgccgggttctcctgacttggcttccgtgggatcctggaggtggcttaggtgcttaacgtcaggttttgtacagttcgtggtcttctctctacaggctccctgggcctcgcctccgatttcccgatgtaccacaacagtagccagaagaggcactggactttcgccagcgaggagcagctggcgcggttgcgggccgacgccaaccgcaaattcaaatgcaaagcggtggcgaacgggaaggtgagggctcgggctctgtaaactcttgcctgtccccccctcccccaggacgtaccccacacctccctcccgcctcctcggcgcagagtgcgtttatccatctaatcaacagcgagcaccttgccaggtacagtgggtaaggagacggacaaggccgtccatcccctcagtcgagcggcggactgtatagtcagtaacaaggcaaagaaaacactttgtaggatgctaaggtaccgggggtaggtttctcttagtggctggtgtggagatggggaaaggactttcccggcggacagagccacaggtgcaaaggcggagttcagaaatcgcagagctggtctctggaacgctcttgatcgtgtgtggcggaagcagagtgttgagaggctggagaacacaggcagggaacttgtaagcggaagtaagtagtttgaactctgtgatggagagatgggaaaccttagaaagattctaaatgggaaattaatcttgtcagattctgttctagaaagagctttctgggaaagattggattgattggatggggcagggcagaagaagggggatgagacaccgttagcacaaaccagttgactacagaaggtttggactatagtctgtccgccacgcccttccagttttacttttacctgtaactctcgtttacttaatatcattttatttttgtgctgtacagagtagtacttcctttgctaaattttcagtatttggcaactgttagctcatagaatcctcacaactaccccatgaggtagatactgttattatccttgcattacatctgaggacactgaagtacagagaggttgaataacttctcaggctatagctagtaagtggcagagccaggatttgaacccatggaatctggtttcagctgtccttctgtgaatcgcaatgccatgctgtctctataaaatgagccccacctgtgttagtttcctaggcccgccacaataccatacactaagtgacttaacacagcagagatttattgtttgagttctggaggctagaagtgtgagaccaaggtgtttgtggagtagtgctctctacaacttctagacccttccttttcagcttctggtgaccccaggtgtttttccgctagtggcagccaactccagcctctagctccttctttccagagtgttctccttgtgtctctgtctctttacatgttcttcttacaaagctaccagtcatattggattagaagccttttctacttcagtaggacctcatcttaactaattgtatctgcaaagaccttattttctcacattgtgaggtactggtgttaggactcaacataccttttttggcacttgtaattaaaccagtagtggcaccaaatagatatttttgttgtaaaattgtagtatttattaaccctacagtgtatttcgtagaaattttatagagatgcagaagaggtaatatgttaagggtcagaaatatccttgagacacttgatttttacttcaacctctgtgactcaataaccgactgagaaagggctattgaaagttttccaaccattgacggtttcttccttttgatctgtaaaagtgacatcaaacttgtgagcatatacacacgctcctcatgattacttataccttagtgagcaaatattcagctgacattctgagaagttatgcaattgtggcacagttttagtttattgaatattttttaaaacttatttttgtgtaatattagcaattctgtaaagagaaaatgaggtacatttccctttggttagagataaaaacttaattaaatctgcacagagaaatattaagattatctaacttattaaacttttgttctaacttttgatctaaaggttcttccaaatgaccccgtctttcttgagcctcatgaagaaataacgctctgcaagtattatgagaaaagattattggaattctgttcggtgtttaagccagcaatgccaagatctgttgtggtaagctttagtggtaatgaggtataaatttctgtagctaacttacaagagcttataaagattaatcttataagctaacttatatcctcttataaatatttaactcaattctctatccactttactcagaaatgcaccttagttatgtatataatttatgcatcaatatttgttgtcacatttttcaatgaatgcattaaattatgaattcttacattgtatcttacacaatgtttcaaaactcatttcatgtcaaaagaattttgaggtctgctggatatgtcatgacattctcattttatagggaaagaaaagaattactttccctctgggttctcatgc

SEQ ID NO: 48113 - DNA, 1659 bp, Bovine  19866880806473
  misc_feature (1)..(1): n is a, c, g, or t
natttctttcgttgataataagagagtcaaaccaaagtaatttatgcaagcaatttctatgaaacaattcaaagccttcacaacttttagagagaacatgaatacaatttttaaaataatgttaaccccaaagcatctctttataaactaaatacagcatgttgttgtaagaatacaggcaaactgtgggctgtctatacattaagatgctaactggaaacaaattcatttctgcaactatagctactctctcttaactgttccaatttttagatccaaaagtatattggattcagaattagagaacagttctagttcctattccgccactcagtaacttgaattttggcaacctgctttctctctgtaatttattcatctgtaaaatggggataacaagaactgctgtgcctcaccaggatgttacaaggtagaaatgaaatacaatatatgacaacttttatatcactatacagattacatttttacatgatcactaatggtcttgagaccagagtgacaagaatctgacccagggtgttttcttacttctgacgttacctcatgctcttggccatggttgttgaccttccagggcattgtgccagagatacctttttgtgtttttattccgttcctggtttcctgctaggatatgtttttttacttctgttttttatgcaaaatttcattcttcagcaaatgtatttcagttgattatggtttttatttttataccaccagagctctgtcatttataaatccattttattaaatttaaaaataaattcatttcaaaatgattaaataattttaaaaggccaatagaaatactccaaagattttcacaaaaaaagggaaattcattgctatatcttaattacaaaaaaattttgacaaaagtggttaatatgaaaagaaagcattataatgaaggaaacaagtaaatttcctatgatcagtgataacacataaaaatatgtacatatatctaattatttattataatatggaaaagcattttaaaaaacagtaagttttccatgcgcacaaatgttcctttatttgcagatcactgctgcaaagttactggtttactcagactttccctaggaaacagtcaccatctgcctgattagtctgtttccttggtatcctgcccattctcgctatttaagtttctgctctatttcgagaaacgcactcattaggatggtcacatctgttatcatttgaaaagaagtacacatactcaaaaaacaaaataggaccttgatattttattaactataaacaggaaaagtctcttttcaactatcttatccttaagtgctaacaaaggatagtttgatctttcaggtccctctctcatattccatgaacctgaaataaagaaggagtgctcagatagtaaaatgacaactcacacattttcattatgtgcatactgagaagcacattaaaaataccatctattaaaattagttgactgaatactagcatagaataacaagtaaaacagtaatattttgctgttcttaagactatttatatctggctatctcctaaaactagtaatatactagaatcttacatatatatgtatgtatacacacattaaacaaaatactcattattacaaacttcatactcatcagc

SEQ ID NO: 48114 - DNA, 1236 bp, Bovine  19866880819727
  misc_feature (1)..(1): n is a, c, g, or t
ntcaaagactatttctatcatttgccaaggccagtgctctatcaattccaccactgtatttatagacagagttcattatgtacgttgatggggaatgagatgggaaaatagtggggataggaaagcatgagatatcagcattaaagggagaataaatactcatttcaggtgtgatggttattcttattctatttttcagttgtaaatggacaccaatggaatttataacaactttctaaatttataaagatatccctcatcatttgctgcataccagtgggtattgggatgattcatggattcagagagtattcaaaaaagaagcaacaatagagatcatctaatagaactgttccctttttaaaaaaaaatagttatgagagaatattgtgaagcactctttcgtgtataatttcaactgctgctgctacatagaatatcaaaagatgattgggcatggatttagatttgtttgaaaactcctctaatagcacacacatctgtactctaaatgcagtgaatgtcacatatatttaaggaaataggttatggtggaagaaggggcaagacatggaactggaactagaagcctggagctttggtttctattttggtttctaacaagttgtacgactttgatcacttccactatcagattagggcttccctggtggctcagtcagtaagaatccgcctgcaatgcaggagacccacattccatccctgggtcaagaagataacctggagaaggaaatggctacctactccagtattcttgcctggaaattcatggacagagaatccataaacagaggagcctgtcaggctactatggggtctcaagacttagcaactaaaccaccaccactatcagattactcatgagtaaacagaaatacctggactgagttcacttctcctggacccagtaaacggaaacagccttagagttctagtattgaggactcagcttctctgcttacatacaagggtgcactgtgattagactttgaagtcacccagacaaagaatgctttctcaaaatataagtaaatccaagagtatatattttgcctccccagagttctagattactaaatgaatagaaaacaaagaaaaattgcagtaataccaggtagagtgtgaccagtgtaaggttttccacggtcctttctgtaatgcaattaagatagtgtaacctcaaccaagtagaaaggaaatcagaaatagcaagaa

SEQ ID NO: 48115 - DNA, 796 bp, Bovine  19866880838790
  misc_feature (1)..(1): n is a, c, g, or t
ntatggatgtgagagttggactgtgaggaaagctgagtgccaaagaattgatgcttttgaactgtggtgttggagaagactcttgagagtcccttggactgcaaggagatccaaccagtccattctgaaggagatcaaccctgagatttctttggaaggaatgatgttaaagctgaaactccagtactttggccacctcatgcgaagagttgactcagtgaaaaggactctgatactgggaggaattgggggcaggaggaaaaggggatgacagaggatgagatggctggatggcatcactgactcgatggacgtgagtctgagtgaactccgggagttggtgacggacagggaggcttggcgtgctgtgattcatggagttacagagagttggacacgactgagcgactgaactgaactgaactgaactgagaaggagggagagcagtgagtttactttatggaatagaactcaaagcagaaaaccaatggggcacccagctgcctcagaaacagtatgccaggacacactaaattaattttggaagatcctcttaaacttgataaattccctgtgtattatttccattctgctctgtctattttccagtcttgatcatacagtagtaaaacccatctaatgaaagtgtctgtttgcttttctttatgggaaactagggaagcccaagaaaatcaagtagtggcaaggcagctttagagaagagaagaaaaccagtttaatcctgcaagccctggtcatgctgaaaaaaagaaagaaaaggaaaaaggaaataga

SEQ ID NO: 48116 - DNA, 633 bp, Bovine  19866880945362
  misc_feature (1)..(1): n is a, c, g, or t
ncaaaagtgtcagtgaaatcaggctactgctactccagccttctcagtctatttgaaatgccctaggatgcacaagggtattgaaaaataccaaccccagagaacaggatttatcacccctgtcaagttacactcacactgatgaattctgacattcacctcaatataagtcagaatcctcttattatttaattagccagttctgtgtgtcttttgccattaagtttgacaacataggtagcctctctcttttcttgtattgtggtgtaatctaacatgaattaaagaggaatttaaaacggagagttcagtcttcaaagtcatatattttttgacctggagcttggcatcctgtggatgatatgaatttctctgaagaactaaaccctgttgtaatactataaggtcttgtgtggcattttttaaatgcaaattcttgacatcaaattgagaattctttctagaaatgggtagcttaggagtacttaatggttcgtgtgtgtatctgaaatattactgttgctatttaagtagttttggcttgagtatttaagaactgaaccactcattcagtctctgtgggaataatttggccatagaaattgaaaatgctttgaattccacatcttgcat

SEQ ID NO: 48117 - DNA, 1961 bp, Bovine  19866881060477
  misc_feature (1)..(1): n is a, c, g, or t
ngaagggtggcatttactgcctggcagaggagggtagaactcacatctgagagctagcagaaacccagagtccaggccctggggaagggcttggcaagtgtagaagcagaggatggctgtgttgctttccctagaaagttacttgagaacttgtccacttgaaaatgaaatgtgtgtgtatttggtcatgtctgactcttggcaacagcatggactgtagcctgccaggttcctctgtccatggaattctccatgtgagaatacttgagtggatttccattcccttctccagaggaccttcccaccccagggatcaaacccaggtcttctgcattgcaggcagattctttaccatctgagccaccagggagcccaacacagtttacttaaatcttattgtgtcatgcatgtgtgctaagtcgcttcagtcatgcccagctctgcaaccccatggactgtagcccaccaggctcctctctccatgggattttccaggctagaatactggagtgggttgccatttctttctcctgtgctcatactggtggagttcttgcttggaaacttctactgtctttgttaagtagattatattctaagtgcaaagaggaagtgttaaggaaattggggatgatttgaataatcaccacaaggcataaaagggagtattgatgaggaaaacagaaagatcccaaagcattaaattcccagttaattggaaattatggctttttggtggcaccagtctttgccattatgtggcttcctccatgagcatttggctgccttgatgtgagggcaggaagattgataactagatccaaggtcaggaatttaacaaaaagatcaatgacagagcaaagaaaactgatcagagagtggagatgttagactctgaagctttaaggacctctcttccaagtgttgactaagtcaaggaatgggtgtaaaggaaaactgatggggggagaagcaggtgaagacctttggaaacaaggaggtcaaaatttgacatttgcatggaaaatgcattgcttagtgtacggtctatgtgaacatgtttgccagacatggtgctttacatagataaggtcaattagaatttacaacaccttcaagaggaaattatttttattccaattttcagatgaataaattgactcttggaaagtttgaggaacttttgtaaagtcgagcagatattagcagcaataataaacattttatagcaatttactatgtattagacatcattctaagcgctttacattctaagttctgagtgctcagaagattgtgttattaacatcatagaaaggagggaagcacagaaagcttcagaaactcaagttacatggcatctaagtggcaaaaaggtggacttcaaggaagtgtcagaaataggctattaatcaaagtcaatgttactccaaaacccttgttttagccactcagaaatagcatctatttatgacatttagagtgctttttcatttaagaaattctttagggaaaaaaagtctcttccaagaatggtaataaaagttttaataagtttcatttcatctatttcattacacttaaaattcacactgtaaaaaatatgaaatgaaacagaatatttaggctgaaggaggaagaaggaaggaaaggcagaaatatgagggaaaatgagataaaattcagaaatcattgcagaggtctctgttaatttttcctgtctgtgaagtggcaagagattttttcctactgatttaaagctaacccatattcatgggttcctcatgaatatgttgtcgttcagttgctaagtcatatctgactctttgtgaccccacggattgcagcatgctaggctcctgtcctccactctcccgtggtttcctcaaattcatatccatttaatcagtgatgttgtctaaccatcacatcctctgctgcccacttcttttgccttctat

SEQ ID NO: 48118 - DNA, 1635 bp, Bovine  19866881062543
  misc_feature (1)..(1): n is a, c, g, or t
nacaagagaattaatagcaagaaaaatattctccctgccgtcctcctggaacaataatcagagcacatgtttcagcatattaccaggttcaaggcataatttaaaaatagtcactctgaaggttgtgaaaagaataacagaaaaccattccatcctgctggacaaatccaaatgagtgaattcctaaactataatataacgtttaatatgttttggggatactgaatactgtatttgaagtgcaaatgctgcttgaatgctgatctgtatctaaaaatgcatatatagaattatttatactgtgtctaagactgctgataatgtactttttgatgacactgaaaacaagccaaatattcacaatataaaaccatgtgataatatacgtgtaatgtaactaaatttctccaaggttactagaaaattatacatatatttgggagataaagactttgaaagcaaacacgtgcaaccatttgagattccacagtcagtttgacataacatcatttacgaggaagaccaagaagatttttaaaaagggatacaaacaagcacaaacgttaaaacatttttaattcttagaaactcatgaaaatttcctgaaaattggcagctacagaatgatgtggttaacttggatgtgcgctttacaaataaatagcatttaccaacagtaaatgcattttaatgaaaaattacttgcacttatgaattaaggtttcataaaagaaatgttatctatagctgatttccctgattatgggcaagtttcaaatttaagaagtatttaaagttttaagaaggagaagaaaaaataaaacttaccacctcttctactaagtcttcaacaataagaccttgttcatctgttcttagatttgtaacccacatccatccatcttctaattcgttatgaacaatgaacatatctccttttaagaaactgaaaatagtaattatgaagttatcaaaattaaatgaaattttgaaacatggaaatttacgtgatcatataccacatcacagagataatactataaaatgcaagggtttttttaaagtcaaataccctagatttttgttctgtttctgtcatcatttacatgtaaaactttgaagatacttgtaaacctgaatctgaatttcatcatgtgtaaaatgggtttaataatggtaattgtactatctatatcactggattattattagactcaaactggaatttatatggacagtaattatacatatattacagctttgggggtgtaactacaagaaaactgaactttaaaatttaagtttcaatgttattactctttcaaaagtaggttaaactaaaattataaacataaacatgaactcattccacatacacaggttactttataaaaagttgattttaaataagcatatttagccttatcacacagatgcttatgaaactaacatttctctcattaaaaaaaaaaatagggtttatttaatccacttagctatcacggtccaacaagtatagcactctttctccaaaagtagaaccaagtggtatgaaaatgcatgcatgttttttctgtcatcaatatccaagtggagggatacacacacacacacacacactatagtttactttca

SEQ ID NO: 48119 - DNA, 777 bp, Bovine  19866881071977
  misc_feature (1)..(1): n is a, c, g, or t
nataagagaaaaacataatgataggttaacctttcttatgaatgcacatgcaaatatcttaaagtgttgaccaattaaatcaaatgagtatttttttaaagtacattatgggtgaggatgatttatcccaggataatgtttgggcattataacattcccataagtattaggaacaagcaaataatacttattagctccacaagtaatcatcattgctctggagtttctagccaatgaaataagaaagaataacagttgtatgatttaggaagaatcaaatatttattatttgaaggttatttgaacagaaatccaataatatctgcaactaaacaactagaattaatgttacagttaagcagagtttctgactacaagagcaaggtaccaaaatcaatagaatatctgtatgccagctgctaatgaggttgaaacaacgctttaacatttccccgtgcaatgcataaatgtgtcactgatattttcctactgaatattgatatcctaaaattatattaataaagctgtgttgttgtttcgtgaataaattgatagaccaataaaacaaaacccagagataggaatagacacacatatgtaaaaacttggcatatgaaaggcatggaattacaattcagagcttgaaagaaaaagccatctcaataaaagatgctgggacaactattattcacatgggaagaaataaaaatctctgccttacactatttctgagaatataatgcagatgaattaaatttaaaaataaagagcaaaact

SEQ ID NO: 48120 - DNA, 1164 bp, Bovine  19866881265710
  misc_feature (1)..(1): n is a, c, g, or t
natgctgggaaagattgaaggcgggaggagaaggggatggcagaggatgagatggttggatggcatcaccaactccatggacgtgagtttgagtaagctctgggagttggtgatggatagggaagcctggcatgctgcaatccatagggtcacaaagagttggacacgactgagcgactaaactgaacggaatataatgaatcctgaaatttattttagagtgaaaccccacacggtggcactgtttactaagaaactgttacagtgcagaggcctcacagcggtcagcttgctttataagcagctgcctccttttgtctgtcaaactcgccctgtatttcacctgttaagaatgtatactagattcttaagtgtggaaatggtaagtgctttttattttataaattgttttatgtatacagagcctatgacagcatctttcacaaatactgaaaaaaattagaaaacattgttgaatttggtttgcagattcatacattgtgcatttgtttacagatgaaaagcaacagaagaaagtgaataataaatatggactatatatttgctagaatattccaccagtgtgtatttttaataaccataatagtggttggttgaataatgatgggagtgtttcaaaatgagaacccaaagcactcaagcatgaatacaatgggtttaaagctgcagatcacttaaaactgaaggagaagattgaagaaatgctgatctagaaccttcttcctcttttcctactgtcacaccctgtttgcttgcccaaaatctgtcattaaatattttctaacctgtttaaattgtttcattccttttgttttcggaactcttacccatgaaggtataaatacttttcataagtctgccctggggttagcttgcaaaaagcttccatatatcccactcagaggaatgtgactcattactgagagaatctgtcatcagtcaaaggaaaaaatagcaacagcatgcaagcggagacaacaaatcacagatctccagtctctgggctgggagcgtgggcagaattcttctccagtcacatctccttcctccccacggtggcctgtatttgttgccctgctcttttccaccgcctcaaacaggctctcattttcttccttctcagttataaagacgaccccaggg

SEQ ID NO: 48121 - DNA, 884 bp, Bovine  19866881303137
  misc_feature (1)..(1): n is a, c, g, or t
nagccatgaaagacaaatttaatagatatttttctaagagacacttttatcttcaaacattcaccatttttatgtggtttttttttttccttcactctacttgctttcaattcaagaacataaggcatactgttcattggcttaaatacacttgtatttcataatttgtattctattcaatctcttttatctatttagtacatctcaatattaggcctttattttaactacaattgtacattataaactaaatccaacattttaccccatcatagtttcacttgaaaccagtaagaactcatttataatataaactctaagcaacatagagcaagattgaaaaaacatgccttaagatatttcaattattcaggcagacaccattgtaatgggacttgtgagcagtaatgttagagtccatcaaagtagaactctgctttaagtgaatttttaaaatagccatgaactatatttgtccttggacagagcacagtattataagaccagagagaaaagtgaattttaaaataaaatgtttgaggtgacaaagtgaaacgttctgtctcctcctcctctgcccttcatcaagtttgcagaatatttgtcttgtaatgatgataagaatatcattatcattactaccatgacaacactgtaataagcatattccatttatgaacattgactctcacaaccaaatcttctggtttatatagttatccctctattacagtgaaaaaccatagctttgactagacagccctttgttggcaaagtaatgtctctgctttttaatatgctgtctaggttggtcataactttccttccaaggagcaaatgtcttttaatttcatggctgtagtcaccatctgtagtgattttgg

SEQ ID NO: 48122 - DNA, 1348 bp, Bovine  19866881339709
  misc_feature (1)..(1): n is a, c, g, or t
ntcatgtgagagcccttgataatgacatgagtgttctgggtagttaaatggaaatcatattcattaaatgtattttggctacccgtttgagtgagtggtcaggagaatgataccaagaccagcagtatgagaattcagattaccagtggcaagttgaaaatgaaagtacatataaatagagcacagttgaaaatagaggaggtgagctaattatattagaagaaaaaataatttctaaatatatgggtaagagtgtgtaggcagagatacctagagaggacctggggctagacctattgtgtgaccagcaatgtaaatttatttaaggagcaaatgagaggtgtgcaaaagcaagagcaaaccatggctgaacagaaatcctcctatcctaatcagctctggtagaagtcagggtgggtttaagtgctgaaaattttatgttaaggaaactggtggaggatatttaatagcaagtcaaaaatataaatgggatgaaaaacccgcatgagggaaggataaagaaataatgatgccatggatagcagaaggaaaggctgcaatgagatttacttacccccaaaaaatattgttaaaaaaaaatggagatgatacccaaatagctttacttttttactgtaaaatctcaggggaaagctctcttatacctgtcactggggccattttccatcagctttgtagggacaaaggaactgaatttggcatccttgatggtctatacttcgtaaataattcacagtatttaatttattttattgaacatgtactgaatactatcctgggcactgggaatctataaatgagtaagtcatacagtctttgaccttgaggagttaacagttctgtgtatgtatgttgggagtgattataagtaatttgatgtttctggactataaatttcactgtgaggaaatttaaataaaacataggcatgaaaagaacacatatttattagtactgaatatgaaggcgttaatatacatgcaaaatatacaagcagagagaaaatattatgttattatgctaaaagatagctcagcacctgaaaagtttgttttcccccgttaccttaggaacttactagcacagagtactcataaattttctattctgtgtgtgtttctgaggggctagggtagggtgtgttgacttacatattcaacactaaagaatgaagaagtaaactagaatgttcatctaaaaatctttaaatttttgaaagtgaagtaaagtgaaagtcactcagttgtgtccaactctttgaaaccccatggactatagcctgccaggctcctctgtccatggaattctctaggtcagaatactggag

SEQ ID NO: 48123 - DNA, 1382 bp, Bovine  19866881441129
  misc_feature (1)..(1): n is a, c, g, or t
nttcttggacagtctttaatgaaattttaaaaatctactgcaaaagcgagaaaaggaaagaaaaaagaaggaagtagggaaggaagataaataaaataacagaataatgcaacagaaatataaagaattctctcctggctttacggcataaggactgtactgaatttacagctaaggcttccctagaagtgaacacacagcaaagaagcaaaaaccttttatgtacaaacatctcttaaatttatgtctataaagtgaaaagtagaggtcccacacttggaaacataactatgaccaatcacagactcacagactgcctcacctacattaaaagcacttattgagcatattacagacttgaaattgccttaagaagtatctataagagtatcatttcaggatggtttatgatgaacaaattccagttagctgattggagttattttgcacaggaaaaatcatatagcaaagctgtagacattaaagggcttccctagtggctcaaatggtaaagaatctgcctgagatgtaggacacccaggttcaatccctgggtcgggaaaagcctctggagaaagaagtgtttacccactccagtattcttgcctggagaattccatggacagaggagtctggagggctacagtccatggggtcacaaagagttggatacaactgagccactaacactaactgtagacattaaaagtcaacagaatcatctataacaaaaatgctctgaaatgtcagatgttaaaataagacacacccttgtgatttatgacgcaggaaaaaagaatttaaatttaaggaataaaccttaacaaaagatacaacagcttgaatctcaactgaaagaatggcaatttttgtacagttccctgaagggcatttagttgatccatggcttttgatgtatggccttgaaatttgtttttagccatggaaccacttgttcaaataggaaaagaaaaagtaaagattagttctgatccctagagctgagctagtatctgataatcttccagttttagtccacatgcaactttacaagaaaatccctaatttaagtctcaccagagtagatgaagaaaaagggaaggatgaggagggggaaaaagaaagaaggtgccggcaaccttgtacatccctggggaaattttcacccaaaccccaatcccaatttgggaccttaagaaaaagactaagagaatcgtagagacttctaatgtttttgagccactgaaccagcagctacctacctccaaacttctgtacaaaagaaaaacaagtcctaatgtgtttaagtcactatgactaatcgtcatattagttatattagtcatatacctaactgatagaatagccaactacctgacatt

SEQ ID NO: 48124 - DNA, 1039 bp, Bovine  19866881505934
  misc_feature (1)..(1): n is a, c, g, or t
nctggggaaggaatagcaacaaatgccagccaagaaaactttggtgcataaaaatgaagtgtgttaagaccagagacttttctattattaatgaaatggagttccaggagagaatgcaaggagaccagaagtaatagcaaagtcatgaattaaatagtgacttaaaggcaagagttcctaggtccctggcacatgacacctccccctactaaagtttattcagtggggaatgatgaaatggtactattgcttcaaagaaatacattcaaaatgtagaaaaatgatttcaatatcaagataattatggtgaacaacatcaagatctattgcagttattttaacagcttgtactagtcacatgccttcctcggctcacacataaggacttttctgtgatgtacatctttcttacaccaaaatgaaaatcaaacccataaactttacgtagtttatcttgtctgaacttgctgcgctacagatgaattttgtaactgtgataacattataagtattaatactgaaagagaagtgtcagaacgtaggagcaggaccaatgcacagcccctgtgataactcttggaactactcccgtaacagtcactttgaaaagctcacaatgaaggtaaaacagttcttcctattcctccataacagaaagggaaaaggacttaacctttaatgaagttcattttcacagcctatcaagcttcacttaagtatttgggaaaaatgtcttattcatttataattcctcagtgcctatcatgacagctattatttaattacttctatttaattagaaggttattgaaaagaataaatgaaataagacatctattctttattagatattataaggacggactgtgaccaatggcaacaaggtacaacttattttattcccttggagcctacatttacaaatgaagtgaacactactcaatgtaccataagaatcaaggaaaataaaagttagattagcaaattatatcattttagttagttaagtcgctcagtcatgtccgactctttgcgaccc

SEQ ID NO: 48125 - DNA, 1678 bp, Bovine  19866881934831
  misc_feature (1)..(1): n is a, c, g, or t
natttatacttttagcagattagtccacccgctacacagcactatcctgagggaatagatggaatagtgtggatggcagaaggagtaaagaccaaaacatggaagatgtttggctaggatttcagatctatgagttaaacgcctcaggacggagcctttaataatagaggttccagcatgagggatttaagttcctggggaagactgagaaggaagagtatgagaaaataaaatgagatgaggactcaggaagagagataaggaatacagtttgcttacttttcacgctcagggtattatgagttaatccttgaaagaacgggtggctcccattcattttcctaccaacataacatgcataacatagtcattcagaatgccagcccctgtgagtctcattaggcttactctgaggagctaccctctctagagatgacatgtgttctgtttcagctctgtacttaaagtatcaaaatatacaagtaggtaaatatactgatcaataacagtaggtcagaagttccaaagtatttgggtttcttccatttagctcctgggcaaggtcacctgaccctttacctgagtttcccatggctaaagcaagtcaaatcagttctctcctactgtttcaggtgagtatacattggatacatttttaagaaccatgtaggagttcaatgttataacactaaacatatggaatcttcctaggtaaacttcaaaatattcccttattttggtttaaaaatgcgaaattcctcttcaattactcttgctctgtgccatgtccctacaatgttatcattgtaaatgttctgaaattaacagacgtacttcttgctgaagcacagatagctgataaaacagggttatggaccctaaaaagaacaaagccctatgcacaaaagacttttccttccaaaggctacaaaattcagcttgaaggatcagcaaacaccccgtacttcattcagcatacctgtatattatcggaatccattctggcaagccagctaaacggtgagacctgctctctggagattaattctgtttccttttatattcctgtattgaagtgtctctttataaggtactttcagaacttcaatgtccaatttacacacgatattaaaaacagtggactcacaggtctgagttgatctttttcctcattctcgtgcttattttcagaaaacacaaagaatgaccaatgactgcaaataaccatataatttccagttagagattctgtagcatttttgtgaaagacttttgctttccttgccgttaagctacttctgtaaggattgtctaaagaaagtagacttctcagaggaaatgatagataattaatctcccaggacaaaaagaatggagaacaattgagtgcctcttcccaattttagtcatacagactttaattttgaaatccaacactattggagctgcaaatataagaccttttaagagagaaacaaataatacactttgtggtatattgttccagttcacaatcattgtggataatctaaatcctttttatagatttcatagtacctaccataaggtaagatatatgacatatatttaatacttaggaaaacttagattcagacttcagttcaccctgaattttttcttaaaaaataaaactttatgtaaattctaataagactca

SEQ ID NO: 48126 - DNA, 2623 bp, Bovine  19866880404440
  misc_feature (1)..(1): n is a, c, g, or t
nagacgcagaatgtatagaagtcttttggactttgtgggagaggtggggggtggggaacgatttgggagaatggcattaaaacatgtataatatcacaaaaaaatgaagaaccaccaccaccaaaaaaataaaaaccagagaaagtaatatcaagggtataaacaaacatttctatccctgggaaagtaatctctcaggaaatggtcttgagggagtgtctgaataatgaagtcactgagatctacaatcttaataaaactccccattctcctgttatccactagtcaggaaaaggcacagtctccttccttgtaactggaggggttttgagtaaaccaataatcggaaacatgctcttcatagcagaatgagatatgagataaatcagagattctgattcttaagaccagattgtgaggagagagttctgagctcaaagcagctatcttcaattcactatggtcattttctttcccaggacaattgtggacaagagacagtgtagtatggcctgtacggctctatactaaaggaaggtgagttcgtgattggccctggtgagtcatgcaacatggtggttaccagtgcaaactgtgagagtcagactgcccaagttcaccttctggcagctgctcagtagttttagggctgagttttgggtaagttacttaactcagctttctcatctgcaaaatgtggataatagtattgtcacatagctcttagtacacagcctcacatagtagccgcttaaataagtgctagcttgaaacaattatcattaactctaaagccactagagacaggagatcctggaaaaatatgggatctccttctttgtttgtcaacactgacccagaggtgggagctctgagaagtcacagtgtcttctgcctgtcaagggaaagtccccattgtcaaacagaagtaggagagacagggcacagaaaatggactgacgtaaagacctaaaagacatctcttatttttgaatgaactggaatatgaatatatgtctgcttcttgtagaagtgccagcggtcactctggaggcaaagtctagcctctttattgttctctggaagctcaagtcacttagctattaaggtagatccatagcaaatggtaaaaaccttccttccacacgaaatctcaaatgtcttggtggatttcattctcaagaatgggaggtgggtactgggagggtggtagttggtgtttctctcaaaatggttctcttttcgttcccccatggactgggttttctccaggggagaatggcagctgagaactcttcggtgacagaattcatccttgcaggcttaacagaccagccaggactccagatccccctcttcctcctgtttctaggtttctatgtggtcactgtagtggggaacctgggcttgataatgctgattgggttgaactcgcgcctgcacacccccatgtacttcttcctcttcaacctctccttaatagacttctgttactccactaccatcactcccaaaatgctgatgagttttgtctcaaggaagaacagcatcttgcatgcagagtgtttgactcaactgtttttcttctgcttcttcgtcatctctgagtccttcgtcctgtcagcgatggcatatgaccgctatgtggccatctgtaagccactggtatacacagtcaccatgtctcctaaggtctgtttactgcttttgttgggtgtgtatgtgatggggttttcaggggccatggcccacacaggaagcatagcaagtctgatcttctgtgctgacaacctcatcaatcatttcttgtgtgatatccctcctctgcttgagctggcttgcaacagctcttctgtgcacgaactggtggtcttcatagttgtgaccactgttattggaatggtcattgtcaccatctccatctcttacactctaatcctttccagcatttctccgcattcactccactgagggcagatccaaagctttcagtacatgcagctcccacataattgtggttttccttttttttggttctgcagcttttgtgtatctcaaaccaccttccgttttgcaccttgaccaagggaaagtgtcatccctgttttataccattgtggtgcccatgttaaatccactgatatatagtttgaggaacaaggatgtcaaagctgcagtgaggaaaaccttggggaaaattaatttcttgagaaaggagtagtatttgaaaaagtagataaaatgttttatttattagcttgtgtgtattttcaatgaaaggtgtaagtgtcattttttcccctctcttctacagaaagctttaagtctttgtgtctggatgtgcaactaacactttcacttcgggcttcccaggtggcactagtggtaaagaacacaactgccaatgcaggagacataagagatgcgttagatctcccggaggagggcatggcaacccacttcagtattcctttttaaaaaatgaatttatttatttcaattggaggctaattactttacaatattgtggtgggtttttgccatacattgacatgaatcagccacgggtgtccattgtgtccccccatcttgatcccccctccctcctccctccccatcccat

SEQ ID NO: 48127 - DNA, 1318 bp, Bovine  19866880549169
  misc_feature (1)..(1): n is a, c, g, or t
naaataggatgataggaagaaacatggaaacctgaactgacaccctctctcctacgctcgggctcctggctctgggtctgtgataggcatgggctatttggggcgggtgatgtctgacccatgggaagggttttccaggcctgtcaggggctcccccttagctgggatcaaagatattgagcctctgctggcttgaggatgaaacagaaggttctagacaatgacgcccagtagcatgatttctgtgtccttcacaggggaccggtgttgcttctaggggttgaggaacaggaagatgtgaataactttgctgccctgtgccatgtcaccttctccccgctacggcagtgcccacaggatgctaccccctgggttctagccaggctctgggctgtatattcaccttcttttgtcagcttctgcctttataagaacacattcccattcatccactgtgtcctatgggtaaagagattcataatctctttctggacttctcggatgttgaacgctacctggatatgtgtttcgtgttcgaattttctaagtggactttctctcccctcatttgcacctggagtgcatgcctggctcagctttcagcccctcccctgtctcattcattcattcactcaatactcactgagcagactctgtgcctcagatattctgcagggcgcttggttttcagaagagacgtggttcctgacccccgaggctctggtttcagttctactcggtccatccatgtatgcgctgtcacaaaactagcagagttaagggaaagctggcagtaacttgatgacttcctcaagagaaaaagaaaaaaaccaccagttctttagggagtcatctcctctgcaggccctgctccagctcatgggcctgttcctggctccactcactcagcccacggagcccagaagtgaggtaactgcagctggagccgcagaggggcccggcgtgctgatggggaggctgccactgcctgtccccacgggacagatgaccactcttcccttggcctgttgataaaaccccctcttgctttcctgatgtctagcgcctggagtttcagggccagggccaccagtgctatggtgacaaagccagagagcatgacaagcccagagccgctcagggccttttattaaacctgacatccaataacccaggcctctcgcctagtctcctggaacatttggaacaaattgcatggaggcctggaggaggggcagagatgagagctggcagccgcggtgcctctgggtctctaagagcggggctgtgaggacagcaaggcatctgtctcgatggg

SEQ ID NO: 48128 - DNA, 1984 bp, Bovine  19866880551670
  misc_feature (1)..(1): n is a, c, g, or t
naggatttccaggtccagcctcgggacacagtggctgcagtgggcgagcaggtgcttctgcagtgcgagccgccctggggccacccagagcccactgtctcatggtggaaggatgagaaacccctggccctgcagtcagggcggcactcggtgagtgtagccccttcccaaacctcatcctgtccgggccacagctgtgcacacccgaggtcctgacccattccccccgccccagccccatgtctcctgcagtatttgaggaaggggcggccgtgaggccttaggccttcctccgcacgtgggagacttctcaagacacctggtcctgacaggtgtcccagggctccctgctgatggcaagagcagagaagagtgacgcggggacctacatgtgtatggccaccaacagcgcaggacaacggaagagccgggtggctagggtgtccatccagggtaaggggaaggcggtcagctaacgccagggccaaggtggggggcaccagtcagcatggtgccctctggtttgggctggggttaggcgatgtgggggttcgacccaggatcagggtcagagtggtggggacctcatctagaggcagttcctccatccgagggcttccctcatagctcagttggtaaagaatctccctgcagttcaggagacccaggtttgatccctgggtcgggaagatctcctggagaagggaatggcaacccactccagtgttcttgcctggagaaacccatggacagaggagcccggtgggctacagtccatggagtcgcaagagtcagacacgactgagctgctaaatcatcatcatcctccatctgaggatagacattggagagctcacgacgggggcagtctgggagttctggctcctctgtggctgagggatgctccactcttcaatttcttccctccgacctttgagcccatccccaccctgtgtgctcccagagccccgggactacaaggagcccctggagcttctggctgtgcacattcagctggaaaacgtgaccctgttgaacccagaccccaagaagggcaccaagcctgggccagctgtatggctcagctggaaggtgaggcccgggacctaggggtgaaacagtcacagctccagaaagggctgctcacaagagccctgagtcctccctgccctccgtcttccaggtgagtggccccgctgcacctgctcagtcctacacggccctgttcaggacccaggccgcccctgggggccagggagccccgtgggcagaggtcctgctggctggctggcagagcgcagagcttgggggcctccactggggccaggactacgagttcaaagtgagaccgtcctccggccgcgctcagggccccgacagcaacgtgctgctcctgaggctgcctgaacaaggtcaggaatggatgcttccagaacccagtggtataccccccagcccctttctatccctctgtagtcaggaggaagaggaatagtggcttccactcctgggccccctcttgtcctggctctgaaagcagagctgagagaagctcttgttcttgtcagtatggctgggaccttatgtccccagtcctgctcttttccctagaaagagattcccgaggattccttcagcattcctgacagtttgtctccctgccctccagtgcccagtgctcctccccaggaggtgaccctaaaacctggcaacggcactatccttgtgagctggatcccaccacctgctgaaaaccacaatggcatcatccgtggctaccaggtaccccccacaagctgacgcacccctccatggtgttgccaagacttccctcttccctggctctgggcactaagaaatggcacctgcagagcagggactctcctgtttgccagacactgccaagcgcttacccacatgacctcatctcatctcacagtctctcctgggttgttatccccagtctacagacgggaaagtagac

SEQ ID NO: 48129 - DNA, 788 bp, Bovine  19866880567798
  misc_feature (1)..(1): n is a, c, g, or t
nacctgcattttaatgagtgcttcctgatagttcccctgaagtttgaacaccagtgacctcagagctactgcaggagaagataaacacagagaggaccagcaatggtgagtgcaaatgatggaatgacaacagggattgaatttgtcaggcaaaccacctcaacaaatgccaaagagagggcgttcaaatagtagtgagtaacaaagaagcaacatttcatccacgtgagagaaagcttagctcccggtccagcccacaacagcagttagggaggtctggacagcactgggagaactgccaagctggtcctgttgcaaagtgaaacttgccccgtctccagctacagggctggggaatcccacaggtgcagtgttaccacacagtgcggctgtgtgtgtagactgaaggcagtgagtctctaccccagtggtgctaatggctagtgtttaatagtcaggtctccaggaaaaataaaacctggtcttgtagcatttgccaatttccatggtgtaaatgctcccaccatggctaattttgagccatttaacatgagatgtcattgcatgcggacttagggaaacagacacctaatggctcatgtaagctaatatgacagaggagcctgatgtgctgcagttcatggggtctctaagagttggacacgactgagctacttcactttcacttttcactttcatgcattggagaaggaaatggcaacacacaccagtgttcttgcctggagaatcccagggatgggggagcttggtgggctgccgtctatggg

SEQ ID NO: 48130 - DNA, 3776 bp, Bovine  19866880592057
  misc_feature (1)..(1): n is a, c, g, or t
ngtgagctttaagccaactttttcactctccactttcactttcatcaagaggcttttgagttcctcttcactttctgccataagggtggtgtcatctgcatatctgaggtgattgcttttctcccggcaatcttgattccagcttgtgtttcttccagtccagcgtttctcatgatgtactctgcatagaagttaaataagcagggtgaccaatatacagccttgacgtactccttttcctatttggaaccagtctgttgttccatgtcctgattgtaggagttagtaattggcttaagaacaaatttgtttaaaggcaacagactaaatgttccataaaagtggagtggagatttgacccaggggtatgtttgtaactttaggagaagggtggtaagggtttggacccaaaaggcctgcagggctgactcccaaagtggcaaacattattcctggaagcccaattgcctttgaagggatgccaacagatggacttgtagcaggcactgtgtgcctggcacccgccctagcaggttcactgggagatgctgatgttgcacatgttgtaggaaacatgggagatgaagggctgaatatctagaggggttggatgttatacagtatttcccacccaagggccagctattttctggttgtccctccagaagactgtagaggcaacattgtggactgggatggggctgaggaaaacagcaagaaacaggagggaagggggcagagcacaacctttgacagaatgacattgcacaagggcataacgtaaactgattaaaatcaattgggtccaagatgacaagtcaaattcaagtaaaccttaatccccaatttgtaagccaaaagacacacccagaggtggcaggacagctctaaggcaatgtcaaaaggggagtgggtggttccccaatgattgggatgatcctccccaccatagcatatgaattcaccccatagcaaaacctagccaggccacattccttggcccaagcccttgccctcggctatggcccacaccctgaagagtgtgctgctctgtgaatcctaacaaatccacctcttatggctttgtcgctcactgaatttttgcaatgagacatcagagcctgagctacattaggtcctgaagccgggcatcctgggttttggccgggctcaagtcccagaagagagctaaaggataggaggaaaaagcactgggaaaagtgtgccaagggatccccttcatagcctgccggaaaatctgctaaatacctgacccgtgctcacagttttcattggcctgatccttgccacagagaagagtaaggacagaagaacccccaacggcttgggtaacagctactggggctcagcagatagtgcctttgggacatgccaaagagtagcctctccagagtccctcatttgcactcactgcggcctgttcgtggggcgggtaaaatgttggtttgaatgagtttacattgatcaacagtatctcagtaaaagtggatttttgaaagattgattgattgattgatttttggctgtgctgggttttccttgtcgtgcgccctttctctagtagcaagcaggggctactctccagtttacggtacacaggcttctctgtggtggcttctattgttggaaccatgggctctaggacatgagggatcagtagttgtggttcctggacttagttgttctgaggcatgtgggatcttcccagacccgggattgaacccgtgccctctgaattgggaggtggattctcaaccactagacagaccaccaggcaagccccaaagtgggttttctttgagcctcttttttgtgtgagagtcaagacaatatgacattccataagtgtagatgtgaacacaattttatttattgatggtcattaatggcctataaccagggcataacctcccaggtaaacatttaactttggagcattagtagaagatgattcactaacttttaacattattttccccttatatcaatatcctattacatttgtagctttgaagtccatacacacagacacaggtacaaataaattcacatatatgtgatcgtttacataaaggcttcctagtgcaaaaaggggttgttagttttacatctcaaattagtttctgctaccccagcaactaaagcaaatttctttgtggaaaaaaagtttctaagcatggtctactaattgtcttaatggattttcagtgaggggtgaagtaccctgctatgtgccctgtgggcattccataaacatgggtttgactgactctgttaacaatccacagagaaaaaccccaaaatgtgtactatttcaattatctaatttattccctcacagtctctgtctttagtgcaagatttctataaacatttaagatgaccaagggagctgctgcagagtcagggaactgcccactgaagctttctgggctaagagttttagttagtctaaagtggtcattattacctgggatttacacatccccaagccttggactgcaaggagatcaaaccaatcaatcctaaaggaaatcaactctgaatattcattggaaagactgatgctgaagctgaagctccaatactttggccacaggatgatgagagctgactcattagaaaagaccctgatgctgggaaagactgagggcaaatggagaaggggacgacagaggatgagatggctaggtggcatcactgacccaacggacacgagcttgagcaagctcggggagatagtgaaggacagggaagcctggagtgctgcagttcatgaggtcacagagtcagacgactgaacgattgaacaacagtgcttcaagctgatgagctaagtgaaggtaatgtcccacctgcgtttgagaacatgagaatggtatagcaacttcctgttttctttcttttttaaatcaatttttattggagtatgatgttgtgttcgtttctactgtacagcaagatcaatcagtcatacatgtacatacatcccctctctgttggatttccttcccattcaggtcaccacagagcattaagtagagttccctgtgctggacagtaggttctcattagttatctattttatacatagtaccagtagtatatatgtgtcaatcccaatgtcacaacttcctgtttcctgtgtaggtatagatctgctcccactctggccctgaggtgggtactattatattctcagtatctgttgcacatacaactgagataaaaacagtgcatgaaacagaatcttcaccttctcttgtcccaaaacattcattgagctctcctgtaagacactgagaatatattttaacacacatatgaatattcttgggcttccctggtggctgagtggtaaagaatccacctgtcaatgtaggagatgtggggttcgatctctgggtcaggatgatcccttagaggaggtaaggcaacccacgccagtattcttgcctgggaaatcccatggacagaggagcctggtgggctacagtccttgagatctcaaagagtcagacacaacttagtgactgaacaacaacaacaatgtatattcttgctatgagcatgtttgctaaagttacaatttgctaaagttactgtatgatttaggttttgtaacatctgagggaaggtcatgatcacttgggagacaccaccctggtgtccattagatggaaaactggaatttagtaagaagactccagagtggactttagagttaaaataaagcgggcatttttattaataat

SEQ ID NO: 48131 - DNA, 1564 bp, Bovine  19866880626684
  misc_feature (1)..(1): n is a, c, g, or t
ntgcttggggagtgaggtcccctggactgggtgtgggagtgagaaagagggcagaggcaggatggaagatgcttctcagatgccggcacctggtggcagattctgagatgggaatattggagagaagcatgttgggggtgggcttcgcaggtggctcagtggtaaagaatccacctgccaatgcatgagatgcaagttcaatcctgggttgggaagatcctctggagaaggaaatggcaactatgccagtattcttgcctgggaaatcctgtggctagaggagcctggtggactacagtccatggggtcacaaagagtcagacatgacttagagactaaacaaaaagaagaacacaatgttgggggaggcgaggcggcctggagaatcatttcacccttgaactcaatctctgtgattctcgagtcactgagttcctgagaccctaccttgtcctagctgtccatccaccagcagtgtatctggctagacttctagcttcctggtgatgttcctcctgccagacacacggtcagcgcagccacgtgggtgtgaatcccaagagagaactggggctgcagatggctctgggcaaccgtctgagcacagagtttcccaggaagcagaggctaatgtctggagcactaggggtggggaggaggcccgatgagtggaactgacagcagaaatccacattccccactgggtcagcctgttctcgagaaagggcaggtcttggtgttttacttcccatcttggttccgatcgctttggctcactctctgctgctggagaggactcagggctacgagcctggcgctgggcatcccaggagacaatgtgctgtgctctccaggactaatagatccaggcacaccgtgtacagacggcagtgctgacgggcaggaagcggaccccaaggaggagaactcgaggccaagtggacatccctgggagatgccagtgggcttggggtgtctttggcgtgcatctacccctttgctgccagtgatagtcccctcctccaagccctgctccaggcccatctgcagagtcagggaccagagtgaaaaatggatgagatagctaatggcagcccttgttgtttggcgtcggaagcattatgaactggtatgtgaaatatggccacactcctggttttcattgtagctggaaaggattaggagacaattaataaatcatttagtgccctgagtttaagtaacttattattatgagctagctgcatatatttattatgcttcactgagcaacattggcaaatttccttcaaatgtcacacaatttgtatgtaatttgtttcagaagaggctttttatttttaaagaaacacatatataaattattaacccgaattcttcagaacacattgcccgaattccaagctctcccaaccaccccttatgagtgtcataaagattttcctgtctcccaaacgatgacagcaccatgtcccttggcctgccgtctgagagactggggagaggatgaagagtcccttgctgtcccctctggtcagtcatctggggcagagatctaaaggga

SEQ ID NO: 48132 - DNA, 3761 bp, Bovine  19866880680331
  misc_feature (1)..(1): n is a, c, g, or t
nttgtgtggagtttgagcattctttggcattgcctttctttgggactggggtgaaaattgaccttttctagtcttgtggccactgctgagttttccaaatttgctggcatattgagtgcagcactttcacaggatcatcttttaggatctgaaatagctcaactggaaatccatctcctccactagctttgtttgtagtgatgcttcctaaggcccacttgacttcacattccaggatgtctggctctaagtgaatgatcacaccattgtggttatctgcatcattaagatcttttttctataattgttctgtgtattcttgccacctcttcttaatatcttttccttctgttaggtccataccatttctgtcctttatcgtgcccatctttgcatgaaatgttcccttggtatctctaattttcttgaagagatctctagtctttcccattctattgttttcctctatttctttgcattgatcaccgaggaaggctttcttatctctccttgttgttctttggaactctgaatttagatgggtctttagatctttccttttctcctttgcctttagcttctcagaaaaatagggaccctttaatccttatttttaaagagtatgttctttgaactgaaggctccataaagaacgaaaatagcttttttaaccaccgactctgatgcgggagggattgggggtgggaggagaaggggatgacagaggatgagatggctggatggcatcactgactcaatggatgtgagtttgagtgaactccgggagttggacagagaggcctggcgtgctgcaattcatggggttgcaaagagtcggacatgactgagcgactgaactgaactgaaccttatctcgatgtatgggacatagtggatacttcacaaattctcttttttgaatgattgaaaaatgggtgaaagaatttcaacatgaagtaaggggtaaaggaaagtgcatatttctgtggtcaggcatgatctaatttgcagtgggagatttgttgagagcttcccaggtggctcgtgtgtaacaaacctgcctgccaatacaggagactcaggttccatctctgggttgggaagatcccctggaggaggaaatggcaacccactctagtattcttgcctgggaaatcccatggacataggatcctggcgggctatagtccatggagtcgcaaagagttggacacgactgagagactcagcatacacacacacacacacatatgattctggtggaggcccaggtatgtcttcagcaagaatgtagtaggtgggccttaaatagggaggcgactcctccactctctgagattcagcttcagggcttccattctcaggagccgagacattgggatctgtgttccgtggaaatccttgctgagatccccctccccaccccttcatgggaggagcatggaagacagaacatgacagggcctgagagcctgagaaggaacttagcctacaaccagtttatctagtttcgtgtttctcttgctgttttatggtttccttcctttagctcagtcgagcatttcagctttgtcttagctacacaaaaagacatcaaaggaagaatgacacaccccagggctcgaggtccacaggccagctgggtggcagcatccttcagtaagagagcttaagaggaaattggctgtcagggaatcagagcctgactttgtggctttgatgtccttttttaaaaaaaaaaaaaactttttggccacaccccctccacctgtgggatcttagttcattgaccaggagtcaaaaacacaccatctgcattgaaaggcaaagttttaaccatgggaatgtgaaggaagtctgctgtccttttttaatttggaggttttctttacagtgataagcttagagggttttcttttcattttaaaaagtgggatttttctttcatttggtggtctgatgcagttgatccctattcccttgaataattttctatgctaatgatttctgcctaccaggccaaaccaatggctggttgggtagatgaagatcagtctgccactgccatttataggaaagcaaggatctacctggtggctttagcttgtggctcaaacggtaaagaattagcctgtaatacaggagacccgggtttgattgttgggttgggaagatcccctgaagaaggaaatggcaacccattccagtattcttgcctggagaattccaggacagagcaggctggcgggctagagtccatggggttgcaaagagtcggacatgacttagcgactaacactttcactttttaagggccttccgcagtcacttttgttgaaccaatacagatctgccatctggctggagatggtgttatcaataagcatctactgaattttcacacggacttgtgcgaggacagttagtgttggtatggaaaggtttcttatctagacttcacaaggaaggggacacagacaaatctgtcctcacagactgccatcctattggatggcatatgtgacccagacataggagaacagatactagaattcagccattgtagggtctagatggcaggccttctacgagaaaaagcttcctcgagggcttccctggtggctcagtggtaaagagatcgcctgccaatgcaggagacactggttccatccctggtctgagaagatcccacgtgccgtggagcaactaagcctgtgcgccacaactattgagcctgtgctgtagagccggcgaactgcaaaatactgagcccatgagctgcaactgccgaagcccatgcaccctagagccgtgctctgcaacaagagaagccgcctcagtgagaagcgcacctcaagtagagagcagccctctctcgcctcaactagagaaaaagacctgtgcagcaacaaagacccagcacagccaaaaataaataaaatttttacattattaaaaagaaaaaacacttcttcaagcgcaccacccaatatgaaaggcatgtcacacacccctcagattagaccatgacacaggaatttgatcgtttggtcaaatgcctttccctatgtaaaaatgacagaagttctacccagagtaaccctgactctaactttggtgatgtttctttggtttgacttttttcttttttactctttttggtcagactgaagcactggaaagtaaaggattattaacaacaagcttttgttattctgcagtttgagtggagtgtttgcattcaacgaggcaagaactgatcgttatttgggttgatatacttttgttatttttgctttgcctgccgtgggatcctgtgtcggagtggtatgagggtggggagtgctggaacatgagctgttttggggttgggttgttagtggaaatgttcctactgcttagcggagaaggcatgttaggtaaaaccactctgtccctttgagtcttaaggtgtttaaatagcgtttccagaggtgttcagtattcacacatgcctggaagaccgagtcaacaatctgtacagtagacacaatcctgtaacagatgttcctcataagtgagactagaaagtttggttcttttaaaaaaaaattattttattatagttgattgacaattttgtattagcttccagtgtacagcaaactgattcagttatatgtatacatatatacatacatgtatatacacacgtacatatatatatacacgtatgtgcttagtagtcgtgttcgacacaatctttttcaacttttttccaa

SEQ ID NO: 48133 - DNA, 3626 bp, Bovine  19866880701876
  misc_feature (1)..(1): n is a, c, g, or t
naaaacgctatgagtgacctctgtttaaaactgtaaattgtacgtacatattacttctgctccctcatgaaacctcactagaatgacaataaagggacccccccataatcctgtaaggacaaggaaaataggagaggagacaagagcgacagtgtgttgaaacctgggaagcagttgtgtaatagagggtaccagcctgcagagaggatgtggtgttgaggtaggggccacaagctgcttttcaccacgcacagaagcagaaaggctcaggaatgggagataaccagatacgtctgaaagtggggatgcacgtggagctggaaacaggaatactgagaaaacagacccgcaggtcctttctgaaacatgatgccctcagctaaccacccttatggtttattctttggaaatgttaaatcagacagattctgcacttgggtccattgagggcagggggccatactgagaatgggggacagggggcagtgacctgtgtaagtactggatgttgacacccacagttgagttccaagaggattggcagacaagcttgatgccaactgcctgctgctccctctgcataagttagggactgactgattcttcttgggaaaactgaccagtccagaatatcagattgcagctgttatcagctgatatttgaggttttcctaatgaaatggcccaaagaggtccctttaaattgactgcttcaacccgaggcagtcagataaaagcgagtgagcaaatatatgaccagatattcgaagaatgcctgaaacatgaaagtcaatgaccaaaataaaatggcaggggcaggcaaggagagaatgtaatgactcagttcctccccctccacccagttggtagagccccagccactttaccttgtgaggccagagggatttcgtcttggactggccagactcatcctgttcgtggtgaaccagggagtcccaacaagaactgtccacgtaggcagcctgccggatgctgaagttactgggacaaaagcagctgataggagaccctgaaacaggaacaaagcttgaggcagccctgggtaggggtgggggaacagggagctgggggacaatcagttaagagctttccaagggtcacttccagaactctgaccatctctgtatctgtcaggcactgtcttcttcccaggccctagctttctgggtgaatgaagaagtagggggaagctgacacatctccctgggaaagttagtgagctcactacgtaaccagaaaagagagtcagaaatcccaaatcagggactcccctggtggccctgtggctaagattctatgctcccaatacagggggcccaggttcaatccctggtcagggaattagatctcacatgctgcaactaagacctggcacagccaaataaataaataaatattaagaaaaacaaatcccgattctgagaaagctcacgttgtctttaatagaggtggcagatttgctgagttaatctagcacctggaccactcagtatatgtatttgttagtgtttctgctcagggctggggttcttgaagatgagtggattcattgatgctgtgatgacacagcatttattgagcacccgtgttgctgtcaggctctgtcaggcacttaacatgtgttcttaagtcaacaatccaggaggtagggagtaagaaaaggccccaagaagataagagatttatctaaagcttggctaactaaaacctttagaggtcctggaaagatgatacaactctagtatcttccgtccacatgaaaatcaaaacaaactaattattgcaatgatttcaagcatactggaattaaggctattttttattgcaaaattttggaagtgactttcaaagtttttctgcgtctcagctttgctggcatcctaaacagatgcataatctcccttttgggtgatgcccggcccaagtcatgcgatctggacagggtgggggctgtcttgcttcagggcctactggggcttggaagccacttaccggaggagaactcctgggcaaaggctagtgacaccagcagcagggggaagcccacggctacgaacttgaccattcggtccaggggaagctccagacgcagtcctttgaggcgggggccctttgcggtcgggcagcaaggcatctgagagcatgtactctgcagctgtgtgtgcgagcgacatgctgcttgggcccagggctggcagacgggggtcctggagagtggggtcccggagagtggagtcccagtaggtggcagcttcagggagcaggctttcagcagatggttcctgcagcctgggcctcacgagtatctgtgtgaggagcgggcactggttctctaaataactggctaggccctgagccaggcacctggtaattagagggaggcatcgcccagtgggtcgttactggaggagggtcgggtgtcggctggggctggtgccaggccgccctctggactgttgaaggcagacgcagtcctatggctttaagctgccctgtcattaatctagtatttttggtgaggtgggggagaggaggagggctgtcaagcaggccccctgtgtaattggtgtggaatctgggtggagattgcttaaatgtgtggaaggccctcattttgtggtttggggtgggaatggagcccccaggactccgctagggttgcggctccaacatagtacttgtcccagtgatgatttctgcttcgggcccaggctccttcccagaaactgatctgtttttggcgttaggtcccctgctctgcttctggtctgtttctaaaatgtttcaaccacatatttacaatttccttatgtttacatttttttttttaaagctcccattagttctctagaaagctgagggaagagtgggagtgttgacgtgcagcgagaacatgacctgtgaaatctggagggaaagtcttcactggacacacagcagcactgtttttttttttaaatttttattgagtgactgcaggaatcacctttggctcagtattctcatctatcaaaaggtactatattggttgcgaaaaattgtaaagattgatgaagagtattgtataggaagatggattgtaaactgtaaagtgtagtgcaaatgtcaacgtttcatttatttatttaaaatttatttagctgtgctgggtcttcgttgttgtgtgtggggttttctctagttctggtgaggataggcgactttagttgtggtgcttgggcttctccttgctgtggcttctcttgttgcggagaacaggctctaggggcatgggcttcagtagttgccctgtggcatgtgggatcttcctggaccagggatcaaacccatgtcccctgcatgggcaggcagattcttaactactggatcaccagggaagtccaactcttactttgatttggtggggctggatgggtagttggaaaagcaaacactggggcctatggtaattgttgaggcagtctgaacgcgggttggaaaaagaatttccagacacagaacatttcagaagggagtgaggttattaagaacaaagaccaaagataaagtgggcactgtgagcacagcgggcagacctccgacagactggggaaagctaacagttt

SEQ ID NO: 48134 - DNA, 755 bp, Bovine  19866880771598
  misc_feature (1)..(1): n is a, c, g, or t
ngacaaataggccaccaagtctgtgtaggagacccattagtgatactgccctgttaagtatagcctgaggggctgtcaccatttggagcttctggggagaaaaaaatgtcaactttgttagttttgattctctttcctgcctatcatttttatttaaaacacttgaaaaaaaaaatcttaattttgttaattattttcttctagggggttttggtctgttttcttcagataaagtgggatgtaagtgaaaaacattttttttccttcccttattaagttttgatgaattcactgagataatttggatagatacttgttattaataaaatacttcgatataggctggagcttaaaaataggaatgatctcgttaaagtgaattcttactcagccttgttagtgactgtctagaatagaatccacagtttcaagggctctttctcttttcatataatttagcttgcaaaatgggcgaattgcaaggaaaaacctttggttgagacactttgaccttctctctctcactgaccttattttttgcatcttaattgatttgaatttaccttagaaagagtcagacttgtcacataaactcataaaggtttatttagaatcttcagtgggttgtcaaaaaaaacacaataaggagagttatttgagggaaattgacactgagaatggaagaggggagataaagagtggagggaaaagattagaaagggctgtgatggagagaggcagcctcttattccaat

SEQ ID NO: 48135 - DNA, 3246 bp, Bovine  19866880793273
  misc_feature (1)..(1): n is a, c, g, or t
nggctccgtttagttgtggtgcttggagttctcattgtggtggcttctgttatttcggagcacaggctcttggcatgcgggtttcaacagctgtggcacgtgggctcagtagttggggctcccaggctctagagcacaggctcagtagttggggctcccgggctctagagcacaggctcagtagttgtagcacactggattagatgttcctcagcatgtgggatcctctaggaccagggatcaaacccaactgatccaccagggaagcccccaagagatgagtcttaaaagtgaaaaaaatacactttccatcaagtggcagaactgtggtgacggacatacggaaaagaatataggtttagagcataagctgaggtcggacagtcccagcatcaaagttgagatttatcacttaccagtgatctgattttagaaaagtaacaacttctctgacttaaggctaaacttctcacttgtaacatgaggcttcaatcagacaaatatgtaaaatgcgtagtatagtgtctactagaatgcatcagtgagtggaagttcttggcatcctgcaaagctctgtgagagtcgaagcctgcttcacctctgacacttcaagtggcttctggttgatcttcacctctgatcaagaaactattgggttggccaaaaagttcgtttgggttttttttttttttccatttgggttttccataacatcttatggccaaacttcttggccaacccactgtgcatgcagcgtatcagaaaactcactgatctgccagtaagtcggcataccccatcatagaactttctatttggggagaaactctgtgggatagatgtcaataggtgagcaagatcctttcctttttttggtagggaaattattggtaggttagattggatctcccagagatagatgctgagataaggattagagtgcaagcagttatctggggaagtcaccagcagggaaatggaggtgtttgaaagaaaggaaggagtgtggacaactggggtttaatcccataagggagccctgggagacagtgtaggacacactttggagcttctcccccaggaagagcaaggaagtttatttatttaccaacttctcatcatcagttaagatctgctttcaggagcattaactgttgcagcagagccgtgtagcacaaccctcgaggtctacgccacagctttcccagtggagcttgcaaaagactctgcatggcatacaactgcaactaacgccgctagcaccaaggaatctactggtcacagggccaggcagcaaggccacttaaactgctctcagaacctgctgaaggtctgctcttgctctggcccccctcataatgtgtggtcttcaaagttacctaatacatggattggagcagtattcccaaatgtggtacgtgttgtctccaagatcggaagaagcctaccgttactgcaccgccacgtggtataaggagcaggatgcaggaacttgtcctcaagcttggagtggacctcttagggatgcccaagacaactgaaccttaaaaactttactgacatggcaggcctgccaatcatttcagggcttatgtcctccctgctggtattcaagtgatccaattaacacgctgctttcaaaataggggaacttgggacttccctgctggcccagtggttaagaacccacctgccaatgcaggggacacaggttgaatccctagtctgggaactaggatcccacatgccatggggcaactaagcctgcaagccaaaactactgaagcctgtgcaccctagagcacgtgctctgcaacaagagaagccactgcaaccagaagcccagtcaccacagtccctgctcacggcagctacagaaagccctcatgcagcagcaaagattcagtgcagtcaaaaataaacaattaaaaaaatatatataggggaatctggtgatgttttgtgtctatgtaccaagacaatcaaggtctttggagtaataatttggaggtgctgtgggaaaacacccttaggattctcagaagcccttgatgagagagcatttatcttaaatcattcaggagtcttcacagatgtccttccagccatacccttgatttgatatgtggccttggactccttcaatgctgaaaaatatttaccagctgggagaactgggaataagagtcagttctatcagccaaaccagccagtcctggcgcttctgtgtctcctccagattctgcttacaaattgcacgatgccttctctcgctcatccctctcttgctgcaagttaccagactcggttagaagaaaccaaatggcactttcaacattctgtctggaaatctccttatcatgtattttaaagtttactaggtacattttctatcttccaagttgccacatgcaacatttctccaattactccgtcacacttgacacgtgttgtccttctccagcctctaataacttttctcgctgctttctcagcctccagcaactgtttgttcaccatccctccaggctttgctaacagcctctttggtgtttttccagcttctaaccaccaactgggccaagggcagaattccaagaacactagagtggaagatacaagcctcttgagggtaggctggaacacttctgctacattttattgcaagggagccatggggccattccagattcaaggagtagaggaaacagactcatctagtaaggaaggagtcataaaatattgtgacaatgttttttggtatacagcagacatcattacactaacatgtggatacatctttgggatacattcccagaagtgaacttgctgagtcaagggcaagtatgcatttgtgaaatactgcctaggcacccttcatagacgttataccaattttgaatttcaccagcaaactagaaggggatggcagatgaagtttcctcacatttcacaagacaatgtattatccaacttattttcccctgccattataacaggggaaaatgacatctttggacttccctggaggtagtacagtggataggaatctgcctgccagtgcaggggacatgggttcaatccctggtccaagaagattccacatgccgccaagcaactaggcccatgggtgtcaactattgaagcccgagagcctggaacctgtgctctgcaacaagagaagtcactgcaatgagaagcctgtaaccataacaaagagtagccccctcttgctgcaacggagcg

SEQ ID NO: 48136 - DNA, 1913 bp, Bovine  19866880798789
  misc_feature (1)..(1): n is a, c, g, or t
naccagcacaaagtaccagagcacgtggatgttccagaaataccccagcccccagagtgaggtgaaaaggccgctgagcagcattccggctgtgaggtagtaccggagggggagccgctccccaaagatgccgctgcagagagagttggattcgtggttaatctcggctacctcgcacccctgccctccgcctcctggctcccccagggccccaccagggacctctgtgttgccactaggcccctctgctttgtttgacgacacgcctcgcaacatgcccggcaaagtggcctctgtaacatccccgtgaccttcttcttcccccttggctgaccagtccatctcatgcattctctcttgcatcacgtttatggttttacctgtcatgtatgtacatgtacacagcccagctgtgtgtctacagccctgaactttctcccaggatcatatccacattgcttctggacatcctgactgcgttgcctcccaaatagctgctaatcaacaactccaaagactggactcctctgcccccctcccagaccctgccccatgtctgcgcccctcagtggactcgatggcatccccacatttggccactcaagccggaagcgagctacctcagtctcctgtccctgcggcccaccctccacaagcgacctccaagacctgcctgctgctcctcttatttctctccagcgcgtcatttctctccatctctattattaataataccattctaactcaagctttcctccaagcccaggtggagctactatcaaatctgttccttagtgtgacctgctagtcagccctgaagtgaactgtcagtcactccgtcatgtccaactctttgtgaccccatggactatagcccagttgggctcctttgcccatgggcaagaatactggagtgggttgccattcacttctccagggcatcttccgcattgcaggcagattctttaccatctgagttaccagaaaagccaatcagcccttctctccctcaagtccacctccgtcagcctctcagtatctgtctgacatgtggatctgaacatgacacccactgagccacccactcagtggctctcctgtgcccacagcctagtacacaatgacctcgttcttcagccccgtcttctgcattttacatgttggtaaacctgttaggagtcccccactccaccccctgccctctgtgcagtcatgctgcttcaaattacacctgccttatttcaccaagccatgactccattgtgcgagtgtgctcagtcatgtctaactttctgccaccctgtggactgtagccctccaggctcctctgtccaaggaattttttagacaagaatatgggagagggttgccatttcctcttcgagaaaatcgccccacccagggatcaaacctgagtctcctgtgtctctcgccttgcaggtggattctttacccactgagccactgggaaagactcttgtctctattcagttcagttcagtcgctcagtcgtgtccgactctttgtgaccccatggactacaggatgccaggcctccctgtccatcaccaactcccggagtttgctccaactcctgtccattgagttggtgatgccatgcaaccatttcatcctctgtcgtccccttctcctcccgccttcaatccttcccagcatcagggtcttttcaaatgagtcaagtccaatttctcttcatcagttcaagtgtcatcttctccaagaagcctttcctgacccctcttttctaatcccagctcagactaagcgactccttggagctccatacgtagccacctctgtctcagagccaccacactgtttataacatagctgctgaagcatcggtcactccagtaggctgtgagctctctagaggtagtacccagcctcag

SEQ ID NO: 48137 - DNA, 3987 bp, Bovine  19866880841384
  misc_feature (1)..(1): n is a, c, g, or t
nccgtgctgggctttcgctttcgggtttccgtgaaggatccctgtccggacagaccatattccagcccaccgttgacatgccatctgagtgaataaactcaaaagaagatccaggaaggtctttgcaggaaagttactaaaagagggagtcagccaggtgaaggagcaggctgggtgatggtggcaacacgccagctacgggtgacgggatgtgtggaaggcttgtctcatttccaacaactttgtctctgaccccatggccccaggttggtgtagagaagacagcagcctgaaccaccctacaggccaacatgggctctgcctcttacctgataaacatgccgatggcataggccacgaggaaggcgttgtccacggcccccagtaactccttgtagttgctcttatctgaaggcagacaggggagacagaaagctggctatctggatgccccctgcaagaagcccttcccgggcctggatggggagcaggcatggggaggagtggctcgccccgctcttaccaaagggggcccagttgcaccacgtggtgtcgttgagactgtgggtgctgttgacgggttggattacctctgagcagttgtggtgcagacggctctggagaggcaacgggtgtgcaggtcaggggttagctggtggctccagagtcaacccagcccgcaagggagccagtaacctcccccaccacagcaggccactgcccgtccccactggactccctgcgtcttcctctgacacccggtctggcaaggggccacggcagagcctcggtgaagggcaaggggtgtctatgagcagcacccaggggacccaaggtgcctgctctctggttccacccccagttccccgacaccactctcttggtgaagaaacccaggaaactctcctgggaaaaagaactgctgaaagtgggagtcagccaagggggaagagacagacttggtgaccaagacaagggacaaggacggtgctccactgagctccgggctgtgctactgaagtatttccgtatttctgctgagcccagcagtcctgcattcttccttacccccgggccagactcaccttgacgacactgatgggcttccgggacatgtgatagcaggtgtagattaagaaggtgatgagcaggatgaaggctcggtacctgcaggggaaggtgggcatctgggttagcagagagtccaggcctaccgtctccactgtgtccaggaagcagtccacctgtgctcgttctggcagcaccaccaacgctcccctccagacacaagcttggggcagaggccaaggggaggggagggacaggtgcccagaggccagagtgctcagagttcctgctcccgagggcagaggcctcccaacagagctgggccaacagcggcgtcctagacggcaccaaagtgccctctgtggctcttgtcactgcccatcgcctctacttctccctgtcctccctaagatcagggtgcctctgtgtgcgtgtgtgtgagagagatgggggcgcagggagacaggactgtgtttaaataccagaaacggtggaagccaggaggagaaggatgcatgccaagtgtctctttgtttaaaaaactttttgctttttattggggcagagctgatgaacaaggtggtgatagttccaggtgaacagcaaggggctcagccatacatacacgtgtatccattctcccccacactcccctcctgtccagcctgcgacataacactgagcagagttctctgtctatacagtaggtccttgctggttatccattttattttacttttaaaaatttttattatttttaacaccagaaacattttgtattggggtagagtcgattaacaatgttgaggtagtttccagtgaacagcgaagggactaagacatacatatacatcacccatttaaaatacatcagtgtttgttgattacatgttgagtacatgttgattccaaacttccagaaagggtctatctttaaagagaggtcaactactcctcacaagcctagttggttgctcagttgtgtctgactctttgccaccccatggactgtagccctccaggctcctctgtctgtgagattctccaggtatgaatactgaaatgggtagccattcccttctccaggggatcttccccacccagggaccaaactcaggtctcctgcgttgcaggcagattctttaccgtctgagccaccagagaagcctagaacgctgcagaaatggtgcctgctacagtccagtaggagcagagtccaaaacatagagggaaatgtggcagcagaggaaaagccagttgacaggacccaggtcctctgcctggctctattctagtccattcctccagacagaagggtcactctttccattgtggctcacgcatcacacagccctctcccaccctcgcttctcatcccatgcactgatctgaggtggaaaacacaggtcagccaggaaccactgaagtttccactgaccgccccactccccacttctcctgaggatctgggggagggccaccgtgtcctcctgagtcactgcttccccagcagagcatcagctgagccgactcagcatccaggagccaggaagtacatggaaaaagagagttcagcgtggactccagcccaggagaaaggccagagccttgtcttcttaaagatcccctggagaagatggggaaggaggggagggggcccggaaactccattctatccctgggctccttgaatcaaagagccaggacactggaggctcggtctgccctctctagcgatctgcctccaaaccccaaatcacttccccacaagcatgttatgaaggctcaagtttgtgaaatgaagggtgttacatcagaggctgaactcaggttgggctgccaggacccttctcacttcgcccctggacttctggtctatctccatctctccactgcctcgtagttcatcttctgaagagaatgaaggtacatgtaccctgccgtcaccaggctgaacatttctcagtggctctccattccattaagtatgaagctctgtacaaaataaaaagcttaaagcttgggggaagaatgaagctccaactctttagcctggctttctggctcctctactgtgtggtctgtctggctcctacttccagacacggggtgcacaggggcagggagtcacaagggattctccagggaatctggggttattcccagggactgccacagtgacccacatagacaagcttggtggtagcaatgttttccaactggtaaatggctcatgactcctggatcggggactttcagaatctggcagcgggtggggggagggggtggaaggatttggagactgtgcccaactgggcttcttcagaaagcaaaggatggaagaaaaccacagccctgcagattaacactcaccagtgtcctatctggaaaaaagcttcaagttttgtagatgtgcgtgcgtgtgtgtgtgtgcgtgtgtgtgtgcgtgcgcatgcttgcgcactcagtcatgtctgactctgcaactccatgactcctctgtccatggaattttccaggcaagaatactggagtgggttgccatttcctgctctaggtgatcttcccaatccagggatccaacctgtgtcccctgtattggcaggtggattctttaccactgagccacctgggaagcctctaattaattgtgcaaccaaatgcaagttctttaattttttgcctctagtttcctcatcagatgtacagggagaacagcatcaaccacatataagtcaaacacaggcgaatacaatgtaactctcaccctggtccccaggtctctgctgtgctacccttaagacctccacccctgggctcagccaagtctcttttcgctgctacatggatgcagtgaccctggtgacaaatcagatctccttggcttcccagatggtgccatggtaaagaatctgcctg

SEQ ID NO: 48138 - DNA, 1764 bp, Bovine  19866880849262
  misc_feature (1)..(1): n is a, c, g, or t
ngctctgagtggtgggcgggtaggggcattctgatgctcatcgggactcatccccccagttgggctggggagggcccctcctgggagacacagcccaggctgcatttccctccctggatgattccaggaagctggagcccaccctgtgtggccagctgagggctctctggggtgatttcagggggaagcggggagagaacagccctggctactggcttccatgagcccaccctcgggcctgcactctcatctctcagggctgggctgggcctgaggctacctgggggcttctgagcgcagcccggccagagtgtctcctacctgtacacagcgcgcttgtcagcctccagctgggcctgggggtcaatgggggcggtgggcacgggcgtgctggcagcagctgagggcgtggagatgtggacagcctgggccttagagggggcttgagcggtcgccgtcatctgcagagacaagggagaggaggtgtgggttagtgggccaggactgctggttccccgactggaatcgtgaggtctacatcgtcccgtgttgtgtgtgtggataagagaaaaggtacagagaaatgcgagtgtataatgagcacccatatgtacatgtgttacaagtgggcagagagcaggcgtttcttcaaagcagaaagttctggagaacagtttaggaccatccaaagccaagtgatgctgaagtgagctcactttaaaagccatagttcttaatgcaaattaaggtggtggcctctgcccagaagctgggggaaaaaaaaaacccgaatgatgagccctttaaattttgcttacgagtcacttgggctgtgccgagcagtgctgcgtttgattctgtgactttggagggcaggaaaaaattagctgagtcagttctcagttgggcaaagatttattccatttaacgtaagccagaggtaactgttttaatggttttgatggataactgagtgttctgcaaattttggtttacctgggcacttgaagataagcgggttttagtggacaatgagcagatttctgttctcaagtctaacaaatatttggagtagtcattttcctcctctgttacatgccttggaaggtgtcccaagtttacatcaatcagagcaccttttaaaaatatattggactttctgtataagatttcatttgacaaaatgattaaatggctttaaaatttttggcaacaaccatcattacagaacttaatgcttttatattttattttctttgattaaatgggatccctgaaacatcatatgtggtgataagcctcaactgttgccttcctccagcctgtccacagcacctcacagctctcatcccctctgctcttgggacttgacatccttgtctgcctctcgagataacaccttgttcactccttcatccccagcacgcggatggcacagagtgaatgcttggtatctcttgagaagacgaatgagggactaacgagtgaacacaccttgagagaattatgttttccagctggaaagttcgtcttatgatctaggaccctgcttcctagaagaaagagtatggtatttccacaaatacgtgactggtggtgccagtggcccccaaacgcttgctgtctcagtttcttcattagatctgtcagatgccacatcttcagagtgaaatagagtccctctgcccttgctctcccccttgctctgcctcatttcacagcccttatcggaccatgtatttcacaaccctggactagacacta

SEQ ID NO: 48139 - DNA, 1565 bp, Bovine  19866880889801
  misc_feature (1)..(1): n is a, c, g, or t
ncaggaccataaagtgcccctaaaagcctctgctcagaagtgacctacatcacttctgcccaagcctcattggttaaagctactcagatgaccacatctgacgtcaatgacccaggttaagtacagtcctctctcggtgaaaggaagtaaagaactgcatacagtaacaccatctactgcagtctccttggtggggtccacagcttatttttgcatccgggacctgacataatgtttggcaccaagtaggcattcagtgcattttcaccaacttgaactgaattatcaaatatacaaatctgagaacagaaagagaaaaaaggggaagggctgaggtacaaactcatggtatgtgaaatagcactgggcttggaatcaaaagactaaactccaaaagccaaggaacctttctgggctcatctttaactgaaggagatgaactagaggatctctagggtcccttccagttctaacctttaaaagagtttgtaatgtgttccttagtatctgcttgtcaatctgccaacttctattagtcaagtgtctaggcctaaaactggaaaaaaataaaaataagcccctaaatcagttcacgtgccaaaactgaaaattcacccatgtctgtaaaagaaaacaaaactatacttcaaaagggaatatgttttcaacaaaaatattgtggcaacagtgtttttctttaataaactattttctgttttgagcacattgttctaagccacaagatttccagctacaggaaagctagtgtggcattgcagaggggtgattacacatctgaatggatcaacacggggttcaggttcacacgtggaaattgtcacatcaattaaaactgtctcacacatagcagaaattctttgtttgttgaacaaatacatacccgtctaggttggatttgttaggctttgaagctatcattcccaatccaatttatccttatttctgtatatgtgtacgtggtcttttttttaaagcttttagaaaaaaaaaatataaaaagggttgagaaatcctgtagctaatgggctgatctactaagagaattatttaacagaggctgagtcctgagccctgtgttcgcctcagcagaaggtgaatgctgtgatgaccctgtttgattagagaaatgtgtatccttaagtttccatccataaatcacaggtgccaacccaggtatccatcactgtcagatcataaaaacaacatgtacatggcatttactatataccaggactgttccagattctttacatatatgaactctcatattgatcagagccactctaggaaataggtcttgttatcatttccatgttactgatggggaatcaaggtacagaaagtttaaataacccatctgaggtcacacattaagaagcagggctgggttttaaaactgagcaatcaggttccagtctgaactaaagtcagctcttctttattctgcctgagcacgtggcatgctgtcaagtgagctggttccattcctggatacaggtatagcctgaagccatcagcatacaatctctctcgtcttaaagacc

SEQ ID NO: 48140 - DNA, 924 bp, Bovine  19866880905985
  misc_feature (1)..(1): n is a, c, g, or t
ngcacctttaacagcaacctgctttggcgtcaggtctccttgtgggcgctgacaaattgcagacacttccttccctcgccagcagggctctctcgcggtcacttcacccagccccctccagagctagaaagcgttggaggccgggccaatccctccccaggaccacatggactaggctcttcgctgcccatcatcagtactaaggtaaccaacatgaattgactatctcaccgggcgctgcacaggacgcgagggtcaccaaggtcatcctgtccgcccaccgacggcggcagtagtgggatggggattggggtgagggccgaaagccaggggaaaggagtcgcggttgcttcgctaggcgacggtttccagcgtctccctggggaagttcctcttctcgtctaacctgcagctttactgttgcagagccttgtcgagctccgggtccaacctagactgcttagcggatgggcgcccagacgcccccgcgagttgggagcatttttcctagggcttccaagtcaggcgggcgccttccaccacccaccattcgcgtctcagcaggcacccttatggctcctaggtcttctgcacccacttccatccctcacttcccactgcccctccaggagcttctcggtagccccttccccagaccaagctgagtgcccgtcccccaggcccgctcacttacggtgcagcagtccatgtttgatgtcaggagtccttggctgggacggaggctggcgcagggggtctgcgcggtgacaggtggggaccctggggcggtggcgaggcagccgatccgcgccgaactagcagctcagctctcgggtcctctctcccgcgctccgctctgctggagaaagtatcctgagccctgcggaagagaagccaatcaggagaaaccctcggcagagtggg

SEQ ID NO: 48141 - DNA, 704 bp, Bovine  19866880916170
  misc_feature (1)..(1): n is a, c, g, or t
ntgcacctacaataaaagataagcagaaaactcggaagactcacaagagtagcagaagccgggactattgaaagtttcatgtgcctgttcagggaaggggtcggctgtgggtgtgcggagtgcatgggaacaggatgcggtaatgaagtaataaactagaatcaggtgtttgacttgttggagtcagggctctgccagagttctcaagtttctttggagaaccaaaggcatttccaaggattctgcggcaataaggaaaatgactaacgcttactgacacatcttctaggtacttgccccttaactttcctcatttaatcttcattaactcagcaaggtagttagttattagcgctcatttgcagacgaggaaacagaattacaggaattatgtaattcgcacatggctaaccacaagtaatgtaccctggaagagctaacattctattaacactgccactctgggaaggggaacagttcggggaaagatttcgcgagttaggagaggctaaaggtggagaaggcccgagcgccggcatacttacaaacaccgtggctttggccgctctgcgcagccgcaggtacttgagccggtacttttcgttttgactcttcttcgggagctttttcatcctggctttgctggactgcagcgggtctcgcggcgaggaggccaggctgcccagcaggctcatggtccggcc

SEQ ID NO: 48142 - DNA, 1599 bp, Bovine  19866880927737
  misc_feature (1)..(1): n is a, c, g, or t
nacccctggttgggaagctaagatcccgcatgctgcggggcaactaagcccattcgttgcaactactgagcccacgagccacagctagagctgagagctggaaggaaagatcccacatgacgcaacaaagacctgacagtcaaataaataaatactaaaaaaaaaaaaaaaatgaagctcattcgccaccccgcccccaacctcgaactcaatttccaatcctcttctttggccattagaggctatgaaggtgctctaacaggaaaatctcttaaaaattgtcagatcccctttgctgtcttctctcccccatctcctacaaccaggtgagtcgaggggtgggagaggagaagggagccaggattcctccagtgctgagttgtaatgtatgttcttttgtaaacaagaacaatcatttgtgaacaggcccagatgcaaacagtccccaaatcaggaattccagctcagaggcgcagaataatacagctttggggaagatttaataatagtaaaattaaaattgtaactgaagcataatgaagaatgtggtacaaacaggcactccaaagagggggcaaaaaaaaacccagcacagattagcccctacggaatagtgattggttgagagcaacagtaaacaatgcacagaaatgcaacttaattatctcgcaattcttaacattctaccaaagccacgcagaaagctttgatgttggcagcagcggaggcagcggcagcagctcctctctctccctggatcctggaagaagatcattactaagaaatctgtacccacctcagcagctgggtgggggaagagcagtggggtccatctgctgagagacccggagtggccaatgacccgggaagaaagcatctctccaggggctactgagtcaggggactggtggacaaaaagggattgagcacaagaatcaatacactaggaggggaggcccggctgaccattaacccctagggctaggtgaataggcccccttggggattcccggatctgtcagcccaggactggactgaatgaaatctggcctgcccctctgtgcctaccccaaatacagacacagtgggtgttatctggccaagaatgtctctgttgttcctggttttgcacctgagatgcccagttagggtgggaggcaatgaggatgaggcccagaagaaggaagacacttgattctgagtcaaatgtttcttttaagaattcttctgatggatgtccaaattgtagcggagggaagtccctgagcccctcaaggggatactggtgaaatctgaggggtcttattctggattcgctacttcctgctgtgggttggaggctgggcagggaggagacaatttcaatactgctacatcatttgggagcctgagctttagaggtgaggggatagagctgagcagaagttctccgtatgccacacccctcattcctggcagggcaacttttagaagcaaagaaaatctgcctcaaccccctggcccacaccccaccttcactgccccctaacccactatctgggtaagctctactaaatcacactgcaaaggagtgcagtgccccctgaaggcaggagaaca

SEQ ID NO: 48143 - DNA, 1412 bp, Bovine  19866880959620
  misc_feature (1)..(1): n is a, c, g, or t
nagaatactggagtgggttgccgtttcctcctccagggcatcttcctgacccagggattgaaccctggtctcctgcattgcaggtggattctttactgactgagccaccacggaagatcttcagcaagctagttcagccttatttatcatttacatggcagtgtcaggcttccaagtgtgtcaggagagaacaaactccagagccgatctgctcttgcagtcgtgtttgctgatggcccatcagccacagcaaacctgaggccagtccagcgagacctcaggatggaggctagggagcaatgtggggtcatcttgcgtctaccccaactccctctcacagtttggactgttttcaggggagtccaatgtaaactttaacagggacctgtacaattgtacattccctctgctcattgacgactggcgccagaccttccacgatggctcccaggggcagacagagcgcctcttcccgttcggatttgtccaggtaggtgctgaaaggaagagggtttgtgggctttggtgggggagatgctgctgagacctcttccctggaatccatgttctgttttttttgccctcatagcctgcctgctgttcatctcagctcactgacaggacaattaaatcttaaaaaaattaataagtaaccagtatttgggcttcccaggtggctcagtggtaaagaatccgcctgcaatgcgggagatgttggttcaatccctgggtcgggaagatcccctggagaaggaaatggcaacccactctagtattcttgcctgggaaatcccatggacagaggaaccctggtgggcaacagtccatggggtcgcaagagtcagacaccactgaagcaagttagcacgcacacagccaagttcttaagtgcttcacctcgcctgttcacacgacccctccaggaccaagatgtcccagcggggcagtagttctgacttttctggaatataggaattaaacaagtaaggtgtgacataaacaagatccgcctcacaacatagacacgaaacaggcgttagtatttggctggacacccctgtctgtaggcgtccgcctctggtagcccacagatacttccctctcaccaacccccgcttgcctcccccaccccgttcctcttctctgtcctagttcatagggctttttttggataaaagatttttatagacctgctttccacttacaattactttacaatcatttcctttctcctttcttaacatttgttttgactttgaacgagaatattctgctcattattttcaaaatagcaacgcctgtcaccacttctgtgttactcttggtagaaactgcattttggtccttgaaggtgcttcttttgcctctcagcctgtgtacatggtgattggaatgtgacgtcaatcaactta

SEQ ID NO: 48144 - DNA, 1520 bp, Bovine  19866880966902
  misc_feature (1)..(1): n is a, c, g, or t
nctggcgaaaccaacctcacaaacttgcccactgccacctgcagtggtgagttctggaagacacccccacccagccccacaacctcttattctactaagttggtcagaaagttcatttggatttttccctgagatgtggtggggaaatctgaacaaactttttggccaacccaagagtacagcctggaaataccaaaaagtgaccatctccatgctctcccctggcccacactacctgggtctctcaggggtctgctcacggaaagactcagatttcttcatctaatccagcaagacgtggtagtatccaccatgtgccatgcctgatctgagggtggggttgctggaggaggtgccccagtggccccagacccctggtgctccctgggcttctatcccaagtgatgggctgggagtcatccactggcggagcaggcttagcaccgcccacccctcacatggacccagaggagtttacctgggggagttggccacagtcagtgactgatggatgggtcaattatttaaatggaggtggttgaaggagccaaggacccgaggccaagctcaccttctgggagactttgacgacagctcctttgaagctcggtttccccatctgtagagccagtacacctgcctcctgtgactgtcatgaaaaataaatgccatgactagtggaactaaatggcctttgaaaatgcgtggcatccagaaggttaaggtcaaatgcagtatcactaaggccaggcattccagccgcctcgcctcacctccaggccatcagagagaccatgtggcggagagcctgaaactttccgggggttggggcttgggatcaggcagtgccctttgccatcccacgtgtggtcctgtgtcaggaggggggaggtgaggaggccgaccacaggagccatcattagaacaagagtcgtgcagccggcactgccgagatgcacataattagaaattagaaaaaggtcagatcgcgtcattatcagctcaatcagctgccgagtgccacagccagttaatttggcatctgtattttttacaaccccgcacacgtagcccagcggactgtaactctttatccggacagatatactgcgcagcggagcagggacataaaatgagaccccaagcaaatgagctgagataattgagagatttattttttatatatatgtgtgtcagggcggctttcctttgcccttgaatgttgactttcacagatgggcttgtcacgaggatactgggatccccccaaactgtcccaccctggatcctggagcggggctcagatcctgcctgctccccagccccaccaggcatcccatcccccaggacacgggtcctccccgctcctgctggtccctctcctcccatccaagcaaatcgctgtgtccacctccctggctcctgcgatctcctgacaggttcccatgggaaccatggctgacaaagccctcccagagatgttcagagaccagagaggttcccagagtgtaggtttctaa

SEQ ID NO: 48145 - DNA, 2124 bp, Bovine  19866880983315
  misc_feature (1)..(1): n is a, c, g, or t
ntgtgcacacgtggcacgcagtgagggtccatggagctctcagtctgtttgtctctctgtctcgcacttaacagcaccaccatcatcatcaccattgtctctgctacccccactgcccaagggaaacagaggcgtaagggcctcccctgcctcggccaggccttggatcaggggtgcgcgggttaggagcggggaggcccggcgggtactcacccgtgaggagcaggagaggcagggcccagtggaccccgaggaggcgcgctcctccagcgcccatggctgctcgcggggctctgacctggtccgcagcacttggccctactgctctgagctcacagcggcgggggaaggaggggcggggcgggctggtggtggttgtttgtgaccgagactctgccccaggagggaagcagctttgaggaaaccgatgcttcctgcccggccttcagggccttggagaactgggaggagaccagaggagagagactctatgaccttgacccgttagtcataacctctgactctaacctcaaaccctagtctgggatttcttagaggtaatcctaactgtaactccaggagtttcgttcctttaattccaagcctctagtgaaccattcaatcccaatcccaattcctttgtttccagatgacacccctcacccctaccccactgctagagtggattagaaatccagggctgagatctcagggcacaggcattctgaggctaaaggtagagaaaagcgacaaggaagataacttcatggggggcagtgtctcatgtccatttcccagggagaggtggggtggtaatccagaagataaggaagataagagactctgggacagtctgggagatgcctatagttcacgtagtcagcccagagacagacataaacttctgggagaccttgagcaagtacttaacccttgaaagtcagtttccttatttgtaaagagggaataataataataacaacaataatagttcctactttgagagatggagtaagagaagagatgaagcataaaatcaaccaaaacagtgcctgatgcttcgtattgatattgacattgacattgaagtcgctcagtcgtgtccaactgtttgcaatcccatggactgtagcctaccaggctcctccatccatggaattttccaggcaagagtactggagttggttgccatttccctctccaggagctcttcccgacccagggatcgaacccaggtctcctgcattataggcagacactttaccgtctgaaccaccaggaagtccacttgcttcgtaagtgatcagtaaagcttagccagtactgtgatttatttatttttatgcacaccccatcactgaaactatttgagcatccttggctgggatatttttcaggccctggaaagatagctggagtaaatgacctttaagatttttttccagccctaggacttcccaggtggtccagtggttaggaatccaccttccaatgcagggggtgagggttcaatccctggttaaggaactaaggtcccacatgagtgtggcaaaaaaataaaataaaaataaatcgttttcccagtcctgaaatattgtgtttagagcagacagacctgtagcttctgagcctgcaatgtcagcgcacaccccgcttctccccaccccctccctagagatccgctgctctcccctttcagagcccagctcctgtttacaggtctcttccttccaaatctggaatctcagatatttcctggagctgttcccggaagaccaaggccaggctctgggggctcagcggaagaatgtccagcctttgttccccattgttcctggccagctcctttgtggggcccctaacccagctgactgcctcccttcctcccccgtcccagcctggcctccatgccagccccagtctcagccccagccccagccttcatagcctgaaagaggaaggcctccttcacgccttcttctcccctcaaatgcagaacaagtctgattaagacaatcagggcaagagaacactgtgttctctacaaactgggcatttccaaggggtaaagaacagacagagtgaaagtaacagagggtcagagctggaagaatagaaattggt

SEQ ID NO: 48146 - DNA, 1372 bp, Bovine  19866881053474
  misc_feature (1)..(1): n is a, c, g, or t
ntgaccagctgtcctccgttgcctctgcatgtggagcaaggggaaacgggcttagaccgaaggcagggataagattagagacaaggaagaacttggcagtgagggatgttgtataacctactttacagacacttggggactgaggagactcccacattcctggtcccggcccagtggactggatgcggggatggtctggcaggctggcggggaatggaggaggaagggatcctgggggccctccgtccgtggcccgatcttcctcggtgtcctcaatttcccgttggaaaattcagtttcccagttttggagctggcaaggcagcacctcccccacccaccacgcactgcaccagtgttctgggctgggtaataatgcctgtcatttcctctcccgggggagtggggctgcaaccgccctgacagccccgagggattgaaggcaactaaaaatagtgcattaaatataatctgttgaggggcacgtttgcattgctcttctttccccctctggtctttttatcctgctgggcaggccaggcctgggtccagctcgggggccctgggaatcaggttttgagctccagctgctctcattttgttgcagaaggattctctcggcaagagatttcagggagcaaatccacaaagtacaaccggggatcttcaggggccacctctcctcacttcccagtgggccctctgggtccttcagggcccgaaggtacagggagagaagctggaagtgggggagacagtgttgagaaggagagccagctccggctttgttctcccatcagccacttccgtctgctgcacaatctctctgaggttaaatattaattaagagcagaatgacagtgagcgctgagcagtgtcactttctgtcccaacacaaatgctaatttccttcccggtatgaagtgactttggagtgggattggcagcgcaaggagaaagctggtgggggtggggtggggaggaggagaggggaggagagatgggtagcccagctttagagaactaagaggaatgatgcgagggagggggaagaagagggctgtcaggtgacaaaatgtggtcatgatgccagcagggccctgtgggactcctgggcacggatgcctttggtcccccatcccttgtaggcaagattctagcctccacgaccttctctgagttccaggagggaaaacagttgctgatcaaaggagaagcagcaatgaaatcacctgaggcagagtctcatccacagtaggagatggaccacttaggaccctgtgcacaccctaatctgtcagcaaccccgcccttttgaaactgcagaagaaagaagaatgcaaggttgttactgccttatccttccccattct

SEQ ID NO: 48147 - DNA, 2008 bp, Bovine  19866881062634
  misc_feature (1)..(1): n is a, c, g, or t
ntgcttctctgccccgcccccattgtccaggatggatcacagcgactccccctggctggcggacacatggcgctccacctccggctctcgagacctcagcagcagcagcagcctcagcagtcggctgggagtggacccccgggacccgctagacggtcgccgctcttgtgagcatgccctcccccaggggtgggggtagggggcctagcagctgagcggggctgctggagaaagggggccatgggtgggctgcattcaccataatccctcctgtcattttttaccgcagtgatctcctgggatccccgaagccctggggtgcccctgcttcctgacaccagcactttctatggctccctcatcgcccgaggggccttccagccccccagcccggccaagcccccaggccccagctgccaggcggctcacaccccagctggcccagctctccagcccctggcccagttcagacagcctctgtggccgccggggcctctcttccccgcgcttgtctctggcccctgcagaggcctggaaggccagaaagaagcagggtaaggatggggggatgcacgcagcctgaatcagggtttatggggcacgggagcctcggtgctagtcgtgggctgccctccacccgcagtctgtcctaatgggcacctattaccgcgcacccagacaggagtatgctggcctcagttttcctttctttctttctttgggtctttgttgagccacgcaggatcttctttcattcatgcgtcatctttgttgctgtgcacggactctctctctctagctgtggagtgggagcttcagtagttgtggccagtaggcttggttgctacgaggcatgtgggatcctacctccccgaccagggatcaaacccatggcccctgcattgccaacagattcttaaccaccggaccaccagggaagccctaggcctcagattttctttacacggggctcttgcttgggttttgcacaccagcagtgagtcctgtttctgcagtcagctcaattcagcgaatactgaataagcatcactaggggtgggatagggcttaggggaacacagtgatactaaacagaatccttgctctctaccagctccaagtctaatgaaagtgcctgaccagcacacgggtaattctagaacctggagcagtgtgaccagtgctagcacgaaacctcaggcttgcatgacctctgtactatgtaatgtgtacatacgtgctatgcaccatgtacgggtcctgcccaggtaccgactctcagcttgcttcccagagaatgagcatttcctttctgtccaactttctcctgacttctagctatctgctttgactttccagagagaaataagtacagtctctatttcttcagcaactactctatgttaggtgcgttactcatatttgttatctcactgaatcctcacaacatattggcaaggtgttatttctctaattttacagataagaggatcagaatggggtagcttgttttaaaccctacgtcggtaagctgcagatctcaaatttgaaaccagaatcatctgcttccaaaagttactttgaatctctctgggagcacccttggggaaactgtcctctcactgactctgtttctccatttctgaaccctgacttcactctccaccatctccatgagcctcctgtactgattagtaagatttataaacattcagcagccagttttgttaagaggatataatccaacttttatcaagataaagatagatttagagtaattaagggcttggccaatatccagaattttatgactctaaatattagcaaagctggcatcctttccagctttgcctcagagctattgcattagaaatcctctgtgatcatgaaataccagctaaaaagaggttgcataaatctcatttttaaagtagctttttcatggataaccacactgatttgaatataatgtatgtcctacttgaaaacattaatgctagccccaaaa

SEQ ID NO: 48148 - DNA, 1009 bp, Bovine  19866881069315
  misc_feature (1)..(1): n is a, c, g, or t
nccctgcgtgggttggctcctgttgctaggagaacctgaccatttgcatttcctgctgtttttattttagattagcagccgcactgctgcagaaacacaggatattttaagaaagacagaaaaaggaagggcgagggaaggacctagcatgggatctccttcccaaaggcctgcaaaacacttggaccaaggtggctcccatcccagcccccaccctggcctcttgcctcctctccctgaacacctccatctcaccgtcctgacaccttgaccagaactttcaagctatacaagaacaagagggacttccctcatggtccagtggttaagaatctgccttgcaatgcaggggctgcaggtttgatccctagtcggggaactaagatgccatgtgccaaaacgaagaccagaggcagccaagtaagcaaacacaaaaaatatttttaaaaataaaataaagaacaacacagtctccttccagaataaaaagtcaggctttgtactcaacccaacatagagagcatagtttccctgtgttaaacagaaacacttctagattcccaaaggaattctccagccctgccaaaacatctgatctccaaagattatgttttctcttcctcctgccccttctttcccagttcaattcagttcagttcagtcgctcagtcgtgtccgattctgtgaccccatgaatcgcagcacaccaggcctccctgtccatcaccaactcccggagttcactcaaactcatgtccatcgagtcagtgatgccatccagccatctcatcctctgtcgtccccttctcctcctgcccccaatccctcccagcctcagagtcttttccaatgagtcatctctttgcatgaggtggccaaagtattggagcttcagcctctgcatcagtccttccaatgaacacccaggactgatctttaggatggactggttggatctccttgcagtccaagggactctcaagagtcttctccaacactacagttccag

SEQ ID NO: 48149 - DNA, 3026 bp, Bovine  19866881088652
  misc_feature (1)..(1): n is a, c, g, or t
ntgttgttttccgttcttctcctggctcagctctactttcccctctagactctgaactggatacaaggggccaagggctctataaagccaagggtgggcagcccctatctcagctcctccccctccctcttctctcccctccctccctccctctctcatcagaagactttaataaatgcatctcagcatgtggtccttcctggggctttataagaatgaattgcttatcccggcctacagtacttcctagaaatgacaatctacaatcaacacacatttattaagcaccactgtgtgtggtacccagttctaggcctggcagggtcagcctgggagtgatccctgggcttcctgtctcctcccaagggccccgatgaccgttgctttctttggctttgccagatcccaagacaatccgccattgctaacaggactggggattttggtacccttacctgcctctcgacttctgtacaaggtcgtctctgccttgaagtgccctccatcccatccccctcatttacctggttagagctcaggctctccatgatcagtaggtctgtgacctcatctcagctagggtttatcctccttgagctcctggtgcacactgggcatctctctgagactactgttgttgtcgtttagtcgctcagtcatgtacgactctttcgaccccatggactgtagcctgccaggctcctctgttcatgggattttccaggcaagaatactggagtgggttgccatttccttctccaggggatcttcccgaaccaggcatccaacttacatctcctgctttacaggaagattctctaccactgagccacctggggaagtcttctgtgactattaatcacatcgtattttcattatgcttctactagggatgctggggctctttaagaggaaagctactgtatgcagcaccctaggactcgttcgttcttctcgttctacctcgccgcaggccaggtcctgctcaattcatccctcagagcagagaatgcctgttattagaatgccttcccctcccgttagcctctggttctcaggaagtgcttattttgttggaggaaccactggcaggctcgaagggaggctgtcatggcagcacgcctggctctctagtttccagggtgtttggtctgagagcatgtccctgtcccttttatattcaattctataagtattctctccctttcaccggcctcaggatatgggatctccagatggagctgagaatggcagagaagaatgcgcccattgatttattgcccctgtgtctttgccacgggcatttcctcttcctgaaaagtcctccctgctcagccaaagcctgcccttcctccccagtcccccaaccacctcttccagagccctgaggggaacgcaagcagtgtctcccttcccaagagcctggtgactctgaacagagtctgcctgcatcctgggtgtacctgtctgtccttttccatggagatatgtcagaacagggcacatagctgatgcagtaagccctcactccacgtggcatggcgcctggcacattctgaatttattgcacatgtttgccaaatgaacaggattactcctggtctgtctcagagagggggatgtctgggttctccctacatcctcttgctttgacttttctaccccacgattctaaaggagctggaggctcatttgtcaccaagttctggaaactggaggctccagccagcaaaagaaaaacaggtgttaaattctgtttggtgtactgagcagactggaattacttctctatggcaggactgtcaagtcccagacactgatacgctacacgcagagtctccaaaccagagtgagcaagatgggccattggaataagagaagaaaacagtacaactttgtttctgtgctgtgtgcgtgctaagttgcttcactcgtgtctgactctttgcgacaccatggtctgtagcccaccaagctcctctgtccatgggattctccaagcaagaatatggagtgggttgccatgccctcctccagggaaatcttcccagcccagggatcgaactagcagttcttatgtttcctgtgttggttctttaccactagcaacacctgggaagccctttgtttatatggatattttatctcatcctgtccagatttctatttttgaatatgctccgtaagacatttcatgtattggcagagcagtaggctttatatatactctcccacacatgcatcttcgtatatataggtactgaggtatgttaaacattctttactgatagagttgtaaacacgtctgaaagccttggacttgggcccctggctcactgtccaggacgtgagttcaatgcatacgtgccagtgtctccggacaaatgtcctgtcccctagcctggccccatatcatgcctaaagctttacagcctgaatctcgctggagggcagactccttggggatggtaatttggggaccctcttcagcggtgacacgtggcagtgactccacagggtctggagcatggcagatactcaataaattacatggggcttgaacactatttatttaaattgagacatctgagagtcttttaaagttttaaaatttgactttaatcctcaaatgtctgctctcagagagtatgcttgatatatttacttggggtctattatataacaacaaaaaataagtatataggctggcagaggatgagatgttaggtagcatctctgactcagtggacatgaatctgagcaaactccagaagacagtggaggacagggaagactggcagtgctgcagtccatagggttgcaaaaagtttgacgtgacatagcgactgaacagcaatgcctcctgggtaccaggttgtgagttaggtcctgggtgacaaatccgaggtctctgatctcaagttatttatattcctttttcaaaatgtttatttatttatttatttatttttcggtcataggtcctgtggaatcttaccatttcctcagcagatgctctagactgt

SEQ ID NO: 48150 - DNA, 1866 bp, Bovine  19866881105733
  misc_feature (1)..(1): n is a, c, g, or t
ntcacacaccgtctcctacagttactgcccgagttctggtaactcctccctccccttgatcctttaagccttccatcagcatctgtgaggctctgccccatctcttactgttttttactttttcttgtgtatctgctgcatataccagcactgcatttccaccactctggagtccatgtcttaaagcagccatttgttctgacagatctccaggtcagctagaactggggtgacttaggatgggctcagctggacttctttacttcatgctttggaagctggggcagctgcttttctcactggaggtctgtgagatggaagcaactctgctccacaggcctctcaccctccttggatcggtagggtatgtttctctcatgacagtggcagagcctcaaaagagcaaacacaacacaggcttcctcttaaggcctaagcttgggactggcatggtctcacgttcacccacatactattggccaaaaagtcatccaagcccaaagaagtgagacagggaattacactctacaaataacaataccatgtaaggatatggataaaaataaggataaagaattgaagtcagttattcaatctgctggtcccatcttcgtcattataaatagccccttttattaaatccacctcaattacattatttgaatgtgccatatgttgccttccagactctagacaaaagtaagaatagatatcaaaaaaggaccgaagaaaaccatccctaaaaatgggattctaatattctatagctattctaatattctatttaataaatattaaatatttatattcatatatatttatatatgctatttaataaatattaaatattctatttaataaatattaaaaatatttatttctttgactgcactgggtcttagttgaggcaggcaggatctttgatcttcattggggcatgagggatttttttttaggttgaggcatataggatctagttctctgaccagggatcaaacctgggccttcagaattaggagtgcagaatcttagccactcactggaccaccagagaagtctctattactctcacatttaagaagcacacaactaacttttttaccaggagaaaatgggatactgataatccatggcatttagtggcatcacagtgactcaatttatcattggtgttgcaagggatgaagttcaggtggtgggcaatagaaataaagtgactgtgatacttagtcaccatggtgacaatagctattataaagattgtagagtcagatggctgcttctgatggctccaaagagagtaagaagggaaaaggacctgttgaaaacttttaatacccaactcagaaccaggtggaaaatcaggaagtctcagtgtttgctctaaagaaatacttctcctcctgtagcctctggattgatgtgggtgaggatcaagtctagaaaatgattttaatgtggcagagttgcaaacccaattaaatactcaaaccctttggtttaagtcccttacaataagtggagggtatgatgggaaaggcctccctggtggctcagtggtaaagaatttgcctgcagtacaggggacccaggttcaatctccaagtcagaaagatcccctggagaaggaaatggcaacccactccagtgttcttgcctagagaatcccatgcacagaggagcctcacgggctacagtccatggggtcacaaaagagttggacatgactgaagtgagtgagcatgcacacacagatgaggaagaaggaagattccaaggtatggaatggagacatttgtgcagacacagatgaaactgagacctgaatatgcaaatccttctaaccttcccaaataaaacctttca

SEQ ID NO: 48151 - DNA, 1041 bp, Bovine  19866881127208
  misc_feature (1)..(1): n is a, c, g, or t
nttggtgcattgacccccacacccagcctctccagtcaggtcctgccctcgccaaggctgcccaggacagatggggcccaccctcagccaatatctcccggccctggtggggtctcttcctctgctctgagccgaatgggtgctgtccctgtgatggttcctgcccagagtcaggctgggtctctagtgtgatggcccagccactcggtggctaagccatttggtttctctccttcctgcaaggttcagtcacacctggcacagaggcctgagattgggagggtggccgccttccagacctctggtcctccgccctcacctttctgaggctcagttgaaacccaagtttccaggaagtaggagaagaggaagtggacctgggattaagaagcactcccacccctggctgtctctaagtctgcagtgggatgctgctgaaattgctaccactgcctccccccaacccccagacctggtggggatcgccagtcaaccaatcctctaggcccctttggtaccccaccccacctaacctcatccttcactccccacttcagctccttgcattaatataacctaccctgctggcttggttgggttttgttggggcaggggataaggaagatattttttcccactcacttgaaatgcatgattttgtttttatttcgccaacttcaataaagatatattgtgtttgtatggaaagtgagagtccagtcgccttttcaaacttggaactcccagggagaagctgactctcgggatgatgcaaagaggatggtacccagactgtggacccagcagggcttctccacacagcctctgacttggctttctggctcaggatagctcttctagagtctttacaagggtcatgtgctgtcaggtggtgctggagaggcggggggaggtcctaactcactttaagcagcaaggggatgaaattggtgactttctgctggagctcgcagcttgggtgcctgtgcacttaatcttctgcttcctcttcaagtgcagggcctgaagaacctgactcct

SEQ ID NO: 48152 - DNA, 808 bp, Bovine  19866881170190
  misc_feature (1)..(1): n is a, c, g, or t
ncctgggttcaatccctgggtgggaaagaccccccatagaggagagcttggcaatccactccagtatgcttgcctggagaatcccatggacagaagagcttggggggctacagtccatagggtcgcaaagagtcggacatgactgaagcaacttagcacacatacaaggagacacatgatcgtcagagcaacagaccttccttgatgcccccgatggcttcacactgaccccctacccaggcagaccaacccagcctttacccagcatcccctaccagtcacagagagggtcagctcacaggacgcactgcccatctggttggtggccacacagcggtaggtgcccgaggaagccagggagagattggtgagaatgagctggccagacacctcatctagagaataaggaagaaatgtccatcactcattcgactcacagtgagctacactatgacaaaactgtatctcacttcatccttaccacaatcccatcaggaaggaactaacctcgttctataagtgggcacactggctcagagaaggaaagtaattgtccaaggtgacccagagaaggaagtgcaaaaccactgcaacttctgtactctttccaccctacacagctgccttttcagggaaggggaaatggcacacatgaagggttcagacacccacagtgaaactggggtgggctggctactggctgatgtcaggttcttggttggtggaaagggtttgattggtagaaattgtattctctggagtgggctctaagctgaccccaaatgttcttctaagctgcttaccttcc

SEQ ID NO: 48153 - DNA, 609 bp, Bovine  19866881190941
  misc_feature (1)..(1): n is a, c, g, or t
naatctcgcctagggcccctacgcctccccacacctcgccaaagactcccaacaatccttggaaagctagtaacgctacaaattaacggctcctcccgcgttagggtccccgagcctggcccctgcgatcccggcttccctgatccacagctcgtgctccgctgtccccacggatccgcctgcaaaccctcactcgtcccggctccccaggccgggcaggacgcggccgcggctcccggactccagccacccggcccgagtctggggctgctccggcttccagccgctcgaaggcagctccaagctgttggcgccaaggaagcgccggcccgaagggcgcccgaagccgggagaaagaaagcgaacctggagccggcccgccgatctcagcctcccccgcggagcgcccagcccggagctcccggcaccggggctccaccggcccgcgcgcgagtccctactcgggtccccggcgcacccagagcgcagctccccgcccgcccgctacggtgtcttaggcccgcgggggtccgagtccgcagccccgctcctcgcactcgtggacaatgcacgccccgccaagggcccgagcggggcgaggcggccggg

SEQ ID NO: 48154 - DNA, 648 bp, Bovine  19866881242883
  misc_feature (1)..(1): n is a, c, g, or t
ngggggtgtcatggggtaggggtgcctctactcccctcaccactctgacccccgcagcgtccccgccggagctggagcctgggctcgaggcgggcccggggctggcggagcggctggcgagggtgctgcgggagccagccttcctcgcgggcagcggcgccgcctgcggggcgctgctcctcgggctctgcgccgccctctaccggcgccggaggcagcgcaaggagctcagtcactacaccggtgagaacccagcccggggatgcccgggcggctgggagactcgatggaggggtgggcggagccttgagatctcgctcccctagaagggaggcgcggagaatggaaatctcgagagttcagtcgctcagtcgtgtccgactctttgcgaccccatggactgcagcacgccaggcttccccgtccatcaccaactccccagagcttgctcaaactcatgtccatcgaggcggtgatgccatccaatcatctcatcctctaacctccccttctcttcctgccttcagtctttccccgcatcagggtcttttcagatgagtcagttcttcgcatcaggcggccaaagtattggagtttcagcttcaccatcaatccttccaagaacattcaggacgatttcctttagga

SEQ ID NO: 48155 - DNA, 815 bp, Bovine  19866881267420
  misc_feature (1)..(1): n is a, c, g, or t
nactctccaaagccctcactaggtgtatttatgtcaccccagcttgatctgtggtcagaaactctggctgctgacagtataatcgcacttatatattatacattgataataatataataataatgaacacacttgccctttttatgtagtacagaagcagccagattctccaactcagaggctggaggtcaggctgccataaactctcagagggaagcccagttcagatccaggaaggggagggaagatccactagcccctggatccctggaggggagggttttctctctttcccagggctcccagtgagctgctgtagcttgcagagtcagagggaagaatcaggctgcatgtaaatacttaaccccatcagagaggtgtcactgagccgtaaatagtgctgcaggcaacggccatgcatcactgattcacacttgtcacacccctcattttctgaaatctagttccctgcccatctctctctctcggtacaggagatccattgccatgagctattttggagtctacttaaatactgtgatttctacactaatattcttttgaggctttaaaatacacattgtaattttaaataaagatattttactttgactatttttgtaatttgcagaagttttaaaatgattatctaaatgtaactgttctgggacttccctggcagtccagtggttaagaatccgcctgccagtgcggggacacagatttgatccctagtccagaaactaggatcccacatgccacacagcaagtaagcccattcgccataactactgagcccaagctctagagcctga

SEQ ID NO: 48156 - DNA, 1587 bp, Bovine  19866881326004
  misc_feature (1)..(1): n is a, c, g, or t
ngtgtattctccttcccctggtggctagacagtccagagtccacctgcaatgcaggagacctcggttcaatctgtgggttgggaagaaaccctggaggagagcatggcaacccactcctgtattcttggaaatatccctggacagaggaatatgcctggaaatatgcctggaaaatcccatggacagaagagcctggagggctacagtctgcagggctgcaaatagtcagacacgactgagtgactaagcatttcttcccctttcccctccaagttccgtgtgagccgggcctcaggctccctctgggagggacatctgcagctggagcccttggccctttcccgctcagggggctggcgaggctgtttggccagagttcccaggggtggcttggccagaatgcgtggggaaggatggtgcatgtcgtaagtgtcaggcagagtacagctggaggttcttcttgttccttcctgaaagggccggagtcaccgatgctttcatcctggatgtgggtcccctcatgagaccaggctcatgagagctcatgagagcaggcccttctgaaccctctgctgcccagctgcttgccagccggggatgcggagaccctttgacttgggcctttctctcccttggcccctcaccattaaccatcttactgcattaatccccatcatcaccgtatgaagtgcagattttactatcccattttatagatgagaaaacagaggcacaaggagatcttgtagctactacgcagtggcatggggactctgttcagatctgtgtgaccccagggtccaggccaatgctgtagcatttagggagtgactggtgggaaaagaagaagcagcatctctttgagggaagattcaagtggaggctcagccgaggcaccctgcatgcaggctactcacccactcccaactccaccaagctgactgagcatctcttgtggggtgacttggcaaagactactccccaaccctgcacagagccactggggctgcagcctggggagaggatgtgttagcagccaaatactctgggggtccttctagaaaaagagcccagatcccccacctgtgttggcagggaggaaggggtcctcagggtctcaccagacagggtagtcactccctctccgctctatccaaagccttggaatccacaggcagacagcaacacgtggctttgggctagttcccagctaagggggtggggcggtggggaggaggaatggggctggaaattcctgaagacttagtcttctgaggaacaaacgaatcttccccctcccgggtctcctcggcagctgctgccgagctgcagaatttatcgaaggccttcacgtgctatgacagactgctaatgagggcggccagggcttctgctttctttgctttctaatttgcctgggattctgcccccgagagggggcaagtgacttggaagccaggagggccccccagagccctgcagcctgtcagcagggcttggcttgaaaggcccctgccgagggccacccagggggctgctcccaggtacctgccagggatgtgaaacatgccctgggattaatggga

SEQ ID NO: 48157 - DNA, 1137 bp, Bovine  19866881358733
  misc_feature (1)..(1): n is a, c, g, or t
nagtcctccacatgtagatacaatattcttgagcatgatgcttaccaataagtgactgatgcaaacagaaccatttcagaagagaactgtcttcagggtttttctcagagcaagtttaacgtccttattcctcagactgtagatcaaagggttaagcatgggaaccacattggtatagaagactgaggcaaatttaccctggtcctttgatccaggaaaagaggttgttaaataggtgaatgcccccgacccaaagaacagagccacagcaactacatgggagccacatgtgctgaaggctttggacctgccctcagcggaaggaatacggaggatactggagagaatcagagcatatgaggtgaagatactgatactggatattgtgatgacccctccaacaacaataaaaaacaccagctcattgatgtgagtgctggtgcaggagagctgcaagagggggaggacttcacacagatagtggtggatgatgttggaatcacagaagctcagtctcagcatgcttccggtgtgggccatggccccagcaaaccctatcatgtacgaaccaagcatcatcagtgaacagacctgaggggacatggtgaccgtgtacagcagaggatggcaaatagccacaaagcgatcataagccatcgataccaacacatagcactcagaattgacaaagaaacagaagaaaaatagttgtgtcatgcatcccacataagaaattatattttctgatatgaaatcaattagcattttgggggtaaacacacaagaataacagaaatctataaaagacaagttgaagaggaaaaagtacattggagtgtgaaggctagaattcatcgcaattaaggtgatcaagcccaagttgcccaccaccgtggacacatagatccctaaaaacaggaggaagagggggagctgaagctctgatcgttcatgataatcccacaaggatgaactcagtcaatgaggagctgtttaccagagccattctcttctggggagctgtctgtagaaacaagggacaaaatgtttcaaatgattatagtcacaagcatagctgatgccccaaagtctagaagataagccagtgcatgaatgccctccttttgcctttcttct

SEQ ID NO: 48158 - DNA, 1530 bp, Bovine  19866881406819
  misc_feature (1)..(1): n is a, c, g, or t
nccttgtctttcaggatgtagagtgccatggggttcttccgttcctgctctccgcttcgggggagggtgtcatgctgcacggggcaaagaagggggcggctggcgcaggtccagaaccctctccaccagccagcaactatactccttgcttcccagcggccagtcagggtcccgccacaacctctaccaaaggatccgtcatccccggggtcctaccttggctgctcctctccctgctctgcagtcttcgtgcagttggtggaggaaggggccctgcagagctggcttccttgtcgcccagatctgccttttcccagcagcccactgctctgagtgacgatgggatgggtgagtgggcggctgggagctcaccttcgggtttcaggcgatcatcactctgatccatatactccatggagttttgcttctccagtttcctcttcttcctgcaaatcaacccagcacctggtgaacacagctgctgagtgtgagcagaagttctgggcgtggggacacagtggggcagtatctgatggccataaatgaggctgtgtaataggaagacgggctgggtgtggtgggatggggtatatcccatctaggtttgcagcctgagtctggccctggcaagtcatttaactcatctgagtcccgagtcagtatctgtaaactgcagagaatcacactaagataatcacactgaaaggtagtgtgctaaccacaaacacagtgcctggctcacaggtgatgtgcaagtgaaactattattaacaatgctgggattgttgggggttttgagcacaggatgtaattccatatacaacgcatgcaatggtaaaatggatctcctggggaagagctttggcctgggaggaaaggcatttaaagagactaagaagaggggacttccttggtggtttgatggctaagactttgccttccaatgcagagggtgtaggtttgatccctggtcggagagctaagatcccacatgccttacagccaaaaaaccaaaacataaaacagaagcaatattgtaacaagttcaaaaaagactttaaaaatggttcacattaaaaaaaaaagtttttttttttttttttaaataaataaagagaccaagaggagcttagtgatggtccagtaaatggttaagaatcctccttgcaatgcgggggacacgatttcgaaccctggtctgggaagatcccacatgccttggggcaactaagcccgtgtgccacaactactgagtcaatgtgctgcaactaccgaagcccctgcaccctagagcccatgctctgcaagcagagaagccaccacaaagagaagccaccacaaagagaagcccacccactgaaactggagagtatcccccgactcactgcaactagggaaagcccatgtgcagcaatgaagacccagcacagccaaaaataaataatttttaaaaagagagagagagactaaggaaagaacggagctcggggctggggtggggaaggattcggatactcagggaggggggac

SEQ ID NO: 48159 - DNA, 856 bp, Bovine  19866881426459
  misc_feature (1)..(1): n is a, c, g, or t
ntcagcagaggatatgtagaaatgtatggcacacaacatgctatgtcctttacaaagaactatatctcccggtttattactcaatccttgcaacagccctgtaaaggaggtagtattaatccctatttttgaaagagggaactgaggctagaacagtgactcgaatagtcacaaagctggttaaggggcgaagggaaagggcagagtctaaggctggcctcctttgcctccctagccccctgcccacctgtccccttccctgcccagctagggagaggatgcacagaggctgagctgctgctgctgctctgcctcacttgggaaataaacaagaagaattcttcttctcatcatttggtgagtcggtgacatttcgtttgacaaagaatctaggaaaagcctctcctgggacaagttttgggactaggctgtgataatattgctttattgaaaaaggatgctaggaactgagctccggatggccttttacttggaataatttatgcaggaaatgagaaataatttttttaaaaagaaacacacattgatctacacatggtcaccagatagaagtgatggcaacacacacacacatgaataatcccagagacacagacatgcaaaggcataaattccagttctccatcaagattgtggccacacaccctgtaaaataccgaaagattgcaagtgtggtcaattcagagccctgtggacacacccacttgcaaaactgtctgatggctgtgacttcccctccatgccttccaggggaaattgtgattttccccacacatgtaaatttcagtcattaagggacgcacaggaagcttgacattggagaaattaatctctc

SEQ ID NO: 48160 - DNA, 725 bp, Bovine  19866881731441
  misc_feature (1)..(1): n is a, c, g, or t
naaagctgttttaggttgaactgcctaggaaaatatgtcacgcatcagctttttgatcgttattgcatgaaaacaagtacatgaacatcctctgcaactaccataatcctggaattgcctctatcacatacacattccgtctcttggcccgaattctctaagttgatacaggtctctctggggaacagcacacctgagcctggggtactgaaccccccttgccggacacacacctgtagtgtcctacaccctcctgtcctagtccactatgaccctactgaacatgcatttactctgacaagattaatattggagtcagagttgaagagagtgaacttgtctaacactaccgtgctatctacaagtaaaatgtacgagtccacgactcgtcatgaagagcaaatgaaaatggagaattaggtgaggtcaaaggtgtaaaacataattaatgaatttgtagaatgttagagctacaggggaagattaaagttcacttagtataaccctctttacagaaaactgtagcccagagaaattaaattacttgccctgaattagtcataattacagaatgaaaaacaaagtaacatgatctctgtaaggacatcaaaaacattaggtaagactactaatcatgtagacgcatttggaatttaaaaaattcaagtctgtgtatttatttaacatttactgagagcttgttacgtgccagatacagcattgaa

SEQ ID NO: 48161 - DNA, 1177 bp, Bovine  19866881747749
  misc_feature (1)..(1): n is a, c, g, or t
nttaccacaagtgccacctagaaagcccacatcctctggatagccttgtccaaaacagaaagattctccaaagaattcccatataggactgttccctgccacctaactatattctcctttgttccaggccttttatattcattatcttatttaattctcccaaataacctgcatgggtttctgggaggaagggtaagactgaagcccagagagaagtttgcagaatgtgagaggagggaggctgagacccagaggaggagctgtggacaggccctgggagctggccacctacttgacttccctccttctgccagaagatggcaggcggggggttgcctttggtctcgcactggaaagccacgctgtcaccaggagctgccatctggtcctggggttgggtcaccagctgaggtgggactgggaaggggagggagataaaggaacagggagtcaggggcactaagggaggaacaggagaaagaagcctgagcttggcttagggaggagcagatatctgtctcctgctcaagcctgtttagctttctcctccttcctctcctcctagaagtctcagggtatgtgtgcttagtcgctcagtcatgcccaaatctttgtgaccccatggactgtaggctgccaggctcttcaggccacggggattctccaggcaagaatactggagtctcaggggacccactcatatctcctgctctgtcctttctccgccttctccacctccacccatcctccatctgccctcgtcccatgcccgccaaggccagcccaggggggccctcaccgtgaacaatgagggagccagatgcttcggcgcggcccacgctgttctccgccacacagggtgtatgtcccctcatcttcagcactcacacgcccaatctgaaggctgtggtcgctctggatctcgtacctgctccccctcccccacccccaggctgggttggccacaactacagaccccatctagcatcccccaggacggacaccagaatcagggcacgtaaggacaaggtagacctctgcagggacagaagctggtactcatggactcatgaatggaggtagggactggttggggcagggccacaggctctgggaacagactgcatggtccagtgagaggcatctaccttctttttctttttccagttttctaggg

SEQ ID NO: 48162 - DNA, 659 bp, Bovine  19866881922709
  misc_feature (1)..(1): n is a, c, g, or t
ntggtgcctggggaggcgtagtgttcccagagtgacctgtccggctgtcttgctcatcttttctgatcaacggttatgcactttcaaagggcctagttcttccttctcttcccctcatcccatctaccctcttacccccttaaaaggacgggacagatgtcctttcttccacacaccacagctgcagccggacacattcccctagcccccggaaacaggtgtggaggatttctcagcccctggggatgaggggcattcaggaagatgaccagttttagaagctgcatgagttttcatccccctctgtgaaatgggcgtgttgccttggattagcacttcccaaagtgggctctgcagcacagtgggctccttggggggcggggggtggggaggggagagccctgaagccaagcaaacttgggaaatgctgcctaaacaattccttttgaagagttacagggctctttaccattttaaagattttaacaagttcaggatgcaagacaacccagtttaacccagggcttcctaaacatttatgaccatggcacccttagtgcacattctatgaacaaacccacctggcagttatcagcctgtaccagactttctaaggccttccaagttactcctcaacatctgaggtgcttcccccacat

SEQ ID NO: 48163 - DNA, 1557 bp, Bovine  19866880587730
  misc_feature (1)..(1): n is a, c, g, or t
ntgatagagtaaacgggaaagctcagtgtgcctgtgctggcaagcccctgctgtcagccccctcccctcggtgggactgcttgtctctgaggaagctgtgctgccacagcaaatggggaaaacacccacatggctggagtccagagcaccaacttacccagtgaactgttctggataccctcctgcttattcacatatcgagccacttcgcaagtcttcctgataaaccccataaaggctttccaaaagtgtgtgtgttccaggaatgattgtgctttctcaagtgtatgaaacatcctgcaattaaaaccaatccagaaaaaacaacttttaataatgattttccagaaggtcttatcacaaactcatctaagtacaaatatatacaaatgtctgacagtccgattatacaggacattagaacctttgaaatcgttttcttatttatgaacattccgatcctgatttgcaaaatgaggaaaaattattttatggaaatacataaaacataagacaacaagccaagagaggagaaagtgggaaattaaaggatatgatatgaagcgagttctgagttacaaaaaacacatttcccatttcacatattcgactttgaacatcctagcagctgaggagaatggaaattcattacacgtacaatccatggtttgagaaaataaaagcaaggcggattttctggaaaagcacagctcctttgaaagccacttgctggtgattcacgcgagcatcctgggtgacgtgataaaacaagcaccttggggaacctccctagtgggctagtggttaagaatctgcctgccagtgcaggggatgtaggtttaaaccctggtctgggagctaagatcctacatgccccaaggcaaccttaagccctctcacctcaactaagacccaaagctgccaaaaaaaaaaatatatatatatatatatatatattttcttaaataaagctccttggactaaatgagggttctagatttcctgtgaaagattaagccaatggttaaaagggactgtttactattttataccctgtagatgctttccaatagtaccaaacaggctaatatttttaaaatagaaaaaaaaattaagtgactatttataagtagaatatgccatgctgacctatcgctcatatagaaggaagccacaggaatcccttcggtttccgatagtgcagatgttttccacctaacagctactacttacactgtggagaaaagctggtccgcacagtcagcagcagagacatcagctctcagtagccgcaggagccgagtgcagggcaggctcgcttcctgcagctgtgcccctaggtcctgccagtccggggcatcttctggtattgaaactggcatacttgtgtgcccagtaatggctgcttgcaaaagatgactctgaaaaggcagatacagcatggcttgcagtccataaagtgattaaactgtgggcaattgtgatgcagccttgccctgttctcactcagcagcgggtccctttgaactgcaccacgtagggttgggaccaccaagt

SEQ ID NO: 48164 - DNA, 3986 bp, Bovine  19866880403513
  misc_feature (1)..(1): n is a, c, g, or t
nttggactgtgatgtgcaatataaagtggattgtatatgacaaccagtgaagaccagctcagtggctggactaagcagaagctccaaaacacttcccaaagtcaaacttacaccaaaaaggggtcatggttactgtttggtggtctgctgctagtctgacccacgacagctttctgaatcccagcagaatcattacacctgagaagtacgctcagcaaactgatgagatgcagtgaaaacttcaacacctgcagctggcactggtcaacagcctgggcctgattctctgcaacaatgctccaccgcacggcacacaatcaacgcttcaaaagctgaatgagttgggccacaaagttttgcctcacctggcctctcaccaaccgactaccacttcttcaagcaccttggcaacgtttttgcagagaaaatgtttccccaaccagcgggacacaaaaattgctttccaagagttcgttgaatcctgaagcacaggtttttttgctacaggaattaacaaacttatttcttactggcaaaaatgtgttgactgtaatggttcctgtttttattaatatagatgtgtttgaggctagttataatgatttaaaattcagagtccgaaatcactattacttttgcaaaaacctaagactgatctcagctcaatgccaattctgagacctatgacaggacctctgtttcagacttagagtgcttcgttcctcttctacattctcagacacaaaacagctacaggtagagtggcaacttccgctgcagatgtaaacacaaagtgctatgctggagcaacgaggctgtaaagccagccgtcagtgaaccacgccccagtacccacggccctgtagaaacccacccacagtgaacctggcctgacttctgtgactcacttcaatcaagagaatgtgactgaagtgatgcgggcagttcccaatctatgccttaggaaggctgcctgggctctgtggtcaccttgggcagccaagtacaaagtccactgaccctgctggggaaatcatgtggagatgtcacttggggaacaagggccctgagatgtccggagactttgtggagagacagccccagataagtctggcttttccgccctcccctccgacgtgccaaggagctgtgtggatgtgtcctggggctccagatgactgctgcctccactgacatcatgtggaacaacagaacccacaagctgagctcaagcaatccaaagaattatgtgaattaataaagtgtcgtgggacttccccagtggtccagtgattaagaatccactttgcaagacagggacacaggtttgatctctggctggagaactaagattccacatgctgtggggcaaccaacagtgtgcaccacaactacagagccctcatgctgcaactgagacccaacacagccgaataaatcaaaaagtaaataaataaaatgactgtcgttttaatatactaagtagtttggggcggtttgctacacagataacaaatattcattatcttccatcttctcacttcttgaaagcaggcagaatgttacacacctctgtggccccagtacttacgcacaagaaccggcctaaaacctggccttatcatctttaaataaattaatctcatagcaaaacagacaaaatctttccaaatctcatactgagttgaacagtgtctcctcaaaattcatgcccacccagaacgtgaccttaaatgaggtcgtactgtgttagagtggaccttaaattcaatgcccagtgtccttataaaaaggccacgtgccaacaaaagcagaaactgaagcaacacagcgacaagccaagaaactccaaagggctaccagaagctgggaggagggcaagggaggactctccccccagcgccttcagagggggcccggtggacaccctgactgtggatttcgggcctccagagatttctattgtttaagccacgcagtttgtggtaattcgttccatcagtcaccaggacaaacccagaggcccagagtgggcaaaggtaacaggagccctgatggtggatcaacgggctaaaaaccacggacaggaaccatctcctttcctctcagctatagtctagttactttatagtaagttaattatgacacgtgcagtttctcttcacaaagcatcccccaaatgaatcttgttagttttcctccaaagaattagcaagcagaattacaggtttccggttataaagaagcgaagactgaccaagctggtttaactgctttgcctgggtgactggcctggaaatgcagttttcgcgtccgcccttcgggttccaggaggcttccatactgaaacgctgtctcaggccttctcagctcttatccaaatgcccccaagcccccttttccttccagcccaccccccgggtgactcagggaacgcccgcccgctgacccgaccacggctacctggggcaggatgaccttcttcagctgctcctgcgtgaagtgctccacgtaggcctccaggtgggagagcagcaccacgcgcacgtgctcctcgtgcacctcgaacagccgcagcagcacagggatcacccgcgcctggaacagggctggggagaggaggcgcggggcttctccgtgcgtgttgtcttcccccagatcggacagggaaaaaaaatcatcacttcagtgaaaggagcacgaagcctagaactccacacacaatcttaagtactcttcgagattcttacgtcccaaaccaaaggcaagtgcttctttgaccccatattactcaaggcttgactgtcctaagtacactccaccttgtaggagtgtttctgatacactcatcatacttaacgtactgcaaagaaaccttatgttttaacataattctgagtggatagctctctgtattaatacattcatgtctaatcaaggagaaatttcatatactagattcaactgatattattgttgcaatttttcctgcaaagccaggaagcattaaatgctacaacaggagctggtcctctcttccaagcagttaaggaaggtccttcaacagagacaggcatcagaaccatttggggacctttgagaatatgtattcacctgtcctccttctgtcccagacctagggggccaggcacaggcaaatttagaaaaagctccccaggtcattcagatcaccacacactaagcgcacactgtttaaatggggacaaataattccaaactctgtaactaccaggaatactttgggaaaaaaatcaccttttttagggccgaggagatatggaagaaaactcttaacagctactggctctgcaaacaccagctggttaagcagaagaggcaccaaccgtgaggctattaattcctctgacaggcagctgactctgtccagcaggaatctgggggcaaagaaggaacgcctgggacactgcagcaggttacttgcagttgagacacgtgcagccttagcccacatcatcgaagtgatgcatctgaaatgtggctagggaaactgaacgggtgggtccccagatatttaagaaaaacacagaaggcgtgagacaacaccagctagtcagtacatatacaacctccaatccaagctacgaaatttttttcaacaaattgctcctcattaataatagcgagagtgccctctttaccccctaataagccagagtccttttagtcaataaaagatattttctcaaattgaaaacacatgtgcgtgcttagtcgctcagtcatgtccaactctttgtgaccccatggactgtagcccaccaggctcttcagttcatggaattctccaggcaagaatactggagtgggttgccatttctttctcaaggggatcttcctgacccctagggactgaaccccggtctccagcattgcaggcagattctttacttcccaccagggaagcccattttaaaacacataggatattacgttacttagagttt

SEQ ID NO: 48165 - DNA, 2189 bp, Bovine  19866880420063
  misc_feature (1)..(1): n is a, c, g, or t
naccccatgaattgcagtatgccaggcctccctgtccatcaccaactcccggagttgacccagactcacgtccatcaagtcagtgatgccatccagccatctcatcctctgttgtccccttctcctcctgcccctaatccctcccagcatcagagtcttttccaatgagtcagctcttcgcatgaggtggccaaagtactggagtttcagctttagcatcattctttccaaagaaatcccagggctgatctccttcagaattgactggttggagctccttgcagtccaagggactctgaagagtcttctccaacaccacagttcaaaagcatcaattcttcagcactcagccttcctcacagtccaactcccacgtccatacatgaccacaggaaaaaccatagccttgactacacggacctttgtagacccctttgctgtgtcaaccattcatctattcaagaaattttttgttcacccactgtgcatcacaaactcctcaatttcctctctttgccttcaaactcttgtcaagatcaagaggtcaaatgtaaaggatcatgcatgtgtacaagctaagtctgttcagtcatgtccaactctttgcgaccctatggactgtagccctttctctatccatgggattctccatagactggagaatactggagtaggttgccatttcctcccccagggggaaaggatcatgaggctcccataaatctgccccatatctttctgttatgcaggcacactcagcagaaaccacatcagcataactgagaaaaaataaacatgacctatatttaagaaaagggggtgggtggtggttgacagctgtccaagcacaggcctgaaaccaagatctcatcatcagggactaacttagtagctgaggcctgtttccattgcctggtttcctaactaaaacagatgttcctttagaaatctgattttccactgggactaaattcacttgagaaattgctagctggatgttcattttgttttaattctgaataaattattttcttcctttgtatttaggttattgggaacccaaattagcaaggttaaacaatggtggatcatacaatgcttggattgcagaaaaactttcaacggaatttaaccctgaaccttggatccaggtatgtcttactaacctgataatgcatgcatgctcagtcatgtccaactttttgcaaccccatggactgtagcccaccaggctcctctgtccatgggattctccaggcaagaatactggagtggtttgccatttcctcctctaggggtcttcctgacccagggattgaacttgtggctcctgccttgcctgagccacctgggaaggcccaacctgataatagttactactattgtaataaaaaatgacagtggtttaataatttcttcttgttgttcttgcaatgttgttaagggaaatggcaattactaggtgctaggcagcattctaagtactttacatactcaaaacctgtgaggttcagttcagttcagtcgctcagtcgtgtccgactctttgcgaccccatgaatcgcatcacgccgggcctccctgtccatcaccaactcccggttagtctagcaatatccagttttatagatgaaaaaaactgaggcacggagggattaactaacttcctaatgtcacactcaactagtttctggttgagtttggattcaaattcaggtatcctgtgttcaaatatgggttgcacctagccattttattagtttgtttgctgttattttgttctaaggaaagttagctgtgcattgacctcaggcagtgtgtgtgtgacttgttgacaaggatagtgctgctcagtggctttgctacattgcaggtagacatgcaaaaggaagtcctgctcacggggatccagacccagggcgccaaacactacctgaagccctactacaccaccgagttctgtgtggcttacagcttggatcggaaaaactggcgtatcttcaaagggaacagcacaaggaatgtgatggtctgtgggcaccactgtttctccccaagcctagggttactatatctttttaaaaaataccttttgggtgttataaatacagatggcatttttagtgttttatgaagaaaagtggtaaagtgatgtgtctgtatattataaactaaaaaaaaaaaaaccc

SEQ ID NO: 48166 - DNA, 2115 bp, Bovine  19866880497874
  misc_feature (1)..(1): n is a, c, g, or t
ntttgcagtgatatggatgacccaagagattatcatgctaagtgaagtaaatgagacacagaaagaaaataccatgtatcattatatgtggaatctaaaatatgacatgaatgaatgtatttacaaaacagaaaaagctcgcaatctttgaaaaagaaacttatgattaccaaagggcaaactttggtgaggggaggggataaattaggagtttggaattaacatatacacacacgaatttatagataaccaaaaaggacctactacatagcacagggaattctactcaatattctataataatttatatgggaaaataatctgaaaaagaatggatatatgtgtgtgtatatatggcaccctactccagtactcttgcctggaaaatcccatggacagaggagcctggtaggctgcagtccatggggtcgctaagagtcagacacgactgagcgacttcactttgacttttcactttcatgcattggagaaggaaatggcaaccctctccagtgttcttgcctggagaatcccagggacagaggagcctggtgggctgccctctatggggtcgcacagagtcggacacgactgaagcgacttagcagcaacagcagcagccctatgtataaatagaagttggcattatagagagcacagattttaaaagcagaagaaataattcatcttgagcagtgcctttcaaatatcttttatcccagaatatagtatcatattttacattgcaacccagtacccacgtgcatgtatgtatatgtttgtatgtatatatgtgtgtatattaatatacattatgttttgcaataaatattacacattttgtttaatatgtaatttttaaatattaatgaagcagtatttaccaattctatgtgcaatgcagtatattttatattttttattctttttaaattttacttatgacttaatcattgattttatgtcctctgattgattcgatgttcagttagacaactgaactagggaaagtgatcagacttctttcccttcaaatcttcagaaatatcagtctcttttagatttttaatgtgttaattaaaagtcaacacgttagtaaataatctacattgttctagggtactccttggctggcacttggaatgattccatggaattggaatttttttggaaagaggaaaaaaccttctgtaaatcaagtatttgaagaacttgagttacattttcttcactgtagttatcaagaaggaattaaagagcatttagtatataatataatatgactggtcagtttgctttcttcattaaaagtaaattctttattcggtatatgttcaagttgacaaatgactgaatttaacattatatatagaaattacttaattttttaaagaggtaaaatgcaaaagcacttttgtaaagctatacatctggtagaacttttcagaagtgatttttaaaggatgctgtttcaactggaaatgctataagattttaagtaggtttattattatttggggaccccataactgaaaaaatcttcatatacttaataatagattattttaactagagaataatgaatcatgaatctttcaggctctaataaagctgcactatatgaacatttaatccctttcctttggatcctgaaacatttaactagtacattgcgacccctgctgttgtgagaattgctgaataactgggaaaaaatatctacttgtggaaggttttgtgatttgaataactattacaggttaaggagaaattgtgctataggtcagctcttttaccatgtgaggctcttaataaaaccaaaatttttattagtactgttttatcacatgagtattttatttagaaattttgaatttagctttttccttgacatcagggacatataaacggaattgataaggaattttagaaattatcatttaaattgttatttgttgatttatcctgaaatcaatttgcttggatagttttgatcttttcctaggcatagagaaagaaggcattatctcgcaaaatatttcaaaacttttatttgggtccttggaaaacctagtatccaaagattgtaaaaatttatatctaagttcctttatt

SEQ ID NO: 48167 - DNA, 2338 bp, Bovine  19866880587059
  misc_feature (1)..(1): n is a, c, g, or t
ntgaaagggaagttgctcagttgtgtccgactccttgcgacccccatggactgcagcctaccaggctcctccatccatgggattttccaggcaagagtactggagtggggtgccattgccttctaaaagactaaattgagtctaatgactttatgaagctggttttattgtcagctcatcaaatgttcattgagagtctagtaagtgtaaggcacagtgctgagtgaaaactgtgatcactatgacaacacacttacatatattacataacacatatatgtggaatctagaaaatggtacagatgatcctatttgcaaagcagaaatagagacacagacatagaaaacacacgtatggacaccaaggggaggaggaggggaggaatgagttggaagattagaattgacatatatgtggatttgtcatatatacatgtacttacgactatatataaaatgggtaactaatgagaacctactgtatagcacagggaactctactcaatactctgtaatgaatgtatgagaatagaatctaaaaaagagtggatatatgtatatgtataactgattcactttgttgtacagtagaaactaacacaacattataaagcaactatactccaataaaaatttttttttaaataggattttagtctagaggaaacaaaacaatgtatcttaaacaggccactacttagcatgttagaaattagaagtgaacacaacacatgctgtagggacattttacagagcggatttctgcatttcccaggctttgtcaatcagcttgagcagaatgtgcaaagcaaatgagtgctcctctgagagcacttctacacaagtgtgtggagggtgttctggtggcagagcagtaactcttcctctcactaatgccatggaatgtgaagtgaaaaagcagtttggatccctatttgcaattttactcaaaagtgttctggaagagaaattcagtgtatggatcaatataaacacacttacggctgagaagtaacaggggcagaaacacacctggatagtaacagactcaggcttccataaaggaacctggggagaccgtccaatcctaaatggagaagggaaatcaatggcaatggaatttgccctgaaaactttggagcttaagttgtaagcaaaatgtaagccttgaagacagcattctgcttgcagaaatcttatcttgtgatgaaacactgtgttgggccctgagagctctaaccagccactgacatgctagggagactttcaggcaggatgtgacaattttggcagcactgaaagccctggtatgtttatgtagtcatgtccagtttacctgtgtcagatgagactttgacaggcctaagagaaggaactacatggggtcactagttagccatgccgctggaaacaccactagccctgccagtcaaagaaaaacacatgtgcctgccagaagtaacaaagtaatgaactttccatgaaagctatcagttctggacaatttggtatttttagagaaaagacttatgtatagtagggaccatgatcattaagacctgaactgatgtggctcatgtattcagaatgaaggtgagagttgctagtgaagaaatgaagcatcaatgcagaggatttgtgttctcgaaggagcagtaaagcacaaatagggaagtagacaagaacctacactttaaagcgtctagtgtcagagtccaaggattcttcatggcagtggtccccaacatttttggcaccagagaccagttttgtggaagataatttttttgtggactgtgatcaggggatggtttcaggatgattcgagcacattacatttattatgtattttatttctattattatatcagctccacctcagatcatcaggcattagaccccagaggttggggacccctgccttatggtaccaacaatctgtcatgattgcatagttttgactgagaaacaagggcttaggaagcctgaatatgctttacctacaatctatacttgtactcgctgtatcttagaaatgggaagataagacatatacaagattttcacacacactaataatccctaagggtccttggccaaacagtcctgagctaggattcaggttttgtttcattgggttttggttcattgtggtcttgtacatttccagaaatttccttagggccaatttaacactcagatcttagagttatagattttttaagtatgctttttacagcttatcaaatgagatcacacactttctcagacacaaaagcaaacaatatttgagtagtacctggagctaaaaacaaagaaatctctttttaaaaaaagg

SEQ ID NO: 48168 - DNA, 742 bp, Bovine  19866880731608
  misc_feature (1)..(1): n is a, c, g, or t
nttctccaatgcaggaaagtgaaaagtgaaagtgaagtcgctcagtcgcgtccaactcttcgagaccccatggactgcagcctaccaggctcctcccatccatgggattttccaggcaagagtactggagtggggttccattgccttctccggggctacagtccatggggtcacaaagagtcagacatgactgagcaactaacaccagcagcttaaaactgtatatgaatgatgagttgaaaagcagctcacatatttattcataaggaatttggccatatctttaatcatttaaaatataagcctaaagtttgggttcttttttagaactttgatatgagtaatagggttggttaatgcaagctaaatttgtggaagaatggttatcacaatagaatattcttgaagacatcaataattattttattaacttcacttatcgttcatatttataagacctggggtttctgaaatgcagttaaaaatactgttatttctagtaaaggtttgaggacatgagagatctattttgttgtactgtgagtagatgtcatataagcctttcaaatgtattttatttccagttcgaaaccttttgaaacctcctttaagaaaattgtctacagggagtatgaagcatattttcagaaagaaaaaccacaatccagaacttcaggtaagcctgaaatatatttttaaattttaaagataaaactctatggctaatttgatattcacatat

SEQ ID NO: 48169 - DNA, 928 bp, Bovine  19866880777685
  misc_feature (1)..(1): n is a, c, g, or t
naaaacagggcctggcttttatccgagtaattgaacaatggagagagcgaaagtggatgactgaggctcaacgtactccaagcaggaaatcttgggctcatggatctttatagacttaaaaacccagctttaagggcttttaaagagaagccctgcatttgggaatcttcagagagttgaaaacagatctccaggtgatcaatgcaaagtgaacgttttcagttacaatatccaattaaaacattcttgtacaattgaaggaaaggaaagaaatcagaagacatttaatgctttttaaatccagataagttttactataataaaaacacatgccaactccttgacttcctggcctaataagtcccaggtatggttgtgaagccagatccaaactgtaagaacaatgaaccagaaagtcttggtggaattatgaagtttctatggtcccatattctgagttagtctcagcagccaaaagagtgatttataaaacattggggaaaatgggtttttacctccaggctctaactttcaagtaaatattaagtatctcctggtcattagagattgcagccagtattccgattatatatatcacctcttggtaattaaacaaatattaaaaataaaagagtgagagttgttattatttaccatgtgtattttcaatcacagcacactattagcttctgtttatcacttccctaatctaggggaatctctctgtatggcttttagatcttcttattggtttgataaatagatctggtggattcagaatctcaaataactgttaagatatcattccccaccccaactgatggttgctcatctcactcttaatcatgcaattcctccttcctccccacccactcacagtaacgctgcttatgtgcttcgttgatctgaaggcagtaacatttgtaat

SEQ ID NO: 48170 - DNA, 1995 bp, Bovine  19866880799902
  misc_feature (1)..(1): n is a, c, g, or t
ntattgtagagttaaaaaaaagaaaagaatccatctgcaatgcaggacatcccaaagataatcaaaaataaccaaattttaaaaatttaaagaaagaaaatgaaggttaatgaaagtaagtatatcacaagttgaatgtaaactacagtatcagacaactctaaacagtgcataaaatggcttttatttcacatcaacttatctttcaagtaattacacagcctccaaattattacacaagaagacaagtaactggcattctcttctctccattattacttattggacattgtaggtctgtctggaattgagaaaataatacaactctcatgatagagatgatgttcagaaagcttaatatttcccaaagattctcatgtaccaattatgtgtcaagcattggtccattgttgaccatgtaccaatggtcaactctagacctcttaagatcctttcaatcaaaagtctattattttctgtggctactctaagaattattagattatatcagtatatctaaacccattaaaagtctttggaagtatatataagctcacgaaagagatttttttttttttccttctgacatctgctgaaataattccaatattctcagagttgaaattctttcccttgaagatctacttataacagttcattgatcaaaaatcatgaaacccttagaactctgctcgatgttatgtgacagtctggatgggagaggagtttgggggagaatggatacatatatatggctacatcattttttctatgcacctgagactatcccaactttggttaatggctatactccaatataaacttttaaataaatttttaaaaagaatggcaaaaggtaaaataaataaagttgatgaattaaataagaactaaaaaagaaagaaagaaagaatcatgaaaccctgagaaggagcctcggagttcatcttgttcaattgcagtcctctccataacatccatgctcagatttagcagttccagtgatgagggtttctctgttgttgttaccattttgagaaaactctttcagggatttatttaaaatcccatatttcagtgatctctacctacaagtcatagctctttcttcttgaagaggaaagagtaagtccagatagttttgaaatgactctatggtgtgatcataagcccagaacaatactagtttatgagtcctgccctggtttcccatctggtttagtatctgatccaaacttttcattgtgcagtaaaattttactgtaatagttgctttagaatcagctttaaacagttaggcaggtctctcctttgttcctctagcttctacaatggtcttatcttgtactgggtgagacccaagtggcactagtggtaaagagccctcctgccaatgcaggagacataagagatgcagttcgatccctgggaagattccctggaggagggcatgacaacccactccagattcttgcctggagaaacccacggaggctggtgggctacagtccatagggacaaaaagagttggaacgactgaaagggcttaatcacgggtgagacatacttgtagggcacagggttcttattcttatatgagactaaatcccaaagatgcccagtgatagctcatctctctatgcctatgcctcatctttcctcagtccttcatcattccctttcaaaaaaagttttctgataaaaacaatctgtacacagacatgaattgttaggcacagctgactccttctatctgacagttctgggggcattcagcactactgtgactggccacctggtaaagcaatcagttgtactgtgaccatttgcaagggctgcaaaatacaggaagccaccaggtcacagtcagctaagtgactgtgaataagaaatgtggcaaattacagtttaggttcatctgaaataagtggaagaaataaaagcagagtagtcctatctgtggaacaggaagagaacactttaaacagttgggta

SEQ ID NO: 48171 - DNA, 721 bp, Bovine  19866880932834
  misc_feature (1)..(1): n is a, c, g, or t
ntgaagcccgccaggctcctatgtccaggggattctccagactagaatactggagtgtgtagccatttgcttctccatcagagctttggagttttatccaaaaatttccagtgacaggatatttactgtttctatttaaaccaaatgtcatgtgggaacaatagtattaaaacagtaagaaattttgaaatagtttccttttgtctgattataaaagtagtactatgttcagtgtctaacatttggatacaataggaaagtgtaaaaaggtacattagagacattatagttgacacattgctgtaaagacttttagttgcccttttttatcttttcctctctctttgttataaaactgaatccacaatgttctataccctggcttttgtactaacaaaaacatcatgaatatttttaggctattaaatattctcatttttaacaattgcatggtctaccattttgtgaatatattatttatttaagtaatctccaatttttaaacatttggattattctcagcttctctcaattatagatataactgatagaaactcatttataaattattactgattgttttggacatgaaacaacagactggttccaaataggaaaaggagttcgtcaaggctgtatattgtcaccctgtttatttaacttctatgcagagtacatcatgagaaacgcggacggaagaaacacaaacggaatcaagatt

SEQ ID NO: 48172 - DNA, 2193 bp, Bovine  19866880984337
  misc_feature (1)..(1): n is a, c, g, or t
nttttaaactgcaggtgtataatgaatggaatgtagtaagttgtgacagtgaaatgaaaaataaagagaaaagcataatacctagtgttcactgagtatgataaatacttaaacacagaatctaagatctcaattggcttaattatttctgtaaaaatagaagtatttgccacaaatttaattttaaaaatttcatcctctttgacagaacttcacagaaattccagttcataaatgtattctgaggaaattatggatacatacaaaatcttagctacaggagttgtttattatgtgtgtgtgcgtcacttcagtcttgtctgattttttgggatcctatggactgtagcctaccaggctcctctgtccataggattctccaggcaagaatactggagtgggttgccatgccctcctcctggagatcttcccaacccagggattgaacccgagtctcttatgtctcctgcactggcaggcaggttctttacaggggaaaagattttgctccagtaaagtctgccatttggagggagaaagcaggggtttgggatcctgggaattgtgagtaatccttccccactgccacttccaaaggtgtagagggaatgggaccatgttccctgttggatttcactctctcaggctggccggtgggtttgtggcaaggaatgtaaagttgccttactcttgggagagctgcacacagagggaattcttatttcctatgtctttttgaaacttggataagattttcctcctacaagcaaatttgaatcttagagaagtttactctgtattcctccttcggtgcaattttccttatgtttagcccttattcatccacatgtctttctgggaattgttgtttagttgctaagtcatgtctaattcttttgtgacccctatggactgtagcccaccaagctcctctctctgtggtattttccaggtaagagtactggagtggattgccatttccttcttcaggggattttcctgacagggaccgaacctgagtctcctgcattggtgagcagattctttaccattgaaccagctggaaagcccctttctgagagtggggtttcagaaatattactgatctccaatctactgtgcttttgaaattctgggaatccactgttctgtaagcaggaaattatatattaaaagaaacaattattgaaggggtgaatggataaacagatgggtgaatggatgcatgagtggatggacatatggaagagatctcaataacagttgtttgttttttatgtctatggtgtgcttagcaccagtctcctggtaaactacagtctatgggatggcaaagaatcagacatgactgagcaacttcactagtgcttagtactgtgccagcccttgggaaaccatgagaataagaaccatgatttctattcttagggagcttaaaataatgttacgttggactacaagtcatcaagttaagtgcctccctaagttgaacctattgttaggaatggcttactccctgaaggcaagcagaatcatgctaagatcatgaactccacctgttcctaggcacaggaaagggattggaaaatattgagataccacaaatatactcctgcctatgatcttgactacttggttggaagtttatgtgctattcaggtagtaatagctaagtgatcattttttaattaattaattaatttggctgtgtcgggtcttagttgtggcaggtgggatctttactgacactccaaaggccagggctccataaagcaaggggctcagggcagaagttcttgcttatctaatggtaatagtaaaagtaggcatttttatttttttcaaataaccttcccctggactcactttgctccatatactagatacccatagttattttaggcattaaacataataaacagtgactttggtcatggaaaattctacgtccctacattaattctgacatacaccattgaatttccaaacagcttatcgttaatgacagaagtctgagcacatacttcttaaatgtatctttcaaggctccaaacagattaagggaaagagatatgaggtcttgctcctatattcagatcaaattactctaatatttttctctggtttatattggttgattgtgttaatcatgaagctgatgatttagatggctttcttctgtaaaccaagagt

SEQ ID NO: 48173 - DNA, 745 bp, Bovine  19866880993746
  misc_feature (1)..(1): n is a, c, g, or t
naaacttgaccctggggaacgtgggtatgattcctgcactacccaccctggaatgtccaggagtgattcacacttgcccctgtctgtcttcagaccacctcccagggaagtctataccccacctccctcccccttcctcagtgactgttatttctaagttgccaacatcgctcccatattatcaacattctaacttcgtgggaagggctgtggtgactttcaggaaagtgaataggaagtgcttttctaaacagcctgacagctgaggggtggctgcgagattataagaagtctgggccggacagacagcagaaagccagccgtgtcacaagagagatggtaagatcatttctttttgctatgggaagtggttggatggaagaggtttgggattgaggcaggcagataaggattcctaaaatgtggaatagcagtagttatggatttttatattgagtagccccatggagtttgtaagaattttgaaacctgctgcccgctttgatcttcccagcatccttttgagttgctatgcccatgttacaaatgaagctgctgtgccttccagagaggctaggtgtttgacctaaggtgcactgttggactggatgtggtctggatctgaatttctgtcgtcttgctccacagctactgtctttcttagcagcgcttacagggactctcttggagcaaattctggttaaccctcaactcttctccaggactgatcttctgtctgggttga

SEQ ID NO: 48174 - DNA, 928 bp, Bovine  19866881015032
  misc_feature (1)..(1): n is a, c, g, or t
naacaaaagaggttttagtgaacataagccttttcagacacccaaagattgagacctttgggccaaggtgccttgcgttctgctccatcaccaatatctttggagatattgactagagatgaaataatcatctgcaatgctagcagtgtttatattttaatttagggatctgaagaacagaaaagatatgccttgatgttagactatcaaataccaataatggttacagtgtgttaggcagtaatgtgcttgagaaagcactatgttatttcaagtttataataaccctacaaggtaattcctattgttcccattggaaacccagacaagttagtaatgtacccaaggtcatattaggaaatggaagatgtgggacagggactcaaaacttcctgacttcaatgaatatctgtgttactaacctctgtaacacaactgtgcccatacaaggtcagagtcagcgaccttgtcatttcctaggacaactcctaggatgcagcctgcccttaactcacattttcctagctctgagtcaggagtgttttataaatacctactgaatgaaggaatgagtgaatggctgttaacaagcctgggaaaggcattgaaccctaaggcaacatctctcaatttctgtaatgaaagcctgacctgggacatctccaatacaaacaggacactttcccaaagaagtcagggattcaagtccttggagccaggaatttatgtttccctgtccagaaatccctcccagatagcataaaactcatggactccctacacgactttcttcctatgccacgggccctaagctttactgtcctgccaacaattaggcgcagagaaagcagattgaagagaacaccagtttacatagtttgttagaataacttttgctggttatatttgctctgcatgggttcaagct

SEQ ID NO: 48175 - DNA, 1909 bp, Bovine  19866881063128
  misc_feature (1)..(1): n is a, c, g, or t
ntaaggaaatcatgatgtgtgtgtttgtgtgtgtgtgtttgaaaaggctaagagtagtggcaacatgcaaaattatggaaataagaaacaaaccagagaacagtaagactgctcaactccggaggggaatttgtagacctctgtcagacaaaatcataagacagagcccaggcagcaataccgtggcccacgaggagttacgatgcacagcccctgacaccagcttttaggacgtaacgtatgactctggagaacacaaacaagtgctcaacgaacatgtctaatgggcctaatatgtgccaggcctattccagtggatggacaaagatacatatacaacactagcaccctcaagaagctcagccactggtaaagaaggcagacacaaggaggcaattcaacaggaaacactcagtggtaaaaccacgtgcgggttactaggggcacagggggcgggcatttcatggaaaaccgaccgagccactcttccattcgcaagataccttcgctctaaaatgagaaaagaatagacgatgcctagcccctctggacagtaaaagcctacaaccctgtgaatgtgagtactgacaaaaaagtcaagtctccaaacctcagctcatactattattgaagcacagtccctaaccgcacaccaaaatgctaccagactctgagtgacatggagggcctggcacctggcttacctctggtgtggcctgagcaactttgcagactgtttccattcctcccagcttccagtgcccatcttcgctcacaaacacagacgacacgcagacattgttgtgtgtgaggtgtccctgggaaaaaagaacaggaagaagactgccattcccattttcttgagaagttttagaaaactaagaagtcatcacccccaaaaaaaaacattacggcaagccttcctacttgtggcataataaacagaactacaactttaagaaatgacaaattcaatgagccagcctaagcattatgaggttaggaaaaaaggaaaaacacaatggaaaggcttatcgccccctgcccagtgtggcaggttaataaagacacgaaagccacggcacagacactgtacatccccatctccatcggagtcgggagatacaggtgtccttacaggtaaatttacaagtcttttcagcccacgtcgtgtgcttcaaacgcctttaaaggaaaagtttatctttgctcccataaggttattgtattcattttctcctctaaattctttctcacctacattctatcacgaacccagatccacttcacctgaaatcttgtcagtaggcattaaaaaaattctgcctgaagaagaggaaaacggaatgataaggaccaccagaaatatcccacagaccacagaagagccaaatttaaaactatataaaagaagagtatagtcaaataaatgaaggaagaagaaaacgagaacgggggtgaagtatgtttttttctcaaaccagaaattatggcagtagataagcgcgcttgaaatactctacccatcagatccaatatgtacacattttatatataaaacactccaaggtatgtatatatttttttaaaggaaagcttggaatagtattagggtgtgtttccgcttgagaaaaataaaggcgaataaacacttagatatttgcttaggacacacaaagagcatctgtggcctaacacactgaccactgaggttgtctatggcaagaagcagggccctggcttcaaggacagggacttgtttccttgtctgcactctcatactattcaaactttttagtgaattcaaacatttttccaacagagaaaatattccaccacggtgcagcattaataattctacttatgtgtatcttaaaaatacttttaagagacaataaattcaaagtga

SEQ ID NO: 48176 - DNA, 1508 bp, Bovine  19866881069882
  misc_feature (1)..(1): n is a, c, g, or t
nagttagacatggctgagtgactaacactttactggccgttccttttctcgaaatatcaaatgtatgtttcttgaaaaacatatcttagggaaagaatcagaaatgcagcaaagatttctgttagaagatgtttatcattgtgttactcaagttagtaaaataatggaagaaaatttaacactcaacaatgggaaatttttaaataatgtaatgcatattgatgttgggaaagattggaggcaggaggagaaggggacaacagaggatgagatggttagatgggatcaccgactcaatggacatgagtctgggtaaactccgggagttgatgatggacagggaggcctgtggttgcaaagagtcggacaccaccgagcgactgaactgaactgatacaatgaagtagtagacatccatgaaataacaagttttcaaaaaatgttttatcacagtattgtatttaagtgaaaaattaagacataacactgtgtataaatatggttttaattatgtaaaagaaacacaaggacatacacatgcacaaattggagataaatacaccataaaggaaagaatgatatcacaagtctaggtgatgaatttgtgggagatttatatattcttctttgtttaaaatttttaaagactttaaaatacaattcatgtattttttcaataatctgtggaaatattatctgaagaaagatgatgcatcaggcccacatagaaaaatggtcagtgtgcctggcaaccatttttttctactaaaaattacttgttaattctaaaccgggagaaaaacaacttcaaattaatcttctgtaacaccactcccatagccaccttgactcaaactttgagaaattcaccaggaccacaccactcagctggcctcaggaatgcagatgtctgcgccgtttcccttctgccatgtggggaacatcatccccatatatccagagctgtaagcaggccaagtcctgtcattttttgtgggcagagggagggcaggagctacgtgatggcatgcacagaatcacgtatcatctcttgtgccatgacatctaccaactttcttaaggcacaaagccttcaacacactgttcattttttcctctcaagaatgtggccaaaatttgatatgtgtagatgtctgtttagactcccttcctcagaactctcctcagtcattgaaatactggtaggaaaagaaagctgatttacattgcagctttgttattctttgtattgaattctttcttgttattgtttatttggctttgaaatgttctccttttcagaaacgaacatttacataccccacaggtaggactataaattggtgtaatattggggggaatctcttaatcataaataaacacagacaggtgtacatgtaactttacctacatatgttaagattcttgaaagcacctttaagtatcatttaacaccgtaatatcatttcttcttaaaaattttttaaaaaatttacacccagtacaac

SEQ ID NO: 48177 - DNA, 1349 bp, Bovine  19866881250976
  misc_feature (1)..(1): n is a, c, g, or t
nggggtgagagatgaattggagaatgctttatgctttctgagagagacttaccattgcattttgggagaggagtgctccattctccagaggacatgcaccgagtggcttctgtgctgcttgggaggtagccctctgcacagctgatggagcaggaagagttgtaggtgaatttccccaaagggttgcaaaccagatgtccatgctcaggatgtttctgtgctggacaggtcacaactgaaaaaggaaaacaaatcagttctgctcctctctcaccctgtagcatgtgggaagaaccctggaaaccagaactactatttatcaaacgtcaggcaccaggcttcccaggaggcactagtggtaaagaacctgtctgccaatgcaggagacaaaagagacctgggttccatccctgggttgggaagttcccccggaggaagacacagcaacccattccagtattcttgcctggagaaccccatggacagaggaacctggcaggctacagtccatggagtcgcagagagtcgtacatggctaaagggattcggcaaagaacaggcaccatgaaaatgtgtctgcatttgttcacatcatccaaaccataagtctatgaagttggtactctactgtccttgttttacaatgagaaacctgggacttgagagttttcctccctgttgtcaaggtgccataactactaagtggtggatctgggattcaaacgcaggagaatctgatttcacagcttcagctcttaacctccttctgactccatatgctccagggaaggcaaagcatgcagacctgacaccaaaaccagctgggacatgaagtgctcctacaatctcaagtgaaggaaaagctgagaccacgccttaccttgctcacatttgaggcccttgaagccagggtggcactgacaagtgtagttgttgatggtctctacacattcaccatggctgccgcagggtgtggggttacaggcagctgtggaaaagacaatccgcgataactattgttgttatgcttcaatggagtttctttgaatttaggatcaatgatgtgtaacagggatgtcaccaatgatacagagtgtcagagattttaatggaggtgcttgatgaaatgcccaagctgagttttaagctcaaaaatttcaaacccctgatgttaatatcagaggtagagctgtaactggcacccgaaatagaaaattcactttatcacaaattctaaagagaattatcctactgcaaataaataacaagtaactaaaaagtgtgttatacgtgtgcatacacactatatataagatgggggcggtttaatcgctaagtcatgtctgact

SEQ ID NO: 48178 - DNA, 1710 bp, Bovine  19866881333757
  misc_feature (1)..(1): n is a, c, g, or t
nagggctgtagagatggaagtggcaagaaagctataggtgacttacttattttctaaaattaacaaataactacatttcttttcaagacttcttaccaacctacttgccactcttcaagaaaaaaaaagaaatgatctcacaattttatttcttcccctgccaagttcctgttcattctatatgggccaattccatctctctgaagaaactataattctctcaacctctcctaaacattcaactgaattgctcctcccaggcattcccaccaaatcccatccatactttgtttacagtaccttttgtctccagatttttaactggaattcacatgtacatatctctttacaccagtagattgaaatcttattgtgagtaaaaccaaaagaaaagaaagaaagtgaagtcgatcagtcatgtccgcctctttgagaccccatggactgtagccttcaggctcctccgtccatgggattttccaggcaagagtgctggagcagattgccatttctttctccaggggatcttcctgacccaggaatcaaacccgggtctcccgcattgcgggcagacactttaccgtctgagccaccagggaagcccaaagcctcattcattttcagatctgtagtgcctatctttatcatttcatttgtagataatctttgagcctaaaaacaaacctgttttggtgtttctggagaaaactacatgggccctatctcattggatggttgtaaaattagattaaataatacacaaaaattactttgcgattctaagcattcaatatatcttagattcaattgaatagccatccagtttagcccataatgctgacattttgggggttgggctttattaagtttaaacacatttgtgaatcattcctttctttttaggttcgttttaaaaatttagcatccagaccatattctcttcatgcccatgggctttcctatgaaaaatcatcagaaggaaagacttatgaagatgactctcctgaatggtttaaggaggacaatgctattcagcccaataaaacttacacctatgtatggcacgccactacgcgatccgggccagaaaaccctggatctgcctgtcgggcttgggcctactactcagcagtgaacccagtaagcatagccattgaaaatttttgtcgttcccctaagttgagtccatcaaatggaatgtcacgatttcctagtaaatatctgtcctgctttccatgaggcatgtgtaaggattagggtccacagtcaactgctaccaaaaccagggactctgcatgcagatcttcagaagacagtgagaagtggaaaggaggaaggattacttaaatggttagccccagttggagtgactgctttacagaggaagatgtttatctgcaatttccttgaacaagtattagctttctcctgctttttctttttttaaaataaaagaactataaattcaagattcccccattttgatggtggtagagagagcatagtcatagatttcaatttctatcctatctcttactgtgtagccctaggaaagttacttgatctctctcagccacagttcccagagttaaaaatgaggtaacagtacatagcatgtggagtaggcacttggtaatatttgttcaatcaatgaatttattttttaccatataggattgctgtcagaattaaataagatactacagggaa

SEQ ID NO: 48179 - DNA, 1211 bp, Bovine  19866881450742
  misc_feature (1)..(1): n is a, c, g, or t
ntgattttcttccctggtggattgcactgaaagagtaattcattgataagtgatttaaaacctgtcagtgtatctccaaggactcaggctacatttttaagcctatgagtttcctcctgaaatgctgtggcagcagaaatttctccactccaccccatggagcagggccatgtccatggtgccatggtctctgcaagctcatgttaacactcagagctcatgaggatgtctgtggtctgcctctttaggacactgtgtttgatcggctgtagcaatcttgtggtccaatttttatttctgctctaaatacacaagctttctctgcacatttcacgtgagtatcttgaaggaatccagggacatttttctttaacctgcctgaaatttgttttggcagaagttctgaaggccaaagtcttgagaggtttgggttttgttaaattatagacataatttcagtgaggttaaaaagctcaggcaaaaattggagtgccttcccatcatttctgcccttgaaactctacccatccagcaaggcctgattctagtgatgtctcttccatggagctttcccaggtcatcagagctggaagggcattcttctctccccaaggctatgtgctgggatgtaaagggaagctgggcagataggggttagaatcccagatcttgctagtgggtaaccttgaccgagtttcccaacttctctaaacctcagatttctcaactataagtaatagtgaaaatagtagtatctaacattttgggggcttccctggtagaccagtgctaaaagaatttgcctgccaatgcaggagatgtggacttgatccttgggctaggaagatcccttggagaagggaatggcaacccactccagtattcttgcctgggaaatcccacagacagaggaacctgtcaggttacagtccatggggtcacaaaagagttggacacaactccaagatggaacaacacttgttgagtgcttactgtcaagtaccatgttagacattttacatctactgttttactcaatcctcttgggacaagccattttactatgccttctttatatatgaggaaaccaaaggtaacaatgaaatgataattcatagctcactgagcaatgaagattgaatttttaaaaaatgtggatcaaggtatcattgaacacttataaacatgaggttctgctccattgtactaat

SEQ ID NO: 48180 - DNA, 779 bp, Bovine  19866881504559
  misc_feature (1)..(1): n is a, c, g, or t
natgaatacagttaaaggagactgagataccaataggataaaaggtttccagattttagcctgaaagtgatcaagattttaagctgggtgtctttcagagagatcactctgtacacagctggtggatgagagaaggggtgggaaccaaagcagacaatgggaataagagagaaagggagtttaatgcaataattaagctaagaaaggttgatcttgaagcaatgtggctgaaaggtctaagagacactgaggaaggaggactgtcagttttgttccgtgagacaatgtggtggataaaggactggaggaagaggatgtaaaccaagaacaagccctgaggctacccaccatcgtgtggtgaaatagaatggtcagagaaaagagaaaagagagcgggtaaggttacatcagccacgggaagagagtgtttcaagatatcagaagcagttagttataccagatgctactggcagcaactgagtgggcagcaacacaatttcccaacaagaagaatagaaaaggagaaacaattttggataatgtttagtttcagggactgattcattcagtaaatagctgaacacctactgtgtatagaggattatgccagactcgaggaaacatagtgcccatctttgaagagcttacagtttgggaggtggagaatcaaactgcaatgaaccatgataaagagctatactagatttatgtacaagatgaactgcaagcctagaggaaggaaaatctaggtttgcctgaaggaatcagggaaggctgat

SEQ ID NO: 48181 - DNA, 870 bp, Bovine  19866881809220
  misc_feature (1)..(1): n is a, c, g, or t
nctgagtacttcactagccttgcagagttccaagcacttcaaactgataaactcaattaattctcactgtacccccataaagaaggtacttttgttataacttccattttcagatgagcaaactaaggctcagagaagttaactaacttgcctaaaacttccagaggataaatgatttcagaaaagattcaagtatatgcagcatggctgtgagttgacacttttaaccactgcactatttattacttgttggcaatgtaataacctggtgcaagaaaagcacccaagacctgaaagtattacactgatctttaatgttttatgcatatgtataaagtagaggttcttaaccatttttatatctcaactatactccctccaccctcaagaatctgatgaatgctatggacactagcaacttcatacaacattctagttaaaattataaatggaattaaacttaaacaactcaaaagcatataatgaggggactgtattcagcttaattattaacttacctaagcctggaaaaaggatagttgatagttaaacactagcagcagtaggcacagagaaggcgatggcaccccactccagtactcttgcctggaaaatcccacggacggaggagcctggtaggctgaagtccatggggctgctgaaggtcggacacgactgagcaacttcacttttacttttcactttcatgcattggagaaggaaatggcaacctactccagtgttgcctggatgctcttgcctggagcatcccagggacaggggagcctggtgggctgcagtctgtggggttgcacagagtcggacacgactgaagtgacttagcagcagcagcaggcaagtggttaagac

SEQ ID NO: 48182 - DNA, 942 bp, Bovine  19866881833764
  misc_feature (1)..(1): n is a, c, g, or t
nagacagcaaatttggttttctttgggaggatctttggactttacacacagctaacatgcctgcctccaaaacccaagctcagatcaccagactgaaaattaacaagaatttgatgagagcagttctgcagccaacttctcttgcttctaaatttccaaaggaaagcaaatcacttaaaatatttttttcaagtcagtataaattttctaggataaaatatcttcccaggtttccagtattttaagtcttgatttttggcttgaatttctatatttcagtaaagtttacaatttgctaatgctgatgtgtgataatctaataaaatctggccttaaaagttataggcccaatttactaataaaacgtaattcaattttccttgggaaatgcaaatcattagtatccaagcagtagaactgaattgaattcctttgccttttttaaggttaaaaagttttctctattaaaaaggcttaacaaagaagtcaactaagactaatatataaggatttacttataggcataatacaatagcatcatgtatataaacatttacattggttaattagctaaataaaagatttgctggagacattaatccttgtagactgagattatcccactcatttcatcctcattttttgttcaactggattaatctgtagagaacttaatgaactacttaatacagtttaatggtagtgaactagttacttgatgtgttaataaattttagcaatttgtctccaagaaatctaaacaccaattttcagtaaaccatatacagtgtattaattcaaaataagtaaacaatatactgtattgtacaacaaaatctacatatcttactctgaattttaataacatttactctaaactttctaaagcatagttcactgttagactaacatatctgcttgccatttggaggcagtaatggt

SEQ ID NO: 48183 - DNA, 772 bp, Bovine  19866881844523
  misc_feature (1)..(1): n is a, c, g, or t
ntttatagcatttccgtatttgtaaggacccatatagtaagatggttcggtggatacctaaaatgatgtaagaatagctcttacaatgtacaggtcaagttttttgaaatcctttaaatactatgaaatcttctctgaagtcaaaagtgaaaaataatgttctgacttattaaataaactcattaagtgcaaatttatgttgaaactgaatatataacataatccaagaaataaaaaaactagcttctttatttgaggagaaggagaggtttgagctttcaagagcattaaactagacctaatttgaacactgatggtagtacatgtgcatgtgcagtcactccctcaccctgcccctcctcatatgcacacctttctcctctcagcttattaacattctaaatctttctcccaggtttggccttgcaaccacttacttgataaaataggtcactcagaaaggaagaacaaccaataaaaggaattacaaagacaacaagattaaactgattgccctgttttcatacactgtagctgaaatctgcaaatatgcagttggctgtgttttggcatttaacagcatgcgatcagtaaggaggaggaaattttattctcattaacggttgcagatttactgcagtgaaaaagggctatgtaactcgagatgtgacagtacagaaagatcaaagccttggactggaaaccaaataaaccctctggctacttcctgcaaggaaaattcactttggcaatgtaaaacagagcccagtta

SEQ ID NO: 48184 - DNA, 1528 bp, Bovine  19866881846003
  misc_feature (1)..(1): n is a, c, g, or t
ntgggagtgtttatacccccagtaatcttgcataaggcctgatgcaaagcaggtgctcaaaatgtatctggtgagtgaattattttatcacagactgctgatgacctgtgttggcccccatctctccctcagatataacagtctgtgcccatgaccacatcagttggcatctgattggaatgagctctgggccagaactgttcaccatccatttcaatggtcaggtcctggagcagaaccatcataagatctcagccatcactctcgtcagcgccacgtccacaaccgcaaacatgaccgtgagccccgagggaaggtggaccatagcttctctcatccccagacattttcaaggcaagaaattcctccacaagtcttgcttatgaatgtaggatccttctttcttcctacctaggcactaactctctcattctccttacaagctgcccacgctccagacataacatttcttggtcctcaaaaacaaaatttagatactttgctcttagacttataacttgttagttggggatggaggaagtagaaaaattgacaaatatttttaaaaaatgatgcaaaagccaacaagatctctacttccttgaaaggagaaaagaggaaggaaacaaaaacatatctgcagatattctttcttggagtattcaatatgcagctaaaggaaaagaagtagatgttggagccagtcaaacttctgtaaatttatagaaagaccaagttatagacagtgaaaaagttttaacatgaaaagattgtctttcataacaagacgagcacaaagccttgcccacagaggaactcagtggatgtgtattgactggaaaaaacagcatctaaccagctgaggattttaaaggacatcagtgaattctggtgggaaaaaaaatcaacttaggttgttatatgctgtcaggtaaacaaaataatgctctactgcacattgttgctttaaaactgttaggagaaaggtttctgtacataatagtaaatatcactataggaaatcattgtgttaccaaaataatgtgtataaaagcaagacatacaaaaaagagacacttctgggatcatttcagtttttgttcaaactgagtggtcaaaattatatttgaagtaatgaattgtcacaatattcctagaagatagagtcccaaataacaatgaaataataaaactaacattactgagtttaagtacttttgtctttttacaatttcatacagtatatattagtattaatattatcttaattttacaaacagatgataggaaaaatgagaaattgacaagatctaagtcataaagttttaagagtctggaaattacacaaaatttttctcccttgagaagtacaaagaaaacctttccaattttttccccctaacccatcctctctctttcctttgctttttattcttgccttcctcactgtactaaaatagtttcaaaccaaaatattcaaaagttttctaagtactatattcactgttattacgaaaacttccacaaa

SEQ ID NO: 48185 - DNA, 861 bp, Bovine  19866881917962
  misc_feature (1)..(1): n is a, c, g, or t
ntttttttgggagaaaaaaaagaactacagtggctactgtgtatcattggttaaaatctctcaaagccatcctatctccctaactcctggtgagttggtttcctagagtgagagcttttcagaagcagccctttttttccagataagtgaactgagcccagagagacaaccacttgctgatgaccacacagcgtgtaagtggcaaacgggacacaaccagacctcctggctcttgctgctcctattgttagaccctatagcgactcttggctgaattttccgtattattccctaagtaactcaatactcaatggagtaatgatttggtatttccctcctgttccacaaagggcaacggcaaggccttcagatctgaagaaggatgaaaacccgcacctctcctgacagtttatggaagatttacctggaaagccagtgacctctgactcccaggctagagaagtggttctgagtccattaaaattcatgctcagagtctgatggttcataagggagctgctgtaacagaaatcattccttgaggtcacacggtgcgttaacccccttgctcctcgtcacggtgatgacggctcagataaacattcatggatggaatgaatcctcagctagaggagaaagtctatctgggaaaaggacaaacgaccttccccctcaatgctgcctgatatggggagacagtaaaagaagagcaaatactgacagaaacctgataatatttgcctgtctagtagtcaagacaacatccagacattctatggccaagttgagaactggaagaaataaaaaaggaagaggagcggaaggaggggaaagagagagaaagaaagacagaaaaggaaa

SEQ ID NO: 48186 - DNA, 560 bp, Bovine  19866881924285
  misc_feature (1)..(1): n is a, c, g, or t
ngaggacgtgttcactctaaaaataaagtggtttaaccctgagtgtgtgattggccagtttgagtggggcagactgacagatggtaaagagaggacctaggactagcctgtaccctctggagagcctccaacatgacgatttgcttcctggcatcacctctagcacaagaccatggaccacgttgctatcaacaaaatagctggctcaccatattcacactccggtccatagaatccagggtaacaggagcaggtgtagttcccaatggtctcaatgcactctccttgcttgctgcaggacatgtcctggcaggaggctgcatggatacagaagggtcagaatcacaggcattcttaagaggtacaaagaaaagctggtttcttattccaagtcttagccccacttgagtaacctcgagctagccagacaacagaaaaccacagcgtcccctggagagccagcctgttccctgtgaagtgtgccgtaggagcctgctggagcattgcttggcttctatttttaaaatttttgattagaggatagtgctttacaatgttgt

SEQ ID NO: 48187 - DNA, 1097 bp, Bovine  19866881972479
  misc_feature (1)..(1): n is a, c, g, or t
ncatgctgctcagaggcttcagtcgtgtctgactctttgctgccccatggacgtaggcccgccagtctcctgtccatgagattctccaggcaagaataccggagtgggttgccatgcgcttctccaggggatcttcctgacccagggatcgaatccacgtctcctgcattgcaggtggattctttattgctgagccaccagggaagtcccctagtggcctttgggatgattcaattgtttttccaaagtaagaatttcttggaaaaactttttccaaagtaaaaatgggtacgaatggagacactaccatctactgcgtttctcttttgtaattgaccttccacttggtgcttacccactataacctatcaatacacctacctaatagtagaataatagaataactaagcttttttgagcactaaatatgcaccatcaagcactgtctgaggcactttacatgagccatgatattgaatcctcaaaaggcctctgggaaatagattacttttgatcactctttatacctaagggatctgagacacaaagaggtaaatggctcctagcccagggcacaacacattatgaggaggagcccaggatgctgctaaacaacctacattacacttggaagcccaccccaaggaagacttatctggtccaaaatgccagtagtgctaaggataagaaattttagtctatcaactgacattgacttaccaaaagtgagagcagagagatactgtgacacaatcatgacttcaagagttcttttgatccaaagattagacttgaaaatgcttttctgggggggagggagggggaggtacaaaattaattatagaatgaactcccaggctaccagatacccagatcattctacaatgatgtgtaaagtggcatcataagatgtttagattaaaggattataatcttttgccacaaggtttatttcaaagaagtttgcccaaaggaataaatacagaagttaagattttcatcatttcagtcaaaaagaaaagccaggttttaagcagtctgaatacaataagagcttgcacagatcttctatggaaggagttttgcatatctgttca

SEQ ID NO: 48188 - DNA, 848 bp, Bovine  19866882041918
  misc_feature (1)..(1): n is a, c, g, or t
ntcccagcacaccaaagacaggaggccagtctgcaagagggtttctgtcaaaactgctttggtggaaactttgtggaaactaaacatagattgatttcaattaaggattccctggtggcttagagggtagagtctgcctggaatgaaggagacctggttttgatccctgggttaggaagatcccttggagaaggaaatggcaacccactctagtattcttgcctggaaaaatcccatggatggaggagcttggcaggctacagtacatggggtcgcagagagttggacacgacggagtgacttcacttcccttaagggttcagaattgattcaaacccacgtctctctctctctaagagctctttagtctggggactttttccattctcagactccaccacttgtcgtagtgaatccaaagtcattttgtcatatccttgacttagtcctaaattaagaataaaggagaaatgttcatgtagaggaaatataacaaaggagggactttcctacaagatctttgaaaaaaaaaagaatatttgcataaaccatttttaaccagcgtctttgtgtctttcttttctgaatgctttgttatactcccttgcatttccctttctgtccctggaccccagctagtcggagaccaaaatctaattctgtttcactttggaatcttcctggctccaccctcattatcatgcttgagtgattacatctattgacctgtctccctgcttccgtttctttccactccttaacccctaggagcgctaatcttcccagaatatcactgtaattctatcctctcttgctcaagctttcccagaaactaccaaataaacttc

SEQ ID NO: 48189 - DNA, 1132 bp, Bovine  19866882146614
  misc_feature (1)..(1): n is a, c, g, or t
nactgaactgaactgtatactagggatatagcaatgaacaaaaccgaccctctgttcctccttacacataactttagtctatcagaatcacaaatattaaaactggctagacatttggttaaaaaaaagaagttggcatactaacccacacatcaaagtatatggcaggtgttctacacatatgccttggaattatagatagggcatgatatcttgattatatttgttttacactagtttattacttgtctaaacttatacaagtttagatgtttattaagcacaaaattttataaaaattcatttatgccttttgcaatatcttcctatctttaattctataaatttaattctagcattgggccattatataaacagtatacagctaatattagtacaaaaattctcacattcttgaagttctgccccaccccccttcctaatatacttgacatacttgtaaaatatttcttagagtgctctggatttctaaattttggcttgacagttctctggcttgactggttaactcatacatcatgtcatcaaataatctcacagtctgtgaaaacaaagcaggtcataaacagcagtaatagaagtcactagaaaagaaagacacaccgttcaagaaaaaaattgacttgattttgcattattaatagccacaggatattgtccagtataacaactgtacctaataaagttaataatgtgtgtgtgtatagtattttttgtatagtgtttctgcaatataatctctttgaaaaatacaaagtcttcaacaaaaattgatgtcttccatttctgtaataatatccataaagaaatcactcaaagttcactttctggtgttgtaacaaaagtgctactcttacacttaaataaataaaagatgatgatcttaaccaatgaacatccatgtgaacattaaaaggatattttctggtagtggtaatgaatctgtgttgaattacctatttacttgttttttatccagtttccatttttgaccagctcaaaataccattcctagattagagacacagtacgtaacctcagaactaagtgtttttgtctgaaaagttagccaaattaagatctaaacaagttaagtggcctaaacactaca

SEQ ID NO: 48190 - DNA, 1718 bp, Bovine  19866880360828
  misc_feature (1)..(1): n is a, c, g, or t
nctgttaagtgatgggaccggatgcctgatcttagttttttgaatgctgaattttaagccgctttttcactctcctctttcactttcagcaagaggctctctagttcttcttcactttctgccataagggtggtgtcatctgcatatctgaggttattgatatttctccccagcaaccttgatttcagcttgtgcttcatccagcccagcatttcacaggatgtactctgcatataagttaaagatgagtaaaactgagttttggaaaggttaagtaacttacccaaataaaaatgtgagagctgttaccattacatcagctttttccaacctctttttgacctcgtggtggtggtggtttagtcaccaagtcaaatccgacttttgtgacctgctgtggactatagcctgccaagcttctctccccatgggatttcccaggcaataatactggagtgggttgccatttccttctccaggggatcttcccaacccagggatcaaacctgtgtctccagcatttgcaggcaaatgctttactgctgggccaccaggaaagcccttgattcatggacccctctcgtaaataaatatactactgtaaatccttagggacttttaatcatttcagcatttatacatgtgtcttctttttgaaaaaattggttccttataggtctgtattattaagcagcattctataaagatcatgctacaatctttataacattaagacaagtgttgacttgtccccatttaatttgtgatataaaatgcagatttaccttaaattatttatgaaagaaaaaaataagtcaacttcagaacagagttttactatgttgtaaggcatcaacaagacagaaacctccttttatgaacggatgtttagaattctaaattttatgctgaattttaaaaaacatataattgttgttctaaaccataagccacaagaaaaggtttccagctgatgtttgcaagcacttctctgcaaataacacattgcaggtgtggagagtcattattctcaataaatgaaaagcgaaattgtatataattgtcactgtattttctatttttaactgtagttttgaaggatattttggagtaccatatcagacctttatcagatgaatatgacttgcaaatctggtgaagatcagtctgaagtagatttgctgatttattatcatatctttcttcctggttagcttgctgcatttctgtatcaccctgctgtatactttctactgtcaaataatggtgtatgctacataatctattgcttggatgcaaacagccaaatcatctcagcgtgacccggaagctcaccctggattgcttggtcaaagagataacagggatgatcaagctcccctcttctcttgctgggagtggctgcaccatggggctaatggaatcttcccaaccctggaagctgctgctgctgctaaatcgattcagttgtgtccgactctgtgcgaccccatagacggcagcccaccaggctccatcgtccctgggaatctccaggcaagaacactggactgggttgccatttccttctccaatgcatgaaagtgaaaagtgaaagtgaagttgctcactcgtgtccaactcttagtgaccccatggactgcagcctaccaggctcctccatccatgggattttccaggcaagagtcctggagtgggttgccattgccttctctgaa

SEQ ID NO: 48191 - DNA, 1155 bp, Bovine  19866880417096
  misc_feature (1)..(1): n is a, c, g, or t
natgctagagacggaaagtcagctgaaactagcccagatggcagcactgtctttcatggttcccctacattcatgcatgcatgcaaagtcaattcagtcatgtgaattgtcccaaagagtcctgtcactctttgcaatactatgctatagcccaccaggctcctctatctatggcattttccaggaagaatactggaatgcattgccatgccctcctctaggggatattcctgccccagggattaaaccctagtctcatgttgcattggcaggtgggttctttaccactagcaccacctgggaagccctacactaacctacacatctataactcattcctttgtaactaaactctccttgaataatcttaaacccataatctgggtatgtcattttcctgttgagactctgtctaatgtatgttcctcactcaagctctgctcttatagtgtactatgaattaatattttatgaaccttgtaattatcttgtgaatcatccaatgatattgcattgcacatttttacattaaaaccattaattatgtagatggaaatatttctcttcaaatgcttcattttttgcataactgttttcaccgcaaaaaataaaagtggtcctgggctttcttaatttccgtgagaccctaatctgcaaaactttttccaacagcagtgacacatcacgattcagaacatgggctttggggttagacccaagtcccagctcacctccttgctagctgaatgaccttgggtcaatcactttctctagcagccaaggaggttccagttggtccttctaaatttagatttttccctctgataatatttcccatctcagtatctgagcccagcccctgtattgagttgtggccccagttgggacagcaccctactactgccatataacacactaagtcttgtctctttaaattgaagttctcagggacttccctagtagctcagacggtaaaggaatccgcctgcaatgcaggagacccaggttcgatccctaggttagggaagatccactagaggaggaaatggcaaatcgctccagtattcttgcctggagaatcccatggacagaggagcgctggcagagtccatggggtcacaaggaatgggacatggctgggggactaaacacaca

SEQ ID NO: 48192 - DNA, 1188 bp, Bovine  19866880488393
  misc_feature (1)..(1): n is a, c, g, or t
ntggaattctccaggcaagaatactggagtgggttgccatttccatctccaagcatgtgtagtggcatccagtgaaggcatggcatagcatacttaggaaattggaagtagttttctgtggctgaggagtgccagttcagattcctccagcagccaggcagatgagatatataaatgaaagtggagaataaagattgatgggatctctggtacccaccgttactggagagccctagtatgacttgaaagcatttcaaccaagctgtttaaaatacatgaacagggacagtaaaacatgacttcaggctgggcttggctgatggactgcctagtcacattctgacatgtgttggtgggggtgtgtgtgtgtataggaaatgtagttggaatggagaccaagcagagagtataatagaaaggaaagtcaaatctatgttttactaatctaggacagatattgcattggccaaaaaattcattcagggtttttcataagaagttacagaaaaacctgaaggaactttttggccacctcaatattatcaggcatatatcaggtggagatatgagttacagacatgaagtctacagagtctaggcttcttttcccatgtattgctcaagccaagatgaatgacaaccacgccagggccaaacggcccttgcaatttctggctaagattgagagggctgtaaagttggagaagagagtagattctatacctgaaaaatcaattaatgtctctttaatggtcatgaaggagatatgtacaaattccaagtcaatctcaagaattaatcaaccaaggcaacaggacctgtgtctcagtagataagcccgcagggtgtggttttcacaggcaatcctattttaccataaaacaaggaggcagggattcatgtcttaacctcctctcatgtggcacgtggggaaaagactcctgtccaatgaataaacttgaggagcagagagagaagcatataatacacaacagtagcaaaaaaaaaaaaaaaaaaaaggaagctttgtgtctcattcaatgagccagagctttgaataaagagggaagatcaatgaataaaaaaatcaaggttcgagaaggtgagaaaacttggttagcaaagtctcttctaagcagaattgaagacttcttaaaatgtgtaattctacccgctgtaattttttat

SEQ ID NO: 48193 - DNA, 706 bp, Bovine  19866880511198
  misc_feature (1)..(1): n is a, c, g, or t
ntctatcctccttttctctggcctttagtttaagattattgtttttataaaaatgagaactatcttttccatcactgctcacagagaaactactgaaatttctagtcatttcaaaaccatttgtctgcttcctcagccctcatccaagtcaaatgtgtcttgaattctggcagctggaagcaatctcagaaggactgaccatcaagattagattcagagcaagttatacatgtcagtattgtagtttataaagtatcttacatgtgctctatgtaatttgagccttagaataatccagcatcacagccattagcattatcctcaatttgtatctaagaaaaccaaatctgagagagttaaatgccttaagacagaaagtaatggagctggaaattaaacttagaaatttttttcttaccccaaactgcaagcttatactacaatactacattaaattaaaatatctaactcatctctgtattaaatcagttaaagccaactgattaaccacaatgaagaagatactttttattttttatttgcccatgttatataaactgtttcagagatttaaaaaataaatcctcaaaggcaagaattacatagaaaatataaaatactttataactattaaaaatacatagaatttctattcttactacataaaaatcttttaagatcaagaaaatattctaattccattata

SEQ ID NO: 48194 - DNA, 1045 bp, Bovine  19866880594161
  misc_feature (1)..(1): n is a, c, g, or t
nctgcttctttgtctcagctgggaaaggaggagaaggcagtgtcccgagtagcattgttttgttccaagtttaaggtgtttgaagtagagcacccatcagctcctcggtctgccataaaaaaaataccacagactgggtggtttcaccaatagaaatttgtgtcttacagtctgcaggctgcaagtcttaagaccaaggtgccaacagcgttggtttctcccgaggcctctcttattggcttataggtggccacttcctcatgggcatctggtgtttctccctcttcttgtaaggacacacggcctactggatttgcagtccacatttataacctaatgtaagcttaagtagttctttaaaatggcttccctggtggctcagagggtaaagaatctgcctgcaatgcaagagacctgggttctatccctgggtcgggaagatcccctggagaaaggaatggcaaccgactccagtattcttgcctggacaattccatggacagaggagcctgcccggctacagtccttggggttgcaaagagttggacacaactgagcaactaacaacaacaacaacaacaaaatcttagtaatggggcaggactctgacttgaaccctagcctattttaagctggagcacaaactatagaactgccatgctacactgcctctctccctacactccaagacaataagtactgagaaagcatatgctttttttgttcatctgtgtttttcacaataatattccctaatcgagcattctgtttatgcataatcaccaggaaaatgtaaaggtagaaagatcaggagacatcagctcaggctgtgtaaaaatcagccagcctgatctgttatcacaatggacaggaaattactagaagttcaatatcatctgtgggggtctactttgggcattatgttaccttaaaaagtatccttagaactctaaacacatccacagacgttaaggacttgaaattttcatgacatggattgtattttccttgacaactcctcctggcataaagaagaaggaaaggg

SEQ ID NO: 48195 - DNA, 2988 bp, Bovine  19866880628576
  misc_feature (1)..(1): n is a, c, g, or t
naaactgttatttttaacctcatacaattgggaaagatctaaaaatgtaatagcttccatggttggcaaagtccctctgctaacactaattcaaataaaagtgatgacctctgtcatatacttttgccccaaatcttgcctttcctactttactacaagctactgaaaaggtagcattaaaatcttttctaccacctattttcttactttctctgaacttaacacccatactccctaaactcttgatgagaaacaaggtaaagagagaaagaaatcaactagaattccacttgccaaagtttagtcctccaagcatttgacatacaagagattacctaatgtcattttttgtaatttttttattggagtatatttggtttacaatcttgggttggtttctgttatacaatgaaggaattagcgatatgtatacatacatcccttccctcttcaacctccctcccacaccccaactccactcatctaggtcatcacagagcactgagctgagctccctgtgctataacacaggttcccactagctatctagtttatacacggtaatgtatttgatgcagaaggaaatggcaacccactccagtgttcttgcctggagaatcccatggatggaggaacccggtgagcaatagtccatggagttgcaaagagtcggacacaactgagtggctaacacacaatgtatttgaaagtcgcttagtcatgtccgacgctttgcaaccccatggactgtagtcttccaggtttctctgtccagagaattctccaggccaggatacttggttcccttctccaggggatcttcccaatccagggatcaaacacaggtctcccacactgcaggcagattctttaccacctgagccaccagggaagtggtagtgtatttatgtcaagccaaatctcccaattcaccccatgcctcccttttcccttctctatctgcatgtccattctctgtgtctgtgtccctattcgtgctctggaactaggttcaccgataccatttttctagattctacatacatcaaaggaaaccataaacaagacaaaaagacaacccgcagaatgggagaaaatatttgcaaacaaagcaagagacaaaatgtacaaatagttcaatattaaaacaaaaaaggaggccaaccaaaaaaaaaaaaaaaaatggccagaagacctaaagagacttttctccgaagaagacatacagatggccaagaaacacatgaaaagatgctcagcatcactaattattagagaaatgtaaatcaaaactataatgaggtatcaccccacatggtcagaacagccatcatcaaaaaattcacaataaatcctggagagggtgtagagaaaagggaaccctcctacactgttggtgaatggatacaagcactatggagaacagtacagaggtcccttaaaaaaacaaaaatagaatgaaccacctagtgtcttaatatggtccttttgaaggcagggatatctgaggacttgagtacttacttggactgtaagccctggaagcaacagtaagggggtgatgagaatgaggcaggaaaagggtaatcccaaaggagcagttctgagctggttaatgctgtgggcagctgggggtcagccccactgtggccctgtgaggaacagtattgcacctcaggattgtctctatgaaggagaggtagcaaggatctttgttcactgcctcccatcccttatcctttgagggttatctagaggcttgctaactttcctgctattccaggctatcacgtggcttcaggaaaatacactgaggtgtgagcgtggagattagatattagcagaatgttggcagcctccatgggaatggacctccagcaccaactctgcaatcagtggtgagccaagggcatggagcagacacacaagacacatccacccagtcctacgctgggcctcttgtgactgtgattaaggaagagctcatagtgaggaaagttcttctagctctttataaggccttgccttttccaacatggctactcctaaggtagctgagaaaaccttggctcaagaaaaataaaagtatctctaaccaagacaagaatctttgctgtttcagttcctggaaaagtcttcttgaccccctaatgtgactctgttctctccctaactccaggccctgagtctgagggccccagctaaagttctgctgaaattacagataaatgacttaaaatgactcaaaaccatctgtgtcccagtttcattccttttatggctgagtaatatttctttgtgtatatgtaccacaacttctttatccattcatctgtccaaccatttaggttgttaattgtagagaccttgaaggacctagagtctgtcatacagaatgaagaaagtcagaaggaggaaaacaaatatcacatattaacatatacatgtggaacctagaaaaatggtacagataaacatatttctagggcgggaatagagatacagacctagacacgtgtggacacggggtattgggggagggtgggatgaactgggagattagggttgacatatatacactatcacgtgtaaaaagggactagatctgatagacagagtgcctgatgaactatggacggaggttcgtgacattgtacaggagacagggagcaagaccatccccaagaaaaagaaatgcgaaaaagcaaaatggctgtctgaggaggccttacaaatagctgtgaaaagaagagaagcaaaaagcaaaggagaaaaggaaagatatacccatttgaatgcagagttccaaagaatagcaaggagagataagaaaagccttcctcagcaatcaatgcaaagaaatggaggaaaacaacagaatgggaaagactagagatctcttcaagaaaactagagataccaagggaacatttcatacaaagatgggctcaataaaggacagaaatggtagggacctaacagaagcag

SEQ ID NO: 48196 - DNA, 831 bp, Bovine  19866880639480
  misc_feature (1)..(1): n is a, c, g, or t
nacactttctgttttcccacttaacctgttggtctgaaaagtctccttgacaccccccagcactgacccaataactactgaaggaagggttcagatggggagatagttcacttacggatgttgcagataaacacctgggatttgtcatccaaagctgttacttcgggatgcgaccagtggcatttatacccttaagatgaccatgacctcaggggactttgctttgggaaaggagaagtcacaagtttagtggaaaaataaccagagtcaaggctgtgtgtagatcattttttcacttttctcctttcctttgtcagatgctgtcttattagaagacatctgagtatgtttgaattttctgaaacttatccaagaaggtaccaaggaggatataggcaggaaggaaggaaatccaacctatggtgtcagaataggctgtggcctgttggaaggcaggtgactcaggtaaacgttgataaatgtttctttctgacattcgttaggagcgttacgattgttcacatctcactaggttgatttccgctgcgttgtccaaattataaatccctaatagttaagtgaagtttcacgtcactagtgtgcccagcacagagaggtgtgtgtggtgcccgtgggtgtgtgcttgtattgtgtagatgttctggaatcactgctctagagaagatgcacattaatagagtcaccacttagtaataggtacccagggttgatcattatatcaaagcatgattcaggaaagtatatgatttactataagtattaattaagcacggttatgtgtaaggctatgttcctaggcacagtgaggga

SEQ ID NO: 48197 - DNA, 751 bp, Bovine  19866880645124
  misc_feature (1)..(1): n is a, c, g, or t
ntttccgtttggcgagtcccttacacattctctagatcaactttctttcttcagtcatgttgtgaaatgtggtcagagtctggggaaggcatcactcatacatccttgggtccctgatgatcgagtcagcaaagccccaggagcccctcatgcagaagccatcttccatccgagaaacaccccttactaaatattttatcctttcatcttggtggctgagaaagagcagggtgttttagtattcttgtctggtaacagatatcacttagaaatccattttgtaatcatttaaactggtttgctttgggtctatttacataattccgtgagacgcatggaaagagagccagtgtgttatttttctgcagccaaagacatggaaaaagcactttctaaggtaattaccacttcagtgctccccacacagttagagggcactgtgaagaagtatgccttctgggtccagggccaccgaagtgtggaaagaatgtactttctccctgggaaggggaagcaacacacttagtatgaagcctcttttacttatcggcgtaatctgcacaaggttaaggagctgtggcttccggagcgtgggtgtgggggtggggagatatcatctcagaacaaacaaggcactttcaagacctttgaggtgtagtgcaccgggggaggaggacacttgacctcctgcctgcaggactggaaatgcaagtcactcctgcagaggattacatcagagtttaatctttca

SEQ ID NO: 48198 - DNA, 2204 bp, Bovine  19866880733054
  misc_feature (1)..(1): n is a, c, g, or t
ntctgtataatgtgtgatgctctctgagctgtagatgtgagggtgggaaggaagaagccgggctctgcagcttgtgaaaaactgccaccacactctcccaggggttcttcattccacttagcacgagggaaaagcaagcaaggctcagcaagacagttctttaaagaaacggcattgaaaataaccatcatgtcaatttcagctaatggggcacagtatgggctcattttaaagcgaggaggagtggcatgcaaccattaagaaagaaatgcttatgccatatgtaagcacacccatccaagcagagccaggagttctctggggagaactcaacacatccctcccacagacttggaacttgacctcccactgaccagaacccagaccatcattaaggaagcataattacaaatgagattagtgagatagcagccaaggttttttccactggagcttcaaagactcctactggcaagagagagagaaagggacttaattcctgaatttcactaacttcccttttacaggtgcaatcgctagaacattaagatgcatacacctgcttgccagctgacacatttatctgtgagcatcctttcaaactcaggaggaagcaagctaggacaaaccctcttgccttccaccactcctggctattactgagctggctcaagcaagattccaactatgaagtatctacaaagctggtgccccactgagaagagacccatgcctgggcatcggacggaagttggagagttccacaagactcttttagtgctggctggaagacaggtgtagtggcccagagcacagatactggtgtcaggaagacccaagcttgagtcctagacctgccacccatctcttctctgtgtgcctcagttctctgtaaaagagcagcaaaaatgacatctacctgagtaatgagaattctatggggaaatgcaatatccctgggccaacaaggtacttgttactttttatttggaagcataaatgctctggaccacaggtttaggggcttatcctgtcccatgtcctgcatggagacatgcagacatgttaaatatcttggcctcttggcctgttactgtttagttgctcaggcatgtctgactcccttgtgaccctatggactgtagcctgccaggctcctctgtccatgggatttccctggcaagaattctagagtgggtggctatttctttctccagaggctcttccaaacccagggatcaaatccgtggctcctgcattggccactctttacccctgagccaccagggaagcccccatcttgacctgttgctgctaagttgcttcagtcgtgtccgactctgtgcgaccccagagacagcagcccatcaggctcccccatccctgggcttctccaggcaagaacactggagtggggtgccatttccttctccaatgcatgcaagtgaaaagtgaaagtgaagtcgctcagtcgtgtccgactcttagcgaccccatggactgcagcccaccaggctcctccatccatgggattttccaggcaagagtactggagtggggtgccattgccttctccgatcttgacctgtagaaggcagcaaaagctcaactttccaataggtgctgtccacaagcatggtgctgaaacagatttctagttttaccttcaggactagcactcaaggctgtctctgactatcatgttcacaagcctctacttggccagaaatcaatggaaagaggacttacatgagtgtcaagaataacgcccagggtgtttcccatgtcaaagatatgcttctctccctcttttcagttcagttcagtggctcagtcgtgtccgactctttgcaaccccatgaatcacagcacgccaggcctccctgtccatcaccaactccctgtccatcaccaagtctgagttcactcagactcacatccatcgagttggtgatgccatccagccatctcgtcctctgtcgtccccttctcctcctgcccccaatccctcccagcatcagagtcttttccaatgagtcaactctttgcatgagggggccaaagtactggagtttcagctttagtatcattccttccaaagaaatcccagggctgatctccttcagaatggactggttggatttccttgcagtccaagggactctcaagagtcttctccaaaaccacagttcaaaaccatcaat

SEQ ID NO: 48199 - DNA, 1967 bp, Bovine  19866880790369
  misc_feature (1)..(1): n is a, c, g, or t
natccgggtgtaccattctgctctccattccaaatcctgccactgtatcaagtgatttcagtatacatttgagcaacccatctactgcctttcaaatcttgtgtgtgtatgtgtattaagaaccatgagcatgagattttcatcttaaccaagttttaagtgcacaatataatattgctgataataggcaatacaccatatagcagatctctagaactattaataattcatcttgcattttttaaaaacagctcttattgaggactctcaatagagaatagaacacactctacacctcagtcacctactttactcgctgtttacagggaagcctccaggcttttggaggacatggcaacccactctagtattctttcctggagaatcccatggacagagaagcctggtggactatggtccatggggttgcagagagtcagacacaactgagcaactttcagtcttttaccaagatatatacttttgctgagtcctaaaaaattgatgcttttgaactgtggtgctggataagactcttgagagtcccttagatagcaaggagattaagccagtcaatcctaaaggaaaccaaccttgaatattcattggaaggactgatactgaagttgaagctccaatactttggccacctgatgcaaagagctgactcattagaaaagaccctgatgctgggaaagattgagggcaagagaaggggtgacagaggatgagatggttggatggcatcatggcctcaatggacatgagtttgagcaaactcagggagataaggaaggacggggaagcctgctgtcctgcagttcatggggttgcagagtcagacacgacttagcaactgaacaacaatacttttgactgcatgtatttctcagcaaaaaaaaacaacaacacatataaactagcttctcctttctctcttcagagcagttcttcagagttgtctcccaggctgtggtactcagtaagatcatgaataaaaacttaaattcacaattattatgttatgtgtttttctttaagttgacattatgacaacagaactgagtagttgtaacagaaactgtgagcttcctaggtaactcagcagtaaagaatctgcctgcaatgcaggagacacgggagatatgagtttgatccctgggtcaagaaaaccccctgaaggaggaaatggcaacccactccagggttcttgcctggagaatcccatggacagaggagcctggcaggctacagtccatgggtcgcaagagtcagacacgacttagcaactgagcatgggcacacgacagaaactgcatggctcagacatccaaagtcattgcccaagaccccttgtttcaccattgcatccatataaccaaacttggcatatggcaagcctttgaaaaattatttgtccatgttaatctctctctctctctcattctctctcccctataaactgtccaagatttttttttttttaacttagctttatggttcagtagaatggattcagtaagtcttggagacaatgcccttcatggaatgtttcactagcaccaggacacttcatcaaaacagggctcattttacttttccaccagtaagtaactgcaaacagaaaatggctctccacttctccaatgagcaatggtcctctgggagacttgacattctccatttaattaccaataacagttagatgatttcctctgggtgttactgtgtctcagtcgggaaagtcactcacacaaacaagaggaggaggtgtgttcactgttcccaaggctgctcacccacaccatcaaatcaaacaaaaggaattttactttcggtcttcttttgctctcataccatcacatctcctccttctgaaaaaagtttcagttcatttggctccagattacctcaaaagaatgagtccttttccagcctgggagagataccaagaaaacagctacaga

SEQ ID NO: 48200 - DNA, 981 bp, Bovine  19866880871545
  misc_feature (1)..(1): n is a, c, g, or t
nagcttgaactggttgcttaagtgacagttgaaatggtgtatttgtcagcatacaaatgaaaatcaacatcacgcagggaggtaatctagtcccaaaggcaccgtggactataaacgctaaattacaatagacctagaatataaccttgcataattcttgaataaagggtttgaggaacagaaaacccaaggtagcgagaattcagatgaaagaaaggctgtgcaatttatagttaaggtgacttcgagactattgatttggtctctaagtgcacccccaaatgtatctcagagctatttttcagtaacactgggtacgataataatgagaaagaggatttagagtggagtagctatgtggttatgtgctcatggcccctcttggggacctcagatcttctccgctcagtatgggttgatgccaatcttgatggattttctaatcttcagttcatggatgattacagatggagcttgggagatattatattttcttcttgaacagctgaccttatttggggaactgaggccaactaagatctttcccctgcagaatgttagcaaatcagagaactcgttggatgccacacagttcgttcatgttcaaatgagacatatatgaactctgaatatgaaatgtacccatatcctgctttcctttcactctgaatgaaaaatgccttaagtagacaagctggggctctgtgtggcctcaggagaaggagtttttcaataaggaagaaatctatgaggttcagtttctagacattttccaggaaatgatgtaaccttgttcttgaaagtgtctgcggcaggggagagcaaaggaagggaagagtttatcttttgcaaaatatgcctaagttattaaaaaaacaaatgcctttgggtaggggagggctccatctgaagggagtgtgtgtatgttccaaggaggatttccaggcttcccaggggcacagtataaagcatccacttgcc

SEQ ID NO: 48201 - DNA, 1083 bp, Bovine  19866880947570
  misc_feature (1)..(1): n is a, c, g, or t
ntatttttcttctgcaagacagtacatcccaagagatctctcttttagcgctgatgaaataggatgttatttatgtagggaccttggtggctaagctgctgttgcacccaccatgtttgtgtgtcgtttgcgaactggcagattgattcatcaaggattccagaagcacattttattctgttattctgcgctaggccttggccaccctgtctgtttgatatactggaggatggctttgctatgggcccccagttcacgggacgtcaatactgaagattctagagaatggatctggacaatgagtatagctggtgtgtgtctgcaggatgagtagctgttgcctggttcttgccctcccacaaaagaaggcagcacatgactgcagagtgttatgtggctgaaaggacaccgattctgtcattaaaaaacatcacggcttgttagatggttcagtgggaaaaagtgctttttacaccagttcagtcatcttacctgcctccttgctgacctcgtctggctatttgttaggtgcaaaatcaactctaaagtctgcagcatggcacataaagcctttgcagtcctagggaccccatctccagctgtatccagaaagccaccccttttcaccacatctaccctggtggctcagcggtaaagaatctgcctgccagtgcagcagccactggagatgtgggtttgatccctgggtcaggtagatcccctagaggaggaaatggcacaccactccagtattctcgcctgggaaatcccacggatataggagcctcgtgggctgcagcccatgcggtcacagagagtcatacataactgagcacacatgcatacaggcacccacccatggtcacttgccattgaatttttggacttatctgcagatattttatactcatttatagctcttgcctttgcatattctctttcttttgtatggaatgcccttcttcatttttccaatggcaaactcctgcttatcctttgaacccagatgtgataactctccctttgcagaagccctctgcaaggatccataaaccaaattacttgccctcttttcacctgcca

SEQ ID NO: 48202 - DNA, 1914 bp, Bovine  19866880967663
  misc_feature (1)..(1): n is a, c, g, or t
ncagtgttcttgcctggagaatcccgtggatggagaagcctggtgggctgcagtccatggggtcacaagagtcggacacgactgaagcgacttagtagtggtagtacggaagctaggaaaatggtataggtgaactatttgcagggcaggaatagagacgcagaagtagagaatggatgtgtgcacacagaaggggagcggagggcgggactagctgggaggttaggatgggacatatacacattacgaagtgcataatagagagctagtggggatctgttataaagcacaggaagccggcttggtgctctaacacgacctagaggggggggacgtgggtgggtgagagggaagtccaagaaggagggatacatgtatacatattgctgagtcacttcactatacagcaacattattttcagattaaaacagaaatccaaaagatactgtaaacaaggtgccagatgacataactagcttgttgtaattatcctaaatatacatatctaaaataacaatactctctattgtgcattttttgctgacatatgtatgtgtgcagtggagtagcaggtggcccgataaatgacaccccagatggataacagcagtcatctttggaaatgagctggggactggaattgggtgtagggggtcgtcaagattttggcactgtctataatattctgttcatttcacaaggaataacagaggcagactaaaccagtgaaattaaacttttttttttttaaaccaacttgttcaaaagcatgaatgtgtaataaagaaaccaaggaactgagctgagtgaaattgcactcgaaattgctgccgagagaaaggggaaagctgctcagagtgagaccaaggtttcttgacgcctcgatgtggttcggaggccttttattgatggctggggtctctctgtggatattctcagccccatgctacctcccggcattaaggaacttctaaaggagactgtttcattttggaacagcaacgtggaggtggagagggtgggggtgtgtggggaatagaagccgaggaggagggaaatcaccaagctctgagatcaagaaaggttccccaggcacctctactgacaccaggcttattgaaagtttttctgcatcatctgaaagggatttagagttaaatatctaaaaggacaaagtacgttggagctctgatgtaggaaaataccacgcagataaggataaacaaactacagagcagaaatgaccacaggtctgacccagtctaataattcttaacatctctcggagttgttgtagaggattaaataagattgctcatgaatgccccaggaaaattgtaaaatggaacacaaatgttgctcatgactgtgattatgtcgtagctggttttacatcagaatttgataacagagctaaaaacagaatccttaatggagtctgggattctattcagccatctaccctgactgggagtactttataagaatgatttggcttttacaagtaatcagcctcagttttttgtttgttttggcttttttaaaaaataaaaatgccacatccaaatttaaaagctggggaaatagaataagggagaaaaaagccatccatagcctcaaaaggccctcagttcagttcagttcagttcactcgctcagtcgtgtccgactctttgcgaccccatgaatcgcagcatgccaggcctccctgtccatcaccaactcctggagttcactgagactcacgtccattgagtcagtgatgccatccagccatctcatcctctgtcgtccccttctcctcctgcccccaatccctcccagcatcagagtcttttccagtgagtcaactcttccgccctaatgtcacccaatatttgttgcatgagtgatggaatgaatgaaacagcgaa

SEQ ID NO: 48203 - DNA, 2287 bp, Bovine  19866880975467
  misc_feature (1)..(1): n is a, c, g, or t
nccattaggctcctgttctaaggctttattgtgataggttttgctgccctaatctcattctcagcccttatctcctcaccaatctactcacctgggtccttaattcagcagcaatttctttacataaaaatagctagatatttcttgatatctgtctgtctgtctatctatctaggtatttctagataccagctatttctatatctagaaatagagcctccctcttcctaaaaaaataaaaataaaaaaaacaactaccaggagacagctctctaacatgtaagaccaaccccctccccacatgggctttgaatattatctccttctaccttctcaggaatttttcatcccaactttccttctctctcctggtattaagtaagttctttttgactggatctgacatttcaccatgcccatgctctcacatctttatgtgcttgaggaatggggaggtgaccagtcatgccagaggggagtgagcaaagctaaggaagtaaggaaaaggtcagggggtgtggaggaaaagaccatgaggtttgggggtgctggttcttatgggccaccggcaagacacttggttttattccatatgtgatgagaaaccactggagaacatgaaagaggagaacataagctttacattttcagagatctttctccagctgctttgctgagaacacacaggtatgtggcaagagcagaaggaagactgcctgctaagaggccattgctggaaggcaggtcggagttgagggtacagggatgcaggtagagagggcaacctgggaagtagcgttcagagttgggatgtctttaaaaagtagggccaacagtcctttaggatgggtgggatgtgtgtgaagcgagagtgtcatagaagactccaagactgttggcctgagctgatgattaactagtagtttatcaaagtggagaacactggaaaagaagccagtttcaggggaagaaaccaagtctggttttggacttgtaatctgagatactcacatggaggagtggatacgagagcctgaaattcaagggaggttccagttggaggtggacatttacatcacgtgttcacaatccacttgccagaaaagcagggtgaagggatgtcagagtctcttcaccttcactaggagaaggtgggtcatgacctttgcctatctggggagtccttctgaagagacacaggagacacaggtttgatccctgagtcaggaagatctactggaggaggaaatggcaacccactccaggattctagcctgaagaattccatggacagagaagcctcataagctacagttcaaaagactcacaaagagtcggacatgactgagtgactaagcacacacctgaatagaaaaaatgcttagacactgatgtgcaaaaataaattttaactccatcaccaagattttcaactcctttgaattcccagggtccctgataacttcctgtgttacacagcttaaaataatgtcatcatatggttaggataatgtaataatgagagaaggaaatggcaacccactctagtattcttgcctggaaaatcccagggacagaggagcatggtggactacagccccagcggtcccaaaagagtcagacacgactaagcaactgaacaacaaacatcataatatgggttggttcccatggcccccgtggctaagctcagtttctggaagacttgggcaatgtttcactcacctgtgtatcccccatgcttgacacagtccctactgcatggaagctgccccataatgctgtgtggttgttggacaaatgaatgaatgacatacaaatggaaacatgatcctttggaagtcaggagaactggggcagtttggagggctcctctaagtaggtttctggtgcatggggttcaggatttctgaattccacatcatctcccgtctgaggcaccctgcactgcagcatggaccatatggtgaggaaacactgcatctgtgcttggaaaggcttgttaacagtatctggggtgcccagagcagccgtgacatcggcatcaacacaccatcctgaagccgagaatcatcccgcaagatcacgcagttgctctcacagccccaaatgtttatgagacacgagccaacacgctctccaagctcccccacctccgctctgctggtgggggcactgggctgggcacaaaccccatctggatgcaggtcaccatctgggacaacagctttaacaacagagatcccacagtagttatcagatgccatttactgtatgtgctgtttgg

SEQ ID NO: 48204 - DNA, 721 bp, Bovine  19866880978864
  misc_feature (1)..(1): n is a, c, g, or t
ntctgaggagccggaagggcctcttccccacaaaaggcctctgacacactatggctttccccaaatctcgaggctgatgcaccagttttccctgtccaattccatgaaggttttcccactgtcttcctgagatgtaatcccttttatgatatttacctggatcaacattctggaaaacgacccttttagacttttctacgaatgccgtatgctgctccatgtccttacagattacctgtgttgtatcctctttgatactactttcaatttcaaaatcactcgggttttgcagtaaacctggaggtccctggaattctggttcttgtatgatttcctcctcactcattctctcgctgccagaatcttcaacaagtgcctcctgggagtccttctcaggttcccagcctgtagattcctgaggttcaatttccatgatgtctctttcttgaactgaggacgatggggcttcttctggggaaatggtgggagaagcagatgcccgagagttaatcagggcatccatctccttgtaggatctgcaggagtctagcacatgaccatttttcactttgaggtgactcttctgaaggcttttgaacttggtctggcactgttccagagtttggaggaagccacactctcgcagctgctcagccacggtcccataccacttgctcttccgatgacaggcttgcagcacttcataagaccaagtctcatg

SEQ ID NO: 48205 - DNA, 2926 bp, Bovine  19866881040370
  misc_feature (1)..(1): n is a, c, g, or t
ngcttgaaaaagaactcttcttgtcttttcatgaaaaactatcttctaagtgcagccaaaacttatacagcaagaaacaaagatgcagcattcacactcatggagcaccagcagaaaatacccatgaagaagacatactctaggcaacaaaagaaaatttctgaaagcaaaaatgtgttactctctctttaaggtttcaaaaccatacactcaatgaaataagaaataaagcaaaacctataaaacaaataacttcaatggaaagcactgtttcagataagctagaatggatggaaaacaagaataacatcagagaattaaaatgtgcattaggcgtggtaaaggaacaggtcatcttcggtggacaaaaatataatcattaatgtgagaggaccatcaggatgtcataagaagatgacatgcaaaagaagatgaaaacgttgcaagagatggaaaattcacagatgaacttctttgttcctgaagaaaagggcaagacacacaaaacgcacacattcacaggtttaggagggcaccatggtgaaatgttagacacaaagcctgcattagcagagctcaccatccagtacgggaagatcctggcaatggggtaaaatccaacagggacagtctacactttccatcattctgcaagttctactgttctacttctgcactcaactaaatcagtattttctgaactgaatctcggggcagggcggtgtggacaatgcttgcaatgctactggctcttctgagtaaaaacagtactctggtcaaagaaatttggacaagaatatgctaaattaaactaaaaccacattctttactgcatagctttaatgctgagacgcattatgaattttgaagacagtgcgatatgatgccgcatttacaaaattcagaaagggaagaggtcatttttggctgattctttggaccatgatgccacccctctgccgtctttttcatctctcgtaacagctactgacatcttctagacacggctcagaaatgccaaggtagaccctgagcaagcaaatgccaggatcataatatgtcaggctctcaccgacgtgccctcaatgctacacccacagcctttagagaagtttgatatacaaattacacatccacacaagctgtcagtgtgattttgcaaaaatcatggttggggagaccactgtcagccttgcagaacactgagatccacagactggtcagcctgcaatcctgtcccagaacttaagtacctccatttgtttctcctgccactctagcactgatgaccacggagcatgggcaagcccggagcagctgcttccgcctgcctgcagcttcactgggacatgggatgatgtgtcccctatgggtgctacatacagcatcatgtctaccctggggatcttgctccaaaccagcagcccctctgctcccactagaatccatttatcgtgtgtgtatgtgtgtgtgtgggtgttcagtcatgtctgactctttgcaatcttacagactatagcctgccagtctcttctgttcatgggattctccaggcaagcatactggagtggattgccacgccctcctccaggggatcttccccacccagggatggaacttgtgtctccggcattgcaggcagattcttcaccactgagccaccagggaagcctccaagcatcatcccaatttgtaaatttcccatatccagccccacccactgggctgcatctcggatcgcggaatgctgaaatggctctgaaactcctttctccatctccagtccagccttcctcctttctgtacgtggtccaggtctgcctctgaatagaacgtgataatgccttgagggtctccccctccctcctgccccagaactcatttgttgatttctgcctttcctcctcctcttgctttcttcctgtggaatggcttggttgctccttggagcccctgcagagtccatgtaacaattagagcagctctgatggaacatctggtgagaagaaacaggactcacttggggtgcaattaccagatgcaggaagtcttgctgggtttcttcatccaactaatacactgtgcccaggactccgaggcagagaggagcagagatcttaaggccggactgcttgggttggatttcttgtaacacgactgactagctgtgtgaattggggctactcattgaatctctctgctctcaacttcttgatctataaatcggaactagtaacagatcatgagagcaaccaaactaaagacagtgaaattggttaagtgattcttgcattaatccaagcaaaaaataatacggccaggattgagtcagtaatagagaggatgaaaataaggaggtagaatttgtaagttacttaaaggaggtcagttggcacaatgtggtgatcaaagtgaccattggggaggggctgcaagaagaagaggtggggtcagatgagaatgaaacaattcaaagtgtagtttctaattttatacctggggtagttgaataatagtgaagtgttagtagcttactcgtgctcagtcactcagtcatgtccaactctttgtgactccatggactgtagcccaccaggctcccctgtccatgggattctccaggcaagaatactggaatgggttgtcatttccttctccaggggatcttttcaacccagggatcaaaccccagtctcctgcattgctggcagattctttaccatatgatccaccagggatctgggtgttagtaaccaaggcagttgataaaagagattcatatttgctgtgtgtgtggcagggagtagtgtattcccagagttctgttgtaacgatgactatcttctttcatttttctcaccacattgtggttacaatcctcagatgaggaaactgtgtctgttaccttcctactcctcaaaccagc

SEQ ID NO: 48206 - DNA, 1753 bp, Bovine  19866881062010
  misc_feature (1)..(1): n is a, c, g, or t
ntctatctgccttggggaggggccaggtcatggccacaagatataaaagatcaccaaagctcagtggtataaatcatgaagatattgacgctaagaagcctggaaatcagcttggaccaaacagagacatttttgaacatttgcagagatgctgtctgggaacagaactggggaaatgtgggcagatgcggaaactgacagttctctgtgtgacatttaattgccctacaccatatgcaagtagttgcagaaagtgtaaacttttggtgtgtggtgtgcatagacatattatggtgggttaatccagtctcttcttcttcctgatggagagtctcaattcttactccttctggccccagatcatttcataagagtcctgtaggtatcagatctacctgccttgaggagctgagcacagcgtctctgccctggtctgctgaccgcttaccctgccgctgcccttttttgtgtcctctgacgtcacagcctcctttgaatcctaggcttgcattagacttgtaacattacaggtgtgaaactgaaaatgtcaaaatgttctcactctctctccaaaagaatggtgagacagttagaaacgatgaattcctcagactgaaatgtctctcacttttcaaacactccttctagaattccaaagacaccgggggcctccctgggctccgctggctttcacagtgtaaatttccatgtttcggttgaaaggttgagcttttggataaaagtctgcaagaagacaaagtaactagtacttactcaaactctgttatgtgcctgaaacacactaaatattttctgcccgttagaaccctacaaagtaaggatgaggattgaactaacagaattgacaaaagtgaggatcacagaggctcagtaattcacccaggaccacacggctcaaatgcagaatccaaaacagttgactccaaagcataagtaagtcctttccaacataacctctggtaaaacgatacctaaatggtatagaagtgatgtattcagagtgatgcatacatgacatcgagcgcataatcttttcttcaaggtcttgttgttcagtcagtaagtcgtgtccgactctttgcaatcccatgaactgcagcacgccaggcttccctgtccttcactatctcctggagtttgttcaaactcatgttcactgagtcggtgatgccatccaaccatgtcatccttttgccttcaatctttcccagcatcagggtcttctccaatgagctggctcttcacatcggtggcttaggcacctaagctaatcttgtctgtgataagagacacccaagtgccaccttacagtatttgtcatgacaagaatactccggatcggggatcagtgaactccagccctgtaccacatctagcctgctcccatgttttgtcagcagagtttcatttcatgctacaacagcagaactgagtggttgtaacagagactgcacagtctgcagagcctagaaaacttactatctgtccctttacagaaaaagtttatcaacccccagactagaaacatcattccatcttccactatatgcgatttgaagccagaagataacaaggaagagagggagcagaatgatggaaaaccatcattaaaaacgcatggagtactgtgatggttaatttcatgtgccaactcaactggacgaaggaaggcccagacagttggtaaagcattgtttctgggtgtgtctaggacgggttttggaacagacca

SEQ ID NO: 48207 - DNA, 6538 bp, Bovine  19866881071767
  misc_feature (1)..(1): n is a, c, g, or t
nggatttcccggcagaatactggggtaggttgccatttcctccttcgggagacttcccgaccatcagcgtgattcatcatgaatttttttcttgtgtattttttttgcttttttgttttagtttttacatttttagagccaaggccacctccacacacctaatgagctggcctcacaattttgtattcctcattataatagcatttgttgctgtagtgatcccaattacttccttatacattatcacatttctctaactactgatttcttaattctcaaatttgatgtatttcagtattatccagggggatcaaaaaaagagaaaatgacacattcctgagatttattcctgagatttcagttcagaagatcttggacagattcaggtactgtgctttcctttttataaaattaaccaaaattattctgaggctcatgactcaagactgaactctgaaaaaatgtttatatgaaacttataatttattctttccagtgtattcctgagtcattagtaaattgttgtcctaaaaaaaaaagagagagagagagaacatcctgctatctacacagccacacaaccctcaaaattttgagcattaaaaagagctaagccttaaaatagaagagatttatcttctgaatgtgaagtttaaagacacctctctgcctctgggcctgtagatgctgagtgacccaaatttctctcacaactgaattgtcctaatgaaagggttcacagagaagagtcatatacttggatggccaatcagttgcacaacaccatcagaattttcaaagaatattagatggaatcccaggctatcatttgccaaagaaatcatgtaatatgattatgaatcagattggattacttatcaccatttagaaacacaaatcggggtggagagtggggtcatctcacaggtataggtttcttcatatttatttaccttataaaaagcattgggggtcaagtgggaagttgagatgtctcagtggctcatccagtgcccactaacagctccagtgaggttttcatttgtgaagctccagagagtatggaccagggaggctcaggagaatggtagcagaatggttacagtatcaatgggccatgctgattccaagagacatgagtcctgatgtccagtctctataaattaacaatagctatctttgttagactctttgctaaaaatttttattcattttctcatttgagtttcccaacacaattaccatggtccattttgcagctgaagaaaccatgttacagaagattaaatgatttgcctaatagtgcagagcttataagtggtaaaatggggatgtaaagcaggcaggttgacttagagactacaccaaactactaaaatattgtgtaaatgcttcacattttagagatctcagataactttatctatatacacctattatatacaggatacctatatgctatattctatatatatgctatattagatacaggtacctatattctgagtactgcataggactaacctatatttcaagtaaaacaaatcatgcaagaaaagcaaggtaaagttaaatgcctatagtgccctgacacataatatggaggatatgattccagttcaaaagtaagaagcatttaccttcaacccattatgtggaaatgctaatctaaaattgcaagatctcttaatgttgttttctgataaagtatgtgatatatttgaattttaaatatgaactaaaaagactgataaataaaaaaaatttttctctagaatactagcctgatttctatgcattatacaaatgtagccttattcatagaagtaggctttgtactagaagagaggaggaaatctcttagccaactaggatatctgaggtcttgtccctataatagatctgagtgtgagatatcttcaatgtatattttcttaacatcttcaattctagaccattctaaatcttcatattctatagaatatgagaaatcataatcttgatcttgagcaacttactttattgatatgattgaagatatggaaatcacataaataaaattgataaaattgatctgaaatttcttttgcaaaagctcatagaaagaacatactcctaccggctagaagcaattggaaataaaatattagaaaaaaattaaaccttctcaggcataattataagagaactgtaagaataaggtcactaaaactctaccagtagaaatatatttgagaaaattgtttaaaaagaagctagtattctaggtaaaggattttgtcagaatgcatagccatttgggagaggagactcaggaaattaaatgttttcaaatagccataggttgttttaatgcagagaagattcaaaattttcaaaattttcaaaaatggtagatctaagggttagagttagtattgattcaaagtcagcttttgcttctcaaaagtatcacatatagataagatctgtgccaagaaatagtgagttccttgtcactaaaaatatataaagcaagggctagaggaacaaacactgggactgctgaaggaggcatttgagcattaacaggtggggtgaatgtagtgtcggtttacaaacctgagtgctcatcagaatcaacaagaccttgaaacatggaattataagagagtctgattcactaggtctagagggagcctagagcttttaggagaagcaatggcttccgtggtggctcagatggtaaggaatctgcctccaatgcaggaaactcaggtttgatccctgggttgggaagattccatggagaaaggaatggctacccactccagtattcttgcctggagaatctcatggacagaggagcctggtgggctacagtttatggggtcacaaagagtcagatacgactgagcagcacaacacagcacggttgtgatggagtaggaaaatgactacatatgctgccaaatgcatgttgcattgtatttaagaagaaagttgcccctggaattagggattctgaaatagcagaagggaggtgactccgggaagatagtaacttggtagctttgtgagccatggctcatgtaaagtcttctgcctcaaccagaacagtcatgattacctgtctcccaacccaccctagagcactcagagcctcccatagcctatgaatgaaattaattcaaaggacaaaaattatgaagaaggaagctgcaaaagaagaatctttggggggaaaaaagattttccaaatgcaatgatatttatctgattaatgccttggctgcttgcctatatcttcactaagaggcacacagaattttctgaaaaggagctgattgagcaggaatgtggtgaatacataaagcatactcagtaacaaacgcagtcatggtgactagcttcagaggaggggcagtgctcatggcattacaaatttccatttctgatgcctcctcagctgtagaaagtcaacaagggcaacttatgatgatcagatggctctgtgaaactctttagtttcattttccctccaggagaggacaatggaaataagaaagactttttcttttcagtctaaagcagaacaaattttgctaaattaaaaataattctggataagtaaaggtcagtcagatcttacagctctttcttcattaacaacaaacaccaacatccagtattgttgcttcaagctctttgttttttttcttgttttttggagtttttttaatcaaatggaggttctggcagatgccatcagcagggctcatgttactttaccagaatcataaatggtcagctttgagtgcatgctcactcatgtctgactattttcagtgccacgaactgtagcctactaggctcctctgtccatgaaattttcctaggcaagaatactgaagtattctttactctaaggggatcttcctgacccagggatcaaacctgcatctcctccactggcaaacaggttctttaccactgagccacctggaaagccagccaagaaaaaagccaattttatatatgtatgtgaccaacctagacagcatattaaaaagcagagacattactttgtcaacaaaggtccgtctagtcaaggctatggtttttccagtggtcatgtatggatatgagagttggactataaagcaagctgagggccgaagtattgatgcttttgaactgtggtgttgggagaagactcttgagagtcccttggactgcaaggagatccaaccagtccatgctaaaggggatcagttgtgggtgttcattggaaggactgatgttgaagctgaaactccagtactttggccacctgatgcgaagagctgactcctttgaaaagaccctggtgctgggaaagattgagagcaggaggagaaggagacgacagagggtgagatggttggatggcatcaccgactcaatggacacgagtttgggtagactctggtagttggtgagggacagggaggcctggcgtgctgtgattcttggggttgcaaagagtcggacatgactgagcgactgaactgaactgatgtgtgtgtgtgtgtgtgtgtgtatgtatgtatgtatgtatatataggcttccctggtgtctcagacggtaaagaatctgcctgcaatgtgagagactcaggttcgatccctgggttgggaagatgcactggaaaaggggagtactgatggcagtactcttgcctggagaatccacatgggcagaggagcgtgtcaggctacagtccatgggatcacaaagagtcagactcagatgcaactgagtgacttacacatacacacacacatatatatacacagtcatataataatactataactatatatatatatatatactcacataatagcatatcatagggcttcccaggtggtgctagtggtaaagaatccgcctgttaatgcaggagatgtaagagacatgcatttgatccccgggtcgggaagagccctggagaagggaatggtaacccatgccagtactcttgcctgagaacttcatggtcagaggggcctggtgggctatagtccttgggatcacgaaaagttggacatgactgaagtgacagctcaaacacacacatatactcatataatagcattataactgtagttcaatgttttgaataatacttttacagtagagattgacctttctgaaaatagcaatgggacaattgtacaggatagttttgcttacccaggttcgatgttcttcagaaataagactgcaacaacaaaggaaatcagaaggcctctgacacatggtgacagttctctttatgaactggaccatgttgacataatctttgaagtgcagagtatctgtgagatatcaagagaaactatcttcagatcttgttaatgaatgtaatctggatggtatagaaaaagattagatagaaaaccaagttggagaccttttataatgatacagtaagagtgttgttgaaaaattaactgaggcatattaaaatttttaagattttatttgagcaaaaatctatttggattggacagtcccaaatcagaagaggttggaggtgctccactgacaggagctaggggagagactctatactccctagaaaagagacaaaagcaaatcaaggaaattatttgattggtggtagcttaagcagttactgtatttgagaaagccttcttggctgtgattggttgtctatagattttcatttcttcaccttgaggtattacagatgggttttggtttacttacgtaaggaaattgctgcctaaaaaaactcaagcaacctcagtctgatggtttccttgtttaaataatataagtatatcagttcagttcagttcagttcagtctctcagtcgtgtccgactctttgcgaccccatgaatcgcagcacaccaggcctccctgtccatcaccaactccccggagttcacagtagatatttgaaacttgcttcagataagatgtgtgccatggcatgtaaatagcatgtactcaattaatgtttgttaaactgatttgaatttggaatgtgagtagacacagaagttagaaatgattaccagatatagtgcgtgcattaggggtagacaaactacttcccagacgccagctgcctgtttttgtaaataacatttctttgggacacaggcatgcccctttgtttacatatggtctattgctgcttttgtgctacaggggcagagtttgagtagtcatagcagagaccatatgaccttccagtctacaagtctaaaatagttaccctaggggtcttcatgggatgtttgctgacatttattctgcatatttgtaatggtgatggtaagaaacacaagaagcggtttcaaagtgggtgaaaggtaatgagtttaattggatcagttggctctgcaaaaaactgctattgctgcaagtaagaaaaaaaatagaaaagacatcataacaaatagtgttgccagtgttatatcaacagatgatctttatatttaagaaatatgacattttatatttttaacatactggact

SEQ ID NO: 48208 - DNA, 1074 bp, Bovine  19866881081117
  misc_feature (1)..(1): n is a, c, g, or t
nctctttgctgggcttgctccgtgtaaccgtgtctctttagaaagatatgtcatttaaaattggacaactactttctgagtttctcagaaggtgcagaacaggtaggattctatcacacccttaatctagatcctacattatttctatgaatgcaatctaagtttgaattagcttgttttttcttttccctcctttgaagtcacataacatgctggttcaaagaaaaccctgaagtacttttcacataaaatattacactttctctcattcctgtgcagaagatcttttgaacccacacttattaacctatttatttctattataaatggatttctttgtgtgtcacccaagagtctgttctaagttttatggaacagatccaatgactctctgctgctcattgtattgttgctatttagttgctaaatcgtgtcccactgtcttgctaccccatggactgtagcctgctaggctcctctgtccttgggatttctcaggcaagattactggagtgggttgcgattgccttctccaggggaacttcctgatccagggatcaaactcacgtctcttgcattggcaggtgggttctctattacacgttttatggaacacatccaatgattctctgttgcttataggatactatatataattcccttgaataatgtaaactttgtctcatgacttgaattctggcatcaagacataaaactccccttcttcctacactttagctgttttgaactacaagcaggtcaccaaacatatactttgtcacatctctgggtcattggatttgctatttcttctgcgtagaatgtctttatgtcccatgtgtgcctggtgaatgctgttggggagaaaaaaatttcccttcttcccttctaggttctttgagtggtttaacaattaaattgacatagaacagatgaacagcagaaaaacaaatttaattttgtacatacaggagcctcatcaagacatgagaggctccctagcaatcaggtaattacgttttatatgccatcatgagctaaggagaaggggatagggatctgggctcccaaagg

SEQ ID NO: 48209 - DNA, 1330 bp, Bovine  19866881123749
  misc_feature (1)..(1): n is a, c, g, or t
nctcctttgacctctattcagatacagtcttccatcttatgatcagaatgatcctagggtactgattaattatttactcagttcatttatttacttgtgacccccatggactgtagcctgccaggctcctctgtccatggaattctccaggcaagaatgctggagtgggtagtcattcccttctccagggaatcttcccaacccagggattgaacctggatctcctgcattgtaggcggattctttactgtttgagccacaagggaagccccatttcacagatattatgtgaataacagggatgtcctttccccaagcacagacacatttgaaatgaagtcatcatctgtcttacccatggcctctttttttgccagatcccattttcccatcactccgaaaggaaatccaggtcgtctttgcttaatgccacgaagggatttaaacagcatgttttgatgccagccactatttctgctgctccaaaaactctcatttcttgtgcattgattttgaaggtgatggtatagacagcctgtcgagggagtttgcagcatccagatgtttcatcctcatccagttaccagagtttttgggattgtgagattacaaggcaatgttggggaagacacgatgaacacctgccacgtagatggatcatattgcactgcatagagtcctagttcccagttgatcctaacagattaataacacattcccactgcactaacacattcccactgcactcttgctctgtgagggctctgtcatgaccaggtctcagagaatgcaagagggagttgaaatggctgaggaaggaagaaggattagttctgttcttgtgcttcaggcaaccacaataatccattgtcctcactggtatctgagctatcatccgacagcattctttcatttcgcgaattttactgagcatcagccatgtatcaagggctgtgctaatcctggcgatgcaaagataactgggagaaaaagatgctgcagcagctgctttcaggaaggtgacagtttagtggctgagatggacacttatcaaattttatgagcaaatgtgaaactacaactgtgtaagtgaaataaaagagaaaggcatggggcttaatagcacctggaacggggaagttgacttaccaaagagctcaggaaaggcttctggaaggaagtgcccattaaactgagagttcaataggcaaagtgttagtgaaagagcttttctagtagcaagaaaagcaggtacaaaggtcctggggtgagaaggaatgatgacacccaaagaactgatcaaggacagtggaggtggagccaggaggag

SEQ ID NO: 48210 - DNA, 1451 bp, Bovine  19866881141302
  misc_feature (1)..(1): n is a, c, g, or t
ncccatggactgtagcccaccaggctcctctgtccgcacaactttccatggaaaggatacaggagtgggttgccatttcctcctccaggggatcttccccccacctagggattgaacccacatctcttgtgtctccggcaatggcaggtgggttctttaccaatcacgccacctggggagatcctgaaagtcatgtggcacagccacaaaaaaaaaaaaaaaaaaaaaaaattggggaaagggtggtgtaaaaccacagacttgctagcccctggaagtcagccgaaggctctgtttgtttcaaggtcaagaccatgacacctcgtcctcccctacccttcccagctcctctgccagctccatctgagcctgaggatctcccccatcaggtgtggggttgagagcccacagagagaggggaccacgagccctcactgtcctcgctgtgcaggggatgagggctcccttctccccggttgtcccatctcctggggaccctgacacagagagctgtgcagaaagaggtaaatttcacttgctgctcgtggttttgggcgcaaaacctggcctgtgagtctggtctagctgcatctagggaaaactcctgtgttctgtttgctgcacgctaagtcgctttagtcgtgttcgactctttgtgaccccatggactgtagcccactaggctcctctgtccatgggattctccaggccagaatactggagtgggtagccattcccttctccaggggatcttcctgatccagggattgaacctgagtctccagcattgcaggcagattctttatcatctgagccaccagggaagcccgggaacggcctaagtcgggcttaaacagtgtcagcaaatctgtcgtttttgaatttaaaaatgtttcttgactgtgctgtgtggcatgtgggatcttagtcccctgaccaaggatcaaacctgtaccccctgcagtggaagctcagagtcttaactgctggggaagtcccagcagatgtctcatttttggattccactgcctctgaggtagctggttgctttctgaaaatctgtcccttgtgcatggcaatgggtgccagcccagtcttctcagcccaaatgcagtaggaaaatgcgccatctttgtcccaaaagtgtctgctgatgcctcattccctcttatggggtcgcacacagacatcctgccaccagcccttgttgtcagagggggtgtgaggcttgaggtacgtgcctctttggagcagaggcgggctgcttctcctgggggcacggaggatgagacgcgggcattttcccaaagcagaaccaggatacggttatcaaggaaaggaaatggatgctggtgccaaaacaacagatgtctgtttcaagattcttctgttcagacataatcttttgccgaagcacaacagaataaaacagatacaggtggagtgttccg

SEQ ID NO: 48211 - DNA, 904 bp, Bovine  19866881350331
  misc_feature (1)..(1): n is a, c, g, or t
nacaaaaacttctgcccagtttttgactgggttgtttgtctctctccccacttctgttcatcttggtattgtgctcattttaaggtaattgaagagcatataatggcggggactttatattttccctgtaattttgctgactttgccattttagcaaaaaataatttattctaatgtgatttgcattgcataaaattataataaatgtttttaaaaacaaggtactgtatatttatgaaatcgctgtatttatatgaggaaaaattttaaatgtattggcatgtattttccacaaacacttatatgcaaagctatatactctgcagctttgacattaacatatagtatttgcataaaccataaacagtgggcaatttctttgtcaaacaaaaagtactgattaccttagaaaggatattaatatcttttctttatccatatttttaaaattttgctgactgtattttgatgatcattcatcttgtgtgatagcacaatctgtagcaaagactctctcagtattttccaaaacaaaaaaataagaaacaggaaaggcagcagcttctgcctgtgaatggtctgatacagtaattttgactgatagcagagagcctttcttcagttgaagttcacagctgttagacccttgcaaacgcaaggtggacatctgattgacagaggggtactggtaaatatattttcaaattaaatttcatgtttattttctgtcatccttaatagctgtccagttggaattttggtccactgaaactagctagtttcctttggtggggggaaaaaaaggttgttcaaataactctttgtgtgtttccccttaatggcttgggatctttgggactaatttcaactgaattgatagaaaggaataaaactgagattgcat

SEQ ID NO: 48212 - DNA, 2010 bp, Bovine  19866881421627
  misc_feature (1)..(1): n is a, c, g, or t
ntgattcagatatgctttcagccctggtgggaaaaatctgtgacacaaaagagtcaggaatggcctgttaagacctactttgccctttaattatccatatcaagtcttgtcaacaatgaacactaggcggatggatagctgacttctttctctcactcagtcaaatagctttgctcgctcttaaatattttttaattggaggataattgctttaggatgttatgttggtttctgctatacaacaacgtgaatcagccataaatgcacacacacacacacacacatatatatatatatgccttcctaggtagcaccgttggtaaaagaatccgcctgccaatgcagaaaatacaagagatgcaggttcaatcccagggtcaggaagatcccctagaggaggaaatggcaacccattttagtagtcttgtctggagaatcccacagacagaggagcttggtgggctacagaccatggggtcgcaaagagttggacacaactgagcgtgtgcacgtgtgtgcgcgtgacacacacacacacacacataccctccttcttgagcctccggtccattccctacccccctaccataatcccacccctataggtcatcacagagcaccaggctggcctccctgtgctatatagcagcttcccactagctagctattttacacatggtatggaggagccttgtagcctgcagtccatggggtcgctaagagtcggacacgactgagcaacttcactttcacttttcacttgcatgcattggagaaggaaatggcaaccccactccagagttcttgcctggagaatcccagggacgggggagccttgtgagctgccgtctttggggtcacgcagagtcggacacgactgaagcgacttagcagcatcagcagtgtatgtacattaatgtaactttctcagtttgacccagcctttccttccctcactgtgtccacatatcccttctctatatctgagtctctattcctgtcctgtaaaaaggttcataagtaccatttttctcggttccatacatagcgttaatatacaatatttgtttttctctttctgacttaacttcactcttcttgatggatacactgggtttcatagtcacggttctcttcttgcacaattcattctcacttcaaaatcactcacactctcaattcatgccatgcacacagaccaccttcttccttctcttgctttttatttccagaaatctcttttattcttttctaatcatgtgccctttcttagcaactttttcaatatccctgctgctggttttctatttatcagatacgatggtttcaataatatttgtaaaccatctccacaccaagtcaaagcatgggaagtacagtgtaggctgagaggtaccatgaggatcagggtaaacaggatcacatcatcagccagcggtagactcgctttcgtggtatctactgagaatttttaagttcagtatttgttaatagagaagcttccaattacatctgccttcttggatttattttttgctaaattcactaccatgtattcatatttcactttgtaattacaaaaccagaaaacaatagaacatgaagatgtgttttaattgtgttatttactggtgggctgaatgaattgcattttggtacatgtctatagtcttatgaaaaatgtgttgggtttgtttacttgtttggatctaaacatggctggagaatcctttgtgtccagagcaacaaccaatcattgttttttatataaaagcagactatatttaattgggtactctgccaggttctggtccctagttagaagttcaaaccctgtggaacaatgtattccagaaaaccaagagtcaaattgaaatacctcaagtatagggaatataaaaggactggaatgaataattgaagttcaacatagtatgcattgagaatatgtgattatatagacaaagatggaaaatacatgtaatagcaaagaagatatatttttaaaat

SEQ ID NO: 48213 - DNA, 1119 bp, Bovine  19866881430595
  misc_feature (1)..(1): n is a, c, g, or t
ngtgtgctggtcaacagaaaaccagatgtccttttggttgctatctttttacagcaacataagatgtcttgattgtccctttcatcctgataactcattggaatatgagcggtgtaagggagacagttaagaaaagactcttgtccagaattccttaaatatatgaaaaatctttgtgggaagccctctgttgcaaatattggaccgaaaggtttggttattacaacagaaatttccaactggcttagtattcctcttgccattttgagaagcaatcgtctatgacccagaagtctccctacatggtatggttctgtcaagtcagcatgacatctcaactgttccattagagtgttttgataggttacattaaataactttcatattttattttactcccaatatcaaatacattgttggtcatcatgtagcttctagcctagccagtgccttcgtgtaaatagttctcagatgctatcacattgtaatgataaagataatggaatgtcagcttcctcgaagagaaaagtgctttttttccataaagggcatttttaaatgggtcattaactcattttatgagtaccttaatgctttgagcacggtgaggaaataatgtatcaacctactgaggccaaaattgattcagaaaaggatttcatcacctagggaatatcctcttattttagatactacacaccctaatgtcctggatcaaataaacaatgcagagtttttatggttacaggcagcacccatgtaaatattacacacgggtgagcttgtggtgctgctcccaatccataggccatccgtggccaagcaggcgttctgtcctagacagaagagtctaatcgtttgccaaataaaacccactgtttacttctcctaacattttattccttcacatttaatttgagaccagggttactcccgggtagcatcttgtatctttagattagctttcacaagtgggtctgaatcgtcctctcgtctgtgagtttctcatgaaggtggcgtagtgctcattaggacctgccttagtgggtgataagcagaacatgcatgcaatgtgtttttcccattcttacagctgaaagtatagtcttaaacccagag

SEQ ID NO: 48214 - DNA, 988 bp, Bovine  19866881750871
  misc_feature (1)..(1): n is a, c, g, or t
ntcaggggacaggggtgaggaccagttcatttcatgaaagcccctggcagccaaatttgtctaagccctttcacttcatggggcttccctggtggctcagctggtgaagaagtcgcctgcgatgtgggaggcctggattcaatccctgggttgggaagatcccctggagaagggaaaggctacccaccccagtattctggcctggaaaattgcatggactgtagagtccatagggtcgcacggagtcggacacgactgagcgactttcacttttcactttatgaccaagacttttcactcctttttgtgtgttttcatatcctttcatctgtcagtacaaattaaaacacattttggagtaaggaacttaactgaaacttgactctttagagagtcaaagttaaaaaaaagtaaactgaaaaaggagtcagcatatagaacattatgggaatgtatttgagatttgttcagtgtttattagacatgtaaaattatgatgaaattggccttcgacaaatcagttttgttttgttttcttagtctttaggtgtcagagactgagagcaaagaatagatggatgaatggatagacacccgaaagggaatggaattttggggggtgatctgagtccagatgaagtggttttttgggtgtagaagaggaggagatctttcttggtatccagcacccagacaggagtctcctgggccttgttatgcacgtggggctcttttgttgtgtaggaaggacttgttgtggctggtagaagcttcatctttggcctcaggagggtggcctcccggcttcctaggtggtcttcactgggttgccttcctgggcttcactgggttgatgaaggactagccagagaaggggactgtgaaccagagaatggtgatccccagggtgggggctgtgagtgcaacagcaaagtcaagggcactggaacgagacagatttgagttgaatctaatctctgtctcttca

SEQ ID NO: 48215 - DNA, 1012 bp, Bovine  19866881824497
  misc_feature (1)..(1): n is a, c, g, or t
nctactgacaataggtcctactgacccatggtcctgatggataaaagctcctattgaaccctatctcctattgacctatggcctctgctgactcatgactcttgccaactctcggtttctatagatccacagttcttcctgacccatggcttctgttgacactttgcttctatttttccatggatcctgcagaactatgatttctgatgaccctgactcttggcccctattcacttaggtcctttgctgacctatgccctttgctgaaacataggtcctgctgaccagtgccttctgttaacccatgacttgtagtgggaagatccaacccttcagaagattcagggtttcagaaaactagatctcagttcagggtaggcctggaatttcaacaaagatctgtagccctgattatggaaactgcccagtggtgcatgacccctgtacaagcattttgcgccctccccaaccctcctcaattaactccactgcccattttcaatcataagctatctgaaagagaccatgaaaaatcttccagttctaggctagtgaaactgggctaatttttgcagaaaatctctaattcaacttctttaaagcctgctttctctgtgaagccccagagaaccagcttatgcagtgtgtgagcactccaaaaaagtttatcttctattttaaaagaaataagttccttaagtggaaatactacctgaataggaaacattaaaaaagaaagacagaaagaaacacagatttataggatttcagggatgagagaacacttaaactttgaatccttcctcttttgtatgaatgtctttacaagatcctaagaacaacccagtctctccttgaatgcctccagtgaacacaagctcattaattctggaactagaccattccatttttgcatagttttattatgacaaaaatttcttaccctgattccaatatctttctccctgttgttaattcagccctatgggccaatgggttttgggagggaggg

SEQ ID NO: 48216 - DNA, 702 bp, Bovine  19866882157539
  misc_feature (1)..(1): n is a, c, g, or t
nttctacgacagtggcagtgatggctgtcagaggactgctgcaggggaatagctgtgggctcacacgagacccctgccagctgcggggcagaacagtggaccggaaaagagactgagattctccatagctgtgagaatcagcttttattacctttgagtaagttctctttttccttaatgaagacagccttcaaattatagcaaaaaccaatgcgagtcacttatttagacatttatttcacatacaagttttcaagaagacatctaagtgaacattcacacaaaacaatgagtggacatacatttatactaggaatgcattcagaggtaagggcttagcattgcacttggggtgtccccggctccctcagagttgaggcttgtctgtcatggggcaccagggtccccaaattggctttcttcactgcagctacctgccactgtctgtcgcctgctgttgaacatgagtgatttgtcccttctcctcactgagcatgctcctggactgctcacagcaacctcttgctgaagtatgggatgggctcatgggatggatttagtatggcctgaacgctgcctgcggtggtgagccagggtggcggcctggtcttataacttctctcttctgatgccccacagcctcataggagctgggagtggtcttggcaatcatgctcaacttctcttcagataaggaactca

SEQ ID NO: 48217 - DNA, 3353 bp, Bovine  19866880145642
  misc_feature (1)..(1): n is a, c, g, or t
nattgccctcacatcctaccacttactcctgattcccattgtttcagttagctgggaaaaaaaaaaaaaaaaaggatgcctgatacggttctgcccttcctctgaagattttgatatgtggattgtccacttttcagaacaaacctgtgtcttttcctcacacaatctggtaaatattataatatttaagcatcacaagggcattgatgcatagctgaactctggactggccaaccaagactcacaaggagcaggtttcaggaaaccaagatgatgggtcctcagccacctgaaaaaatatgcagcaactcaggttacatctggaattcattgggtatttttctctgtctcttcctggccagttttctcaccactctacccatgaaaatgcagctatctgggtgagttcgtgcacatactctgattcagtttttcaaggagcaaatattgatcactgccatagttcaaagcagggcctcgagtgttaaggtgggagtgggggtctttcagggcagtaggggagaagtgggaggagcccccttagcagctgggattcttgaactcccaggtaatgcagagaatgcaatgatttatgaagtgtactttaccaagtaacagtaaaattgtgtgataccatttagaccatactgtatttctccaaacatagtgattgcattttttaccttaacagttactctgcagtctataaaatatttacgttacctttctaaacatatacattatttactgtacagtctgtaaaatatttatgtgcctttctctaaagatactgtatatggtatagtatttttattcttttttccccttcctgaaccatgcacgcagtgaactgggacacttttgaaatcaaggacagtggcaggaaagaagacacaatgccacagaaagaagagatggggtctttgttcttgttggtcttattctcatgggcccaagtgctgtagacctctgttggcagagaaaataagatatcaggtgctttgggttcaacgtgaaggactaaaatggaaagtcaatatacatccatacaaatttcaaagaaaggaaggatcgcatctgtgtgtattcacacaaacacatacaggaacacacacacacatgctcctaagacataaaatgagttgttcatctggcttgattgcctagagtagagactttttcctctctaattgggctaaataattgttattctctttcctcacttggttgagtcctgagaaatttccctgtgatgaaggaaaaatgtgaatgggagaaccgaggcatttattgaggaagtgcggcctgataaacactaccactatctccaaatctttaataaaatttatacaacattccgagtgaaagaatttgactgaatttcccaaagatcaaatttttcaaataattgttaaactcttcacatcatttggaatatatactctgatacagagcctatgtttatgggttgccaataatcaagtgaaaaattaagaaaaaacatagtcagtcatgagaatgttttgtcttcatgatagtaatttagtttgaagttatccagttaggatccagacttgtttcattctttggaacgcacagtatcactagttctctgtattatagagaaaatgggcttcacatgcagaaacacaggatggagggggatggggtggaactcattaaaaaccatttaatgctaaactaaatgtcggcatactttgaaagaggcctattagttaatgtacacaagaagatatcagtatttatgataagccaaagaaaccaaacagtgaaacccattacatagtgcttataagacacttgagttttaagcaatgttttagataaattagattggaattgacagaaagaaaaatagctcttatggggaaggatttttatttagaccccttacctggagccaaaaatcctgagttttgactgattctgaatgactaacttgtctgcaatgaatgggtgacctcatagcagacagataaaacataattacattacaactagagggtactttttgttgttgtttttatggatataatagacaagatcctcaccaacacataaataatgctattgtttccaaaggctgcaatttaaaacctccctttcttagtatagtcagttagcattaaagtaaaaaagcagttctggtacatacttccgataatctggcttgatctaagaataacattaagaactttcagagtaatattaattctctcaaaggggcctgcagtaaatacaaggatgtaatctctggcaatgttctatggtgacagttgagagaagagaagcataagatctgatagtcagttgaaaaggacatggataaggaaaattagtgggtctacccccaaaacaggacagagtggatgatcactccacatcagagaaatatctgtagaaaggcccaacatttttataaatgaataatacagactatagtaataggccctattacgttatcataaaacattttagatgtaaaatattaaaacggatatgattaccagctatcatcagtggaggggaaaaaaagtgatacttaggcatatgtcaaattttaatcaatttagatatttgtgaggcctctattattaactaattgaaaactgtgcctttgggtaattgaatgatttgacctcatataaaacttttggataaaagccaattaaatgccagagaatgtatttgaagctgataatttcagttttagtgtacttaatcttaaatgattctttctgctaataattagatagcagaacctgttttgtttagtaaggtcactgttagaccatagtaacaaaaaacatgttactggtttcaggaagaatcttagtcattttgcatctcaattagcaggaaactatttacttagatcatccaaaagtcaaatcaaattatcaggataagttaaaggaaggggatccaaaatgaaagtattaaatttatatcttttagttttttgtctcaatttttatgactttcatctaaactctagtagttaaataacacaataatagctaaatattttatgaatttctattatttatcagtactactctacattgtctataaatcaaaagtgaagttgctcagtcgtgtccgactttttgcgaccccacgaagcctaccaggcttctccatccacgggattttccaggcaagagtactggagtgggttgccatttccttctccaggggctcttctgacccagggatcgaatcctggttccccacattgctggtagatgctttaccctctgagccaccagggaagcccacataggcatacatttatttaattctcaaaataattctaggaggcagttacc

SEQ ID NO: 48218 - DNA, 1932 bp, Bovine  19866880503924
  misc_feature (1)..(1): n is a, c, g, or t
ntataagaatgttaaatatatgaggaaaacttatttaaatcaagttgaataaaactaagtaaacccaaatagtagaagaaaagtggggaactgctaactaaattcctttttagaaaagtactcaacatctgattgaaataggtaaattatatgaccaactctgaacccagacagccttaggaaggcctcgtgcctcttctatttattagcaatatgtcattgagagcaagttgcgttacttttctatgctgcagttttgttatctgtaatagaagggcagttttattttttttttcaaaataaaaatttttaaaacattaaaaccgactttatatggtaagtacatttccccatggctggaatgcagtaggtgcttaataaattttatcttttattcctagcatcttgaaaacttaactcttctcaacaacctccctaaaactagttcagcaaaaaagaatttctgctccgaaagttaaacttcatggttcaagatgacatgttgcacactggtttccaactgaacagctctcatcccacggccatcaaggggcatgtcacagctaattatctgtcatcacgccctgttgcataggcagtaccctgcctgctgctgctgggacctcggtgctgtctgttgattcatttgcatcgcctcctgagtgtctctgctctgtacggatcacacagaatgaagcccaggggccaactagcaggcccatctgaattgtggaacatatctaaagcccctcctcattacttagtgagtaatgtgggggatgttcgctggttcacacaccctggcaatgcaaacggtcatctgctgcctcatctgcttttctgcgtctggggtgcaggaccagatcggctgaggaactttgctagcacttatgcaaatagctatgggagttcctgggtttggcaacatttcctttccgaagcctcatttgcgcctgcaccgtctgcctcttttgtgcttccacgtttttgtgaggagacctcagaatacatctctcccatattcatgttgtatttatgtcaatacatttaatccaccctgtttaatgactgttgatgtgtctgtttaaaccctaaaagaacatatttttaagatacaatcagattacatataactaattttccaaattaaggagagtgtattttccaatttaaagtacataaataaaatgttaatatgtgtatagacatacagcaatgagtccgaaactgttaggcatgcacatgtaatatcttaatttcgtaccaatactgtattcttcaaaatacattacatcatacatacttaaaaaaaaaaaaaaacaaatttgattcaaattttttaaattattttcaaccaacttcatagtacgactatggaatcagcaacagcacattaataaatgacaaagatacaatttaatcttgatacaaattcttattccattagtgaagtttctcaacttttcttcttttctccatgttgtgttataatttttaaaaacttttataaattttataatttaggagatactcctatagaaactaaattcaaaatttgcttaaacaagaaagaaaaactaaagatttagaaataagccaccactgtagaggagcttgatccataatacaaggaactgggaaaagctctgcatatatgatacttaaaactgatttcctctaggtggcagtatagtcccagaacttaaaccttaactgtaatgaaaaactaagagctccaaaaaataattgcttattaccagtccatgctatttatacatttgaaagattttttttcttttgaaaactaagctaaatttacaactgtgaatgttcatctgcagatgacatagtggattttgtactagaaagaataaaatgtggttatatttcagcacacatacatgttttccatatctttgtggcactgtaaga

SEQ ID NO: 48219 - DNA, 711 bp, Bovine  19866880597000
  misc_feature (1)..(1): n is a, c, g, or t
ntgtttccccaaggcctaatatattgaaaagtaaaatcctaaaagttaaagttagggttactgtattatttgtaatataattttctggacccagactactttattatatacatcctttatctgactgcattatatatgaactgtatttgccttttgtccgtttaaatgcctaaggaatctaggacttccctggtggttcagatggtaaagaatccacctgcaatgcaggagacctgagtttgatccctgggtagggaagatcccctggagaagggaatggcaaaacacttggtattctggcctgaagaatttcatggacagaggagtctggtaggctaccgtccatggagttgcaaagagtcagacacaactgagcgactagctaggagtctaagaatggtcattaaactatggggaactttaagagactgggtttcttccccagttggattctgttcacagagaaagaaagagagcctcttatttattatcattttaaaaaatccagtatctaatgaagtgggaacattgttgaactcagatgacaaattttaaaagaatgcctcagtcacaaaaacagagtgatgtgatctaagcttcacacattccacccttagaacacttcctggtatgagacagtgttttagagcaaaagtacagtctctaagactgtgtatgttgtgagtaatgtcactctttaatctgctgctg

SEQ ID NO: 48220 - DNA, 987 bp, Bovine  19866880803465
  misc_feature (1)..(1): n is a, c, g, or t
nccattccaatcttttttcccacttagatacctaatatttccccctctggtggtagaccctctgtgacggcatttactccactgtagcctatcattcagcctggcgtgctgcagtccacggggtcacaaaggcttggagacaacttagcaactgagcaaccatggtaacatacccagaagggtaatataggatctacctgggaggagggagtcatgtcttatataaaataagactgcttagcagccttgagtttataatgcttaaaaagtcactcaacaaatattaaagcaattaaattggcggcacttgaattttttaatagcttagtagttaaccgcagtataaagagggatgagtgcacagcctgcacacttctcatgcacaaaataaggaaattattgatcatcacactccttaaatcttgcctatgaagggaaacaatgccaggaattgcttcctcggaaccatggtatgcccaacaatgatgtctcagtgccagaaatgctaatttaccagggctcgatcatcaattgttgaagcccttctcttaggagtaatgtcactgcatggcaagttggcaattatttgaggagttatttcaataactgcacagctctttgtctgattaatgaaactgccaatggatttacaactcctgttacggaaatgtatcactggagatttgctgaatgttgtgccataaattccagacacctgagaaattacgacagaatttgattagaatggctactttcatcttccttttttcactaaattcatttctcattaactactgctaccactgtatggactacgagagggctatttatgacaaaatattctgtttgctaaagccattctttctatccctgtccacactatctaaatttccttgcagatcgtatttaaacatgccaatgtagattcaatgcattgaatagggataatgtcaagtagggataatgtcaaagaaaaaagtttccttg

SEQ ID NO: 48221 - DNA, 1451 bp, Bovine  19866880907775
  misc_feature (1)..(1): n is a, c, g, or t
nttttatttcaattataataattattcctttaacttactgggaagaacaaataaaattttgtaatgatcctcttagaataatttctagagctctttcttggactttatcaaatggcagaatttcagaaagcataaccttagtattctacaagacttataaagatattactttacccctatccatttacatctcctgcccccaaatttcttgagtatcttaacaatacttgatatgatctctgctgctgctgctgctgctgctaagtcacttcagtcgtgtccgactctgtgcgaccccatagatggcagcccaccaggctcccccgtccctgggattgtccaggcaagaacactggagtgggttgccatttccttctccaatgcatgaaagtgaaaagtgaaagtgaagtcgctcagtcgtgtccaactcttagcgaccccatggactgcagcctaccaggctcctccatccatgggattttccaggcaagagtactggagtggggtgccattgccttctcagacttgccttaatagaataggcatatgtgggttgtccccaattctagttgtggatctgccatgggaaggtcttattgcacatctgagattgagctgtttgcattgttctaaacaggaaatgatgagatacaaactccttagttaaccactcaggagtaaaatgcatgttttaagttgaggacatgtttaaaaatcaaaaagcagatttgaatcagaaagatggcattcccagaggtaccttccggaatgctatgatgtgacagtcccactaggcagcaccctccagggtgattcagggtcaaagatgtgggctgacagttggtggaactgtgtctggaccatgaagaaaaatcaatgaatgagctccaagcacaaacgcaactctccagttaaacatacacaagatctttttcaatattaagcaaaacacatggacatttagtttacttcattataaacccccaaatcacagcagcattaatgtcgaagtggtgcctgagggcccattcaaagcaagcccggaaaacacttcttgagcaaaaaggcaactctcaacacagggtatcagagttttaccatctcattgttcatcttatgctcattttggcattaaataagaagcaaattacagattgaatacttccgctaagacaattttttcccttgaagaacctaactagttgacaacaaatgaaaatgtgtgtgtgtgtgtaactcactcattaggtgcagaaatggttgatggattttcattgttcatttagaagccataggtaatgctgggtcaccacacaccataaaatgtcttaagttcctttgccacagtgcgctacagagcccttatatttatctgaccccacagcagtggggatctgggccagaggactgtagagggtttcagagcagcttccttctgtgcatccactgtg

SEQ ID NO: 48222 - DNA, 1168 bp, Bovine  19866880947515
  misc_feature (1)..(1): n is a, c, g, or t
naatgtttcagatatcatgatgacattttttatggcacaatgtttaaaggaatgtctttatattcattatatcaaaactctatgacattgttgaaagcaatgaaattatttatttcaaaatgtgatatatataaaatatttcacccaggatatattcttttttaaacaattttttttaacaattttttaaacaattaatgatggactatggagcttgtttttctacacaaaatatttttcttcaatgtaaaagagcaaagctcaattggtctgtgtagtataacttgttggaatgtgtagacaatcctaagttcaaaccataatatggctctgacaatataaaaattctatgagaagcaaatggctaatcagttctgatccaaacgttgatgacatactatgctacaattagcatgacctcttccgtttataatgaagatgaaaaacacaggaaaatatttataattctgcatgaatgagaatttaaaattataactgttatattcacaaccactaagaataactatacatatgtaaatatacaacacctggaatagaataaattctaatcataatagctgcattaagtttgaaaccttttggggtagttaaaaaataatatttaaaagaatttttacataaacgtgaaaaactcatgaaaatagaacttaatatttaaaacattagtctcagtaaattcagtaattatacatgaggatgcacttaatttctgaaattactttttatacttattaatgatctgttgactacatttcatttatcccaatcacataattccttgtcttcctcctgtgaaattcagagaagtaaagtaaggtgagtggaatgatttaaagaaataagataagcagagatcttatcatgactcctttgggaatatataaggtaataaaactccacaaggttgtttttactggcaaatattcaaataccagccattgacttagagcttcactggtcaaaagttagcaaggcaagctgctgtgcaatgtctgcgagcaaaaggccctaagctgagtagggcaattgccaggctctgcccagttttattagggctgctttaaagatctagtaacaagatcctaattagctttccttattttcccccaggtattcataacacagaggccaagttcaaaatcagaga

SEQ ID NO: 48223 - DNA, 685 bp, Bovine  19866880948633
  misc_feature (1)..(1): n is a, c, g, or t
nattaaaagtattcacaagccttgtttccattcaagtgaaagatatacaaattgtgtatgagacagaaagtaaggaaagggaaggaacttttagaaaatgagaagtcagcgacttggaattctaaattctttggaaaagtaaattattaatttctttgaatggtaccagttatgtgtgcgttagtttgtatttaatttctttcattcactgaaataaagactaaaaagacaggtgtgccattaccaaagcattaatgcaattcttcagcagtccttcccaggtgtgagggttttccacccataaaagattgtgactgattaaaaatctcaaatcttctgatttgggcaaagactgtctgtagaaataaaatcctaattacactagctaaaattatttcaaggcagctcacatttatacttcttttgacttaggcagtgacatgattcagctctgtgtttagtgctcagtactgaaatagggtcaagaataatttcccccagaagcctgattgcagtctaagactctggttagctctgtgtcagaggtcttctttctcttaggatgtaaccagccagtaccctttatgttggtatctatggtgggatttggtttccttgttatatttgggagttggcagaggagtcgagcggcaacaccactgtagctggtgattgggattccaat

SEQ ID NO: 48224 - DNA, 1324 bp, Bovine  19866880971894
  misc_feature (1)..(1): n is a, c, g, or t
ntgttctaggttaatagctctttttgcttcctctgtctttctctcttttgtaggaagaagaagaaactttctttcctgacttacagtcagccttagaaatgttgaatcattgcctaggtgcatgaactcagttctgagcagctttaatttccagcagccaacatttctataatataagctctctaaaggaggcccacagaagaaccagaaatctgaggttgtgtagaaattttaatgagaatggaaaatctccacgtttaggcgtctatccttgcatattaatatcattacatttaaagggtgtttgatttcaaacattgaattaattaaaggaacttccaggtcgagttataaggccaaatcaaatgccaacagctccctctactggctactggaggaaattatttgatctctggctgaaattccaatcctttggccacctgatgcaaagagctgactcatttgacaagaccctgatgctgggaaagattgagggcaggaggagaaggggacgacagaggatgagatggttggatggcatcaccgactcaatggacatgggtttgggtggtctctgggagttggtgatggacagggaggcctggcgtgctgcggttcatggggtcgcaaagagtcggactgagcgactgaactgaactgaactgaatgaaaacttgctgtttatttgaaaagcgtcttcatcaaattaagttctttggaaaacattgaagcttctggggaaagatgaaagacgttcatatgtggtgatagaaagaaaaacactaagaattacagaaattgatagtcatgtgaattttctactatcaacaaagagttcctgtctccactaaaaatcatctgctcattctcttgccctaggccatctattatatagacttcggattacagttaaaatattattaaggctacctttagattttcattttcccaaatctaacacaaatattacatttattttctggaagttgaaaaatcttagtataagtagccattttttccacattatttgtcacttgatgagttctacaaaaagaaagaaagaaagaaaacaagaactacctttattgttatttcattaagaatagaaagatcacttttaagttgcatgccattcggaagcaataatgttggtttcttttatttaaactttaaaatttggtataataaagaatctaattgggacaacaaaagtaaaacatgtaaaaaataagctacattttcctcccaaactctgtgcctcaaccttcctgaagagtgccatcctctcccacctgaaacaatcgatctattttggtttcactca

SEQ ID NO: 48225 - DNA, 1115 bp, Bovine  19866881072047
  misc_feature (1)..(1): n is a, c, g, or t
ntatttgcaaaagttgataagccggggatgaggaaaccttctaagattttgccaggtacctggagattttcaaaatacctaaactgaaggttaaaaagcatcaatgtttcagcggctaggttagatcctcatcagagaggtttggatttcttggaggattttcctaaccactttgcaatttccttcagtccactcactaaccttgaatcagacaatgtgtctgcacttaatggtcctttgacacacatatgctctacatttgagctggaaaggctataaatattttttccttgtcttgagccaaatatcttgcctactgtggatagctacagggtatttaaaacaataacaaaaatgttcatgtatttaactgagatatagcatgttaaaatatttacagttaatacaacaatgcttctgtacttgttttatgaacttggcctcaaaagagtaaggggaacaaagtgttaaacatgcatgagctattattgtatttgtctccctcaacaaggagtaatattgactataggacttgagaaactataactaatcccatgtctaagaagaaaaatctctacttatgtagaggccatgttcaaatgacccaaatgtcctcagaccccataaatcatgagataaaatgagtgaaaattaagtactattaacaatcactacctacatctcactactctttggccttttctggcctcaccacacagcctcagtatcccatcacccacccccaccaatgtccagtgtcctttttcctcttaagagcttccttattttttcatcacaggcttttttctccaatgtagcagaatataaggtcactgagaattcccacagtttgtattttacagactcaagaacacagacagactagaccaccaatctcctgagccaaagtgaaaaccctaaagggacagatgaactggtctaatacaaccaatccctgggtcagttaactgcagccagggggctgagccacactggacataggctgcttttgtttctgcggcagcctgtggaaagtgaataacattttaataacagtagaacatctttcctagtgaaaaaatagcagcttaagttttcatccttacatccattta

SEQ ID NO: 48226 - DNA, 3435 bp, Bovine  19866881271007
  misc_feature (1)..(1): n is a, c, g, or t
ngttaggatttgaatttagggggtgtggttccaaagtcgattttaactgtcttccaagatgaagacggtgtgggtataagaataaaagaagtcatcttagggtactttgaataaattttcaggaaaaatttgaagagacttccaggatggccagtaatatagcagacataggaatttagtctggcaaagccatctaggggccaatgatagatggataaaatgaagaagatttctagaggctcagaaatagctggcttcatataagaatagaagaaatgaaattggccattcaaccagtgctacaaggacaaattgctgatgtaaacatgatgactcatctagagacgggggatgtctggggttagtccagaacaattacttagaccaagttggttttatagattatgtaatggcagcctatacatttaaaaaaaatgctagctcattgttttctataatatattaaattggatgaactaaatgggcgaagtaattgatttggcagaaattaaactacatgtaatttcttcaagatcatacactgtatttaattatttctatatcatccattgtgcctagaataggattttcacatttttcatatcagaattgctgagttcatatgggatttacagtgcaattaaaatagtaatgggtgggtgcaacatattaggacaaaaatagtcgatatttattaaatctttactatgtgttaggccttcctctaaatgcttgatggccattaagtcctttacaagatcttatttgggaagatgttattcccattttaaaataagaaaatcgagactcttagaagttatacaacaggttcacggtggaataagtggtaaagctgcaactcaaataaatttatatgcctctagaaccaaaggtaatatattatccaccatactagagacagaccaagagagactgagacagagaactgaacatttgtacctgtatgtattatgttggtgcaaacataattgcgggttcagactgtgaattttaaatcattataaatacgctcaaacacatctttattaatcaaaataggaaccattgcaatcaacacatttttgccaacaagaaatgtttctttattcctgtgccataaaaattcatccttcagatttgatgaactcttagaaagcattttctgcctcctgcaggttgtggaactcctttccctgcaaaaccttgtcaagatgcttgaagaagtgacagttggtaagaagtcaggtgaatatggtggatgatgcaaaatttcaaagtccaatttgttcaactttgggaacattgattgtatgaccttgcagttgggtgttgttgcagagaagaattgggccttttctgttgaccaacaccggctgcaggaccttgcagtttttggtgcattgcatcaatttgttgagcacacttctcagatgtaatgatttcgccagtattcagaaagctgagatggatcagatcaggagcaaacgaccaaacagtgaccattaccttgttttggtgtaagtttggctttaggaagtgtactggaggtttttctcagtccaaccactgagtgggctgtcgccaattgtcgtatacaattcacttttcatcacagatcacaatcagatcgagaaatggtttgttgttgtgtagaataaaagaagacgacacttaaaaacaatgattattatttttttaattgcggtcagctcatgaggcatccacttatcaagctttttcagctttctaagttgcttcaaatgccaaatgaccatagaaaggttgatgttgagtacttgggcagctcctcatatagttgtaagagaatcagcttcaatgatcttctccattggtcattgtcaacttccaatggctggtcactacactcctcatcttcaaggctctagtctcctttgcaaaacttcctgaagcaccaccacactgtatgttcattagtagttcctgggccaaattcgttgttgttgcattcttggctggctttacaacccattttgaacttgaaataagaaaatcgctcaaatttgcttttggtctaacatactttccctagtctaaaataaatttcaaataaatagcaattaataagtcattagcagaaaaacataaagccagaaatatgcattaaaatgatgtataacataactgcatttatttaataatctattccaattacaaacagcaaagttcaacaatgcaaaactgcacttacttctgcaccaacttaaagatagaagcaatattaacttaatggatgctaatgaaatggctatacagagctctgaaatgttttatttgagattatcagaccataattctacttcccccacacatgccttctatttcgaggctcaagatctacatgaaaaaaaatctctggtcagtgattatgtctatgaatccattagggatgaatagtgccaaatatatcttctgctgtttgtgctttgtaaactactttctcttatttaatttcattttatgatcacaatcttgaaatgtagttcagggattcttatgcaaaagcccagtcacgggaaaggactttgaggtcctagttcacagcaagacagtgatagaagatcaccacaatagaacccagagctactgatcctcaatcttgacccaggtcttgctccttagttttatttaaatggaatctctttccttaccatatgcctccagtatttactcagctctgtgtctaacccaaaaaaaggtctacagaaaacataaattgaaagaagacaagtttttctgcctgaatagctgaaattttaaagatacagtaagatgggttttaccacctaatgatgacatcattaatcgagctttattatcattgtgagtgccccagaaagtacaatacttggtaagtgcaagctttcagacaaaagcgaacatgagtcgttattttttaagttggtcaattgcacccctcttaaaagatcaagctttcacatcagcacacctgaatccagatcctaacctcaacttgtatcattagtggtaggggcaagttagactcaaattctcaagaccttagtttcctcacctatagaaatgatctaacaatactgctgtttaggatagttgtgaatattaaataaatcacataaggtattcaaatagtacctaaacaagggtaaataataactggcagttattactttaccatcatcattatcatagttttatattttatttataagagcattggttgtaatacttcctattttataccataaagaaaggataaggtttcaatccaaccctgccttgccattgactataagatgcatcaaattcaataattttaacaaagtgaaaaaaaaaagtttcatcttaagtacataaaatacagtacagatatgcactcgcatgtgtgtgtgtgtgtgcgtgtgtggttttcaaaga

SEQ ID NO: 48227 - DNA, 1535 bp, Bovine  19866881356328
  misc_feature (1)..(1): n is a, c, g, or t
nccagtatgcctgcaggctcagtcactaagtcctgtccaactctctgcaatcccacgaactgtagcccaccaggttcctctgtccatgggatttcccaggcaagactactagagtgagttgatattcctgacccagggattaaacctgcatctcctgtatctcctgaattggcaggcggattcctgaccactgagccacctgaatggcacattactaataactaaagcccacacttcaagtttcactagtcttccattagtgtccttttttggcttgaggatcccacattgcctttagtcattacgtctcatctcttctggtgttttccagactttgtttttcatgacaatgacagctttgagcacagtttagggaatcctaaagtatgtccatcaatttgatgttttttctcagctcaagtttaataaaactacaaaagatcaaaagtgataccctactactgcacacatcagctagcctgctccagaacacagctcaggccttcttcagaggaagaaaggctggcctcccaacccctgcaggaaaggccacatctggaccaagtaaagtgtgttttcatgacaaccgtacaaaagaggttatgttcttatggccacctactgcagcctggccctaaaatggcccagcactcacttctgattagagaaatattctttgctctgggcatcaggcttcttggtatcaccaccaggcttccagcgcgctggcacgtccccatatgtgtcagtgaagcggaaaggcctgaactagtgtcagtgtctcatccacagagcggccaacaggaaggtcgtttatggtaatctgtggaaagatacctttaccatcaatagtaaaaaggttcctgaatgagaagccctcatcagcctttaagaccccacagtactgagcaacggtgcgctcgggctctgatatcaagggaatgtgcatggcccccagccttccttgtttcttgggtatgttgatccacgccaggtgacagaagtgagaacccaaagaagcaccagttacttggtagttgagtttcttaaattcttctgccctatcactgaaagcaaggagctccatggggcacacaaaggcgaagtcaagagggtaaaagaagaacacaacgtatcttcctttgtggtcagacagacatatctttgaactgaccatctggcataatggttgtagttttgaactggggggcaggatgcccaattttcacatttcctgaagacatattgctatcggcagttctcagagagaaaccacacagcccagttaggatgaagacacccatcaatttgattttggctgatgcttttctcatggatagactgaggttagggctttgaggaagaataacacagaagtaggtgaagtgttgtcatcatatcttatgagggttcacactaacaatatgacttatcagtgttgctgacattgtttacctggcttagatagtatttaccagatttctctactgtaaagttcaagctagttttagaaaaggcagaggaaccagagatca

SEQ ID NO: 48228 - DNA, 1611 bp, Bovine  19866881473123
  misc_feature (1)..(1): n is a, c, g, or t
ntaaaatcttgactggaggaatgtcatgtagagttctttggtgtcacataaaaaccccctaagtcttatcaacatgtgcactttcactaatgagagtggccagcttagaagacagtggattctgtaggcaacgtcatgttacagactgttcttagtcacattgaaaatctgggactgaagggataaaaccggctctgaaggtttattatggagaacaaaatgtttaaaagaaagagcaagctctgaacttaacctaaacttctttatccacttatgttttctgacttccataatgatacttcaaagctgacatccgtaagtctgcatttaaagaatttcctcttattattcaactagttttaagttataatagtcctctgtttcaatttttccactataaagttttatttttacattaaaaaaaaaaaaacactagaactaaggagaattaggtactactttggaaaggaatagtgcagtgtttaatgtttttgctgttgttcactcgctcaatcgtgtctgactctttgtgaccccatggactgcagcatgccatgtttccctgtccttcactatctcctggagtttgctcaaacttacgtcttttgaatcagggatgccatctaaccaactcttcctctgttgtccccccatcctcctgccttcagtctttcccagcatcagggtcttttccaatgagttggctctttggatcaggtgaccaaagtaccggagcttcagcttcagcatcagtgcttccaatgaatattcagaattgatttcctttaggattaagtggtttgatctctttgctgtccaagggattctcaaaaatcttctctggcaccacagttcgaaagcatcaattctttggcattcagccttgtttatggtccaactctcacatttgtacatgactactggaaaaaccatagctttgactgtatggacccttgttgaaaaagtaatgtctctgctttttaacatgctgtctaggtttgtcagagcttttcttccaaggagcatcttttaactttatggctgcagtcactgtccacagtaattttggagcccaagaaagtaaagtctgttactgttttctcccccccacccccatccatttatctttccttccaaggagtaggcatcttttaatttcatggctgcagtcactgtctgaagtgattttggaggccaagaaaataaaatctgtcactgcttccacttttccctcatctattttctatgaagtgaagggattggatgccataatcttagttttttgaatgttgagttttaagccagcctttatactctctctttcactttcatcaagaggctctttacttcttcttcactttctgccattagggtggtgtcatctagatgtatgaggttattggtatttctcctggcaatcttgaatccagcttgagcttcatttaacctttaggcccaatatgaaggaagtagatataccttattcacagtcaattgcttatttattcatttcacaaatgtttattgaatacctattttccactatgtacacaatctgtacaagtaggtaataaagttaaaaaatcaaaatccccatttcatatatagaat

SEQ ID NO: 48229 - DNA, 844 bp, Bovine  19866881499133
  misc_feature (1)..(1): n is a, c, g, or t
ntatagaattatctttttatttttaaaaagttttacttatttttactggcatatagttgcttttaaatgctgttagtttctgctgtacaacaaagtgcatcagctacatgtatacttatatcctctccctcttgaagctgcctgccacccccagcaccgccccccatccttgtcagcccagagccctgagctttgaattcagcagttaaaacctaaaatgacttttgattgcagtaggtaaattcacataaatatctctaagaggagatgtgtgatgcatgagttacaaaaaagagaaacccagactctagaaaacaaaagtgaaattcttggttctcctctactctttgaacttccatatttcctctaaagcctgacttgtgatttagttcatataactactttatttaccctagcatttcaaatcttagaaatttctattctttaacactcagtccctttgggtagcttgccacccacttctttgaggtttatcctatagctgaacctgtgataagcaaagaaaaacatacccttttacttcaatagttctgtaaagattagttacttcctatccagattagtatttagagctgagattaccctgaaaaaaatcaattggtcattctatatagaaacagaaaaatgtgtatgttgaccagcctcatcttcccacgcatccaaaatatgtataaaaatattgtttagaataaggaatatctcttccatgcaggtgagtggtacacaaacagagtgcaaaagagcataaggaggccaaagttcacaatggtttgatgaataaacaagggtcacaaaagctggaaatacaggcagtcttaccagg

SEQ ID NO: 48230 - DNA, 1163 bp, Bovine  19866881558449
  misc_feature (1)..(1): n is a, c, g, or t
naagctgacagctggttttgattgagaaccacagcattaaaagcaatagtagcagcagaccattgcatatagtcaactaccttttcctggggaatggagagctaattgcttgtcttgcaatttcttctcctcttcaaaggaaatcagtttgattcctccaaagttatcaagcataaaagaactctgcccccaaatcaggattgccctttttcattttcctcatgatttctgagattttcactgctggtactctggtcttcatatcctgtttttctgcttccacttagacgtgccaattaaagaaagatatggtttatttaaaaaatatggtcctagtgctgactgtaaagagagctcttaaacaggcctgaactcttcatcagaagtagttgaacacagtaagtaaatcccatgttgaatggtgaccttgtaaagtctccaagaagcaggactgtactgggctttgtagtagcttaaatgaaacaaacctgcttcttcccttgggtctcaccaatcctgggccaggctatgtaatgggcaaggtgcccacttcaaggggctgttagaacagtctaatgaagtggtttctcaaatgtggaccctgaccagcagtaacacaggacttattagaaatgtacagtctcaggccccatccagccctgatgtggggcccagcacactgttataacaagcacttcaactgactctgaagttatatgttcgcatttgtgaaacactgatctagagcatcagcaggatttctgttgatgcctgttggcttaaacctgatttaacttcacttagggggaatgaagaagcccatgtgagcaaagttgaatggacagcataaaacaatggcaaaaagtaccaacgtatgttgattatgtaaagacagcctgatatttaggcctctctcatacgcacacaaacatatcagtttatagatacaaaaccattcatttaccaacaaatatttgttgcagtgtatcacataccataaaaaaggctgagcattgaagaattgatgcttttgaactgtggtgttggagaagacacttgagagtcccttgggcagcaaggagatcaaaccagtcaattctaaagtaaatcagtactgaatattcattggaaggaactgatgctgaagctccaatacttggcca

SEQ ID NO: 48231 - DNA, 1077 bp, Bovine  19866881892246
  misc_feature (1)..(1): n is a, c, g, or t
natataaatcaacaaaccacacaaacaaaatcactactagaaacctcggctacagaaaaagacaatggctttgtttatgtgaaataaaatatcacagtaacctgcactattccaaagaaaaacttccatcagtttatcatgaaaatacatcatcagacacatgaaaatatattatgttgattcagtatttcataagacaaagacattagaggcaattgccaagataaaagaaacagaatattaatattttaaaactacctaattttttatctccaatgtatccagcaatggtaattcctaatccttggacatttttagtgagttctacgtcaaatgtctcactttcttcacttttctgagttgaagcatcaacctgaaatacaatttaaaaaaaaatacatataaataaacacacaaacaaaacaagctttttcaagccacactcttcatttagaaaaggtatgatgtaattagttcttaaagaactctgctaaagaattatagttagggattactccttcaatcttgacaacgtggcctcagcatcacatttttactcaaaagcaatgtcaggaacaaagctgaacaccctcttcagagaaatacattattggttttttgtgaaaatcataaaaaaattagtttcttattacagattatattttcaggagtggctcaacttcctttttgaagaagttagaggatataatagagttgaaataaggctttgaatgcacattaacaagctcaaatctagctttgtcattgactttttctaagcatcactttgctcagctgtctatcaggaataagaaaaagtccagctaacattcattgagcagtttctacataatagacatttgatatgtctcaatcaatttactccttagaagaagcctatgaatcaagtacaattactgtcagtttttatccagggaaactgaggaacataaacttttccaaggactcacagtgaaccatctaatagaggaagaattcaaacacagaggcgctggttgcagagcccctgctcttaaaagatgcacagtatgcaaacccccttagaagtaagggcca

SEQ ID NO: 48232 - DNA, 846 bp, Bovine  19866881998707
  misc_feature (1)..(1): n is a, c, g, or t
ntatctctgtactttatgttaaatttttgctctaggtttgatgctggctaaccaaaatcggggaaaaagtctctaatttgtaccttcatactatgaattgttttccaaaaggtgaacatgtttttaatctgtgatgatataatttatgttctaatgagcatggagtcttagaggatcagattagtgaagcattgagcagttggaacagcagatcacattcctggacttcccacacaaatgtttccatgtacttcagtcctttccaaaacctcagatttcctataacctcatgagaagcctcctgctgctattctttcctgataagctccagatatatttattttactgtctcaccttctccataaaatggaattagaaggaaacaaggggctcttggcttttacaatttattactcttcagagaattaatgtttgtacttttgagccacagcaacctttgttcagacaaaacattatactaaagcgaagggtggaaaacagataaaacttagctgctccaggtgaattagggtgggagcccacaactctggcaactgggtccattcccatccaacacaagttccagaagagctcccctgggcagtatggaatctgtaggctctgttgattgagcacagtgatcctcaatcctgtttgcctgttagattacctgaggaacttgttaaaaatatccctgctcagaacccacacccagatattctgatccaaccgatatgagttagggaagacaatcctccctgctgccccctaccaccaccagggctccagatgttgtaatatgcagccatggttaagaactactgcttcaaatcagtgctgctcaaa

SEQ ID NO: 48233 - DNA, 1538 bp, Bovine  19866880183093
  misc_feature (1)..(1): n is a, c, g, or t
nataggaaaaggagtacgtcaaggctgtatattgtctccctgcttatttaacttatatgcagagtccatcatgagaaatgctgggctggaagaaacacaagctggaatcaagattgccgggagaaatatcaataacctcagatatgcagatgacaccacccttatggcagaaaataaagaactaaagagcctcttgatgaaagtgaaagaggagagtgaaaaaggtggcttaaagctcaacattcagaaaacaaagatcatggcatctggtcccatcgcttcatgggaaatagatggggaaacagtgaaaacagtggctgactttattcttctgggctccaaaatcactgaagatggtgactacagccatgaaattaaaagacgcttactccttggaaagaaagttatgaccaacctagacagcgtattaaaaagcagagacaatactttgccaataaaggtccgtctagtcaaggctatagtttttccagtggtcatgtgtggatgtgagagttggactataaagaaagctgagtgctgaagaattgatgcttttcaaatgtgatgttggagaagactcttgagagtcccttggactgcaaggagatccaaccagtccatcctaaaggagatcagtctttgagtgttcattggaaggactgatgttgaagctgaaactccaatactttggctacctgatgcaaagagctaactcttttgaaaagtccctgatgctgggaaagattgagggcaggaggagaaggggatgacagaggatgagatgattggatggcatcacagactcaatggacatgggtttgggtacattccagtggttggtgatggacagggaggccttgcgtgctgtggttcatggggttgcaaagagtcagacacaactgagcgactgaactgaatgcatattagaactaaaaattattcatttatctgaaagtaaaatttaactatgtattctttattccatttggcaaccccagcataagattaaaaaggtaaaggttttgaagaataaagtcatttacatataatcaaataataattatgataataaaaataacaccacgcttaacataattttcccctttatccacctttttgctgtatagccacaattgttttgtttcagtttctgaaaaataacagatttttttcttgtgataggatatttgtgattttatcaacctggaaggaattacatcatcatttcaaaatgcgtcattcctaaagattaggtcaggcatctcacactcctggaaattttctctgacccagagcctactttcctactcccaactccaaatttattcttataactctctccaaaaatggtctttgtttctttcagagcacttgtctcattttgcaatttttaattaattaatgcaattatatgatcagtatctgtgtcctctactagattgtaaactttttggcagctctttctatatctcaattataacctcagcattcagcatatcagcaattcagcaaacagaaattgtttgtatttcatttca

SEQ ID NO: 48234 - DNA, 1611 bp, Bovine  19866880245710
  misc_feature (1)..(1): n is a, c, g, or t
ncaattgttggagagctggtttggtggtgctgaattctctcagcttttgcttgtctgtatagctttgatttctccttcatatttgaatgagatccttgctgggtacagtaatctgggctgtaggttattttctttcatcactttaagtatgtcttgccattccctcctggcctgaagagtttctattgaaagatcagctgttatccttatgggaatctccttgtgtgttatttgttggtttcccttgttgcttttaatatttgttttttgtgtttgatctttgttaatttgattaatatgtgtcttggggtgttttgccttgggtttatcctgtttggggctctctgggtttcttggacttgggtgattatttccttccctattttaggtaagttttcaactattatctcctcaagtattttgattacagtttcaatttccgtgcttgtgaagggtctgttaagactttttattgcttcttggttcagtttcggaaggttgtacttttctaagaatttgtccatttcttccgagttgtccattttattgtcacacagttgctgatagtagtctcttatgatcctttgtatttctgttttatctgttgtgatttctccattatcatttctaatattattgatttgattctcctccctttttttcttgatgagtttggctaatggcttgtctattttatttatcttccaaaagaaccagcttttagttttgctgtaaaatcaatcttaatgtctactagagatagatagaaaatgctaaattttacctatttgaaaaaatatggaaaaataggactgctgttgtatttccttagaagcaaagttcagaactttgttttttattcttataagtagctgttaaacagaaacattgtgtttgtttatatgtgtgtgtatgtgcagtttttatatttgatgatataaaggctatgactaagctgctttttttgatctgatataaagatctcaaaccatgtgtcttaaaagttaacagcttctatgtttattattttcctcagagataagataaatcttaaatctgtaacctgttattttaaaagaaatgtaacagttgctatttattcactacagagttatgaaacactaatttgtaaagcttcactgaattctgttggcaagtcactttcaggtgactgaaattattagccaattttcaaactggcaaaataattaaatgtgctctctaatatttggttattatgtagctcttctaaaaggatacatacatagactgcattttgaagtagatttttgaaacaaatatgactttttgtaaaccattaaaatcattgaaagtaagagtaaatatacaaattatattttactcattctgtacaacacaggacacaactagttaagtttatcctcagaatacttacctcattgaaaaataacagaaaagttgctccataattttttcctaaagacttatgaatatcacgacccaaagattcatgccaaatcattttgttccaatgaatgcaagaacatttccagaaatttcaggcttgtcaaaaacattagtcgcctatttaaaaatccattaccctaaatctcacttttaaggaagaaa

SEQ ID NO: 48235 - DNA, 2176 bp, Bovine  19866880471294
  misc_feature (1)..(1): n is a, c, g, or t
ncattgctgcatgcctggccctggcgggttgcccatgttcctagtgggtcattaataaaggctacaactgctcctacatttagattttcttctacactgactcagcagttgcagttatcattttacactgtcatggatcattaagaagtttctcctggcatgcttctaaaagatgctctcttcctctttaggttagagctatttttctaccctaactcacctttcaaaactggattttctttttaaatggatatctgggggggaaatgttttaataaacagctcagaatacagtaagtaatggtttaaaattcagttcctttgtgacttaaaaatcaagtgtttatttagaaaatgcctgtagcaaagagtgcagtttgggatttatttcatgtcacagattaaatgattgcttgcttacttccttcacttgcaatgcataattaataattcacagcaagttcagattagtcgttacattttcttctttacttaattttcaaagtcacttaaagccatctgagccctagtatttttacatcacaaaccataaatcaaattaaatgttggagtcagggagccctagtgctacatttaaatccaaagtcctggaaaaactacagtttatatagctgtgttataggctgtcacccaacaataaacagggccttccaggtggtgctagaggtaaagaacccgcctgccaatacaggagactctagagacgtgaattcagtccctgggttgggaagatcctctggaggagggcacggcaacctactccagtattcttgccttcagaatctcttggaaagaagatacagtccatagtgttgcaaacagctggacatgactgattgcaaagagttggacacgactgatgggacttagtacacgcatgcacaacagtcagttcagttcatttcagtcgctcaatcgtgtccgactctctgcgaccccatgaattgcagcacgccaggcctccctgtccatcaccaactcccggagttcactcaaactcatgtccatcgagttggtgatgccatccagtcatctcatcctgtgtcgtccccttctcctcctgccctcagtccctcccagcatcagaatcttttccaatgagtcaactctttgcatgaggtggccaaagtactggagtttcagctttagcatcattccttccaaagaaatcccagggctgatctccttcagaatggactggctggatctccttgcagtccaagggactctcaagagtcttctccaacaccacagttgaaaagcatcaattcttcagcgctcagctttcttcacagtccaactctcacatccatactgaccacaggaaaaaccatagccttgactagacggacctttgttggcgaagaatgtctctgcttttgaatatgctatctaggttggtcatactttccttccaaggagcaagtgtcttttaatttcatggctgtaatcaccacctgcagagatcttgaagttaatgagacctaattcttattaatcataagaattctctttagtatatgtaagtagtaaaaatcataagaatactctttagtatatgtaaatagtaattctattgagattaaatgaaatgcatgttcagctgcagatatatggcaggttttgtatgtttggtgtgtgtcacaatgatgtatgcacaaagcaggagatttgcctcttattcacttaagtaatatcctgttcacttagaacatgcttgatgtatagttcatgctccaaaattctagagtgagtgtgcatatatgtgtgttttgtgccttggtgtgtgtgtcggaggcatttctaagatgtgttgaggcagtgagtatctcaagctattgctgaccaccagctgagaggaaattcaggaaagattcccatgtaggcttgccagaactagtacaaataaaagtgtacgactaataaaggtcaaaagatataaacttccagttacaggtacttactaaggatgtaatgtacaacatgataaatataattaaccctgctgtatgctataaataggagttgttaagaaagtaaattctgagtattcatcacaaggaaagattttgtcttcattttgtatctatatgaaatgatgggtgtcactcaacttatgatgctaatcattttatgataaaaataatatcattatg

SEQ ID NO: 48236 - DNA, 1355 bp, Bovine  19866880905958
  misc_feature (1)..(1): n is a, c, g, or t
nataagctaaagttatttaatgatcattttttacctggagcatttactagaaattaaaatgctaggacttttctctctccctggaaaatcatcttaaaattaaatatggatttaaaacataaatatgccacctgggaaagcctgaatttcctcctagagaaggccaaaagataattttcaattttgatcctcttccttgctcattttatttcgatgaccgatgctctaagcttatttttgatttcgtttgttgccttctatatcgtatttcaaaagtttccttttatgaccgcctgaaatactgcagggcagattcaaacatgtcccaagcaggcactaaaattttaatgcatttttatggaaccggtctcagccccttcaacacaacatttatttgtccagaaggatgttagcagaacatcctcctatttacaactcggtaagcaaattgttcccatactccaagtatgtagaattttttatcaatgtcatataaatactgtgaaattcatgttatgcatctgcataagttcatcatattagctaacctaacaacacagtcatgtccaagtggacccttttaattaatgtgagtcttttctgaagttcaaaacagtgttgttattgtcacttacattaatatctgtcttgacacagttcaaataaaaatttatgccatcagtgttatttaccgttctagtcccactatttaaaacagcacacagcacaaaacaaacaatgcatattgaatcaatattttataacttttttccctcttttttaaaggctaatcgctctgacattacttcatttttcagatatagaggcaaatgcaacaaattttcaatgtgtacaaaggaaatgggtgagtaatggttaaaaactacacagctcaaattttccagatcaatctcataaggtgagatttacatgagtaaaccaaataattaacttgcttaaccactttatataggtagacaattttaggtttagggacacgtgtattgattcctgggttgcttgagagaggaaataattgttcttgtcatttcttaattacaaaaataatcactcatacaattgggtgtttcatcgtagtttgcttttttcaatgcaatttccatttatttcaaatacctgatgtttaaaattctaaatttaaatacttgaaattgttccctagagttaacaggactgaaactgctgcaaatgtgctaatttggggaattcaattctatttcatcaaactttcatttgatttcattgtgtggaataggtcagcaactactgcccacagccaaatctggcttcagttgttgtttttttttttctttattttttgtatgctccacaaa

SEQ ID NO: 48237 - DNA, 747 bp, Bovine  19866881023214
  misc_feature (1)..(1): n is a, c, g, or t
natgcagcaatgcttctctgataactgagcattccaaatctcctcgatataaatttctcccaactccctaaactagaaataatatcctcagcattctgaattaggcaagacacacaggcatgttatccatattatattaatcttcaaaatgtattgcccaaggaggagacatgaaagagaacagattatctctacgggagacttaacacttgaaaagaaaaaaggttttaaaaaattgcatcagaggcaaacacaacacatcctgaatttgcaggatgtgtttgcaggaatttgtttttcccaggcagggggtacacaaaaacactgtgataacattttgccataccaattaccagctcttctttcttcttgggatctcaaagcacctctcaggatttacatggtaaggagatttttcttttttttaaaggtgaagagaattgagttactctaacttgtccactggaccttggagaaggtttgagtttaccaagtttttcataaaaaaaatatcagcaactttcaacctttattcagaagttgagttctcagtctaagtcaacactggtgaagttgagtattttcaggaagtatttggaataatttggaatatggaagtgtttctaatcaaagatgggtgtttatgaaactagcaacaaatgtaaattacctgtatataaaggtatgtgaccgaaaaaaaaaactcaaagaaggaaaaaaaagactgttcctaaaagaattctaaaa

SEQ ID NO: 48238 - DNA, 372 bp, Bovine  19866881153679
  misc_feature (1)..(1): n is a, c, g, or t
natagaaaaaagtccttcattaaatgatttatacaacaaaaaaggtagaaaataaaatatgatcaattttccaaagaaattatgcttagtgtacataacttctgaggaataatcactgtcctgaaactctaatacaatttatgccctaaagtataattagcaaacaaataattggccattataaattttttaatctgatttgagttctttcagcaccatggaggaatgagaattccaagtattaattacaccctaagcatagaacaagctgctcatataaatgacatttctgaaaatataaaacagcaactaaaaattacactttaatagctgtatgtgctctttttttccattttgatttggcagaagtag

SEQ ID NO: 48239 - DNA, 1562 bp, Bovine  19866881568480
  misc_feature (1)..(1): n is a, c, g, or t
nttggtaccttacttttgtgataacacctgttctgcttacccagagggatcttgtgaagatgaagtgaggcaatgaatttgaaaactttgctaaaacaccctacaaacatatgcagtatactaatataactagtagtataattaaaagattgcattttcaaaatgttaaaattagttgcagtttcttgaaagtctacaactttaaagcaaacagatggataagaatagctcttgaatgccaaatttagtgtggtatgttttcttcctggtatgcctgaaagttgtatctaaaaagcaactgcagaaataaaatatcaagtgctcaaatagtaaatagatatcatagggttgttatattgtcaaactgaaaaggaaaggaaggaaggaaggaaaagaaagatagagaaataatgaaagaaaaagaaaaaaagaaagaaaattaaattaatttatgggttattccaactacaagcagttcaaagacagcatttactacagggttacaaaatctttgggtctactgcttgagattatcaatgcaattaaccttaaccatttcttctacatattgatcctcaagcacttccataaatgtgtttcttccttattgctgtaatggcctttccatttttagttgatgggaaagtttataaatgctttggcttctattctcagatgggaagctctcttacctaattggttgtttttaagtagctcttaattagaactggttttggcatgtaatttccattccatcagtttccctttactcaattgctccctatttatgttgtatagactttattaacttataatcacttttatgagactgagtggtgatgatattttcaggataattttagaactggcagcattggatcttctgggtgatgaactgttagtatgatgaacatcactgaaattttgaataatattaaattataaaaattactaccacaacaaaaaaaatacaggtaaattgtaaagtatatgtagtataattctaaagtcaagaggaacatggaaaggctttctgctcaccatatttatttatgcatcagaaagaaatctggccataaaaaagagcagtctgtcattttacaaaaattataaaatcagagtttttacaaatattataactattgggaaaataatgttggaagatgaagccaaaacaatagtgaacatttctgaaacataaagggggctagaactgtgttagagaaaactgctagagctttatatgttctaacacaggattagtaaatgttctaagccatgcactgaacaagaagtccctgaaaagcctgatggcagaggtggaacttgtcattctatggataaatagatgttaataaaggttatgaagtttttaatcagccacagccatgttgcctcctgtctctgtgccaggagttcattatgagatagaagttaatacatataagtaaaagttatacaagcaatgtactacaaatctggtcaagaggtttctgttttattacaagaaataggccaaaattagaatttctttcgacaaatcaggttcacgatgcatgcaa

SEQ ID NO: 48240 - DNA, 1612 bp, Bovine  19866880082110
  misc_feature (1)..(1): n is a, c, g, or t
ntgaaagaggagagtgaaaaaggtggcttaaagctcaccattcagaaaatgaagatcatggcatccggtcccaccacttcatgagaaatagatggggaaacagtggaaacagtgtcagactttatttttctgggctccaaaatcactgtagatggtgactgcagccatgaaattaaaagacgcttactccttggaaggaaagttatgaccaacctagatagcatgttcaaaagcagagacattactttgccaacaaaggttcttctagtcaaggctacggtttttcctgtggtcatgtatggatgtgagagttggactgtgaagaagactgatcaccgaagaattgatgcttttaaactgtggtgttggagaagactcttgagagtcccttggactgcaaagagatccaaccagtccattctgaaggagatcagccctgggatttctttggaaggaatgatgctcaagctgaaactccagtactttggccacctcatgcgaagagttgactcattggaaaagactctgatgctgggagggattgggggcaggaggagaagtggatgacagaagatgagatggctggatggcatcactgactcgatggacgtgagtctgagtcgactccgggagttggtgatggacagggaggcctggtgtgctgcgattcatggggtcccaaagagtcggacatgactgagcgactgatctgatctgatttgatctggagcctccagaaggaatcagccctaccagaagcttggcattagccctgtaggactcagttcccacttctggtctccagaaatgtaagtgaataaatttctgttgcttgaagccacaaggttggtagcttgttacagcagccataggaaactaatacagagagctcattctatcccgagtctcctccagaacccagcaggatcttcagggaagttagaggaaaaaactcttacagctaaacagagattataatactcttaggagaaaaaaacattttcagacttctattgaccatcagaggaatccagtgaaactttctttcgctctggtctgggtttagaaggaggctatgagctaatactcccaaactatttgcagcaatgagagaatcaacagccaaaattgtcacttttttccagttttttaaaacaatagagtctgttatttctttcctaaatgcatcagcagggccagtggagaaggtctggaaagcaacagctaagattagcctgcaagctccccacagagaccttgagtgactgtcagctctgcagggaacagcagcaaaccctcacgcaaatggcctataaaaaaggccttgtcagaggcaccttgacctgcctgggcttctctggtactcggattcccagcggccctcccagggttatgctccctcgcatgatgtatttcccctgccttttttagagctgcattatgcttgctccaggaaacagcctcttccttctcataaacacagccttgggttcctgaccaagctccctgccactccgcagctccttgtccatccatcacaccttgctgtcaccctggctgcgattgtggagaactgggtctgtttccagaggtgaacctagggtaggctgaa

SEQ ID NO: 48241 - DNA, 2124 bp, Bovine  19866880479886
  misc_feature (1)..(1): n is a, c, g, or t
nttgctggcaggtagctgtgcatttaaggggtgacctccagagggagggacaggatccctgagcagttccctcagcctcagccacctcctgtcccgtgcagccactcgctcctccccactctcaacccatttgcaatttctgctccttgctctgcatttgcaatgccttctcctctgcctggaccacacttttgtgatggtatataatgaactgattgtagaagacaaagtttattttcagaaggaagttttattctccatatactcagccagcatgtctttaagaatggttttatgcttttaacacttaacttggaacataaaatggccttagtttgcttaaatcattctgttatagctcccttgacccctgtttttatgcaagtcccagtttacaaccttgttcaaagctgtacacgtccctttgaagggtcactgggatcaggagagagacagagggggataagacaagggtggctcagagaccacctagggcaaagcaaattaatgccaacagtgattttggggggtgctaaatgataccgctaatttccccaacatcctgcttaataaaactttcaccctgagccatattttccaagtttctcaaggactgcttaagtgggaacccattcaaaatgttattaaagtccaaggagaccgtgtttattggctctgcatggactgctaagcctgctgatctgtcaggggaggcctcgtacagacttccctgtttccagcacacgggaactgatgctgtgggacggaggaagagcccccttccttccccaccctgacttctgttcttgaacccaggatatagccggtctgggactagaaacactgtatgtgagtcttggaccacagattctgttgctccaagaagagggaagccaagggggatggtcacaggagagaacaaagctggcctgggaccatgttcttttccccttgggggtgccgctggctcctttggccagcacttgctcttaagtcatccggtttcattttccagttctgagtctggccgtgacgtgaactgaattagaacaaaggcaggggccctgtcttaggtgctgtgtacttccagcaccagtcacaccactggatggtcagtgatggtttgatgaataaaggaacaaatgcataagcctgctttccatttacttctactctgcccacgtcttaagcctccggggcagatgaaaaattatgttcattgctatgtgtcaaaccatctttcctcgttactgattttagaaagaattaggactttaaaagaaaaaaacacacaagaaatctgaattgtataactaggtggggagcaaagctgcccagtgaactggaacctctgtgctgacctgtgtgtggtaaaagagaaaaagtctacggtcttgaaataaagagagaaaagaggaagggaaggagggagggaggggaaagaggagaaagaagcagagagagattgagaaagaaatttgtattctggtcgtatggctttgtaaccataagcctcagttttcccatctgtaaattgagaggttggactggatcagttttcagactttataagacatcataatcacttggggtgtggtgggtgatggtggatgctgttaaacatgcagattcttgagccatacctccaaaggctttgactggggccctggggacatgcatatgtaacaagctaagctgcaattgtttcaagaacttacttggaaaaaacaagacccaatctcctcagagaggatgtgattctaacacttcaagggtggaccctggtaggtgtaccagtaaccctcatctctcgtggtaatagtcgaccactttggggcatgctctggtttaggtgggaatgactcaagagtaagtgctgaaggtaaagaggatggtacattagcatcttagaaaccagaatattctctcaaggtgacctttgccttggttgttagacttgttaaatgggaccagagttaatgcaagtgtactgtctccctgactttaaaaaaaatgtccaaagtgagagttgagagttaggttttatttggggcaaaatgaggactatagcctgggatatagcgtctcagatagatactgagaaactgctccaaagaagtaggg

SEQ ID NO: 48242 - DNA, 1125 bp, Bovine  19866880541935
  misc_feature (1)..(1): n is a, c, g, or t
naaaaacctcttggtgaaaggaaaagaggttagtgaaaaagttggcttaaagctcaacacttcagaaaacgaagactcatggcatctggtcccatcacttcatggcaaatagatggggaaacagtggaaactgtccgactttatttttttgggctccaaaatcactgcagatggtgattgcagccatgaaattaaaagatgcttactccttggaaggaaagttatgaccaacctagatagcatattaaaaagcagagacattactttgccaacaaaagtccatctagtcaaggctatggtttctccagtggtcatgtatggatgtgagatttggactgtgaagaaagctgagcactaaagaattgatgcttttgaagtgtggtgttgggagaagactcttgagagtcccttggactgcaaggagatccaaccagtccatcctaaaagagatcagtcctggatgttctttggaaggactgatgctaaagctgaaactccaatactttggccacctcatgcgaagaattgactcattggaaaagactctgatgctgggagggattgggggcaagaggagaaggggacgacagaggatgaaatggctggatggcatcaccgactcgatggacatgagtttgggtgaactccaggagttggtgatagacagggaggcctggcgtgctgcaattcatggagtcgtaaagagtcagaacacgactgaagcgacttagcagcagcagcagcagattcctctgtacctctcctcacactcggcctctgttgtaaaatcaattacaattggcttacatctccagttctgggtacattttccatctgctccatacatgcacaccctccgactggaccattccccactccccacaccgcccccaccccttccttctccccattaactttatcttcttaagcagctcaggaacacagatgttttcaccctgtccctctgcacaagggtattttcccagtgtctctctgtgtgtatgctccaggcacagcctctctggggagggagagagtaaatgttttcattccaaaccctcaggtcaggtcttgtttgtctaaactgggtttgttgccataattatcagattagctgatctctgg

SEQ ID NO: 48243 - DNA, 1499 bp, Bovine  19866880637857
  misc_feature (1)..(1): n is a, c, g, or t
nacgtagtttgtatagattgccttaaaaataatccttgtgttataatattatggcttgctttttgatatgtctgccagttagataagtcacttgagagcagagatgagaacttttcatctgcttgcccagtctttgcaatgaaccaggcccagagtgggtattcagttcaagaatgaatgcagccaattgtctttaaggacagaaaccaggaccaaaaataggagggaaagtgagttcctgttgactcactgatccgagagagaggcaaaaggcctcagagggacagccgccctaccagcctgagtggacgcattcaaaaaaatcttgaagggaacaagccaaacacaagatagagtgctgccagcccgcactctacacttgctgctggagggagtacttgtgcagaattcctatgctctcccagtaccttcatgttctcaccaacccagaagctctcggaacctccttattcaagcgattttataatccagcctcttgcccatctttctctctccagaggatggtgtttggggctgaaaattccagcccttccatcacttgtctcccatcacaagtggactcatgtccacatgagtttgaacaagctccagaagatggtgaaggacagggaagtctggcatgctgtaatccatgggattgcagagttggacacaatttagcaactgaacaacaagttctatgccaggaactagtgacaaaaccaaatatatttcttcttatataacagatctctaaggactttttaatcataattaatcacccttaattaataagaggctcagtgttggagccagagaataaggctcaaattacccagttctcacataagctatgaccactagatgggagacctcactaggccatttcctgcaagaccagcatgatattatctcctcagcagcccaggagggcagggaaataaggaaatctgctttaggacccagcagtcctaggagatgtgtgcccttcttcatgtcttcattactttaaataagttctcaccttgcccttcaataggccattgggacccaagaccttgttgaaaatatgttttcccacatgggcatccacagctgacagagggtcatccagaatatagatgtctgaattttgataggtagctctggccaggctgatccgctgcttctgacccccactgagatttataccctgaggaagaaaagaatttctgttaagtactgaaactgagtccccctaaaactgagttattctactgaatttatgataaacatctctatccaaaactttattcccattcttggctcgtacctgttcccctcaagttaaggaacataaaagggaggattgaaacaaagcaggaccctgcagggcaacctcctgggtacaaaagctcctctgtgtctcctgtttcttatttgtaggaaaaaaaaaaagtgttagtctccctggcctaccctgagttccaagcagttactaattagggaagcgaggggaa

SEQ ID NO: 48244 - DNA, 867 bp, Bovine  19866880660598
  misc_feature (1)..(1): n is a, c, g, or t
ntgcagtctttgtagcctcattgctcccccagtcatgcattaagtggccagttccagttaatcatgacatgacttcagtctgccaggatccatggaatacactgtcctccaggggaaacccttctaactcatgctggatatgtgtcctaattcctttccaggaataaatcaacttgccacacatggctccttctaccagcgggtagggaaagagagggtcagagaaagcacggcagcggcagctctgtggggcatacagtatcctgtctcacagctgtgggtcatcaacccttaggccctgctgctcatctccaaagggagagtgctggcatggctgtggagctcagtcttccaagagcattgaactgtagtcacttcagttacctccagggtagggcagggtagctggctgtgcacagtgagggtaaggagccctcggaggcttgatgtcagcacttacttggttttgctctggcaggttgctgatcgcctttgcaaatgaccatggaatctatctgtggactggatatctctattcaattctcctctttgtcgtggccctcatccagtctttctgccttcagtattactttcagctgtgctttatgctgggcatgaaggtgcggaccaccatcatggcttctgtatataagaaggtatgtggggtatgccaggaatcaccaaagaaaatccccttagtaaacatgaccctttgttccacgattgaggaaaacttgatggaggtgataactgaccgcaacactgaattttggctaaccatacagccttctttagacatttcttaggaaattaaaatgaaaagtgtgtatatagacatagaatatgtgtgtgtggtgggggtagggg

SEQ ID NO: 48245 - DNA, 1197 bp, Bovine  19866880663461
  misc_feature (1)..(1): n is a, c, g, or t
ntccttttcctgtcctgccggccccagttccgattctcaggctcagtggcatcctcttataatggctgtcacggagctcccatcttttcagtctctttgcctgaacaactgcctcagcctatatcttagcttccattgcccctgcccctgccccgaccccaatcattcattctcctggcagctacccaagtggactttaaaaaatgtaaatctgattgcattactcctctgctcaaaactttctcctggctttccatcagacttaaaatccagactcttcaccatggcccatgagggtccataccactttgtacccacccactttccggcactcacctccccgcacactcagcctctctctccgtgctcccgcactctctttctcctttccaaacaaaccaaccatgttcccctctcagcctcacaacccaccccctgtgagtggaacacgcttccttctgatgggctcttctcatcacttggatctctgcccaaatatcacctcctctgaagcttctcctgttactctaaggaagcagttcactccaaatacatgaacatgttttcttaagagcacctcctgctctgaaagggtaacgtatgtattggtttattagttattttctagctctgtaaagatgaggactccttcaggactctttatatctgtgcccagaatggtctccaatgcatagtgctactcaataaatattttcaagtgaataaaaaaattaattagctaacactaaatcccaccaacatgcaaattctagcaatgctaaggtattgttttatttttctgctaaaaaagacattgagaaaaatttcatatataccccaaaggagagagaacagtactacattacacccccaagcatccatctctaaggtactgtgatagtattgtgaatattactaatataaaatgtacggcaaagggtgaagtgctgtaaaaatgtaaggacagaatcaccatcaccaggacaccaataacgtgcaggacatttgaacagacactcatggcagagttaccaggacaaggacatcttggctttgactctggttcttgtccaagccgttcacgctggctccagggttccgcttggatttcttcttctgccgtttctggaacgcccgcctggccttctgtagactcttccgccatgtacttctcaaacctgctgactagtgcctttg

SEQ ID NO: 48246 - DNA, 1440 bp, Bovine  19866880737170
  misc_feature (1)..(1): n is a, c, g, or t
ntctttcttttgacatgatcgattctgcatcagcctggtgcccaaatctccatctctgagttcttgctttctaaggtgtcatctatctggtttcccctatcagtgctggccctctgttggtcctagtaaactcaccagggtctaaaaccctgttctagaagcggcatgtgcgttcatccttcagctttcagatcatggctagagagtgatagtccaaaagactttaaatgcgcatggggtattgaatttttctccctagttggtgcaataaatacatgtacctttataaagatcgattgtccagtcagcctgacatttttccaaagttacgttccgtttgttccttccacctccaccaccccctccttcaaccctgcatttccagaggtacagagcagtcatgtggtctaatccttcccatccagggctctgtagcctatgtcccgcagcagtcctggatccagaatggcaccataaaagaaaacatcctttttggatcagagttggatgaaaagaaataccagcgagttctggaggcctgtgccctcctccctgacctggaagtgctgcctggaggagacatggctgagattggagagaaggtacttgggacaccaggggatcctgaagggtgaaggaaaagagcgaggatggtgaagaagtccatggcagtaaagtagttgatcaatttaggtagtcaagcctggaacaaacatcagaaaacttgagtttgcacaatatgttgtgcaaatatttaaatttaaaattttgtacctgaaagcaaatataagagttgtgtaatctaaaggaaagataatgaacctaggacctggttaactaaccagcagctaacccgaggtagatctctggtggagggccagaggcagacgggggggagcctgtctgaactctaattctgtacactaatgtgggccagagtagggttctaataatctgcagtgaacacatagaaacctaatacattattaaatgcctttcttaaaagttaatttttaatgaccgttgcatattatatgaatatagtatacttggtttacaagtccctgattactatttatttaggatgtttttatcctctttccccattattaaaaataaatatagcagtcttttggggaaaggtcttgaggttgggatgctacagatacagctctagagtgattttgttttttaattcagcatacatttcttgagtacctactatgtgtcagatactattttaagtgctggagttatatccacaaacaaacagaaaacccaccctgatacagctctacattctcctggggcaggaaacaaaaacaacaacaaaataagtactatgatataaaatggtaacctgggcacacatttaattattaggtttaaagttatttatttgaatgaaggatatttatttgtataaaggaacttgtgtta

SEQ ID NO: 48247 - DNA, 1947 bp, Bovine  19866880845069
  misc_feature (1)..(1): n is a, c, g, or t
natgtatactgagcatttagagcactgcttggtacatagcaggccctccataaatagttgcagaatggataacttaacacactgaactaattgaaattatatatcaaaatgtatattcacattcccaatgatcatgttcctctttcacacagagcttacaggatctcacaggactcactcccacattagaaagattgggctttgattttaggtacttgggagcacctgaaatgtttgaataagcaagtataatggttagaattagaacaggttttaagtatttgagcactcccaaacacaaatgtgtgtatttttttccccagataaagacaaaaaggtattccaaggcaaatcatccaggtcatttatcttcacatcattttaaaaaaacaggtttattgagttgcaactcacatactatagaattaatccaaagtgtacaatgcaatgggtttagtaaatttccggagttgtgcaacctggaccactatccattttaaaacattttaatcatctcaaaaataaactccatacccattagcagtcactttccatttgtctccaaaaatctccccatccatcccagccccagacaaccagtaatctactttctctctagacagaaagatttgccttctctaggcatctcatacaaatggagtcatacaataggtggtcttgtgtgacaggcttctttcacttatcatggttcaaggggctttatatgattttcaaatataaatatgaaacttaaaacacaataattaagagcacagatcacaaagccagactatctggatttacctcctagctccaccccatgttaaggttacgtgatttgaggcaagttactcaacttctctgtgctttaatttcctcatctagaaaatgggtttagtgacagaacctgcttcatagaaatttaaatgagttaatgtaaatacagcacttagaagagtaccttacacgcagtaagcattatacaggggtcagctgctattatgactgttgctgctgctgctctcatcatcatctgcattagacagcaagcctatggacagatattctcaaaatccttgtcatagctttaggatgtttttttggcatttaatgggttttaaaacgagtgtctcaggagaaagaagtgaggaatgactgactgctaaagaacacaaggtttctttccagtgcgaggaaatgttctggaactagacagtggtgaaggttgcacatatgtgtaaaacaccccaaaaaaaccccactcaatcgtatactttaaaaggggggatttcgtggtttgtgaattatgtctcaattttaaaaactgagtgtatctcttgttttagaaactgccatatttcaggctaaaaatagtgaaggcatacatggatatcttgccttgaaaaaagtcagaaatttaaatagcttccctatttatgctccactttggccacctcatgcgaagagttcactcattggaaaagactctgatgctgggagggattgggggcaagaggagaaggggacaacagaggatgagatggctggatggcatcactgactggatggacgtgagtctgagtgaactccgggagttggtgatggacagggaggcctggcgtgctgcgattcatggggtcgcaaagagtcggacatgactgagcaactgatctgatctgactgtccttcaagtttttcctgtattttatgtattaaaaatgtatttatgttttattcccactattagctgcagatggagggtgggtaatacagtgtttgattatgtgaactttctagggcatggctacataaagcaataaatttaaaaagagaaatcattttcccttctaaattctattaagtaataaatatattcataacagctaagagctcacatttaagtcagagaatagtttcagttttttggttctgcatttgctatgtgac

SEQ ID NO: 48248 - DNA, 1801 bp, Bovine  19866880882099
  misc_feature (1)..(1): n is a, c, g, or t
nctatatttgcactgatattacttaaattttgccttcatttagaacagatttcttagtcagctagattgccaagcaaagttgggccagctcttttgagagtaaatggggaatcctgcaaaggatcttgaaaacggaagtcatgatggagccaagtatgtggaattgggaagggaggctgcagtgaaagaacacgcaggttccaaaggtttaaggattgaggggcatttgtagccagaacaagccgtggttctggaatccagggcaggggtggctgggtttatatatggaagtggaatttatacaagagactaggcaacagagggcctgggaatgtacccagagtgtctgtagatcaagaatctgaactaccaactggcttgggactcctaagtatataaagaactttgtatgcaggcgacacttggtctcacccctggggctttcatttgcctcttggcagctcaggatttagcaccagacaaaggcaggctcttctggaggaaggagcgagggacacatgaaagctgagaaaagacagacagacatgcggggacctacatctgacttaaagacaggaatttttctcaacagataaagctgtgcagttttctgaggcgtcatttacctgggaccatgatttgggtgtcacaatccaagagtgagttgccgccttttcttcttgctgtattttaagattctccttgctggtcttgttatagggaaattccatgtaatgtaacacatgcggagacaagctgtgcacgtgttcagatactagcgcaggttaaacccctggagggatggactgactgcagtcgctgtgactgcacctgccccctccccccgcccaccgccgctttcctcctgggggacagtacagctgagaacctgtgaagacatgtgttctccagattgtggatggaggtagtgcaggctggcaggtagcctaggtctctggatgtgccagaggatactcacgagaacctgaacgcaattgaagttcatttattcactgaagaatagttatcatgaaggacctgccttctttgcccagaggggatgatgtgagctgcttctataatcaacttcagatctggaatttttcatctacataatcccttctcacattctgccctgtaggtcaccccctgccttaagccaaccctttcttgccacactgctgcatgtaatgtgttccgtaagcactacgtgtgtgagcacgccagctccatcacgagctcagcaccacggagcatgccaggagcccgagcaggccaggctttttcacaactgagtacacctagtggtcttcctgctactttccacactctctcttgtttctccatcctttaacatggaccctggagctcgcctcagcgtatgtcagtcaggccagaagccctgagccctcctaacctgaaagcctcaactttacagaaggagagtggacgtagctcccactttgctagttgtataagtttagaaggagcctagctggatgggccggttcagaaagcctgagaacaagttcctaatgttctaggaactcaaatattagactagaacagagaggttcccggagcctggcccagtgtgggcccctacccagccacgctcagccaaatctccagggaagggggcaggacatctgtgctctcagtgagcattttattgaattgctcttctcattgaatagtcgagtttgggatgcattactctgttccagccccattagtttagaaattgagagtccaggagaagtgagactctaagatcacacagctcagctgtggcacagtt

SEQ ID NO: 48249 - DNA, 818 bp, Bovine  19866880899991
  misc_feature (1)..(1): n is a, c, g, or t
ncttgaccgtcagccatagtttctcctctgttgatttcctcccggctcctcccacgaaaagctcttggtgtttgtttttcctcccggcagtcaccaagggctttgtgtacagctccttcctgaagccctacaacgcgcgccgcagccactccgacgcctctgtgggcagccactcctccaccgagtcggagcacggcagctcctccccccggttcccgcagcggcagaacagcggcggcaccttgaccttcaaccccagcagcatggctgtgtcctttagctcagggccttgccagaaacagcctccagatgcatcttcccagacagaatttgaccaaggaactctcagtgcctccttgaactcagagggcagtccttccagatgcccgtcggacccagactccccctcccagcacaggccttgggactcgggcgatgcggtcagagaccttcaccagcctgcccctaccctgaggaactcccgaaaccccaggcatccagaaatggctggttcctccgtgtcagggcgtaacgggcagagtcgagacctcgtaaaagcaggcgcaagaacagcactgtttctggacgacagacatgagcagccagagagtagcgaggctgaaggcaaccaggtgagtgcgcccggtttccatggttactgcggggcttgtggatgcaggggatgagttctcaggagtgggcgaggcctcaccggcctggggagctgaccctggagatgggcccacagataaatccataaaggatttccagaagctcactgctgtgagagtgggcagctccacccttcaggaccttcg

SEQ ID NO: 48250 - DNA, 988 bp, Bovine  19866880953587
  misc_feature (1)..(1): n is a, c, g, or t
ncaccatctatttatttaatattaaaaataatatttcactgagtttggttggcgtcaactggagcagttactcatacaggaattcaaacaaaagcagcactggccttgagccagagggctggtgctgggtggtccatgtctgtccttagctcagagcagctcctaggctgctttcggacctgctttgggttaagaagatgatgtattcatttatttattagaaatgttttaacaggaaatgctaatagtttgcatttagggagaactaccctggagacagctggaggaatccagcagacatggttggggaggagattgctacgctcagccttggagtcagatcacggcctgttgtaaaagtctatactggggcccagcacgccaagttagcccgaaagatcctggttacttcacttcaggacagaaggggagaaacagggcagttctttcagcttccctgtttcccttctctgttgccatttgtttcttaggaacctggaggtgtgtttttgatgtgggcatgaacacagatgttggctctgctgggaatgaacaggccctgtgtacacaaatacccaggtgagagtgggtgagccgaggtataagcaagtacacgtgtaactcaaacccatttttagtgtgacttcgggctggcagagtcatgtgtgagttcaggggttgcatgtgcacatcttttcagcatatggggacgcatgaaagacaagtgtttgaaggggatttcaggcgtgtcctcaagctccagagtgcattccagcgctggatcatattcatggctaactttgtggagcccaaaggaaaaaaacaaaagacagggagagtacaaatgaagcctgaatgaatgaatgtatgtaggagaggaatatgagcaggtttgtgtatctttaaaaatcctcttccagctggtttaaaagaccataggacttcatttgtgacaagagggtgtaattacagtgccatggggaggggg

SEQ ID NO: 48251 - DNA, 787 bp, Bovine  19866880984838
  misc_feature (1)..(1): n is a, c, g, or t
ncagcagatgatattagagagaattttaggtctttgaattaggaacaccccagtgactaccccagagaaggaaatggcaacccactccagtgttcttgcctggagaatcccagggacgggggagcctggtgggctgccgtctatggggccgcacagagtcggacatgactgaagcgacttagcagcagcagcagcagcagcagtgactaaccggatggaatgggaaaaggaagtagaaggaatagattcaagaatgacttgcagatttctgcttgggtgaatcacagggtatttcatcaaagttgggaatacgcatggaggaagtttgggcggataaggtaatgagtggagcaacagtgaatttggtcttggacaataaagtacctacaagacacatcaggagagatgagtaaacttggaggggagagcgaagaccaccttaaactccattggaggttagggcaggatgaagtgtggaatgaaggacaattgatgagaaattaagctaagcatacaactaacacatagtgtggggctggtttgactgattttgctcagggctgggtagagtcaagaacatcttgagaaaattgcaaatttaactgtagacaagcctttaaaaagcagttaaaaacctgttttgaaatgcatatttctgtaatttgtttcaacatgttgaattacagcaaatgagatggagaaatgatctcaacccatttttttggcctcctgactggaaacctcagaactcagccctgtaagctgttaatcaaataagcactgcagg

SEQ ID NO: 48252 - DNA, 748 bp, Bovine  19866881008854
  misc_feature (1)..(1): n is a, c, g, or t
ntgaagggctgtaggtggaaggagaacaagatttactctgtaaccaatcctgctgatctgcagctctaaccctgctcgtctgccacttttcctctctctccctcaccacagtccctgcacagactgggtgcagccttgcccagatgacttcggcagccttctcccaggtctgcctgcctgtccagtcttgctcctctaattcctccttagagagcctaagtgatctgtttcagttgcagatctcatcacaccatacctctgcttaaaaccctgtaatacttctgcactgcctgcaggataaactctaaaccccttagtgttgcttttaagacccagcccctgcttggctctccagctgcatgccttgcctaggctgtccgccaccatggaaccccttgcaaactgaaccccagatgctccaggtctttgctgagaacatttcccttcccctcttcacagctggggcctccctggtggctcagtggtaaagaatctgcctgccaagcaggagatgcaggttcgatccctgggtcaggaagatcccctggagaagaaaatggcaacccactccagaattcttgcttgggaaatcccatggacagaggagcctgatgggctacagtccacagggttgcaaaaaagttggacacgacttagcgactaaacaacaaaacttgacagctcatttgccttccgggtattccctcagatgtcacttccttctaccccatcacccaagaccaggttg

SEQ ID NO: 48253 - DNA, 981 bp, Bovine  19866881073287
  misc_feature (1)..(1): n is a, c, g, or t
naaactgttgatagtggctgctttcagaggaactggaggaatgaagaaaataagctaaaagaaattatgtgtaagatgttgaattctgtggaatacaagttctagcaaaacagcaccaaaacaacctgttaagataaagctgagtttattcttatcacagtggatagcactaccttaacatatggtggccttttactaggaatttatttaaattcataataccaaatgcattcttataacttatggttggactcctgctattattattatagacagttttatgaactgagaacatgaaaatggccaaatcagtgaaaatttgctggacagtatctttaagtgtactgtcaagacttaaaaatgcatttctctgtatgttcatgtttgttcacacacatatggagaaatttggggagtgctttcactagcacttagctttttcacctgatatttggggacatatttgagacagattaccaagtactatttgcaaaaggagtttgaagaggtccatattttatttaaaggaaaaaaaatctgaactttcaatcatataatttcaacttaaaattctttgactatgggagttgtatccacagagcaaaaagtacagtgctaggcatatggatatgagccatataaataaaattgctattttcataatctttactttcgacttgggttcatctttgacctataaagggaaggaccatctttttggcatcttgtgaccagacagttgtgaatgggttgaaaaaacaggatgacttgtttatgggtctcctattttcaaacacatgaactgtaattgacttctgagcaatttctaagtataaagtgcattctttaagataggtgtctgaacttcattgaactctgactggcttaagctgtaagggaggtttagaggactttgaacttagtcaagccagtgagttaccagtaagactttttctaaagatatttcctttgcaattgtca

SEQ ID NO: 48254 - DNA, 1437 bp, Bovine  19866881138384
  misc_feature (1)..(1): n is a, c, g, or t
ntgaagttgctcagttgtatccgactcttgagaccccatggactgtagccctccagactcctcccatccttggggtcctccaggcaagaatactgcagtgagtagccgtttccttttccagggaatacccagcttttatttattaggatcctgcaactcctagatccatagagtgctttttattactgactttcttaaggagatataggtttagagctttccagcatgtatgccaaagggcatgcagtcatgctctctccttgtgccctagaccagctgctgttgtctcactcttttcctactttataaactatttcttctggcagtctggtgaatacaactggagaatacaccagtattctggtgaatacaactaagtccgtgtgccacaactaccaagcctgtgctgagagcccaggagccacaactgaagcccgtatgctctagagcctgcactctgcgacaagaagaactgccacaatgagaagtccctggaccacatccagagagcagcccatgctcgccaaaaccagaaaaaagcccacacagcaacgaagatgcagcacagccaaataaataaataaaaagcaaattattccttagttgtccatcaaaaatggtaacatatccctaaaaacttgggtaggctgttacttggacttgagggtattaagaaataagtatatactatcttctaatcacttacctctaagttgctggagttccatgttcaaactctcaatgttattctcatagaactcaagattttgaagggtctctgccctcagtgattcctcttgcttctcctccagcagtaagttgagctcttcctgagccctgcggcacatatccaagtcctgttccatctcctgaatcctcaccaagaccaagggacactgggaagtctggtccaaagtcttgtcaacattctccgggccctccttttctaggctctcccagccaggacggttacaggttaagagcttggggggtactgcatttgttctctgctgggccgagggaggcaggggagctgggcgagagggtctcattgccaggggtggatccagtctcaggttctggtctcccggcacatggggaggagtagatgatggagtacagggacggggtggtgggggccttagagcttttctcctttcgggcaactcctgctgagtcattagcttcgaggaacctcggaaaatatccttttcggagttaaagtccatgattgaaaagtggcgcaagattttatctggttctgggaagggccctgacaagctcttctcaaactctatcagttgctgcgtcaactttgaatccaggtacgtgctgccgtctccttgtgaccgtgtcatggcttccagggcgggtgccctgtcttgcagaccaggcttcgtctctgatctgtctggggcggagcaaaagctggaagca

SEQ ID NO: 48255 - DNA, 2861 bp, Bovine  19866881154490
  misc_feature (1)..(1): n is a, c, g, or t
ncttgaagctaagctagcttagattttggtttgcagcctcctgacgccatcttatttctttagagacaaatcctgaaaagtatttgacaaggcttaatacccatttatgatgaaaatgctcagtaaaccaggagtacctaaaggagaataccttaacctaacgaaagtttgagtctctcagtcgtgtccaactctttgtggccccatggactgcagcccgccaggctcctctgtccacggaattctccaggcaagaatactggagtgggttgccattcccttctccaggataacctgatgaaggtacacctaaaacctaaaacaaacattatatgaaatcgggaaactttagattaattctccttaagagtgaggacaagacaaagatgttcactaacatagcaacatttttgacatagttctggaagttctggtcaaggctgtaaaggaaagataaacaagaaatacaaggatgggaaacaacaaaactatcagtattttcaaaggacataattatggggaaaagaaacaacagaaaacagcagactatttgaataagacagtgaagccgggctgcaaaatacaagattaacttacaataataaataccatttctcttaaactaccaatagccaacagtaatagaaatacacatgattcacaatagtaacaaaactattattcagtattcagaaattaatttagccaagaatatcctcttagacctttatggagaaaacttgaaagttctaatatgggacttaaagatgagctgatgaagtatttaggcgtaaagggtcatgatgtctgcaactaataactcaaatgggtaagaacaaatggcagagaaatgtagacagggagtaataaagcaaatacagcaatatgaatctaggtaagggatatacaggagctctttgtactaatcttagaattcctctgttagttttaaatcatttccaagtaaaacaaaaattctggaaaaaaactgagctgaataaatgaagagacacatgccatacttctgaatgaaataagctaatatcaaaaagatgttaagcctctctcaaatactttataaattcaaggtaagcccaataaaaatttctcaaaaaatttgaggaacttgataaacatactgcaaatgttatatggaaaaataatgaccccagagtagctaaataaatttaaaaataaaagagatgggatacttgctgtgccattcatcaggttgtattgccaaatcactgtaataaaattagagcaataaaaaacagagcaagaactgacaaactaatggaacaaaaaagaggcttagagatagactagtgtatccacggaaaccatacaggagaaagagagtatcacaatgtaatgaaagaaatgatgggttttttggatatgttactggaaaaaactggctcattaaatggagaataatagggctggatccctatctaactcatgtgtaatgtggactctagacaaattaaaggaatagcaataacttggggactggcagggccttcttaaaactctaaaagcataagatataagccaaagaatttacttatttcattaaaattaagaatttttattaaaaaaagaatttttattgataaaaggacaacaaagacaaaattaacatatgagaaaacatctacaaagtgatgatgaataaacatctataaactgtcttccacgagtcaacagcaacaacacagtaacttcaagagaaaatgggctaagacaggaatcagtaatttatagataaaactatatgtataagagatctttataatcattagtaaccaaagaatacaaatgaaaacgacaagataccaccttgcccctatgagattacaaaaggtggagaccgagagaaagctgagtggtggttgggacatgatataagacccctcaaacacttctggcaggagagattggtacagctattgtgggcaggcatctggcacagtctgatcaaattcaggacgtgaaagcccatgacccagtgattcccttctaagtgtataccccacacttctattacacagttttagaagtggacaggtatgaagatgctcactgcagcaatatttgtggtggtaggacgtagggacaacctgaggatgtattacacagagaggagacaagcaaaattgtggttcacacatgcacagagcatgggacataatacagcattcagaagcaaagaattagatgtacatgtagaaacacaggaggaccttaaaaacagtactcggggtgggtgggaaagcataatgaaatgcatcatcaccaactaaaatccagggaggaagataagggaaaaaaaaaaaaaaaaagacatcttttaggctccttgcgtgttaaaaaagaagaattcaaatgacctgtgatgaaaacaaaattagaattgtttccttcccctaagtttccaactttcctaacaacaaaagcaactctggttgccagctttgttgatgagtaacagcttttcatcctttttcaagcaggaagggaaaaattcagggatcagcagaggactaaagggatcagggcagaatggtcacgaaacagtgtttttgttctcatgacctcacaacctaactgaaaagagccgattacctcttgattaggagtgagattaggagtgattcagctaaaggcacattggtgccatcaacttttcacgtcctctgaaacaacttactttcagaaccttttcatatatacaatcctctagcccacagagattccacacttcttagaatctaaaaattctagagctagagagcgcctggttatcctaagatgagcaaacgaaagccaggggactgcagttcagggtcacgaaa

SEQ ID NO: 48256 - DNA, 1091 bp, Bovine  19866881204253
  misc_feature (1)..(1): n is a, c, g, or t
ncaggctcccccgtccctgggattctccaggcaagaacactggagtgggttgccatttccctctccaatgcatgaaagtgagaagtgaaagtgaagtcgctcagtcgtgtacttgatctacacctcctttatgatgcctactgtttcacttaccacgttgagttagttatatttatgtatgtatctatcccaatagacaggatatccttgagggcaaggactatctgcttccacagcaatgctggacactccctggcacacaaaatagattcatatatgacaataagtgaatgaatgactgtgggaataaatgaagaccacccaaatgagaacaaagaggctattctatacctaatgaaacaaggcagtcattcactatcacttggcatctggcagagaaccaaagactgtcaggggagtgggaaagtttaaggtagaaaaacaaaacgggaagatttcatgtatgcactgatttgagagtactggcatggggaagctggaggcaggctactagaagtatggcatcttacgtgattgttttggtagagcatatttgactttctccagttggtcctgagttggaaaagcagggcaaaaattggggaagctgacagtcactgaccagtcataagaattcttggctgattgctgcagattgattgctgagctgattgctgattgtgggtcagagttttaattgtcatatgtggtctgaccattattgagtttgtatattcagtctctcgtgactgtttcttttttcctccattaccctcccaacctggttgagtttcctagcttgcttcaattctcacctttcttctttgtccctcaatccttactctgcttcaagtgttatattttatccaggcccccagaaactacattgagtagaatagttgtgtaaagttaggattaatcacaaaaatatacaaatgtcaagtggtttttttttgttctagagcccagtttggtgcctagaaaaagatagatgtgggaaaaattcaacaaatgttttggctttcttttttttttttaattcttgaagttgcctactaactatgcagttataaatctaatctatgtatatt

SEQ ID NO: 48257 - DNA, 973 bp, Bovine  19866881550762
  misc_feature (1)..(1): n is a, c, g, or t
nttgctaggcccaagacaggtctgagtcctgacaatccttttctggatccctgcctgcctgtgggactcacagatgtggtggaaaggaacagtcaggtcctgcatgtccgaggacgaggggactgggcggcttgtggggccatgctgagccccctgctggctcgctccaacaccagccaggcctcactgaacggcatctaccagtcgcccattgacttcaacaacagcgagttctatggtttctccgagttcttttactgtacagaggatgtgttgcgcatcggtggccgctaccatgggccaacatttgccaaggctgctcaggtacattattaataataaaaatgactcatgctggcagcagccatttattggatgcctaactttgtaccagacactgtgcaaacggctttgcatgtgtgatctcactggcttcttggcaggagccctgtgagcacttattttacagatgaggaggtgaacttagagaagtaacttgctatgctctactgcctgctaattaattaatcttaggtctccatggatgtccagttaccaaaattatcacccagatctaatattgtcatggtggctaatggtttttcctccagcttgccaatagtcttgtctaatctttgtggacaaagtgtggtctccagatattttccccttactgggtgttcccaggtgtaaatgcttttggagatgatgtcacacaggtgggcaagtccactttcgttttcttaccttgagcttttaagaggccagtatggacaggtaaaagtttagctagcattccacaattcctgttcaatttggactcgtctctttttcatttttgtatatttttctcttttagcagaaaaacttatggggagatctgtcctcccatattttttattatctccctctgtcttcttcaatttctgttagtataagggccttagtataagaaataatatatgtagtatat

SEQ ID NO: 48258 - DNA, 743 bp, Bovine  19866881563899
  misc_feature (1)..(1): n is a, c, g, or t
ntcctcttgctggtgaatgcctgtctctccacctttgcagagtcactctgcataggagacgcagagacccttcattcttcaaaccctcataggatataaaaccctatgagggaggagatttttgtttgttttgttcactggtctagagcaatgctcagtgagtagtttttggtgagcaaatgatttactgaacttcaggaaaatacaaggaactgttcatatcaaaatctctacttccacttatctgaaactaaattaaccatctcttctccacaaatagttttatcttccagcttgagtaacagtgtcatataagtctttcagacttagaatctgatgtcaaacatcagaatctgatacttcttcctctataatccagacagtacactaaccgcagcagctaccatttaagaatttatcacatgccagacactgagctaggagcttgtaccatcaccacactgcaaggtggagaccaaggtgctccagtcagggtccctggcttcaaatcccagtggcaccactaaacaacatacttaactctcagacgcaaagctaaaccagaactcaagtctatttgactccaatgcccatgtactttttaccgtaaatgttattctcttacatctcactggttcttccttcaaaatcactaaatttccattttcctctctttagttctccaacattttattatgaaatttttcaaacagccaagctcaaagaagccgacacccaccacg

SEQ ID NO: 48259 - DNA, 1297 bp, Bovine  19866881608863
  misc_feature (1)..(1): n is a, c, g, or t
nacacgagcaactgccatttactgaatacttattattagatccaagaaaatcaaagaagccaatgtttccatctcctaatcttccattggtttgaaaaagacctatttccctttgttctttttcttaacttatagatttatttgcttcaccattgcaaagccaaaaagcagcaccttggttgcaggtgcttaacaagatattgagacgagtcctgactgctttaggctgcagaacctatccttttagataaaggctggtgcttgcctctgaagcacagaaaaggaaaactggaattcacttgcactcccaaacctccctattatgaccatggaaatagctggttgaataactgtggcctagccaggctatgctgacttcccatggtccttcccaaggatatttaactcgaccaactaagatcatggcatccggtcccatcacttcatggggaaacagtggaaacagtggttgactttatttttctgggctccaaaatcactgcagatggtgattgcagccatgaaattaaaagacgcttactccttggaaggaaagttatgaccaacctagacagcatattaaaaagcaaaaaaaaaaaaaaaaaaaaaaggcagagacattactttgccaataaaggtctgtctagtcaaggctatggtttttctagtggtcatgtatggatatgagagttggactataaagaaagctgagcgctgaagaattgatgcttttgagcatcaatttgaattgatgcttttagagaagactcttgagagtcccttggactgcaaggagatccaaccagtccatcctaaaggagatcagtcctgggtgttcactggaaggactgatgttgaagctgaaactccaatactttggccacctgatgtgaagagctgactcatttgaaaagaccctgatgctgggaaagattgagggcaggaggagaaggggacaatagaggatgagatggttggatggcatcacagacttgatggatacgggtttgggtggactccgggagttggtgatggacagggaggcctggtgtgctgcagttcatggggtcgcaaagagtcggacacaactgagtgactgaactgaactgaccctgataagtggcctggggatggacggtcctgcatgccagaggcactgtcagctttcactggcaaacactgtgattgccctttaggctccaacacagatacctgcctctagtcttagggtactttgggctgctcttcctctctgccacctatttatggtaaaagaggaagaagggctgcctaagga

SEQ ID NO: 48260 - DNA, 773 bp, Bovine  19866881673756
  misc_feature (1)..(1): n is a, c, g, or t
ncattgcaggcagattctttaccattgagccatcagggaataccatagtgttacctcttcagaaaggcctttcctagtcatacaaatgtagccacccagtcacacatttatcacacctttctactttagttatcagcatagtatctagggctaaccaatatttttaacggcttatccctccctctccattaaaaagtaagctccatgaaggcatggacactatcttgtatcaccagtttcaaatacagtgccaggcagagttggtacccaatatatatttactgaatgttcacatggaaatttcacttacaagatatgcaataagggaactatagacaggactccaatgaggaaaacagatttgggatagtgaagttctctaaactattagatgaataggaattatttaaacctttaggaatgttcccccttagtgggtagagaagtgtaggagattcagaagtctaaagggtagagcagtgtctcctgaagcaaggacaaggtttcagtgagtgatgggtcaatgatgggcaagtgttacctcttagtgaagaagaatgggaataagaaaaagaccattggatttggaaaggtcatttgtgaccatagattaaaagagcaaaaatgtagggcttaagaagagaaaggacttggcaggtatagctcattagtagcgcagtttggcagttaagggaattagtactctagcaggattgagtgggtttcttttttatgaaacccaggcttcttaacttaagttaaggacccctagg

SEQ ID NO: 48261 - DNA, 1191 bp, Bovine  19866881687249
  misc_feature (1)..(1): n is a, c, g, or t
nggatggggcagagagaaaagaagagacaaggaaaagcaggagaatggaagggtaattagaaaaaaaaaaaggataggtgagaaacacaaaggtgaagggaaaggagagagggaggaaaaacttaagagaatgaggaaaaggaagaggggagcaggaaagtaccactagagagacccctccttacgaaaaccacctctccatcgctttgatagagacccaggggcctgtgtcttctctgtgctcatctccccccacagccacccaacaccagcatgttactctccactgtgggttttctctgaaatgtgacccatctcacaatcccttcctcaatggctaattacttgaaatgcaagaattcatttgcaaaggaagctcgtaacatggaaataaacagtgggccccaaagaaacccagaaaaataaaataagaaattccaaaaatatttaattactgcatctcttattgttgttgtgtagcttcttatagcgtaaaacaagacccaaactagccaaacatactctactcagccagaaagtctagtcgtctaaagagcagatgaaggcaaactgacagcttttaagccccaacagggcttttaacgcaaaagggcctgctttcaagcaaactgaaagcaccaaagtagtaaaataaattcctaaaagcttaaatgctgtgcatgtacacagtgctaaaccccttagaattctacaacaaaaagatacttaactacttaatggaagctgtttgttattttttttaaagtctcaagtaacacatactaaaatagaaataagtattttgaaataaactcatggagtgctcatccaaatctgaagcccctagagttctcagaaatatgggataggatttgaagcagtttgggcttcccgagtagcttcctggtggcttagcagtaaagaatctgcctgcaacacaggagacgcgggtttgatccctgggtcaagaagatctcctggagtaggaaatggcaacccactccagtattcttgcctgggaaatcccatggacagaggagcctggtgggctacagtccatggggtcacaaaactgtcagatacaactgagcaactgagcacatttgaagcagttacattaagactgataccaggtttcatttgaacagtgattctcacctcttaattcccatgattcttgtgtgtgtgtgt

SEQ ID NO: 48262 - DNA, 973 bp, Bovine  19866881692133
  misc_feature (1)..(1): n is a, c, g, or t
natgaatagcctgttgtagtatagggtttttaagtgtggtaatagggaatgctaggaagtgataagataaagaaagttagatcatgaggagttttgggagccatgctaggggatttggcttttttatctgtagatagtaaggaacaagcaaacttttttgagtagggcggtcatacaggcttaagtttcatcatctttgaaataattaaactctgaaagtcaccagctctgaattttgtgactatgttaatcatgtgacaaggttagggtcattttatgtctttgtttaaaatagctctatgaagatgaaagaatgctattaatacaaaatgtcttaaagagtagtcatagcaaatgaaacctggtgtattagcagtgtcataccttgctaaaatcaaccaaaactagaatttcttttacatcatattgcaggaagaagctgccaagatcttgctggctgagttcaacctgggctgtgacgtgcaacacactgaacacgtgtatagggtttacgtcacgacctttctgggttttgggggcaactttgcccggcagcgctatgaagatcttgtattgaatgaaactcttaacaagaacaggtatgcttgacatgggatctgtgattctgaaatagaatgttgtcaggctgcagatatttgggagaaatggttacatcctaccaagatattaatagacatgtccttgcttcctccttcctcaccagccctgccagtggggtagcctttgtgttgttcagtcactcagttgtgcccaactctttgtgaccccatggactgcatgcagcacaccaggcttccctgtccatcactgtctcttggagcatgtctattagcagtcccacttgatcttcatcggagtgccttctaatctttgttattaggacttagaaaagcacagtgtcttattgaagtgcccatcttcagacatggcatcacaggataattgagctcaa

SEQ ID NO: 48263 - DNA, 1039 bp, Bovine  19866882067306
  misc_feature (1)..(1): n is a, c, g, or t
naatagggagcctggcagaattaacatatccttaaaccagttaccttaattgactgatcaaagtattaatactaatcctttattaactcctttcactgtagagactaggcccaagaatgctctgcagagggcatttgaagtctgtatcagctggcacactgctggtgcctagtgatagtaagtaaagaaagaatgaacacatgacagatttgaactcaataacctttgttctccaattattataaaatatttaaattcattaaattgttaattggtagagacagagctgagtcaatcaataacgttgatgatagcttactcgaataatggttaccatgtgccaggccaacgcctaagtgctctacatactttaactcatttaaatcgcaaaacaaccctatgatgtagctagaacgattagtggtgctttagacatgaggaaactgaggcatgtgctcaaggacacagagtgagtcactgtcagaactgagatctgaaccgagcagtcttgctcaggagttcacaccttaaccaccaggccatatgagtgtcgctggttccactcaccatgccgaggagcggctttcgggtggactggcggtccatggttttcctctcaaatggtctcttggtggtgggaagagactctgggaagaaggtgaaaacctggagctgctgcaggaccctgctgtgctcctcatggaagatggcaatcaggttcccctccctgccggtgactttgagtagcttggagtccatgcacaagaacagagacagaggggagaaaagaacacacgtaaaagaccccaggacaggcacagtctccttgaaactcctcaagtgtgagccaccaacactgtagccagggggccacaggcccagctcctccagggtagctcagtgtggaaagagaccattcaaggccatgggatttccagcactgtcaaggcatcaagaattccagttccccatgggcttgacccaagtgacatagttaacctgcctagcttaataatagcttgacaaccctgacatgtat

SEQ ID NO: 48264 - DNA, 3488 bp, Bovine  19866880167241
  misc_feature (1)..(1): n is a, c, g, or t
ntaaatttaacgtgtcctcctcaagtgccccagaaatgctttcctgtacatggggtaaatacagaacaattggcggaaagtacaagaaaaggacttttctacttggcgtgtgttttcttgggtgtggatgtcagctgcagcaggcggagatttttattttcaagcatgggttttagtttcactcagaaatctgtatttcgggttacctaagaatgaactgcatggagtggaaccactgggcttctggcggggccggggggatggatcacatgagagcagatttcacaccctggggcctcctgttccagggttcctgctgtctgttccacaggcaccacagggttacattttctgctggaagcaacctgtactcttatctcctctctgttgtaaatgaattgtgtgctcttggacaagttactaacctctctgagccacagttctcatatttacatcataaggagaataatgaaagcttacagggttgttttgaagattgttgttgtttagtcgccaagttatgtctgactgttttgtgaccccatggactgtggcccaccaggtctctctatccatgggatttcccagacaagaaaactggagtaggtgtcatttccttctccagggaatcttcctgacccagggatcaaacccatgtctccagtattacaggtggtctctgccattacaggcagattcttcacccactgagctacccagaagcctgttttgaagattagatgagattaaatctataaagcattccttgtcaatcctgtcatgctcttaagcacaagttactgtaaacatcaaggtcttcagacttgcagggttgtgtttggatgtttgtaccaagtcatgaaataggtgagtgactcttagctccttctattccctctctcacgtatcaagtagtctgtgagcttgcctgtcccagaaaagtaattccccaaccatgcaaatgttcctgatccccagacattcctcgtatctttcatcaaattcaatcatccttcttccatttttctcttttactaaatccacacatgtgctgagttatgcatgattagacaggatcagaataaagttctttgcaagggtaaatagggagaaagccttcctaggtatatttactttcttacccaagaatagaaaaagtagttttgctaaatgaatggatttcaaatggtgaagcaacataagtctgagacaaggttgcagtgggaaaaggggaggctccccttgtggtgcccctggaggcctgccctccagatggcacctcttttacatggttggtgtggtgtcatgttaatttatttcaaatatactttatgtaggattgaagttagctaacaagtgatactagaataaaaatattaagtaatgaaagtgaaagaggagggtgaaaacgttggcttaaagctcaacattcagaaaactaagatcatggcatccggtcccatcacttcatggtaaatagatggtgaaacagtgtcagactttatttttctgggctccaaaatcactgcagatggtgactgcagccgtgaaattaaaagatgcttactccttggaaggaaagttatgaccaacctagacagcatattgaaaagcagagacattactttgccaacaaaggtccgtttagtcaagtctatgatttttccagtggtcacgtatggatgtgagagttggactataaagaaagctgagcaccaaagaattgatgtttttaaactgtggtgttggagaagactcttgagggtcccttggactgcaaggagatccaaccagtccattctgaaggagatcagtcctgggtgttcattggaaggactgatgttgaagctgaaactccagtactttgaccacctgatgcgaagagctgactcatttgaaaagaccctggatgctgggaaagattgagggcaggaggagaaggggacgacagaggataacatggttggatggcatcactgactcaatggacatgggtttgggtgaactccaggagttggtgatggacagggaggcctggcatgctgcagttcatggggtcgcaaaaagttggacacgactgagtgactgaactgaattaatgggaacagagtttcagttttggaaggtgaaaaattcaggagatggatgatggtgagatttgtacaaccatgtgaatgtacttagtgctgctgaactgtatagctaaatatggtaaaaatagtatgttttatgttatgtggcttttaccacagtaaaaaaaatgcaaaggaacagtcaggataaatggaatgtcaagaccacgtggagaagctgaatgcaagtttgtgggtggtgtgattgtgcagttgctgtgggcaggccatgtattttgttgtgagcttgctggaaggcaagttgaaaaggaaatagcaatctagccatgagagaaaaaaaataatcagttcctatgaaaggcaaacatttctcagtacttaattccactctggagctgcacagacaacaggaattgtagtcagcagtggcctctacaacatcccagcaaactcagaagtggctttctaatctcccatttcttggcctatgacttccagaatctggtgttaatgggagcctgccaccttgggtcaacatggtccaaaaacacagctttctattgctgtcttgactttggtttgggataatgagaatagacttcactcgtgagccaaaaggcacatgtgttttgaaggaaactccaaagatagtcctcaaggcttcctattgtgcctgggaagatttgaagaggacaggctgtatcttgttctcagcttgaattttcccaggcagccaagagccttgactgggagaatcatcattgaatgagtgacctggaggctaagctagacctaagcttgcctttatgtgtaaaaatggtcactttgggaagggtagggggaaggtcggtcgttgatttgtcaggaggagcgtagaagaacctgactcactgactgaggtccagccccctgtgtcatgagaagaggtccaatggccacgctcataggtccccccacatctctctggagtatacactgttctctcagatccactgtggttaacacagcctgttcacagtgttaaagggacatgaggctaatcagctttaagtgcagactagatttttccctgtgcattaattgtagcatgtgaacattcttttaagtaagtaaaaacaaatatatttttagtgactgaaatacccttgtttattttggaaacagtaagtgcaaatgttaaaaaaaattaaaaagagcccagtaattttcttctatgactttgaaaacaacttgattttttcttgcttccaccaaaaaatgaactcattagacataaaaaaacttaaaagatagtaagttttgattaatctaaaatctcttgattccaccacctagggataatcattgttaacatttccttctatttttctatctttatatatacatatccaaagc

SEQ ID NO: 48265 - DNA, 1543 bp, Bovine  19866880379852
  misc_feature (1)..(1): n is a, c, g, or t
nacggaatgaatttccttctttaacacatttgtttaattttaaagagtgaagcaattgaataaaaataacagagaattgtaaaagtggcatgtacaacttaggtgagaaggcatgatgaactaggaggagggtacaataaaaaaatcctgaaggttgtatgtcagtgattggcatttgggtaatacttcaggagttgagagcaagagggggcttcctttctaactcatcacttgccagcctccatccctacccccattgcactagccgtaaacctcaagatggctgaaaccagtctcagtgggctgagcattatgtcctgggagctagtagatgctcattaaatattggctgagtgaaatgagaaagtgaatggataaatgtagctcagttcccttgttttgcaggtgagaaaaccgaggtttagagcacaaggagggcatagtcatttagtggcagaatggagactgtggccagatctcaagctctgggacccaggccctcttcactgacctgtagttgttagggtctgaacagagagcattcaactcccatacttagtaatgaatgctggtaattctccgagtcctttatttgaagcgtgtgtcccttttaagtcccaatatattaatgcttttatgagctccgtgaaccttgtatgggtgcttagaggttaaatttcctgtctgacccctcctccagtatcctcagtagaatttatcactttattcagttgttgtccatgtagtgactggacatgacagtcactaagtcatgtccaactccttgcgaccttcactacttcctaatttgctcagattcatgtccattcagtccttgatgctatccaaccatctcatcctgttctttttcaaaaaataattatctacaaaacaggggccaaaaacttaagggacaaaaaaaaaaacttcaggagtttaatgagaccttaggtattgcttttgggggaaaatttagtgaaaactggatagttatttaaattcctggagaaaactaaagccatgctgtagactccagggtgaggagcacgtatttcagtttcaatattgtaagttgttggtgtttaataccggtggggcagccatgtgcttcccacggctccttggatggaagaggcagatgggggaagggtagtcacatggcatctgtgtcctctccacagatccaccgtgggcgccctgctggcatctgaggtaacctgtgctaacacctcccagctgcaagtctcatcttgtctcattgcttctggcctgcgtggtttgtaaagtcacctcagatacctccacaaagcttgtgaaaccacctggagcaattttgtctctttccttggtcatggaaaataatgatgaatgaaaaaaacagctgcagcaacccagtgggcaggattagtgaagcatccttacagacctccctgctcctgcaccaggagggatggtctgtgtggctgctggtgggaaagagggtggccaggttgtttctacacctgctgttagtattaggaacccacagtgcccatcacatggg

SEQ ID NO: 48266 - DNA, 991 bp, Bovine  19866880406613
  misc_feature (1)..(1): n is a, c, g, or t
ncacgagtgaactctaatgtaaactctggattttggattttaatgatgtatcaatgtaggtttatcagttttagttacaacacatgtaacactctggtgggagacgctgatattggggaggctctgcatatacaaggatgaagggtacagcagaaatctttgtaccttattctaaatgctgccatgaacctaaaactgctctacaaaaaaaaaaaaaaaaaaagacattttggagaagaaatatgtgcctttattctcagagatggcttagaaagttggaaaagattttagatttttagtccaatgcctgcaactttatcagggagcatcagggtccagaaaagagaagcgacccacttaacctggtgaatgacaaaggactaggacccaggcatctacatttccattttcgtagctctttcagcttcattctagggcactgtttatgtgagcttgattaatgtcgctgttttctctgtgtatctaagtgacatacttatctaagtgtatttaagtgacatactatgatttaagttcaaattaaactgctcattgctggtatataggaaagagattgattttttttttgtatattaaccttgtactccttgaaaaggagtacgtcaaggctatatactgtcaccctgcttatttaacttatatgcagagtacatcatgagaaatgctgggctggaaaaagcacaagctggaatcaagattgcccagagaaatatcaataacctcagatatacagatgacaccacccttatggcagaaagtgaagaggaactaaagagcctcttgatgaaagtgaaagaggagagtgaaaaagttggcttaaggttcaacattcagaaaacgaagaccatggcatctggtcccatcacttcatgggaaatagatggggaaacagtggaaacagtgtcagactttattttggggggctccaaaatcactgcagatggtgactacagccatgaaattaaaagat

SEQ ID NO: 48267 - DNA, 1146 bp, Bovine  19866880471322
  misc_feature (1)..(1): n is a, c, g, or t
nccctgatgaagggcaagttctgagagcactcttaaacttttgaagcagtggtaaacaaactctaaagttgcaacccagttgcaccaaaacctaagctaaggcacgctgagaattctactttgcagtagcagatcattctattgatcttataaccatgagcctaattctgaagcttgcagacccaaatggatcaggtggagccaaatccacccccttcgctgtccaactgtgctccaagtggcccaagtcattgctggcaagattcacacctcactccacaattagggtccactaataatttgcatttcttcttgggatgctgtgcatttttgtactctatgcagtgatatgctaaaggagaatcaagaagagagtgttcctcttggccataaaaaggtattcaagacaggcagaaagaagatatatagctaaatacatatcacttgaccttgcctattttattagaaaagcatatcttaagaattattagttctcgaaaaagaattcagcataacactggtctttatctctaaatatctcattagagacactattaatcttagtagaacagttcctggtgcaagatttaaaggatagaaaatcattattttccattaccaaacagagtttttgccagaaacaaatggccagtgggagatttgaaagaaaaacaaatttctatttaattgagcttattgtcttcctgaaaacctactaaatggttgcttccttaatgagtcagggaaactcaggattttcttagtgctgttgagatctctactttttcccttttggttttgaacctgtttccttctctgaacatttgtagcctttctttgtatatgattttttagattaactctgttaagtgtgtagccattggagatctaagtcaaacccaatgcaaacgataccaatttgagtacttttattttgaagaggggtcattgctctattgtaaataccttggcatgcttcctgacgcttccaccaaaaaaagatttctgatttcagtcatgtgcagagctagcaagggaacaaatgctattctgaggacaaggaggaagcacgctctgtgccaggtgctaatccgatggctttatatctgttaattgtttattctttataccaaatcttagagatag

SEQ ID NO: 48268 - DNA, 1675 bp, Bovine  19866880513617
  misc_feature (1)..(1): n is a, c, g, or t
ntattacatgttataacatataggactttgttagtttttattttcaaatgcaaatacaaattatttgtattcattgtatgaatataccatattttatttatccaataattagttgatgaactttagggttagtcccacttttgggaagcattttgaataatgtttctatgaacttttttgtgcaggttttgtatggacatatgtctttattcctgttggatatacatcctttaaaaaaatttcttttaagtttctgcccatgctatgtagcatgtgggatattagttcccaaaccagggatcagacccttgcccccttgctttggaagcacagagtcttaagcactggaccaccagggaagtccctgttggatatacatctaaaagtggaattgctgaatcattttgtaactctctactttatatttttaatcttctgattaatctctttcatcatttggtaactctgtgtttaacctgccaaactgtttcccaaagtggctgtatcattttacattcccattaacagtgtatgggagtttcatttacatccttgtcaatacttcgtgttatctgtctgattataagcatcctgctgctgctgctgctaagtcgcttcagtcatgtccgactctgtgcgatcccatagagggcagcccaccaggctccaccgtccttgggattctccagccaagaacactggagtgggttgccatttccttctccaatgcatgaaagtgaaaaatgaaagtgaagtcgctcagtcgtgtccgactcttagcgaccccatggactgcagcccaccaggcccctctgtccatgggattctccaggcaagtgtactgcagtggggtgccattgccttctctgataagcatcctagtgagtgtgaaatgatatacagttgtgattttgatttacatttgcctaatgattagtgatgttgggcattttttcatgtgctaattggccagttgtatacctttgatgatctgtgtagttaccttatttttcctgcaccattatgtattgggtaggggttggttacattgatcatttttctactagttgcaaaatcaggaagaaacatatctgggccaggttgggaatttactaaagaaataatagatattacctaaagatcttgaatgaagaacagtgactctgggaaatctcctctcagtgcagtagctgggtgtgactttgccattggggagatgatagttgtatgttaggtaaggtcatttttggaattttatgtgcattagaagagtgtatgtgttaggtagaaaaggcaagggctgatatatactgagatgacagccctgctgattttgagaatggtctcttcctttcatccacatgcttacagtggtgggactcccaacaggatgtttggaaaatataacacaaccctttggctgcttttgattgattcagaggtgtccatatggtcccaacttggccgaaatttcttgaggaatgaaggcaaagcagaatatagatgacagacagacagacgagttgtgctgtgttcaggtctcttcctccagcttactcccagggtcctgctgtctattgtccttcggttctgtggtccagtccttcaatcagatggtcctttttggtttagtcaattttagtagatagcaacgactactgtattgtacttgttt

SEQ ID NO: 48269 - DNA, 2274 bp, Bovine  19866880530487
  misc_feature (1)..(1): n is a, c, g, or t
naagtggggatttaccaagttcaacacggatgaatttgagaacatggtggcagaaaagcgactcatcccagacggctgtggggtcaaatacatccccaatcgtggtcctctggacaaatggcgggccctgcactcatgagcatcagtgctgtcccctccttaatcacgctcaccaataaatgctatttcctgtcaaaaaaataaataaataaataaaataaaataaaattaagttataaattcaaatatatcaaatttcaatggatataacttcagcctataaatattaagctacatgtcaatacatgtttaaatgatgcttacaaaagaaatttatcaagaagtttgaaataatcatgcagtatattaactatattcatgaaatctggattattggattactagtgttatctacagctttaggaaaaacttcagatgttaaatgaatgattcaaggatatacatagattctctaaaagtgttaaaaacgtaactgggttttaatgtatgtagacctaaccttcatcaatatgaatgttttaaatgtaattaccaactattagattgatatcttgatgattgagatgtatatgtttttctatactagtcaatcaatatattagcatgtagattaaaactgaaatgaaacaaatttcaagtttgatgttttttaatatatacttgcttttaaaggttgtatacataatggctttggcttctgtatgaaaacatgaggctaagaattgctagagtcatgtaaagatcataagaggaagaccatgagaatctccgagacttgggtctgagtcgtaacattctgagcctgaaccaatttggaaaaacttaactccagacttcttgaaatatgaggtaatgtctgtttttgttattaagttcactcttaattggatattctgttatttgcaggcaaaatccttcctaagtgatatctaaacatataattttttcttggaatgtaagaattgttctagtcaattgccaacagattaaaagagaaaatactgaaaagaaatgattgacaaaagtcaacatacattaaaaaaaaaatcttagccaactacaaattaaaagcaatttcttcagacacagataaagaacagacttttggaccatgtgggagaaggcaagagtgggactgtatgagagaatggcattgaaacatgtatattaccttatgtaaaatagatgaccggtgcaaatttaatgcatgaagtagggcacccaaagctggtactcagggaaaacccagaggggtggggcagggaaggaggttggaggggggtccaggatggtgagacacatgtacacccatggctaattcatgtcggtgtatggcaaaaaccaccacaatattgtaaagtaattagcctccaattaaaataagtaaattaatttttaaaaattaaatttctttaacattagcttctagaaaaccattcttaaagaaatatcagaactatacttgttttagtcgaaacagaaaaggaattccactcactagtacttgcatcattacactggagatcctagcctctgcagttagctgtacatacatacatacacacacagagacataccaaagaaatgaagcataaacagtagaagtaaatagaccaaactctcattatttgcaggtgatttcacaaaatcaaatacttagaaaattctagaatacttgctaagacgctgcataaccacaggtcttgctaacttaaatactacatgcctaacacatatacttcttttcactccacaaatatttattaactatctaccatgttactgtgctagacaacagagattcaagtcaagcaatacagtacattccctgacaagcatgaaactgtatctaccatgagaggtaaatcaaccttaatcaatgtttccatccattccattttggggcttccctggtgactagcggtaaagaagtgctacttgctcagttgtgtctgactctttgcaactccatggactctgtagcccaccaagttcctctgtccatgggattctccaggtaagaatactgtagtgggttgtcattcccttctccaggggctcttccacctccaatgcaggaggcatggggttcagtccctcgtctggggaagatcccacatgccacacagcaactaagcccatgtatgcatgctcagttgctcagtcatgtctgactctttgaatcccatggacctgtaggacaccaggcttcctttgtccatggggattctccaggcaagaatactggaatgg

SEQ ID NO: 48270 - DNA, 2305 bp, Bovine  19866880634307
  misc_feature (1)..(1): n is a, c, g, or t
ncagcctcctctgctcctgccttgcttgcaacactggaggtgacagacaccctgaaccactccccagcgcccaccccacttctccgtagacaatatacacaatggccagaagaggattaaaatcagctttattgacaaattgaagaacacagctgggatttgaggcccaagcgaggttttttcatcttctctgaagtgatgacagctgagcccactgggtggggctaaccaaacttacccaccccgccgcagaccgaggctggaacgtggagagctgagtcctgggtgggctcaccacgggcaggtcccgctgggtttgtttactgcaggtagactggaagccccaaagcaggtccaagagaaacagagagagagagaagaagcaggaggacaagtaagcagggtcctttagcacattatctccacccagtagagaaaggtggtcccaagagtctcaagttcatcaaccacaaccatcccaactgaggtcaccccggtggaagcttctccccagtactttccttccatgctctactgtagttaggagatctttgccttgattggctgagcaaggaatgtacgaataaggaaaaaggtttctcccaggaggtaagggtggcttaggagcctggactgctcagtgaacaagtggccaggggctattttgtatgagcctcccagtcggcagccacgatgcaaacacaggtgctggctagagctggtggattcaggactgactcccgacatctcacacctgaacactgaccaccaaattccttttctttcctgtgctctggtgctcagacccctgaggactgctgaggaaagaactgggcagacttcacccacccccgaaccctggatgggtgaaatggatgaagggggtcagaaggtacaaatttctagttataagataaacaagtcctgggagtgtaatgtacagcttggtgattctagttatgattctgtattgtatacttgcaagttcctaagagagtcagcaatcttaaacgttcctatcacaagggaaaacaaattaactctgtgaggtgacggacagtgactaaacttatggtggtaatcagtttgcagtatatacacatatcaaatcattacctacctaaagtaatatactggtatatgtcaattatatcttgataaaactgaaaagaaaaaacccactaggccacacagctagggtataattcagctggacacctatggtgttcctgttgtaaagagagtccctttgactccagagtaactgacaccttctgatttaactgtcaggtgtgaaatcattagctttgtgccaaaccaaagcaggagggccttttaggccacgcatgcagggaagacaggagtagaataggaaaactcttccagggcctgtgaactgatagacgtttaatggcacgtcttgcagagtcgagtctgacgtagctctctttggctcaggaagtaaggacatactgctagcactctgaagtcctcccgcctacctgtcacagagaaaaccccttttctgttttttttcctgtgcttttctatcttgatgccactaactatactgtcttctatatttggatgcatttccagtgcattcaatattttgccttttagcatgggtgacttctgctaagtgttaatcccatccattagccattcttttcatagtatcaccattcaagggtgacctcatttcatggcaccagatggcacctttctgtagtttccaacaggctatttatacaactttactttgaataaaactgaatgattgcagaaacattttttccccagagtatttttattagggattcctgccaccatattaacatataaaacaatctggatgttgacacagaaatgcaaatttcactgtacaaagataaggctccaaccataggtaacgtggcccccagatctctagtttttcagtgaaatcaatcattttgacttcttccccagagttgtctttatattagacaaactacaaaatatgttccagatacataacattttacaatatgttccaagcacagacagaaatacacaatacttcacctacatttttttcatatccaacttgcattagcactaaagattgtgtgtgtatatgtatttgccatatgtgtgtgtatataaaaccacaaatgtacacacagtaattttcatggaaaattgaaacctttgagactgtgggttttatccactatgttatcagagagggaaaatgaataataccatgtcacaaattcctcaattggggataaataaaaacatctgtgtatgaagggcatat

SEQ ID NO: 48271 - DNA, 1177 bp, Bovine  19866880662842
  misc_feature (1)..(1): n is a, c, g, or t
ncctcttttctcttatgaaatgtggttcagaggtttagaggcaggcatcaagagttggagcatctcttcttcagctaaattccaactttgccaggcaacgtggtgcgtggccttctcttctggtgctgggtactcctttggaatgcaggctgggttgagggcaggggcgttctctttgccctcatgagttgtcgtcaccactgtgtccctggctcctagcacaatgccttgaacacagtagataccagtcgatttttaccgatggaccccagtctcctttggaacttgggtgtttgcatgttcttcctgattgacattgcccagtcttgcgagccatccctggtctctacctagacacagttactattttctgtcttaaatcttttccagaactaggcacacaaacaaataaaacaacttaatgattcaggtgcttgacagaagttgcttccatgagtaacacattttggttcttgatttaaattgtacctcatttggagctgcagcaggaaggaggaggtaacttcattacagagaaaaaaagatcacatgaaacttggaattggttttgccttttcctctctattcaagggcatggagttatttaatccgatgcatctctcaatgcgtgcacttgctgcagggatgggaatgaagtcccactgacagtaagaaattctttcccagaggaagtagatgtggttgccttgctgcttgtttacatagcagtcaccttggtacctaaaggtagcaaatgtgggtgttcattgtgggtacttgatagaatattctaatattgctgctttatttaaaaggcttagttttgtgtaatgtaactattgacacatttgcatcatctttctccaggaaaaagtgtaggtaattgtatctgtaagaactgcaagttagagcccctagcttggtagctcagctatctgacctgaatgctcctgtgaaagaatgatccacacataaaaatttcggatgtatctgctctttgaaaagtgaatgtggtaccttctatgtaaaataggagtcttatcttgtctttgtaacatttctcttttgttcttccaacaaatatttattgactcctgtaatatgtagagaagcacagattttaagtagaatttttaaaagaaaatctctagttgtatcctttaagagggcagaaaag

SEQ ID NO: 48272 - DNA, 756 bp, Bovine  19866880668132
  misc_feature (1)..(1): n is a, c, g, or t
nataatgtaggcacattattaaacttcttcaagactgactttcttcatctgcaagacggggatggagaaagttctgagtcacattattgttggaggaaatcaatgcgatcaagcgcatgaaacagcataatgcctgacacatagacagtactcaataaataattgtaattatcattattattgccattattgttgtgtctcagttaattggctaatagatctgtcccctttagcacaaaaggactcttatggtggagctaatgtctcaatctcctcttcatcaccacagcaccaattttataggttggatgaagggataaataaattaataactaacagtattgtacagaccagccaacatgacaatggccaggaaagtggactttccaaaagacttcccttacacaatggaaaaattagaaagcaaacctgtaaagccaaatggacattttcctccccattatgatccattcatttgaaatatgtctgcctacagaggctttcatcacttgcaagttggtggaagtggtgacacacttgtgcaaccagagcaagttcctggtgagacagaagggaaaacatacaaatccatatttactcaggcagtagtagccactgtgaggaatcagcatctcttttgtgctcctggaatggaacaggagacaatgggtaactaaaaggttaccacagagaggaagggtcacatatcttcaaaataaaagaaattaaatgccggtatttgcatacagtatatat

SEQ ID NO: 48273 - DNA, 1284 bp, Bovine  19866880703762
  misc_feature (1)..(1): n is a, c, g, or t
ntgaattttaatttttgttcattgttggtggtttaaagaggtccccccccccagcccatgtaattattgtgaacattttgctttgtggtcactgtaacgtttggggtggtgggacagggaggaaaagtaacagtagtccatatgtctctggcttctattcagagcagtgtgcagaatgtaatgctcttttgtaagaaacattttctgatttttaaaataaatttagtgaacctatttttggtggtcattttttttaagatggtcatttttcaaatggctgaattccccccaacctacccccaaatgtaacactaagtttaattatcagtcctctgttggatataaataaatggcatctcttcttggacttaggcaaaatatcttgacatactcagttctggtgattcttaacaattagaaagcccattgcttgggaggaaattccaccacacagtcatgcttataataagctggggatttttgtttggttttgcaaatacttgcccctactttgcaacaattttctgtttgtgaagaactaaagtgggaagcaacacaattgatggaatactagtataagcatatagcagaagcttaatagcaagttttattaatcagaataatacttggttaaggaagtgactgatgctaaattctgattgtttttattagataacttctcacctatagatttaaactatcagattggttgtgtcttttagctaaactttgtaaaatatatacctatgtatgtatatattcttgtttttccactgtatgcaaattgaaagaaaaagatatacctttctctgttgtatgttgggttatgtaggaaatgtttgtgaacaattcaaaaaaaagatgaaaaaattcctgtggatgttttgtgtagtatctcttggcatttgtataaatagttgaaagttcactacagaataaaactcccataatgctagatttaatgtgtgcccaattttgaacaagggttgattgacacctgtaacatttgttaaaaagttcctctcataaggaaataaaataatcttaaattaagtaaaaaaaaaaaaatagaaactaacatacaagggctaataagataaagatagtgattttactttgggtttaatttgtaaccttagaaagatgtttgctgagtgcctcatacaaacctttgaaaacatgacaaattaagctctaaaattctaaaacataataccagtaaaataaatttctgtttcattagaatcttgtcactatactagtatctttagcgacagaatcatt

SEQ ID NO: 48274 - DNA, 1969 bp, Bovine  19866880777572
  misc_feature (1)..(1): n is a, c, g, or t
ntggatctgccagatgttgcagacaaaggctgagaggttatctaggacttcatccctgttttgccagaagtaaacctgaaggatagtcatccctgggtctccttttccacgtcactgctgcagctgccatggcatccagagctctggcttctttaactttgagcccttctccctctgtaggcggtcagtttcaatttcagctgctttggcctcctttcaccttaggttgcttgtgaacctccgacatcttctcctatcctttaattttcacggtagccctctgcagtaaggaaggcaaggaagcaacctaagatagagtgtctaagtttcttgtggtcccttgcttttgtttatttcattccaaacctcatgtttttagtgtgtactacctccactctaccctgattgataataggaaacttcaaaaccataccatcaaactcttgcacttacaaaaataggccagtgattgtttctgcagcttcctcttataacccctactgttttttgtcttagctctcaggccatttctgagcaatagaggttacaagtactccactgaacaaccagttctaaatcctgtcatcaaatcctgtgctcctgttccaaatggtaagttttcttatgggcatattaaaactttataaatttagagtcttcctctgttgaaggaaaaaatttaatttgtgagaaaagcttagtctttttagtgttttgctactttttttaatcatactgagaaaatcagaagtatatttacgtgatacgactgttgagaatcatttagataaataagatgctttacatcagctaagaatctgttacttgttataattttacctgattattatattaatataataactactaacattgtatgtattgcgtaggtctgacacttgtgctttacaaatgttaatcatgtaatcctcacaacagccccattaggtaggaggtggtattgacattttatagatgaaaaaactaggttagaagaagttaagaaatttatgctaggctgtagagcttataatttgacagagctagccttcaaacctttatatatctgtctcacattttttgcttttctcattgtaccatctgattacttgtggcatttgaatttttgctatgtagaaagtcaaagaattacatgctagagagaaagtctaaaggtttggctactcctgtttgtgcattgtagagaattatagaaactctatttagatatactgaattacaataatttttttgtttgttttcaggtaatagatgcctaatatttcctttatgtgaaagaaatgagtgtaactagtattgcattaagagttgaaacctggctttcagctacatggcatgttaaagtgcctgtaacgtggctagaagcttgtattaactggatccaagaagaaaatgatcatgttaatttgagtcaggcacaaatgaataaacaagtgtttgagcagtggctccttaccgacctgagagatttggagcatcgtcttttacctagcggcattttagaaactccgaaaggagaactgaatggattttttgctctgcagattaattcattggttgatgtaagtcagcctgcatatgcccagatacaaaagttgagaggaaagaatacaaccaatgaccctaattacagctgaaatacaagtaacccccaaaccttgggaagcaaagccttcacgaatgttgatgctacagctaactgatggaattgtacaaatacaaggaatggaatatcagtctattccagctctgcatagtgatcttcctccaggtacaaaaattttgatttatggaaatatttctttccgtcttggtgttctcttgttgaaaccagaaaatgtgaaagtgttgggaggagaagtcgatgctcttttagaggaatatgcccaagaaaaagttcttgcaagattaattggggaaccgatcctatagtttcagtcataccaaa

SEQ ID NO: 48275 - DNA, 1584 bp, Bovine  19866880864757
  misc_feature (1)..(1): n is a, c, g, or t
ncactgttttgacactgtccccctggaataaaacaggtacaaaggttaattaagatggaggcatgactaagaggaacttgttaaggatgatatttgtgtgtctctgctctctctgccttatgcctcagtatggttttaaaacttttgtactagcaattggtggtatacagtgtggggtagtgtcataaccagtttgacaatttattaatcacaaaataacaataaatctctagcttttacacttgtttgtcttgccttttttgtagaaagaaaaagatgtcttcaatttactttgagtaatcatgtcttttaaagactactggaattgattgacccccagattttcctacacttgagattatttttcattaatttttttgtttcctcagttaaattctgtgtgtatatactatattgtgtgttagaaagagaaccaactgggacatcaggtaacttgggcttttgcttgctctttttggttcttgactattatttggagtcagggcatcatgactgaaagtggtggtgaggcctgtgtgaggcctgattctttagaatcacccacctaggtgattctaaagaaccttttagttgtcgccctggtgtgatttttttgttgctgtttgtttctgatatgttcatcttagatttgaatatcttttaaggagtttacgatacttaaaattctccaaagccttaaacaaaaaaaccctcctaaaatactgtagacttaaattgttctcatattgggttgagtggtgaaaataacatttcaggattttatttcccaagtggaatacttatgatcctacacaaattttagcaaatgagataaatgacaactggcctctgtgtattcagaattagtgtttcagacttggcctcaatgtagtcatgaaaggagttttttgtttgagaaacattattaccatgttaatttagtagacaaattacaacaaaataggaccgataaaaatgctactaacattagtgataaaagaacctggagcacatgtctgtgtccttgtgcaaaacaagtttatgttgttaaggcagagaaatacgtgcatatctgcttcctctcttaacattaaacatgttgattaagtcaataagtcctgcattaaggaaacctttataatacagctttgtcctattctctactgtccttttcacttaactgttctcagtagatccagtgaaaacacacttggggaaaattatacttggcaaatgtctgcttctgtagtattgcacatgatattctctcctttggaatttcatctgtcttctttggcttatataaagggtactgtgcctctggggtcagttttgtaggtttcctaaacttggctaaccagttgatatactctgcaatgttaactgctgcattctgcttctctcattcacttacactttggaggatttttttttgtttgtttttctgctcttgaaatcttcttggcagttacttaagtaacatgaaagtggttctcctcaacttttttgtatctttcctctagtcaaccatatgcagccattttgcttcagaaggtgaacatttattgaacatctgttgagtaa

SEQ ID NO: 48276 - DNA, 1726 bp, Bovine  19866880870946
  misc_feature (1)..(1): n is a, c, g, or t
nacaaatgaagaaaatcaaacatggactgggtattggataatattgggaaaaaattttttatttaaatttatatattttaattggaggctaattactttacaatattgtattggttctgccatacatcacccatgaatccgccatttgtcggaggtcatattggtatcatggttacccttttaagtcctatctgttagcagtttatactgaagtattttcagatgaaataaaatgatgcctggggtatacttttaaagattctggcaaaaaaaggaagggtggaatagatgaaatatgaaaggcaaaatgttgataactatttcatctaggtcctagatatgtgatggagaaaagttggtcattttactctgttctttatttgcacatgcttgacatttttccacaataaaagttatattcatagaaataagctcaattttctcatttaaatatttgaacaggctttatttttaagttttaaacaagtaacaatacattctctaatacaatgtacacatttttatcataattatgtaacataaaaaattaattttttaataagcctcctagaaatgctctcaaattccctctggttttacccccaaatgttctccaaataatgtaattttttgtgtgccatgacgtaaaaagattgggaagctctgcccagaggaactgattttgtgcaaagggcagataaatacaggctttcaacgtcctccatttccaaaagcgctcagggctccctcttcagcatctctttaaagcactttcagaaaatgaaatgcttgagatttaaacagtccctgcagctgcagcaccagtttcaaatgcccactattttgaaagaagatccctttgtgctgttttttgtttcccaaaggaaaagctaaatccaccccagtgttttcataaactgaaaatgaatggcttgagcgccgctgttgagcgcgacggaagaggacatttggcagagctggcctctgcggggctttggttccccccagacatcagtcagtcagcaacctgctgggatgtggccctgaaaggtgacttcaaaggtgaacctctgatactcgtggggctgcccagcctggggagcaaggtgcaaggtgttcagggtgggggcttggtggctgcagctcctttgctgctatagagtctggccagacaggctgcacatcctcttggaagcccaggttgcaccccacaactaagctgcacttgcttttcctctgcatggttgagtatatccttgtctctgaatctggctgtttggttgtttatttaaatctgtaatacataaagtgaaaacattccaaagagagcaaaaagatatccaatagaaatagtcagtctctcaagcttatttccagagaaggcaatggcaactcgctccagtggtcttgcctggaaaatcccatgggcagaggagcctggtaggctgcagttcatggggtctctaagagtcagacacgactgaacaacttcactttcacttttcactttcatgcactagagaaggaaatggcaacccactccagtgttctttcctggagaatcccagggatgggggagcttggtgggctgccatctgtggggtcgcacagagtcagacacgactgaagtgacttagcagcagcagcagcaagcttatttctcccatcagtcagttcagtctctcagtcatgtccaactcttagagaccccatggactgcagcaca

SEQ ID NO: 48277 - DNA, 1562 bp, Bovine  19866880931498
  misc_feature (1)..(1): n is a, c, g, or t
nttttaaaagaaagtgaaatttttaaaggaaaatagttaaaggagatgctagttagttgtgtattattgtacattaacccaagagtggaagcaaatgggaattggacaaatggcaagtagcaaaacgagttctgatgagactgataggcaagtggtggtagacaaatgattttatgaaagtgatggtgatgcaaggttctggatgatgtaaagaacagtaaactcgctgtccaagtggacatgaatatgtctaagtggatctaaataaaagtggagaaacttgaaggcacattttttgatccctcatgccattcattgagattctgtggaagaaactttaaaagaattctatgtgtgcgaaagagaggaaaagagtcagaaagaatgtgaggagaatgatcttggctttttgataaatgcctatgatcttcctctgtggtggtcattatactctttccctttcctggtttccttaggatcttattcataattgggactctaattaagaaactggagggaacttattagataatataccatttcagcttggatgaagtagtgaaatgaccccctaactagatagtaagtgggacaaatgctctcgtaccttccttcataccactgaatccatgacagaaaggcaggctctgacgccttccatgcagagtgcataccaatactgtgaaagaagagggttcagtacagagcttagggcacagagcatagtgatttttccataaaatgtaaatgaagacatggaatgttttcatgggatgggctacctataatctctcctaacttcagctctaccattagtataatttccaaaatggccattccagtcctactcattcatggagccctgagtgctttattagacatctgattttgtaaatacatttttaaaagtcagctcatgaagacttcagttcagcaaactatactatactttgctattcagtttacagggtggtctttctcatgtgcattaagtgactgatttttcttttaaataaagattatttgatacctgaaatttgataccaatatagaaatatattttctataggttatttgggaagtttgcaaatgatcacctttgaattgaagtggtttcccccttgtttatgacttaaagtcatatctctgacataaggatgtgccagtatagtctgcagaaaattagttccctcttctaatcatgtttaatctcattttctttgaagttctaaccataacaaatcatccagcccttctccttttacattaatattaaataacattttaaaattatagaattcatatattatacatcataaaacattgaaaaatgctgacaggatgagcatcacacatagtctagccaagtggatttatactaaggagtaatgactatataattttaacatttccagctaatatctcttaggcaaaaacttcactgttgaataaaaatatttttaagtgaaggatctgacaggataaggtctgctgaatttaaacaacagctaccaaaagtaaaactcggatcctgaaatgccattttgtcaggacagatcagt

SEQ ID NO: 48278 - DNA, 880 bp, Bovine  19866880971363
  misc_feature (1)..(1): n is a, c, g, or t
ncatataaggtatctgagaaatataaaactgtgtctaccaagtgccacttcacacctactcttacaaaatgtgaaaactctaactggagacattacatgtaggctacttaacctatgagtgagccggtttacatgctatatgttgcactagatgaacattgaaaaggtagttttaaagaaaataaggactgtgtcctgaacttctgttttccctagaggtttttttaaataatgccttcatctcttccccattttccagttgtcttctccagcgccacagccataatttagcagtattatgtgctgtcacttctgtgttagtaaacaccaggacttgctgtgtaattataaaataacctcataatgaaatgcagtgaagagttctaattacatcttaatgttgcttaacaactattctaccttaaaatgtgaattttccaaccatgtatcctaatgagttatcagaatgtattagctctccccgaaaatgtacaaatgaggaggtagacatagacgattaccgccagcatgcatgtgtgtgagaacacttatgtattcaaaattaatatactaccttaaaaattcttaaaatataaaagcacatcaaaatgctgcaacaactacagggcatgattttttttttaactcatatttcactttgaaggaggaaaaaatgcgaaattattctccaaagcaaaagattacagttaaagctgtcttcttagaatagaggacaaatacaagttaaactgaaaacatccacactttttcataagaacacagagctaaaagaaaactcactggggtgatctaggaaataagacttcccatttactttattctttaaaaatttccaagaaggactcctcccatattttat

SEQ ID NO: 48279 - DNA, 826 bp, Bovine  19866880984904
  misc_feature (1)..(1): n is a, c, g, or t
ntatgtatataccaaaagaaaggaaagcaaggactcagatacttgacatcaatgttcatggctacattattcacaatagccaaaaggtagaaacaatatgagtgtccatcaacagatgaatgaaaaagagtggtataaacacacagtgaagtattactcagccataaaaaggaatgaagttctgatatatgctataacatggatatacatgttgaaaacatggcaagtgaagtaagtcagactacaaaaggacaaatatcatatgactccacttatatgaagtacctagaacaggcaaagtcacagagattagaggtcaaggactgcagtacaaggaaaaatagggaattcaatgggtacagagtttctgtttgggatgatgaaaacgttctggaaacagatagtggtgatggttatacaacacttaatgccactgaattatatgcttaaaaatggtcaaaatggcaaatttaatgttatacctattttactatgataaaaatacattatcattcagattatatataatcaatgagctagaaacctaaatagcagatattgtttctatcaaacattaaatatatttgcatataataaaaacagaaaatgtacaaatttatagaattttttagtttacaatgctaaatatatacaaacctcccactgagcaatcacatttttcagcttctggatttcagcatcttttcgttcaagttccaactttaatctttcaattcttccatcttttagaactacttcctaaacagggaaaacaccattttagaaataagacagttttgtcatgtctgatttacaatatccttta

SEQ ID NO: 48280 - DNA, 1139 bp, Bovine  19866881036788
  misc_feature (1)..(1): n is a, c, g, or t
natggacaggttcctgatgaaaagtttactctgcctcatttagagccgtaagtctcagcagtggggagtgggtgaaaaggaggggttgctggtggggaagccgccttcacacttatcttccctgcccacttaatgactgctgtgattggtgtgaatatgatatagcttttgttaagtccaaaaaactccaaatcaaacactggttatagggggagttgataaaataattattctttttgtctttatacaaatataataaacttggttttctagagacagagatatcagaatcctattatatccctagtttgttgcatttttctccctgcaggtcagtctgagtcctttaccactgtttaatctctgggccctcccagagccataactcacctcagagctgtgctgtcatgtcaaacatgagcttcggggaatgaagccacaggctgttcgtcccagaggccctggaacttgttttcttgaccagtccctgatgtcagccagtcttgtggtcatttgctatctcctcaaaagagagagtggggcacgcacagctgctcgacccctgggctcaacatgtgcctgcccttctagcaaattaatcagcaagggaaaggcagaagcagtttttcccccaagtgatttcttccctccagaaagttattatcttcccgggtgtactcagtgactcatgacttgtcagcaccattcaaaacattattgtatctgaccacaccatactacacatgcactcccacttacagttcatggtttccttgcacacacccctaataccactcagtcaattgccaccccttttatacactcaccttggaggtgtgcaaattggtaagacatccttggatttatgtatttctgtaataagcaatacagtgttctttgggctcacaagaagatcttaaacgaaagcaaattattgctttgctcaaaacacaacagagatttacagagtgatggggaagaaacatatagaactcactgcagagatctcttggtaattagctcatgtgaataacaaagtaagcatgcaaattcttttttcgtccccagattggtaaagttttcaaacgtggagggttaggtgtgacccagcccatttttctttttgtctggattaattt

SEQ ID NO: 48281 - DNA, 848 bp, Bovine  19866881076710
  misc_feature (1)..(1): n is a, c, g, or t
ntgaatgatactagtttagatatcttggctccaataaaacacatcattaaaattaattttatttgtttcacttttcaaatgttttctttttgttctttaatttggcttgcattttatttttattggaaagcactgctctagaacataataaagattcaaatattttttaaaagaaatcaaggtgggttgcttctccatcacagagttgcctgggtattgttttatttttgtggggcgggggaggcattcagttcctaggacactgtaggacattgggctggggtcctctggcctggatggtttcgaattggctagggtaaggatgttgtatattgtttcattgtttgtcaggggagtgagtggagagtttaaaaatagcatccccctccctcctctggccccatgctgatccctcctgagttatttctgttggctgcattaggagcctgacatttgattcattcagtgggccctgcctcggtcctttaaaacagaatggacagttagtgaaaggtcaaagccactatggctggtggtagctgccctgggccatgacaggcagaggagacacggagaattgaagaaacagtaatggcaaaatgcttggtcaagatccagactcggaggggtctccgcctgcaattagtgaaccactgcaacagcaatgtgtttgtccgtctgctgagacacagttccaagatcacagccagaaacacgggtacgtgccctgcagtgggctctggtctgcacctcagaagggtgcaggcttccagctgccactcacccgacaatgtcagaagtctgtgataaggagagaaggagaaagagggagaaaagcagggaggcag

SEQ ID NO: 48282 - DNA, 1627 bp, Bovine  19866881092541
  misc_feature (1)..(1): n is a, c, g, or t
nttgtagtagctgttataatttgagtaatagtatctgtgaattatgtagttattgttatttaagataccattcatgtaagtttggtaatagttgtcatttgatctctgtcttcggcagatattatagctgtaacatttgaacttctaagtagtctctgattgagtaatgtgtacacagaagtaaagtctttaaagaattatgtgactaataaaacttccaggactcttaacccaatattagcacacagtgcttttaaaaaattttatttaatatgaaaagatacatataatgaaaaaatgttaactgtgtatgtgtgtgtagcatgtgtgcatggagtatgtgtgtgcacaaaatccttctctgcttcctgacaagggtggatcctagtaactagaaggtctttagtttgctaagcacagagcgatggccttggtggaatgaaactttttctctgtatctccactgggtggttgaaggagagggcagcagcaggagagaaagagtatatactagctcactggtctcttcttataagggcactaatccccatcatgaggacctcatcctcatgacctcatctaaacctgattacctccaaatattcttacatgggggatatgaattttagggaaataaaaacattcagtccataaaaataatatattgtatacaagctgtttcaaagaagagaaaaaagaaggaaagctgccctacttatttttaggaggcagggataaccttgataccaaaatttaatatggactacacaagaaaacaaatgcaagtcaatctcaattatacaaatacaaaaatctaaataaaatggtagtcaaatgttaagagcaaggacttttaaagatgcatcatggggacttgcctggtggtccagtggataagactcgatgctcccaatgcagggctgggttcagttcttgtttggagaaccaagagcccacataccacaaccaagcctgcacaccacaagttgagagcctgcatgccacaatgaagacccaaagcagccgaaaaaaaagtcttaaataataaagacatcatctttcttgaatatgcatcaaaatgataaaggatgggcgttgggacatatagaagaccagattgtgagctgaaaaatcattaaagctgggttatgagtacagagaagtttgttttgtaccattttgtctctttttgtatatgttttaaattcacataataaaaagttgggggttttttttgtaatgcattgtggccaatcagtatttaccccaggggaacttctttgtgtaacactctagggtgtcctatgtaaacttcttctgccttctctggaaaaatacaaaattatcacgatacttttatccgaaagcagctttgtttttagaggatttgaagaataggaccagggggcagctgacttaagagtttctatgaataactctctgcatttgagatcagaagcacctgaagaattatgcaaatacaattaaagatttgttaagtgtatcagaaaatggcaacccactttggtatccttgcctggagaatccccatggacagaggagcctggcagtcgcagagtcaaacacgacttagcacacacacacccaaacatatcagaaccaaaga

SEQ ID NO: 48283 - DNA, 1644 bp, Bovine  19866881103843
  misc_feature (1)..(1): n is a, c, g, or t
nacctgctcatctctttgtctccactcttgccaattttcttctcggtgaatccttctgtactgggtttggtaatgaaagctcatgttgagcattacaaatagcatgggaggatttctgtggaattttcttaaaagcaagattcctgagctatgaaaaaaaacaaaaaaaaaatattaaattcagtttaccaatactgggatactaatgatttttttggaagttaagaaatcagtatttttatacttctaaatactcattatgctaactcacaaagtcactatgtgaacttttgtaatctttgtagaatttcaccagcttgagaaaattttggtggatttctagatgaaatgattagtaagtaaaaatggattatactctattataccaccatttgaaccaatttaatgatcctggtttactaaagggtttataggaatagagaacaggataacaagtatgcttttaaaatacaaaacaataaggttcaataagattaaactttaatggcttataaatttaaaagtttaaatagtgagagaagatagcttgaggaactctagcaactactttgctagtcatgaaaaatacagagcctacaactagcaatatatggttaggaaaatactttaattggttacaacagtacagtggggaaagaggacaaatcttagaggtctgtcttaggtgatacagattgctctacattagtaagtttgaggaactttaaaatatgatgacaagagacagagcagttcaaacattcatgccccatgattatctcattatagatgtctgccgtttacatttaatgtagaataatgagcttctaatgcagcagacattagtgtctaccctaacaatgtttgcaaggtaaaaagttcgagtgagaacagatgctaattttgttcctcttatattgtaaagactgtagcagtttcccctgtatctctaaaagggggggaaaaaaagtgatctaatagctttaaagatttcttcaataaaagcaatggataagtttttcaaaaaatacagggcctagcccacaaagtaacataatgaattaaaactgtactggtcaagccactcccaacagtaagaataatctgagacacagaggttgaaacagggagaaaagtactgagaggctattatggattaaattgtattgcctcaaaaaatatgttgtaggcctaactcttgctgtctgtgaatatgacctcatttagaaaaaggatctttgcaaatataatcaagttaaggttaaactgaattaggctgggccctagtgaatgaaaggtatagacaaagatatacgaagccaagaacactgaggactgacagctaccataagaagctaggaagaggagagaggaaaggaaggattctactcagaaagagcctggtcctgttaacaccagggttagaactttcagcctctacaactgttaagtgaatacatttctgttggtttaagtcacccagcttgtggtattttgttacagaagtcctaagaaaccaataaagaggctttaaatcaaggatcaacaatttaacacagactattctgcaggagggagtgatgagatgcaaatactgctttaagtaggtggtttctgttgtgggaaagcagagtagaggagatg

SEQ ID NO: 48284 - DNA, 1177 bp, Bovine  19866881112935
  misc_feature (1)..(1): n is a, c, g, or t
ntttgctatgaccagtgcattttcttggcaaaactctattagcctttgccctgcttcattctgtattccaaggccaaatttgccagttacccccaggtgtttcttgacttcctacttttgcattccagtcccctgtaatgaaaaggacatcttttctcggtgttagttctaaagggtcttgtaggtctttatagaaccattcaacttcagcttcttcagcattactgtttagggcatagacttggattactgtgatactgaatggtttgccttggaaacgaacagagatcattctgtcgtttttgagattgcatccaagtactgcattttggactcttttgttgaccatgatggctactccatttcttctgagggattcctgcgcacagtagtagatataatggtcatctgagttaaattcacccattccagtccattttagttcgctgattcctacttgtccatacctctcctaaaacagacatccaagtaatcttgatttttgatacccctgatacttaaaaataaaagaggaatcatttgctctgtgacaacctagaggggtgggattggaaggagatgggaggggggttccacagggcggggacacatgtatatctaatttctattcatgctgatgtaaggcaaaaaccatcacaatattgtaaagtaattatcctctaatttaaaaaatgttttttttttttttaaagaggactcattaagcagaccaattcatgaccaatgacttgaggcagaaggacagccctcctcttcagtttagggatgtcctagatctcaggtgcccctctcattcctagtttcaagcatctgtgaagcaatttccccaggagcagaaagcagcctttcaatggaaggagcagctggtgggacataatgctatctagcttcctggcaccatccccagagtgaaatttcaaatcactgggcctgtttctttttccattccatgtcctcccccaaaggtacctccaacaaaagcaaattgctctaacataggcaaggtcttttcccattgtcaacaaaactcactgataggctcactagttctttctggctgccaacacaaaaacctcaaggctgtaattacatttggaggaagttcagcatgtccctgcatccagatttcctaggtcatcctatcagaaaggacatc

SEQ ID NO: 48285 - DNA, 807 bp, Bovine  19866881141625
  misc_feature (1)..(1): n is a, c, g, or t
ntgagctttttcaaatttcatgtgcatacagatcagctgtgggttctgatgcagtaggtctggggtagagcctgagagattgcatttctaacaagcactcagggcatggtgatgctgctggatcacactttgaaaagcaggattctggactcataaccgtggagctggttttccttgttcttttattcatcatatttgtggaatggtgcttactacctgcatgatactttgctgggtactgagaatgtgatggtgaacaagagacagcccttgccctccaggatcataaaatctaggtggaaaggcaatacattcattgcttcatcaaacattacttaaatacaattatgattagagccacaaaggaaaaagtacaaacgtctatgaaaccatgtgatagggagtcttgttctagttagtgggacaagattgtgactcacgaggtaaagtaagccccaggagacccatgttgtgtactgatgctcactctggttgtgggaaaccggtgactttttcctgcagtttccaaaagtattggctatatttagcatatcaaccctcttttcctgctgtacattttcccatggtggcctcagccaatctcttgactttccgtatccaccctatctccaattccacctctcttctgagctccaggtttctaactattgatgaacatcttaaatttggagacaccttaaccctcagaacccacatattcagggggcaaactccttgccttcttcaccacagcagctccgacggtgtcaccactgtgtttataaccattcaagcaaacacccagca

SEQ ID NO: 48286 - DNA, 848 bp, Bovine  19866881147116
  misc_feature (1)..(1): n is a, c, g, or t
naatatgaaaataaagttttttttttatttaggtactagctatgtccttgtcaggctctgtttgtttggaaggcttaggaagaagcataataaaatctctggagtcagaggagggaaaaacactgtataccacctggagccaagtcaaggataacttcacctcgtgtgtttccaaacctcaagggagattatttctgctaggggatcatggtggtgggggatgggggttggtcaccttgaggacacctttttgtctccatgtttggagacataggtttttcaccgggtgtagatggcaccttcttggttcagtgctgattaaaaggaaaaaaaggaggaaaagttgtacagtaattcaagggcagccacgaagtctgagtttgcagtgccagcagcagtgtggtaatttgagaatagcaaattagaggaacaaagcagattttaatcatatgccacagagaggaagggaggaaggtggtttaggtttatctccaaattgtacctccattagagtaagggaggtttttaatgctgtaatccaatgtttattgttaaagatttctttgtttctttcctccagtatttctttagcacactcactgggagggaaatgccagctttcttcccatcagtgaactcagcagttgttaaatataaaacattttcttgatgttattgggaatagaatgagggagaaagagtgacagagttagattcaagagcattaccctttcggagactttagtctgaaggcaaaactgtcccattccattatttctgtccatccatccatccatccgtcaacccatccacctacttcactcattcgtccaaagcacctctcttaa

SEQ ID NO: 48287 - DNA, 2134 bp, Bovine  19866881184205
  misc_feature (1)..(1): n is a, c, g, or t
ntaggtaattcctcaaatactgttccccatcagacagtcagattttgaaagagaacttgttatttctccaaggccaaaggagaaaccacgaaaccaatctatgctttttactgatgaggaattagatgacttttcattggaggaggccttacttttagaagaagctgtccagaaagaacagatggagaccaaagaattacagctattgactttgaacagaactacagatgaaagtatagagaagttttcacatagatctaatactctaaataatttttcttttatttgcaaaaatggaaacaataattggagtgaaaaaaatttatctgagcaaatgactagtgaagacaaatctcttagttgtccatctactagagaccaaaacagtagtagtctttcagttaatcataatgtacctctaccccatgattttacaaataaaggtaagagctcagagacatataaaataaaacaaattagcagttcagatggacattccttaaataataaaatgttcaatggagagctagtcagtaatgtaccaaaaaggagttcagatgttcctaatgaaaatgagcaccatttacagacttgttctttacaattgtcagagaatagcactggacttcctatcaccatggatttgtattctccaccctttatctatttgtctgttctaatggccagcaaaccaaaggaggttacaacagtgaaagtcaaagcatttattgtaactttaaccggaaatctctcaagttctggtggcatttggagtgtaagagcaaaaatttctgatggtactgcatatctagatgtagactttgtagatgaaatacttactagtctgatagggttttcagtatcagaaatgaaacggttgaaaaaggatccttgtaaataccaaaagttcctggaaggtttgcagaaatgtcagagagagctaatagatttgtgctgtctgatgactatttcatttaatccctccttgtctaaggcaatggtactggcattacaagatgttaatacggaccaccttgagaacctaaagaggagattaaagaaataatttattgaaatagtattagaaaacaattcaaataagcaaggaaatatttagaattaaatttgtccttttactttcacaactttttgaaaaggaagtttcataactgatttcagtttaattttaaaatgcttgatcatgattgtgtgtttaagtttttttaataaagttttttgtagtaagtttgctgaatgaatttaatgacccattgttgttgagaaattttgttttccacttgttatttcacataaggtgactggtaaagtattggtgtttaccaatgagtcatactgttgaaagaaggttaacaattataagtaggtagttgagtacttctaatttgtaccccaaaagatttgtttataatgtttttcttaggaaaaaatgtaaatccagtggaatagaatgttagactttcagatgttaattgttttgctggtttttattttgctgattgtaaatattttgtctggtatatttaaggcaattattatcttaactagataccatttcaaagattatattgaatagttaaaaacttgattttcaaggataatctattaagaagatccagttaacttttggggggattaaaataagatgtatatctatgtctttagttgttatctcctttctgaattagttttacatgtaagtcttcctttagttttgttggaagtgctgatttctttttcaagggaggctgtttcccacttcccattttgctgttaaaaaatcacatttgaaaggttaagttatttttattattctttttttaaaatgtaaattaaagtatctttaaaacattaaataataaacacatggcatttttaaagaaatgtaataggaaatatctggaagtaagataaatacatatataaaaatatgatatggatatagcagaaaaatattctaaaaatcttttgttattattggttgaaggataattatcagagttcaaggcacaatccagattttgctgctgtatcctttgataataaccacttctatgtccttgcatagcttatttactacaagaggcctaaatgggatgggattatctttcattat

SEQ ID NO: 48288 - DNA, 782 bp, Bovine  19866881204268
  misc_feature (1)..(1): n is a, c, g, or t
ntccttctgattaaatactacttcatcagcagcaagagcacactgggagaggggaaagaaagcacaagagagagtcaccatggaaaatattcaaaagaaaccacgtaataccacaaaaactgtggtttaatgacagcctgacaatgactcttaaaatcttcttaacctttttttcttgtttctctattataaggaaggcagaaatagctgaaaggacctatcactggtataacgtaagaattagtcaccaaagagatagaaaggcagtccttatttttatttcttgtattttaagactgaagccagttattcaaagtctatagtacattcaataaggcgtttacaagttttctagaactgccatgagatttttaatgtgggtcttcagaaatcaaaaaggtcacatttcccaaattgacctatatagtataagaatgttctatatttattatggatatttaaaagaggaacttttgctaactttgcaccctttcagtacaaacagatatattttgaagatgtttggaaatatggttaaacatatagttttcttagttcctagtgaattattcctgtcaccaaataaacttggaatatgcaaataatactttacaaattttgaactaaatagaaaatcaacattggtcaagggcctactttatactagattgtaactcgggattttaaaaatatctcattgaagaaattaaacattttcatgaagaaactaaagtttagtgagtgaacaccattccaggacaacacagtggggataaatcaaa

SEQ ID NO: 48289 - DNA, 955 bp, Bovine  19866881261677
  misc_feature (1)..(1): n is a, c, g, or t
ntccattctaatgataataaattgttagacacctccctatacgccaagcactggactgaaatacagccagattattactgggattatggcaggtgtttaactgggattattagaagagggtcaggctccttgaatccccacatgctttggatactctgtctttaggaacattttacaggtgagtaaaatgagcttttctttcaagagtaataactgcctgacaaagaatgagacagccaaaatcagagccccagaaactactcatcatagggtgaggggcctgcacaatgggaaggaaggaaaaatgatggatgaaagagatactgtccccatgatagtagcttttattgcacattccctacaaagaaagtcaggccttggcagttaaatatattttaagaaagatccatttgtaattgttttgtaagatttatggaattgccatgcaatttgtgcttgtggaagaattttaggcagatattttaaaaggttactcattgattgattgtttccaaaaagagtctattgaatagaactttatctgaaaaatgccttcctgccctcacagtcactttctcccagaaagcagaacttatcacactcataatcactagccctctccctgagcacatcctgatcaatgggagttcacacatttcctttccagcagaccttcggtacacaaatagacaccagccagcttgggaggcattatgagcagccatttaaggaagtaagcaaacagctggtctctgactccacgaaggaagagtaagagaaagaaatataaatttcaacagggaaaacaaaagctggacatgaagagttccttaattgggcctaaaagtagcactggactaggcagctatgtgtggaatgattgggtgtacttctgcctagaagcgaagaagagatgtatgactgctttattttttttaactttttgttttatatt

SEQ ID NO: 48290 - DNA, 1299 bp, Bovine  19866881302798
  misc_feature (1)..(1): n is a, c, g, or t
ngttggtggacccctgctgatctttctggatggcctgttaggttctaactggtgagggtggatgaacacatgccatctctcagttctatgtatggatgcaatgcttctgacagaacgtgactccagcctgggcaatggtggcatctcagtgtctctgaattactcattcattctgtgtgtgtgtttgtgtgtgtgtgcgcgtgtgtgtgcttctcagccctccccaacacttatctgtagattctgctagcaacagggtgaaatgaaacgggcttgttgagtggagaggcagagagcctgccggctggccctgtggtctgtttggtcctcaggaggcccctcctgacacctggtcccatttggcagtgcattctcagaggcacaagccaagcagtccataggagtgacagaaacacattcctagtcccaggccaatcaacaggagtcagggaggtggggcaaagggccttggcttgggagctcagagacatgcatgtcagcacatgtcctcatggtaactagctgggtgactctgtacgggtccctaatccctctgacccctggattcctttcgaatagagaagcgggactcagagctatctctatggtcctttctagcatctatgatcttatgataattaaagttagtttcttgttaagatttagaggtttaccaagttccttttctaccacttacctcctgctcctggcccccttattacaggggtccagattaaatgagacttcccatatgaagtctttacaagagaatgtcaacagttatacctgtcatctaacttatattctattatttatatccacatcttgtaattccacttgagactgcaagctcctcagtgaagatgatagcatcaccttggtactgtcaactacaagctggaacttgcctatcaactacaaattggccatttgtcagcgaataagaacaagggcatttgccatctgcctctgtggagaatgaactctgtgctgctgcagctgttaaccttcaaaacccgctgagggagtgcagggtagagggaggcactctgtattccagggaatctggtggaacaggtctttagacaattagatatttccaggaactgacttattttcgtgatcccaatctttgcatctcttcatatctagaaaagcacgaaatcccttcatgatggcatcatgagactagcagaaaaccttccttgagactagcagaaaacctctcttagagtaagtgcttgattgcactgaaacccctcttcaccaaaatcgtatatattgaccttcccccactgc

SEQ ID NO: 48291 - DNA, 1661 bp, Bovine  19866881398281
  misc_feature (1)..(1): n is a, c, g, or t
ngagtaagatgtaaatttgttcatacaaatatgattgcaattacatgaaatgagaacccacaaaattgtgcctaaaatgaagaccaaaaaaatacataacataataaaagatgctattggataatagactctctaattgacttacaaaagacaacactcaaaattataatagtgatttcttgtcattttgttcttgcaaatgtgaccaaaattggaggcttttcagactataatttcacatgtaaatgttgtaaatattgccaaccatttgaggcattttggttatttttggtttaacatggtgaccttaagaatttatagtataggatctattcctaaaatgactttgttaaaagtcaggattctccagaacaatttctggactccctctcattcagtaattagtttgggtttgtttccattacagatctttgtggaaaaagaaaacctgaaatttaaaattaagaaagatatgtctctttacaggtgttccattgcccaaagaagatatttctgcccccttgatctccagctcaccagtgaaggaatcccatgagtatgaagagccatcaagtgaagaggaagataaaataaaagaagaacccttgacaatctctgaactggcatacaacccaagtgccagcctactccctaccccggttgatgatgatgagattgacatgctctttgactgtccatctaggctggagttggaaagagaagacacagattcattcgaggaactggaagcagatgaaaatgcctttttaatggcagaagaggaggagatgaaggaggctcgccaagctttgtcatggagctatgacattctgagtggcactattcgggtgaacccactggtcaagagtttttcccggctccttgtggtgggcctgggcctgctgctctttgtatttcccctgctcctcctccttttggagtcaggtattgatctctccttcttatgtgaaatccgccagacgcctgagtttgagcagtttcactatgactactactgtcctctcaaggagtgggtggctggcaaagtcaacctcgtactttacatgttgggttgctcataaagctcatttctcatatgactaagggctatattcaatactagtgatttggtttgtttttgttttttttttccagcaaatgcctggttctgaatggtcatgggaccatcaataggtgttcttactcataactgattattcagagctttaagttagctttccataattcactgcaagtaagtttaaatcaaacacagttattttagttataggtcagggaagatgacctctaaataaccaaaaatatgtttattttttattatagtacagacatactctttatctattataatacattgagctgaattagattcttttttaatagcaccattacaagctataaggttcagaatcagagttttagtaaaaacccaagggaaagttttttgaatataatccttagtgaaaacaatgtcctctaaccaatgcctatacaactaaatttatgctgggcttttgcttttgtttttttaaaaatatttttatgtgttcaaaatattttggtaaatttttagcaaaaaaaaaaaaaaggagcttcctggagttatttaagtgtacagattgtaagactaatgcacaaag

SEQ ID NO: 48292 - DNA, 1571 bp, Bovine  19866881474328
  misc_feature (1)..(1): n is a, c, g, or t
ntactggatttttccttatccttcatttcagccctgctacgttccacctgtgacccttatgtgatgaaggcaatgtactttcatacaatttggtaactataataaaggtccacttcaaaatgtttgagtgcagactaaaatcattttttagaaaagcgtaattatgtccataatcaatctcactaatttctgatagtgtattggaaaaccaagttatttgataaacactctataaatgcacattatgccggggggagggtgggaattgcctattttctctatcacagagaacacagtctttgtcaacaaaagtcccaaccttgaacagcgcttttattttatataagactttatttcaacacaagaaacagcaaagttctcccaaaacaccctgtgtttctttgttgtgtgtctaccacaaagaaatgggaatcttcaaacagagtccatgttgaaatatatatcaaagaaaaaaaactatttttatttttcacaattctcctaagacattttcgtctcagccagtttccccagataaattatcattgaatgggaacagagaagcttccagggatgtgtcatccggagtatagtctcatacttcctggttcaggaaatagtatgtggaaagcagtagacggcccataaatgttggctgaatgaaggatcagtgtttacagggcccttggactttcagggtgagaaaaagaccaaagcactatttttaaataaaggaaagtaagtcagttgtatttttgacttttttccccctccaaaggagatactcttgtcctacaaaaaagaaattattaaagagaatttaggaattttacctccaattgaaatttcttcagtaattcataaacactgcatttgaagccaaaacattcgcttcagggttgaattcgaagctgattccacatacacataaaaaaagaaatcaacctcaaatatagcatcctccacttcaaacaactctgtgcaatgccacaaagaatagaggacagtccttggagaatatgctatctgaaagctaaaagctttaccctttatttctgttgtttacttaaattgctttggtaaaagatttatccgtcagttcttcccagtgtaaatttaatagcccagatattaaaaccatcaagttcgaggttagagaggaaaatgccagccttgcttcttaacgacagcagcccacccaaagaggcttaaataccatcaacaatatccttgatgctttaacaagtgtacttaaaaagcaattaagtatgccaatctcaggctgaaaacaattttaaaataacacacacattaagttcctgcttcttgacaaagtagtgatttgcactgacatgattgagatattgtgcatcgtttcagcaaagtaatttccacaaggcaggaaagtgcatgcttaggaagattcatgttatggtaggtttggtttttccttcccgttaaaaaacaaaactgcatacagttgactaacagtttggaatcactaccaaaaacttcaccactatagggaagcattgatactatctaacaactaaaacttaatatttattggc

SEQ ID NO: 48293 - DNA, 1467 bp, Bovine  19866881517444
  misc_feature (1)..(1): n is a, c, g, or t
ncttctgatttcttgtttgacattaattctaagtggttagctatttcaggggtacccgtggttagacattgtctcagtttgctccatccgtctgtattttcagtgtgatatgttgtgactattttcaaggatgacaacctttggggaaaacacttggatcaatattctttccttgtccagttctcttgtgttttgttttttttttttaggttggaaaacttggtccaggttggaaaacttcagtcacagggtaaaatgtgtatctttaaatggcatggttcttttgggggaaggcatgagttagaaataaatgtgtgtttctgttgaggtccaaaagagttattattccttgtgaaataactggctttagtctagataaaatggctattttatctttaagtttataggcaacaacttttcttttaactgaaaacttttaaaatcatctctgttgcctgaagcaaggttttctttgttaatgggttgatcccttgtgcatgcacaggaacacaacacacagatatacatacaataaatcttattaatttagacttcaccaaagaaaagtgtttgattaattcagacacgctagattcttatttaggaaaaagctaaatattgtcccttgtaatgcctgctgtgcagatggttttgtgtgtcaattactttgtttcattatgtttcaagagctatgatttgaccctgaaagtgacagaaaagcaaacagttttactagatttacacaatttatttcttctgggacaacttaatctcaaggaacatgctgcagagtcagagtccaagatcagaacttcctgaaggggactgaagcgaatagaagcagggtacgctggagccagagtgaagctaggagccatgaatcaaaaataagacccaacccaactctttgtcattgacaagatactctcttcaaatataaagacacatacaggttaaaattaaatggatggaggaagagataccatgataacacagatcagaacaaagtgggaatagctgtattaatttcagacagagcagatttcagagcaaggaaaatgatgagggatagagaggggcattacataatgataaaggggtcagttctccaaggagatataataatccttaacgtgtattcacctaacaatacaacatcaaaccaggtgaggcagaactgacaagactgcaaggagaaataggtgatccgatgtcatagtgtcacggcgtgtaatagtgtacactcaggcatgcccgactctgtgaccccatggcctgtggcccaccaggctcctctgtccatgggattttccaggcaagaatactggagtgggttgccatttcctcctccaacagttggagacatcagtacctctctctgagggtgaacaaagttggtgtagttcagggctgcgagggaggccttggcgctccaaggatttccagatgtgtgtatattccagtgtt

SEQ ID NO: 48294 - DNA, 928 bp, Bovine  19866881700086
  misc_feature (1)..(1): n is a, c, g, or t
ncttttcttccatcggaaccttctgcctctcattctatttccactcatccatttgataaatgttgcctgtgctgctcggtgccaggcttactgaggtaagccctgggatggcagcagtgaacagagcaggcttggctcctgcctcaggggaatttatgctctcacgggaaggcagatttaaataattacaaatagtagctagagactaacacctttgtttcatctgttaagctaatgacatctaaactattggctctaatgacttaacattttattcttcccagataacatttgcagctcaaaagactttagcacttacctcaagaagaaagtaggagtagagagggagaaatttcaaaaggaaatctatttatggaggggagcttttttgacaactttaaattacagtctgtagctagatgccaaccccacctggccaaaatgtcctcttctacaaaatacactgactcttctcaccaattttatttttttcttctgttggtgccctgtggcatgagggatctttgttccccagtcagggatctaacctgtgccccctgcactgagagcaccaaggcttaaccactggaccaccggggaagtcccataatacactgatcgtaatgttgtgaggtttctaggaaagttcctagaaaggcatccaggggtcactgagcccttgaagattatgcaatgttttatgtgtttggttccttttctgccctgaagtttattctttccttattctctctaaaggatatatagtctcaaaatctttgggaaaaaaaagagagaaaagaaaaaagaaggaagaaaagcaagaaagcaagcatttttggttctttcttttttatgtatgtatttttagatatgtaacgcaaatctctgttcctgttgcaatacacacgcacacacacaaccaaaacaa

SEQ ID NO: 48295 - DNA, 1145 bp, Bovine  19866881782069
  misc_feature (1)..(1): n is a, c, g, or t
ngtgtgacactggactgattttccttagagctttggtttgtttgtttttgtttaacagctacagaatccagaagttagatttcagcagcaactggaacagctcagtgcaatgggatttttgaaccgtgaagcaaacttgcaagcgctaatagccacaggaggggatatcaatgcggctattgaaaggttactgggctctcagccatcatagcagcatttctgtatcttgaaaaaaatgtaatttatttttgataacggctcttaaatctttaaaatacccgctttatttcattttgactcttggaattctgtgctgttataaacaaacccaatatatgatacattttaaggtggagtgcagtaagatgtgtgggtttcactgtgtttgtttcttttttgttttcctggaacagtgggaatcaatgctttttcatttaaggctactgcatgcgtcaaacacttctgcatttattgtaatttttacaaaacatattaccttttatagttgggtgaacagatttttgtcctgcatctgtccagtttatttgctttttaaacattagtctctggtagtaatttatgtagaataaaagcattaaaaagaagcaaatcatttgcgctttataatttgtgatacaacattgcttatcgtgactttggcatgtatttttgcaaacaaaaatgctgtaagatttatactactgacagtttttgctttatttgtatacaatgtatgtatgcacatttgggacagcatctctagaaacatactacaatagatcatctgagcaaaatatctgtaatggaaaaaataaagataaggaaatacttcaaagcagagtatttcttaattgtgtagaatcttacagcatctttgatgaacatctcagcaaaagtactggttagtgaggcttgttgaaaatacagtagaaaaactgattctggttatctctttaaggacgtattaattgtacagacaagatgatgtaacactgtctcagcattcacagattgactgtaaattaccttaatctttgtgcagactgaaggagcactgtagtgtaaccccaaagtgcatttgcctaggacttgcagcttctcccataggtagtttaacaggcattacaatttgtaatgaaatgttg

SEQ ID NO: 48296 - DNA, 1038 bp, Bovine  19866880137154
  misc_feature (1)..(1): n is a, c, g, or t
nactgtttataatagccggacatggaagcaacctagatgtccatcagcagatgaatggattagaaagctatggtacatatacacaatggagtattactcagccattaaaaagaatacattcgaatcagttctaatgaggtggatgaaactggagcctattatacagagtgaagtaagccagaaagaaaaacaccaatacagtatactaaagcatatatatggaatttagaaagatggtaacaataaccctgtatgtgagacagcaaaagagacacagatgtatagaacagtcttttggactctgtgggagagggagagggtgggatgatttgggagaatggcactgaagcatgcataatatcatatgtgaaatgaatctccagtccaagttcaatgcaggatacaggaagctggggctagtgcactgggatgacccagagggatgttataaggagggaggggggagggggcttcagtatgggcacctgtggtggattcatgttgatgtatggcaaaaccaatacaatatttaaagtaattagcctccaattaaaataaatttatattaaaaaaagaatcactatatatcttaggttagatatttaagaaaagtaatatttggggtcaggataggctacattatcctgaagaaacaaagaaaatccagaatctcagtatcttcataatgtttacccttctcatcctgcttgttttttatgaatcaacaaggagttttagtcagtgtagtcatttaaggacccaggataatggagactcatttttgacacgtgcttctatggctactgaggtcaggaaaataggacgctgttaaatgtgcagtgacccctaaatcttcttcccagtggtgatattccttacctttcaagattacatgacacagttccacacttaatctctttgtctctgaacaattgtttcagattcaaaagactaacttggaaatatctaaacccattcagaatttttaactaacactgggtgactacgtctggcatttaaaaatttttattactttta

SEQ ID NO: 48297 - DNA, 1947 bp, Bovine  19866880368423
  misc_feature (1)..(1): n is a, c, g, or t
ngtctctgggggtcttaaaaggggtcctaaggccaagccccatgtttgacttcttgcctgcagtgaactgaagtattcaccatagtctttctgctgagtttttgtttctgaatccttctgaatatttttgtccttctatcactctggtagtagaaaactggctaattatgttattccttcaaaccctgtagaaaacagcccctcttctcccatcccaatctgtactttggggaaataattatttagtttacttacagattattaaatttaccgtattattgacactgacttgtgtccctgtatctttgaactgatgcattttatgttatgttagcttaactatttcctcctcagttagtaaaggctcttctcctgagaaagttagattttattttcttcccagaaagctaaccccatgaccttaatacctttctgattttaagaggcgggatctctttaagtgtcaatgcctgtaaagttttctttaagaagctcaaatagaattatctaccgacatttctgataattttctgaagcaataagaagaggacaaagatggacacatcctttaaaaaggggagcctttatcgtagtagcattggttcatctctttctatagaacttgaaagcctgtgctcagtaatttatgttaatgctttattttcgaagttttctttcttccataagctcttcatactttcaccaagaaagtatgacctttcccctctttgaaatttaccctccaacctacccccactctccaggctagcttttcattagggaactggggagacataccctcacgttgctatgcattgcgctctggtggcaggccttcctgacaaaaatcaaagagctgctagtgccggaaggatgaactctgtgatctcagcccccgtaaagagaagcatccccagagagaggttcaattcatgtcagagttaaatcttaactcatctgagagctgagaagcactcaggcttttgaatatttttattgagaaacattttccaaatcacagatcagattaatatttcagtaactctgaatgaatctggtccagggcaacaaacagtaccaatggctcatgtgcagtgtgatttagaaagaagattttagggtctttacacagtttctgctataattttttccaggttagtgaagtgaaagttgcgtagtcatgtctgactctttgcaaccccatggactatacagtccatggagttctctaggccagaatactagagcgggcagccattcccttctccaggggatctttccaatccagggatcgaacccagggtctcccaccttgcagggagattcttaaccatctgagccaccagaggtgacccatagtagtatgggtgctataaagtagtatgcatgctataaagtcccccaagtcaatctggtgccaaataatgcagtcgtacattctgggatcttatgtgagaatataagaaaaatcctctactctatctcaactacagtgaatgcagccaaccacaaatatttccaaagaagtcacagaaattttaatgttttaagaaagtcagagggtcaggataaggcctagatcaacacattcataagaggcaaagaaagttgcccagagacacgtatccaaactctttcctctacaagccggtctttttgtatcagcttcccaccagtcattcctttgagctaaaatgttaaagacttatgcaaaaatgcttattggcagttagaatttcttagctattagtgcttagattagttagccattactgtctcagttgcttcccttgtggctcagtagtaaagaattcgcctgtccatgcaggagaggcaggttcgatctctggtttgggaagatcccctggtgagggaaatggcaatccactccaatattcttgcttgggagatcccaggacagaggaatccgggggctacagtccacag

SEQ ID NO: 48298 - DNA, 1442 bp, Bovine  19866880553614
  misc_feature (1)..(1): n is a, c, g, or t
naagtgaattaaagtgggcatcagatgaacctcaatcacatatgtgtgaggatatgaaacactaaggtgtggataccattcagacagaaaatgagattactatccacaaataaagttgttcttttgaactgcattattggaaaataatcttggaaagaagaacttctaatactagttatggctgtaatccattagaatgatttcctaagaatggcttataaatattctcttaaatatacttgaataagaagaatttttctcttgtgtgcttgacgtggctaaataaagcatggtccttccagaactgagaccaacacaatagatcattaattttatccaattgtttcctgaagtgaccccaattatctgattttttttcatctaatatagttcattcacagaaagtggaatataagtaaccttgtatttcattgtccactaagaaagggagtttatttgatataataatattattttggaccctttatattgaaaaaaagaatatatacccctttaaactacaaagtatctacattcaactgggtacctaattatcttccctgagaacttttttaaaagaacaaatgtggtgaggcaatgagtatatcatttattttgttttatagaaataacactcatgtgtttttctttgtcatagtaagtaaaacatttcagagatctaaaataaaatattaatccaatcccagctttccagttccacatgctgacagaacccaacgtaaccagtatcagaataatgtctatcttccacattattttctatgtttatacaaatagaatatgtgcacataatatgaaaatacccaagacaatataaaaagaaattaaatctgttataaaattactgtaatcaaaagaatatgatattggctgaggagcagacctgtcacatacacaccactctatattctgtggggctatcacacatgagcagttagtgtcagcctcctgctcaagtttccattgattctccattgtctgtagtagttctgtccaacaaaactttctatgatcacagaaatgttccataacctgttctatccaatgaggtagctacaagctacacgtggctattgagcatttgagacatggcttgtgacactaaggtactgaattttaaattgtgctgagtttcaattaattgaaatgtaaatggtcataagtgttttataacttgtgtactggacagcacaaatctgtaacgtcaaacccagatttcttatcaagcatttaagattctccatcattttatctcagacaaccttagatcaagacctataggatcttagaattaaaaacagaaagacagtggtgctgcaaatatgggaaaggaaagccttaaagtgtggactgcaggacacaggggaaaactgctcttacctctactttgaatatatcatcagcttaattcttattgaaag

SEQ ID NO: 48299 - DNA, 1849 bp, Bovine  19866880637385
  misc_feature (1)..(1): n is a, c, g, or t
ntatgaacacacaagtcactaataagatatgctctgtcaaattaaaatcagcataatttttaaaaagccagtaatatataaaagaattctatatcaatataacttgtattaggcactaatgaaatacattgtgatttagaatttcttgatttctgtggacatttcctatataatgaggaattttccatttttctaccatcagctgatgttccattctttgtcctgttatggttccattgtttgacatctcacagaaccaattaaccatataacattgataagaataccaactcaaaaagggtgtcaaaagagcatggaaaatttaggatcttttttgaagaggttggtagtcgcactgaaaactgtaattaaagagtgtgtaattctgtttgtgtgtttgttatacaattctactagtctagagttaaagaaacatgggaccgtacagtggattacaatgaaaaagaacttttattctccagttgatgataataaagcataactccttagagagggacttttttccctatagtatttgtaccacctgcttttaaaatgctactaagtgtgaaattagtgttgtccctcaaagtgcataagattaattgttagtaattgaacacagtttggggactaattatataaaaattgatattaaagaatatgaccaaactgattgagttttacagtttgcattttgttttcaaattacatgagttgaaaggcaatggtaagaataaaaatccattcaaagctgtgaaagcaaattaaggtttactagtcctttgaaagacaaatgagtcaaatgctgtaatgtagagagagcagtaaaaatgattctgaaattaactgtagaattaaaatatcaactgttctaagactgcatggttgaccacattcaaggaggtgacctgcctttccttgtgtgtctggttaattggggtctcaacgctcttctttgaaaatataaattacgatgatttggttagagaatggggaaaagtacatacaattcattgcctcccattattccttatttatctttaaattttcagcaaaagactcctgcttcctgaaatatggactgaatgcccttttccctatttctcccactatgtacagttaaaaatgctggacatttatataaaacaaatgtaagacgactctgaaaggcagacaaacagtctaggtagggagctggtgatcagaggaacaacatggtgatgagttctttgggttttctttatgcctcgtatattccagactgggtggagaaatccctgaaaatgccaatgaacgcagagctacacccacacctaaagcctgatctgtcttgccaaaggaatagaaagagacagcccagccaggacagaaatgtttagacaatgactgctctaccacagcaaatgtcacagaaaaaaaatccttatcccttccagcaaaggccaagtggggagcctaaattttaacacttcccttagttgtccagggcaccccaagctaccttcctgagattatctgccatttcctactccagggatcaaacccatgtctatagcatctcctgcattagcaggcagttctttaccactgcaccatttgggaagcacagaataagatgaaaatcacattaaataaaatggaattagctttactataaacagaaaaaaaaaaaaaataaggtttaagactgtgctgtgctgtgcttagtcgctcagtcgtgtctgactccttgtgatcccatggactgcagccctgcaggctcctttgttcatggggattctccatgcaagaatattgcagtgggttgccatgacctctcaaggtttaagactacaaagaaccaaat

SEQ ID NO: 48300 - DNA, 1549 bp, Bovine  19866880703766
  misc_feature (1)..(1): n is a, c, g, or t
nattttccaatcattccagaagattattgcatgtttgatttccatttttgtctatagctttctaatagtgtttatagtaatgaaatatcatctataaatttaagttcctgtttaaatggtgtttgtgcgtataccacttctttaagccgtacatattatatctcttcacatttccaactctgagaacaaggtcatattcaattgtttcagctctcttttcttccttcccttctcaatgtttattagagttgggcatgaatagcactctctgtgtttctgttttaacatgatggagtttactcaggtgattttctttatatttttgagcttctacactgtctagaattaattagctcccccatagtaatttctggaaatttataatgctgtttatcaagtttatgagcaaattaattgctttaaatctattttgaaattcatgtaattacatcagttgtattgaagttttctgaattgaggactttatcagcttttaggctatcttaaaatttgttcattatctcaagtgagaaatttccacattattttatattactttttgcataaaactgaaaaattgagaagtccaatttgataaattaaagttgcatgctgatccccacaacacatcttgtggttggatgacagtcttccattaaggcaagtgtcctgtataaaattagcattgtaactaatatataggacctttgtggggaagaaaaaaattattactcattaaacagctttgaatgaatggaaatatatatgatgctttggatggaaagtactaatattaaaaaacatagtcactttaggatggataaataattgttataagcctttaaaattaagtgtaacttacaatacatatatgctaaaatatgcatatatgctaaaatacacaaatcttaaagtatacagttcaaaagatttttataaattgagcatattcatataaccatcagacacttttgagatttccgattgttcattgtacgtgtcaacacttaatattgctaatccttttgattttagttgttttcatagatgtgtgacttggatagcattgtgtctttaattgacgtttctctgataaccaatcattatgaatatgctttcattttcatcttagccagctggacaaattctcttgtgcaatacctttttcagatcttttgcctacttttttttctgtaattttatttctttttaaaattgaaatatagctggcaaataatattctgttagtttcagatgtactccatagtgatttgacatttaggtacattaaaaaatgatcaccatgataactctagtagctttgtgtccccatacacagttattacagtgttattaaccataccatttatgctgtaattacatccctataactatttattttgtaactgtaaatttgtacctcttaattccctgtaaccattttgcccaaccccacccatctcccctctggcaactaccctttattcctctgtatttatgagtctgttttcatttgttttgtttaagattccataggcaagtaagatca

SEQ ID NO: 48301 - DNA, 1016 bp, Bovine  19866880764724
  misc_feature (1)..(1): n is a, c, g, or t
nttatcaagaattacatacgtcttccaataagacttccaaaaggctgaatacagacccagtccttgactagtgacactgaaaaggaccacagaggttaaccagtcaaccctcttcattctataaaaaaggggggggaaagacctagagtgattagtagtttccttttcaaattcagaaaagtaaaccaccacagagatgatcactgatctagtagctgtaattttctacctcagtgtctggaatggccccttttcaccctctcttctctttctgactagctctgccccagtgcgctcctccagcttccaatttcggatagcactaaaaattcacactatgaatttttaaagtttcttatggcagggtataagaaaaagagaaggcatgaaatccctcaagctcattttcattgtactgtcctcttcaaactgctcactgaagcatctagaaaacaaaaggataacatgtatttgtgaatttcactttctttctatgccctttgtgccgtaaagctcaacaaaatagctgaaaagtgaacggtgggaggactggggctggggaggaggtgaggcagtgagggctggaggcatagcataaactcattcatcagatgacctgtgatgtgattctttttgccatgtgatgtgattttgagcaggtctcttaaggctgttaagccctagattcctcttgtgcaaattgagagcttgaatagataatctcaaagttcctgtcagcattaaatgaggttttaaattcatgccatcaaaggaccagcacctagctgtcacaacttgtccccaaaagccacacaccattcttctactgctgagatttctgtacatttcatataactaccattcaaatgtggcatgcactcctaattagcactttattaaagctcagctcgtgtgtctgtagtccatttttcaagatgacttaaaagaaatcagaatttgtatgctattcattccctctaaaaagcatattttcaagatgtatttaggcaatagtg

SEQ ID NO: 48302 - DNA, 834 bp, Bovine  19866880868343
  misc_feature (1)..(1): n is a, c, g, or t
ntatagctaaagcggtctattttaattactggtttctttaatctagttttccttatagagaatatcaatgccaagtggtttttaaaggattcaaaagtgttcccagatgaactaattatgcccttttatttccataactgttgtaatagaaccttctgaggaatctttctgaaggatctatgtcccttgcctcttccttaaaactcattccagatctctttcttacatgcacaaaatatacatttatttttactgtagagttaaacacttatcatttacctgaacctaatctgcttaaatgcccaaagtctaattgatttcaaattacattttaacacataataattaaactcgcagaagagttaaaaaggtacagatatgatagcaaagctaaaattccaaatcccttttgcttagatctcttccacaccagtccatcctaaaggagatcagtcctgggtgttcattggaaggactgatgctgaagctgaaacccaatactttggccacctgatgtgatgaactgactcactggaaaagaccttgatgctgggaaagattgaaggcgggaggagaaggggacaacagaggataatggttggaaggcatcacagactcgacagacatgagtttgagtaagctccgggagttggtgataggcaaggaggcctggtgtgctgcatttcacggggtcgcaaagagtcggacatgactgagcgactgaactgaaccgatctgaactcccacacgtccccctctctgtcctactttgcctcgcatctggagagagattcatctgtacggactccagcagtggtttcccgtgccctccga

SEQ ID NO: 48303 - DNA, 1278 bp, Bovine  19866880870085
  misc_feature (1)..(1): n is a, c, g, or t
ntttacaccatcaaagaaagagaaacaagggggtgttttgcccttctaaaaaaagacacctaaaatgttgtcaaggggattgtacatgattctgaaaagtcatctggacccagctagctgtacaacttcaggaaacacagaagtcagaggaatacattaaacagtacctaaagtatgcactcttcaatattgaagcttagaaactctgtagggctgatacttatattttcagtaaataaatgataaagaaaaaagctatagaaggtgaaattatagattaataaaagaatttttaattatcaaataaaaaatttgataagactatttagccttagagacctacatttggatgataagacaataaagaaattcaaggacatgacctgctataaaaattaagatagtgatcagggtgaagaaagtagtaagcttaggataaggcatatacaatgactgataacattcttttttgacctaattggtacttacaagtttttcacttgaaataagccattaaattacatatttgttcagtgtgattttctagacctgtgtttcataagttaacaaagatttaagccaaaataacaatggattaatatccaaccagcattgtatactaattttaaattaattcatctcactgtaaaaatgtaagataattaaagcatataattacttaaggtatatttgtgaattcctagtaatttacaaaattaacaaattgttttattagattagggctatcacacctacaagtgagaaatgtaaaacaaattcaatttaaagtagcaccgacaaaaccaaagaacagcttcaaaaattcttttatctacgggaaactgatgacatggaggtgcagtaatgtctggagctttccctgtggtggggctgccatcttgagcctccgtaccagaaacagcttccacttgctcaggctgggatgagggcagaaatgaatcatgccaaagaggctgatactgtggaaatcacttccagtccttccggtcacttctctgggtaaagtgtcaccatgagcagaaagccagtcctccataatgatgatttacagttggaaagtggctttaggacagatttactgttgccctattcacactactctgtttctatcgccaaaaacatttttcctgtaaaaagcaatgttaggaaagggcatatacatcagagcatgttaataaacccccttccttttccccttcaaggaagtgagcagtttgaaaagaaagagaaaaaaatgtgcacgaagagagtgaataa

SEQ ID NO: 48304 - DNA, 1183 bp, Bovine  19866880882268
  misc_feature (1)..(1): n is a, c, g, or t
nttgaggtattcttggagccccaggggccaaattcattatctcatcctatgttttgtgtatttggaggacatcacagtctcactaggggctgactggattctcacacaaggagattcagttctcattgaaggaaatttactgagttcccattttctccctaatggcttttcactctaaaaactgaagttggtaacattattaatgctaatcagagttaagggtttcagttatttcactacagaaatgaagacaatcataatttgcaaagaaaaacatgagatgagcattaaaatgaatttaaaatttaatattctggtaatacttaaccctttttaggtgattcgtattcagaccattattattcaaaactagaatgtgtgagaaaacagcagccacactggtttcaaagtgtgagccaaatgtccattaattcctagacatgactagtccatcttaaagctagacagaaaatatccagggtaggacaaaaaacatgtaatgcaattaaaacacattttgaaaatgccttttatgaatcagcacatccatcaatggctataaaatctggggagcatgacatgtgcaacttaaaccattattacagatcacttcacagtttacccctctcttccaaatgtctgttaactaggaaaggttatagatctcaccattaacctgtcgatttattctgtaaactcaaaaagaagactgccaaccatctgaaagatggacaggtaggcaggtgattctataggatttggacttgacagaataaaacaatacaacacaaccccaagtctaagaggggtttcctcactgaagagatggagaaggaaatggcaacccactccagtattctcacctggagaattccatggacagaggagcctggcaggctacatacagtccatggggtcacaaagagcaggacacaactgagcagttatcactcttcattgaggagaaacccatgtggcctgtgaaaggtcttactagaaacaaaagtgactttgatttaaaatctacatgttaagtatgtaacaaagggtctgtaattattttaataattgtcaaaactaaatctttgtgtgagcatatgtcaaattccccattttatgtgctaataaaacagagttaatcaataaaatcatattttcagctacaaaatttattccttcacat

SEQ ID NO: 48305 - DNA, 1720 bp, Bovine  19866880887302
  misc_feature (1)..(1): n is a, c, g, or t
natcattattcagttcagttgctcagtcatgtccaactctttgtgaccccatgaaccacagcatgccagacctccctgcccatcattagttgagtataattataaatttttgatgatggttctgatgaagtctagaaaactaagtgataaccttgaaaccaagttaactaaaacatgttaagaagccgagagaactgagttttgaaattaataaaatcccttggtaaagtctgcaaactctaatatattatttcaagtgatgattatctgcagaatagtctccttaattttgtgggagtacacaaaataaagttttattttgttaatcttgacatgttttattttagagtaaaagaagatggaattagtgaataaagaaagttttctctcttataacataagaattgtggaaagtgtcttaaaggattttatgatcctaaagatatatgaaaataaaaatattcttatctaaatgaagtggccaattagataatagtgcatctttaccttttaaattcagtaaataaaccatgtgtctgatttgcttctcacagaaaagatagccacttgagcataatgaattacacagtaattttctgtacatgtgaatttaaaactgtaactatttttgaaggaatagtgaatcctgttttaggaactgagtggaaagtgctgcgcaccaaggcaaaggaaaatcaatctgtatgaaagtcatttggctaagaaaagaagggaaaggtgaaactgaaatacggagagtcagtcttcaactctgaaacatactttatttgcacccctgatacacacataaccactgtcactttattttactattacctgaaggcatgttaaaattctcttttgtggtaaagaatctgcccaccaatgcaggagacacaagtgcgatccctggtccaggaagatcccacattccacagagcaactaagcctatgcgccacgactactgagcctgtgctctagagcccagaacagaaactacagaagcctacaggccctacagcctgtgctccacaacaagaggagtcactgcaatgagaaactcaagcacagcaagtacagggcgcctgcaagtatagaaagtccgtgtgtagcaacgaagacccagcacagccaaaaatcaatcaatcattctttttaaaattcacttttgaagcaaggaaagtttgcgatatgttgatgtttcctgaaataaacatgaacaatggctcttttacccagtcatctttatcactctagaaaagggaagttgtcggactttgtatctgcagtataattagtttgtagaggcaagatcgtaatgaaagcacaatttacattattacaggcatttgactgtttactcactctaactggaataaaaagtgagttccactatgtgcattcgaagatttattcaatccattttctaatattttccctccagaaaagtaaaagtgtgattagcaagtgggagcactaaaaacggttcctgaattgagacttcccatcctgcctccatgggatcaaagcagagagaagggctccagaacaaactctgggagtgttgtctcactaccagaaatggtgcaactggtttctgtgccatgctgtaattacactgactcaggaaaaagttctacattgttcttagaagtaatattaataataaacctgtcagtcacaataagtcgtgaatggaaagctctttgttgggcacca

SEQ ID NO: 48306 - DNA, 1266 bp, Bovine  19866881046178
  misc_feature (1)..(1): n is a, c, g, or t
nttgctatatactctgactaggtttaggtctcattttgagcttttgtgagtaatataaagttaagattaatttgtaatttcatggaaacattacatgatgttaatataaaataaaattttagtttaaatttttttttagtcatataatgagttgtggattttattctaagggatcaacagaagttatagatcataggtacaaccaaggctcaaagcatgctgaggtttaatgaataactcctaatcgttgacaaaaaagagtcacttaccctaattattaatgtaagaaacaagtaccttttctggtgtttgggaagaagtacttgcatgtttcattatcctctaaataaagatttaattaaaaaatatttgctatcaagagtaatgtacagacatatgttttggataaacatttatgagagtatacttatatacatacatataccaatcccaaggtttgttaaagtaactagtcatgttagaatggttgtgacttttctgcagtaaattatctgtaagaaatctgctcttctgaggcattttatccattcctcacaaaggttttactcattctgtttttgtttttctgtagttttcaatggaagttctattgcctaccacttaggccttgtaccctggactgccggtgtctctgagttttcatcttggcacatgtataattgtagggcaggccttctgtataatctaagttcattctaatcagagctacaggtttccctccgctctgtagtgaatagagaatattcaaagtcagaaagaaattaggagctgtcttaaaaggtgctttaaacagctcatgttccctaagccctcaaagaaagttacaaatcaagagagcacaattggaggctacattatcaatgcctttcttataatgctgccatttacattgaataatattttaattggctttttaaaaacacccatcctttggatggaacattccggcatgatgatattccattcccatttaggattacaatggtctggggataattataacattcatttccatctggagttctagggacttatacatgtgaatatggaaagagagatgagcatcttctgtttgtaaagtagacactgatttggtatttgtgacacatgctattctatttttggctcctataacctacataaatatcttcttctaaggtctttcttgccaccagcaagtgggagcagtttcctatgagttgactctgtgatattgcttttatggatatcaaagatataaaagta

SEQ ID NO: 48307 - DNA, 2542 bp, Bovine  19866881092760
  misc_feature (1)..(1): n is a, c, g, or t
ngtttggaggtttaggagcttcccttgtggctcgctggtaaagaatccccatcaatgtgggagatttgagttcaattactgggttgggaagatcccctggagaagagaaaggctacccactccagtattctggcctggagaattccatggactgtatagtccatggggttacaaagagtcggacacgactgagcgactttcactttggaggtttagaaatatgtaattatatctagaatgcagtggctacatttggggttggggggcatttaggaggcttctggggccactgctgttactgtatttcttgactgtgttgtgctcatatgaatgtttcctttcgtaagaattgagttgtaagaattcattgagccattaatgatttgtacagcgtgtatgttctactgcaaaaaacatttaccttaagcaaaaagaaaaataatatgcctttatgatatctaattcagaaaatgttaattctcatgatgtgcactatcttgaacttactattccatttattcatttgatgcatatttatacagcacctgaaaatcatagttagacttttctccttgttactaaatattctctgaaatgtatttttaatgactgtaaaatatatcaaaagtatgtatgattttatagaatatttactcttttttcaagctactgagcatctgcatcatttacaattttacactgttataaatatcattaagatgagtatctttgtatgttaatttctgataaccacaaaaatatacatttgctgggcctcagggacatgagcattttttcccatattgttgtacaaaaaatatgtattgctttccagtcccacagactttcaatagtttttccatagaggttacaaaacagtgacattcatggagtggaatgcattttctaaatacctttacatagggatcctaggaaagggtagccattattcttcattgtgtgatattaaaattagcccacattcccaatttgtatccatgggaagaaaaacattttaatttacgtagcttgcatcaaggaatagtcatagtacaagtgacccattctgtagaaaagcacatgaattgtaaggaaagccagggccattttaagcccagccttgccactttctatccatttgagttggtaagtgatttcagctacctgagcattaatttctacctctgtaaaagatgatgatcataaatactatacaggattgctatgaacactagggtgatatattcaaaaagcctaccattgtgtctggaacaattattcattaagtgttttttttcctcttctcaattatggcatgctttcacttatccataataatgggtcaaatgtcatagataattctaaaactttatatcacaccagactttttacgactgatgataaaatataaaggagctgatttatttcagcttctccacctatttctgccctcctagccaaagtagggaaactggataacacaaatggcaaaatcaatctataaataattaagagctggtcttgggtcttattttatgatcaaaaatctgaatcattatgaaattaaaagtccctttgcaagttgtgttttcatttggcctttaataagtaactttcaaatgtcttctttttgtaaaaaaaaaaaaatcatatcataggttagaaaagggttctactgagcgatatttttttttccatgtgagcactatcattaagacaattatcactgatcaccttttaatgatatttcaaaaccacttgaaaaaaaattttaaagggtcacataaagctacatagcttatgaagctgaacagcacaaatgggacttttgcatttgttcagacatgtaccaggttttagttcctacaggctcacagacggttttctccttagcagtttgccaaatgtattttagaatgtccaaaatttaaaatgttgatgtatgtgaaccaactacataatgaaagaatccatgtaccattaaaatgataatgtgagtcactcctcagttccctcaaatatgttaagtgcaaataactagaccccagggagaggatcagaaaggtaaacaggtattattttgagtaaaaaagctaggcagacttactcagtcaacatgaacttgttgtttttttaaaagaggattcttcttttcctttttgttgcaaatatcaaattatgaccatggaatatgtataacaagctacaatgcaactcctgattattcagagcctaatcacagtttgtgttttatcccagccatttgcttctactcttcctgcctgctgcctgccttttgccatttcactgcttgttagtctttggccagagtatcccagaaaaaaaaaaggcaaattaaaaaaaaaaaaaaagaggtgggggaaggcagtccaaaccatttgaacttcttccagttttgtctgaagtttctggaggaagagggagtatgcaggttcacaaaagattcttagattatctttaactcttcttgtattttcccaaccatacacacacacatccttttattaaaactgtagagata

SEQ ID NO: 48308 - DNA, 2484 bp, Bovine  19866881100625
  misc_feature (1)..(1): n is a, c, g, or t
nccttgatagtatttgtggattggtttttaatatttaataattcatacttaaatcagttaaatcattaatcatcaataagtcgtcagtaagtccctaattctctacactttaaacagtttaatagatttgaaggaaattgtagtcaccctgcttcactttgctgatcttattgatatattagcctctttgaaatttaagttatagtttttattcatgctgcctcatgtttttgagctagtagttaagctttactattttttattgtggacatgtagaggaggagctcacatattcttagtagttgaaatggcatcttgaccttgaaaatataaaatccataggggtgcagtttggcctcaaactctatactattcaagatgttagaaaggtatcctgaattcaacacatttcaaatttatttgaaaatcattcttatgtccattttttttgtagattaattagaacaatattttattcttaaaagtatatgaaatagttttgcttcaaaaataaaaatgaaacagaatattctgaaagtcttactttgggaagttccataagggcagggtgatggtgttataatctctaaattatttttcagtgcctgatatacaggaagcattcagtacttatattctaaattaaagagtgtttctggtactgcacagaccaaatttggaaatggggattggagattgagtacagcaggaatgtgaatcattaaagaaccatttttatgaattctatagattcccatattattaggcaagcctgaagactttattttagccaattaattatttctgaacttcttattgcctgcagagtataaatggtatgagttaatttctttctgtcataagatttcttaggatggttcatagctctactagtcatttttctgtaatactttccggattatcacttttgacagactggcaattaacctaggtcttcattagatagagaggaagatatatgggtttaaagcattcttaataatgagatgatgcattcctcttcaaactgggatctcatatattagtgataagttatatagggctaatttcatttacatttattcatccaacaaacatcattcataatcccaggcaccctgttttgtgctaaataatgtttactggagtattccagagatgtcttaatatataatcatttttgatctcttggaaataaagttgaattcagcttgatgtaaatgtatgcttgctgttaacctgttaaaggcaggcatttaaaattctttggcatgtaactttgtaagataataagtagataaattggcaaatagcttttaattaatagatgccttctatttaagtttttaaaatgaattgcattcgataggatgaactatgttatgttgaagaaacaaagtcagtagcttcaaataatgtgggcatgaacttgggccaactctgggagatggtcagggacagggaaggtgctgcagtccatggggttgcaaagaatcagacacaacttacaacaacaacaattaagtaatatgatagatcatattatttccaatgatttttctcttcttcaggtcacatgatcatggcattcctgttgattcccatgaaacatgagtgtttcctggtgggataatgtacatccctaacctgttgatgtgagcctaggccatttgtcttattttttgtccagtggaatttgaatgggtgtgatgtataccacattcagacactttagtggccattgtgtggttctattttactcttttcttctcagcattaggtcaagacagagtacatcctgggatggagaatacagatagagtaacgatttagaggtgcggctgactgagagccatcacgtaacttgagtttgctgttgtaaaccactacagtgtggagttgcttgttcctgcagccttatctaatgaaagctaatacaaacagtaaagttatttctcactcattttatatgtctgtcttcaagtccattctgcatactctgtgctgcatttcattttcgtttcttccaccaactctcacagaactctcagcatcagaaacattgccagttgatataaagaaggaaagtaacatgctaaatcatgctctaagtagtttgtgccttcctcctggaagggacacacatcaaacttgctcatatttcagtgactgaaccatgtcacatgacttagcttaattaaaggaagtgaaagaaagagacttggcaaaatggatgaacagtgaaatgattaccacataaaccaataattcacaattttaagtccttttcagaactgattgagtgattaacctctgtttacaaagaattctggcctggctttggaacattctcccagaaaagacctttatacacaaaattgacagaactaatactgaatagaataggactgaagcaagcaaaaaactaaacagcatatgatttgagtaattcaataacatataaattatattcaaagacaaaag

SEQ ID NO: 48309 - DNA, 776 bp, Bovine  19866881223977
  misc_feature (1)..(1): n is a, c, g, or t
nagatggctggatggcatccaccaaactccaatggaagtgagtttgagtgaactccggggagttggtgatggacagggaggcctggcgtgctgcagttcatggggtcgcaaagagtcggacacgactgagcgactcaactgaactgaactaaaaggtaaaaagaggatatccccagttgaatcactatagacatagaggttaactattgtcatttaagagtcctttacctaaacatgccacatgctctagaacaggctctaattctggaataaatacccacagaaacagtcatgcatgctcagtccaattttccatatacatgttttctgaaaagtgggggttaaaggtaattgaaagtctaggactgacatattagactttatggcatacaagcccaaatctaaaactagaaacagtaataatattaatatttagtaggagaagtagaatgttaaacctacaaagaaaggtggggaaaatgcttaaaactgaatgaagtagttaaaaactacaagtcctagatatatcagcattcacatctgtgccttaagaacatgcaaatgaaactaattagtgctcaagtcatttagttacaagtggtggctaaacttaacagtttcccaatttcaagcacacataatgtataacgtagacaatatagtctcttataaagaacagaaaagcaaggaaagaagggaagaatagagaataaaaggaagggaggaaaatttgctgagaaagtatttttcatttcagagaaaaccttctttcaatt

SEQ ID NO: 48310 - DNA, 1825 bp, Bovine  19866881243480
  misc_feature (1)..(1): n is a, c, g, or t
ntgaagtcgctcagtcatgtccgacccttagcgaccccaagactgaaggcccaccaggctcctccatcaataaatataatgttagtgactctttcactctgaggcacactcatcatctattcatctcccgtaaggcagctaatatcaaaaaggagtctctgagtccctccttctcctcaagatccatttggaaaaactggttacttaatctttatttgctcaactagctttatccaactctggaaggcaaagtttaacaaatcacatagataagtcttatttgattttaaatgaaatcactaatctttacctcttcatccactgaaatggagaaataatcaacaatattcttcaaaaaaagttatctttccaattttagtccctgctttcctttgcttatctccaagaggagatgatcataaaaaggattatatgaaagatgtatataggaaatagtctaaggatttaggtcaaaattaataaggtctggagtaagtcattaggagagaaaagaaagaaaaatacagtgaaaatacagtgaaattttagatgtgagctaatgagattggttaagattgatattaattatgaaagtgagctgaatctaaaatgtctgataaaattgccaaaagcagcgaaataagtgtgcgactatatttttacatactagaagatcagtagagaatgaagaacttaagaagattcactagcagaagaaacaaactaggagagtagcaggagttttgcaaagagggtaataaatataagcacatgttagagaaagagatcctccagggtaagcactgagaagggaagtacttgttttacccagaacgctgatgctctgtgtgacgcatggtcagttcacagtcatgccacaacactcatcactgcttcttgtggtccaccaccactaattcattttctaaactcatccttaacagtcaactccaaaatcatcaaccatgtcctcactaggacatctctagcatcataaatattatcatgtcaagtgttcctgcaaaaatttaataccagtttctattatgttattctccttctgaatgacttcttcaaagaagaatatgaaggggcaaaaagatatgtcccttttaaatgttctatcacacatgtgtacatattcttactagtctttggtgggagaagaggaagatgccaaaaataaaaaataaaaataaaaacctctagctgggcactattttttcatatgtgcctttactcacaaagcacccatcactccccttgttctccttagtcccttgcagctcaaatgtccccagggatcactggaaatctcaatgtaagcaaaaagagaggtaactcttgtattggtgggagtatagaacaaaattagatgcctggtgtgactgttcattttgggctagcaaggtcactgagaaacactaggtcatgcttgggttggcaccagctgagtaggcaagcaacataaactatggctgggagtaaatcagtgttgagcagagtcccagaggaaaggcagccgaaaggctcagctacactagatgaatggccctagacataactctaaataggcaactgtgtttgtcagcctttctgggagatactgaaattaatgttctatggacaagcccactgaactgtcagtaaagcagatggaagccagagttcccaaattccccaaccttcagtctaagttattctttggatcagttagatctgaaactctgaactgtccacatctctttcccaagttcatctgatttccaaggtggaaaaaaactctcaaaagtaaattaaaatggaaacatttgatgactttaaa

SEQ ID NO: 48311 - DNA, 1787 bp, Bovine  19866881513303
  misc_feature (1)..(1): n is a, c, g, or t
naattaaatgttattttagaaatcttctaacccaaccttcagactcctgggcttccagtgcttaattttgctatcttgggcaagttactgaatatgtctttgcttcagtttcttaatttataaaatggggtgattatagtacctatatcattacatttttacaagaacctaatgaattaacacattgcttagaaaagttctggtccatagtaatctttcaataaatgtctattatttaggaggagcagaaattaaggtagaagagataagacacagaatctctgatagcttaaaggataaattatttgcttaaggtcatgctaactattggtacaaccaagactattttaattaaagtttccaaactttccatgcacaatatgaccactgccatatgatgttagttcccaaatgaattatgaaaacatctacatgtgagataaagaaataaatagattccataataaagacaatttaaatttttaattttttcatttcccaatttacacatttatgccatgtatattaagtataagaagcaaaatattttttaattaaaaaaattttatgtagaccatatttaaagtctttactgaatttgttacaatattgcttctgttttatattttggtttttggtcatgatgcatatgagatcttagctccctgaccagggatcgaacccatgcccctcctgcactggaaggcaaagtcttaaatacttgggactgtgaggaaagccccaagagaagaaatttaaaacaatgagtctgagaaatatatacacccagaagttccagtgttttcccacaaacaatagattatattctactccccacttagatgcccggtatttttcacatagtttggttttcaagtgtctgcttcttctagattgtgagctagttgaggataagaacggagacttgagtaagacttgtaaatctctggatttaactggagttgcctgacatcctctgagcacttaataaattcacaatgggtatcccttgtattcaacaaaaatatgccattaggggtaaatataagaaagagtagtagtctcagcttttatgaaaatttgagcagattccaaaagcctccaattgaagtataaattcatgcctccatatttccctgtgtcccaactgtagtaccctatacatcaaagaagcccaagtgaatatgtgttgatttctacatcttaagggaaagtacacacggtaattctttttctagaaacttagttgacaggattttagattaaaagatgtagatgatcaaagtggagctttgggaattattcaaatattggtctatacaagcagagtccactgtccagagctatcaacacttgtactaaaagtcttaaactaacaagacatcactcatagaaaaaccacagctaattctacaaaacacagctactaacagttaatatttatcgtgttggaaagaatttagatccaccattgtagctacattacactgacagattaaagatatgataccccaaagaattttcttggtaaacatacaaaaattagaaagtttttaaccctaaatcataattcctttcaatttatacaagctgtatttccacccagctgtctagtactgaaagctgaatgttctaaactggagcttttagttcagtaattgcttaatttttcattgcaatgcctcttcgtggatttaaaatggatggattttgcttttaaaaaaacacttcttttttcttgtttttttttttttaagtgtaattatttttgtgtcagaaatataatt

SEQ ID NO: 48312 - DNA, 924 bp, Bovine  19866881545233
  misc_feature (1)..(1): n is a, c, g, or t
ngagatttaagggctttgaataaactaattccattcttagccaaatctgatcggaacactccaaacgtctcaagcctgccatgctcagttagaaatcccttgagacgtactctatttctgcctcccaattaagctgaaacaagaacggctttttgcattacgttttggcatattcactcaacccaggtaggccagagattggtgaaaataaaaaacagcaaaggagtgaaattgccctatcttctgaaaagggaggaaatttgtttttgcagtactgggtaattgtttgtgcagttctgatttttctaaatggatagtgtgattttaactttaatttttatgctgaagcagcttgcctcctagataacctctccatgtacagcacatgaatccatatgatttaattctaacatttcctgtcatggtattctgaaatcttaagtcattacttcttaaaagatctactcaacatagcatttattttcaaattccctggaaatcccataaagaactatattattgcctgcttatatttacaaaatgaatttcatgttagctagatttttcctaatatattttcatatatattactacaaatataatgtatatttttgtagattcacatatcatgtcagaatttatggtttgatttattgtgcccctaaaatttctgcctcttgaaaaacatttttttataaaaaagttcatactggtgttgacacatatagaacatgaattttagcttacaaaaacctaatggttaaaatttataacctatacaattcttaacagtttttatacttgtgcttccctagccttcattaacatttaatttaaatttatttcacatatgggcattttttgcttgacttaaatgatgtatttttgtatgcttggtatcatttgttgtgtgagctattttta

SEQ ID NO: 48313 - DNA, 1262 bp, Bovine  19866881651059
  misc_feature (1)..(1): n is a, c, g, or t
naaatctgcttgttgcttaaaatactatttgaggtttatattagaaacataatgtctaaacagcatcaatattaaatattcaagtttccccactttcagctctggcccatctattcatggctgtcaagcactgcaacattccatgcttacttgattctcaagactgtttctggcattttctcagaacttttcaagtaattactttttgggtatcaagggacttataacaaccaaagagcatgttgctcatctcagtcattgtctgggtgcattgacactcattctaaaggcactgacactattttgtgagcctggcctcatgattgagatcacataattgcaataattaggaaactcacctcaggatattatcaaaatgacccgcccaaacccaagtccatatggtttgaaatagctaatgagtcagttaatgtgctatgtccaggagtaatgggtattcaatatggatagcatgaaggtataatttaccaactttctgactgattaaggttttcaagtgggcattttgcagcttaaagagggttcaaagtattaacagcattgatggttgagacaaaatgaagaagcaacgattgtttaaaaggcaagggcgttggaatttgagcaatttcattcaatcatatattccaggctaaaaaaatgcactgctgtataaaaccaaacgaagatgtaggttttagtagccacctgtcctggtatggagacgtttgggagctgttactagctagattagatcagatcagatcagttgctcagtcgtgtccaactctttgcaaccccatgaatcgcagctaaggcctgtgtaaaaagtaaagaaaatgaaaaaagctgtaattcactgattttagggtgggctggagaaaaaagatgaagtttaattaccaaaaaaaaaaaaaaaaccacccaaacctagaatcaataataacagatgtctgcatggaaacgatccactgggtaactgattgatgtatttttcatttcatagattagtataaactcaaaattgtcacaatatctctgactgacttgttgactgtggtatctagaaaaaattaatatcccaaacacattcaaacatacttataagtggaaattaagaaaaattctatagttaacacattagctactcatctgaaacccttatgacaaagatatgcactaatttttttgaatctgaaagaatttactatcagagaattcttataaagataaggttcttaattggagtccacagacactca

SEQ ID NO: 48314 - DNA, 1018 bp, Bovine  19866882033413
  misc_feature (1)..(1): n is a, c, g, or t
naggtggagttttgccccgatccgccatgccactatcacaatgctctcaaaccaaacgttgcttgcaaaattgggaggtgaacacagaacacctgagagggccagagcctcagataatttattcctccagagccacaggaggaaggtcatcctctcaacacctgcaaataacatgacttgcagcttaggtatggtgggaaaaaacattggatttggaatcaaaagctgaatttgattttgcaccatcatggtcttattcaccaactctgtgtactcaggcaagttgggatgttcatggctttcatttttcttatctctaagagtcaatatttaattcaatagaaatcttgtcaagatcaaatgaaaaaatttgcttaaatatcctttattaactacaaaggactaaacaaatatgagttatgtcaatatatcaataaaatacaaagttaaatcaatggctgccttcaggtaagctgtgatcaatgtattatgtgatgggttgtgatgggcaaatataagttctttgtgtgcataagccacttgacttgactctacttcagggccttcagcacctcctagtcttgataagcacatgagtaaatatatcattaaaaatgtaataaactgtacatatatccaatcacaggaggtgtcaggatagaatcctgattttaaaaaaactactacaatgacctactctcttaggtcaaggagtaagcagcctttttatatttgaaagaaagcctgtcaacttgaggcacaaactagttctaaattcacaaattatttgctgaactagactatataggaaacctcctagggttgggctgataaaaattccctaatgctcccagctcctcatagactcacattcacttctctaaagtcaagttccaaccagggcatgtctcacttccttcagaggtgttctataaggacattgtgaagtaggaagagagagaacaccactgctggataatctgttgaacttgtctctttctgctagaacaacagctgc

SEQ ID NO: 48315 - DNA, 1736 bp, Bovine  19866880419423
  misc_feature (1)..(1): n is a, c, g, or t
ntttttttgggaaaaataggtagtcaaacatcaaaaagattactgttaatagaagaaaagtggacatttgaattcagtgaattttagctcttttctatacatgggaagatgcagagcctggactcaatggaatccctgcttggatgtccatcttaaccttccagggccagtgtcctgctttcctccaccttgagtgcccccacgaggcagagactgggggcttgatggacacaacatccttcatttactgacgtggcaggcgacactctctgtccacactgtatgtactagaatgaccgaaatctctatgcagacaacagcagcttagagttactcttgtctaaacccttcattcgacagcaaggaagctgagacccaggaaggtaagatttcagagctgtttacttctatttcaggatagaaacatgtgtgctctttgcagagctctgatagcctcttagtcagctttcttcctcctggaagaagagtcatttcttttgcagctatctgttccattatcactttgatgagaaccacaaggaaatgaagcggtaggttattcagtgcgctgataggatgctcttggctgtagataatagaagagctgactaaaagccaaacgtttttagggaaatgttgtttcatgcaatgaaagggcagagccatggagattccaggtttaattaagaagctgagggctctggtgtgtgcctttctctctgctttgctctctgagtaatgatcacatacccctcaggtcacaagatgctaccataccatcacgttcaatgctcaaggaagaaacactgcatgtcttcctgagaaatggcaggaattgtctagaaactcctagatgctccccttaagaccacctgagctagatgtccatgctcaagatactgagcagctggaggaaagaaccatctggaagtcagagaaagggccagtggttgttggtgacaagtcatgtctaccacacacagataagcaagaggtcgagggaagagttttcagttatcaccagattcctcttttgcttttgaaatgtttcatgtcccattatcttcctgttccactggacaccagtgggctaagattaattaaaactcatgaaattttttccttggtattttgaagttgattttaaaacctggccaagctgcaaaatgacaaatgaaatactgaatttatgcagtttgggtttatggatttctctcattatacaagttcacttttctctctcatgtttgtgcacacttacataggtttttgtaaaggcttcgtatatattttgttgactctgaacacataacaattaacaagttaaatttcaggaattttgtgttacactgctccagaaatttctttgccttccttcgtttactttggtgagatgctcagagaacaagcaacgcttctgcatggataggctcacacggatcctcaaacaagagcaccacttagacacctgaaggcatctcaattaagcagaattaccatccaaattaagcagcagacattgccattaagcataattaggcctaatttgattccttgggagacattccaaataagggggtttcccgattaagttcgtggtgatgaaggtatattacattttgagcataacagtaaagaacagttacgtcaaaatttccagacaacagctcttgctagaatactaacagcattctagacaagaagggttgggacaccttggcttggtggttgacatg

SEQ ID NO: 48316 - DNA, 1477 bp, Bovine  19866881000948
  misc_feature (1)..(1): n is a, c, g, or t
ntggttgtatcaaactactcttttaaaagactccctcacataattgctactgtgaatctcagaagtgcacttcacttgatagagaagggaagagaacatgtctttagttgtagcaaagggaacaaagctttaaactttcaagcatttgtactgccctcttgggatatcttttaattaaaataaattaaaggaagtttttgagagcaggattttgagttctgaagtgtcatggttaaagtagtcaaatgacagattcatgactgctttattactaagagcttacaattatgtaaacagttagtgaatacatcctgcagtgagtaggtatttcactccttaaacaggtagcagacttattctgctaaatatgctccccacagagcctagctagtgacctcacatcaatttcacgtggataatgcagatgcttgtgcataaggccgccaatttccatagggggaaaaaaaaagatttaacatgtaataatatgaagattttcaaatgcaatactaaatcttaataatatacatatgcacacataaacagatatacaatgggggttgttagaaaaaatggcactggctttttagaaaaaatggcactggctttttaaagtggaaagctttttagaagtcttgttatttaagtttctccaagcttattttatatctccaagatgtatatctttcaggatcaactagatattgcgaggttagcataagtcaacttgaaatgccttcctcagttatcagggtgaccattttggagtgctgcaccattgaaggatattttcatttatgccttttaaaaacagatttattgacatacaatttacatattttaaattctgtccacttaaagtatgcaaatgatggactttaatatactgagagcattatacacccgtcaccataacctaattctagagtgttttcatcagcccacaaagaaatctgttctccttagctactttttatctgcccctccccttacattcttcaatattaatagattgaatcagacagcatgcagtcttttgtccccagttccttcactcagcagaatgattctgaggtctgtcattgtcttagcctgtatctctacacctttccttttaattgaccaataatatttcattgaatgtatttgacacattttgcttatgcaagcatcagttggcagactcgaactattttacattttgagtgttacgaataactctgctatgaatagaagagtatactagttatgtgtgtatatatatgtttccaggtctcttgagtataaaaacctagggatgaaattgctggatcatatggtaaaactgttttaaccatctgaagaactgccaaaaatatattccaaatcttctgtcccattttacattcccaccagcaatgtataaagtttccaatctctctacacacttgccaacacctgttatcacctctgagtacagccctcatagagggtagga

SEQ ID NO: 48317 - DNA, 960 bp, Bovine  19866881113488
  misc_feature (1)..(1): n is a, c, g, or t
ntagtaacatgggagcagcaaaaaatagtaatggaggtcaagtttgtgcaacatttcattgcatatgtgctgaaatccttctttgcatgaaggcaatacgtgtgtgtgtgtatttgaagataatattagtgagtgaaaggtaacagtccaaaatatatgatgcctctagcctgcttcaaatgtgcggccacattttataaggttaaaccaaatagtcgaggtcaagcatttactcagacacctgaacattcaataagccagcacatcagctccacatcactcacctgtaattgctaaaaaggaaacctgtcctcagcctcccttttcaataagacgtgtatggggaaattctatgctttttatatcttagcattcacctgcacagattaggaaaggattatttccctgaaactaatgaagtttgaacttcagagcctatctttcacgcaggtgcattgaggttctggaaactacctagaatgttcctagaatcctctgaatggggaattttgcagcaaaaataattttaagttcaactgggtaaggccattctttctcttctctattctccttctggatatttcagcactggtgctgggcattgcgtggggcttttgggatcagtctaaagggaaatttaaggtcacttatatcagcctatttatacagtttccaccacgtttatttataactaattatcaatcatcattccaaagcaatgtgtgtggttggctctgtgaacacagcgtgggccacagtactggatgctgagacaagggtgttatggaccatgttctaagtgccagcgctggaaaggggtaggtggtggaagtgggacaaggttaggtggacaaggacaaagttagactctagatgcttgacagaagttttctcaagttagaacacaatgctaaaaatatatagacatcaaaagaatcctcacttcagcatacaagtcat

SEQ ID NO: 48318 - DNA, 870 bp, Bovine  19866880223408
  misc_feature (1)..(1): n is a, c, g, or t
naaacagtgtcagactttattttttggggctccaaaatcactgcagatggtgattgcagccatgaaattaagagacgcttactccttcgaaggaaagttatgaccaacctagacagcatattaaaaagtagagacattactttgccaacaaagacctgtctagtcaaggctatggtttttccagtggtcatgtatggatgtgagagttggactgtgaagaaagctgagtgctgaagaattgatgcttttgaagtatggtgttggagaagactcttgagcatcccttggactgcaaggagatccaaccagtccatcctaaaggagatcagtcctgggtgttcattggaaggactgatgctgaagctgaaactccaatactttggctacctcacgcgaagagttgactcactggaaaagaccctgatgctgggagggattgggagcaggaggagaaggggatgacagaggatgagatggttggatggcatcaccgactcaatgcacatgagtttgggtgaactctgggagttggtgatgaacagtgaggcctggcgtgctgcgattcatggggtcgcaaagagttggacacgactgagtgtctgaactgaagtgaactgaatcagtatctatgtagtggagttttattaactatatttttaagggaaaaagtagagtagtatttcccaagttgcttgagcccaactctcttccatttgatcagaatttgtaatttttcatgaaaaattgaagcctattttaaggaatttgagaatgactacttgttcgattttgttttcaaaataatactcaagataagattactaggttatgggtaaagcagactgaaatctgtagcagtgcaaagtttta

SEQ ID NO: 48319 - DNA, 1435 bp, Bovine  19866880401325
  misc_feature (1)..(1): n is a, c, g, or t
ntattaggtctgaattttatcaagataactagcctttaataactgagcagtagcagttgtcaccatcaatcatgaattccaaagcctcatatcagtcgccagacctggtttcctgcatcagaacatcagttgatttctagagaccttgactctcaccaacaccaccccacacaaatccagcatcttccacctgctgatttatggtctctgtccgaaaattacctaactttgtaattctaattgctgatccattcccttgggaggtaaaaagcaatttacaaatttaatttaaagctgaaataattaaatacattagctcaacgaaatctcacacacttgtgtatacatattaagccaaatatgcaaatgaagaaatcaagactcacagtggctcagaaacttgtctgaaatcacataattaggaagtaaggacgagacatttaaatagtttgccttaaaagccatgttaattactatttactctatttttaaattctgatgtgaagtagggactacacaatcaaattcctggggtttggagttaggaattgttcaagccaagtataaagggatcctggtaattcacttagggaagaaatgtagcatgtgatggtggtgacctttaaagaatggatcagggttttcctgaagtagcaatcaggatcagaagggtgcctgtttaaacagcatacatgcagtctgaactctttttcttccttttttgctgtggtggaggaaaggacattgtttatccctgtgactgtgactcagtatcccacagtgctgaatctcaagacagaaaagagatgagacacagctgcattttaacaaggttgatttaggcccaagctgctgtttggggcctttggtttgtgtctgagataagtattaatatttaccaggatgtactgttgtacaagtcaccaggggatgatttcttagaaaaacccggtgcacaatcacaaggatcaaaccccctttcaaatcctcaggtttagcacataatgaattcagtgccctgggctagaacttaagtaactaggagcaaaaaccagctcatcatgtgtcatttctacaggaagataatgctcgagacaccacgtgatctcctgtaagtggagcaggaagctgcttgcccagccattagagtgccagtgcagaaggcagaaaccagaggcagagagcccaacagggaggctgtagtgaattatttctctccaggcccccatgtggtgaccgccactgcccacctcccttgccatgctcagcatgtgcatgcgtgctaagttgattcagtcgtgtctgactctttgcaaccccctatggactggactgtagcccaccagcctgctctgtccacaggattctccaggcaagaatacaggagtgggttgccatgccctcctccagatatcttcccaacccagggatcaaa

SEQ ID NO: 48320 - DNA, 1186 bp, Bovine  19866880463045
  misc_feature (1)..(1): n is a, c, g, or t
ngtttgtggtaagtttttaaacgtgaggatcaagctggaatgtacctcctaatcttgtgtttatatctgtcttggcattctgtgaagctctgacactttttatccctggaatatagatagtcttcaggtttttagcttcacagaaaatgcttcctaagcaatgggtttaaccttgggtcaggctagctagtttgagagaggcacagttcaaagttactgatgtaggcaaatttagcgattagttaaataacaaatcaaagtgacatagagggatcatctctactatagcacaattcttcacatttcttcactactttcttagtattttatctgagctgcttttcctgttggtaggtagaaccattcatttgatgtaaggtgaaagctgcagagtagaagcataatccaaccagagtgttccccattttttaaatgccaggatggccccaaccttggggatatgtttgatacagaaaaggagaattttagctagaggagaacaagctaaagagagtcaagggctataaggatgtgggagtttacatgggtacttctcttttggtgttgtggacatttgagaatttgtagagctaagttaatggagaaggaaatggcaacccactccagtattcttgcctggagaatcccagggacggcggagcctggtgggctgccgtctatggggtcgcacagagtcggacgcgactaaagcgtcttagcagcagcagcagcagtgtgtatacgcccttccccaggtccctaaactatctcttccccctggcagccataagtttgttttctgtgtctctttctgttttgtatataagttcatttgtatcatttcttttcagattccacatatgaaggacgtcatacgctatttctccttctctgtctgattacttcactcactatgacactctctaggtccgtccatgttgctgcaaatggggactgtttcatttttttaatggctgagtattattccattgtagatatataccacatcttctttatccattcctctatgtttgaattgttaatgtgttgtgcatgctaagtcacttcactcatgtgaccccatagactgtagcccgccaggctcctctgtccatgggattctctgggcaagaatactggagtgggttgccatggcctcctctggggaatcttctcaacccaggaa

SEQ ID NO: 48321 - DNA, 2428 bp, Bovine  19866880484550
  misc_feature (1)..(1): n is a, c, g, or t
natgtagatgatcccacccttatggcagaaagtgaagaggagctaaagagcctcttgatgaaagtgaaagaagagagtgaaaaagttggcttaaagctcaacattcagaaaactaagatcatggcatctggtcccatcacttcatggcagatagatggggaaacagtggaaacagtggctgactttatttttctgggctccaaaatcactgcggatggtgattgcagccatgaaattaaaagatgcttgctccttagaaggaaagttatgaccaaactagacagcatattaaaaagcagagacattactttgccaacaaaggtctgtctagtcaaggctatggtttttcagtagtcatgtatggatgtaagagttggactataaagaaagctgagcacagaagaattgatgcttttgaactgtggtgttggagaagactcttgagagtccctcagactgcaaggagatccaacctgtccatcctaagggagatcagtccttgggtgttcattggagggactgatgttgaagctgagactccaatactttggccacttgatgggaaaatctgactcatttgaaaagaccctgatgctggggaagattgagggcaggagaagattgaggaggatgagatggttggatggcatcactgactcgatggacatgggtttgagtgaactccgggaattggtgatggacagggaggcctggcgttctgcggttcacggggttgcaaagagtctgacacgactaaatgactgaactgaactgaacccacggatttcccactgtggtatctgaatcccacttcagtatcttcgcaggaggagcccgagtctgggggaggctgaaccatgtgtttctctctacatgaactttggcctgctctgacagctaaggagatttgactttctgcctggcctaccagaagctcaagaaatgaacttcctagtattgactgtgtcattttctaaattcacaggtttcagacagaatatgatataatatatacattctgggagaaggcaatggctccccacctccagtactcttgcctggaaaacccccatggacagaggagcctggtaggctgcagtccatggggtagctagcagttggacacgactgagagacttcactttcacttttcactttcacttttcactttcctgcattggagaaggaaatggcaacccactccagtgttcttgcctggagaatcccaggaacaggggagcctggtgggctgccgtctcgggggtcgcacagagtcggacacgactgacgcgacttagtatatacattcttggtggggaaaaattgtgctgtggcctaaaagacaaaaaaaagcatattccctcattcttggtagatgcacaacaacaaaccacattgggtgattaacaaggggggaaaaaacacagttatgcacctagtttcataccaaaaatatactgggttggccaaaaagttcactcaggtttttccataccaaggaagtttttggccaacttgttataactttgttgaccttattattgcctttacaatgccaaggtcagacctgttttgtaaatgccagctttgagtaattcaaaatgtatgtaaaatcactaccatgaaagctacagttcatggaaaacagaggaaaggttgtccattttttgggaggcctacgattttatcatttcatattgatttatacggtagcagatcaaggagggtctttggtagaattcagttcaaactgcctctgctattaatgttcgtgtaaacttggagaagtcagctaacctctctgcactttcatttcctcctgtgtaagacagagaatacaaaacgtagcactgggtcaattatagctcagcaagaaaaacactcatcacagactactgtaacaagatgctatatgtcagaacacccagcgctagtaatcatgcaatgaacactagcttcctttctcattttcatccttctggactcttgaactattataacttatacaataaccgttacttaaattccctaccacctctttcaaatacaaagactatatttgttgatagaggggaaagatacataaagcctaaatccctgtgccataaagtatttttgtagggcagtccaacaaaatgggaccaaggttttcttgccattcatagacagttaatcccagcctgactattgcaaaactcaactattttgactttttacaatgtctggcaatccagaaaatctttagctcagattacatttttttccatgctgtagttgaactattcagtctgagaggcctgtgacaagctagagttaataagttttccatggtgtcaaaagtaataatattaacgtgccattgtgagttaaattaattttggtttgtgcactggcctgcatataaatgtgaatgacatttccaaatatg

SEQ ID NO: 48322 - DNA, 1030 bp, Bovine  19866880512039
  misc_feature (1)..(1): n is a, c, g, or t
ntgagttgtttctggagtatctggatttatagccgaggtgctgaattctgtcactcggtccgctctacattcctaactggatgtgtgtggaggagtgaaggcaccgacgatgctgagacatggcgcccctattgtgcacgtttatcaaggtgcctgggagatgcactggtagtgcagtgattaaaacattcaactgtgaatacattttttttcccacaatacatttttctccacgtttttacatctgtgaaatgaggatttattttccttataatcaatggcatctcactatcactgtcagccaggcctgtgcacacccaactgtctttttacttccattgatgttccagtaacaaatcatttaagggccatttgaggaagagatctgaatcctggcggtggtctgaagctttctattgaaagctcatacactcaaactagcagaatgagagtcaaacagttaggaagattttagaagcactaatggaacaatgtttaaagaaatgctttatcaaacactcttgatggcatgaaggaaaatggtgtgtaagaaaaagatgggtatcatcagctctgagctgagaacagatttagaaatctttgtaatttattaaccaatctcttttgcttttattttccttatctgaatacatgaaaatgacacaaaataaaatctgtctaagtcaatgatcattcaaaaagtacaaaataaaaattcaagtcatatgaaaccatttcttgacatagtttgcagtactttttgttattggtctatgaaatattgctgcatcttataattaatggtttcttagagtacatgaaatagacatttcctaaagaataagagaaagcatgagcattgtttacaaataatatattacaaagtaataaactgtataaaattttaagcaaaccgagttattcattcccagaagataaatcacaattatatttaataactatagtcaacacaaatttcagaactagctaaaagaaaaacgaatccctagccaaataaaaccatattcac

SEQ ID NO: 48323 - DNA, 1451 bp, Bovine  19866880539164
  misc_feature (1)..(1): n is a, c, g, or t
ncagatgacatgacagtttatatacaaaactcaaagggatctacaggggaaaaaaaggaaagggaaaaatcaccaaactcctagaataagtgagttcagcacagtaggaggatataagatgaacacacaaaaataagtaacatttgaagcagcttttcccttctctagggcaacttagagcctggcaacgcctagagataccaacctgggaaagggaccacaagccaggtcagggcaggagcagaacgtggctccagcacatgagcatgcccctctgctccacaggcgaaaggctttcgaaacacagaggtgcttccctttctcactcactgaccttgttcagtgcattctgacattaaaaatcctagcagtctgtgtaaacttcatcaacatctacaaatgagaatgcccctaattgggctctttatttcacgaagatgattatcctggcatctcaggtaagaaaataaatagatatctcaattccccaaatccattcactatatctaaagtttcattaatactagtctgcaaaggtaactacagcaagaattccattaacagtaacacatttatttcttcaagttttaattaattctatatttttataatgtttaagattaatccttactctgaatatagaggaaaagatgataaccttaatacatttaaactagcccttttaatgacaaacatttgtgtgttctccaaaattgtaactttatgtaagtatacaccttccatttcctaaaatattcctcaaatcttagagtagtgtcatagttggagaaaggagataatagacattaatttataatcaattttaacaaaaaataaaaataaataaaatcaattttaagtatcaaatggagaagaaaaaaaaggaaggatgggaggaggatcaaagaagactcaatcagaacaattgcaaataatgttttccaataaatatctctgtacgagaggactattttaacatacacataatagagatctttatcccaaaaatactcctagcacattctcgagactgcagtgatttaaaactgcatgtttttaatagttgtatccaataactgcatgtaaaaacaagtaaagtcattttagaagcaattagtaagcagaagaggaacacagattagctatctctgttgcagactctgatccaataaatattttagccaatttcgcttcctgtctatctgacatcctatccaataatcactgtttcccaatggtcagaacccttgacatgtggcgttagatatctgtatcccaaagttccctgagagaaacagctggctaacagaagaacagggttttttacctgtatgctgtgattaactttatagttaacagcttttctatttgtaaacatcaagatgactccacacttggggcaggtacactccagtttttgcaggactcagatctttactctctctcctatc

SEQ ID NO: 48324 - DNA, 4332 bp, Bovine  19866880542001
  misc_feature (1)..(1): n is a, c, g, or t
ngacacaaaatacatggcccataggttacttaaaatctttcacaaggaaacacttgaaatttttaaaaatactaaacatatgctacacaattactttcctatatgaaacacttactttttataaactcaattataatctaaaatatgtgtctctgatctcctaaagtttttgtttctatttttcagatccttatgtgaagattcatctgatgcagaatggcaagaggctgaagaagaaaaagacaacaattaaaaagaatacacttaacccctactacaatgagtcattcagctttgaagtaccctttgagcaaatccaggtaatgttaaacatattttgtcttccccttcgatttcgtttcttcagaccgcataaattaaacacacagaccttgtaaactctcagtgcacatgtctctacttgaactgccatccttactccacgcacattagatgctcaagctacatgaagagggaaatgatgaaatacacagcataggatacgctgcttcatcagcaaaagcagcagcattctggtgagcagaaataaagtaggaaaaagaacaccaacagaacaactctgctaattcaaaaagtacatccacaaccgttaaaaggtcaagaaaaaatgagctttaacttttgactctcaagccacagtatttctcattatcacctctttgtagcaaaaaataaaaataaaaagtgagaaaagaaatatcttggttgatgctagatatgcagcataattaatcttttaccagtagaaaaattaggtcaagttgtattttcaattgtttaaattcagattcctgtttctgagttggaatggatggttatttttgtaaagaaggaaccttaatttgctagataatatttattatgattggaagtattctattaaaagaccttgcagttaataggttcaaaataggatctacatgtagccacagagatagcatataatcttactacttagggcttcccttgtggctcagctggtaaagaacctgcctgcaatgaggcagacctgggttcgatccctgggttgggaagatcccctggagaaggcaaaggctacccactccagtatcctggtttagagacttccatggactgcatagtccatggggtcacatagagtcggacacaactgagcaactttcactttcacttattacttagcaattcttaaatatgcttaggttttcttatctcatagtccatagttaggctattggatccaaagttcacatccactaattataggctatttttactaacttttaatgggtggcagagagtcaaattggttaaagcaacactatttttaaactttataaaatatttgatgtgggtctatcttttcagtcctatggaaatttgcttgtgacttgaaggaaagatgaagggtgggcaattaaaaactacagcatggaactttctacaggttcagaatcacaaaagtcagcaaatagtcttcagttgcatatttttacttttaatccattcttaaaatacagtactttaagaatgaatcactcttttattccatgaagaaagttaatataatagccacatttattgtatacttattttgtacataggcccaaggtacatacttatgcactttacctgcataagctcatttaatccttatgctgtgaaagaagcaccattattaccccagttttatatacgtataaggaaactgggggcttgccttggtggtccaagggctaagaatccaactgccaatgcaggggacacagggtcgatccctggtgcaggacgattctacatgccacagggcaactaagcccatgagctgccgctactgaagccgcacgcttggagtccgttccccgggacaagagcagccactgcaatgagacgccctcgcaccacaactagcgagcagcccccgcttgccagaactagggaaagccggcacgcggcagcgaggactcagcacagccaataaagaaatagttaaataagaaaaggaaactgaggctcgtgtgtaaaacaggaataataacagaacccagggcgaagcgagaagcatgtagaagcatctggaacagtgttaagcacatttgaacactcaggatatggttcccaccattattattcacaatactaatattcccttctcttcaaattagcattttattagaaaatggatctaatgctccaacagaactctgtaaggatgggaatatcggtgttgtccagtccggtagccaccagccataggtgggccatgagcaccttagccactactgtaacaggggacttcgattttaatttatttaaatttaatcagctacctgtcggggaggaaacggcaacccttccagtattcttgcctggagaatcccatagacggaggagcctggcaggccatggtccgtagggtcgcagagagtccgaaacgactgaagcgactaagcaagtgcctgtggctagaagctactgtataatataggccagttttttaactgccaataatcccaccatcctcacatcagttcacagttttcacataacctttcttatatatatttccgcatgtcagcagattgtggcaacccactccagtgttcttgcctggagaatcccagggacgggggagccggtgggctgccgtctatggggtcgcacagagtcggacacgactgaagtgacttagcagcagcagcagcagagatgatttaaaaaataaaggaagatgtgcaaggttgggcttcccaggtggctcagtggtagagaatctgcctaccaaggcaagagatgcaggagacctaggttccatccctgtgtcaggaaaatcccttggaggaagaaatggcaacccattgcagtattcttgactgggaaatcccatggatggaggagcctggcaggctacagtttacggggtcgcaaagagttagataggactatatatgcacgtgtagaggttttatgcaaatatacaccatttcacataagggactcgagcatctttggattttggtcccaggggtcctgaaaccactccctcagatacggatggacgactgtactgctaatttgtcaaaccatgactgtgacacaacagaggtggagcagaaagaaactctgtcagtaagaggcacagagaacccacctgtcatacataaagtaagagacttgtctagtcacatttctaatttcccttcaagtattaaaatttcatgaaattaaggtatgaaattcacggaagaaagattgaagttctcggcagagtgtggttaaatgacatggaaaaagtcttcaacactgaaatttgtcaaggtagtacaacagtttgtgcgtataaacttcccaactgttgagcacacaagtagtttccacttattatctaggaattacagcactccttgtggtcagataaaaatgtagaacagtgaaccctctttcccctgaccctacataagggtgcagtcacctacctctaaaatactttcacaaaacacttagatcttaaaaggcgaaaaggtgaagatcttttaagatcttctaattcaaaatgattaaagcacgggggagaaaaagcactcccacctctacacacattaagttgtataaacacactgaaactcataaaggttagggaaaacaagtaaagaacttcatagctgagatgaagcggggggcagcactgtagctgtagtttctaagacttttttattttttagtgacagaagtacctgatatatttttttttcttttctttttttttatatttttcattagttataaaaatgattgtattatttttaataatggactgtgcctagaagcctttttagacatttcagggcagctgctgttgttcagttgctaagttgttctgactctttgtgaccccacggactgcagtatgccaggctcccatgtactccactgtctcccagaatttgctcaaatatatgtccattgagtcggtgatgctatctaaccatctcattctctgccagcccctttaccttttgccttcaatctttcccagcatcagggtcttttccaatgagtggaatctttgtatcagggtggtcacagtattggaatttaggcttcagcaagaatcattccaatgaatactcaggattgacttcctttaggattgactgggtttgatctcctcactgtccatgcatacaaattgcacacaaataaagaaactgaggtatagactgcagagagattaccttgaaagatctgacaattagaggctggagagggagtagataactgctaattccaaatcttttacttcccaattatgtcatagtgcagggattc

SEQ ID NO: 48325 - DNA, 1418 bp, Bovine  19866880722440
  misc_feature (1)..(1): n is a, c, g, or t
nagagcccaaagatgccggcaaatgtgttacagcagcttttcccgcagtgggtacttctgtgaggttctcactggggaggagctgtttacaggacactctgagtctccctgtttcacttatcagccacacagagcacagccttctggtcctgcaggggctatagttgttgatgacgccacgctgtagataccatttgaagtggtgcttcagaatggccttgccaaccttcttttgcccacactgactggaactcttcccatgtcaactcagctttccacagcggctgtcatccatccacctttcttttccagacctgctaatgtggctctagcgatgtgatttacctggctgtcttccaggtcctcatcagtagagagtctgttttgctattttgcattctgtagccttcaactctagcaccgatgctgctgatatgaaagctcaggtacttccataagagttcgagtttaatgatctgtctaaaagctgagcaccaagtgattcactagtgcttcaagtactcgaacacagtttcccaaagtcagttctgctgtttttatcctccactggagctcgatgcagctttgcctctctctggacttcctgacttggccgttcattaagtcagggacagtggacctttcatacaggcacccagcgtcatgtaccttccccttactcttctctcttgcttcctgagactttaatcatctttctgagtgttcttattccctctgcctcctttagtcactaacaggtactttcccatgatctgcctttggcattcatctacctctatgatttcttcataattttaggacttccaatactctttatttaaatcacactctaaactcaattccaagtcttaatgtctttactgagctcctgcattttgctaaattcactttactaaggaatggtttatttacaataaggtgcacccattgcaaatgtacattttgacaagtatatgaaatgtaatcacccctccaaacaatgcctctaagtccctttctagcaattcctgccctggttctaggtgataattgatctgctttctgtcaccataaattcatattgactattcaaaaatttcataaaaatggaacaattcaccgtgtagtctcttgcatctggcttctttcactgaatccaatgtttttagtattcatccatgttcttttatatataagtaaaccattcatttttattgctcagcattccattctatggtcgacagtctattgttgattaatgaaaatataggttttttcagtttggaactcttaagaataaagctgctgaaaatattcttgtgtaagtccttgaggtgatacatgtttatgttttgcttatgttttcttttggtggctcagatggtaaagaatctgcctgcagtacaagagacccggat

SEQ ID NO: 48326 - DNA, 1870 bp, Bovine  19866880777662
  misc_feature (1)..(1): n is a, c, g, or t
naagaccactgaagtaaatgccagtgaatgtaagagttttctaattctaattgtgacaatcctccttcctgaggtgtttacaatgtatatatacaaactgcattcacctttatttaaaagaatatttatactttcttattggttttcatagcaagagaaattgggtgatatctgcttctcccttcgctatgtacctactgctggcaagctgactgttgtcattctggaggcaaagaacctgaagaagatggatgtgggtggcttgtctggtaagtctgtgatgtttattgtggggttttttaatgcaatctcatcgtggacaccaaatgcatagcacacatgccacgatgtccccctccttcattggtgactgttctcttttcccttggagcctgaaagcactctcagagttcatgccaacacagaagttgctctcaatttattggaattggcagagaagatgaagcctattttcctgcttcataacccaaatatcaattatcctatagcactgaaagctaaaaatgtttgcttatcttttgaaaggtgacatccatgaccaattataatttcattcactttttttgtttttgatatttggtcaacattcatttatgatgtgaaaaatagttttttttatctgagatgtatcaggtattatttaagtgtttatatttacataagcaaagacaaatattagatacatttatcaaatatagcctaatgtagcttttaataatactattttattaaacattcagtatttcaaatatatgtgaacagtaaaatctgagggtaaactctcatggtaatatatttattctctacagcttatgttggtaatggagagactttgagatttaaaatactgtacaacccaattttagttttcaaagaagtaaactcgtgctcaaaagaaaagtagactcaaggatttatcatttccatagctgaacaccactgattttattttcttctctgtaattaaatcaattatatattttctaataacttaaaatgtggaggaattttcttgatatggcacagggtcatcgaagacaaactatggttgtcactgtttgtggctatggaattagaaccaacattactcgttatccagtgctttctctaataaaactatcgcaaacttcaaaaggtcactctcatggagcatggtgattttatattctaaagcataacagctaaaatatgctaaagtgaaggttccgtgtactgaaccactaatttgtcagccaaatactcctggtgcctaaatttacttctctttataaataagtcacccaggaaatctgcactacttctttcaggtcactgggaccccatttaaaaacttactactttaaattttctttgttcacaccattaggcaatgagcagtttcttttaaaaatgtagagtatttattgtgccaaaggtgcaaaatatatgcagacacatatgtgtgtgtctatacacatccaccttgtcctgggttatgtccagtaaaaaggcctataaacagtagccataggcatccctagaaccagagatggtttgaaatgcaatttctcactagaagaacatggagtttatttgctctgtggtagatcctaggtgtggcacagaaggcattcaagacaagcctagaacatctcatcatacagaaagcaaggaagcctcatgtcaataggcttaggagtcaccttgcagtgacttccactggccaaagatgtgatcatttgagcatcagtaacggaataaatacagtatatctgaacctgaaaacagaagaggatactcttgttttgaatttatgtgcaaactttgaggcacaagaatatttcactcccagagttctacttagtatcct

SEQ ID NO: 48327 - DNA, 1557 bp, Bovine  19866880782236
  misc_feature (1)..(1): n is a, c, g, or t
nctttcgagttttaggctattgacccccctgctgcaggaataatctttctcaagcaccattttcatcatgtcattcctactcaaggaccctcaagggcagagcaccctggtgcctaccatattaaatccaaaactcttgagcctggtaacctcagtggttctctccagctgatctttgcttctgttgcaccagcaaacagacactcttcaatccattcaagtagattggcttgctttcctctgtgtaactttttttgtttttcatgaaactagctttaagtatctgctcctctttctttggcagtcttggatattctccttatttccaaaagtacacactcccacatagacttcttttccatgcctgccaaagtctttgcaattagctttgaaattggtttccctcaggaagtcttccctgagtaaccatagtcctattctgttaattttgattctctgtccctctgctcagttcgtactattttttccatgtatgttattttgttctatggatttcacttctataagcttgatgccccaagctagagtcaaaatataacaatggtagcatgttttatgtttgttttccgaatgacttgatcatcattcattcattttatttactcaataaatatgcattatttaactgctctgttagaaatattgctggagtttaagtccagggaattccctggtgacccagaggttaggactctgagctttcactaccgaggacctgggtttgattcctggttagggagttgagatcctgcaaggagtgataaagggggaaaaaagacattatgtcatcacagaggtaaggaatgaaggaagagtattgtaccttggggcaagagagagtttaatgaagaagaaatgattaatagtcagggaatgttgctgaaaggttgaagataaaaagaaaagatcattgagttggtgattatatgtctaaattttatgacccatgaagggttataacattaatttttgagaccaccaggtcaattctaaataattgaagccatgtggtaaggccaaacaaacaaacaaacaaaatacccagtacttctcattgtcaatattaaaaaataaatatgggtccaaaaatagacaagaaacagttccaggttggaggaataattaaattctatttgattcaagaccaaagtgttctgtgagtgcagaagttcagattaagttttctgaaagaagcagcctcatctttatatatattacattcaagataaatcagggatttctgggaaagaagaaacaagatggagaatctctttaatatgaagtaataaatgtatttgtaaaaatttggaatataaatgtggttcttaaaaacctctatcttagcttcatgttagcacaaacatttttctttcatgggaaggcttgctgaatgtaagtttatttcagaaatttgatttctgtaaataaatgccatgctaggctttgcatattctagaattatttagaattgacccagtggtctcaaaaattaatgttataacccttcataggtcataaaatttagacatataatca

SEQ ID NO: 48328 - DNA, 1622 bp, Bovine  19866880835215
  misc_feature (1)..(1): n is a, c, g, or t
ntacttattgaatatctctggaggttcttaatgggaaataattctacagctgcatttttaagctctggagtctttcctctttgggaataatgatttttggttttcagttgagtaactgtttcccttttctcatgatataggaaaccttataaagcagatatctagcttacagagtatctctggatggctagattcagatataaactttctcttaataaatgaaataagatgccaattacattttatgtctaaagaattacttattctcattgatacgtgctctcttttcatgttactgttcattatttagagaaaagtaaagtaggatgaataaatgaaagtcttagattaactttagttctcatgatttcaaacaaatttttttgcattttatatgagcaattttgtttaagattttttgttttgctttcctctaaagtattaaatcttattttttaatatcataatgagtgaaagacaccaaagagagacagaaaaaggaattcaagaaacagatttggaatctattgaatagaaactgaactgctgttcataatagtctgttcaaggagagacttggatttaaatgggttaattataacccagtagaatctagccccgagatagaaggggataggcttttgttgttgaaagtaaaagtcataagatgatgaagcaattatgtaaattaaagaattacgtgttcattatgtaagtgaaaaaattaatgtgttattttagtaagcaattaaatgtgtaagcaatttggaggaaaaaaatggaaaggagccttatctgaaagttactaagcacatgtttgaagcacaggggctgttgcaaaggtgaattgtgccagaagagcctcaacgtgcacacaactcccattgttaagattctagctcctggagaaaacctctctgctaaagtttccattccgacttgattaacgtttctctaattaacatgatccaagtccccttattagtaggttaggctcacttgccttttttttttttttagactgatcacccactctcccacctcccacagataaaaagggaatctgaccttgcaagacagttagcctttctcttctttttgtctctttaaaacagaaatcctttgagtttcaagagacacttacacataaaaccattgtcttaattttcccccttctcaagttaaggcctcaaaaatcatcctttataatcagtatatacagttcttccatttgcaaaaggtttctaacatgtatagcctctgactgcctgatgaatttgaaatttttttcattctaatcattcaagaaatatttatttatgccacccacaagtcaaacctgaagccaaccttataacatttggaaaaacccattcatttagcattttcacttaattacttcaaatgttatgatcaatagcttatgattccattttctttttttaataaattttattcatgattattgtaaaaactgtatcagtcctgtaccccagcatcagggacatcttcaaggcatttagactccttattttagcatgtactcctagttttttatccatatgcctttcactgcatgtgtgcatgctgagtcgctgcagtcatatctgactctttgggac

SEQ ID NO: 48329 - DNA, 1230 bp, Bovine  19866880848234
  misc_feature (1)..(1): n is a, c, g, or t
ntgcacacaggtttctcaagagacaggtaagatggtctgataatcccatctctttaacagctttctacagtttgtcatgatccacacagtcaaaggctttggcatagtcgatgaaacagaggtagatatttttctggaattcccttactttccctacgatccaatgaatgttggtatttgatctctggttcctctgacttttctaaacccatcttggacatctggaagttcttggttcatataatgcttaagcctagtatgcaagattttaagcatgaccttaccagcacccttatttaaaatatgctcatgaaatgtttcttgaggcacatagaattcatacattcaggagctaaagcccatatgtaaatatactaattgaataactgtttatgaataccatgtgtgaagtgttttctttccaaagttctatgtgtggctttaccatttaggcacctcttatttgtctcaaagtgttttgacatgatacacatactaaacactcgagcctgaattcagagtaattttcccttgaaattacttagaggcaaaaaaaaaatctgagacatcattactcttacttcaatgtgaatcacgagcctcatcagcatgattccatttcctctaagttgactcccaaaactcttcaactcaaagcaaaaatgtaatgatatttgcttgttaagctttatagaagcattggcaagcctggaaatgaggcttaaatcatattgaaccttcgattttctaatggttgtttttaaaatcattagaaactatataggtttaatggcttggcttggaaaagtcattctagactcaaatctagagaaaaatctgaagtgtatttcacatattattttacattataaaataaatgtaatttgatttcttgatcatatgatacatatacacttagatatagacatgcatatacacatacaacatgtatatcatatgtgtatatctgtgcatctgtgtttttatgcatacataaatatacatgtatatacaagcttttttattctgccatgaatgcaatgtatacacatatatatgcttatatatatttggggggggggaagagctatgaagtagtagaaagtgataaagattgtctgactctagctctttttctttcttattttaaatgccaaactttgtacctgtgtaagtgacctttcaagaaggttggtaatattgatgcatatatacattattggaaaatgt

SEQ ID NO: 48330 - DNA, 1028 bp, Bovine  19866880868701
  misc_feature (1)..(1): n is a, c, g, or t
natttcttttatattgcacattactgataagctattttccaaagcttctaatgataacattataataatgacaattattattgaagatgaccagtgtattttggccatgtaattttcatttttaacatgttatctaacatgtggtttttcttaactaattcttcttagccaataatttgtttctgttagaagaaaaaaatttgttcaatgaggttattacatgtaaatggtaagtctcttctatttattaaaaaaaaaaagtttcttgtgtttttcattaattataatggcactgatcaattttaaatatgggttctctcacatattaaaattgatttttctctccacttttattagtgcagatattattcatctggaaacaagaaaacttatcaattattttcattattccatatatgaaatgtatggttagtcatttctgtagatcatatcaaatatttgttccaaagtattattactttgcatccaaagacatcaatgacaagttagatctctcatttattaaatgactggtatgtttcaggtactacacttagaactttttttgtacttggtactttatatccactgtatcattaatatccatgactatcccacaaagtagctatcatttcccacaattaaacaagagcagcgtgattcagagatgttaagtaactctgctaagtcataaattagatgtgacaaaagcttttcccaaaaccaagactatctccaccctgacggtaaacttttaccttgtcactgtgcttctaccgagatacctttgaaaatattgaaaattagattatcagtgtagaaataagatcttgagcatgtttaatttttggttttccatggggtggcagaatcagacacaactgagtaactatgcatatatgcacttcataaacattttaagacatattctttaatcttagatgaataaggattaaatgtagttgtaactctatagtttatttgtttatacattcaatatcacatcaaccctttgttagcatggctga

SEQ ID NO: 48331 - DNA, 2095 bp, Bovine  19866880902032
  misc_feature (1)..(1): n is a, c, g, or t
ntatcctttcagaagattcttaacaataggaacccttccaaaaatttaatgccagttactttgcctgatacaaaagaaaactgctattcattaattgatgtttcttacttatcatacatttgaattttatctctgggaggcaacattagaaaacttaaattttaggatactgtactctttccctgtatatatccgtgattcacctttaaattaactttgggaaatctcaggtctaagcgtgctagtataactttagtactctttccaccagaaaccactttactaacgaaaatagcttccagcaacttgttagaagagcctctgtgtggccatagccaagataaatgaccttgaagccaaaataaatgactttgaagccaagataaatgaccttgttgaattttaccttatcaggtatttcatagcttgaatcaaaattcaattttatctgaaacagaagaaaatttattaaaggttagaataagacaataactcacttttaaccttgtagacaaaggtatattaattgacatgtggaaaaacagtcaacttctatccttctaaaactgccaatcagcatgtgtgatagctgggcacttgactttgatgattagcagtcatgcataagggttaaagtgcatattagtttcatggctagtactaactaaatctaccatcctgccaatggttattgcaacgaatcacacttttggtgcagaacaaacagaaaacaggaatctgttctcatcccactggaacattactgctaaatgaaccaagaaagaaagaaaagcatctcactattaacctccagtacttttggaaatggatgttcgtatccacatcctctctgatagcctgggttatggccttggaatgaaaatcccttgttttatacacagtgggtcaaaagagtaggaagaaaactaactcgaatgttcacaatgacatgtgaatttcctctgatgtttagcattttatttccctaagagggagactactaaaaggaaaaaaggatcaattctcaagaggaagcaaattaaacagttaatagaaaaagagattatcttattttgctatgaaaataaacaagacatctctttcccagaagataaccagcttaaagtacacacatttcatatacctacaaattggcatgtttaagaacaccacagaataatgattctgatttattttggattttgttaaggccatgttttaaggccaaaaaagatgtccttttcattataggggactggaatgcaaaagtaggaagtcaagaaacacctgggagtaacaggccttggagtacagaatgaagcagggcaaaggctaacagagtttgccaagagaacacactggtcatagcaaataccctctttcaacaacacaagagaagactctacacatggacatcaccagatggtcaacaccaaaaatcagactgattatattctttgcagccaaagatggagaagctctatacagtcaggaaaaacaagactgggagctgactgtggctcagatcatgaactccttatggaaaaattcagacttaaattgaagaaagtagggaaaactactagaccatccaggtatgacctaaatcaaatcccttatgattatacagtggaagtgagaaatagatttaagggactagatctgatagacagagtgcctgatgaactatggacggaggtttgtgacattgtacaggagacagggatcaaaaccatccccaagaaaaagaaatgtaaaaaggaaaaatggctgtctgaggaggccttacaaatagctgtgaaaagaagagaagcgaaaagcaaagaagaaaaggaaagatatacccatttgaatgtaaagttccaaagaataccaaggagagataagaaagccttcctcagagatcagtgcaaacaaatagaggaaaacaataaaatgggaaagactagagatcttttcaagaagatcagagataccaagggaacatttcatgcaaagatgggcacaataaaggacagaaatggtagggccctaacagaagcagaagatattaagaagaggggcaagaatacacagaagaactatacaaaaaaga

SEQ ID NO: 48332 - DNA, 1530 bp, Bovine  19866881012581
  misc_feature (1)..(1): n is a, c, g, or t
nctgagctgctggatgaataatgaattatttagaaaggagttatggcctgaaaaaacaagtcctgcatttcaaatttgtttaacctacttaccattaaaataactttaagtacttggatggtctgtctcaaagttagttgacctaccgaggagaccaaaattacataatgaggtcatttcaggtaatgtgaatgccaaaacacatttgttggaaatggctagtaaattgggaccaaaatggggttattgccagagtttaaatcccagtctcccactgttagcaatttgacattggacaagttctttagcttcctaagcctcagttgcattatctgtaaagttggaatactaagagaatcttgtttatcaggttattctgagaaataaatgaaagcacaataaagtgctcactaaatattactgtaattgtttctattaagaatgttataaaatcttgggctaaatatgcaaaatgtgaaagcaaccagtggacagttagatcaatggcttgattcataggagaaaaaatgtttgatgggataattacattttatgaatacatcaacagaaaattggattatatatttactgagcatggccccacccatcagaaaaagacccattttccccctcattcagtctctcccatcaggaagcgttccttaatcctcttatccttctccatcagagggcagacagactgaaaaccacagtcacagaaaactaaccaatcggatcacatggaccacagctttgtctaactcagtgaaactatgggcattgccatgtagggccacccaagacagacgggtcatggtggagaattatgaaaaaacctggtccactgaagaagggaatggcaaaccactttagtattcttgccttgagaaccccatgaacagtatgaaaagacaaaaagataggacactgaaagatgaatgccccaggtcggcagatgcccaatatgctactatggagaacagtggagaaataactccagaaagagtgaagagacaaagacaaagcaaaaacaacactgagttgtggatgtgactagtaatggtagtaaagtccaatgctgtaaacattgcatagcaacatgaaatgttaggtccatgaatcaaggcaaattggaagtggtcaaacaggagatggcaagagtaagcgtcgacattttaggaatcagtgaactaaaatggaatggaatgggtgaatttaactcagatgaccattatatctacttctgtgggcaagaatcccttagaagaaatggagtagccattatagtcaacagaagagtccgaaatgcagtacttggatgcaatctcaaaaacaacagaatgatctctgttcatttccaaggcaaaccattcatagcatagtaatccaagtctatgccccgaacagtaatgctgaagaagctgaagttgaagggttctatgaagacctacaagatcttctagaactaacacccaaagaagatgtccttttcattataggggactggaatgcaaaagtaggaagtcaaga

SEQ ID NO: 48333 - DNA, 673 bp, Bovine  19866881034006
  misc_feature (1)..(1): n is a, c, g, or t
ntttttctccttacacagtcattaattttccaagtatgaatttaaaccatctcaaaattattttcttatggtgtgttacacatcccatcagcaggactgcctaattcaatgatggtggtagaaaaaagctgaattagttttggataatacagtaacaaaacatttaaattaaagaggaataaacaaacctcaaatatctatagggagaatgaaaaaatataaaatatatactatatttataaaatataatatgtatataatatatacattttctccaatatttgcacttagtttctaacagtctgccctgctattagattataagcattttgggagcaaagacagtaaaaataaaataggcaaagtcagtcttatgtgataatgtattgttgctatttttcagtcactcagtcatgtccaactctttgcaaccccatggactacagcatgccagccttccttgtccttcactatctcctggaattttctcaaactcatgcccattagtcagtatgagatccaaccatctcatcctctgtcatcccctcctcctcctgccctcaacttttcccagcatcagatcttttccaatgaactggctcttctcaacaggtgtccaaagtattggagcgtcaacttcagcagcagtccttccaatgaatattcaggggtg

SEQ ID NO: 48334 - DNA, 1351 bp, Bovine  19866881042751
  misc_feature (1)..(1): n is a, c, g, or t
ntctcatggccaaacatcaaaacataaaatagaagcaatactgtaacaaattcaataaagactttaaattggcccacattatttaaaaaaaaaaaaagatgtatagaaaatatgacaacaggtattagctgtgggtagtagatacacagatgctaactactgtatcctttttactttccagaatgcaaaattttttcaaaatcaaaataattttttaaaaaaaattagccaacacaaggcaattgagaattgaagacagttaaaacctgattcttaatcatggggtgaaagggtgatcacagggatgaggttggtcaaagtggcaaaaactgccaacatcacaatgctgtgctctgctcagtcatgtccgactctttgtgaccccctggactgtagcccaccaggctcctctgtccatggaattttccaggcaagaatactggagtgggtggccagtcccttctccaggggatctttctgagccagagatcagacacggttctcctgcactgcaagtgttttttttttttttttaaaaccatctgagcccccagagaatagaagtatcaaaatagtaaaactcagaaagatctgtccaaatatagctcgaccattagttagtgttgaactgtggctcccagattaattaaaatataaaataaattgctagcttcatgtacttgtggaaaaggagacaaacagaatagcagagtccttttctgtccatttgtgcttctgtgtattatttgaagcttggtctcctgttaattataaagatatgctcacttctacctgactcttcccaagcaacatgacacagccaattgtaaatttcagatgtccaacatgaccactgagatcaaacataaaagcttattaaattcatgaagggagaacttctttaatttatatgcaaatttatatatcagcatgcagattttatggtctctagctactctgacaatatctgtagccttattgtgtattgaccactgttgctgtggggtttcactgaaaagatctcgacaataaaatctgtagccaacatgctggctgcctgtctgaagtaatactgggatatctagccatttagtgactggtttctgaagttagatctgtccccatgatgcataagaagaattaattaaattattttaaggggtgtgttttggtgaaagataatttggcaaattatgtatttttttaatttctaagaaaggaaaaatatttgaaagagctcagctgtacagagaaagacatagctgcaatttagaaaaactgaaaacaaacgagcaaaaagtcagtagagacatgcgttgttcttaaaatccaatttggcagatatttttaa

SEQ ID NO: 48335 - DNA, 1055 bp, Bovine  19866881093931
  misc_feature (1)..(1): n is a, c, g, or t
natagtactcaggataccatgcctaaaattaggatttaaattcatgattacattgcaataaaagattagataaatataacgcagggccatactgcattcatttaagtgcattttagcaaataggtttttaacattaagcattcattattatacacatagagatgggttgtatattttattttccctcacttgctaatattttataaaatcccaaatgaaaaaaatacatatctaaagttatttataataacaaacatgccattactgaaaaaatgctctagggtaattattgtatacatatcaaactgactgaattcaatattaagaagatatttacatatattctctctctctttttttttcttttttttctctctctcttttaaagcatcttttccatgtctatacttaccataacaaaagatgaagagaatacatgtgagattattttaatcattatctactagtcattttgataatatttagttatcctcaaatataaaactaatgttaataaataagcaaaataaaaaattcatttatcaaatgcatgttcattcaacttgcattgcacaaataatctaagttactgttagatttaattctgaagccgtgatttgcaggagtcttgttttcatggtcaaggtgacttctggatacactgagcgaatccttacacagaactgcaccaaagagaaaacaacatgtgtcaaccctgtgggtggaggtgacacacaatttaaaatgtctaattacacgtttcaccttagctaaacaccctgaaagatgacatgatctaattgcagattaatgcattatttctctaaggctacaaatgaagcagctagaggaaatctcacactgattccctaagtagtccaagacttatattaaatgtctttgcttgccatataaatatgaataatcctcctgccatagcactgactccaaataaaactaaaatattaactgggcattgaaatatcactaaggcattgtttttgaaaattgaataggtaaaaataatcccaggctaggtacccaaagcaaaccag

SEQ ID NO: 48336 - DNA, 961 bp, Bovine  19866881100965
  misc_feature (1)..(1): n is a, c, g, or t
nacacacacacacacacaccaggcgctgtggatacatcagcaaacaaaacaaacaaagaaacccaaccacagaagagcttaacttctagttgagggaaatagatcacagacaataaatacatcaaatgtaaataacatagtatattcaagatgatcagtgcagtggaaaaaataaagcaaggtgagagctgaagtgaaggaagggatgataattttaaaagaagtgaacaacaacgtaggactcattaagaaggaaacatttaattatctgaggggtttatatcccagacaagaatgattcaggcagagggaacagtgagcacaatagccctgaggttgaaatgtgcgctgtatgtttgaaaaatatcaaagtggggagaggtatgcgtacacagacggagggtaaaagtagtaggcagtgcacaaattcagagaggatggagcagatcatgtaagggtttagcaaaataatctgaaaaatattaggacgcattgacagattttaagtagagtcatacttgtgatggaactgtagaacatattaggttgctatggcatgagtgttttataagctgaaatttactctcatacatgaagcatgatttgtctcatgagatggggcactagaagatattacagttcaaactcctttttcaaacacaggagaactgactagttccaggtttgctgtgtaatgagtgagtcatttaatttctctatgcctccaagtgattgtaaagaataatgctacctgccttgtaccgctctcaagaatggtttgcgaaactggggagataatggaagaaaggaaaagtgtcagattgacatggagtgtcttatagctaaagagttgatgatgatcttgtgtgccttctggttgtcacaaaaattacagtcttttctatcaggaaccagagtgtctacgcagaggcggaaagtcaaattttcacatcgttatagt

SEQ ID NO: 48337 - DNA, 997 bp, Bovine  19866881126899
  misc_feature (1)..(1): n is a, c, g, or t
ntgctgatgactttgagtgtcatttctttaagataaaacctaagattcttaaatgtggaacaagaggtttcaggggatcaaatgactctttgctgtgccagtctcatttcagccttagagtccttggtcataatgttccttcaggttgaaaaattcttctaccttccctgaaaattccttctcatcttttagtcctctctcagagcctcttctgttaaccctgtaactagttaattcctagttcaaagtattcattgccaaaatgatatgtcattgatcacgcagctcaccatgatgaccaacacaaataagatgtaagtatatcgtgtttttgttaaatcagttttttcctcaatattcagtatagctctatgctttaataaaaaggtctaatattctgaagattccttacagatttatgcagatagtattttgtttctctcttccttctcattaggttgtaacagttaagaccctgaggtttgttgctttgttcttgtctccttctatcaattaaatccttcaacaaggttatcaaggtatttgaaagggaaaatgttgtttagctctctgcagttgagagtgcccaagtttaatgcttgcatcaataaataatcactgcaaggtcatattattcacctggacaaattgtataaactggatactcgttttaattaagctccagagctcttccagttaagacagctgtggaaagatgtgagaggagagaaaaatggaagtagggcatttgagcgtctgagcaagaaaaaaaaaaaaaaactaatgtgggaactgaacaatcaattctatattatattacaaagtcattttgagatgtcggattgcaggaactggttttctcgattttctatatggcatctagcacagtctatactttaatgatctgagtcttcttgtgcccagaaacctagataggaaggaataagagctgcttggtaagcttgctgtgcagatacatgaaaatgttagggataga

SEQ ID NO: 48338 - DNA, 1304 bp, Bovine  19866881146910
  misc_feature (1)..(1): n is a, c, g, or t
nctggaaggggaaggggaatagtgaaaattctgtgaacaatcgacaggagttacttgggttgaccatatgctcattccactcttaggagggtctactgcctcccgaggagaaagaacgggaacaccaaggctgagccatggtctagaagtttcatccactgctggcagaagcataccagattcatgagagtcttctacccttagatgaaagatggaggaatagagagtctgggcatataatgccactcatctctcatccaataaaaaacaactttttaacagtttctgataatgatagcacaggatgttagtggctaacattagaatcaacttggactatatcagagttaggctacagatgatattctacagcattttcctctgcccccctatttctgactaccatttatgttcctttacctctgctatggcactgtcctccactccattctttgactttaaaaaacaactgcagccataaaataaaaatcaaaggcaaacattaaaacaatgaaaggatatttactaaggtgtctatagaactgtataagtctggaggagatgactaaggtttttacatcagaaggacaaaaacatctttaaatttattattattgcttgtccttgggtcactatgagatttagtgattccatgtaacccattccttttatctctttcaggacaagagcaaaaacatacagtcaaaaacccataaataatgacactaagttctatttcctaatgcacagcaattgagctctccattgcccctgctgtcaatgcaggtcagggcttccctttacatgtccaaaaattcagcagaggctttgaaatgacttctctgaagaggctggttaccttcttaagccttacaaaatggttcatctttttttatctctaagcatctgaaataatgggtgattgaagccaaagaagagattttactttgtactttgtactgacactgtaaatatattaactagtttaatcccacaattctgtaagattagcattagcattatctcctttctgcagacaaggatactgaaatatataaaaataaaaggactttcccattgttacctggcaagagagaggcagaattgtgaagatggcatttttttttttaagtctggataggctagattttgttacagtaaattaatcaatcaataaatcaattctgaatttcagtaacttgattcaatagttcttggcaccaacttatcctctatgcatagatattaaattgaaataatttggaaagagcaaatcatattgaaatgtaagtctgtgtgactga

SEQ ID NO: 48339 - DNA, 1678 bp, Bovine  19866881297701
  misc_feature (1)..(1): n is a, c, g, or t
nttagtaattagtgaagttcaagtaccaatcatctcaagtgtggccaacaagaacagacatcaatggtaatatctgctctccgtccccctacagtgttgatatggtgattaaatgatttgctgtgaaagctaaaacagcacaatagcatcaggaactccacatgcgtatcttgttcttttgcttcttcctattctttgcccttcattcatggcacaagactgactccaagcatattctcttgttctcaatggcaccatttccagaaagtcctacatttggatgaaggcctaaaaggtgtctacccaactctagggactaccgagatatcctctgttgcctataagaaaacatagcttagtttaaaagactgtcattcacttttataacttgtctgttctcattttttttttaatttccatgaattactgcctaagtactgacaatccccaaatctatgtctccaacccaaatctctccaactctatctttaacagttccattatgccattcattcatccactggacaaatatttatgtagcaactgctaagcaccaggtctctgctaagcactggtaattcagtagggaacaaaacaaataccccaaccagaccgtgtccaaaagaaagcctcatctttcaccagaatccattcattttcctgtctttgcctcattcagtgaatggcatcacctattaaccagctgcccaagtcagagtcttggcctgacatacttaattcctcctcctgactcttcaatgctccacatgaaatccacctcatcagtcattgctaagccctaatgagtatgggttaggatcatagtactcgataagacaagagatatttgtattgctataccctttttaggaatttttgttaaaaagtgtttttgcaactgttagggtatgtggtgctttatatttcacgataaactttcaaaaaaataaaagcacatttatggggcagacagaaagcttttcctctctcacttctttcagagtcctgaacattattgctctggccctctgcaccctccatggtacctttaatgatcattttgatattgattccaccttgaaacatgttccacagcaaatgtgacctctggcttcccgttttctcattgaaatgtgtatgtttcactcctgctaagaagtaacccacatgtcttttgtcatttgaaggtgaagtctcagcctcaagttttctttgctgttttatattttatcagcaagaggcaaggtgaagagaacactgttcttttggtggtagtatattctatccaagtttacacaacatctgaaattgaaggctgaaacactgggtggaatacatcgtagcaactgctgggctttgaaaagccttttttcacttcgctaaaaaaattctgcaaggcccatgctgtcctatcgcagttacattctttctttgaataagttatattcaaacttttgctttatgttatagctctgagaatttcacacatcagaggaggtttaggcaggtcaaaagaagtccccaaatatctaatccctcagattgttattacaaggtaaagaacagtataaaacgcagcatatgccctatgataacagctgtgtttattttaacctgttatatcactacagcttttatacttttcagagttttaaatcagtacataatcctatcaatt

SEQ ID NO: 48340 - DNA, 750 bp, Bovine  19866881300873
  misc_feature (1)..(1): n is a, c, g, or t
nattttgagacagtgttggactgccatttgtctgtcacctctaaatagattctcaacctcagagaaaaacctattcagaggatttatcaccaatttaacacatagaaaaatctgaagattaatataaatagaatatgtccttttaaaatgtcacagcattgagccaattcaggtacctttttaaaactcattcaaaagtacaatatttccaacaagcatgtgaacttggcctcatttgcaaaggtcattaaagtgaacacctcttcttacacttaaaatgatggatgctgctataaaagccatcaaataaatattcattttaatcaagctttttatttacccaatggagatgacctctgttctagtatctataatgcttttcaaaaaggaaagatattgatgtagttgtctatattaagtccttaattcatgtctactctattcagtgggtgcttttaaaattatcagaattatcaagctgctcagaacaaaggtgctttctgattgtcagctccatattctaaaagagcaggttaatttctctgaatctcacagttggaactgtctaacactaactggcagttccacctagtgatcaaggcaattgactaaataaattacacacaaagctgagactcctaatagtaataaggtccccttcacgagctaatcacatcagcaaaagcactcatctgttggctgcaactctatgggggtcttgaatctatcgtataaaaactgtactttcag

SEQ ID NO: 48341 - DNA, 629 bp, Bovine  19866881305925
  misc_feature (1)..(1): n is a, c, g, or t
nttatttgctatttaggctctgattcttctggtttaaaccatcagcaaggtagtgcagataaaggcagtaaaaatattaatcaataaaagacactgccagcaagacaatagctggtggcaactgatatgcacaataaaaaagaggaaaagtaaagattactcattgttatttaaaataaagggataatattacaaacattttaaatggagtcaggtatataaagtacaagcttacataagagtaaacctatagctttgaatcttaaattcaatatgaagatttttgaatatgttttcaaacaaatgaaatctttcccccaaatataggcatgatatagaatggttagagggaagaattctaaacactactctaaatggtatcatttagatggtatctaatggtatcattagaattttttgaaaagagttctaatcacatttgcatgtagtttcagctcagttcagttcagtcactcagtcatgtccaactctgcaaccccatagactgcagtacgccaggcttccctgtccatcaccaactcccagagcttactcagactcatgtccatagagtcagtgatgccatccaaccatctcatcctcttgtcatccccttctcctcctgcctt

SEQ ID NO: 48342 - DNA, 1475 bp, Bovine  19866881388109
  misc_feature (1)..(1): n is a, c, g, or t
nctatggtttttccgtggtctgcatggacgtgagagttggactataaagaaagctgagctccgaagaattgatgcttttgaacggtggtgttggagaagactcttgagagtcccttggactgcaaggagatccaaccaatccatcccaaaggagatcagtcctgggtgttcattggaaggactgatgctgaagctgcagctctagtactttggccacttgatgggaagaactgactccttggaaaagaccctgatgatgggaaagattgagggcaggagaagagggggacgacagaggatgagatggttggatgtcatcaccgactcgattgaaatgagtttgaataatctccgggagttggtgatggacagggaggcctggtgtgctgcagtccatggggtcacaaacagttggacacaactgagcaactgaactgaataaatcctcaaaactttcttctaaactcttactatcttctattaactgacacccacgttcctgctgatgtctcctagtctcttatttccctataagggcaggaggaaagagtaagcagagtatgtatgtctcagtactaccagaaaattgactacagcacttccttaagccacttacattttctgtacttatgctagtcatttgttcattattgtcaccaacaacttgtaggatgggtgtccattttcctccactggcttgtactgcattttgccaacattctttgaagcattcttagtgatttcaatatctctgtcatttggccatcaaaattgcttttttttttattttaatgatttttgtaattatagtatgggtttcatctctgggcagcactccactttccatattgtatgttccaaaattcctttcgggatagccttctgtcttctcttcattataaaactgttcattatttttttcttcatttattaccccttctagtgtgtgatatagatgcaatttcattcatccagcaattgagccagagccacacaatatctattgttaatatactaataatatactattgtgaatatactaacaatatactattgttaatatactatttccatagactgtcacacatcttaaatatacactgcatttgctcactaatcttaaacactgcgtgactggctaattttttgcctcctaaatattaataaagcatcaatcattttaagtttattaaaaattcacctcaatgtcaactttgatgggtcctctttgatgcctgaaaattcttctacttatttcttctgggatttactgccaggctcctcattggaagctcagttcattgatcttgcctatctaatttatactcctttttagaacatatctctgatactatctaccactttaaattgctttctgttcctttcaaccatctgagactctttttctttgaagccctatatatgttgtctcctttaggacaagaacacttatttttcacttctcatattcccac

SEQ ID NO: 48343 - DNA, 489 bp, Bovine  19866881407944
  misc_feature (1)..(1): n is a, c, g, or t
naaaagtgagaaagctattcgtaggctcctactaatcttttgtgaagcctcatccgctgtctccattagagactaaaaataacacgggctgatacatgaatatgcaatgaaattttaaagcagttctcccaacttggggggaagattctcactgttacaattgggaaattaccaaaattaatgtgaatttatgaaatcctgcaggaattgaatcccaggtgcttgtcagctcttgagattgagtgatagacaggcatgaaaactaaaggaaaaagtggaggcgcctcaagcgttgctttctggactgtacctgcagcatgatgatgggagaattattccagtgctcctggagcagctgctgctatgacctccttattattcccactgttatgctcaatgacttttaaaaacctattttgggcacagttcctgggctctatccaatatatatttttttattcttcactggtatattgccactcaaatagg

SEQ ID NO: 48344 - DNA, 728 bp, Bovine  19866881409240
  misc_feature (1)..(1): n is a, c, g, or t
ntacacatgtgaatcagctatctgtatacatatatcccttcgctcttgatgcccccctcccacccaccagcccacccctataggtaatcagagagcgccaagtaagccacccatgctatacggcagctgctcgctagctctgtgttttacgtatggtagtgtgtatatatatatgtcagtgctactctctccatttgtctcaccctcttcttttccccgtgtccacaaggctctagtgtttttaaatttgaagtcatgttaacgtgatattaaaatgaaaaatcatgtcagtaatagtactctctacatctgcatctctctccctgccctggaaataggaacactctttgacataaatcgcagcaagattctttttgacccaccttcttgaaacatttcttcttctagatttttctttatgtctgcatgatgcatacttcatggttcttagcctggagcacctaatgcaaccgggaattaaggaagctagagctggatgagtataatgaatgggttgcctctgcaaaagtctatatacacagtagcgaaggtgagtacagagttgcaggccagcatttttatgaatgttttaattctttctctcaaggaaaaccaggaaaacgagaactagcaagagcttgacaaacacctgccttcagattggaagaccagtcacctgtcattcctggactctgcactgcagctgtctaaggtacatggaaaaagaa

SEQ ID NO: 48345 - DNA, 1782 bp, Bovine  19866881433536
  misc_feature (1)..(1): n is a, c, g, or t
ntgttgctggcataatcgcatggggaccaatcaatgccatacgcatattttaatacacatgcgtttttctctgagttttgagtaaattaaagatagatgaatgggaacaggcaaaaaaaaaactacatctgtgtgtttttcttcaaggagactacagttcaacgtgtcttaaggtgaagtcgcttagtcgtgtcccactctttgtgaccctgtggactgtagcctaccaggcttctccgtccataggattctccaggcaagaatactggagtgggttaccatttccttctccaggggatcttcccgacccggggatctaacctgggtctaccacattggaggcagacactttaacccttgagccaccagggaagcctaatgtgacttggagtgtagtaaattaaatgcaagagacatattgaaatgttgctcttggctcagatatgaggtgaaataaagaagtagcagaatgctaagagttgttgcaggctgtggaagtgagggcttctctttcttttttggagctagtcagatacctggaacattctcagcaacttcaaatactctgaaagcatgagtgttttgaatttataccagaacagacccagggaacttaccatcttagagttcctatatgagtataaaccatttcttttcaatttactcccacaattactgagtacagactacatgtgaggctctgtgttggccagtgataacacaaaggtgaacagggtaccagggaatttataatctagtgggcgagtgaaccacataaacagttaactcaatattatgtgataaatgtgaagacaaccaggagcattaaaattttgtggtagtagtaacagctctgcaaaaagactcaccacttaattcaaaacagagacatactgaagagacctaaagttagacatggcttgagctgtgcactaacacagctgtggaggaaacttcacagacttggttttcagcttttcattcatttctgactattataactctggtttttcatacttcagttcaatctaatcaggctatttcaagcttgtcagaataaaatgtcaaaagaatattacaacggtgattggaaagaacataagattaatttgaagttaaaaactgctgccaatcaactagtaaattgtagcttcaactgttcatcctggcagtctaggcactgatccctcctttccagttttaatcctcattatccttctacttgatgcttctcatttggagcctaagagtctttctcttttatgagtgtgatttttgcccacctctcactttgaatcttcaagccatgacagtatctttcttcatttcatttctagtccctctttcctgagcatgaatgctcagttctgtctgactctttgcaaccctatggactgtagcccgccaggattctcttgtctatggaattctccaggcaagaatactggagtggtttttcctctccaggggatcttcccaatgcagggattgaacccatgtctcctgtgttggcaagcagattccttaccactgagccacctgagaagccccacatccatccaagccccacatcctaacccaggtcaattccttggtcttttataataccatatagtcatcaatatatttaatattaacttgcttgaaaattaaatctttatttttgctgccaattttcttcctcataaatcttcctccatctcaagaaatgccagctttgatctacctccttaggtcaaaattctggaaccttttcttgaacaccacgcatccaatccatca

SEQ ID NO: 48346 - DNA, 1082 bp, Bovine  19866881469893
  misc_feature (1)..(1): n is a, c, g, or t
ncgagatagtgtacctggtgaactgatgataaataggagcagagaaacacgtgttgagaatgacactgcccaggaacactgggcaggaacggccgaatgctctctgggcagttttccctctccagccattctgtcgtcatagacgcaggggctggcattcagggcaagcttttgtttagctgcctctgtttccagctggccccaaagtcagtaggccatggactccctaccagggtcaggtaagaaaaagagttgaaaggcagcaacatcaacaggaaataaaacatttttattgaatatctgtgtaatatgttaagtcatttttaacaacagtcagaaaactactgtggaattcactacacgaaatgaaacaaaatttaaaccacctcatcaaaaatgaaggtaaaatacagctaaagtagttggctcgcaggccacgagccatatggcagaagaaaacaccccaacatttctacaagatacagggaaaatccacacagagaagcactcaagcaggcagtaaatatacacgaaggcaactaggctcgttctagagcatcagattctaatacttgacacagctctgtcagaagggtgcatgtggcttactggaggatgaatctcagtcttgcagcaggttcggtcactgacttgtgacagatgtagtaccagctgattctatggtgacagtgtcccatgtctggcagtgttgcaagagaacgcattagtcgtgctttaatgcaagaaatgatgtgtacttggcaactcgaacctgcttgtttcaaaatgtgtgtttcggtgcgaacaacttaaagctgaatacagtgaactcaaatgtcaatttctgatattcaaggaacttaaaaaagtcaactccctcgctttagtaggggcttatcttttaaatcggaaggagtttcatttgaatcttttttttaaagcagatgtttaatctcacatcaggacttgtgcattttctactgtctactttctgaaaaaagtgtggagcatccacagaaggggagaggtcttattctcccttcgtcctttcagggttatcccagtccaggactctgctacaa

SEQ ID NO: 48347 - DNA, 690 bp, Bovine  19866881608380
  misc_feature (1)..(1): n is a, c, g, or t
ntttcaattttgtatataaaatatgtgttatcaaaatgtttacacaaaagcttatgtatgagcaattgcaataaacatatgtttaagaggtggttacttaaatctgggtattttcaaagcctggggactttcagttgctgtgttaatagtgttaattcagcattcagcaaaagatacaaacatgatacatatggagagtttgcttcaacttctaaaactcaattccctttatttatgaaaaatcttccgtattaaaatgaccatctctcagcttactctcaatgttaagttttccagaggagggcaaatcctctagttgtatgactatgacacagaattaaatagaattctttaatataattcgattaaattctagtttccatagggaattcccaaataataggtataatccataagaggttatattcttagggatgttgatcataattgaatagtgttctggagaggaattcctcttgttagctcatcaaaataacaaagataaagaaggatttgcatcttttggaaaggcacacatgcttttccatgttgatgaactgagaaatgcaatagtttattttcacgtgtctgagtaatctaaggattcactcctttatcagatagaagatatttgttttgttgcaacaacaaaaagcctaattttaaaattctgatcatttgatggtgtgt

SEQ ID NO: 48348 - DNA, 765 bp, Bovine  19866882190449
  misc_feature (1)..(1): n is a, c, g, or t
nacttatttgcctgttttccaggcaaatcggtccagaatttcctattgtgagtatatatatacgtacacatactagtgtctatatgcattatatccatctgcacacacataggtatatactactactggggtaaggaaaaaacctcacatcattacagaaaggaaaagtttcagtttagagaggagaagtttcagtttagagaggaaaattttcagtttagagaggaaaattaaatccttcccaagagtcaatatcaggaattgttttaatgtaataaagattcaagaatttctgatctggtttgacaagttagcaactcacaaatgaacaatatcactgctacacaagtaccattttattataagttctcattagttttggtcttccaaatatttagaatgaaaaccaagaaatagttaaaaataggttgataataggctcgttgctctgttttatgagttctcacagtgtctattttacacgtaactatgaaaacattataatgccagaagctctggcaattggcttacataggaactcagtggaaaagatctgaagtgacagctatattttcaaagctgcatttagagcatctgttcaacggttaagactccaaggtctcctttcattttagtcctgcttgaaactcgactgttttctagcaaaatccattagaaagagcaatggtaaaactgcatttagatttacctgactgcctcttaaaatatgactcgagccacagtcaattttagatagcttgcata

SEQ ID NO: 48349 - DNA, 877 bp, Bovine  19866880547614
  misc_feature (1)..(1): n is a, c, g, or t
ncttgttatcctgtcttgtcagtatgtttatttcttatcataacttgtcatttggtatttttgtttgcctgcctctttttctatttaatctatagagtctaaatgggggccaaatctgtttaatttcatcatttccctctcccccatgcatactacagaatcatcaactgtattaacagctcaataaatacttgaagtattgagatattttgagtttttccaattattttaggaacacgtaaccggtgcaggtcctcggcctccgttttacactttcatccttgaggccaaactatggagtgtgcagtttcatagaaaaacaccagtgaatgcttaacctacaaaagctgcttagtagctagcctcagtgatagaatctcatcgagtgggcttctattctgttcaagtggagtaaaaataggcactgcttagcaaccagtgttttgtatcgagctctctccttcaaggaaggcagagcgatgctagggctaaaatactgaggagattcaggaactggtaagtacaagaaatagctaggaagaagtgcttttgagaaaaagcttcagacaattgttcctgaaagagcatgctcttgaacgtgacttgctaatgatgaaaggaccacccctccaccttttttaataggaaaacttcacatctcctaaattagggaatatgctctggtgagattacagaggttcctcacagacaccaacacagacatactgacaaaaaacttccctccctgtcctgtttaactgcattcattgttcttattaccacactcaccagaaataacactaaaaccaaattaaaagctgggttttgttttttagtttgaagctttggtttgggttttgatttttaatttcaagat

SEQ ID NO: 48350 - DNA, 3307 bp, Bovine  19866880572951
  misc_feature (1)..(1): n is a, c, g, or t
nataagcactgcacactaatttgtggtcagaaataagggaaagattatggcccaaaggatattacccaagggatccaggaacaatgaactggaaaggagtatgactcaaagtcgtcagcactcaatgaagttcaaagtcaaggaatccaagtacacatgccaagtcttaaggtcagaaggtaggccacaagatggaaatgaaatcaaaggttaaacgcaggatggaaagtggcatgacaccagctcacaaaaggaataaaggtcctggaatctagtactgaaatagtgtaactttcttttactgctcatggtgtacatggaatgacttgtgtgtaatcagttttatttattttttctgcttttgcatttcattgattccatttcttgtattataagacctgcatcttggtttaaaaagtgttctggcttttaaatcccacttgaactatctatctttaccatctatctttaccttcaccctatcttctccagacattaattcattctgcagatagcctaagtctctccttttttatttattgaaagttaacttttagaaagtgaagtgaaagtcacacagtcgtgtccaacgctttgtgatcccatggactgtagcccaccaggctcttccgtccatagaattctccagacaagagtactggagtgggttcccatttccttctccaggggatcttcctgacccagggatcaaacccgggtctcctgcattgcaggcagattctttaccatctgagctactagggaagccccaacttttagaaagatttacccaaattttatttaaatacctgttaatgaaaaactaatttttttcttcttgtaagatttgaggtgaaggttcgaaaatatacttaggatgcaagaaaacaaacatgttcacatcattttcaagggggtgagaaatgaatttttcttcttataaatgaagaatgtgaaagtttactgataaaagagttttatctagatcatggagcaaaattcttaggactaaaaattcatactatattcaaagaaatatgaactataatagtaagtcacagtttatattccagtaggtttttaaactctaaagaaagtttttgaatatcccaagttggcaaggcagtgggaaaatggacattctttaggattgctaatgagagctaaaattagtcaaaagctcactagtgagcagttggactatgtatgcaaaactttaataaatgtcttgctccatttgtctcagaagatctacttccagacatttagcttctagatggaaagccttatgtctccgtgttctgactgtcccagaaactcatttcacagagaagaagatatagcaatgaatgtacatccctggaatacaaaggcttctaatgttaattctaagtactttcggaacttaggctcttcccttctctcatcaggaagggaattctaaactctaagtctcagtttgtgcaagaactatacatttgatatttctaacgctgtgttcggttcagtttcttgtgtgatgctataaattcatgctcctcttctcttttttcttaattattaagtatgtcttaatttgagatttattttgctttccaaatgagaattttcttttaattttactggtaaggagttatatatgtttaacataaaatttgggtagcttagagcttagaaaatcagtgtgcttcaaattccacaaatacctatatactgttaaaaaattaaaacaaaattaattatttcccattttaaataatgtttttgagttatcttgtctgtgacatatattctatgtattatatttcatataataccttagaattgcaccaaagtcttttaaacttcagtaccatttctttctcataacaaccttatgaataagctctaattttattccatttgacatataatgaaaatgagtctcagagtggtgaagtaacttgtaaaagatttagctggtagttatagctggactcaggctcttcatataacactagatgcctttctggtctcctcaggaagacctctcataactgcaccagaatctttggcaatgtctgcctcctggacaatacattattttccaaaggtcttctcagtgggatcttgtgactgtgtctgagagcagaacattcaatagcacagttgctttctcaagatcatcacctgcgttcacatcagagtcctacgtcacatcagtgcaatttcaccaacaccacgttctcagtcctcgagcctcttgttgctgtgaccatctcacttttccaccccacacatacacaagatacttggctggatagctacatatcagagtctggaaaatcttaggatatttctaaatttagcctaaatttatatttctcttggtgtaccttaaaaatcttactgcatctgttaaacagatttctggagcccaacttcaaatcaggcatgcttggaaactgaagaaatatttaaactgcttctgaattagttgtgaaaacaataacatatattcagttgttatttatagaagctttatggatattaccagatgctatagagttccccagagaatactggctcttgctctggtgtcaacaataaagatcaaaatctacatgggaagaattgcctgttaaatccagtaaactcgtacctctagtgtttaaggcccataaccatattgcttaaatgtattttttcagtctcttcttgaatcaaatctcaaggacccagctaaatatggattgtttgctttcttgaacatgtctttttgttcacacttaatgactttattattctgaccattttcctactgttcatggggttctcaagtcaagaatactgaagtgatttgccattcctttctccagtggaccacgttttgccaacaaaagtctatctagtcaaagctatggattttccagtagtagtatatggatgtaagagttggactataaagaaagctgagcactgaagaattgatgcttttgaactgtggtgttggagaagtctcttgagagtcccttggactcaaatcagtcaatcctaaaggaaatcagttctgaatgttcattggaaagactgatgctgaagctgaaactccaatactttggccacttgatgtgaagaactgactcattggaaaagaccctaatgctgggaaagactgaaagcaagagaaggtgatgacagaagatgagatggttggatggcatcaccaactccatggacatgagtttgagcaatctccaggagttggttgatggacaaggaagcctggagtattgcagttcatggggtcacaaagagtcggacttca

SEQ ID NO: 48351 - DNA, 1389 bp, Bovine  19866880606021
  misc_feature (1)..(1): n is a, c, g, or t
ntgtgtcctccactccaaattctatgttgaagttgagtacttcagaatgagactgtatttggagataggtcttgaaattaagtcaaagcaagttgatatgggtggaccctaatccaataaaactgatgctcttacaagaagagaggactgggacacagaagacatgggggtaaaagatgctaagacctgaggataagatgttcctgtacaagccaaacagcgatgaatgaaacaaccatgctggcacgttgatctgggaattctagcttctagaacaataagaaatcatatttccattgtttaagccaccaatctgcagtattttgtaatggaagcctagaaaaacaaatatatttattaaatggtaggacacaatgttttaaaatactcccataacctagatgggagtttaaaaaacaaagtaaagcctgaaagctaaaaggggacctcaaggagtcaaagaactaagccttaaaatggtaagtcttcagaggaacctcagttttttcaagatttttttttcagagcaaaaacaatattaatctgttgtaaaagaaaaattggtatactatgaagtaaaatgctgaatctacatgaaccttcagaagaaaaaaacgtgggtttgtaataaaatttgcagtaatggtagaatgctttggattatattcttagattcccagagatctggtgttcatttgctttatatggaaattttagtgaaaagtttgaaaagcattgttttaagtgcatttgatgcttctcaaatattctttcatctatatggcatgctgaggcttttgctcagttgtgtctgattctttgtgaccccatggactatatagtccatggcattcgtcaggtcagaatactggagtgggtagctgttcccttctctaggggatcttcccaacccagggatcgaacccaggtctccctcattgcaggtggattctttcccagctgagccaccaaagaagcccttattctgttctaggcacttaaaaaactgccaagaataacagacatgaacaggttctactgccagccctgttcacatatgaataaacctccacctctagacaactctgatgtatgtctggtttgaaaaggaaccaccaatggagaatgttctcagaagctcaacctttctctctgtacatctctttcagctaatctcagctaagccaatgaggtgaagagtaactctttctggataaatgcttccttcttctcctccccagcttcacatcatttggataagggttcaggaacagaagcaaaaagggaaagacaccacaagcgtcagcctaccttaacatgcaggtatagtttcccgtgtcattgagaaagcgtgggccggaaccagagcacgtctttctccttactaat

SEQ ID NO: 48352 - DNA, 665 bp, Bovine  19866880612714
  misc_feature (1)..(1): n is a, c, g, or t
ncttaagcttttctatacatgcgttattactggacaaatctttctccctttctctaagccattcacccctccctctagctccagttctttatgatgagatgactcattaaacttccttcctagcagggagctgacacccaattaatgagctgacactgttctgtgtccgctctcactagtgcaataaggctttgtttacaaacacaggctgttgtgcctgttagagactgcaggttaaaatctccctgctgggccagtttgttcagaatcataaggcttctttaaacaatgtctttgtgcgttgaacatcagacattctgctttcagcaggatgcaagtcaccctaatggcaacatcctctttggcgggaaagggactaatgggacaaggttttggattgtaaataatataaacggtattattttattataaagttattctcaatctatctacaggtagataattatttatttttaagataaaatttcagatatgccgactttggttcttcaactaaatgcattgttaaatctagacttcatctgagtttttctccttctgtcagaattcaatctgcccttctccattgggaaacgcctttctaaattccagccccataaattaataagatagcatctcttctgtgaaatctttctcaaattttt

SEQ ID NO: 48353 - DNA, 1077 bp, Bovine  19866880645894
  misc_feature (1)..(1): n is a, c, g, or t
ntctaataaataacttgatacaacttgctgctaagtggcttcagtcgtgtccgactctgtgcgaccccatagacggctacccaccaggcttccccgttcctgggattctccaggcaagaacactggagtgggttgccatttctttctccaacttatacaacttctccaactgatacaactcaggtcattgcaaagaattggtgaggatatgtacaggcaaggtgatggcagcttggggcttactttaggatttaacttcaagaataatcactaaaaaagtttttaaaaatttaaagctttatatactttttaagtggttaaaaattgtttgaggacatcaaaaaccttgattggggatattagccaaagattaatatctgattacaaaactaaggaaagcagagttggtagatgtgctccttattccttcattctagaaaagtaagtcacatatgatcctaaaatgaactctttcagaacaacacccttcttcatcccaaaaccttagttgagtatctttatccccatcactagtccagaccagtacctgctattagtaacgtggttccagcaacaaagctgatgcggactttgatgtatggctcgtcagggaggaatttcacgcagtcaagtccaaggagcagagtaataaatccaaatccagctagaatatctgcagtaatcatcagcgcccgagttaccaccagcttcactagaagatcagagcatgtggtttcagcataatcagaggaaagagacatgttaatacatagaggtgcaccaaaggaaaaaaggcaactgcatacatcaacacatgcccagtgaatacaatcacactgtaaatgtgcatgaacttgaaaataaatacttttatttaatttttttataaaatccaaagtattataagactactgacattaattgtttaaacaaacattatttgtttaagcactgcttattatgatcctcttagcaaaatgcctggcatatggcagagactaaataactatttctctttttgcctcctgttttggaatgagtcttgttcacaagtattagctgaaagctatgttgaaa

SEQ ID NO: 48354 - DNA, 767 bp, Bovine  19866880808851
  misc_feature (1)..(1): n is a, c, g, or t
nttgggaataaaggtttgtccttgttaaaatgaacaccatctagtgatatcgcctcctccctccccactgtgcttcccccgtctgaacaactactcgatttaagaaggggactcaggatgaggaaggatgtggtttcctcccgcttggcagcacttcgtgtcagaatggaagcttgtgtctgtgcctggcacggatccgtggggccctcttaccagcccggtcgtgtctgtgaccagaacacgtgggaggtacacttccgtatagaaaaatctccccctggctgccagctctggattgttgtttttcaattgctaatgaatgcggtcttgcttagggcagacctcttggaagaactgagacacaccttgaaacaagtctgaatcagatcagacaagcttcccctgcaaaagaatccctctgcagttggcagcatgtgagaaaatgtctttgagagcattttcttcttgccatttcaaaggagagccgcttgcagcccaggatgacaggagtgcaaggctcctgcccccacccccattttcttttatttacatttttttaattggcttactactaatctgaaagttgtgctgttcagaattgataattgatttaataacagaattgggatagtacctctgttcttgaaaaaaggagtgttagaatgatagaaagtgtccaggagttgattaacagattgaatttgaatgaataggaagagacttaccaaaactgccagtgggtcattcagacgggtactgcgtgtaag

SEQ ID NO: 48355 - DNA, 840 bp, Bovine  19866880869607
  misc_feature (1)..(1): n is a, c, g, or t
ngaaaataggagtcattatattaaaattttgacacagttattttacagataattttgtttattatttttggttagtataaagcattttagcattaaggcacccaccctgtcaaagtgaaagagaaacctaaaaagtgtgtagagattgggttttcatctgtgacttaatctacattgctgtcacccttgttagttgagcctgaaataatcatctgctgattctaagcatatttttctttgcctagttttcaggcaggcttggaattggggatccaaattagaaattatcctatctgtttattaacttagagatcagtttcattttctagagaaagcaattaagaatatgatgtgccacagtaagagaggctgtctggaatctctttacggtcctcatcacttagaagaatagctacagaataaaatactgtgactataattttcactttaataagctttttcctgttcaataaatgaatgaggagtaatttttaaattaaatttgccccttcatgcagttacttttatttctacctcctcactacatacccatttgttcattagaatttgtgtccagatattacttataactggcatataggtaaaaagctatgacaaaaataatttacttgggatttcaagccataaattttacttcatcctggcaaaaaaagaagtcagaatggaaacagtgacttttaaaatataaaagttataatattttttttgaaatactgatagcatttaaaactggactttgaaattacatcataatagctaacacttttcataaaacattatcaagtcaatttccttggcaaaatcactaagcaataaata

SEQ ID NO: 48356 - DNA, 1613 bp, Bovine  19866881088216
  misc_feature (1)..(1): n is a, c, g, or t
nagatttttggtgatgtgtggccacagaggtgacaatgtgtatgaaacttgcatcctcctttaaaatgaccacacattctggatggcttgaacaatactggtctataccttttgtttcagtgtagcactcttataaatgttccatttcaaatgctgttagtaggtcaccctatttattaaatacttctatgatttttagactactgtactactgtgaaacttgtgacataggctaatatttgggataatagacatagtttgtcaggtgtggatataaatctcatctctgcaacctactagaaatatgatctgaacaagttaccaagacctctgtgattacccccatatatctgttatgttcaaaacagagtggaggtccttgatatgtaatttctcaataatattcaggtttcagtacttataaccccacagaggttttatcaggggccagatatgtgtagaatagtggtgaaagaaatagttaacagagttgttatacctctagcccttctgcattaaagatcacacaaccaaataaaaggacattgttcttgctagtgaactgtttcagctggttaccaacagaagggctaaacatcacagaaactagaatccagcttcatcatttgtctcttgagtaggaagagtagagcaggcacagtaagacatgagagttatacatttccctttactataaattcagagtatcatggactgcaaaccaagtctgaatctaggatttctagattttctgttcctcactaagaagaaaaagtgtctagataataaaacatttcctagtggaaataaaccaagacaatatgatgaagagtaagaagaacaaacttatctgccagaaattcaactctgatgaaaaaaaaaactaaaaaaaagtatttttaagtaggcagagttcagtgattaagagaccattctagagccaggctgttgtaatttaatcattatcctgccactttctggggcttcccaggtgccacaagtggtaaagaatctgcctgctaatgcaggagactcaagagacaagtgtttgatccctgggtcttcaggaagattccctggagaagggaatggcaacccactccagtattcttgcctggaaaattccatggacagaggagcctggcggactacagtccatgtggttgcaaagagttggacgtgactgagcatgcacatgctagatgcaccagttactcttttctagccaaaggatcttttatcttatttacacttgtctcagttttcttacctgtaatatggagatataaaaaaagcctatcttcctggttgattctgacaatattaacattgtaaaattgttataattttatgattgtgtcatatttttataaatattaaaagtgtgttattataaatatatttttgtgttaatattgtagaagtcttaaaacagttcctagtcgatagtcagcctacatatgcattagtattgtttaagcacttgagggtaataagtactctccttgcctttgtatttgtattgacaggatgggacttctgtggtgtgtaatgagtctgtacttctatgggatcctgcaaagccatgcctcaggtaagtgaatgtctcttaa

SEQ ID NO: 48357 - DNA, 5179 bp, Bovine  19866881094067
  misc_feature (1)..(1): n is a, c, g, or t
naattgcagtattatgaagaggcttagtagtactcttaggaacttactttgggaaacactattcttacaacatgcagttcagtcttctctttttacactccccttctgaggaccagaagcaatgaactattcagaatcaatccactaagtctccttaagaggcatatatttcaggcttttgctctttacttcctaagttgtaataaaatgctaaagtgaagcctgtttgttttttttttttaatcagttttaaatgaggtttaagtcctattgcaaaatgcaatagttttaaacttaacatttttaatttttttgtgtatatattaaaggctctaactttgacataggtccaaaatgattctgaatgggttgacttcatgtgatgaatcatccttattattatctagatcactgaaaaacattcatgaaaggattcattatctagggttctttgttaggtgagagacccaaagaaaatcttagacacaatatgttttaggagcaacagctcacacaagaaagctttatgatttttatttattgtaggaaaaaattgtaatatcaacatagaaatcatttcacatcaatttaagtaatagttttattcattttcattttagcaattgtggctagtggtatattaaaaacctgcttgagatattggcacagagtgttgaaaattatttttaaattatatttttgagaatattttatatcttactttacttacatgcaattagatgattgctatttataatgtttcattattatagataatgcttctaagaatatcgatagggacataattctctttctgttaagttacttgttcaagaaaaattccaaaagtattaggtcatatggtatgaccagtatttatgacttctgaactctgccatcaatgatttctaaaatggtctttacaattcaccaatgatatgtggttctaccagttttgttatatctctgagaacaggaaatattctttagttttcatttttctttacagatatggcactgtgcctcgttatcataatcatatgaaatttttaagtcacatatgggcattaaatactaaaaccataagacatcatatttttagtatcattatataaatggaaactcgcaagatttttcattcaagtttaattcatcactatgtgtcagaatgtgctaagtgatagagctctcgttgtcaatttctcctttttctttattcactggagggttacatttagacttcacacattcatctgctgagtgcatccattacctttctgtttcacattggctgctctgtcaacctcccctttggcatttctggcatgacagacataattgcgcttgagatcctcagcagtaactttcttgatgctcaaaagctgagttcttgtctcgtcttctgttactttcagaattacactaggagtaggaaaaagaaaatcaaagcattagtgagattcaagggccaaaggctgtatgtaaatcagacaagtagataataacagatctcccaggtgaggacagacagaatgtcaataagctgtgtgctcatgatcctgaagatacaaaaggagactagcctctggattctaatatcattctttaccatctatactacacacaattccaatatctagattcaacacccagcattagcatcatactacaggtcactctgcaaagcgaagggtctcctttcctcaaatatatgaggcaggatgcagcattgattcagtgagaggcttctgaggcctgacccctttgaattttgatcgaggttttgcacttactggttatgtactttgagcatggtaagtaatctttccaagtcttagttcctcctttgaaaaggaggaaactggcaatacctacatagtgcattgcaagtattaacttactcaagaattctgaggattgagtatgttaattcataagtattagaacaatgcatgcctacattctaagtcacttcagtcatgtctgactctttgcaaccctatggattttagcccgccaggctcctctgtctatgggattctccaggcaagaatactggagtgggttgctattcccttctccagggatcttcccgacccagggattgaacccatgtctcttatgactcctgcactggcaggtggattctttaccactagcgccacctgggaatcattagaacaatgcttaataaatattcatataagctattattatcatctcacagtaatagctgatgcatttcagggattcccaaaacttggattttggacacagatcgaacattttagttaaaatgctgaaacctcctagttatatcctaaagaaagaagaaacttctcagagcaagtaaactttgtgaaaataagtatatccaattctctgcaagtcagagatcaagtgctttgggtctaagatcaagactgaagatctctctgaactactgtgctcaaaaggaaaaaaaataaaaattctctctcttacagttgactgacatccaagttcttatgaggtttactgtcagtcatgaaatcttggttaagggctgtgatagagttaacctaagttgaactgcactgctcagctatgaacagtgacttgtgtctcagtaacagcaaggaggaacagtatgactgtcattactattcattcattatttttataagggttggaagcacaatgttcagaattcctgaaatggtcaataactctcctgtgcattcagtcacatctttcatcaattccttcagcaaaaactgctccaatttcaggaaactccttctgtatcattaaatatattctgtttcttgaaactacacctttgtatatgatgtaaaaaaaaatgattttttttctttttaccaggaacatacttttctttctttctccagtttatttctacttatccttcaaatctttatttaagccatgtatcatctgagacgtattacctaactccctaaagctaactggaacttccaactaaatcttcccaaatatccaatacttcccttttactgcatttatcacattgcactgacatctctgttgtatcattgttatacctgtaaaatctatgcagttaggaactaagtatcttgcatattaccctatgatacttcataatttctgtataaagtctgagtttactactagggaataaatatcttttaacttcttgaagttcaagtaacctaagatctatcagcacatagatgataaggtctaagttttcagaactactttgtcatgcagttagctgctcatttttatttattgttgcagtcttccttgccaaatcaagccaattcaaaaaatgtcatgtttatttatgtcgtgacccagcgtgttattttaaaagtgagttatattaccacctcacccacttaaaaaataaaatttaaagaacattaatgtttttagtcgatattaaaaattatcacttataaatgtgatatatgtgctatgaaaattaagaaaggagaggaaggagataggaaatacgtgctcactgggagataaggaactaacacaactatctgaggcacaaaaacataggcccagactccagacttgagaagcagaacagggccatgctggcaggctttcctctgtctacaactctaaatcccgaccttttcattcagataggagattcattccaactgctttcaagcgggtatcataaagataaaatcaccaggtagtatctggggcttggattgcaagtctgagaatcctgttttgggatagagcaactaaagacttgaaaaatgaggctgatttttgttactgacaggcaaaaattagaattttcatcaattagcataaaccagaaggcattaggttgaggaacaagggttagtcacccccttgtcagtgtccgtgatacctttcattaacagatacgtcaatagtggtgtcctctggcttttttccatcaatggtccaccaaatctcattgcgagagtccttcaggtaactaaaatagactttgcagggaatgagtagctcttctcctgaaaaaagcaagttaactcatgagtttgtaactatcacatggttatattggttgtattttgtgaataatcagaagttatgaaagttctatgtgcctgtaagcttacttctgactaattttcaagtggactaccataaggtaatgtaccatacttcaatacttcattgcaaaacaaacaaaccaggaaaaggacagcagctttttatataaaattattagaatgcccatcttttaatagagccgatatatgtcctaaaacgacagtatttgttcacaaaggctctgataacgtttcttttcttagccctaaacctccatggactgctcttgtcctttgttatttccctcaccaacaatgagagatggaggaatggttatccagatatttggtcctttgcccagagaagatgaggtgacgtcattgctgagaggactgaccaggcaggctgtatcttgaaatattcaagttatcacggttcagtcaatgagcttaaagacaacttacaaatagaaaggctatgctatccttctgagatggaacatggtgaagacagggggaatctctaggcaaaacatggtaataataattgtaacaatagcagcagactcactgaggactttgaatgattccctgtgctaaatgttttagctacttataaatagatacatttaattttaacaatacattatgaattattttttaaattaatgttttacagatgcaaaaattgaagcttaaatgctatcccaaggtcaaattgcaaataagtggcagaccaggatttcacccagactgaccttctgtttttgtttgcccagaacagttctgttttatgcttgctttcctagttagttattaatattgactgctttcattctcaaaaggtgtccaggttgagatgataaattatattgtcatcccaatttgaactgaggtttgtctcactgagtggtcatactctagcctctcttccaatgcaaggtttttatgccattctctagacagttgcctataacaatatgtacaaagataaagtgaccacggattcaggcatgcttttgtaaccataatatgacagacagaagaaaggcatttagatgattaatatgggtttaccctgatgccagaaagaatgttcatattaatatataaaacca

SEQ ID NO: 48358 - DNA, 1317 bp, Bovine  19866881127484
  misc_feature (1)..(1): n is a, c, g, or t
ntgggaaagatcccctggagaaggaaacggcaatccactccagtattcttgcctggaaaatcccatggacagaggagtctggcaggctacagtcaacaaacgtaaaattacttttaaagactcaacagtattctcatttttttttaatcctctatcaatggatgattatattgctttttgcagcattacctatttgaatagaagtgtgaaaaataaaattgtggatacgtctttatgcatttctctgattatttcctcaggatatatgtgtgcaaagttcattaaaaggtcaaagggaggcacgtttgtgtctttgaaacaaacagtcaaggtgtcttccacagaacctattccaggtacactcctacacacggtaccagaacaccacacctgggcattagatcaccatgtcctgtccagcactagacaggactgttccccttaattcttgctaatctaatgggtggaaagtgacatctcattgttggcttaatttgtatctatcttactcatgaatttgagcttctttttaggatgaacttgtttctatctttttgaactgcctgaacttctggttgaaaatcttttctcatttttcgaagaatatattttatattgaatggatttcttttgtgtgcaagagttccttgtgttgtgatggtgctaaccactcccatatacctatattttcccaagttttcatttgtcctttaatttataatattgtgatgctccaccaatgttgtcaatctttatgtaatcaaacatatcaaattttctttaatggccccatccttgatgattgatatatctagaacggcttttatttcaaccttgtgaaaatatttgcatatattttcttctagtacttttagggcttaatttattttttaacatttaaatatttatttcaactgagatttgtttggaagtaaggaatgaggtaaaaaaattaactttatttttatagaaattatccaaaattcctagcatttaaatacatcttttcactgactctggatgctaccttgggcatccgccagctgcagggctggcttcctttcttttctggatttctgttttcacttcaattttgtccttggagaatttcttaccaactcagcaattcattttaaaagacatttatttttaaatgcagaatttctagctgctttacaggaaaagggttgtttagcggatgtggtccaccatactgagagaaactgaaatcttctccaatctatttctgatgtgctggttagcatgaacattcaataaatagaaaatgtcagggacctgcacaagtccttccaataa

SEQ ID NO: 48359 - DNA, 1101 bp, Bovine  19866881140485
  misc_feature (1)..(1): n is a, c, g, or t
ngaggaaatatcagagttggccaaaggtatagagggagtcaagattgtgtaagatagaggtggggaatggcaaccaggggctccaaaagagctaggatgagaaatataggactagatcatggagactttaaatatcagaataaagagtctggataagcctttccctttaggaaatacaaatgattagcagatttgatcagtatctaatctggagatgagactggctggaggaaatgttcagtgaaatatttgcagtcattaacatctgaatccttaaaaatgactacatgtacttcagcatgttattaataagtaagcatgtgtttacttggtttttattcagatattagacactgtaataattaaccacctttctaataggatgatgaaaataattgattgtaaatataccaaagtgtctaaaaaaatatttattttcctatcgcataaatttgtcagaaattctcttaaatgaagaatgtgaaagaaaataaaagattggctactgcttgccctcaggaaaaatttatgctccatggagtctgcattccactgtggctgaggaaaggaacactttgtctttgtaatttagactataatttgtgttctgatagggtgacactaagtggctgaaaaaggaaaggcttagtcaatagaaatcaaaataagaacaaaaaattgcactcatggtgacatttatgactcccaggtgacagcattaggaaattatacatatagtaacttgaaatcattaaaaaaaatcaacagcaagcaatttctctcctttggagtagctcaactctcatccattcttataaatggatgacaaaagacaatgcaaattgaatcatataagaagaattggtaaaaaagattttttccttttaaataaatgatataagtattttgctactgcatttcctatctcaaaggtatatttactaggtagcattttttcatttgtgctgttaattgttgttgtcatgtctgactctttgcagccccatggactgcagcacacaggcttccttagtccgtcaccatctcctgggagtttgctcaaactcatggccattggagttggtaatgccatccaaccat

SEQ ID NO: 48360 - DNA, 950 bp, Bovine  19866881210653
  misc_feature (1)..(1): n is a, c, g, or t
ncctcatacttcctctgaatatcaaatcatattgtatatatttgaaagtgcttgataaatggtaaggtgttgcatacacatgaggtaccatgttgacctctaaaataattaattaattcattaattaatgcatttattcttttgttattttaacaaaccttttctgaataccttttcaatgcttccatcacttccctaaatactatgagaatatgaagtgctactttgctatttagatttagagatatatttggcatatatttcttcgttatatcatttgcaagacaatctttccttaacaattacttttataattttctgcagcacagaaggacattagcaattcaagagactgaattttagcccacagaagtcacttagttattgtccttagaagaacctctgcatttcactgttacatttgattgcacctattggaataaaagtagatccctgaatgctggtatgtgctgacctagttaaccatacatataaaggacagctttttcattggaatggattcaagataagcagcaaatatttatgttccactaaagtattgttccaaaactgacagcaatggctcccaaaaaataggaagagtatctgagttcgaggctttgctttattcctcagaactgtaactataactttaccatatagcatattttgaaattttagagtctaatgaaggtctccaagtgaagctacacacctttgtatggagaagaaagctttttcacccaataaaatccaagataaagttaactaacaagcacattgttgataggttggcattttgtaatgatcattactggtcctacatttggactaaactccaaagtgtttcagataattgttacaaattatctgaattagctgtaaatttgaaattataaagcattattttactatcaaacaatttctcagaaaaaatacataatttcaat

SEQ ID NO: 48361 - DNA, 1239 bp, Bovine  19866881329343
  misc_feature (1)..(1): n is a, c, g, or t
naaaaaaagacagttatcaaagcagtaagtgatattaattagggaattttttctctcttattctcaattttccaagatttagaataatatgatacatatcacatgggagtgctatgaaagttagtaaaattagagaaagagtgttccctagccttttaatcagtggttcaatctagattcagatggcttaggtttaaatctaggttgagcaatccttagcaagtcgctaatgtgcttctgcctgtttcctcattaaagaagatttcaatagcatctacataaaatgaggtcatgcatgtacctcagtacatgatagttgttattattgccatagtaacaataatcattacttccctgaactgaaattttaaagacatcatttactcccttcaacttttaaatgactagtacaataatatgaattggaatttctaagtggtaacatgtcatcatagattttaacttaaagacaggttaatccaatcagttttgctttgtatgagaaaataaaaatgtattcaagttttctagggaattaatgtaactggtaaatatttgacaatagtaaagaaaatgatgttgggtgattgtatttttttttaattttattttatttttaaactttacataattgtattagttttgccaaatatgaaaatgaatctgccacaggtatacatgtgttccccatcctgaaccctcctccctcctccctccccataccatccctctgattgtattttcaaatactatttccccagaaattgctgtcatcagatgagttctccaaagcatgtagaaaattcagaaaggggaagaggaaacccaaagagcaaagatattttcctcctgagattccccatcataaaaatgccaagagaagccttgctagtgaatttgctaactgtggacaacatggaccccctgtggatccctgggttcttcagacactggggttaaaagacctcaacaccattgatgacacctcatcagctaactacagtgccctctcgtctcatgccagacagaccactagcacatttccccagtttctggatgaggcaattgattatcccaatgcccctgggggaagatctgccaattgactatggaggtgatagaactacccccttgccaggcactgccaaccacagtgaagattttcacttcctttctcaactttcaaatcctccaggaggactacaaactcttccttactatacttctggatgtgtcacc

SEQ ID NO: 48362 - DNA, 1403 bp, Bovine  19866881331427
  misc_feature (1)..(1): n is a, c, g, or t
naatcccattttcactatttggcaagtccaaaaaaagcaagttatttaggctgcaaaatataggagtctttgggctttcttaaacctttccctatcattccttcttctacagagttccagcccataatgccttgcaactatgagtactgggaaagggcttccgatttaccagcaaagcagaagagcagaacttaccctgtgcctgtggtgcctgttggggctctctgttgtccaggagaccagcagcccagaaagagacccaagtctccgtggaaacgtcaacactagattctgacgttgtagcggaatacggacaattatagctctggcctcctacaaagtactggtcttggcaaggcagaagggtgttctgtaaaattcagtatgtaggttggttgggggtggggaggttgtcccaagagatgcggtggtgggcattcagagggggaaaagagtgggagaaagaagcagaaaatacatgcagtgaataaaaaccagtaacgatgctaagtatagatcccagattaattttgagtgatccaaatataattactagaaaggaatcagcttcgtggttcatccagtccttcccatagatcctctcagcatagaacaggttagtattggatggactaaatttgtaaatatccaggagtattctctgttgctatgcctcagtcatctaacaggcgggtacccaagatctaagcaaaagaaattctacttaacgaatgaatcgtgtaagaactatttgactctttcttgcaaatatcttagttatatttctaataactttaaaaaactttgaatgctagggctggaatggacagaacataccatatactctaacttttaaattttagtttctgaatcataaacttgctccattcctcccttcctctttcctctcttcctctgactttaaatgctattagatcttcttgaaataggttagttaggaaagacagcaagctctatgtaggtctctccatcaccaggtctcaatgcctttccaaagttatcttgcaccactaactgtctggcatgtattctctactgtgttctgagccagtgaacaccctcctgcccctgcctcctcaaacctcaaacacacagtctttccaaatgtccagtcaggagcaggtatgcagcctccctgggttaatttgtacaacagaccattcctaattatttgtcaatgtttaatcaggtaaaagccattcatttcatcagagcctagctttggacaaactctttttgaccacgacaagtcttttgttgacttgtgaactttcttgggcatagcataaacagaaagaaaacaaataagtagaggaaaaaagaaagttaagtcaattaagtcatactttgttaacattcccaataagttaagtttttgaaaa

SEQ ID NO: 48363 - DNA, 1375 bp, Bovine  19866881656621
  misc_feature (1)..(1): n is a, c, g, or t
nctctttgtttcaatgttgtaaattaaataaagtacatttaagaaataaataaataatgtagattaagtaaaatctcccatttttccccacttcaggtactaagtacctacaggaaaataggggaccctaacttgacattctgcatctcaaagactgctagaccttggattctaccatgctaagtataatcatatttttattcattaaacaaatgtgtcgatagccttcaacatagacactccagatgttgtatcatatgctgattccatttatgataccaatgttctgggaaggatttgtagagaaattttgcatattattttatactcaaaactgaatctttacaaaaaaaagggtcttccttaacttactttccagaaccaacttcaagtgacacttggatgttttatggagtcaagagtactttgaaagaatactctcattaaaaatattgcactgactgaagccaaccttccaatgggtcagagacttcccttttgactcatgaataattatttcatgtataataatattagtttttaaaaaatagcatcatcttaatttttgtcatacttgagcattttcaaaatccttctctacacgtaaaatgatagattctgtctcgtcacctggtctggtctcctgggcatttcctattcaaaggttttgggtcatattgcaaagcaagggaaattcaaaatctcactcagctgctaagattacttctggcaaaccagaggcaatatactcgcccatatccagagactgaatactccaaaagcaatccatccctcctcttcttccaaacttcattccatctctcattagaaactttagccaggagataaataattttattaaagtaatatacttaactttctgaaggtattgttgcatgttgagagttaaacttaaccaaaatgagtctcaaatgttgggatatatgaaagagttactgttgaatgtcctattcctctattttttcccccacatcattcctgatatacccacaagaaaacaagactgacttccacactgaacatctgaaagactgccagacctcagattctatcagacaaaattggaaattctctagagatctgcttctgtattatttcacaagagcagaaaagaacagatgaaaacagcagcttatcctcagcatcccattttaatcagcaaaacttacaaccctttccttggaagattatgacataattgttgaaggctttctgaaaagacttagagacattaaaaatcagagagtaaaattttttttcatttattaatttttccacaagtggcattaagtcttaagagggtctctcatctgacattttaagatcaatgaagccaaattatatatttatttat

SEQ ID NO: 48364 - DNA, 891 bp, Bovine  19866881706225
  misc_feature (1)..(1): n is a, c, g, or t
ntcctcaaccttgtccctgaaacacaaagataacgttccaagtcttcctgggaacccacgtaagccaaaactagagaacactgaagaaaatcttctcactctgtatctaaagtgttaaagaaaatccccttatgaactaacactgaggaggtctgtgtgagtctgtgtccctgttgagaaaattctatggcttctttcactgatttttggacaccaggatcatcctgacagatggtaatgtgtacccaccagtcccatagtctgggatgtgacctcagtcaaccagatcactctggatggagggaaaaggtgggggagttgtggcaataattctttatatgtgcatttgacatttggtgactttattgcaaatagagtaagaccacgcaatccccctctcatcagaatgagagtaaggtggaattttatagggctattatgcactgatctataaaccactaaagactcaagtgaccctaatttcaacaagtatgccttatcttcactatacagctacttagggaaaaaaaaaaattgttctcacagaaaggtgctcgggcagtacttaatacaagattttaaaaagctttgacaagaaaatagagcagggagccagaacatatactaaaaaaacattgacaaagtacaagaggggcatttcatggctgcactataagccttttaggggtgttttttccaaggcaaagctaataaacagtacctgaatattcactatgtggaccttctgtattaaatgctaaaggatgaaacagattttactaatgatatatctcagacatcatgaaaatcacctagcagtgatctccagcatacactttgctaatttagccttgtagctaaaagcttacacttttagtcaaaagttccaat

SEQ ID NO: 48365 - DNA, 1637 bp, Bovine  19866881790437
  misc_feature (1)..(1): n is a, c, g, or t
nattacaagtaggatgtttatgattaacaagtgggaggtttatgattacagcttcaacatcattactcactattagtctgttcagattttctgtttctttatgattcagtctttccaaattctatgtttctgggaattcatctatttcatctaggttatccaaattttgtgggtatacttttcatattagtatgaatctttgaatttcttaagttttaatgtctcctgttttattcacattcttgtttatttgagtctttccactctctctctctctttttttttttttgattaagctagctaaagggttatcaatacacttccccttttcaaaaaactaacacttatatttgctaatattttctattgtttttctagtttctattttatcttgaaatactaaaaattcacttttaaaagttaaaacaatatatgttgaagttgtaggctcaagtcaagcatcaaccaccacaaaagttaaaacctatttgaactccgcagacccagttagatttcacatgggaatgaccctgtttaactttaaaactaatatatatgcaatgatttcaatatcattatcaacacaaggaatctgagcttccatcttgcactcagactaaagtcaccagcagggtaaacccagagtaaacaaaaacagttttctaggcgtgcctcatataatactagacttaagcaaaatgtgtgtgtgtgtgtgtgtgtgtgtatgttcgtgcgctcatgctcagttgtgtctgactctttgcaaccccatggactttagccagccagggtcctgtgtccatagaattttccaagcaagaatactagagtgggaagatgtctgggtattaattccaactcatctttagacaggttatcttccttgtcaaggccacagtttattctgatgtaaaataagtgggttaaaataaaatttgggtactgaaaatatgaccagtaggacaaatatagtttgtctatcccatggtagtgaatcacctgatatttttaggacaccttagaagtcttaatttgctgttagagctcatctaatatgggagtttgaactgattaagcatttaaaccctaaactactgcttctggaaaatgagaaaaaaagagaaagaactgcaaaaactttccccaggaattatcatctctgcaatgagagacatgttttcatctctgcttgccctgcctgatgagacttatcccacaaaaagaggttttaaatgtcacttttgtttcatagtataagcaatatgtcaattttgtactgaagaggcagacaagcagtggtcagattagagaaataaagagccacttatcctaaagttccaatagaatgacattatatattagttaaagcattttaccatttgtaatttggacattaaattatataagtgagtggaaataatttatcagacataataataacacaatctttggcagatttttaaaattaatctccctgtcatatctcataaacttaaaaatatgaaatattttttaaacaattcttaactaaagtgaggagggtgattcattttggacatttactttgcatcttacattttaaggtcttagaacattcaatttcatgggaattactttgtcccttaaaattcaggtat

SEQ ID NO: 48366 - DNA, 1763 bp, Bovine  19866880482762
  misc_feature (1)..(1): n is a, c, g, or t
naaaatacaatgaataccatatcacaaaattgggtataactaactttataaatggaaagacattcttggatatctcatagttgactcaggctatttctagcatttgattcaccaaacaacatatgaatcacatatgttattgaaaataaattcaaatatatcattggaaagatgttttaatattctgacagagtcttcaaccaatgcatggatgttatttaattcattgtgatttttaacaatgaagattattaaataactttgatcttttgtttggacttatttggaggtaaaaatatcatgtcagatactcatttattggagttcatttactatgaattaaaagttaatgatgtagcaatatcaagcaaatattgagaaagttcactcatgcctaaatgttagcttacttatttgtaatattcacaacaataaattgttgagtagaagaaacaaagatatgagatgtcttttttaaagtgaggcataataataactgcacaacttatgtgtgtgtgtgtgtgagctcagtttcatccatctctttgtgaccccatggactatagccctccaggctcctctgacaatggaattttccaggcaagaatactggagtaggttgccatttcctactccaggagatgttcagtacccagggattgaatctgagtcttccgtgtctactgtgtctcctgcattggcaggcagattctttaccactgagccttctgggaaacccatagcttatgttgaagtgcaagtgttaatcactcagtcatgtccaactctttgtgaccccacagactgtaccctggcaggctcctccctccatgagaggattgttctctaggcaacaattgcctagattgttctctaggcaacaatcctggagtaggtagccattcccttctccaggatatcttcctgacacagggatcaaacccaggtctgctccattgcaggcagattcttaaccatctgagccactaggaaagcctgcagcttattttaggactcaagtaagtttacgttcaacaacttagtttcagagtcttgctgctgcccctatattcttttgactgagccataccttttggaattccagctgaagcatgatgcttatattttctccaaagtcaacacaaatgatacagattactgttactttctccttttatattgtgaaataccatcaataactattttggtgtgaaataattttcatttcctaaaggaaagtgatcatttatgtaaacagtagtataaaaatatgtaaacttttttctttagttcagtcgctcagtcatatccgactctttgcaaccccatggactgcagcatgccaggcttccctgtccatcaccaactcctggagcttgctcaaactcatgtacgtcaagtcggtgatgcatataaccatcacatcctctgtcatcccctttttctgctgccttctatctttcccagcatcagggtcttttccagtgagtcagttcttcacatcaggtggccagatattggggcttcagcttcagcatcagtccttccaatgaacacccaggactgatctcctttaggatggactgggtggatctccttgcagtccaagggactctcaagagtcttctccaaaaccacagttcaaaagcatcaattcttcagtgctcagctttctttatggtccaactctcacatccatacgtgactactggtaaaaccgtagctttgactagatggaccctggtcgacaaagtctgcttttt

SEQ ID NO: 48367 - DNA, 1524 bp, Bovine  19866880553415
  misc_feature (1)..(1): n is a, c, g, or t
nacacctgttccttacatactgtgtataactgctttcacagtgcaatagcagagttgggtagttgagaccaagactgcatgatccataaaataaaaaaataatttttatctggccctttccagaagaatctcatcaactcctgttctaggtaatggaggtctttctgttcatatgctaaaatccttttcatttattttcatcattagtagaatcctttgtaaaatactttaggtggttctttcatagacaaaagataacagagttatctttttggtttctgcagcattttacaaataaaattaaacaaatgccttattttctttttttctaaggaaaaatatgattgatctgtgctgagatgactccagcattgctgtaaacttaaactatgatacgaggtttgcagtacaggaatgactacaggaaagctctttggtgctcacccatatccggtttgactctcctcctggcacaaggaaggattatgcttgcctgcctccaccatgcatgttgacggggttagacatttagttctactcagtggtagacgtgtgtatgtgtcacttttgggcaaaaacacttaactgcccagagggaggcccacagggataactatgccctaacccagccctcagtgataatgtgttgagagagccaagtgtacaaatatgcagtagcctacgtcagtgagactccatgtagagatcggtagcctaagacagctgcccagatcaggagcagaccgtatgtaaggaatcatctcttgtagtgttaaattcctgagattttggtagtgtttgttactgcagtgtaacttatcctatccagactaacgcaatggcctatggaatgtttgtgagcagaagaatgctttcctccatgttatagcattccagacccacatactttagagcatttcaatatttgaaactttatattttctctcttcaatacaaggctgtcattttaagccattatcagtatgttccacattcacattcacttataatttgttgctcctaatcttctgtaagctaataaaacagatatttataatctctataatcatttctgaagtaaaatgaattgtctctgagggaagtccttgaggaaatttgtgatcaaaatgtttcagtagcacaggcagttcctcagatatccattttgatgattcagaggtctcttttcacttccttcctttttttgagtgatgttctagatcagagaggttatcaaccagtaattttcagataagacatgaatagattaccatatgtttaacaaaacttcatgggattgttctggaaatttccagatttatcttaggtagctctgatatatatatatatatttttttttttttttttaaattatttttctacgtcctcaccttacgtatctggcaggcttctcaaaatacacttatcaccctcccataacacctatttcaataacattttctattggccatgaattcatctatggcaaaactctggtggcttctttgattcttcccttatcat

SEQ ID NO: 48368 - DNA, 1660 bp, Bovine  19866880563731
  misc_feature (1)..(1): n is a, c, g, or t
ntttagaattgaaatatcctaatcaaatattatctgtagactgtaccattagaatacaaagatgctcttctgaaatgggaaatactgtttcaagaaacagcaagaataaaaaattctatgcctatgaaaaaatgcattcctgaatacagagagcatatagtagcaaagattttctcacttgattgcacctaggatggacagtcaggctaattcaatgcgagcatagtcttagatggcttcccggggggctcagtggtaaagaatctgcctgcaatgcaggagacacaggttcaatccccgagtcggaaagataccctgcaagaggaaatagccacccactctaggataactgcctggagaatcccatggacagaggagcctagcaggctatagatcatggggtctcaaaagagtcagaaacgacttagcgactaagcatacgcacacacacacagtcttagataggaggtgacagactccaactaacagacctactctattccacagcctgtttttgtaaataaagttttatttatttatagagcacaggcatgttcatttgtttatgtatgctataatggaataattaagaatctaattgtatggcttctaatgcataaatttttactatctgatgtttagcagaaaaatgtttcccatttctgttcagtggaaaaccagttatatttgtgtatgtgtgcacacgtgtatatatgtgtgtttttctttgtgtgtatgtaggatttaaagagagagtgttatgcccagaaataactgaggcttttcagggagagttcaatgtgtacggcccaaagaatctttgaatattatataatgagatttgagctaattaatgtgcaaacttgagtctaactgttaacataatctaataactctacacatgataatgctttgggaaattgggattacatacttataaacaaataaagagaaaaatcaatgattcttagcctctcacaacagattctactttgtagggagctcttttagagagcttcactgtgattttttattattaccatgaataaaggttcaaggtgttaccacacatttgatcaaatattaataaatgtgcttggagagagtgaatgtcgaccagcaaaatagaggaaaaatgtcatctggacctggcagagaaactttgcaggaagccagcagtggagattgctctaggaggcagatgagagattatttttcacaactgtagttgagtgaaatgaaaatgtctagttttgtctctctatggcaaaggctagggaatgatccatcttgtcagcacctgaatgctattcttctggcggactttaattacataggctagacagcttgtgagggaaaaaaaaaacgttgagaatctctattctggggtaaatttcctaagcagtgtgtgagaggtgtacgcagaaatcctgttgacaaaatattttgtgcaagtgcctcccacacacagctttaaaatgctacccctgtgtgttttccattcctgctgctattcaagtaacaaatgtctgcagcatcttaatctgtttctttctctcccttgccccatgactcctccaagaaacattagcaactattgcattcatccccttatgtcatttcatgtaattttacaatgattttagaattatattgaatt

SEQ ID NO: 48369 - DNA, 1923 bp, Bovine  19866880595809
  misc_feature (1)..(1): n is a, c, g, or t
natacatatattttcataaattataggtaaaattttattataatatgttggatattataataccatatatctctaatatgtctcttaaaaaagagacttaaaaagagtaggaagaaataaagacaagaatattatctgaagtagaaattctcaagtttggtctcccaaccagtagcatcagcatcacctggtgatttgtgaaaatgcaaattcccagaccttctgaagcagaaatgctggagacgaggtttagcaatttgtaattttaaggccctcctggtgatcccaatgtacattacagtttaagaacctctgatctaataaaattatgtaaattattgtacagcctgagctataaagctaaattgtgttggacatttaacactgaacccaagttcacaggagcttgactgattatagaccaaataatctacatttttctctgcatcagagttaggacttgtcattttgaggcctcactagactcaaaattactacagtatgaattcaaatccagatatgtcttaacacaagacttaacacactccacacaacatcattctctgtctctgccaacattcaactctgcacacacacacacacaaaggccagaagaaagtcacttgcctaaactgagcttttaccaaatcttaagctgtgtgtgtgtgtgtgtgtgtgtgtgtgtgttagttgcttagttgtgtccaactctttgcaaccccatagaacacagccccaccaggcccctctgtccatgggattctccaggcaagaacactggagttggttgccatttccttcttcaaaaggaactatagaaagaaagaaagtgaagtcgctcagtcgtgtccgactcattgagaccccatggactgtagcctaccaggctcccccatccatggaattttccaggcaagagtactggagtgggttgccatttccttctccacttaggcgctatacatttcagtaactctaatccatgtacatgaagatgagatgtgaagaaacccaagttcagagaggttaagtatagtcatcaaagtcatgtagccagcaagggcagagccaggattccactctaactcttcctgaatccacagtccaaacatatgttcctcagtatcatatacttctaatatgtacaccacaagaattcaataaaagtttattgggtgaacagtgagtgaaggaatgacctgaatttctttgttatggcatttccatggcttccttcagcagacatgttccaagtagcttccagaaactgcaaagacacacagaccaacatgacgattcacttaatgtggaactcagaaagatactagagccactgaggaagtcactgacatcctccaggagaaggatttccgtcactccataatctcaagctgtgtgtttctcactgctctctgaaaacaatgaacatacacataacagaaaagtgtataactttttcaatgaaaatgtgaattttaataccttaaaaagtaaattataataatgtgaagcattcctggttcatttaacttaccttccagataacttctcagggaaacttaagaattcaatataattctaaaatcattgtaaaattacatgaaatgacataaggtgatgaatgcaatagttgctaatgtttcttggaggagtcatggggcaagggagagaaagaaacagattaagatgctgcagacatttgttacttgaatagcagcaggaatggaaaacacacaggggtagcattttaaagctgtgtgtgggaggcacttgcacaaaatattttgtcaacaggatttttgcgtacacctctcacacactgcttaggaaatttaccccagaatagagattctcaacgtttttttttttttttttttccctcacaagctgtccagcctatgtaattaaagtccgccagaagaa

SEQ ID NO: 48370 - DNA, 1720 bp, Bovine  19866880637145
  misc_feature (1)..(1): n is a, c, g, or t
natataaaattattcatagaaattttatttatggtagtcaagaactagaaacatttcaaatatcaatcagtaagtaaatggaataacaaactgtgggggtattcatacaacagagtatactcagcaacgacaagggacaaactactgatacatgcaatgacatggagaaaacgaagaaaacaagcaccactgccaaatatatatatatacacatatgatacatgtatagaatatatattaatatatattacgtatatatttcaggtatgaacagagtccaacacaagaaaattatatcttaatttattcacatattccaggtgtttttgcatcatgtaaaactagaaaggctttaataatatggatgatctggaaggcatagtgctttctaggtgaaataagtcagatggagagtgacaagttctgtatgttatcatttatatgtggaacctaaaaaatgaatgaatgtaacaaaacagaaatagactcacagacatagagaagaaactagtgattaccattgggggttgaggagagggacaaaataaggagaggggattaagaggtacaaactactacatatgtaaaataaacaagctaattgtacagcatagaaaatatagtcaacattttctagtaactttaaatggagtatgaactaaatatattaaatcagtctgctgtacacctgaaactaatatgaaatgaactatacctcgattaaaaaaaaaaaactgtgaaggctttgctcacatgtttactgtgacacaatcaaaaagtcccttggtatatattcttctacctcacaattcacatcagttattaataccactttatatcatgtaccacccacctctttctgatgcttttctcactcactgtttgcgtcttacaaaacttctcatagtacagatctgggagtcaaacacttcctgttctctcctgtttaaccaagtccaaagggaagcacccaaattagccaagatgctcatttcccaccaatgctgacaaagatgtctgccactgagaagcagctcagctactcaggtgggaaatactgctacagagcagacagctgctctcaatgccagaacaaacaggtgcagattttattgatgcaaaagaagtgaaataaacaagacaaaatagagatccactcacaaatacagattttctagagtaaaagcagggaagtggaccttcagagtagataacaaagtgccctttgctgatcaagttcaaagtcacattccatgattttagagttcttatggcatgtctgacacatactacagtttcattgccattaggttattttctaataacagaaaaatgcttacaagaaagaggtacagattcataaaaccttttcattattttgggatagagaggtggtaagttgagaaaaaaaaaaggccaaggcattttacaccatctctccagtgatagggtgcttcccaggtggctccagtggtaaataatcctcttaccaatgcaggagacaagacagaagaggcacaggtttgatccctgggttgggaagatcccctggaggaggaaatggcacttcactccagtattcttgccagcagaatccatggacagaggagcctggcaggctacagtccatgggggttgtaaagagttggatagaaactgagcatctgagcatatcaagtgatagaacctgtgtatgtatatctttaccccttggtatgaa

SEQ ID NO: 48371 - DNA, 798 bp, Bovine  19866880670223
  misc_feature (1)..(1): n is a, c, g, or t
ntaccgttcccagggtaagaagaccagggcagtcgctgcctttgccagatgcgcagtcttcagtcttcacaatgcacactctccccaagggaaatgtggagagaaagccaaactcttgcaacttgatgcaaagtgatttgggttccattacaacatctctcagtaaaaggctattcaggcttagagtaaagagtccacacttattttctcccagaaaatgaggttgttatataaaacaccagacatggaatcagagcttctggaaatcactctaaaccatgtgatttaatcttaacttccttaaaggcttatcaggaaaaaggagatgacatggtttagttatatacagtcttaaaattgctaccttgtttggggcacacttcaaaactcaagaacattttaaataaattttaaaaattacatatataataaaataaagggtgttttatttttctttttagatgaattaatgctaatctgggtttttcagaatgtgtttcttagatgaactagccagaaatgttatgcctttcttctgggcaagttagattcattttgtattacaaaaaaggagtgttggagtggacttcttgttaaaaaagacctgagttctcatttgactcttgtgaacttggaaagatacatataactcctttgtctttcacctttaaatggaaatatggatatttcttacctctcagaattattataggaatttaacagcatacttaagatatttagaaaggattaacacaaaacctattttcagtattttcccaagtgtgttacccagcaaag

SEQ ID NO: 48372 - DNA, 1094 bp, Bovine  19866880671850
  misc_feature (1)..(1): n is a, c, g, or t
ngaggagaaaaatattctgactacaacacagctgctccttagatttatctctaagcacagccccctttttagactcactgctcggtcctattgagaatgtaggtgagtgaaggaagggagctgggttttgtataaaacacagaaaatcttgtttcacttaataagtcctgcctctctttaagcaactctccacagaagcctgcaactgtaacaaaaacacacttctcacttacagcttataacactttagtcttggaatgaagaaatcagaccttaacaaggcccgctccagcccttacagacttcagcatcaggctgcaccaacagagcatcagactggcaagtgccggccacaccctgcagcctcaaactgcagaactctacagaagccacaaaggttcctggaaatgcccggcaagtgtagagacacacagcaatggtgactcaggcaggagacaagtggaatatcagtagtgtgtgcatgcacgctaagccacttcagttgcgtctgactctatgcaaccatatggacagcagcctgccaggctcctctttccttgggattctccaggcaagaatactggagtaggttgctgtgccctcctccaggggaccctccctacctagggatcaaaactgcatctcttaagtctcctaaactggcaggcaggttctttaccaccaatgccacctgtagagcccatcagtagtaccacaaggtaactaaccaaactgatgacatcttcttgaacatacttgaaatatctgagaactccccaaatatatataactccctaaagtactctatgatctagttttcctgagtaggtagatcgaggctcatctctataaaatatcaagaataacagcatgctagttttcccactaatccaaactaaggacatgatcctgttacaggaagaaagtcagccatcgctgactcatggccagagattagtggaggtgctagctccttgcacataaatcacattattcaagaaaactagagaataatgttgcttcaggatttctacatttagcatttcctgttttaatacttcttaatttctattctgtatttgtaaacagcttta

SEQ ID NO: 48373 - DNA, 903 bp, Bovine  19866880683783
  misc_feature (1)..(1): n is a, c, g, or t
ncattttaatttttattggagtatggtttgtttgctcatttttgtttttaagacagggagcaatagaactcgagagcagagattcagaaaacagaattctctattccatcacttacccttagacaagtgaagttcagagaggggatgtgatttgcccaagacaatccctgtcttcccaggagagctccttttccaccttttttttttttttttttggcttccttgcttaaccatcacagctctgtctaatcagttttctcattagtcggttttttagaagttgtactttaattacattttccaggtaaataagagcaaaagcaaaaaataccttgtaaatgaagctgtatcttatttcttctagctactttgcttaatgacctaaatgcatcatccctttggtcagggtattgatttatcaaggaagagggtgttattgaaaaggagtgagtcagagcatccacgcagggagatgttgctctcaacacactaccagagagatgctgggggttgggggggcagggggggagggagaggcagactgcaagttagggaaaaacaaagacctttttatatttaaggtacagaaagaaaaaattacggtctccaatctgctcactacacccagactagaaagtaggccaaagctaaggggtccctgctgggtcttgtccttttaaacaaatcctagccacactcgggactggcccgagctcccggattggcactgattttgatgaagctgagtatcctgccttcttatggctgccttaacaagtgaccacaagcttggcagcttgcaataacataaatgtattctctcattgctttagaggccagaagttcaaaatccaagtatcagcaggggttggttccttctggaggcattgcgggagaaactat

SEQ ID NO: 48374 - DNA, 780 bp, Bovine  19866880688090
  misc_feature (1)..(1): n is a, c, g, or t
ntcccctcccgtccaggctgccgcataacattgaacagagttccatgtgctgtacagtaggtgcttgttggttatacattttaaatacagcagtgtatacatgtcaatcccagactcccttactatcccatccgtgcccctggcaacaataagctcattctctgagtctgtgagtctctgttttgtaagtaagttcatttatatcatttcttttagattccacatataagggatgttctatgatattaaatttatttttgatatttgaaaacaatggtattcttttgttattcagaaatggccagaaaagagatagaagtggcttgagaagacagagaagaaggacctggtagaatggtttgagggcagcagtagaaataaaaaataaaaccacctttattgtttccttcttactacagctcattcaacaagcagaagctagaaaggtcagagcagtaaacatttctacgcatgcagtgacatagagcttaagggaaatgggtgctgtaactgggtacatttcaattttacaaaactcatttttaaatcagttgtgaacatttaatgccttcctgtgtgttttcagcttactaagttatcctgccaagaaaaagttgttgagaatcactgtggaagtgaataggaagcatggaattgagagggatattgagactgggcatagattttaaaaatcaccagcacagaggtggttgaagatgaccgtatttgcctgtctcttgacctgttttcagttattggctttatttatttacttatatt

SEQ ID NO: 48375 - DNA, 2774 bp, Bovine  19866880733959
  misc_feature (1)..(1): n is a, c, g, or t
ngtacaatacatttatgttcatttttaagataaggtgactgagagccacacaaatttgacttgcctaaatgttcatagctgctgcatagcaggaaaagtcaagaagctgtgtatcctaccttctgttatagcagtggctctaaactttacaggtttcaggaccacattctacttttaaaataaaattttagaaccttaaagagcttttgtttatgtggatttcatctaccaatattgtgtatgaaatttaaactgagatttccaaaagtacgttatgtattagttaagaacaattaattacccattgcatgacaacataacactttaatgaaaatagttgttttctaaaccagaaagaggcagtaagaagagtgacattgtttcctatttttgcagatttcttcattccctggtttttcctcaaaatgtcaaccttttatgaaagataacaagaaagttaggagtgaggcctttaacccagttcaaatgtagttcctcctcctttttcatttttttttcccgccatagggtatgtttatccctacttccaaaaccgctataagtgcttgttctaacctttagcgacgtattgtctcaggtccagccatcatatctgatgattattgagtttagtggcttttggcaattagcccaaagaagtcctaccattctgccacactgtgcccatgatagtttgcaggacccttggagtaaaaaactagaaagccagttctgaactcaatttgtgtgtagataaaacaccaaaaatatttgggctatccattatgtgtcctcaatcaaccatcaagcgagatcagatgtttatgacactcagatgtaagctctgttttctgtcattgacaacagccagtctaaaggccttatagacaaaaccttagaacaatagaatactctgtttcttcacatctttcaaactgaaggcaagataagagcagtacatgcatctgctttgttttcaatgaggaaatcacaggagtcaggccccatatgaactttcaaatgcaacatttaaaagcatatattttagcaacagcaaaaaagaagttatagtcttcaatttggccattgtttttcttaaagtcataaactctcaacatgtaattttataaaatgactcacaactcaatttcctattttcctgcaagcagcagtattgtgagatttcaaaggggaaatagctttaagtataaaagtatagcctaatttaataggctacagtagcacacttaaaaggaaatataccactgtactaatatcacatacatcaaatatcacaaaagagtgacaattaaatgcattatttttcaggccacttgcaaaagagatcacagacttgcaatgttgaaaactcgccgctgctatctagagaagaaaagggaggaagaattgaagcaatttgatgagaatactaattggctccatcgtgtccaaacggaaatgggactcttaggtccaaatggtcatataccaaaggtacatacatattttatagtcagatttattttcttagaactgaacttcttaaactcactgttgtataaatatctttcataaggcaaattttggttcatctctctcagatttaactgactcattttactgtttttaactgaatatgccttctacctccctatttacctactaaatttctttttctttactttcagaagaataaagttacatttaaatgtttttcttaagtgattgcatccttttatgaggtcgttcttaagtcagactgaagtaattctatttcagactttcagactgtacttgaattttcatcatgtaggtgatttaaatttaataaattgacattagttttaaaattagttttaaatgtggtcaccattatttgtattatagccaaataaaaccagtttgaaagctgtatgcatttatgtttatgtactgaattgacaatagtccatctagaatataaattaagtataatttgcattatacttataatctagtatattcatgtaattgacagtaaaatatagcccatctccaactagaaaagtacttaagagcttgtttagtattaaaaaagcaaaaaaatccattgatatttactagtttgcctttgttttcccataattatcttaagctcccaattttttaaatggtacagtattctttttagtagtactattattgctttttttgcctacttattagcatttatgaagttaatattcttcaggttattttcagtaaatttaaattttatttaccatggtccaatctaatttttctagcagtctgtcttctataactctcttaagcagaacttttcacacctgaatataaatctagaattagtgtttcaattcttgttttttaatgcattttattataaataatttgaaaaaattaaaactgtttctattcccatcaacctatcccactctcagtccttttttttgtggatattttcatggctgaaataggtatctacttttaagccattctttcttatataagcaaactgagacatgactttgtgaaaagatttattcacagtcatacaactctagacagagacccagtactgtgactttcatattgctgcccttttttctgtaccctcctgcattatcttcctcttaacctctcagatttacccacttctacatctcccattaccagtacccgaattcagccttccagcccccattgttggatgctatgtgtggccttcctacttcattccggcctactgcagtcattctctacactgcaactaa

SEQ ID NO: 48376 - DNA, 1390 bp, Bovine  19866880735150
  misc_feature (1)..(1): n is a, c, g, or t
ntgtgtgcacgtgtgtgagtgtgggggatggtgatgttgtgtgtatgctgggtgtgagttcttgcatcagtttctgttgcttataaccagagaatctaactagtactctaccttttaacatccaaccaaggttctcctctcacagcctagattccaggaccttaagaagtggagcagtttctacaacatgctatatatttccattccattttcaagcttttgtccttaattttccctcttcctataataccctttgttcatttctgaaaaattccaattcatacttcaagccttagcttaaatatggatgaaagtatttctacttctaacgcttccccagccctaaaggcaaaattaagtgtccttgttttttaaatactcaaatcaatttatacatctttctaatttacaacatggtatcatagctagtgattcacaagtccagttcttccaggagatgctgaaatcctcaagaacacacaggcaaagttcaacaactatgttgaattgaataaactgaatcacatccaaagagttgttgttgttttttttttttttcaaaagatggctctcacttttttgtttatatgtcttacaatttccagtcctcttctcttttaaaaagtctatcccattaacactttatagagtttagaattaataactgatgagacgtagaaagtaaaaatagttgtcccacttctcttccctctgtgattccgtctcccttttccactgacacatcacatttcaatgccattttttgtttccttccaagttccctttgcctctttctttgcagaaatatgcaatgacccattatgcaatgagttacactatataacaaacagatttccctcctctcctgagaccatgtgaatgaagaaaaaaccatgaaatccttaataaggctgctcatgtgattgaaggctaagaatgtgatcccttaggaaattctggagatggatatagttgtgcccctcctggaaaaatcattagtgaattattcaataaaaacaaaacataaagaagaaaatgctagaggttcctatctatcttcctgaaaagattgatccaaagtcccactttgtaattgttcagatgaattgactttaaccagagaagcaaaatgctaatcaaaacaagggggagataaatggaattggttttccctttgtgttatttaatggtgcctcccatctcacctgctgcctttcctgatggaccagagttagtgaatatttatttggtattatatgtccccattactgaaggaaaaaaaggaaatcatctttctcacttaccctcttgagtctcttcactctaacccctttgcctacacaaggaatcgcaaatttcatactttagctcacaagatcctccatgattt

SEQ ID NO: 48377 - DNA, 1284 bp, Bovine  19866880820290
  misc_feature (1)..(1): n is a, c, g, or t
ncacctgagatgtaacgagctccccgtaatatgctctcacttagcctttttggtcataacgttgtgggtatctctgcaatagagtcacagaatgtgaaacatgggagatctcttaggaaatctaatctgagaccctcattttacaaataaagaaacgaaagcccagagagagaaagcaactcatgctcagttactggcctgtgctgaagcagaaacagttctcttgcttgtctgctcagggttcttatcattctatccctgagatttaaggacacagaggaaccattcaaaagactttttggaatcgttgctattttgatttatttaaaaaaaaattataaagcattgactcagtacagaagaagaagacagattagtcttacactggttacatgactgaccagttatagaaaagttggaaagatctcatacatcaattacacactgaccttggattaagcactatgctggcccctggagatctaagatgatgtggtcaaatcacttagactcctcatagttcttgcaaaagcagaacacctttatgtttacactgagagccaagagtctgaaaatctccatctatgaaggatttattctccatttcacagatcttagaacatatggcaaagttacggtcctaacaagcaacagatgcgacctgattttaactctatgatgttttcaatactgcgaaacagtggaaatagcaaaacaagcacagagaggcattttaatgttgttatcattgatgaaaagatagataataactggtcaaaaaagggggcccaggaaactgtgccagtacatagaatgatcaagtcatatgaaaaagactcctctgtgtacaacatttaaaagatgtgtatctaggtcaacattactgaaccatgcccaccttggccgaatgccaactcatttgacttgctagagcaagacaaagtactttggtcttatcccttaatggtgccctttgactttctggttgaacttttccttgactagaaagaattcttagattcctaaagaaagaaatcttagtaccttttcctcaggccagatactctcaatatcctcatggagtttggttggcagtttagttgctaagtcgtgtccaactcttatgaccccatggactataacctgacagctcctctgtccatgggattctccaggcaagaatactggagtgggctgccatttccttctcctgggggccttcccaacccagggatcaaacccgggtttcctgcattgcagccagactctatcaattgagctaca

SEQ ID NO: 48378 - DNA, 707 bp, Bovine  19866880826205
  misc_feature (1)..(1): n is a, c, g, or t
ncccaaagttgccaggtactgtaaatctttgaaaaaaattgccctttagcactgccaagaccaaaagctaaattggcccaccttccgcaatttacatctgggttcagtttggtctcagttaaaagagcttaacccatagtcctgacttggtctctgttcagatgggaaagcagctatatgaaaggagcagaaataggtgaatatctttttatacccttccttgaggggaaaatagtgctttattaagtttggatagttgtcatctaattgcctggtattagggaatcagctggtttgttgctggatagtatctatttgctttagatagttcttttttgaagtatgcagtttactgatcagaagccgtcaaaaataaagtacattattacaagggttttaaactgaataggagtaagatgaagagaattaactctccaatgccttagataagaagcagaaagaattccattaatgcaggtttaacatgagaaatatagtagatataaaagttatttttaatataggtagagaatggaaaatagcaataagattaagaaaactgtaaaagggccatgatttacatcgaggttttttttttttttttttttttttttactagttcttctcatgaatgcaacagttggcaatgtctttaaaagtctagaatttttcaggataaatccgcttcaagttgggaatgatttatt

SEQ ID NO: 48379 - DNA, 1056 bp, Bovine  19866880842589
  misc_feature (1)..(1): n is a, c, g, or t
naatgataatatttctactcctttcttttcacattttattaaatttgggtagaacttccaggaaaatgttaactaataatggaaatagttcacatcattatcttgcttttgatgtcagtggcaatgactctagtgtttcattaagtattatgttaggaatggttttatgatatatgttcctaagtatcctttctttgctttctaatagttttagaaaaaggtgtttaatttttatcaaatgatttctttgccatcatctgagaaggaaaaatatgtttttcccttttaattacttctgcaatataatctttaataaattccgtagtgtaaaatgaatgttgcctatttccatgagcttgtgggaatgatttaagatatgttaatattgataatctaaaagttgatggctcatttgtcaggaatcctgctccactaatagctctaacttgattctaccttaccccaaatgttagtgattttttggtttgtttccagaagatatttaatgggtatttaggaagaattaatctcatggtcctcccttctggtctccttgctgatgttgaaacctcttgagaaaggcgtgtagtcaccctctcccctctactggtggtttcttttataagaaagataccctttaaagaaaggtgcttggtttattatggattcataccacacataactacagataaaagccttcaagacatcaaatatctctatgaatctttccaacttttctatactaccagttctatactgagtttcgtgaagatgtagggtttcctccaaactctgaccctgggatgctgcagcaacaccgattacatcctaaagtgtaatacatttcaagtgaaaggcacgtctgagagcttccagtttgtggggtggatgggttcaggcatattctgaacctagcttatattcaggtaggtcagttgtgtattagtaatattaattacttaatattaaaccatttagtcaagtttatccaattcaatcatgctttccattgtatgaaatcctctttcctttccttgggtctttaatctctaggct

SEQ ID NO: 48380 - DNA, 839 bp, Bovine  19866880951889
  misc_feature (1)..(1): n is a, c, g, or t
ncctcgttctgcaccttctaaagaattcctggctggtatcgatttcagcttcgtaggctttgacagatcagttttcacttatttgcactgtcatgtgaacagttcttgccatctcttatctttgttttggggagtttacagcttttttacttattaataaaacttcttaaatggaattttgggagtgtgcattaattttaaaatgaaagagagataagtaaagaatgacagttgaagtatgtgaagaacactgaacgtgctcagttgacctgaatggagccctggctctgtgtgacttataatatgacactaggtaggtggcttgacttctttcagcctttatttcctcatttcagaggaaataaagaggcagtattacctataaatagaggcagtattacctatcaccttgcagtgttgtgaggttcccaagagaggatatatgtgaaagttttgccagatgttcttagattcattttttatatagctgaaaaatgagattaaaaggtttatcctgactgtaagtaattctgagattattttaatctcaatttttagtaatgagaataaacaatttcctaaaacattttaggtgacgtttcactttaacacattatcattagtgatgctagatatagtgatgtaatagtgtccctaactcaaaaccttactcttaaaggtttctttctttagtatatttatgattattggcatactgtaggaaacttgcaaatctttgctcttttaaaatttgctttcatcataaccacagaaattaatatgtcgatttgggaagatgtggttttatctttgtcacaaaacaaagataagaaacagca

SEQ ID NO: 48381 - DNA, 1778 bp, Bovine  19866881094294
  misc_feature (1)..(1): n is a, c, g, or t
nattcaggccaacttataattgctttaaagatcattgtggcagaaggtaaagaaaaatttggaatgtggcaatatttaaagaaattggaataaaaagttttttctctatttgttgaaattcaagggatctgagaagcacaactttggggattttagtctcaggtaggctgtcactagtgtgactaagctctcagctaccctccctgtctgtctgtctgtctcttgcatcttctctacctgacttcctcttaataccgtcctctgcttacccatagtttctgccttgtcatagctttaacttactcataactttgctcactcatgtctatcctagcccttcgctatgctcccaactgctcacaaaacaatttgttctatagcacagtaaagtagagtccagcaagggaattgattatcccataaaaaatcaactgtttggttgagcttccagcactaagctatatcacagaccaccagttagctgaaggtttgcctacacttggatatgatccttacatctgctcccagcagtggtgtccagagtagaatgaggtcatgtggtgaagaacacaacagcccagagtttgccactcaacatgctcagtagatattatgttttgttgtcgttgttgttgtttttaggaaagaatggtgggcatcctgatgaacctatttagaagggtgggcagaaagaaaatggaataaagtctgcctcaattctcagtctataattctgacagctggaagttagtatgcaaggaagatgaatacaaacacccaacagcctagctctaaaagcaaactggtagacgatgtaaagtaagaattctggtagtcctgttagaggcaccactgtcatcttacccaccttctgggtcattttgacagcaactaagcactaagaaagggaggttttgcccatgaatgatagagagcattcccttttccagggactgaaataaaaagacaataatccgagcctgaagcctgatacgtctgtctgggttatatcccagtgtgaagaggggacaatgggttggacctggcacatgctctcacgctgagactgtaagccaggaatatttttcctagaaagcaacccagtggggagcctctgtgagaaagtgaaatataaattattcatttccttttctttgtctactacccccaacaagcctggctctgcagaggcaaacagaacgcagaagagtgtatgaggacaaggctcctgcacgaagctcagctgaagctccctccttcccagggagcattcgtgccccagaggatggcaggcagcctggccggcagcaggacaggagaggactgccactggtctgaccaagacacaggctcacacagtccctgcctcatctgctcgctgcatggatgtgcctgcgtgctcagtcatacctgactctttgcagccccatggattgtagcctcctctgcccatgggattttccaagcaaaatttttggagtgggttgccatgcccttctccggggatcttcccatcccagggattcgaagttgcgtctcctgtggctcctgcattggtagaatatttaccgctgagccactggggaagcccccctgcatgggcacatctcttcaattctgtggagctcagttgtattagctgtaaagagagagtcatctaagggtatcctggaagaactggttcttggaaaagcacatggtcaagactggtattccctcctgaccagccagcctccctggctctatggaattctctaaatacaagaaatatcgagtag

SEQ ID NO: 48382 - DNA, 2160 bp, Bovine  19866881109940
  misc_feature (1)..(1): n is a, c, g, or t
nccaagtcatggtacagagggcccatcttaggtgtttgatactgggtcattcatttttgtcttttttcaaccacagagtcatttgccttgtgagaactgagaaccacacttaacagaaatagatatgaactcttaaacatagctgaaaagctattcttattacttctcaagttctaaataacatgccacattcatatctgaatcattgagacttctaccgtaatcatatttcatattttttatttatgccaattagcagcaatgatattaaccctactatattattagtcttttaggcacatcatttcccatactagaattgctacactttgctttatttatgtgtgtaatccagctgtagatcgctgcatgttctttttaatcttcaaagatgcttcttattccccaaacatctattatcccctctgcttactcactgttttggctgtcaggccatagaatactgatgaaagaaaatgcacaagagtgtgacaattatagattcattctatggagtttcatcaggatcatgcctgtcatcacatcacaccttttattcacctatcaaaatgtcacaaaactattctctcacttattattcttttttcctggaaacattcacccatattccattttctccccctcatttgtagtgaaaatattgcttcttatgtttcaaacttaatattcctgcaaactttgtcatattccttcatcatcaatttagtatcttctcatgaattcatatggggtcttcagagaagagtccactggattgttaattccttgagggcaaccctcatgatttattcacccttatatttttgatgcccaactaattttctttattataaagatggcttccaaacacactcaacaatatctgctattaaaacaacaaaacaacctcccttgacgttattacttcttctgaaggtgttagtgctcagccgtgtctgactctttgtgagcccatggactgtagcctgccaggttcctctgtccatgggattctccaggaaaggatactggagtgggttgccatgtcctcatccaggggatcttcccaacccagggatcaaactcaggtctccctcgttgtaggccaagattctttaccatctcacccaccaggaagcccaagaacactggagtgaatagcctatcctttctccaggggatcttcctgtcccaggaattgaacctgggtcccctgcattgcaggcagattctttactgtctgagtgactatagctactttttaatctttgcatttgttatcgaaatcttaagttttttccattgcttccacttccaatctgactcattttaactatgagaggtaggattctgctttcttccaaccctatgaactcttgagaatactatcgaaagattacaagtgacctttatgtccctaaagccaataactgtacctttgctcttatgttccttcaatgcacttaaatgtttgatatttgagaacatattcttcttgaatctttcctctgcctgagcctttgctgttcttacagatattcacagcttcatttctcatcactatgtagataattcccaaatgccatctttagcctgcctcacctgtgtgtcttcttcctgagtttattctcagctagcaatagtatgggttggattgaactgtggataacatgtaaattcactgcatactaaatgaattcagaattttgctcccctaactgctctcactttctagataaaattgtatgcagtatctctctcatatgtctaggtccctgaacttaaatcatagcattgtccctcattcttctctctttgtcatacccagaatccagtatgtcactttgccttttgattcttcttttgaaaaatctctgggtttctttgtttcccctctcattattcacaaaagcccaggctttcaacaccccagccttgatactatcgcatgattttctggtcttttccattgtttttctatcatgggaccatcactgtggcactgatattaagagaaactttaaacctgtcactccatacttgacttgcctacaacatcgagttcatattttctggggttgggtttagtattctgatgagcttacctcactttatcttgctaatactttctctttaaacacgaccttctaacctctgccc

SEQ ID NO: 48383 - DNA, 827 bp, Bovine  19866881151431
  misc_feature (1)..(1): n is a, c, g, or t
ntatgaattctagtgttacacaagtcagtccataggatataactgtaaacttgtaaccagtctattacttccaagttcccatgataagatttcctgccatagttaatgggctgcttgcttggagcaatactctacaaaggaaggatttttaaagaccataatatacatttttctgaaatcagctgagagggatttggccagtagttttagtatgaggcactcagtcatttttcgccatctttacaggttaacacaattggagaagatatgattcacacaggacaagtttcctgtcttgctgtgttcctataaagatctgactcaagtgtgaggatccaatttaaaaccagcctcttgcctggatcaagattgaagagggggtggaagtggtggccgtgtttaagctttcttaaatataaattacttttatggaacaaattgtaccttctttgaatatagctaagtggaagtcttatttggattgaagcttaaaacacaggtgtcaattgataaagtaatgaagccccagaataggaagaagcttgtagtatgtgaatatatgtggctgtactctgttggtttcttctatagaactgtaaccaatattttccactctgtcacttggccacatttgaaagccaaaagggatttgtgtagtgataatacttgattgaaaaatacaaacttagaatcctcaaaaaagtaggttatttaaagctatctgaagaaaagatgtatactcagtctgtgagcttatatatttccagtttattcttataatttttatatcataactcaggaaaaactcagggacaacctaccacagt

SEQ ID NO: 48384 - DNA, 1335 bp, Bovine  19866881181243
  misc_feature (1)..(1): n is a, c, g, or t
nttaagctgaactgtttctctctcttttctctaaatcactcaggttctgtgttcaaaaggtcaattacatttattccaaattggtcagacaaacatttcctttgcaacctgaaaataaaatggcccaatgaacagtctcttgagaacaatttgttcattttaaatatgtatctggcaatgaaatgtgtcctccccaaccttaggattgtgtggtaagtgctattgagcatatgctgggatctgaaatggaatctgcatcataggaagctgacaccaggagtgatgtggatgaggtgacctggtcctgttattatatccttcaccactaaatgatcatcttggccatgctatgagtttgcaagcattaaacagaaaaagcaacagcccactcacagtgctacatcatggaacattggaggtgggccagatataataagtatatttggaaagagaagtcatttcaaatcactaatccgtaaatgacaagatctcgaagaaccaatctatggttggcttgtttttagaaatcctcagtgcaggaatattcagatgttcagataaatgtaaagataaatgttttatcttcagataaaagaattttgagagtttcctcctgtgtggacatgggatttgatctcttacatggcttccacaataccctcagaggcctaagctgtcacctatagtcaggaatcagatctaggcctgtccaccatgtgagtttagctgctacattagactgcatgggttacaaactcaaatgctagctaggctagtcaggtagctgatcacactggagagtgtgcctgtttaaaaggtcagcgactgcttagttctgggagagcactgcctgcaatagtgcagactcagtgaagccagatcatctgcttgaagagagtctggttgtctgaattttacaataaaatgtcttgattttataaatgttgacaattcagtaaggcagtgaggtcagacacgtctttgggacagagagatgcagcagagggtccagtgtgttacgggtacagtctctattttggggcataggctgaatgcaacaaagattatacatggggtcccatgggctctttagggaaagcacagtgatgttctgggtgagaggctgcaggccaaagatcatccaacaaagcccactttcaaatggagaaaatacaaacactccctttatatagtcactcctgcaccacaagagggaaaagaagttcccaaagaagagaatcgggaaggaggaagaagtggcagagggaggggagagaaagaaagaaaaagatgagacagcggcagccccaggttggattccattctcctgttctg

SEQ ID NO: 48385 - DNA, 1020 bp, Bovine  19866881194657
  misc_feature (1)..(1): n is a, c, g, or t
nttctttctaataattagaaagctgtctttctaataattaagatctcagctcacacttatcattccttgacccatttccctaaagtatattggaatgacctgacaaagtgaatattatttcttgtgactataatttattctatttgaccagaggtcaaattgcttcatctcctccacctgaaattgccatataggcctgtttagtgttgtttaactatcaggttttaccccatggtgacttttgtcatgagtgtgtacgccactattgttaacattttgaagtaatatatggtattactgttaaggtcattctagtttttgtgagggaaactgaccagcagcatcttcttatttagactttctgaatttaatttgtaccctcttatgagtagtaggttactttacatccttacatttagttaagttcctgagatatagactcatttaatatcagtaagccttttagcttctgtactgaaataaaaaattcaagcagtaatttaaatttgaacaaactaaatctaaaatattttccattattttagtttaggagaaatctccataagaaataataacttctttctgaaccagaggctaataaaatattttaactttctgctgccctggaccttattgaatgtcccacacagtcccacttccatcattatgggtattttaaatgaaaaatctgtttcatttgtgtaagatttcagtctgtgactttaaacgcttcagaagccctcttagactatgtgtgtatgcctgacttgatctcaattccgtgaagttttacctcttatcaatgacaactgacatcagtgtactaactgacccttcttgtgcctagggtaccctgatatgcccactgcagcggatgttgtgaacgcgttagatcaacaggcacttgcgtccatcctgagagcatacggagaggagaagcacgccaagaaaatcgcttcagcaatcattcaagcacgcggccctctaccccatcaccagaacccagcagcttgccagcat

SEQ ID NO: 48386 - DNA, 2675 bp, Bovine  19866881201721
  misc_feature (1)..(1): n is a, c, g, or t
nacgcatatatatggaattttgaaaaggtcatttttaaagacttcaaaaattctgttgtaaccaatatccacagtcacaaagaattttggcatactgaacttaaagatacactttcctaatacatttagatctgttaaaacccatccaacataaaacacatttatgacatgaacagaaaaatgagtttctaaccattctacctattgtgaagcaagaaaatgtttccatgttatatttgccttaatagaaatttcaggtcttcatctatttttcttctacaactaggtactgttccaagatcatgtctcccataaagtacaagggatgaatgagatttctatgaggtcccttccaactctaatttcctatcctagcgtacactttatacctaaagaaaaagagtaataacacattagaagcatgtgagaacatacaaatttttccaaacagcataccattcccaaagaagacctgcagcttatacaaaataaatgatataaacaaagccgaaggatataaagtaacctacctaagatgacagagtaagttaatggcagggcagaaactacaaactgctaatatttactgtgaatttaccactctacaaggtaggtactattacaaagcaaattttataaatgagaaatctgaagcaaagggaaggaaagtggctcgtgtagatcataaagtaacaagttagaggaggaacagaggtttgtcctcaatttgcctctagatccttgtttctagtcactatactaaaacctgctttttaattacaggttggattttctaattccctttctagctctttatggagacttgataaataaaaatgcctgcttgaaaaataagataaactttgcacttataaagttacacagaaaagaatcaatagcagaaacattagataagaatcctagtttgaaactttaaatagctctgttatttcaactgatattaggtatttatattaaaatgcaaagaagtcaatttaggagattaacagaggctcaaactgtaaaacagaactttctcaagagctactaatttctgcacttagctcatgcttccaactctaccacatggatgtttgttaaatgagcctaacgattagagcctctgtccagaatcattctaaattgggaccttaattgtttctgtttcatgactcagtgggtgtaatattttatctgctggattttctaaatgccagttccatcatgttctgagcacactcttttgcccactcaatagactgggtcaccaagacaaaactttgggataacaggataatgaaattttctaagtctttaattattctctcttacaagtaacaaaggacacacaagcaaccaatacactaatatttttatggactcatctacctctctctctttctctcttccacccacctcgatttatcaagtccagctgtatgaaacacacattagataatttctttttaaaaattattttccagaataaaaaaagtcccccaaaggccatgaatttaaaaaaaaaaaaaaaaaagtttcacaacattgttttttcttttgctctccgggaactatcaaactataaaaagaatctggtatgaccaccatatggctatcactaactgtataaacaaatctttttcagtaaaattgactggaaagaaaaattttgtatcctgaaccccatttccttcttgccatccatttggaaatgagaactgaattcaaaagaggggaggttacaagatgcttttaaaaagcagcttaagcataatgcagaaggaagcagcagtgtggtacagcaaaaagatacgcataagctctgaagccatatgaaactaattctatcacttccttgttctgtgaagttgggcgattcattttacttctctaaacctaaattcacttgtctagaatgtacataaagtagcaagtgtggccaaggggacagaaagaaactctaacaagtctcaggaaataaaagcaaaaatacatatataatagccagggttatataatatgaataaagcagacactcatgccactggctggccccacttcagaaacaaataactatatcggataactgaaatgtaaagaaagagggtagaaccaataataacaggggtaaaaattagaattaaagattcctttttaggagaaaattcagagaatacaggtcttaaagaacagccataaacctacttgcaattctaaactttggtgagtgaagacacacagacatttacagatgcaggagaaggggtagtaattcaataaacaattactaagtccgtgagttggtgatggacagggaggcctggcatgctgcgattcatggggtcgcaaagagtcggacacgactgagcgactgaactgaactgaactgagacactgtagttaaatgttagaaaaatattgagtggccatgacctctctggtttaaagaaacaggtaagttaggagacaattacaaaagtgtagtaaatgataccttggaagaaagaacagtaaaataaatggcaccatggaagaaagaacagagcacatacaagggtagcagagactggaaaaaactcataggtctgctgcagatggcaagtagcacatgtggcagaagaggaggctgatgatatagaatagcccagatggtaaaggaacttgtacatatgcca

SEQ ID NO: 48387 - DNA, 762 bp, Bovine  19866881306873
  misc_feature (1)..(1): n is a, c, g, or t
naatgggagcatgatagggctttagatatataggggctttagtttataggaaagaaaacaggttcaaagaggaagaagtggcttcttcaagtcacaaacgtggcagtagtaggaagagtctcaactcctaattcagcacatttccccctctctgagcagtgagaaggtgctcagtggtaagtattttcagtgatttaatgattaacaatatcaaatgccttccatttggttgtgtgcatgatgttttcagtctctatattgtatttgactcttttgcgaccccccctggactgtagtccaccaggctcctctgtccattggatttcccaggcaaaaatacctgagtaggttgccatttccttctccaggggatcttcctgacccagggatcaaacatgagtctcctgcattggtaggtggattctttaccactaaaaccacctggaaagcccaagttgaagtctgaattgggggaggaggatctcactgaagttgtttcagcctatttggttcctgtctttagaaaagtactctcccagccagtgttttcaatagaatgattgctttgtgttcataaccaattcaaactcttcagcaactgtttctttcccatgtgagaagcctggtgagcatttccattacatcttgaaataatattttcattttggggtctaaacatagtaactagggtaaagacttagtctaaacttagctgctaatagcccaggctgtgaagttggcattacaatattcttatttttt

SEQ ID NO: 48388 - DNA, 1822 bp, Bovine  19866881325348
  misc_feature (1)..(1): n is a, c, g, or t
ntttcctgttttctactgtggacctgttatcatctgggctaatgttaccaaatttacaaatagcctatttatttgtgccacatagagtgtgatctcatagttgcatccaacatctgttctttcttctccagagtacagtagagtcttggaatgtttatgtttaaatttcatggattgatttttcctgagtgtccctgattatccatgacagttacaatcttgtattttgctatgtcactaatttgaattgtgcaatttgttatatataggaatcaatcatttactgagcctagctaaccaccatcatctgttttatccatcttcgcactaatttttattatgtcagtcatgttattcttttcattaattagtgctggagacttttcttgttcttcactggtaacatgccctgctgttttaactcaaatctaacaaaagtttatagctaagaataacttaaatgcaaacatagacattatcaaaatgaaacgaattttcaagaaatatccaggtatataaattgtgtatttggagtgggtttagataaattaaagggcttccacacaaatgtctactattgtgaaataatattaaaggacaaataaagtaagatttctcatagcctattaattgctctgttacattccctctggtaccaataattagatcctgccattaactaaggttaaaagagattaatgctagaaatgtacataattacttttttaaaaaatcttcctttccccctattaaacctacatgagcttgagagtaataaactctggtattttccacttagcaattttatgtacatatttagatatgtgtatatatcattatggtttttaaaaataaagaatggctccatgtatatagttatttatttatctattttgtcagtttttctctcaaaaaaaaaaaacacaaaacattatcatccagaagcactggatattccaaaaacctaccagactgaattttttagtactacttaaaatgagaatatcagatatgtaacaatttcaatttctgtaatcattctaacagactattttaactaactgaatcaatttgccaaatatacaaataaaatacatatgtaaatttttacttataaattatatttattaatttgaggttttgtttgctttatgtctggttggttgcttggttttttgtttgttccaccatctttcttggcactcaaaaatggtctcacgtgcatacatttttggttttgaaaaaagtctgtgattacaactagaaattatctcagctgaaagaatatgagattcattacatttattaagcagaaatattctacctatgtacggaaataaagggctaatcttttattaatagttatggaaatatatttggcacacaactagaatattttctaggtttcttctcaagatagtctttaaaataatttgaatttgtacccataacaattttaggtctttttatcttatgatctaaaataaatcttacagaaattgataacaaatatttcattagttgactaaatcctaaaaatacttaaatgttttgcttttatataaatatataacttattttattaggctttgatttcattcctagaaatgtgagttttactcaagtaaaaccctgattttcaagtgaaaacaaaaggtctagaactagccaaagtgaaaaatcataccataaaatcattaagacaactttaacataaatcgtttggaaaaacaaaccttgtcaaaagtaaccaatgacactgatctttatacttgaagaaataaaaatcaccaaatgaccaaaaaagaatttgattttataa

SEQ ID NO: 48389 - DNA, 1246 bp, Bovine  19866881890144
  misc_feature (1)..(1): n is a, c, g, or t
ntgtgcctcctttttttgacgggggagcagagctctaacttgaattgcatttcaagagatctacaacttcaaatcatttaagagcgattctgagctgcaataataatggtgagaataatttatttgtgcagaattttacactttacaaagaatttcctcgcacactacctattcattctgtacagcagccctgagaggcagccatggcaggcactcttggctctattgatcgaataaggaaactaacacctgtgatggttataagcctctactggagattaagtctctccagagctggagttctttccaccatatacatcaaatggcttttcatgaggaagtttgcataatctcttttggacacatggaataggttaagcttctgcaaacagcagacaggcaggtaaaacttaaattaccctttttattcaatgagtgaggtctgttactttactctcccaaccatttgtcattagtgtactgcttgtgtataagaggaatttcctttttatgccttcatcctaaatacagattaattagaaaaatccctgaactctcagcaccagcatcttcctgttcgtcattgagaagcatttgttgaatggatttcatacataagacactgagcttagtgctagcaactgtaaatacataagctgctacagcagaccattggataattaacagtaaaataaaccagctggcccagccagcagtaggaaaatgcatccctaatactgtttcagtagtattcaggggcctaatattcagtgtcttctactctttgaaccagtaattctatttctaaaaatgggtcttatataattctaaatatagaaaacttttaaatttctaagtagcattatttagaatggtaaaagaatgaaaacaaacctaaatctcaagtaatacatcaatgggtatataaattttgattcatctctgctagctcaccagaaaagaatctgcctgcaatgcaggagacctgggttcaatccctgggtcgggaggatactctgtagaaggaaatggctactcactccagtattcctacatggagaatcccatggacagaggagcctggagagctacagtccacagggtttcaaagagttggacatgactgaaatgagcatgcacttgtgactcttaatcttttcaccttatgtgagcttttcctatttgtaatcattgagaaaaacatctcatctacctttgttcttctaagttacagaataagcttttc

SEQ ID NO: 48390 - DNA, 1640 bp, Bovine  19866880142815
  misc_feature (1)..(1): n is a, c, g, or t
ncttggaaggaaagttatgaccaaccctagatagcatattcaaaagcagagacattactttgccaacaaaggtccatctagtcaaggctatggtttttcctgtggtcatgtatggatgtgagagttggactgtgaagaaggctgagcgccgaagaattgatgcttttgaactgtggtgttggagaagactcttgagagtcccttggattgcaaggagagccaaccagtccattctgaaggagatcagccctgggatttctttggagggaatgatgctaaagctgaaactccggtactttggccacctcatgccaagagttgactcactggaaaagactgatgctgggagggattgggggcagaaggagaaggggatgacagaggatgagatggctggatggcatcactgactcgatggacgtgagtctcagtgaactccgggagatggtaatggacagggaggcctggcgtgctgcaattcatggggtcgcaaagagtcggacacgactgagcgactgaactgaactgagaatcatactacataaacttagctaaaaggtggaaccaatccctcggtgttcaccagcagacaagtggacagacaagacgcagaaaagccttccaatgaaacgttattcagtcagtcgtaaaaaagaataacgttttttcacatccttaaccatcaataaaccttgattataagtgaaacaagccagacacaacaagacaaataacatatcagagcacttatatgaaatacttaaaagaggcagattcacatagatacatagtgccgaacaggggaaatgaagaattcccattattattgcctactgggtacagaccttctgttgtagggaattaaagttttgaaaatagtagtaatggttgcaccgaaatgtaccctgaaacaattaaaatgacaaatgtcacatatttacattaggcatattttaaataattatacaccttttactgctactaaaaagccactataacgtcaaaccaaggaactacacacggcttgctgtacgtaacggccctagtcagacggggtagagaaggtacacaaacattcagggggagaccctcagtaaacacatcaaaagcttctccattaagcacatcaaaatccacccggtttcgttgttttgaagctgggaccccaaaagcttaatattagcacacgcgctctatgaggccgacgagtatcacccaacagcaccactcccctccccaaattattctagcgccaccctataccaagagccccttgggagccgctgcggcactggacgaccgacgtgtcacttccgtacccagcagccacaacaatgacagcagtcctgggtcaattctttacaacccagaagtttcaacgtgagcggtcgaaggaagcgccacaagacgagttaacaccatttcctcagcgaacctcgacctcccgcgagctgcctccagaggccccgagccgaggagagtccgaaggcggcaggcgggcccccggcctcctgactcaccaagtgtagatctgcagctcgctggagggcacgtttccgcgggagaactcgtccatgcggtggtggcggccgttgttggtggtgaagacgcgcaggagcagcgggcaggtctgggggcgg

SEQ ID NO: 48391 - DNA, 1454 bp, Bovine  19866880484011
  misc_feature (1)..(1): n is a, c, g, or t
nttttactaaaatgtttcaaggacagtaggccatagggtatcttggggcctggctgaggacccgtcactgtgccctgttaaaaccagcctccaggggagccctctgttacagccccctgagtctccctacaggtgccaacctggttgtgggtccagcttaactgcatctcctgtagtttcactactcataaaagtgagaagtgacttatttttgactgttgtgggtcttcgttgctgtagggtttttctctagttgccaggagtgggggcgacccttccttgcagtgcacgggcttctccttgtggtggcctctctcgtagagcaaggtctctagagcacaggcttagtcgctccgaagcatgtgggatcttcctggctagggttcaagcttgtgtcccctgcattggcaggtggattcttaaccactggaccaccagggaagccctgacttgaattcttgaactagttattttattactacagctcagacttatgtttttttaactcaaaactagttctaaattatttgattcattttttttttaatttggcattgaaatcatctgtgtccatatatttgaaatcctcaaacttttccatgcctgtctcaaaacatgtctgacaaacaggtggtgttagcctttgagatgggcctgaaaggcgctgggaatgccacctcactgtccatgagctgtccatgagcctgtcttgccagccctatgcaccagctcacagcccccagcacagggcacagcccctgccgtggctcctgtcctgaggcgtgtgtgtacttcatgcttgggtctgaggcctgggaccacagccattctgggagctgccagggggactctctgactgtgtcaggagctgggtcaggttatttttccttttgaagctttaggtttattgcattgttaaagattgaaaattgattttgttttctgttctcttctctccccaccctgctttctgggtgacagggagtcactcccggcaggacagcatggagcccagcgacctctgggacgatgtgtctaattgccggtgtggagaccggctcaagaccctggagcagagggcgcggaggcagcaccagcggtgtctggctcactccctggttgggaccccaaactacatcgccccggaagtgctcctccggaaaggtatgtgctttggctctgcatccaagctgggtgatctccgagggtcccagctcccactgtcagggtctcagtgtccccatatgtctccccacgggagcccaagagtggggttctgtcagcagacaaaccttcagtgtatcctcctctgcttgggagctggcccggcgtctccacttgctcctccttaggctggaagtgatgagctggctgcatggtaggcttgctccctagagcccagaggaattgtttgagggtcaggacgggttcggggtcctcactgggcccaccat

SEQ ID NO: 48392 - DNA, 2204 bp, Bovine  19866880520680
  misc_feature (1)..(1): n is a, c, g, or t
nttctttacagcactggactttactttctctaccagacgtccgcagctgagtgccatttccactttggcacagcctcttcattctttctggagctattagtagttgtcctccccacttcccctgtagcacattggacaccttctgaccagggggagatcatctctggtgtcatatctttttgccttttcatactgttcatagggttcttgcagcaagaatactggagtggtttgccattccctcctccagcggaccacgtcttgtcagaactctccacggtgacctgtccatcttgggtggctctgcatggcatggctcatggcttcattgggttatgcaagcccctttgctatgacaaggctgtgacccatgaatgggttcaaatagttaccagatacaaaagcagactgttttcctgaggctggagagctgcaagttcactcctctgtacactcgcaagttaaatatgggtgttgacgtgtcagtgctggtatcatcttttaattacgttctccaccctctgttcccagacgaagtgagtggggtcaagtacccccctaagctccagggcctctctagagctctgctggcagtgggcccaagggcccctgggcacaagcagtgtccagcttggtcccttcgtcagctctgggcacgtgctctggcttgactgctgggtgctggccagaggggcagtggagcagggccaacgcattaggagaaagtgctgggccgggtttcagttctttgattagactgaaagatttggctgccaattgtcatcagccaaatttctcacactttgcctgatgagtcacttgtgctggtttccaagtggaacagaaggctctgggaaatttgcagtgcttattttagatctgcttcagggagggggctgagtgtccgatgtgatcctggtttgcctcacatcagggctttgtgcgagggactgtggaacgctcttccaagagtaaacagcttctaactaaggcttttacaggtttttttgtacttctctgtgtcagaatttcagattaaacatggtaagcgtgcatcacatatgtgctgaggaacaatgcggaacattgcttcttcctcctgagacatgggctcagaggatgctcttcctcttaagatatgttaccaatctgtttattttggcaagataaactgtgttaagacttaacaaatgatgtctgcaaagcacatgctttgtgaagtgtattgacaggccgcacatgtttctctgggcggagactgtcttgttgatccccctgctccatccttagttggctctgggttagagatttgtgttgaaggcccatggccagctgctctgctgctgctcaaagcagatccagcacttacctggccgctttatgtgtctttcttgagtcctgagaaccagcatccacgattgtgttatagcatatacaatacagatgaaaaataaacaataacaaaatgcccacgtgtgagccctcagcctaactgagaatattactggctgagtaatattccattgtacatctgtaccacatcttgatccattcatctgtcgatggacatttaggttgcttccatgtcttggctattgtgaatactgttgctatgaacacatttgtctttttcagatgtcttttatcatctttttatagttgtcaacatatcagtctttcacctctttggtcaggtttattcataagtattttatttttttgtatgtgattttaaaagggattattataattttttttttttttttttaactttctccttctgacttcattaatgcattgtttccctctcgtgtcctgccgcagagcccgctcattagtttctgaggctgctctgcactgatggggggctcccgaggtgaacatgggctcagggccacgcacacaccccacacccctgactgtggctccgaccacactccagcctctttggcctgtgctcaccccaggtctgtctgcacgaagatgagacagcaggtgggggccaggaccctgtgtgcacatctctctattctgccagccgcggtctgtgctgctcccccagctgatgaagggggaccccgggggggagcaccttatatagatgtagtttaaatgaatttatggggggagatgagcttcgagtccttctcttccaccatcttaatctcccagccttaatcagattcttaagctggttctttcat

SEQ ID NO: 48393 - DNA, 1075 bp, Bovine  19866880555755
  misc_feature (1)..(1): n is a, c, g, or t
ncacacacacacacacacagaccaaaaaacccaccccccaatctcccaaactaaacctgtttccaaggaaaagtatataatatattcaactaatcacttttggagcccaggacatcacaggtgttaaaggcatacccaatgccaaagaaagctcaaactactgcacaattgcactcatctcacatgctagtaaagtaatgctcaagattctccaagccaggcttcaccattatgtgaaccgtgaacttcctgatgttcaagctggttttagaaaaggcagaggaaccagagataccttttcttcttcgttctcaaagagcatctcgatgcaaagttcttgtgtagctgcacaaaacaaatgctctggaacacagggcacaatctgaagcattatatgcctcaaacatttaatgtcataaaatactcatttgtctacacttttgaagatgtatctttgatctgcagtaataactctttgtagcaggacgctacaaaggagacgctttgtaatcttgcagattgctatacagatcttccttggcttatgacggagttaagtcccaataaacccatcataagttgaaaacatcataagctgaaaatgcatttaatacatccaacctaccaaacctcacagcttagcctcacctacattaaaggtggtcagaacacttatattagcctccagctgggcaaaataatctaatagcgagtctgttttataataaagtgttgactgtctcatttaatttagtgaacacggtactgaaagtgaaaaacagtgtttctaagatatcagttgttcaccttactgattgtgcaccacgtgagtatctgaccgcacatgctgcccaggaagagataaaaatttgaagtacagtttctaatgaatatgtatcgcttcacaccatggagcagtcgtaaaatcattaagtccagacatttgtacttagtgaaatatttattgaatgccttctacatgtgaggcactatgtgaaccaatttcacacaatttttttaaaaagccattaactgcactcactttacccttttgtaacgaaataagaggtacttc

SEQ ID NO: 48394 - DNA, 1771 bp, Bovine  19866880566339
  misc_feature (1)..(1): n is a, c, g, or t
ngacactaaaaagtctggactgtggcagtgacagtgtgcatgtatttactgccactgaactgtacactcaggaatggttaaaatgataagcattacgccaactcatctaatgttcatacccagcgggccagggtctgaccatgctccccctccaaacacagctgtgctgggaaaagccggacctcagccctggtgctgacacagtgcacctcgctcacagatggaggtctgaacgcctggaaccccctaccccacacggaaacacaacagggagcagctccccaaggccacacacccccagatacttttgagtgcctgtgggtcccacaaacattccgattataaagccaagcagtgcaggagagaccggacatatttgcatttacacatgagctaagaaacaccagggggaggtgggtgcccctgaacggaatccaggtcagacgtagcggtgtctgtcctttcttttcctccccctcaacatttcattatgaagattttcaaacatacagagaaggtgacagagttattcagtgacagcccctcaacctgcacctggcaaagctccttgtgcagagggggcgggaggaccccgctccacgctctcatcctcttcccaccgtgctcccccaggcacgcctggcttcctcggtgatggtgccagacacctaccagcaggcctgtcctgcctgaatcactagggaaggatgaaactttccttcagtcccacaaagaatccaagtattttctcagcttgagaccttgtattttagactttagtttgatgacagttgatttcatggcaaaattatgaacttctgaaagcatttttcatgagaatactcatcagtcaaattacgattgcagctggaaatgagcccctctgacacactacagtatcattttaataagcgctctcatccagaatttcaaaaggccctaagggcgctatgacctagggtctcaagggtcttaaaaaaatgagggtgggcctccctggtggctcagtggtaaagaatctgcctgccaatgcacaagacatgggttcgatccctggtctgggaagatcccacatgccatgaagcaactaaactggtgtgccagaactattgagcctgtgctctagagcccgggaaccgcaactactgagtccatgtgctgtaactactgagaccctgtgcctagagcttgtgctccgcgacaagagaagccacccgcacacctcaacgacagtagcccctgctccccacaactagagagaaaatctgcacagtgccaaaaacccatcacagccaaaaataaatcaataaaattatacaggcttcccaggggcgctagtggtaaagaaccggtctgccaatgcaggagacataagggacgcgggttcaatccctgggtcaggaagatcccctggaagagggcatggcaacccactccagtattcctgcctggagaatcccatggacagaggagcctggtgggtccagttcatggagtcgcaaagagttgcacatagctgaaacaacttagcatacattcctggtggcgcagtggtttgaattctttgttttcactactgaggccagagaactaagatcccacaagccacggtgcaccaaaaaaaaggtggggtgggtagcaaacaaagcagtctaatgttgggaatttcttgggtatcatcaacggacttaaatttatctcagaagaaactataagacactggaatttaaaaattgcaatacaactcacaaaacaaaactcattttcaaat

SEQ ID NO: 48395 - DNA, 1505 bp, Bovine  19866880589615
  misc_feature (1)..(1): n is a, c, g, or t
ngagtcgtttatcctgagcaagttgcaagaaggcccgttttttagtgtgcctagaatcagcatctgggtatctccggctagtctagctatcttcagccgtgtacaaagtgccccgccccgctctgctgaccgtgttctgcttgtttgtgcagccgtgttccgggtccacagcatcggggcacagtcggggagaaggcaccgagggtggagtgaggcatcttacctctggggtctgacacaggctccagcgggacctctcgggtttgggcaggagaacacatcccctccgcgtggctggagagtcctcgccagtggcctcagctctgtaaagtctttataaggcggctgatggctccaaaggtaagtgttccagcctcgctcacggttagagaagtacaagtcaatatctgcaagtcatgctttgtcatctgttgaactggcaaagattagtttgaagtttataatagtctatggtgtcaaatgtacggggggtgataggcactttcagctgtggtatttgtggaaatgcaaatcgtacagctcttctggaaggcagtttcacaatatctatcagaatttaaaatacacactccctttgatccagattttatctgtcccataaatatctaatataggtattcaaagatgtgtgcctgtgtgtttattgccgttgcatgtaacgtcaaaaactgttcttccatggacgactgatgagttatagaggaaactagtcatcatttcgtccaccaataagaaaagatgaccaggatatattgaaagaaccaagtcttgcataattctgtagatgatgatcccattttctgtttttaatagacatatagacttctcttggagagggaaatggcaacccactccaggatccttgcctgggaaatccatggacagaggagcctggcgggctacagtccatggggtcacaaggagttgaacatgactgagcatctaacattttcacactttcactttcatagacttctctatgcctagaaaacatctaaaaagatacaaaggtagttgcaacccagtgttatctctgcagcagggcactggaattggggatatcttctgttcttcagttcataacccgcttctgtataattttaatttttttactatgagcatatattatttttataataaaacagtaattttaaaacccagggtggaagacattcatttattagggctccctttgccagaaacagcctatataaatggatcagcccctgttgacagaactttccccaccatcgagaacaggtatcaacgacttaacaaacagtgaaggtaataaaaatttcaggaaaaccaactagaatctcttgggggataagtctctgcctagatgagtttttcagcccagtagaaataggaaaaaatatttggggaggaaagacactttctgagttgtcatctaatgctgtgcattttatttttatttttttcttttgaactttttattttgtatagccaattaacaatgt

SEQ ID NO: 48396 - DNA, 1259 bp, Bovine  19866880689880
  misc_feature (1)..(1): n is a, c, g, or t
ngaagtgttataaaacactagattgtcaaggatgtagataggttttatgtcttttgtgatgtaggttttaggccttgtagataagccccaaaaggaggttaggtgagagtgggaagattttcaataccaaggaaagaaattcagctggacttgctggattattgataaaggtttttaggtaagaggtagtataaatgatatgtgaattggtaatactaccctatagacagcctgccaggatatttgcagggggaagtgtctgaaagcagaaaggccaactggaaggctagtgtaattctctatcagggaaagcaccagagtctgagccagagaaagaaaaattaagaaataggaaggctttgcaaaggaagaagccgcaggacaggacacagaatggataaatgcagtgtaagtcaaatttcaaccacgagttccagagagagaattgagtgatacaacaaccagaaatcctctttgagttaatgtaaatctgtccctatggcaccaagaacctgtggttccccaaatggaaattacggtggcctttagaagtgaatcctactttccccagttgttcatttaactagaatttatttagtacttcctatgtgctaggcactgggcttcccaggtaactcagtggtaaagaattcacctgtcaatgcaagagaagcaggagctgcaggtttgatccctgagctgggaagatgccctggaggagaaaatggcaacccattccagtgttcttgcccagagaatcccatggacagaggaacctggtgggttacagtctatgcagtagcaaagtgtcagacacaactgggcggctaagcacacgtgtgcgtgtgtgcacacaccacacacaggagctaggctttaagaaaccaaaaataacgaaataagctccagactccctaggtgttcatcacccagttccatgccttacaggtaattattttggttttctcatccctaaaacatattaattgaacagccactcaattttcattcatgatttcccccataaccaattattatgcaactatctgtgttgttgggtgttgtcattatagacatgcctgaaccagctaagtctgctcctgcccctaaaaagggctctaaaaaagctgtgaccaaggcccagaagaaggacggcaagaagcgcaagcacagccgcaaggagagctactccgtgtagcaagtccatccggacaccagcatctcatccaaggccatgggaatcataactccttcgtcaa

SEQ ID NO: 48397 - DNA, 1029 bp, Bovine  19866880697903
  misc_feature (1)..(1): n is a, c, g, or t
ncatgtagacgaagggagtgtggctctgtcccatataagggccgagggatgtagtttgctgatgcctgtcttagagttttattgtttgatcctatatccttgggagataaaaggtttacttgccagtagaatgaaggaaagaaagttataaagaaacttttatagcttggtttataaaattaagtgtagaagttttttggaatcattttaacttagttttttgttcactagtccaagacctccctggcgtcgtcaatgggaagaccgatgacaggggctattcaggtatccccatgtgtgggtttgcatcttgggcctttcttgtgatttagaatattattaccaaagttttttttttttaagatattacttacatagtgaccctgattctttaaactgtgagctaatatttgaactgcttgaaatctttggtggcagtctctggatttatcactatttactcaggtctcaagtgaaatcccacagggaaatggacataggccttctagtttgtctgtaggatggactctgggacccggttctcctgcgctgtcatttccagtggcttctatggtttctcccataggcctacaggagaccagcccaaagtagggagtagccagctactaagctatataaggtactactgaaaacccaaaagagtgtttttcttttcaaactgggagtaagtccagttcgactgaaaaattgaaattttataggacaaaggaaaagttcagacaggttgacacgtgaggaggcagaagtgaggaacagtagggagggattataaacctctgttcaagactggggttttattaagatgtgtatcatgtgcagaactgtaaataagaggtagatcatatgtaagaacactttttaaatgattcttgttctcctaaggatggagttactagacccatgacagcagtgagagccgctggctttaccaagggagctttgagaggtttgttacattatttcagctattaattttttttcaaatcttttaatttttaaactgttttt

SEQ ID NO: 48398 - DNA, 1649 bp, Bovine  19866880740588
  misc_feature (1)..(1): n is a, c, g, or t
natatatatatataaattataatatatattttaattaataataatatatttatgtttttgtttatgttttcttattcctgttccatcttaacaatgtcttctcttttatcttttagtttattatttgactaatattaatcttgatatgtgttagtcactcagtcatgtccaactctttgtgaccccatagactgtagcctgccccgctcctctgtgcatgggattctccaagcaagaatactggagtgggttgctatttccttctctaggggatcttgccaacccagggattgaaccctaatctcccacattgcaggcagattctttactctctaatcttaataaataagttctaatatgtctgtttctaacacaatcatatttattcagaggtaagtttgtttctcaagtgtcttgcttttatctgtgagttcattttcctttagggatagaagcccctctgtctttccatgttgatgaaggaaaattagactttcacatcaatgtgcttaagggatttggaggcaggaggacagatgagtctcagtggaaaatctcagtgactaaataaaccattagtcatgacctaccctattacacaaagccttagataaatggcttcaccttttaccttcccagaaaaatcagcattaggacagacaatccccacaatagattatatttaacaacacaggacatttgaaaacagtgtggaaaagtggctgtccacattttttcttcatctgtttttgtcagctctcttttgtcagggtttctgtgctgttctgattttattcttgaagacacctgtattggagttctgagaagtcacaggagccagtgctctttgtccccagatgattttatgggagaacttgaagaactgccatggaccctcctactgcttgctctcacgtttgcctcttaccccgttaaaagcaccactcacacagagcagtgcaaacttctgtcaccatgagattttcttatataacatttctagtttgatttgattttaaagtcatataaaatttcagatattacgtcaaacattataatggcacactgagcttgtatataataaccagccctcagtccaccgaatttctcctgaccagctgtatcccatacattgaacttaataggtcctctgttggtatggaacacaattgtgttatgtggcaacaaagtggatattaaggacagaaaggttaaggcaaagtcaattgtcttccaccaaaagaagaatcttcagtactatgacatttctgccaaaagtaactacaactttgaaaagcccttcctctggcttgctagaaaaatgattggagaccctaacttgggagtttgttgccatgcctgctcttgccccgccagaggtggtcatggacccagccttggcagcacagtatgagcacgatttagaggttgctcagacaactgctctcccggatgaagatgatgacctgtgagaaagtgaggctggggcccagcattcagaagtctagttttataggcaactgtcctgtgatgtcagtggtgcagcgtgtttgccactttattatatagctaagcagaacatgtgcttaatttttggatgctgaaggagatggatgggctttggagtgaatgtggcagttaaaaaaaaa

SEQ ID NO: 48399 - DNA, 1582 bp, Bovine  19866881026248
  misc_feature (1)..(1): n is a, c, g, or t
ncatccatgttgctgcaaatggcattatttcattgtttatggcagacacatatgccactgtatgtgtatacacacaccacatcttctttatccattcattcactgacctacatttaggttgctgccgtgtctcggctattgtaaacaatgctgctctgaacacagaggtgcatatacctttctgaactagagtttttatattttctggatttatgcccaagagtgggattgctgggtcaagcagtaactctatgtttagttttttaagaaacctcgatactgttctccacagtggcttcaccagtttacattcccaccaacagtgtaggagggttctgttttctccacaccctctctagcatttatttgtagactttctgataatttgtagaaaggtctactttctgtagacctctgtgagggggtacctcactgtaggtttgatttgcatttctctattaattagtgatgttgaacatcctttcatgtcccttaggaatcttttttaaaattcttttctcccgttttggccgcacctcacagcatgttggatcttggttccccaactagcgattaaagccaaacctcctgcattggaagtggggagtctaaagcactggaccaccagggaagtccccagataataacttttgaaccagatttctctgaaaggaaatgtaccctctaaccaggccaggaaaaagtctgagttggcagagtcgttttaagtcataaagtaacactatacaccaaactgatggattatttcaggagcattaaaatggcagtcctttctgctagcaattaacataaattaaatgctgatgggaacttaagggtaccccaatacttcattttactatatttgtgttttaatgtattagaaacagtacccacttcattatttcctgcactgcaattatcactaatggattttaccacaatgagatccctcctaaattctggatcatttgcatgatttgtttctttatatcacaactgcaacaacagctcttttgtttgtaagtgacttacaggaggaggttttcagctctgcagtcaggctgagtctctgtactctcatccactatttccccgggatggctggctccttctaaccatcacaaccatctcacctgtctgtcagggggcagcagctggcagctgaccttgcttcacatgctcacagacagaacggtcgagcctctgctgtcacttgcactaaccactctgcacccgttgctcacagccctgggctggaggggagcagctctcaacacaacaaagctcatcacccacaggagagttcccgcatggcccagaggctccaggaagcctgcaagcagcaccactagtctcacaaacagatcgtctgaggaatgtaggttctctggtaagaaactacaagagggttgacagagcttttagaagtaaaagggggagttcttttctcccaggtcctgggactctgaggccaggagtgcataattaggttatttctaaggaactgaaggtgctcaagccctcctgaggtgccttgagcatgaaccctgctcagtccccaaggagcagaagtgcccag

SEQ ID NO: 48400 - DNA, 732 bp, Bovine  19866881057612
  misc_feature (1)..(1): n is a, c, g, or t
ntggcatttacaaataaattaactttctcaagggaactgcactgtgcccaggagaaattatgaacagtaaatatcctagaaacttatgttcccctagttattaccagactaagataacttactgtttctgctcttaaaatattataataggaaataccccagcacattccctgcccacctcttctaagagtcaacagtaacccttccttcactatttccttcttgagctccggtaagaatataaggaattaagtatccagtctcgcactctggagtctgctatgttctaaacagctgctgtctgatttgtggtgggcagtaagttgcattacagtgctaatggcttggagagttatttcctatataggcccattagcttagttttattccaactgatcacatatcatgcctttaacctttagcttccatcatacaaatgcatgcaagggtcaaaccaaaatattacagctataagaaagatctaacacctctcatgtacacataccacaaagtactcagtccactggcaacatgtcagaagagtgactttgtttctgaagaatgacaaattttacaaacttacctcatttctttatggacacttggaatttgatctaaggccattcggtagaatttaatggctttggaataatttctttgctttaaataaatatttcccatattcactttcaaccgtcctaatttaaaaaaatattaatgaatatataatat

SEQ ID NO: 48401 - DNA, 1890 bp, Bovine  19866881094401
  misc_feature (1)..(1): n is a, c, g, or t
nctccccagccccattgtgtgcgggtggctgccgctctttgtggagatggggttgggttttatcacagcagcacctgtggaggctgctggggcctgaaggtaggtagcctgctttgctgctcaattccctgttggttgctttaaagccaacaaaggttgatacccttggacagagagagaacagttacaatgctaaaattagggtgggaatttgactctgacattgttcaatgtttgccattcactctaggaaaactttgtatctcttgccatctgtcaacctagtagtgacaggtgtttttttttacttaattaatttttgtctgtgtgccaatatttgatgttcataggaatttttctgcaggataagtgaaaactcatattttgtagcattggtttgcatttattattaaccgttctgattttgtggtgccaggcagatcctgtaggctctaaatgcagttaggatggtgagaacctttctgaggatgtaagttggcttttcaatggagtgggtctccgtttagggtcgtgactccaggcggtgatcttgagctggagtgctgaggactgcctttttccttactcattaactcagtcctgtcctgcttcacaggagtgccgctcctgtgttttcattaaattgacccagagggtaccccccccacacacacacccacagttatctccctgtctttctcttctgtgttttagccttttcacaggaagtcccaggctccaggaatagcttcacacttcctccgtccaatgtcagccctttcccctttccagctttggtgacacgaccctttctctgagaggtctttgaataggcctgatcactgggattccggggacagtgaccatcacctctgtccacagcagtggctcaggtggtcagagccctggccaggaagtgtctgactctgggaaaggagggtgttggaaggaggcaaggcttctcagagtggaagccctgttggggtgtggaaagaacacaggagattcacttgctgggttgcttgctgtgaggagtgctgcacagaacagactgcacgtttatccccggcctgctcattctgcatggtggtcttgggtacagacttctatagctcgatggtttttatgctgttattcataatgtgtgtgtctgtgtgggtatacacacacgcggatatctgtgtatatatatcataccgatgtcgtgtataaagccaataaggcatgtggtggtttctttttcctgggtagaaacttatttggaggtgaggctctatcctgcctgggtaacctgacataccgtctagcacagcatttggcacatgtggaagacctctgtgccctctgaaaccttgtgattgtgcccttgattggaaggatgttttcagggaccctccaggtgaggggtggccctggcatggggtttcctggctggggcagccctggagtcggccatcagcgtggtggtttatgattctggtgttcaggacctggctggaggcctggcccggctgcctgatctcatttcagctttgctagttaattatagtaaagatacgatttaaataataactcgaattttaggtccaagaaacactgtttaaaaaaaaatgccgtatgtcattagtgtgggtcccacaggacgtgggtttcattggttccctggtcggtgctgaatgtgtgcttggcagccagtgaagttgtgaagcacttgaaggaattagaataaaaattcttgaacatctgataacgttttccaggattggttgaaggatagaattgagtttgatagggccacattaaggtttgcttagaatactgctgtcatattgtttttagtggagccgcctgtactcaggataggccttagccatcgtctcagccccagat

SEQ ID NO: 48402 - DNA, 1382 bp, Bovine  19866881291183
  misc_feature (1)..(1): n is a, c, g, or t
ngggtgaagggcccctgagagctccctggaccgttttgcagtatttctgtgagtctaaagttatttcaaaatagttcttgcaaaaccctcctctgagaaagggaaataaagagtagtaatcaagatgtgggttcgatcctggcttaggaagatcccctggaggaggaaatggcagcccactccggtgcacttgcctttagaatcccacggacagaggagcctggcgggctacagtccacagggttgcaaacagtcaaacaagactgagcacatggcacaaatgtcaatcagtgtgaaaatagcccaggtatattagaacataggaaagcctctagcagagctgaagaaataaatgaagttctcagttggattttgcttttgaagggcagaacacttaacagcagaatagcacaccatggacacataccagcctttgagaattgtcatccatcctgagaagggattgttgtttactttaggtgcttacttgtgttgtttctggtggcttatttcaagttagaggacctgtagatcttcagatacttggattccaccaacatgtatgtaatgacatgctcactttagcagcacatacaccagcgtttatgtgatgattcatttttcattttcagaaccccattctgggtttcatgttgcatttaaaatgctggatgcagatggtgacgagatggttgagaaaaaggaattttttaaggtaagtaggttctagttatttttggtttatcataaaacacctgaaggcttgtgtggtaattctacatttctattaagatgaaaattatatccactgccaatatatgaagtgtcaaaaacttctatatacattcaaaaatactaaaattgctataatacagccttgaggaaacagttacagaacaggagtaggattctggaaggggaaatgagctgaagcgcctgcattttgtagcattttatttttatgatttcagcaaatgataatacaacagaaagggcttcatagataagtaaaaaattgttgttacatcccaccaaaaaaacagaataagaaaaataaaaccttaaaccttcatgaagaatatgagggaaaatgaaaaagccacaataggtataaattggtgcgaattttctagggatctgtgcaggctcgtaattgaaaagctgaaaatatgcttaaattatgtttctcaatacataactctgtaacatggccgcagtaaatctcactccactccaaggaagttggcagtaacgttcagaagtgcgtcagtgcatgtaaacagtagggagaatgctaggcagagctcggtgttcttcatctagaggagcactttatggagaaaacacctcagctctttcatctgtgcttttcttccagtctc

SEQ ID NO: 48403 - DNA, 1102 bp, Bovine  19866881340816
  misc_feature (1)..(1): n is a, c, g, or t
naacctgtgcaatgaaaaatacgatttttaaaacattaaactgttaagcagacgtcaggaaaatgtttgggaatttatctcctttattgttgcattctctcgttgggaataaaatacccatgctttactggaagagtcttctttcttccctttggagttgctgtaggtcttaggtgagcgactggtttgaattggtttggttcacagggagtgttcacagccatggtgctgtcctgttattttccgtgcctttgtctctgtctgggcagcaccctcaggaatgctgtcctcgtgttttcagtgctttttcgattcttaaccactcttgggtatcagtgtgggagcaaaacattttggtatctgagagcacagactatggagggttgaggtgggggtggaacaacaaagaattgctattgtttttcagtccaaaggattaatgtgaaattgaatggtaggagagaatcgggccttgtttactaaaaaagtagttcacatttcttgaagaattgatcacttgacaattactgaatccttactatgcaccagacactggtctagaccaaagcagacagaggctcccgtcttccagctcctcattcgcaagagggagaagcaggaagccggggaattgttggccagtgtaggagctgcgggaagcagacagggccacgggcagacctcacggctgctgtcatgtcacgagacgtcacctgatgccacgaatgtgggctttacctcagaggtacagggtgccctgctgttttagaaataccttccatttacttactggaatgtgtgttctcagtgcttatatccattgaaatgaaaagcaggaatcaaattaaacataatatgggctaatttagaaaaagaaaacccacacttatcttagtcagatacatacatctttgtgtatgttttttaaattgcagtataattggcctccaatattacatgaattacagctgtacaatataggtgattcacaatctttaaagtttatgtaacatgtataggttaggagattttggctgtattgtcagaattttttttaataaatgtgtttaatttatttaaattggcattacattttgcttgg

SEQ ID NO: 48404 - DNA, 925 bp, Bovine  19866881715165
  misc_feature (1)..(1): n is a, c, g, or t
ncctccagtatgattttcttggggaccacctcaatctgtatcagtgggagaactaattattagagtatttaattgagagtttctttcaggcacttttcgagaaacaattgaacatttgaaaattctctggaactgaacactgaagacagtggttgcaaagatccaaatagaccagcccagtcattacaaaaattattttcatttattcaagcctttaaaataaaatattcatttaatgggatactcacagaggcaataaaatacataatttaatcaggctttcaaacccatttaaaaatagagaactttcatttgagaaagctcagctatttttcttccctctagcacattagaaaaaaaaaactgcaactcacaagatactacgttgtgtaagagagccaaattctgtttgacttacatatcttgatgaacagggaggaaaaaatctgcttgctgcagctgctggcatccaggcccttgactttgggcgtcttgaaattatgatatgaattcatggcatgtctttaatgcatctgcctgcttcccattttatgagacaaatgtaggaagaacttgacagacagagggaaaagtcttccttttgcaccatttggaacaatagtctttgaccctccctaataggaagattggtaaaacctcctcccctactagcctttaaacaaatccctagttccttttaatatgtttgcttgacaatggaagcatacagaggactcattcaattgtaaatgtgaacctagtataacgaggcataaatgggacgcatttcaaagcagagtccctccccattgatactcgaagagctaagagctgatcctataattcatgatcctgtaatgttgaagcaccagcttgacccaaactcacaccaaccgaatgcaacaggccctggaaaccaagacgt

SEQ ID NO: 48405 - DNA, 1208 bp, Bovine  19866880350497
  misc_feature (1)..(1): n is a, c, g, or t
ncttgctatgtcccaaaggagatgcaatcactgttccttaattgtttcagcaccactatttttttaaatgttcttggctttaaaaagttcttcattgattacctttataaaaatctggcccagtaagtagtttataatgaaaacagctttttcaaaccatacttcccattacagtttagcttatttgtggaatgcttgtaggaaagataattctaaacacatttgtcttatgctttcttacccacatttactggctggggaagaagtacagtaacaggcattgcttgagctaaaatagcaataacatcctcctcagggctcccaaggatgcaagttgtttcccaagttgtttcccagctatgactagtcagttctcatgacaaatcgccgtggagaagcaaaaaccatggaacaccattaaatgtggaacaaggacggggggaaacagtcatatatacaaactgagcaatattttagctttaatgttattacatttgagtaaattatgactccaatttttaaaagatttgaggctccatatatacacaagcaaaaagctactttactcataatgatactttaattttataaaattcttctctaccaaagaattcaagccaattatgtattcctgaaatatactaaccccactattttcctccaggctctgaaatttcatttatgaaatgtaataaaaacaaataaattccaagtatgagggcaagtttcagtattcaccctttgaaacagtcctttgccaaagtaataagattaataatctaacacatctctgcatattagactcatccgaaaagtaagctgtaaataaacccaatgcttgcttgaaggaggtgtcaagaatattaatttataggtaaataaacaaattaataagagctggaaacttttacaaacagaacagaaaaataagatacacggatataaacacaaagcacaaaaaaggcttatctaagttaccttccaaagacgacattctaaaggcaactgtttggaattctgaacgtatttttcctttcaaaaatggtcctaaggcagtggcaagacctaaatggggcttcttatcaccaattctcagacgctgatgactctgggttagtaagaggactcatttccccacagaccacggaacttttagacaaggaattttacagtttccaaggcctgagaaatccctcctttcaaagcca

SEQ ID NO: 48406 - DNA, 1494 bp, Bovine  19866880485305
  misc_feature (1)..(1): n is a, c, g, or t
nttgtgatccctgcctttgtaccttgcacagaatattccggctacagtaaagaatccgtgctcttcttctaaccgaactaaaaagacagcctgtttgctttgaaaaatggctaccacctgcaattaatctgaaactgaaaacaagcagtataatgacagttagcaagttaacagccccctccatgactttcctgaaagaagagcataagtgacattccataatcttctcaaaaataaaaataattctcagaaataggtttttattttactaataataaactgaaaatgacatatgagattattaaaaccagacactgtgctcctgcagcgtgacaagcctggtataagcgctgtaggaattccctcccaggtccccccatcttttgcctttattctttcagtctggtgtcagatgaatacaagcagtaatgatgatacgatcaaggaagaactgacaactggctgaatgtgtataaaaagactgtttagctggtctttgcaacaagccatcttttgtcctgcaggagcttccctgcacctgaggtagcctgaaccttcaagagatgaaatgcaacataaaattgttaattgatctattctccaaagagttcctggaacactttggagaatttttccaatctgtttgatagaaagacctggccgccaacttactaagttctaactaagcatacagcatgacctaagcagactacacacaattcacgaccatccataaatgatcctggggcattctgaataaaccaaactctatgcacgctaatgtgttgttaaatgctaaaacaattcacctatgggaagaacaaaataaacgtaatgtctctattcatttatttgacaagcactcaatgaaacctgttttatgaagatcctgcgacaaagatggtagaacacaatgagtaagtgagccagctgcatctcactcagtgagcaccaatcatagtcctaaagctccagttcacatacagagcgataaactagcagccatccattcctgtccatagatgctgtgtttttcaagaacttacagagtggggtggagagcagcccacaggttgtataaacagccacaataaaagacaatatatgataaagacagtgaatgctgcaagggaaataaaagatgtcatcagctggactggaacttgaaaactggatgagtagcatttagatgggcagagactgagtcaaaggccatagcaagaaaggggacaatcaagagaggtccagaggagggaagacaggaggcctccgcaggtgtatcagttgaagagggaattacagtaagagggccagaaagtaagtggaaactgggctgcaggaagacttaattgtctggctaagaggtctggacttcatcctgcaggccatcagggggcctctaaaggttgaatgcaatgaacacagcattttaggaagattaatcttggtaaataggacggattagaaagaggggagaatgccaggggggaacca

SEQ ID NO: 48407 - DNA, 1161 bp, Bovine  19866880554520
  misc_feature (1)..(1): n is a, c, g, or t
ntagactactagccctactactactaggaaatccacagattctcacaaggaacatgactctgtagtttaattatcctcattaaattgtacttccttatcttgatttttttctgattatattccttattctcttactagcccagccacactttaaaatatgttttatgttttatacagaatttttagttgttctgtactgggaagatattctctccttgtttatcccaacatattgccagaagcaaaagcacctgtttttacacgttatactccttgacttctaagcttgatgaacacttgtcagagatgtagcaaaagtcattgttgttttgagcaatgttactagaatcttgttctcttgatattaaaaatgtccctctttccctcaagaccatctaaccatataagaaacacaaagttctttgtgtaaaatgaagggccaatgtggctgaaacatagtaagaaatgggaagagaggcatgagaataagttggagataaagactgaaatcaggtcgtgaacgagtattgtggggaactgggtttcattgtaagtcatagaggaaatcactgaagggtgttaaacaggaaaggaatctgaactaggtttatttaaagaatataaatgagaatgacaggttgttggaggacagagaggaaaagggataccttttcattatccagataagaaatgtaggtagcttggagtaagtagcatggtagccaggagatgcaaaagtgtacttaagtataatatctgttgttgtgtaactaattactccaaaatttagcaacttaaaacaatcaacactgttagcacacaatttctgagcaccaggaatctaagagccacttgtctgtgtggttctggctcagagacagtagtcaaactgttgtctggggctgcagtcatcttaagtcttgactgggctggggaatctgtgttcaggctcactcatgtggtttctggaaggctcagttccttgctgcctgttggccagaggtttctgttgccaaaggttattcataacatggtagcttgcagcttgcttccctcagagttggggtgctggtggggagaacaagatggaagtcatagtcttaatatatcctagtctctgaagtagcatatcatcacctctgtcatatgctatttgtacag

SEQ ID NO: 48408 - DNA, 4839 bp, Bovine  19866880584962
  misc_feature (1)..(1): n is a, c, g, or t
ntgaaaaatgaaaagcacttaaatattcaagttgtcacagaggacagctaaaataagtaacagatgacccatccaacggaaggatgggagttgtttttagttatgctttttctcttgaaggaaaagaaatatttacatttctttaagatttagtccttggtgaagagatttaaaaataaggacagtcacacaaccgtttcttataatgttccaaactgtaccagttctcctctaaaaaaaataaaaataaaaaaaataaaaccctggcattttcacaagctacaaatgtatccacccacaaggccaatacagatgaactaatatatattaattttttaaagagggaaaagcttttaaattatgaaggtaaggactgcaaggagatccaaccagtcaatcctaaaagaaaccagtcctgaatagtcactggaaggactgatgctcaagctgaaactccaatactttgggcacctgatgcaaagaactgactcattggaaaataccctgatgctgggcaagactgaaggcgggaggaggatgagatggctggttggcatcaccggcacgatggacgtgagtttgagtacctcctcaaactctgggagttggtgatggacagggaagcctgacgtgctacaatccatggagtcgcaaagagtcagacacgactgagcgactgaactgaactgaaagctcctggtgtctctgaaattcttctgctatttgttaagttgagtcaatgttcattttttaatgcactaaatatttactgacaaccatctcctaagagcaaggtattaatagctaagggaaatcgctaacaaaacaatttttaagtagttacatgactctagtcctcataatccagagggatgtgatattcatacgaagaaagtccctggaaaagcagatgatctaaagattccatgtttacaagagaacaattccatcaaagcaaaagttaaaactgttgggaggctggtagagacttggactctccatcagcaaatatgactaggaagcagtcatttatctcaattgattacattaaaaaaaaaaaaaaaaaaaaacagtcaaggaagaagtaaagttagaggctactgtcctcattttatctatcaggaatggtatgtgtaaccaaaattacatatagtgcttattggcgcataggtataagtgctaaaccagatcaggccagctctcgggttccaaatctaaggcttgggattttaaaatactgtagtattttcaacactaagcaataaatggtactctgtaagtactttcaaattcatggtttcctctgagtatgaaggtattgtatttatttaacagtcacacaacaatgaactgaagagactcaagcaaaaatatgatcctatgcagatggaacacctatctcagggtttaatttcctttcattgattttgtgcccaaactcaagactgtgacaatggttctctagagtccagcaatgtgtaaaaagctactcaggtgaacagaaaagtcggtcttaattttagggttaaaaaaaaaatctcagctatgaaatggagaaagatttcaaaagtggcaaagcgatcacctatccatttcaaagacatgtttatctttttgtgtttcaaaggaaaggccttttgaaagatgtggcatagaaatatgcatgtgaatagaagcacactaaagtcttagctttcaggtataatggctctcccttagaaagtcctgtgcaggattcctgaatatctaaggtacatttcatacgctgccaagtacaccaagggccctgcggtatcacctctttccagcttttatctgatgattcattaacattttcctgcattatggccctaaaccctactactacttaaaagctgcactcctcaactgcacaaatgtattcattcatgtggtactgaaacataccagaatgtcttatttgtatttaaaataaaagggggtggggggtgagggagtggtggaacggggaagaaaagataattacggaagacccagtaaggcaatctgatagtcttcttctagaaatattcatgaaaatctgtccctgaaaactgctggtatttggtagccaatcttttccacacgattttctgagaaacattcttagaaagatcccacaatggggtgataataaaatgcacttcgtcaaatgattttttttttttttttgggtctggcacggagtctctctctctcacatcttcactgtagattgcaactcctcttcttccaaagccaatctcactgcctctgccttagtcacactgtgccttctgtctcgtacaagtccttccaaactagacccctaagcaaggacgcagccatccccggggaacaaagcatacagtcttccactggcttccataaaggcagactttggggattcagagttgaggttcacaaaagtgttatgaagaataacatattcagcccacagggaagaagtacttgtaaaacccctgtgctctgaacacatctcaagggaaagagactggatctttactaaaaaagacaaatgtgaaatataaatgtaatctggggtaagaaatgtgaatttggcctggaaatgatcccttttcctagcacacattcacagaaattacccagcaaagaatgtcacccataaccgggctgagtttgaattgcagcttattgctcagtgtgacccaaatggaaccagactaaatccatcagcagccagatgcaaatggccgtgtgctgggcttagtttcaacaggcattctctttgcctggtgaaaagccctctctccgaccagaggataagttattaagaaattgtttgtcatctcagattgggtggatcatttgtttccctgaattctttttctcatcatttactcattacacgcctcctcctgatggaaggagacatttattagcttctgcatttattgcattggcaaacagaaacattctgctgcatttcctgggggggttcgctcatttatctattggataagagactgaagttttctacagggcagaaaaattaaaatatcagtcaggttgacagctgggaaaatgaaggtctctctgcgacacgaagctttctagagcttttggtttactgagaaagaagccagaatgttgtttcatcaaactaccacttcatatgtaactaaaactgtaggcactgtctggtgaaggaatactccaaaggaatgatacatgtggctcaatacactgtgaagtacctgagatgcaaggctaatttttattttaaatggaaaatgtaacaaaatgctctcgaagatcaatttctgtaagaagttggggagctagagagggaagacggtctgcttaaaccaatgaaaacggagctcgaatcatagaatttaaagctgtaagggatcttacaggtcatggaatcctcttgcaagaatcttctttgcaacatccttgacaagcgatcactctccttctgcctaaagtactgacggcagccaggagatgggcatatcccacagagcagctgattttagaactgaaacttctgcttaacaggggtcactccccagggtgacctgattgcttgtgaccttgggcaagccactcaacctctctgggtcttggggtccttgctttcaaagttaggatggtgacaggatcagagctgaaggaaggggaggtcaccaagaagcttgacaacctcaactcagtccaaagaccactgggtctggtgttccaagatcccttactgttcttggaggcagccaccccacagcagagccagcacctgccagcattttccacactgagatgtgggttattctaatccggatactggagctcatttagagtagagctgtcttcaattcttttctagttcttttttcttatttcatctctggcttcaccccccttgaaccaacacttgctatacacctttctttcgtgacaaagcggcagcaatactgagacggagctttctgctgaggctaccagccctagacacaacccctcaggcggctggcctaccccagtcctgccctgatcccccgactctctcatagcaagctctggggcttagctctcagttcaaaaaaagcataaagagcctagtactgtgccagcacgaataatataaagaaaaattggtatttagtcttttgcacagttagggtttatatatcagacaactccagctttcctgataaaaatattcaagtccaattgaatcattttggggttaagaaagaatacaaacactaacaagtatattatttttacaaatcagtaacatctcttagctaggtattcataaagacattttttcccctaaacagctcttaaatctgacctggcagcaccctgagcagctatagtgttctgtgcactgacatttagttcaacaagaatcagagttaagtcattactgtggagcctcaggttaccacctggaagagatcctcatttgttaccatgagtgcgttactcacagtcggtgaactcaacggaagaaagtgatgcagtgatgtactcgataacttcactaaaagttcccttaaatgtccaactaaatcttagaaacctgcgaaacatagcaaatacaactttccaaagacttattcgtgtgctcccgcccagtatagttaatgtcaacctaaagccagaggatgtgtcattaaaaaataaaaattacacattagttattatgacctaggtgctacagttcccctcatctgccttatcttctatataaccaactcagattaaaaaacaatacagaggtgagtcacaggttaacaattcctacagatcagatctggatacaacagggagataaataaaatgttt

SEQ ID NO: 48409 - DNA, 1569 bp, Bovine  19866880672068
  misc_feature (1)..(1): n is a, c, g, or t
nattcagagagagggtgagatttgaagatggaagatctgatggcatgtcagctgaaaactgttaaaaaggttttatgatcaaaaggttggtggggtaagaagatctagtttgtagttaagagcagaaaaaaaaatttagtgactgtgaggccagtccagtagattggacatccattgtagccagaaaagagccaaagatctaagacagccggggaccatccatgccatagttgcaagcttttttctgcctccttactcttaacattatcaatatagtcttaccagttatggcttcattacttgcagtcttgctcaaccagcctatctcatcagggcatttaggctgcatgtgctttcactctcatttaaaatttcattttagagtgaattaacttctttgaaatatgaaccaaggagttttaaatttgttgctggatttcacatgggatacccaaacattttaaatacatttccagtttttgcctgattttcttttcactggcatcagtcaataggtgaatttttggttttgagtgaagattactattactaatgtaaatttcccatttttattatgaattctgaaataataactatttcctcactttactaccgcatttcatctccccttagtagttttgtcagttttattcatctcagggagagaacgtcagatgctctaggaagtccaggacaagggacaactgattcacacataattcacaggttggtttctttcttggctcagtgttaagtatatgtaagctgtaagctgtgatcttgtaggatcccaaagtcaaccaattctttttttttggatgtggtacattatgtctggaaatttagtattgattattgtggtttctcttgcttgatctcagtgcaaaaggactgggaaagtagcatgaatcaggtttgccagttagctctttttgcttgcttgctttgtgcgttggtttctagagaacactgaatactctgtctctttcatgccatgctgcaaagatactattgacttaaaagttcgaatattgatgaaaaacactgtgttagaaattactaagaagaatatctacaatgtattatacagaggttggtgaagtattggagtgaaaaaactgcgtcactacattgattcttttggggtaaggatggggactacaatcttaaaggaaccacaacagaatctttggttgaaacttttctaaatatgcatagtccatgtcctgaacctctgccatagccatcactcctgggattctactttttctttatcctactttgaatcactatatatactcattatctgtaactgctgttaggattattatgattattgttagatacaaggtgaatatactctggggctaggagaccattgtaattggttgcctagctattttatagcaaactcttaggtaggatataagattagataaagccctcatacataataagcttttagaattttaattaaaaatgaaacaagaatggacacttacggggaaatactgtaaggatgttattttcagtgttgagaaaaggtcatctttgactgtgttcagaagg

SEQ ID NO: 48410 - DNA, 1369 bp, Bovine  19866880676428
  misc_feature (1)..(1): n is a, c, g, or t
naccaagaagacagtcaaagccatgtggcctctcccctcacctccaagaacaaggggtattctgatgcctctgagcccccagctcaggcctggggaaagcttctcagtccgagaggaagggctaggtaccttgggcatccaggagtcctctctcatcacccactgttgactatgtaatctcccaaccggcctaagtgggaggccttaagtggcctaagagttcctttttctagaagacgctgtctccattccccagaacaggccgacagctcctggcactggtggccacgcccctcagagctcaaggcagccctgccctcccctgccatgatggaaagcatcactgttaatgagcttggagaagcgggataaagtgtgtgaggaaattcacagatgatactaatttgggaggtgtaggaaacaccagctctaggagagaaagcaaacaatctgtggagggagaggttagaaatccagacaagtgaacatccagtgaggcgtgctagaaaacaatgcccgtgagcaatcaccgctggcagagaaggaggagcaggagctgcttccttgaggcctaagaggcgtgagtgttgatgtcgccctcgtggtgataatctacagcacgtgagatagggaagtgccagtagaaaagactgtgcaatttggagccattagcttagcaaaacagagcatgccaactcttctagcaaagtccttggtcctaccatgatgggagcaaaaaccttctttttcaaaagtatttttatgtctgctggcattctcctgggtggcaatcacaggaattttgagaacataaagattcgtcaggaggctctacaaatattgcctactgaggctttagaggtgaggatctgggacagctgagcagagcagagaacaacccagctggtcaatagcaacaggttcctgtaacatgaaaacaagctggccaggtcttccttggtggctctgtgatgaggagtctgcctgccaatgcagaagacatgggtttgatccctggtccaggaaggtcccacatgccacagggcaactgaaccactgtgccacagtattgagcctgtgctctagagcctgggagtggcaaggactgaagcccatgtggcctagagcccgtgctcagcaacagaagaagccgccaccacaattagagagtagcccctgctagccacaactagcgaaaatcccacatggcaatggagacccagcacagtcaaataaataaaactgtgtgtgtgtgtgtgtgtgtgtgtgtgtgtgtgcacgcacaactaggtgcagccaaataaatacattttaaaagaaaaagccggccaagtactgggggcaggggtgggagccaaggaggaggaat

SEQ ID NO: 48411 - DNA, 1548 bp, Bovine  19866880691740
  misc_feature (1)..(1): n is a, c, g, or t
ngtttggcacactgcaactaagaccttatgcagtcaaataaataaatataaatatttttaaagtgcaatgaatactaaaccagggaaactcattcactggggcatatgagtagtacatcacagcattcatccacagcgatccacatgctttccaaaaatgaatagatattacatgaggaaggagaacccagccatctcagaatctctagttcctctggcccctctagacagtccttgggtaagaaacgtgttacatccattcaacaggctctggaagatacaagatggaaactgagagatggaagtgcaaatcttgttgctggcagctgtacggtcccaaagcctgaaacagaagagacattcactagtcctggctatctcagacacagtttcagctgctgattctccaaggaaaggacttgactcagagtaagggtgttgtccccattgtctctaaggaacctgtgcttacagaattcagattggttgaattcaaagctaccttggagtctagtaagaagcaaagggcaatatcaacaagatttcaattatgttatgcgattgagctgtgctgggccaccacacccgtctaactctatcaaagtttgggcaacttgaggtttctgagctggctgctctgactgccttctgctcagagtgactggaacctggattccagtagcaatgttacagatgcttatgaaatgggatgaccagctccacagagagacagtcttaccaccctcagcttgtggctgtctttccccagttctgctctctggcatttacagctttatctatgcgaggacacctgggactggaaggaagttcctgtctcagaaagctcaaggtaagatggttatggttgaagaagatccaaattaaatccagtctggagagctgacctgctgttttccgtgatgacctttcaagtcatgagtaactagagtcaagtccattgttgaaactgaacccagcaataggcctgatctacttggattatcttggcttcaaaaggtatgttcatgtattgtatccctgtacagaaccttcccattcatcctttcaacagacatctttgtggacccattctagatcaggcattgcattagaaactgcagatacaaaaagactcattaataaatggacctttctcttaaggacattttggtgggctttacagtactatttccaggaatcactatgtcaaccatagtactggatggggcaaaaccagggtagagtagaaaggataattggggaccaatctcaaggccaaatgaccttaactactacctgatgtgaactctagcgtttctgctgggacaaaagccatgctctgagccttataatttttcttttttaattggaggataattgtcttataatgttgtgctggtttcttccatgcaacacgagtcacctgtaagtataacacatgtcccctgcttcctgaacctccctcccaccccactgccctcatccccccggcccccccaggttgtcacagagcaccggccgagctccctgtgttatgcagcggcttcc

SEQ ID NO: 48412 - DNA, 1537 bp, Bovine  19866880757775
  misc_feature (1)..(1): n is a, c, g, or t
naggagactggtgagctcaatccacgggatcacaaagagtcagacacgactgaacatacacatgcgcacacacacacacacacacaagttcaaagtattatatagatgcatgtatttaaagtaaaagaaatccaggggcagtgcattgtgtatgctcaatattaacattttctcagttttctaattaaaattattataaagtcagattttccacgttgaggatggtaatgatcgtggtgctggtgatgcttttcctggccttaaagccttattgagatatttcaaataaaagtcgtttggtgtgtgttaagatgacttggtctcatttacacactgatgaagtctttggagatttagatttaacatttggtcctggagtgtcttcattccacagcttgtaggttttttgatgggacagagaaaaattttttgattaggtgatagacaaacatcatagctagtgttcattttgtaaaataaatatttttaaaagtctttttattttattttactttttaagattttatagcgaaatgtatatgaagacaaactgaagtagagaaagcaagcagcttttggagatgttaagctgcttccaaactgtaattgtggaaatttgattacagctcagatagaaacatcattaataaagatggtttagcagttattaagaatgtcagaaaagcttgaaattgagttgtttttcagatcttgcattgttagaaagaggctgtttacattttattctgaaaacgattataatttaaagtaaaattaaaaatgaaaaaacttaataaaagataatgaatacatttgagataaatacttcctttatattacatttatgatagctttatgacacatgataagagaaattagtgaattactaaatattggcaagatgcttggcagttttagttttgtgttgtgaaagaaaagcagaaagaccctggacttaacaatctagtgaaacattttcagcacagagttacagttagagcttttgcattgtgttgcagaagttagaactcaacgtttccctccccgggtgtgtcatgtacctgcttttaatgtaaggtaatcgttttatgaggccaccagatcccgcaaaggatgcatggttgctaccctggtatccactatcgtattcaccctccacttagaacggtttttgtgttcctgagagcctcagaagttgtgcctgctcactattatatgacttcttgagccttctaagtggcatgaggagggctatctccatatttttttcccttctctgaaattacctcattatccttggtttatattagaactgaaaagatgggttaagtagtttccttgaaatagaaagctcagacccacatcaaagaagtttctaagatatgaaagtaggaaaggcagcagccaaatcaacagatagctctaaaacagacgaccaggtagaaacgtatcataccagagccttaagaagagtgttctgaatacggcttgtttgtctcaacttcatttttaccaaagtatcttcatttctctttga

SEQ ID NO: 48413 - DNA, 1450 bp, Bovine  19866880770307
  misc_feature (1)..(1): n is a, c, g, or t
ngcctggagaaccctgctgaacacttcccaacacctcccagattagagcacgccaccacattgcactatccatgctgggtttacaaggtaatgggggtgggtacccattggtctgagcatgtggtagggaggattagctgtcgattagctgggatgagatgggagttaaagagggctttcctagtagctcagatggtaaggcatctgcctgcaatgcaggagaactgggtttgatccctgggttgggaagatcctctggagaaggaaatggcaacccagtccaatattcttgcctggagaatttcatgggcagaggagcctggcaggccacagtccatggggttgcaaagagtcggacacagctgagcgactaatgcacacaggagttaaagaaccaaggcagaagccacaaaccaagagggaggtggtaggaggtgggatcagttgaggggctggtacctcagtggttctgaaggacagcatggcagccttcagattgcacatgcttattttaaaggtctagggtgagaaaagactggacagcaagtctgacatggtgaggccctaaggctctcacttcgtagggcgttgacagactgtatctgaattttgaccttgagctcatttcagtgccctattctgaggctgacaggagtgatttaagattgggcaatcaagaatctaaacaagtggttaaagaaacgaggagagaagcttggcagaggtgcaataaacaatgggaatggtctcctgggaaaggctcttgtacagaagagtggcaggacaaggacaataacgatcagaatgactttaacttggggacttctctggtggtccagtggttaagaacccgtcttgcagtgcaggggacacaggttcgatgcctgggaactaagattcccacatgccttggagcaaccatacccgcgagccaaaactggagagagtctgtgtgctgcaaggaaaggtctgcatgatgtaatgaagaccctgtgtgcctcaactaagacccatcagagccaaatacataaatattttttaaaaagagagaaatggctctaccctatgagataagctctgtttcagtcttattggctactagataatgaatgtaggcttgtttcatcatcaatttaatcattcaaaattcaacttaataagtgattatttaaggtctgctgtgtgccacagactggcctgggatcctaggaatggaggttggaatgggaaataagagaattatattaaacagtctctatgttatagacttttgggcctagtttacaacactttaaagaacctccaattttttctgataacaaataaggatattggaacctaaaagttgtgggtggttttatttttactatgttaaaatatacacagcacaaaattgaccactctagccattctcacatgtacaattaaatgacactaagtattttcacaa

SEQ ID NO: 48414 - DNA, 1427 bp, Bovine  19866880807829
  misc_feature (1)..(1): n is a, c, g, or t
ncatagcaaagacaaatgaagattccctgtggaatctttccacagggaaaagactattagcagtagcttacgaaaatctctccttcctccttatataactccatttgaagctaaatatatggtcaactcaactaaaatttccagtttgcttctatttcggctgagccataagcagagttgttgcgtgggacttccaaggtaggctgcttaaagacagctgacctcagctgacagggaatcttttcagtcattttgccccttttccttcttctagtgtgcagtgtagatgtgatggccagagctccagcagccaccctgcagtgagctgaccctgaagagggaaattctgtactaggtaggatgcaggagcgaaacaggaagtgcctggggctctgatgacactgaagctaccattccagtcctgggactgctcacctctagactttcattaaataagggcggggggacccaaaacaaaaaaacttcctaatttaagcaatttcatttttatgatagagaggggcaaatgaatgaggaataaatgttctttacaccttggtatatttgctttttgcacgcctcatgaataactttaataaagtcaaatgcaatgacccagtaggagcatctttttcctttgtggaatcctctgcttccacttgtcagaaatttatttccttctgcgtctctcctttcctgacacagaacagaattaaaaatttttaaatgatgcttaactctagcatcaaagcttactatctctaaagaagccacattccatggaaaccacactgtctcctgggcaccctggcaaaattaatacacagcttctgtaattaccttttcattccatctttgctatttctcatataaagaaacagagcttcttctggcatttctacttttattccatgcactttagaaacttcactaattagagtctgaggggtttttttttttcttgatttagtttttttttttaattagaatagaaatccttacattcattgacagccttgcaataatactcaagctatattagttatgctattttatctcacgcctcagttttttcatctgagcaacttcaacatatgcaccaaacactcatttggcattccaagtttcctattatttgttcatttcttcattctacaaatactgaaggtctgtgccagaaactaggccaggaatttgtaatgtgatggtgaacaaacaagatacttggccctacttctatggagcttattatggcatactggagaagaaagacataaatttaaaaatcacacaaataaatgtataattaataaagaatcacagtgctaccagaccacatatagggtaatcttttatttatttctaagaagttgtctttcgaatgagtctccaaagccctgatttctctcaagtaccaaactaccctt

SEQ ID NO: 48415 - DNA, 712 bp, Bovine  19866880825177
  misc_feature (1)..(1): n is a, c, g, or t
nccaccacagggataagcctgcaccctgcaactacagagccccccctgctggtcagaactagagaaaaggagcaatgaagaccccaggcaccagccaaaaataaaaattatagataaataactgatgttattttgaaaaatcacttggagaggttattgaacttgtaagttccctgatacaaagggccttgagtaattatattgcatgttgtccattaataacaatatttattgagcacatactatgttttgggcctagtagcaggcaggaaatacaaagcaaatgatcattcatttctagcatcctaagatcagattagattctaatcctaagattagaatcctttaaaggatatattgtccacacccaagccttaagtgtcttcagttataaactatagactgacctcacttctcaggcttaagttcagttttttggtcaaagctttggtctgtattttttccaaggtaattctttcatctaacaaaggctgtataatgatttccaacaaagaagatattcagaataacatgaagaaaaataaaaattggtacagagcattggaggtgacctgtgttgggaattcatggcctctctgcagttctaaaggcttggagggaattagatcaaatatctgtgtagcctttctgttttagaatctaaaacatcaaatttgtatgtcgttcaaattcttcattcggggggttgagg

SEQ ID NO: 48416 - DNA, 1635 bp, Bovine  19866880828220
  misc_feature (1)..(1): n is a, c, g, or t
ntatcacctagtatctgtctgtctagccacagctaaatttcacctcattagaaaaaaaagggctctgatgaaaagtcagtgggaggtttgtcatcagtttgattcagttcagttaataaaccaaatgtatggatatgacacttggaccataaagaaagctgagcattgaagaattgatgattttgaactgtggtgttggagaagactcttgagagtcccttggacagcaaggagatcaaaccagtcaatcctaaaggaaatcagtcctaaatatacattggaaggactgatgctgaagatgaagctccaatgctttgtccacctgatgtgaagaactgactcattggaaaagaccctgatgctgggaaagattgaaggtgggaggagaaggggatgacagaggatgagatggttggatgacatcaccgactcaatggacatgagtttgagcaagctctgggagttgatgatggacagggaagcctggcatgctgtgcagtccatggggtcacaaagagtcagacacgactgagctgaactgaactgaataaaccaaatatttgtgggttatctggtttgtctttggtaccttatcagacaccgtcaaaaatgtataagaaataaaaggtacagtctctgattttgatgagctcgtcagttggctgggtagaataaacatttatacaaggaagagctggagacaaccatggctaaacttcgtataagtgtacatctagaattcagcctctggtcaagtgtgctcttagctagttcttttatctccaatttatagcttttgagaaatgatagaatcccaagattcacctgtctcttcaacctttcccattttaggtatgaaagtgtgaccagtgatagttttcctgggaggaagtgacatagatgaagagagaatgaggttgtaccgggataggagatgaggaagagaggtgattatgaaattaaaggttgttctttccaagagattaaagactgtggattccttgacttgcctccattccttccaacttttactccacctgttctttgacttctgtctctatttaagcttatcacttgactggcactcgtttcaataaaaccctcagtctccaggaaaaaaatgtcctgatttatagcattttataatgccctgatttaggccagtttctgtggtataactgttccctccatgatgagctcaaattaccgacgatttaatggccagatcccagaatccctaaaatttaacactcagctgtcccaagctgggctgccactacaagcctcctctctgttgagctggtcatccactgaccacttaacagagcactgggtccagatattattggcagagtggtggcttccataaaattccagcttgggtagcatccaccggggatggaaagttcaggaaaggaaaatgtagctctatttggtacctggtaccccaacagaatgatcagagacaaaaactggaaagttgagagagaatctatgcagttgagttcataaacttaggagagaagctcatctttttgagatatgctgtgtggcctgtacagaggactggcttagatgacctttgaggattattaagtccatctttaaaaaacttctctgaaggtttctcaatgg

SEQ ID NO: 48417 - DNA, 1246 bp, Bovine  19866880861272
  misc_feature (1)..(1): n is a, c, g, or t
nattgggaaaagagtacatcaaccgctatatattgtcactctgcttatttgacttatatgcagagtacatcatgtgaaatgctgggctggatgaagcacaagctggaatcaagattaccaggagaaatatcagtagcctcagataagcagatgacagcaccctcaaggcaaaaacaaagaagaactaaagagcctcttgatgaacgtgaaagaggagagtgaaaaagttggcttaaagctcaacattcagaaaacgaagatcatggcatctggtcccatcacttcatgggaaatagatgaggaaacactggaaacagtgacagactttattttcttggctccaaaattactgcaggtggtgactgcagccatgaaattgaaagacgcttactctttagaagtaaagctatgaccagcttaaacagcatattaaaaagcagagccattactttgcctacaagtatccatctagtcaaaactatatcgtttttccagtggtcatgtatgaatgtgagaggtggactataaagaaagcttagcactgaagaattgatgtttttaaactgtggttttggagactactcttgagagtcccttggactgcaaagagatgcaaccagtctatcctaaaggaaataagtcctgaatattcattggaagaactgatgctgaagctgaagcttcagtactttggctacctgatgagaaaaactgactcactggaaaagaccctgatgctgggaaaaactgaaggcgggaggagaaggggacgacaaaagttgagatggttagatggcatcaccgactcgatggacatgagtttgagtaaactccgggagttggtgatggccagggaaggctggcgtgctgcagtctatggggttgcaaagagtcagacacgactgagtgactgaactgaactgaacaaatctgaaacacacatataatgaactgggaaagagttaatctgtctcaatgataagcataatctgtggtaggcaaaaatcaatctatacatctctccactcacacaggcaagtaagaacagggcaaggaactttcttccatgtcagacctacatcaagcatgatacacaggaaaataaaactacatgctgacactaagagacaaaaaaatggaaatatctgaagcagctgaaccataaacttatacagtaatattacctttagaaactgtagaacatgatcactgtgaatatcaattagccgtaacaaaataattaagg

SEQ ID NO: 48418 - DNA, 1617 bp, Bovine  19866880865390
  misc_feature (1)..(1): n is a, c, g, or t
ntaatcttgaaaatagcattattttaaatttgatgggttctaaaatacccctagagaacacaggagaaatatttctcatcaataaggaaacccctgggtgaagatttgtctcctcattacttttatccaacactaagctaatatatatatatagttagaatagaaaactgaaatgcaaaccacgttactggcccctaagggaatttacttcttactaccctctgaaaaagaagacagagagataacattgtactttttcattcattaccttactgttttgccaaatacccaagaacagaatttaaatccaatcccatcctagctttaagattctcaagttcagatgtctgtgaatgtctctggacatggatttccctaatcccctaccatgaacatcagtatctaaaaggagtcagctgtgcttcaaagggtagaagcacagacacgactgactgattacagcaagacacacatctgaacaaataataaaataggattaagcatcaggtgagctgagacaagcacatgtaccactaatgcttccaacagctgaagaggaagcagggttacattccatccgggtgctgagaaccaacatccctcccatataccttggatttaaaacaggggaagggagatgggagagaaggctagaagcaccctccccattaacatgcagtgaaagaccgaaaagaatgagctgccacatacggctcatcacaggaagatgctcgagtacttttcccttctaaaaagactattcacaataggattcattcatcaaacactatgggctcctcagaatggggttatttaaggtgtaagtaagcattttatcttgggttcagctattactcctgcaagttaaagtccatgagttatttatgatttgcaaggtgtcaaaacatacttttgtcaccagaaatcaatactactcacttccagggccctcgatttcctgtgtggtagttaggtctgtgtgagagtgtgtgtgtgtgcatgtgcaaatgcagacattttctgaaaccctttctgtatacatgtcagcctgtattgatgattagatgacagactgggggaaagagaggatgggaatcagcgtaattatcttccagttcctggactaggctctggtatattttgcttggattaacctgtaagggcaaagctctgtctctgtattgatctgcaatgcttgttacgctgccctaatgcactgttttcactttgggaaaatgctaaacgagattactatctaacattagaaggccataaaacccaagcatggcaccttccattcaggaaaagggtttgaaagtcatttccaatatgcattatggtaaaccctccatacagtcattgagtcagcaattgatttttattgactgcttccattcctgcttatggaaaaagccactattaggtaaaaataacacaaggcagaatttcaagatacccaagaaggaaaattaaatcttagctgcaagagacatttaaacaatttaatttcttggtatgaaaagattaacaaaaataaatagtgaacaacaaaagagaaagatgaaatatttggagaactcaaagctataaaaaaagaagtgagagagagaatagtta

SEQ ID NO: 48419 - DNA, 1375 bp, Bovine  19866880918711
  misc_feature (1)..(1): n is a, c, g, or t
ncctgctcttccgtccctcttcctttctgtaagtcatcataccccgtcttgaaggattcaggaaagtgtgtgggcaggaagtgatgggaaagtagtttccatatcagaatttagaacttatatccacatctgggttgggcctaccttcatgatctcaatgtgtttctgggtttttgtgtgtgaactggaaaggggactgttaacatctaggaatacatccatccttatactaggaacagagagctcttcttggcctcctccttcacccagggacagtcccaacaccatgatctctcctcactgcttccttcccagcccagccagagccagcagtcgtccatccccagctcttagtcatctccttccagcaatgaacgccatcattaggagcctttcattatcagcggcttgcatgcagctgatgttgatttgatagaatccaatttagcatcccactctgggctctgctccataagcatttgggtttagcatgtacaggcagtttgatgctgtcttgatggccttttaagcggctgagaaaattgctggcatggcaatttggtggcaggcaggctcctggcgggtggggctggaggaagcagggaaggaacaggagagggggcatttcagcctgtgtgtgtaaaagatagctaagtgtttgggaaccgtgcacttaaagtgaagagagaacagaccaggatatctgagggcctccatcaggcgagatttcccagtggcacctcctcctcatgggcacggtgctgccctcagtcaaccacctgcttgtcaccctgtacccgagatggcacatcaccaatcacagaacgctctcctacaccatcttgtttttatgatgtgcccccagcaaactgtcaggctgtctcctaaggatgctgttacccccgtcctgcagaccaaaaccaagcctcaggggcagatgcccaacttggtagcagaggtgctgatggctgagagagtgcagggctcaagagatagcagaaattattgcaagagtgtgagaaatggagtatttcttgtcatatgagtaaacaaggatgttacagtcatcagtgatcctagccctctggggcagccaggaaggagaagaatacctgtgtgatttggcagccactgggctgcccccactccttacagtgagcaccgaggaactcaaggcatgaaaacacacaggttcctggctccaggagagctgagatgtatatgaaaggaatgatttttagttagcccagactcttgcatcttcccagacatagaaaagtgctaaactccttaccttggggtatctgggttttctttaattcacaaaaatactttttgatgttcagactacctgcccttttgttgcaaacttaac

SEQ ID NO: 48420 - DNA, 1006 bp, Bovine  19866880939069
  misc_feature (1)..(1): n is a, c, g, or t
nctgccacgatttttgagaaagcctgaaaagggagctgttctaagacactagggccttttactgttggaggctctcgttttaatgcatcagatgtagtcacacattgtgtgtattgctgtagcagtcgaaaatgtaaaaaacatttggttttgagtgtgttgccccatttgaagtcggttgtgattttctccacagtcattgtaccttgttggtagtttttgagaaaatctaactcacaaattatttaaatatataataaagtatttatgaatactgaaattcttgaatatttttcagtagtgacaagcatgtattttcattttgtagttgtcttccgtattttggagctgttcttctttcgctttttctttctcacttctctcttcctctccttcctcctttactctctccacccttccctcctccccatcccgccccccttctcttctgtgattggtctttgaaaatcttttggttcccatgtaccacatctttgcttcctaaagaataaagtgggttcataaggagtgtttttatatttggccaaaggatgaattgatcaaataaaggttgtgtactgtcacatcatagttacatggttcttggctatgtatttcaagggttacttctttaataccttgtatgacagctctctgataaataacaattgctaccacttactgagcactgattctttgcctggcagaattatgtctgttcctcagtcctcaaatttagggtctgcactctggtcttcttgctctgaggtccttgaattctggttttcagacatcttttaagcagtacccttccctgctccccccactcccccagttcttcgcaaatgagattttgcagaatctcagcatcccagtcgcctcttgtttggtactggggtgagagacgcggagcctgatgctgggtcccatccttagcactcagctgctgactcccaagcagctctgggccagagggctgcgtgaaccgtgtaagattagcactgcc

SEQ ID NO: 48421 - DNA, 2814 bp, Bovine  19866880942179
  misc_feature (1)..(1): n is a, c, g, or t
ntgtggcctccgtggttagactctgcacgtccatccggcgatgtgggttcaatgcctggttggggaagtaagattccacatgcttcaagatcaaaaaacataaaacagaagcagtattgtaacattcaataaagactttaaaaatggtgcacataaagaaaccccaaagcacaaacaaaacttgaatggttttgtcctctcagaatgcgcttatgcaagaaatttttgactaaaggtgaatgtcattcagcccagtttacatctagaggatgaatttcagatgtgggggcaaaacatggcacaggctatttccttatacagatattttctctgaaaatgaacattggaaccgaagcccgcttagagacccagtttgctctcctcttcatttcagtaaccctttcggttttctgaatcgttcctgatgtgtggtgatgtgttacagtgatagctgatgcccaagatagctgatgctcagccccgacatttccttggtggtagttgtactagtaaatgtgaataatgtcaaatgcttggcatgtttccttctgcagatggtggggaggaaatcctgcaaagccttataaagatggcagactgtagttttgaaaaaagtctgtggccgtttgctgtgaaaagggggaactaatagttaaatatctaggaactcttccctttgggacagttgataaattgaaggcattttctgattgtgctttactctagattaacagcctggaaggtttcagatttaaagagcaaagttatgtatcatacaaacaacatgatgacatgctcagccaccctgtacccaaatattgcaagtcgtgttggttgctctagctttaaaaccaaccccccccccccacccccaaccccaaggtctctactctgatgtacttaattagctaaatgcttctgtgctgttttcttcctggaagtaggcttcgagatagtctggtgtagacttaccagttgacagaggaggacacaggacctggcttggtaacggcctgcctgcatgtcttgggctcccaatgtgttgccttgggtgtatcctgtaccgctccccatccaagcgtcgcctttcccttcattccatttctgttcctcctgtcccccctttcatgctggacatcatctcttgacatcccttaacacatttacaaaattctttttagaggttagattagtatcagactggcctgctgaatctccctctaagttggaagataacgttttatatattgtgtgactcatgaattaagatcttttgctctaaatgacagtttggaaaagaccgttttacagtagtttgcttacacaaatctggaagggaatatgtgattgatttgctgacagaccatctccgaaagcagttctaatgatggactttataattgattgcatccatcacagagagcctaaactaccccctccctaaattaaaaaagataaatgaaataaagtatgctgaatgtataagctgacaaatctgagggaatttaatggagcgaaattacggcagccaacagataagagaaaaagatttctttgttactgattataatactaaattaaaaaaaaattactcaagaaggataatagaggaaacaaagctctgtggcccatgtatcaaactaagttattgaaagatttttaataagtgtatctatctcattcactgcttattgttgattcatatcagtcttgttagtgctgttggaagaatagtaaatgcagggatggtctggtagtatagctgatactattgctgttgtaatggatttttagaattaccatgaccttatttctgggtcgctgggggctctgtaccaaattcaggccatttgaatgaactgtttggaaggcagttcctcagtgtagaagcagttttacagtaagtatgcttttggctctgttataaaagaccaagtgaaggtgacatcaaggagttctggggcgaggctgctgtgggttggccgcttcagtggcccgatgatatgatggcagtagcatggtgttcctcttggcttttcctcccaggattatcacatggctaatgtctgaatatctgggctttgtataacgatacccagtgttgggaagaggaacctgcttcctgttaatctgcttggaaggaaactactcctcgaagtccttaggtctcattggtcagacttgtcactggtaaggaacatgcacgtactagggttcattcaaacaaatcgagacgtgccccggctcttacagagttcacgctgcctgtttcctgataatgcccgggggaaaagtgacggggaagattccttatctagaaaacatataaatccacttactaggctactggaatttaccatgcaaatgtttgatgttttcccttagtaacttgtttcatttcctaggtgcatgtgctctcactgacttaactctacttgtttctactttcagcttttaagtttgactcagcctgatacattctgtcttgaacaggaccctgtctaccagtgatgacgttgaagacagagaaaacgagaaggggcgcctcgaagaagcctatgagaggtgtgaccgtgacctggatgaactcattgtacagcactacacagaactgacgacggccatccgcacgtaccagagcatcacagagcgcatcaccaactcccgaaacaaaataaagcaggtacggctccatccctctgatggccacgactagtgcatcttccattggtccaggtgttgcagtggggttaatgaccttaacaagtgattcaggttttttttagcccacgctcagaggatcacagagggcag

SEQ ID NO: 48422 - DNA, 1437 bp, Bovine  19866880942830
  misc_feature (1)..(1): n is a, c, g, or t
ncatttcagctacacagtagagcactcagatttctatgacctgtgctgaaatagaatatagatatacccatcatgttttctgagctgaaaattgacacacatgctctattatttgtacacttatagagacaattaaatcagtccttgatatcaggatcatcctagaaaatctaggacatagagttgccataattttagcgaaccaattaaaatccctgaaaagggcttcttatgtagcacaatcaatataaggacattctgaaaatatggaccaacttatccaacaagacataacaagacatcagccttaaagctttcaccaccaaacactgaatgtagaatcacataaaaacagtgaaaccctaaaatagtagttctcagtatgtatgtggggagagaggggcttgaatgtgcttatgcaacatatactgaacacaagaatttggggcagcacacttgaagatttcctgaaatagcaggaaacaagtcagcagtaatgacaaggcattcacaaatacagcataacatcatttctctgtatctttgaaagtatccacagcaaggactcagatcacgtgttctccacttagtatcccatcgctgttgaagaaaaactgattcttacattacccatgcatctagtgaaatcatgagtcttgatagtaccttttgctattaatttcttatttgcaatattaagtatgctgttctacactgtgtcatagactccagtgagcaatctgcttaacagatgtacacatagttaaaataaattctacacatgggctataacttggcaaagtgtgccaagatttcctggtatctctggcatagagattatcctagtctcagcaaatttacagctggtttctaaaagaccattctttaagacacacacctatttttttttccatttttgtgttttttctcttcatcctacattcatcataatatactggctgaaataatgaggattggtatctgagcatgaaggaggaatgctagtgagtggggaaaagtctgcccagggaatgagagaccagcccaccctagctcctgtctcgtctgctctcaagcccagcaaggatcccaggtccctttgatttcctttgtgctggatttagagtgatcatctctgacaaacagagcccaagtcagaagaggctcatttctcatctctaatccttaaacaggtacaaacatatcatctgtcatctctcctgaatggctcctctggccttgatgaattctcaaaccatttttatttgagagcccagggacattctcctaaccctttaacaatatctgcctgtcatggatcttgagagatttctgaaatgcaggctgttagcctctttacttccgaataacaaatgcttaaagcgcatcaaggttacatgagcacttctgctgtgatgtgggtaggcagaaacatgc

SEQ ID NO: 48423 - DNA, 1236 bp, Bovine  19866881030085
  misc_feature (1)..(1): n is a, c, g, or t
ncctgaaaaaaaaaaaaaataaagactacatttaggtgacagatggtaaacctcttcacgttataggcatcttgccttcctgggacgattgggaaagctctcttcatatttccaagcagttgatctttgattgtgtttgctacttatgcaatatctggggagaaaaaaaaatatcctgttgcttttaaatctatgaaaagtgtctcaccttggtagaaggcagttttcatcaaagggagaaatgagcagggagagcgagaggggagaagaggagggtggggagagacggagcgcgaagtgaggcatctcaggatgccatccgtaccctgcgctgtcaaagaagaggcaggcgcagagagaaatgatagcaggaggggatcatcaacatctggaattcactgctcatcacgtcttggtttagtctaggtgaaactgttatgaaaagatctattccgcttaaatccattcattttcacaacagcggagagaaacaccaagtataaccaattccactttgcagattcaggaagtgagtacctagtgtcctatgacagaggggctggagagggaatctagaaacatccattccctgggccagctctggctcaccacagcctggttcccaggggtcccttgctgctcttccttttccagttcatccttttacttctgacagcatttccttctctaaagtaattagaagcactagttctgaggttctgccatttggagaaagaatgattttttaaagttgaagctctcaaactctggagtcaatctctcaaggtttccctctggctttaaacactaaagggcagacatgctcactgttcttaaagaaaagataactcaaaagcaagagttaagcccacagttacccatctgtcatagaaaagatttccccaccactgctgtatttggaatttgcagtcagcaacatgtgtcacgtcaattgcttcccattgttttcaagctccctatttttgagaatttgacaacctaacaaatatgttttcccccaatcacaaaagtcagtttgacatccttgtttctccttaatagataaaggtcctaggacagaaatggcaaatggctttccctgcgctcttatcaaaatcaatggaggagtcagcatccagaattataactctggaactccttctaggaaggctgactagctaacatgcacagtccagtcctggactgaccagactgtagcaagacaaagaagaggga

SEQ ID NO: 48424 - DNA, 1332 bp, Bovine  19866881039075
  misc_feature (1)..(1): n is a, c, g, or t
ncaaaattcacaagtggaaattaaagcaatagaagtggaaatttagcatactgccccaggaaataataaatgtttctctgtgaagaatgagtcagcaggagggttttttcccttcaagtttcgtgttttgtcagtattttagaggcttttgtaggcaggatatattggacacatggcttgcgaacaagctgtttgtcttggtttcatgcctataacatgatttccattttacaaagtctacaaacctgaaatttggggccaaaactctttattatacagtaacacagagaaagcaaatattttgattcaaccattctttttgaaagtcaaagactaaattcttgggttggtgttccaaataactgataatttagagcaagtctgtagtggctatgtggcaactaatgctataaaactccaagaattaattacctgggaaacttcattccaaagtgatggcactgttgtttctagaggtctagaattttagaaaggatgttggcagatggttcttgaagcttgcatggtactttgtgttaaactgtactgggaggtgtcagtgatactattttagagagaagcaaagtctcaacagtttgcattattactattctcttttacccgtcaaggaatcttatgctaaagggacaagagtctgttttccgtaaaggaagatggagcagagacaaaagaaccatgaatccttcttccacaaaattcttctctccattagttcccactcccgctgagataacttgttccggtcattagcatataaatgctactctgaggctaggtgccagaatataactttccctagaagtttcattgttcagcatcatcatcttaaatatattctggttgtgatgcactgcaggcctgttttcatttgtctttatgtaaagcgaattaatgttgtgtgctatttctctagaaaagtagtgggaaccagactagtgaattttcttttgctttcacttcctgcagagccataatactttcacagctaattttcaaaaatcaccaggtccctcactttttattttattttattcttgacccccaatctatctattgtctatttatgctgctaagtcgcttcagttgtgtccgactctgtgtgaccctgtagatggcagcccaccaggctcccccatccctgggattctccaggcaagaatactggagtgggttgccatttccttctccaatgcatgaaagtgaaaagtgaaagtgaagttgctcagtcgtgtccgactcttcgcgaccccatggactgcagccccaccaggcttcctccgtccatgggattttccacgcaagagtactgca

SEQ ID NO: 48425 - DNA, 999 bp, Bovine  19866881062283
  misc_feature (1)..(1): n is a, c, g, or t
ncatctctttcggaattttcccacagtttgctgtgatccacacaaaggctttggcatagtcaataaagcagaaatagatgtttttctggaactctcttggtttttcgatgatccaatggatggtggcatacaacataaatcctatttaattccccctttttttccatagattctcttttattgcaaattcactaaaatcagaatttgaacctgaaatgaaaggattaagtcacaagttcatgcatcccacctccgcctcttccacattttagcacaaaattcaagtgtgagcatcctgtcctgtgtcttccacttaggaacctcacttccactactctacattctattaaacttcagaaattccgaagtcccagaacaaacaactacactacttcaatactccctttgatatgctaacaatccctaagagaatttcaactaacagttgaaaagtaaacgttagtttaggtctagaacagtctgcttgggcataagttaggtgaaatattaatacattaaagctgctggtaatggtcttagctggagaaggaaatggcaacccactccagtgatcttgcctggagaatcccagggaccggggagcctggtaggctgccctctatggagtagcacagagtcggacacggctgaagggacttagcagcagcagcagcagcaatggtcttagcattagtgttaaaattctgtaagaaaataattattttaagcatgccatgacagatttgctacattcttaagaaatgcaaattatatccaggggcccattttttttcaatatagcatgtccaattttataaaagatgtattaaaataaatgagaactataagccacttaaacatattcacttaacagcaagcttggttgaaacacatcttttttttgtttttaatgagcaatatttgtacttttatcatcttaaaaatgcttctcttattcacactgaagtaatttttctgtattttcctaagattctctca

SEQ ID NO: 48426 - DNA, 1542 bp, Bovine  19866881073305
  misc_feature (1)..(1): n is a, c, g, or t
ntaagttccctgcttgcaacaacaattctcagattcaaagtcattcttgaagactgagtttaaaacaaggtaccgcatttcttagagccttcgtacaaggctagtccctgacatggctgcagcttcctcctctgcgctccaccaagactctccctgctgcccagcatgactacactttagctctcaaccacggcttgccttatcctcttcaaaacacaccctctaagaccgtcagccactcaccattggagctactcctaggctgcaagacaggaggctccattccactgacagatttgaatttgacatcccatgtcttcgaccataacctccttatttcttatcttctattctccttaatgggcttccttggtggctcagtagtaaagaatccacctgccaacacaggagtcatgggttcgatccctgagtagggtaagatccgctggagaagaaaatgtctacccactccagtattcttgcctggagagttccatggacagaggagcctggcaggctacagtccatggggtcacaacgggtacaacacgatggagcacccttcatgtcacttactgcagccttctttatggtccattttacagagttcacatagtttacaaagcactttcatatatctctgaattctcaaaaactccttggaagtgcctatgctgggctgaaagagaaggaaactgagatgcaggaagactgactgtggccaaagttatacatattcagtgagcagggaagcaccctgagtcatctgacttcctgaaatgtcctgagtggatcctgatcacagttctaggcctggctgggaccactcaagatcgtacagttctttccaatgagaagagagactgggagagggaaaatgcaggagaagaaaggaatactattatattcattttaaaaaatctttacagtgactagtttatcatacttgatacagatgggaataagcctgatataaattatttatgatgtgtaacagtttaatggagtataaaatagactccttttttttacagttagtaaaagttgcagggttcttaacggcacatccagaaagagcctggatcctactcatctagacttctgacagaagcatcaatttactaaactgttccctaccaactacacgttaagaaaaaaaaaattactctcagggttaataactgcaattttctgaaaatactgaagaatccactgtaatttcacatcactgaatcctgtgcctttgtacattataagaatttttagacagtttctcctgttttttcttattaaaagaagatatctatatgaaatacaccgaagaactaaacagatgataggatctagaccagtattatagacttgaaaatactatatgacaacatccataaaacatgaagaaagaaaaacatatgacataaacgtcctctgaaaaagcaaacaagtaattctctctggtcataatgaaaacaggaagagtaatctaaatgaagtccataggtcgacttcaataaataacacactcatgttatttataaatag

SEQ ID NO: 48427 - DNA, 713 bp, Bovine  19866881075910
  misc_feature (1)..(1): n is a, c, g, or t
nttctctctcatgcagatttcattcttcaaaatggggttcattaatcattttcctctgacactccaactaacacctctcatcaccattcgtgacaggtcctggtttctcaccatcatacttcttgccattgttcccaaggcagacgatgtaaataaccatagcctaccactgcaaacattgaaaccaggaagagaaccaggcaggcttcacctgcaagggctcatgaatgcccagagggcagcttgtcatgtgcttcgagagggacagaactcagagggaacagaaggaagcactcttctatctgagcagaaacacccaggagtgtgggctgtgctcttaccagcatgtcggtggcactgagatagtgcttgctggccatgcactgttccagcttttgaggcacttgcttgatattctcgatttcatccagcaggttcagaacatgtttatgttcaattccttcaatccacagcttccgaagctcatctcgtttgcaatgcaatagcatcttgcatgaaagcagattctctttcacctggaacagaacagtttccatcttggggtcagtgcaaagtcttgccagactaaacctacagtgtgggtttgtattcttcaccattaccgctgtaacagtctgtagttctcactgccacccgttttcctgaggctaatctacatgtggaattctaatcctgattaacacacagattca

SEQ ID NO: 48428 - DNA, 1768 bp, Bovine  19866881090841
  misc_feature (1)..(1): n is a, c, g, or t
nactacggcagaaagtaataacattctaccctagggtttaatcattttatcaaatgcttataaacatgccaaggaaggaggtcagagcctaatacaatcttttgactaaacctgtcacaacacctttctgtgcttcactaatttgcacatgtgcgactaacagtggttacacagcagaagtatctatacactcaggaaaattctgaatgttttcttacctaatgtgagtactgaaagcaaagggaaagcacagggctatgggtcagggacactctgatccgtcaattacagaacactcatttaatcatcccaaggattaatacagggagcaatttaacatcaccttcataatcaagggcaagggaaagttctgtgatttaaatgttttcaaggtacacgtaaagcaataaaaacagcttaaatgggagaaagacagatacccaaatttggacatctccatcattttattatatgaaagtaaatgatctctgtgtttctactgttagaggcaacaatttaacatccccttcataatcaggggtatcctactaaaatcatattccaaatgaaaacaccaccaccattgctttcaagttcaccagagttcataaaatggagttgcaacatactttcatcagaggcctgtcccttgcactggaattccatgatagcaatattggtccaaacacacttccaagtattccagagggctaacgtacgtgccaaagagtggtaaaggcgtgctttcgtcttgtcgggaagggtacataatgataatactattaaagacttacttgaactttgcttccacctcctcagcagctttctggtattgctcggtggtaactttgtagaactctgagctctgtggataaagagatagcagagttttcactactcaagaggacaacatgtgtgcaagacttacgatttcaaaaactacataaaatcttgtgtctgccgctccagcaaaaggaggaagatttcttgcatggtgacaggaatacttaaaataacatgtaagattatatatttaataatggtatcattgttggcatacacattgtaatcacagactaaacattcatgtaagtcatcaatatttgaaccttctgaaaaaattcctaacgtagttctgaaagactattttgatctcccgtatttggaatctaccactgcaagaccaaagagcacttgagatgaaatgtgaaattcacacaccatattttcctatcattccagtgttccacctaggatattaaaggatcatttctttttacactgtatatttgtcctcaagatggattctttaccaagtacaatttgttctgtcatctccatacgaccacaagagcatcaacatttataacaaattaatcagtaagaacaagggggcagatttaggtaatttttattaaaaaatgtttccactattacatgaatgaacacataagcaatataaatcaagttgtaagagccaagtaatgcctttcctggggcagcaatattaaaaacgatccattctgactagctactgtgaaacctgtcttactgcagggggtggcctaaatgacccgatgagccttcagactccatgaaataccctgcaaaatgcactgcggtacaaaagaacacaatgcaatgcagtggtctattgtgtcccttcgttctctattcactcaggtttcacatgcatgacttggggtggtttattttttaatacatcattgttggttggtgagaaaagaaagtaaatcctcttcacacc

SEQ ID NO: 48429 - DNA, 2679 bp, Bovine  19866881094930
  misc_feature (1)..(1): n is a, c, g, or t
nttccttctgagtaataagaaaaatagtactattttcttttctccttatgcccgcattcctaactttactcacatccattgaatatatttcttaaccagtttggttattctgccatcccctcagtgatccttggaagatacagcaaactcttgtatgtgtgtgtgtgccaaactgcttcagtcgtatccgactcttagcaaccctatagactacagcttgccagactcctctctctatgggattctgcaggcaaggatactggagtgggttacagtgtcctgctccaggagatcttcccaacccagggatctaatccgtgtctcttttgtctcctgcgttggaagatgggttatttagtactagcaccacctgggaagcctgtaacaaactcttaagctgaagtaagaaatgggatctgtgacattagaggtgtcaatattaatcgtgggagaaatgactgctaaaaaacattgaaggaggagacaaaatataaacagtggggactgtattaaattactccggtgatgagtattcctaataacggtcttgattcgtctgtaaaacaaaaccctaaattcaacagcatgtcactatgctttccattcggttgcctataaaggaaacagggaaatgaaatactcagaggaaagattttccttacagatggccacagatgtaatcagggatttaggatgcatgaagagataagcctcagttatgtagaaaatgcacttacgtggagcagtttatttcccagggacgccagataattgagttacatctaaaatcttgacccgtctaagacacacatgtacatgtctagtttcagtgagctgagaggtgttaaatggtttgaaaactgtaattaaatagctgaaattgtgctgcaaaatcactatcagcatctccttattgtagtatttcagcgttaagtgctaaaatttaatccgagtagctgtgactaatctagtctttattagtaacacattcaaattaagaggtgtgtgttcctgttcgtgtactttctcattagcactaatactgctaatggggagtgacaaacgtactgtgtttttgcctgtcacttacccccttttagatagctagctccttagagaaggcaatgttccctgtgatacatttacagagcttgtgtttaatagtttcctcaaaagagaatatgtccatggggactgtttattagttgatgggctctggggaaaagagtttgaattaatcaatttgaaccatagaggaaattatgatggcaattaatataaatgagaatattacacactcattggttcctatagacctttcaggctcttttctcctcttacttgttatgagatttcaaggttttttcccccagactcttggctttgctgcttgagtggcccgtctttattcctctcctccaaatcctcctgattgttcaaaggactccttaatgttcaagagagtgactgaacagttcttagtatttaaaatgatgtaaagccatcttcttttcgtgaatactcagtaagggctagtatgtttggtttttgtattctctccaaccaccttagcaaatactctggggttggttgattggatttttaatgtgagatatccagagtgggatctcttcagggaatgtttgctgctacccagcgtctgcagctcccatgacacactctcctcacacatactcacacacacacacttacaatttattcctctccccccactccatacctattatgaacagtggttgtcacacagacgtacacacgcacacacactccctcctccacttctctcattcacactcattgcccccctcacacaccccgtggaacagtagccaggcagttctcccagctgcagctcttctcggggctccttctgtcttctcctcagggctcagagatctgaattttctgcctggagagccttctccagacactcaggggacacaagtgtgcgcagacagaggaggagccctgtcattctggcctgtaggcatagcttcctggtgttcctgtttctggtcaacatgcatgtttccttagagacagtgttacgaggagtgattaggggtacctaggacattttcaaggctgtacagttcagctgtattatgaattcagttacaacttgtctagacagctttgggacctaagacattgatttcccaaaaccaaattccaaatgacctttgggaatagcccatttctaaattgtgtactgtccatatttctgactcaaattatttacttgcatcctggaaatagatgagtcaagtctgtggtgtagcagagaaagaaagaaaatgttcagatcaagaaatgagaatgaatccttgctcttagtagttttatattcttgggtgtgagcccaaatatttctgcctgttaaacagaggtgataaatagacatagtaacttatttcccagaacattttaggagacagtgtacatgcagttgtctgtaacttgacaaaaaggaatgtaaacaaaaggtacaactatttcatagttggaaacatagaaaacagctatattttgcatgtctccaaaatataaattttaaattgttgaggaatttgctaagacttttttttttacttctgccaccttataacatcactgttatattatttttaagtaataccgatttttaagagttaattt

SEQ ID NO: 48430 - DNA, 1800 bp, Bovine  19866881097164
  misc_feature (1)..(1): n is a, c, g, or t
ngtggttctgagagatgaaaattgttggaaactgtggttctttctgctgacaaactccctagagttgaccttgtaacccaactaaatctagtgtttgagttgcacagcatgccttcctgcagtctaatttgctgtagttatgataatgccagttagtgtaaatttctaacatgctggaaatatgggagggtcagtattgtctggatagctggaaaataacagcaaaaaccagtgtaaaaactggaaccaagatttattaaaagccggtgttgtcattaaagatcttgtggcttgaggcttttatctgttctgctcctgtggcgctggtctgactatccatagtgtgccagaaattcctttctttcaaggtttttggtagaagcaatgttgctaatgttaagttcattttattaattaaaaatagcttctgatatgctcttaacaatctccaaccatctatatcagtactgactaaagcacatggaacctgtaagttggattcatggatttttctagcttgatgtaggtgctgtatccaggtgatggtggtagtcagtgcagagaatggcggggcaaagtgtatatttcgacaccggcgtcttgtaacacaggtgcccatgtccacgatgtgatctgtagcatcactgaagcagtgcctgcaatggcgtccagagtgttgactccgtcctgattgtctgggttgtgttgaactgtgtacacaccacctggtgagatcagtagcccacattcatagagtaaaacaaaattaacttgtgacaaaatcaaatataccacatggtacagcagagggtttgaactgggcaaatctgggtttgtatccaggccctgttttttactggctctgtagccctgagccttgtgaagtgaggtcatatcatttacagtgttgtgaggattccatttctgtagaatattcaggaagtctaaagtttttcctttcttgcctcaactgtgccaaaaccaacttattggccaaaagcagcaaatcactgctagtgattcccaagggggcctcccgtcctcccccacccctctcctctgcagtgtaatataatgctattttcagtgagtgtgtttctagtgcctgttgttttcacagctgttatattcgagtattagaattggagtatataacactaggtagtattaaaatgatatgtccacgaaaccttttaaacctaagatgagcggcattgaaatgggaagtaccggtaacaccctgtatgtctatagatttagatttcaaggtcatttcacatccattctcttatttgtttttttatgacaacttgagatgtaaatagagatggttttattttcaccattttacagttgagagaattgagacccagggaagccatgatggtaaatttaacaactagaccaagacagagcctgccataaaacaacacatttaaaaatagtgtttggcttttgagttgggtgtgtgaagagacatccaggaacacagaaataaggtggtgagggaaggacaataacgaaggaagtgaaaggggaaaacctgaagactgaagtcctctttgagactgaaagtaacaaatagaggggggggggttgtgacgacgaaagccaaaggtgcagttgagcgctgtcccgttttaaggccatgccagaatggccagtgtttcctgagcgctcactttcccaccaacaccacgttttcccatgtgtgtgaagttagcctgactttgtgacccccgttctgcgcctgttgttggagactttgggcaggatacctggtcccgacccttcatttgt

SEQ ID NO: 48431 - DNA, 1227 bp, Bovine  19866881125066
  misc_feature (1)..(1): n is a, c, g, or t
ntatggactgtagccctccaggctcctctgtccatggaattttccaggcaagaatactggagtgggttgccatttccttctccaggggatcttccctacccagggattgaacccaggtctcttagtttcctgccatggcaggtggattctttaccactgagccatttggaaagtcctgtagagatgctatattctaattaaattagtctctctctgtcctccaaatatgacactgtcccttctcacagcaacacctgttgatcctgtacatccttcccactgtctttgccctcatgcctgaataccttctctaatatactccagtcttctctatgttatctggaagcattcactgagcatttcctttcaagaactcattgcccttgtgttactacttgttcaacacgtcttgtagttctctattttttctttgcttaatctacatcttttcagtcaggtagaagtcctctggaggatcatttcttatacgtcattcagtttctcaccgtgctttcccacattcagttttttttttttttttaattttattttatttttaaactttacataattgtattagttttgccagatcagtttttaattcctttttcaactggtctttaagccttttgagagaaggagtgggactattgtttattaactgtgagttccccacctgcccccaaatttggtaccacttcctatgttcagtatgcacctaatcaacatttcttgaatgaatgaatagtagatacccaatacatatcaattgatgagttgattttaggattgtattttatttatgttttttaatgtattttttgggctgcactgggtcttcgttgctgcatgtggaccttctccagttgcagcaagtggagactgctcgctagttacggtgcatggacttctcactgcagtgacttctctttctgcagagcacaggctcagtagttgtggtacaagggttcagttgccctgtggcatgtggaatcttcttgggccaaggatcaaacctgtgccccctgcactggcaggcagattcccaaccactggaccaccaggaaagtcctaggattgaattttaaatgctttgtaattgtgatgaactttgtagagttaaaagtcatgtattaatagcagaggactcataaagctttgtgacgatgaagacttgaaagactgctgtgttcccaggagagcagttcatcctctccttcattggat

SEQ ID NO: 48432 - DNA, 1286 bp, Bovine  19866881168941
  misc_feature (1)..(1): n is a, c, g, or t
ntttatgttgtgtggcatgaagccggtctgctcagagactaaaggtcctcgtgtggaatttcaggtaccttacaggcaggtaggtagagtcaggtgataagaaagtgtcttctcagtgccccaaatcatactgaattggtggccactaacataaggcttgtcgtggagaaggaactggcaccccactccagtactcttgcctgaaaaatcccatggatggaggagcctggtaggctgcagtccatggggtcgctaagagtcggacacaactgagcgactttactttcacttttcactttccactttcatgcattggagaaggaactagcaacccactccggtgttcttgcctggagaatcccagaaacccgggagcctgaggggctgccgtctatggggtcacacagagtcggacacgactgaagcaacttagcagcagcagcagcagcaacataaggcttgtcgagaagaaaacatcctaagataaaggcagagtaaagaaaaatcatgaaagactgacatttagtgacaatctggctagtgcatttattccagttattgtcattttgcctttgattgttttatttttaaattttatttatttatttttggctgtgctgggtcttcgttggtgcacaggctcttcttcgctgcggtgagtggaggctactctccagttgtggtgagcaggcttctcattgccgtggcttctcttgttggggagcccaggctctaggacacgcgagcttcagtagttacggctcatgggctctagagcacaggctcagtagctgtggtgcaggggcttagctggtccgaggcatgtgggatcttcccagactagggctcaaacctgggtttcccacattggcaggtggattctttacctctaagcgaccaaagaagccctctctgcagttttataaagagaaaaatctcttctcagatgtccctaattgtacctttaatcataaaaattaatcacagcaggtaacaagtgcatatattcactaaattctgaatcagtagattctcgcattcatgaattttggtttgtgatcacagtaactccacaggcaggtaaggtggttttttttatgtcaccgaggcatgagtttggatcacctgtgctaggtgacaagtaacgggaaaggggcagacagctggtggcggcacccccctgctgagcagccgttcagcatctcagctctgtccttcctgtaggcagcaacttactcgaacgctgtgaagaaatgatgttactctgacacttccataaggcaaaa

SEQ ID NO: 48433 - DNA, 2102 bp, Bovine  19866881215913
  misc_feature (1)..(1): n is a, c, g, or t
nttgcctcaaaggcctaaagaacagcatgcttcccaatgggttatttgaacaatatgcgattattatgggccgatgcctggggcttggatatatttttgttaaggtgaaattttctttgtaatggacttggttataatgggatttgatctccattcatctcacttacccgttctccctctggcggttttgataaccttgctccctatgcagcagccagcccagctgagtctaaggagcctaacatgctgctaatttgtgaccaaaggctctccaacagagctctctcctgagaagcctcagatctctttgatttaccaagcatccatccatcatccttggccttactcaatcttctttccaagggcttttatcatcttccatggtatagctctctcagaacgctcccagcctgtatagacacgacctgtatagacacaatcccactttgtggatgatgaacggttatgttctagagggttctgagttctcatttccagctggggtgagtgccatgtctgtctggcaaggtggtagtcagttataggatgaggataacagccttcatattacaggttttgaataaaggcacatctgccatctaccttgcaacggtgtttggagttttaattcataaatttggcctagaaggagggtgtacacaatgcagtctgccgtgtcacccctccagcctactccattcaaaggatatgccccacggcactgggttttgttagataatctaagtgcaaataaatcattcctcttctcctgagtgctttgttatgtgtcctaaacatttgctctatttatttaatcgttttctttcttttcttattctgtacatagtccgattctgcaagaagttacaacatggaagttacttatggcatttcaatcgaaaggtgaatagagagggtcaagggcccccctcaccagacctgtttcctctgccaagatacccaaagtctcaccaataatggcccctgagaaaatgcgactcaaggttggatgatgtaaattgttgtcactctcaggtgatgattaattaattaatcagctcagtcagagatttgggtggggcccacaggaagtacagggcttccctggtggctcagtggtaaagaatccacctgccaatgcaggagactggggttcgatccttggtttgggaagatcccctggagaaggaaatggcaacccactccagtattcctgcctggagaatcccatggacagaggagcttagtgggctacagtccatggggttgcaaagagttggacatgagttagtgactaaactgcaacaagaacaacacaggaagtataacacaacattcattcattcagaaaacttttattaataagaaccagtgagcatgtgccactgctctgtgattcaaagacatggcccatgccctcccccagacaggcacagagtcacgtggtgtctctgaaagagccctaggctggggccttggtctcttgtaccagctgactctcagatctgagcaccgagtgagccagggagccccacggggagagggtggaacaggatccaggtcaggcctgctctgagcggaaccggagttatgttcacctgctggaaccatcaaagggaaatccctttctcctgtcctcatgcctcaggggcccagttctgtcttcccactcaagtgaggggcaccattggtgttggctccttgcttatcctttcagagattttaaaaagtgggctagtccatgggcttccctggtggctcatccagtaaggaatctgcctgcagtgcaagagtcctgggttcaatccctgggtcaggaagatcccctggagaagggaatggcaacccactccagtattcttgcctggagaatcccctggacagggaagcctggtgggttacagtctatggggtcacaaagagtcggacacgactgagcgaatgagcactttacacttaatccatccaagtctaccttctgtatcccttttcatttaacacaggatatagtgtaccatcaacactgtcctgccctctgcttttttccaattagcaagaagtcttggagatctttccatgtcaatactgaaagatctttaatc

SEQ ID NO: 48434 - DNA, 1061 bp, Bovine  19866881223923
  misc_feature (1)..(1): n is a, c, g, or t
ntgggattttccaggcaaaagtactggagtggggtgccactgctttctccggtcaggggctgaggggaggggaaatgaagaattactggggtcagcctggacactgtttaataggtgttgagcttcagtttgtgaagaaaagttctggcagtggatggtggtgatggttatagaacaacatgatgtgtactttatgtcactgaacgcttcaaaaatgctcaaaatggcaacttttatttatatatattttatcataataaaaataaatgaaaaataaaagaaatttcacaaagagtgtgcaaacatgaatgctatgacttaattacagcagttactttctaatacacatctattatacagacttatttttctatgtagtgatggtgacagctggggtgaagaggagactggttaaaagtgtgtaatttccatgttttgccattctgaatctattggtcagaaatgaggcctataattttttccagagagctgtcacaaaatgtgggcagtcctgtcctcccatcaatttctctccagagaagcccatggtgcccaagggtggcctgatggaggggtgtcatcaccaggatccctgacaacgacagctggtgagagtggagcaacacgaaagtaggtcaatggagaagccgtttgccagcttctggagacttcatctggggagcagaagggcagggctgcttgccagctgtgattcagggcacaagcgcctccttatacgcaggggtaaaggtggttaatatcacgaggtggcaaagagctctgtagaagccaaacggcaaggctcagagactctggcaagctccccagtgctggcaaacgagggcatcacgggactctagtctctctacaattaaacagataattaagaaataagaacatatttttccaatataaattgataggcgctgcttggtaatgttagcatcaggaataaattgagcagtaatctgcaaaggatgttattgctattgtaaaaataaagatctgtctccgcaaccaatcaattcagcagatatataccaacaatcaaattgttaaaa

SEQ ID NO: 48435 - DNA, 802 bp, Bovine  19866881251400
  misc_feature (1)..(1): n is a, c, g, or t
ntctgaaggtagcatacacctgtttctgcttttagggtgagaaatgaattgccaattactgtcgacgtgtgcagacatgacacttcatatgctagaagcttgctcagcctgctttatgctgggttccccactatgaaactgtcagttctgaaaaaggggtgtgtgttggcaaggaggagaagagggaaggggatcagtccttgatccattcctgtctttttgtgctcctgcaaagtggcgggagggaggtcagtgcctctcacctctgtttccccagcagagctcttgaacaagatgaagtgatcaaagccggacgccagcacgtcatcacagtctcattactttgcaagctgcacgcccagatgctgctgttttctgcatcaggcttcgctgatttacatgcataccacctcagctacagctcatttggtactattcacaattaactggttcttgtcatgatagagtttctctgatacagaagaccttaatgtaaagagaataacatcgctaggtgtagcctgtttctctcagacctcctggttggttgacaagaaacagggatcaaatgttttgtcactgctttgttatttgtgttattggtgtggttagtggggtgtgggtttggaggtatttttgaagtctttgagatacgagattttcctggagaccaatttcatcaactccccgatcttggaagttcttttcaatgagtagattctgatatcctgttttcatttgttcggtttcttcccccagtgaagagctgctcagggacatacatttgtttgaagggtagtaa

SEQ ID NO: 48436 - DNA, 1161 bp, Bovine  19866881254482
  misc_feature (1)..(1): n is a, c, g, or t
naattcactgctgaacagcagccataaaatatgatctcttagtggtaaaaatgcaagagacagagaaatcggagctggaatatttaagcaaagagatcttgtcctccaaggcaacactgacctcatttccccaacttgggtcaaaggttttcagatttatatggacaccttaaagcaaatcagaatggtgctggccttaagagtttaacctgtagttgaaactgtaacagcccataacttattcctaaatttctaggcacctcctgatgactggagcatttatgtgccaatgccagccataacacacacacacacacagatcagaaaaaataaaagacatccaaattggtactttcctcacctcctttccccctgcctcatgtgatgtgtgcactaaaggagtaaaattacagtcatcagagacaaggttgccaatgatggggacccatacctttcaaacaaaatggaaagtcagtaattttcagggcagcccatggatagctgccacagactagctcctgaactcctgaaactcacagcaaagtcccttactcttagcaaacccccctaaccctctcccgcccagccttcccaccttgagtcccttgtcatattgcaaagaatgctgcaaggcccttgattcatgcgggagattattacagggctcagagaagccggctctgtaattacggtggctgtatgatttctattatcctgagcccccagtttcagtagctcacaaaacttcccactaaatcctcctgcagccccacagctttccacggctgggcctctgcccaaagagtgaatggggtcctgataacctctgggaaaagcaggacagagttatgacaggggaaggggagtggtactcagtgagccagagtggtggggaattctattgtttagaaaaaaataaataaatgggccagtttcgctttttattatttcaaacaacagacgcggcggcccagctttcctttccctattcagactgtcccccagggccggctgagtctgcaggagtgtagctgggcttcagcaaaactattaaaaaggccaccactctgagctcgtggagcagaaagtttggctgcccccatggcctggctttcccccaggagggccactggctcattcccctacacatgactctctggc

SEQ ID NO: 48437 - DNA, 1258 bp, Bovine  19866881254884
  misc_feature (1)..(1): n is a, c, g, or t
ntctaaatgggcaattataattaaatgtatgcagaactgatgcaggtggaaacctaactcccaagtggtgttagtgtttcttggcatttaatcttccgttaccttagagaattaagcatgtagactaaggatagagctcccacttgaagaagaaactaactagctaactagacagatgtgattaggagggatccgatcttaaaggcggggagaaggccttaatcacctagtttccttagaaatctaagcaattctacaagctcatcgtaagaagtagagtcaaacactggtgtgttccaaagcaggtctcacttgccttggcactagtctgctattttggggtatgtgggggaagagaatgacacagcttcttgcggtggccagctccgctcctcacatccccggatgaaggacagaaggggctgccatacccatggtaggcggcgtcttagatcgaagtaaaatagctacttaggtccattttttagatgaggatcaataataacttttttttttctttttcaactttaaaaccttctcagcttgaatgccctaaagagaatggcagttaaaatttacattttagagatggaaaacacaagacaaagatataataaataaccagcctgaggagtgaggtgttccaggtaatcaagactacgtttcagacaagtgggtatttgctatcagacaaactctagtgggaacgtgaaacactgtggaagatgacagaggtgagttgatgtttaaaaaaacaagaacaacacacaacgctatacttctaactaggcaattatagccaggtgtacatacaaggagtacaggtatatttactttttctagaatttaacctcttccgttgctaagtctcttacaaaataatcaaggcattgcttgactctaaggatcgtagggaataaaatgtcaccactgcagctgctgtatttcctgttcacagcccttcaaatttaaaaaaaaaaaggaggggggtgaaggcccaatacaaatgtggaatttaattagttagtaaaagccccaatccttgcccgaagtcttgttcttcctgtaatattgcattcttctcttcttgtgtaaacttttcattatggaggagacatctttataatacaataactctagttatactgtaactgctggtaacataactcctgcattggaagagccagcatgttcaagtaatgttgttttaatacaatttgtggttcagcagaaaaccaagttgacttggtcatttaga

SEQ ID NO: 48438 - DNA, 696 bp, Bovine  19866881262541
  misc_feature (1)..(1): n is a, c, g, or t
nttgcaaaagcttttagcctgaatttttataagatttttgcttacagcaggggtggagcatactattatctcctgattatctgagaacaaatcattttaaatttggcatgtaagttgaatagtacattttttttcttttagtacctcttcttttgtaatgatatttttttggtagaactgtccttcccccattaatttttattttgctgcaacccattaggaaacttcctgagacccacaacataggtgtttatccagttattaggagagtttgaaagaatccatatttgcttaggtttttattttgtaccattttaaagcagtgtttcccaagtggggacttgaataacagtatttggaagagcacgttgctgccaaaagctctaatggaggcttttttaaattctcaataaatccagcaataaaacaattattaaattttttttttgcatgtctaatgaattttgtgatagtcagtggagataaagcaaaagggcttcggttcctgacttgctttatcacacagttggtttacaacatacgtatattcctgccatggggattagatgtttatgtggtttaaaatttttattcatagtcatgtagtatttaatttatggcctatggtggattatggctaaagtctagaaacatccaggactctgttgatgaaaagcaggttaagaacatcataaa

SEQ ID NO: 48439 - DNA, 2014 bp, Bovine  19866881266897
  misc_feature (1)..(1): n is a, c, g, or t
ngcccaccagcctcccccgcccctgggattcttcaggcaagaacactggagtgggttgccgtttccttctccagtgcatgaaagtgaaaagtgaaagtgaagttgctcagttgtgtccgactcttagcgaccccgtggactgcagcccaccaggctcctctgtccatgggattttccaggcaagagtactggagtggggtgccattgccttctctgctccaccactttagtttgtacttaatgttactcagaactgtactgagtgcccttcgtgacgtaacaggtatatgttactttcaggcatgtctcaggttggctgttattaatgttattttcgaggaaaagaaaatctgattcacactttgaaataagggctgtggtggtggtggcttagtcactaagtcatgtgctctttgcgaccccatggactgtagcctgccaggctcttctgtccatgggatttcccaggcaagaatattggagtgggctgccgtttccttctccagggaatcttcttgacccagggatcaaacttatgtctcctgtattgcaggtggtttcctgtattgcaagcagattcttcactgctgagccaccagggaagcccttgaaataagggccaagtggatctaataatgttgcttaatatcttctagttaaacgcattttaactagaaaaaaacagttcacaatttcaagaatcatgtcagctctagacttttttttttcttacatcggggccaataataaagaatattatgttctagaaagatcaggaaattgttttcttcctgcttggagtgaggttcaaaaattagttcagccttgaatatctgagaatttaccaattctcagtttggggcttataaaatgttagaatgttgtaaggatgactccttattttctcctcttcccatgatgcaatttaaaaaattcataagaattgtcctaatgagagaaggccgtactgatggagggattcaggtgcttgatgagtgggggaaaaaaatgcgggggctcagtgacctgtagtgtgtctactgagagtcccgttgagtacttcccagaatggggatcactgaagaggcttgattttactgtgggttttgctgtgtagaactgctgggtcccggtaagttatttctggatatgtggagccttacttgtaattagtttttctgagttgcttggagggatttccattaattgttctgtgaatctttattattcctggaggagaggtcactggatgccgacaaggaatgcccttagtagacaattaagcgtattaactgttttcagaaagcctgacttaatgctaattataccgcaggtgtcaccaaaattcaggtgtatgatgttaaatatttcttatagcaggttaattaattcagttatctgagactcgtatcaggcagctgactcttctcgtggaagaatctgtgttgctgtggttaagtggggggtaactgacaacatctgccttgagagtttacccaagcagaataacacagcttgtgttttacagggtgatgtacttctctgctcaggcagctgtaacaaaataccacagactgggtaacttgggagactagaatctcctagtctctcttctaggcgactagaagtctaagatgatggtacagtcagggctgggtgactgttgaggcctcctcttggctgggagatggtcaccttctccttgggtcctcagatggcccttcctctgtgagtgcgtggagagggagagggctctttggtgtctcttcctctctttataaggacaccagttccatcccattaagaccctgctcatatgacctgatataatctttatgacctgccttctaggccctgcttccaaatgcaattatgttagggcttcagcataatgaatttggtggtgtgtgtgtgtgtgtatgtatgtgtcagtgtcacaattcagtccgtagtatgtgggaatctgtgcactcttagttgttaaaatatcctaaaatgctttcagagtgacaat

SEQ ID NO: 48440 - DNA, 1179 bp, Bovine  19866881310824
  misc_feature (1)..(1): n is a, c, g, or t
nggaccttgatggggggagggtgggttctgggatgtaactggtttctatgctaagagcaaagaagaccaaggttgcctttgggctcctcttttaactgtatcaatgtatttgttatatgaataagtgaatgtgttagaggatcctacaggatgtggggtaggttaagatacttcttgggaaagatgagaccttgtaaataaattagaatgaagtcttaaagatatctgacagattttgttttccagcagattagtctttctcactgaagcatacttttgagtcttatttaaggttgagttcttccagtgcttctgaaatctgttctgactttctgacagtagacgtggacatccagttccaagaatagccttaaattaaagactgtcaattttaaacagtttaatagatatgtaagtgatagctctattttaagtgtctttcattttttgaaaaataacgcttgttttagaaattcaagctgttttaaaccagttgcttccttgtaacttggcaacagccgttaacctatgctaaatggtctgggcaaggttcatccttacaaacttggagggtctgaagtttgtttcgaatttgttatgaatcaccagcctgtcccatcttctacagacttgtgtagattgtttcattcctacctgtctagattaggagtggagctggcaggtgagaagttagaaatgaatacagaggttccagaaacttggttcctgtgcacacaaggtctcccatttaacttcgttgtggctaataaaggcagctgaggaagggaccagcagcatcagtagtttgcagaaaactatggttttccgtgaaactgcttgttgatactgccttttagggaatgagctaacgtctgtttcataggcttgattctagtaggctcttattttagtggttctcatccagggttatggatttatgtgtaatcttgtgaagacatgtttcaataaccagtactgcctaaagttctgtcatattttgggttctgatcattgcacccatatccatgtaatatagttgcttgtatagacagatcagtagagattcttgataaacagggtggacactgatgtggtattaaaacaaaaacactcaagtatcaaagatgcagatgacaatacattcacgtacatctcattgctgtcacagcgtccttgcaa

SEQ ID NO: 48441 - DNA, 2131 bp, Bovine  19866881317583
  misc_feature (1)..(1): n is a, c, g, or t
ntatatatagttctaatggagaatgtccgtttgagagcaacttcttgagaaaactgcccagagaggctagtaacttgcccagggtctcccaagttgctgatgggcaaactgggatcaaacctcagctagtccgtacatctttctctggttccttgtccatcattcttttcatttatagtatattcttttctcagctttattgagagacatttaacatattgtactattcactcattaaagtgtacagttcactaatttttagtatttgcagattgtgcaaccatcttacagtctagtttagaacatgttcaatacccccaaagaaatcctatacccccttagctgtcactctccatgcccccactcccctgccccagacaactactcacctactttctgcatctgcaggtttgccttttctagacatttcatatcaatggccatgtacaatacgtgacctttgtgtctgacttctttcacttagcattttttcaagatttattcatgttgtagcacatattagtacttcataactatttatgattgaataatatcacactgaatggatatactacatttgtttatccatccatcagttgatgagcatttagattgtcttcacttttgggatattatgaataatgctgccataaatattcatctagaagtttttgtgtagacatgttttcagttctcttggttatacacggtatctaacagtggaattgctgcgtaatatggtaactgtttagcatcttgagaagctgccaaactatttttatactgactgcattattttacattcccaccagcagtgtattaatatgcaggttttcagtttctccacattctcactaacccctgttaattgtctttttcattaagtttgaattggtaaatcacgtggctttggtttgcatttccctaatgatggatactattgagtgatttttcatgcagttattggccatttgtgtatcttctttagagaaatgcctgtttatgtcctttgcccatttttagttatgttaccattttattgttcagttctgttgtaagtgttcttttatattctggatacaagcacctcaacagctatatgatttgccagtatttttccccattctgtgggttgtcttttcactttcttgatgatgtcctttgatattgctattttctgatagtccacaattaacagaaaacatccttaagagctttcatatattttcttttcttgctgttacccagtgtcagctaaatttttgcgtatttcctaaggcaaggttgttataatatcaagattatcaaataaaatgtcatcaaagagcagagacagtactgtctagtttccatctaataggctcaaccagttgaaatcctgggtgaggtcctgtgtgtattcctagagtttaaatgtttctggtgctttcttggtcatagttttgggtagtgggttttgggtagtgaagaggaaatagtccttgcttatttcttagggagggctcttaaagagtatataaaatttgtcaatttatttgctgtcatagctgtaagactcttacaaaacatattgtacaaaatcatttaattggaaagaccagctgtttcaagtcaagtcaccaggtacttagaaagctccagctgtgttctcagcactgttctgtgtctctctctccaattgttgggacttgaatttgaaggacacgttttccaaaaaatatggttttaacattttcatgagtcagtgaattcctttttcataaatcatggataagtgaatttaaccacacatgattttatttctctaataagtgattttttaaaatgttcagttatcaaagtgggaatgttttgatgtcattttcttctctgaagtcccttccttgcagcctctcctctttctctatgcaattgtcagactttagtggtaggacatcattttaaagaatttgtacttaatgggctcagtccccactgggcagtaagcagctccttgagtttattataacttttggcaggtatgggagatttctaggtcgccagagagctcttgattaaattacttctgaagtgcactaattggtcttttccacagtgcttaaggtggttccaaggagatacgaccagcggc

SEQ ID NO: 48442 - DNA, 3059 bp, Bovine  19866881327373
  misc_feature (1)..(1): n is a, c, g, or t
natgtctgggtccatgcgcgtgagtggtggccgtaccttcccaagtcatggtgatgatgggctgtcaagatggtacctggagcagttggaggtggggcagagaggctgcagagtatggtagaaagaagactccagggatctgtgactttctgccatgtgactttctgcaatctacctagatgactgttgacaggcaacctagtttctttggagctgagtttttcatgtgataaagcagagatttataccaggtgattcatttctaaggactctgctagctccagagtttcctgactcagtacctccgagagttgcccagctgcttgcttctaattcttctccctgttccttttcagctcttaaccattgatgacaacttctgtggcctggatatgaacgcccccctgggcgtgtcagagatggtgcgtggcatccccgtcttcacagaggacagggaccgcatgacttctgtcatcgcttacgtctacaagaatcactctctggccttcgtgggcaccaaaagtggcaagctgaagaaggtaggacaaggggtagtcattttggtgattgtatggacagcctgtccccagcaggatggatattggctttgtgttctcttactaccccgggcctggttggtgagtgatacaggtttgcaccaagaaaggtgtcttgctgttttgaggtcgacagtggtattcttgtcccttctctgccttcacatgaggattgttgtaggactcacactgggtgagtgtgtggctccacctcttctgtgggctggtgtgctcctgagaggtgtgcgtctccaggctcctagtctaaatggtgtgctctggccaacgtgggcttatgccctaaggcaagacccttattaggcatggatggttgggaaggatggacaggggcaagggatgtgcctgttcctccctcttcagcctttctggtttgtgcatccatctggaatccatttagggaacagatggaggaaagtatatagtacccactggaattgctattggggctaagagccagattgtgggacgaggaaaccatggatgctgtgggagcacagaaatgcctgcaggtggagttgaaccgtgtgatccggggacatgagctttcctcctcgttctccagaagcttgctggcttcagtggtactgggtgaccatggcttatccgctgtgtttcatgtccccatctatgcagaagtactctgtcacctgcttggcttgggctctcatcttagtgggttgttggcactggtcccccagagtgcccttcttgcttggaccaaagcctttctaaaactcaaggcagtaggtcctgttttctattggctgataatcatacttcacgctttctcctgggaaatactgatgatgccatgcggagatcctgcttgttttaattaggcttcccctggaattttctggacatcgtgtggttcagatggatgaagcagcggtgccttatctgagaccgagttttgatgcctgcttttctcttgtgctatgtttgtcggtatgagcttgatggtcaaggggaaatgctgtctgcaaatctcgagattgtacctgttaccctgttctatggtgtgacagcccattccagccattgtttttctctcttcagattgtgcatctttgtggaacaggtggtggggctggagggtgggagtgtggagggggagaggcagggagcagagtgtgtgtgggttggggatgtgtgtggagcagttacatggctagcggctggaagagaaagcgtatgttggtgaaatgccatggcacgaagtgagagtgatgcaggcagcccaccacgcgttgggatcaccctcctcattgtagtgtcctgccttctatgtcaatgaacagattcatttaacctttgtccttacagcttgaagaatgatattacctagtcacctgcctttctgcgaagactatgttaaacgcaactgaatatttccttgctgccttggccttctcgttgtgattactactcacacagtggacagggctcatggacgcccagggaggatgctgggaagtgcaggcatgttgtgtctgatcgttgcggccttcccagctcttcctctagggcaccttgtcacttatcccttccagatgctgcctggtccacatcagcaccctgcctcctccctgagctgtagcttcagctttcagtgagctgggaaatcagataaccaaacttgctgaaattatgtctgataagcctccatataagccaaggagggggaagtccacgagctttagagcagggacttcgggaaaagatgtttctgttggttgctcaggtgatttcattcttcatgaggattcaacgagttcgatttgctggcaaagtggattctaaataccaaagtcattcccatatacaagtcacacagtgaaatgtctgttgacctgctttgcttgctctgatggttaaataagcactgttgaggggttgcacagagtcggacacgactgaagcgacttagcagcagcaaagggtaaataagtaagtgaaggaactgggagtgctttaggtcttgtctctactaagcccatctcagtggaagggagaggtgacttttttcaatgttctggaaggttccaaccccctcaacttcctaccaggggccagccaggatcttttcacttgctggccagaccaagtagaccataaagaattttttttttttttgctattgtctgagctggtgggtatatggtgtctgtgatataaacattgagaattcactgcaaacaacagaacagaaagttattttctcttggggggcgggggggagatgtttcctggccatggctgcatcgtaaacctaagttggttgacttgcaaataaatgtgtgctcttggtcagagggtggtcagaggctgatgggggctgactctctcacctgtggaagccggtcccctgttgggggtcagagcgaggcccatctctgtgagtgggggctgaagacacctccaggaccccgggcaagccaagtgcacacatacatccattgtggggcaggctgtgagcag

SEQ ID NO: 48443 - DNA, 1311 bp, Bovine  19866881332272
  misc_feature (1)..(1): n is a, c, g, or t
nttttttgttcccctctaatactacagtttacttctatgtatggcctttgaaaggaagaggtaggaccccaaatcttaaattgaatcattagataataattgcctttcactgagcttgtttgtagggcgtgttgcttttgacgttgttacttggctgttggccaaagttagttctgctctgcagtgggcagtcttaactgtagcccttgtgagaccttctaggctatgccgtatttctgactttgcacttgctgagtacctgagttttcagctcttttgggtcaacagttggtgggctggcattatctgattaaaaaaaagtggcatgttgtcatggggcatttggaggatgagacatgtttttgttgaaatatatttgaatagtttaatattcccatctttatttggggataagtctaattctttttctttacagtattgttagtttctaccatacagcaaaatgaaccagccatccacatacatatttcccttcccctttggacttccttcccattcaggtcaccacattgaattaagtagaatatcctgtgctatacagtaggtcctcattagtcatctttttatacatagaatcaatagtgtatatgtgctaatcccaatttcccaattccttgcacccacccttccatctccttggcatctatatatatttgttctctgcgtctgtgtgtctatttctgctttgcaaataagatcttacatattcaggtacaaggtttcttagcatctacaggtagcccaattctgcaacctcatggttatgtgttcacccgaaacaacatgtagaatcaaatagcctcttaattaaagcacagtttggtcagaagcctaatttatatgacaacagcaatcataagaaaaaaagcaattatgaaggacattttcccctaaataaactcccaagttttatttaaatttaagggcagagatcaattttgagggtttcttttttccccatgaacatagaacctcgaagtttatagtcattctgttgtctttctcaaaacacttgtttgatggcaacgtactaggcaagcaccctgcctctttcttagaggtgctgaaggcattgttggtgctcagttcatgtttaataataacattagtcagggttgaaatgtggctggcacaccagggttaatgccagcattcttaggagaagggtgattggcattttaatcagtgcaaatgttcagaacctttgtctgaatgactgtatttccagctcttcaggtttccctgttctgtggttcagcaccgattcggaggggacagctccatctactg

SEQ ID NO: 48444 - DNA, 803 bp, Bovine  19866881349427
  misc_feature (1)..(1): n is a, c, g, or t
natctgtaactggatcagtttgctgtgtacccaaagcattgtaaatcaactatgttttgtctttgctcatgctcagtcatgtctgactctttgcgatcccatggactgtagcccagcagcctcctccgtccaagggattctccaggcaagaatactggagtgggttgccatttcctcctccagggaatcatcctgacctagggatcaaacctgcgtctcctgcattgcaggcagattctttactactgagccacctgggaagcctatgtatttcaatttaaaaaaaaaagaaaagaaaaaggggaatttgagaatctgaccatgcaatgagctgatgaaactcatctagaagctttccaattttctcccttctcccctcaatgatctcttggcatctcagcataattattccctagacttagtctatagctgtctttccacaaggcagaaaatgaaggtgaagatggactccgtatgtttagagttgaagtaatattttctttgctaccctgcccctcatcaaatcatgcaaataattttttgcagtccttgagtcatgaaaaaagtttaaaatctcctttaagccatttgcattttttggtattaaaatgctcttccacatgtgaattctaaaggcaaaaatatttgcacacaatcatttttattaggacttttacaacatataatctttacaaactactttcttatgcaatcttcctcagaaaagcagttcacttaagaaaagcagtttctgaaagtttgtcagttgcttaagaagttactaaggaaaatcattttatgtg

SEQ ID NO: 48445 - DNA, 1272 bp, Bovine  19866881360804
  misc_feature (1)..(1): n is a, c, g, or t
nagaaaaaaggatattgtgtaaaagcgccgaaggtttccagaatttccctttcttgcccattataaacatggtctttccctttgctctgagctcccccctctggcattcatggtatatttctctttctattattacaaacttcaaagctctcccgccatgtcattttgtaaaccctctcgactgtaagtgatggtttgcgctgcttttctttcttatttggggggttgtggattaaggaacgcagaggaactgcctggaacatttattaacttttaattcagtgcagagaaaaaaaaagtcggaaagccagtgcaccattgatgttgcctcaaagatgctttgaccttgtttaaccaatttttaaggcttgtgtgccaggactgaaatgaggtgccttttcacagacctcaggattgtgctcttgaaacaaatagatccatatggctctttgtttttgcgattcaagtgttatccttatgctttttctatttaaatggctatctttgttctgatgaaagctgattatattgtcagtaaactcttaactattgaatatttttttttagcaagaagattggtaatgcccaatttatttagcactgtttaggaattggattgtcattgtagcttgatttttcagaaaacaaaatctcacccttttgaagcaccaaaggttgtattttaacacttctaaatggaaaattttgtacagcacattaatacatttttctcaaattgggtctgtggaggaggatgaggtttttactttcctttagggtccctggctgggtctgagccttaaactgatgggaaacattaatagaagaaaagcggccatatttgtttgttagttttgtgtaataagggaatcttcataaggaaatgaagactcatagacatgtaaaacctacttgccagcttccttggtggtccagtggttaagaacctaccttgcaacgcaagggatagttcaagggatagttggatccctaatccgggaagatccacttgctgtggggcagctaagcccatgtgagacaactactgaagcccgcccaccctggggtccatgctacacaacaagagaagctgccacagtaataagcccctgcccacaaccagagaaagtcctctcagcagtgaagacctggtgcagccaaaaataaataaaaattaaaaaaaaaaaaaaaacaactggatgcatggggctggtgcactgagaggacccagagggatggtacggggagggaggagggggcggggttcaagat

SEQ ID NO: 48446 - DNA, 1221 bp, Bovine  19866881391033
  misc_feature (1)..(1): n is a, c, g, or t
nagtaggagtctacaccaggcataacatccaataggaaagaaaactggatttggaaaaagacgtaaagagatgtgaataaaacatagactggataacccaacccttctgtaattgttggttatagaaagcagttgtctctattaaaaatagaaaagtgacacttgggaaaaaataaagacaaaagtagcagatggctaaagatttcaatacctagtacatacacagcactttcaatcatcccccagtgaacagtaccgggtggctaggatgtgatctatttcattcagatggagttaagtctttatatttaagcagaatggaatagaaaagcaatacaacatacatttaaaaaaaaaaagctttaatgaggttaataaaaaaattaatctaatacactgggatttttatattatagaaggatctcgcaaatgtcagagcacacaaagaaacagtttgcagataaagccaaccaactgtccactgcccctaccggagccagacactgggaaatctgttcacatcacagcagtgtacgaactgtaatcactttctctgcaaatacctataaatcagatggagaaggcagtggcacccactccagtactcttgcctggaaaatcccatggacggaggagcctggtaggctgcactccatggggtcacgaagagtcggacatgactgagtgacttcactttcacttttctctttcctgcactggagaaggaaatggcaacccactccagtattcttgcctggagaatcctagggacggtggagcctggtgggctgccgtctatggggtcacacagagtcggacacgactgaagcgacttagcatagcatagcatagcataaatcagaagtgagattcaccgcctgtgactgctaactcatcttttcaggtcccttacaaaccatatttttatgataaaagagattgataaatattagtaatcaacagaacttactccctgaaagtggctttattttttaattactatatacctagagattacttgcaggttggaggtatgtaatttcataataacaactgcgtaatatgtgctgatgactagaaaatggcatttaatttctcaagtaattaaaactggggtaaaatctcaaccaacattcatccaaaagcagcatcaaacaatcttggtggatctacagctagttacaacatcaagtagctattccctttctttcttcttgattt

SEQ ID NO: 48447 - DNA, 975 bp, Bovine  19866881512480
  misc_feature (1)..(1): n is a, c, g, or t
ntattattattgagtacaaatgagatgttactacattagaaagcttcagaatctatcggatctatcagtgtctcttataatgactgttatagcaacaccaagaatagatgaatatgaatggatatgagttggggacttgggctgtgtgggtagggattgttggtagtagttgaatttgagtgtttctcccatcctgtactaagtagatgagaagacaccagatttctttaaagatgctaagtactcatctaatgcttatggaagcaggtaggctgaagctgggaaagattgaaggtgggaggagaaggggacgacaagatgatatggttggatggcatcaccgactcaatggaaatgagtttgagtaaactctgggagttggtgatggacagggaggcctggcgtgctgcagtccatggggtcacaaagagtcggacatgactgagtgacaaactgactgaggctgaagggaaaacacagaaaattgcctctgttgtgatgtgtgcgcaaactctttacattttgccccaattttggctattctgttggtgctgaaccaagctgttaaatcatttttcttgcctgtaattggaaataaccatatgtgaatattaaagtgaagttgttagggcttaatcactgagtaatgtaacattcattatttaacatttacataaaataattttgtgactttttatatgaaagtatacattgaatggtggaattagagcaaagcataaccttagttaatataaaaaagaaagtcacaggagaataagatgattttggtaggaagttattttaagcccagatgtaagatagaaaaccctagctgctcgtatgagaaagggaaaaaatctagaaatgtgggcaagaatgagatagcatcattgaaaatctaggcagtagtctgggtcatcattgaaaatctaggcagtagtctgggtcatgaatgtggtcacaggaactacaagg

SEQ ID NO: 48448 - DNA, 1293 bp, Bovine  19866881524551
  misc_feature (1)..(1): n is a, c, g, or t
nacattttaaagtgaaaagaattttacgttgatgcaaacatttgactatataatactttaaaaagccattttatctggaacagtttttgcaaagcattctgcagaatcacctaaactccttccacggggtaactaatcttttaatacgttacaaggataacccaggcttcttccatgagcctaaatttgtaagtcaggtttgaacaacttcgttcaaggataaaagtgaaaacccttgctaacgcctggcacacaaaggagcattaccagcattcacatccgaccgcacagaatcacactcctttacgagtgcttcatccttcaaagacactgaagccaagctaaaaagttacacctctaatgagatcagtccagaagtattttcaatagatctatgtcacttgccatatacgttgttatggaaggtagaagtggccagtccattatctaaaggaaaacatgggacggaaagatcagtcatctctgaaatgtttgtttgctattacattgtcttcccgaggtttacactgcctttacgatatctcacattgctttgatattgctctacacatttgtttcatgtttgtttctgtattttaaaaacaacttgtgtgtacataacactgtggtaacgtttcctctctgtaggtgtggtatattgacaacaagccactgaaggcaactggattctgatgctgacctaacacagagccctgcagcaccgtctgcacactcctgattctgtctgtccatcctgagagctctgacacagcgcgtactgggctgtcccgtcttaagcgctttacatgccgtctcccggctggactatgaacttcccatggctatgatctctctctaatgctcttttgggagttctttgtttttttctaaaaacaaatacagaaacctccacaagttcctacagtgtgtttgttcttttgttattttaaaaaaatttttctggccccgccccatggcatgtggggatcttagttcccagactacggatggagactgtgctgcctaaagtggaggtgcagagtcttagccactggaccgccagggaagtccccgggaggttttaacatcatctcgattgtgtctggaactagatatagaaatttctccaatggtgcagagttttacaacatgagttggatataacaataaaatactaatataaaaacaatatataataaaaagaaaaaaaaatctaatagttaattaagcaatttactttgtgctagacctgtctgtgctaataagcactatcaatataacaattaatataat

SEQ ID NO: 48449 - DNA, 1313 bp, Bovine  19866881660145
  misc_feature (1)..(1): n is a, c, g, or t
nttactcagagatctctcaaactgctttacagcgtctcattcaccacctatgtgtcatgtacacttttgtttagttatagaaggatgggcagaaaacagcttggctgccaaatctatacctataataccattcaggtgctggaaaaaacctgagcccttcacagaagaattgtcttcagaattgttttaagttattttatccttaagattatagccaattgtattgcattcaaaggtgcaattttttttttttttttttaagtatttctggtcttcccagaagtctttgttggcacagtagtgagtggcatgagtcttttttgatgagctccctaaaagtttggaaggatttttaaaaaataaaaagtgaacagtgacagcaaaatgcaacacttgggataggattccatctaaggagaacgagggctgcctccaagtgaactgcagcagatgacgaaacctcagcatggaatagccagtttcacgggggtgataaatgacagcacattagttatgtgttagcagcgtgatatggcagtgaaaaaggccagcgctattttgggctatgctgcacgaaacagtgtctcctcctggagctgagactgatcatctccatctccccggtttgagggagatagcatctgggttgctgccttgagtgtcaggcacgtgtgcaccagaatgacagacaaacgggtgggagtcccaagccgaggatctgtagtgatggacttgagatgaggcacgtttcagtgctttttggagaactggcatgtttaggaacaagcacggaagccaacagaggttaaccttttcagagatgggatgacactgaagaaacaagcgtcattgtgaagttagtcactcagggagtcatgaccttcaatagttggcattgatttgatacagagcacttttgaggggttgctcatgtgttttcacagagagcagatcatcaaaaagggccccaaagtaaaattaagtacttgtgttttatagtcaaccatatttttaatcaagggatcaacaaggatggaagtctctgcttatagtgagaaaaggaatacaaaatcgcgatggatgatgtaggtctgatgcttttgattggaaattcgaatgcaggtgttgaacttgggaacaatgggggtgagacctttacagtgatttttaaaaattcaaatgtgaagtgaacacagtagtatacatgagcacagcagaaagacactcagaatgtcagctgacgggtcggggtatttctacactgagaactgttgggccgtaggagggtcccctaggaaagggagttaatttca

SEQ ID NO: 48450 - DNA, 772 bp, Bovine  19866881764360
  misc_feature (1)..(1): n is a, c, g, or t
nttatgaaggtggggatgtgattttttaatttacttttattgaaaatatgctcagccttgctgttacatatgagtgcccctccaccctctgaattagaatttgttgcttttctgcatgtgtgttgaagacagaagagtcttcattttgatttttttttttcccctaatcctgaaagccatcagtaatttaaacaaccacgtctgggaacgtttggtgacagttctgcacataaaaacagttgtccttactgtgtaactaatggcaaaatgttgaagaacaggaagatctccatacccgacccttttgatcactcagttttgtcatttcaagctcagaaatattcatcgctttgcacgatgagggactccttgtacctcacataggaagccagttctcttaaaagcgtcgtccagtcatgaatgatggcactgtgtcctcatcccttccagttttcatccattagggggaaaaaaaaaggaaacagaaaaaaaaaaagaaacaattaccccatcagatgattttccccaacatacagatttcagaggtatccagagcagcaggaaggacttgaaagatacacctggaaaggttattctgtaaatggcaaattgagtgagattttgcctgtagaacatcaagttaataggcttggggagaaatgggatgcttggatctaattcacggctctaatataatagtcctgttgtttatgggacatctgatatcacatgttgagaagccagacagctattccaggaaggctgtaatgaa

SEQ ID NO: 48451 - DNA, 1201 bp, Bovine  19866882121306
  misc_feature (1)..(1): n is a, c, g, or t
ncacaccccaattaaaccttcattcatacattgttttcacaggaaacctttgtaccattgtacttttcatcttcaggtgacaaccacaccctttctcattgcttctatcctaggggatctaaactaattctaaacttgcactaaactcttaacatggggaaaaatttaggggaaggcacagtgcgtctgctcatttgtaacattcaaccttcaacgcaaatttccaaactcaccaggctacttggaccaactaaggctatgaacatcaaagtgatttgatggcatggtaaagaatcctcctgcaatacaggagatgcagaaaatctggtgttagattcctgggttgggaagatcgcctagaggaggaaatggcaacccactccagtattcttgcctgaaagatctcatggacagagggctacagtccatgggatcacaaagagtcggacacgactgagcactcacatgcaagcaggggattgatgatagacttctctgtgtggaggggctgacatgctatacaggaaaagaaatgaccgtgaaccacagcattaatgcccaaagaacaagagtgtatacgttgcagatgtttccatgggaaataagcaaggaaggccaggttcctacagtggtcttcatggtcttcataggtgggttataagtaaacttgacctcccccacccgcccaaaaaaagagtacagacttaaaacacctacggaggaggtgaagggccttgcagaacatgttaaggtaccatacaaagtggagacatgcatcctatgttaaatgattaatttgagtaaaacaaagaattcacagagaaaaagtggagtcacgggtgaaaaaatacatggagatccgctcagaaaggaccttgaaccccacggccaggcatcagatatgtttgtgcagtgaaggtgagaggcagtgtatgctcaggtcttgttttatgctgtctattatattgtaaaccagagcagactgtttcttattattacatttgtaaatatacccagaggctcttaaagccacaggaacatccagattaaattaaaaagctttgacctctttggatgagaggctctatataaatccaaggtattgatattcttattatggtggataaatgaaatgtgtgagtgaggctagctcagcagcagaatggtttccctgagattcataaaaaaagtaataataatg

SEQ ID NO: 48452 - DNA, 1803 bp, Bovine  19866880384295
  misc_feature (1)..(1): n is a, c, g, or t
ntccaaccaaacccatgtccattgagtcagtgatgccatccaaccatctcatcctctgtcgtccccttctcctcctgccctcaatctttcccagcatcagggtcttttcaaaccagtcagttcttcacatcaggtggccaaagtattggagtttcagcttcaacatcagtccttccagtgagcaccctaatctgtctctatagatttgcttattctggacatttcatgtacatgcaatcatacagtgtgatattttgtgactgctttctttcactaatgtttccaaggtttatccatgttgtttcagtacttcactcctttttatggctgaatagcttcccatgtatggctgggtcacattttgtttacccatttttcagttgatggacatttagattacttctattttttggctattatgaataatgctgctacaaatttttgtgtacaagttttggtgtggacatgttttttatttggggttagactaggagtaaaatttctgggttgtgtggtaattctacgtttaaccttttgaggagcaggcagatggttttgcaaagtggttgcactattttatattctcatcagtagtgtatgaggttaataatttctccacatcctcacggacatttatcttttttattctagccatcccagtgggtatgaagtaatctctcattgtggtttcaacttgaatatctttgatggctaacgatgtctagtattttttcatgtgcctattggccatatttgtatcttttttggaaaaatgtatatatattctatttgttttttactctccagcctctggtccaaactgggcatacagctgggactcaataaacagaagtcacaaaccatttacagtagaatcatccagagctcccaggtccctactgagacctactgggtcaaactttccatgctcaggactctgaatccacatgtaaataaggtctggggaggtttccaccacacactgaaatttgattgaactaaattaattgaactaccttaaactgaactaaagattctttaaacatctgaaagccatgatatattcagaggtaaacctgagatctatgctgttctagaatgcaggtgtgggtctggtggacaacagtcacaggaagacatcacttcattatgtggttgactaagcttggcattacgttggtctatttgctatgaaagttgcagaagagagtctgactggctgagatgtagaacagaaggtggtctttgtagggaaagtacctggtagattctattaattttaaaatattctgtcctatgatgacatatcctggtatatgctatatctaaaatggaccaagtctctactgaagaagaatgtgtatgtttttcctccctctcggatgtatattctatgttttgcttttctctgagtcccccagacttatacaagctatctcactctagagaccataatacatgtcttatcttcctgttgtctgccacatttcttggttccaagcaacaaaataagagtttgttaagtgaagcccaaaaggaatttattacaaatttagtgggtgggtcacagagtcaccaggaatttcaggaagactggagcagggacaacctccttgctgacatcactggccctgggaactgcaccttgtggccactgccaacaccagaggtggctgtcctgaacccctgattcttgatgtattcttgatcagtgccttgttttaagtccagggcatcaggttgtagagctacaatgctcaactgatgaatggctgactcgactataagtgaatttaatggaca

SEQ ID NO: 48453 - DNA, 1596 bp, Bovine  19866880540987
  misc_feature (1)..(1): n is a, c, g, or t
nctctatatagtgacatgcaaagctctcccagcatatcttggcatatgaaaaaaaagcatgaaacaatagtgtataatatactagtttttatcagaaggggacaaaaataagaatctgtattccagatatgcctatatatgcacaaagcatctctggaaggatccacaggaaacaaacccattatatcttggggaagagaacgggaactcagaaaaaggggaacgaggatgagaggagacttttcacagcacagctttttatattttttgagccatataaatgtataatctattaaaattatattaaaatttcaaaattatgcaaatttttattctactccatgacatagtcatatttgctctaatttttttttaattacacatatattttcacaactgtaaaatgaaatccatatttaaagtcctgcttcatgggtcatctgggacatcatatgtgtggttcagtgtgaaaagtatgggttctggccatttaaatcttgcttaaatatttagccttcatttcatttggagaaccaacatcagcacacaaaaaatctgagaatgctactaaaaaatgctttctcaacagtttgggatttttatctacaggctggggtttctaacggggggaaagattaaccccagcatcttagagctcttatgcccaaaatcaataccaatctatctttggtaattaaaaaaaagccaccacactgagatggctcccagagtgcaaagctcacagacttctgcccattcgtcaacgctagtgaatccagcggcagccaaaccccaaaaccaaacctctgcttcacggcgcaagtaactgaacttcaaactcttcagctattttctacacgtatttaaaagattggtgattattttttaaattaatcagtctggcttaagtcaatttcctattcccttaatggaaaaaaataattaggcttcttttggttatacttccacacttttattagaatgcttttcatatattatatgtgaaaaaatacagcatttcttttttatatgaaagatatgggctaaaaataaataaaatacaactcagatataactgatggaacaagcaaatgcagcatgactaatgtcaataaaaggtacaatacgtacctagtgcattttgtcccagaaaagatattctaaggacaagttttgcatcgttgtttgcctcccaggagtagtttaataaaccaacagtgctataaatgtctcccaaatcctcccaaactgaaattttatttctaggtgtaaataaggccagagttaaaaggacaaacagcgtgcagagatgaagcactggagcatgaccagcagggagtcatctgctgctgctttcatcctcgctgcttccatttcagaaggctgttctctctgggatcccttcagacaaacaaacagagagtggggaccacgaggacttaaaactctactgcaatctcctgacgaactgttgggatattcatgaggggcagaatgactccacctttagattttatatcagctgtaataatgagttatgaataattgatctctaggtagtaaattattcaggcaagcacacagtttccaaggaat

SEQ ID NO: 48454 - DNA, 1056 bp, Bovine  19866880545513
  misc_feature (1)..(1): n is a, c, g, or t
ntaattttatttctaactttcaggtctgcaattgaagagggtaaagggatttataataacattaaaaattttgttagattccagctgagcacgtaagtttgtaagaaattgtgacaaacttgtgggtcttacagataaattattcaaaaagtagaattgaaacaaaagcctataagcttctggctctgattctcatatgtaagttttccattgtgaaaactggattctatcctaaaactaaacatggcatgataattataattactaaatatagtaaatataaagctaaatataattacttgtgtatatcatcatcaaaatatattaattgttgtggcttatttaataccttctgaagtaactaagaaaggggtgtcaaattttaatttttcttcttggtatctttttccaaaagcagaagggcttttattgtagtctattacaaaacacagttataaaaatatcattgaaactcttaactgttatctgaactcagttaaaaaaatcttcctctttgttgttgttatctaaacactttgcaaatcctttattaaattgctgtggatcataagggctaactctttagatcataagggctaaatagtcacactaatgaagcagtagtttacttggaaatataggcttcctttaaaagaacagtagtaacatgagagttttaaatgataagaaagtgatttcataaaattagcaagaattatacaatgttgatacatttttaaaaataactctttctttcgataggagtatagcagcattaactttaatctcactggctacattaatgaactttccccaatcctctcaatgccatgcagattttgtggatcaatattattatggatggacctccagctcagaggtaagaatttcctcatttgtaaactagaaggacaaggatagccttatatcctgatagttaagctctaagacttcattcccagtagcatcggaaatctctgcagcatcatgtttgttttaagttgtgtgatgtgagcgtatcatttactcttctgggatgctcattcatgcattagg

SEQ ID NO: 48455 - DNA, 1271 bp, Bovine  19866880847614
  misc_feature (1)..(1): n is a, c, g, or t
ntcttctgcagcaccacagttcaaaagcatcaatgcctcaatttggtgctcagccttgtttatggtccaattctcacatccatacatgactactggaaaaaccatagatttgactatatgaacctttgctggattttcatatctgttttgcatttagactatggtgatgttacatgtcacatagtgtctaaaagactccactgtgtacacctgagtgtattagaatgaaaaaggaaaataacatctttctattgttatgaagttagttctggaatcccttgaaagtgtctcaggtactcccagagtcccttgaccactctgagagctgttcctctgggcatgaaaggagacactgaaagagccagcattaaatattcctgggtctcttgaataatttctccagttgtactgccctattaaataattttttaataagctagaaaaaaagatagttaagcagcaggagaccttttcatgaataaggtgctctaaggtaaaagctctatttgaatttcatgggtgtgagatcattaataagcaaaagtaatgctgccagtgttattgtaatagtcataaaaatctgcagtcttactgagatgatgcacttttatgcgttaattgacatcattttatgtactgagtggatgcaagatcttgaaactgtttgaggggcctcctgcagggttaattgtgcaacacattcactcactacatatttcctccaaagaacctgggagtttctaaatcagtcacccaaactctgggctcctgcattctctatgcaaacagtttttcatcactgaaaaatcccaaatatgatgcaaatcatctgattaattattttgtgttactcttcaacttttcagaaaaatagtccttagagagctgtagcatcagcataatgcagtcaatgctttagagcaggttgatttctggctctcatcgtcatggagataaaaccttcagacacagggagttattgtgatggtaaaccatgctctttccctggtggcatggatttttgcagcttgtcttttgatgaatttttctatgtcactgttgataaattacatgtatagggatctctgttttaatttatctagctatattcttaaacgaatacatttctattttgttttaccttcgggaagatataagattatttttagttaaatggcttgtgaaaaattagatgcatttgacaaaggtacttaatgtattgatggaataaatacaattctagttttctagttgaatgcacaacaaaggca

SEQ ID NO: 48456 - DNA, 1378 bp, Bovine  19866880873716
  misc_feature (1)..(1): n is a, c, g, or t
nttcaggtcctgtgagattctggccatcttacataattagggtttgggagctgaaagggaaaagggaggagagagagtgggtgcacactggtttgccccaattgtgataatgaagttgacgttctggggtaagtgattcacgtcttcctgaggctgcatgtattagcaggaaagaaaccatgagctttttatcttggatgtaatacttaggaatgagggatgactaataaatacaataccttaggatgagtagggtgcaaggaaaccctccacttcaggagccaaacaagcctgccttgaagactgaaccaccaagaagcattcagaaggaagacaacaacacacaaaaagcctttttttaaaatcctttttttcttacattactgttgtttgaaagaaagcaaaagtgatttatttaaaatatgttgacaggagaagagtatagataaattactttagtatatttattacgttttcagactatttaaattctttccttataccactctgttgttccagtgtattgctttggtggatttgtgagtagagaggctaatggttttgctaacattgaataatacccccaggtaaatagggaatattattctttataaatgtatgagatgtgggtagggatatctaagctattttaataaataatattttttaatgtatttgaatatgctggtccctttaacattgtcattgctgactacttcaagttttaaaaacacaagagtgtgtaagcctattattttaaatgtgatttttgtctaatttattcaataaactggagaaggaaatggcaatccactccagtattcttgcctggagaatttcttggacagaggagcctggtgggccacagtccatagggtcgcaaagagtcggacacgactgaagtgacttagcatgcacatatgaagtctattgggaacataaaatcctaacatcccaccaaaatataaaagacaactgcagatgaaatactttctggatgatgtgtaattttatactttctttactgctatctcccttcatcatattttattgctcttcattcctttccgaaggaatatatcctaatcttcctaataaatctctaatcttcgaagtgaaacctttcttctccctgaagaattattaaagatttgctgatgatgaactctctgtttttgttacctaaaaatgtaattatttcacttaaattcttgaaggatatatttactagcaacaaattttaaatgactgtggttttgtttaactgcattaaagatattgtttaactgtcttttatcatccatattgccataagaagtcagctaacagtctaataagtcatgcttttgttttctctagctattcttagacttctttt

SEQ ID NO: 48457 - DNA, 764 bp, Bovine  19866881073647
  misc_feature (1)..(1): n is a, c, g, or t
ntaaagaaaaaactatcatttaagggaggtaacacaaattcttgataagaattataaactgagtttatttgagctctggggcctcctcgttctccaaggtctccaccatcaacagctcaaacggattgcttccttcatgccaactcctggcgttcagggtggtacccactctgttctctgaccagctgatacctgatttcttctgctttcttctttttgaatttaatttaccctttggtaggaatagttcagcaggggcacaggatcttgtggcactgaacagatgttcgtagagttgctgggcctcaggacacaagcgcaggaggctctccaccgaggccgatgtcagtagttgtcggcacagaccatgcaccaggctgccactgtacagtctgctcagggaagaggagagggtatcattacagtcgaggctcctgcgctgggacagctgtcactaacgtggcttcaacagatgcatcaaatactgagaacactgcttctataaaatcattattacttactcaaggataatctgtttcttgaaagaaggaactgaattgttacaaagattacttcttggctggtaatacttagaactttttatctacaaagtaaatgatgggtgcttgctggttctgcaactggccccaatttgagcaggcctcttaacacttcaaagaaaaggagttaaaatgcctctgattaaacacacaggtaggctgttgaatacaagaaaatttaatttcatcatttgtgaggtcatt

SEQ ID NO: 48458 - DNA, 1274 bp, Bovine  19866881119100
  misc_feature (1)..(1): n is a, c, g, or t
nttgacagaaatgaggtgggaagcagctggaagcaaatggtaaagaattcgtcaaaaggaaagaaatttcctgagtactaactctttgtggctcactacacgggctcatgatgcaacacaaaaatgaattagaaaaagatcagtcccacatgctgagagtctaagatggattatactatgtataatgtgctaagtgtcacccagctgaaacgctatgagactcagggattgaatgaggggtgattttcagccaggagataacaggagtctttgtagagggggtggcatttcacaggacctgggagaatgggtgggaagtgaaaacttggagccaggaggaaggatgttgtgaaagggcagagataaagaagtgtgagactgtggagaggaggcaggggacagcaggtagtcccatttcccgggctggaagagaataaagacaccgatatttgaaatatcctgtcacttttgtagtttgggtactattccccattgaagatttggttacatcttgacaggaacttgtgagaatcaggttatttgctttttacattcataactggtcttccctggtggttccatgataaagaatctgcctgcaatgtaggagactcaggttcaatccctaggccaggaagatcccctagaaaaggaaatggcaacccactccagtattcttacctgggaaattccatggacagagaagcctggcaggctatagtccctggggtcacaaacagccaaacaccatgttgaactaagcaacaacacaacactcataacctgatgtgacgagtccaaagctctgggtggtgaatataaggggcctcgtgaatgcatttatatgtatttcagtcttgaaaggcctcagattaaattacagaggaggaaacttggagattaaaaaacaccagctatttcaatggtgataacattccctatgaggtgcaagtctggccatctgccatttccaatattattactttacctcaataaaaagaggataataccaggcttctgtgagttaagatgaagtttgggtgtgaagatgagaaatatctcggttagcaaggagaaacagcgacccacacgtcgtcatccctccgagtcacaagctgacagctcagcaggtggagccaggaagccccgcagctgttccctggctgctggccaaggccattaccatggcaacgcccctggggtggggaggggcagcttaacctgcggaaaccaccagtatttaaaaagtaacacaaatgatcctggattggatc

SEQ ID NO: 48459 - DNA, 752 bp, Bovine  19866881357159
  misc_feature (1)..(1): n is a, c, g, or t
naaattaaggagcttcagtaacttgatgtttcaaatccctttgcccgaggtggtagcaaattgaaaccataaaaggttaaacctctacaaacctctacaaaccataaaaatttaaacctctacaaagctacaaagcttacagatctgcagggtagctctgcagttgcactgtaagtatataaagaaatttatctttcaagcatttagtgacatttatgcttatgaacattcagattaagcataaatggctatcacatattgtttatttaacaggaactggcagagtatctattgaaaagttgacattgtggagtcttggaatgattgaaaataagccagaatttactttcttgagatgtacataagaactagagaatgtgtgtttcatatttctctctcctgcctgattcagagttcctatgccataacttacaagagcctagaatactattttatgtcagaatagccatgtgcagctgtgcaggctgttactgcacaactccagagggcaccactgatgagaccaaatctataattttgctcacggaactgtatttaattttgtgaggacccaatgagagtgacagtccctcccagagctgtgcaaggctgtgaagtaagaactttagccattaacagcttgatcttcaaggccaaattacacaaatatgcttctctatctcccagtccagtgggtttggcaactgtgctggggtttggcttccatatccacattcaaactgagggaactg

SEQ ID NO: 48460 - DNA, 1050 bp, Bovine  19866881427327
  misc_feature (1)..(1): n is a, c, g, or t
ncattctcataacaccaagggctagagtcactgtgaccacaatgggaagaccttcaggaattgctgctacagccaaactgtagccaacaaagacacagcatttaagtataaattcagtagtacccataacaataatttcaattagctgttacttagagactaaataatgtaaaatcaatgctgtcaaacccataaaaggccttacttagtatgtggaaaaattgattaacatttattggctacctacaagctaccagattaagcacagtgattaaagaatatacattcttacttcacactgcctagatttctactccaagcttcaatttttaccttaagctattatgctaccacccctgtagtttagtttcctcatccatatatatagtaacaggtgttcacacaaaaacttgcacatgaatgttcaaagcaccattattcatactcaaaagatggaaagagcccaaatgttcaacaattgatgaatgttaaattgtggtgtatgcccgtacaaggaagcacataaaaaagaatagagtatgattcatgctaaaaatggaaaaaccttgaaaacatcatactaaggaaagcagcaggacacatgttgcaagatttcacttatatgagatgtcaggaataagcaaatccaaaaagacagaaatctgtttagtggctaccagaaggcaaggagagggcagaatggggaatgaacaggcacagggttttctttcaggggtgatttaaaagttccaacactagacgttggtgatggtggtaatgatgttggtgatggtggtaacaatatgaatgtacttaacaccactgtactgcatactttaaaagggagtattttactggtatgtgcattttatcacaacaaaaaattacttatttctcttcataatattaaaaaaaaaaaattaaaattaaaactccacttgtcccattcccggtattaccccctgactctggcacagatgaggacaggtaggtacacatccatccttcactctaacactgctccctgcacccacctctactgctcaattt

SEQ ID NO: 48461 - DNA, 2916 bp, Bovine  19866880420967
  misc_feature (1)..(1): n is a, c, g, or t
ntgtcacagaatgagtttcatcatgtccaggtccatcagtttttctttggtcgtggagggtgctggttggtgcccatggtcattgagaagcatggtactcagatgcagcagttggaagtgggtcagcaacgtgttgggtcatagagagtcactttggttggctgactccccagtgaggtgcccacagctgtgaatggaaagttttcatctgccagagagaagctgttcagcctaagggacccatagtgatgatataaacgataactaaccaagctttgtctggaggcttccagactttgtcatttgttcagggaaagtcctgggccacttccacctatttccagtggattctcagacctgttccccttgtttgaaaccctctgcaaaacctgctttaaggtcagggccctgcaccctctctccaacccctccaccctctctccatcccctccaccctcaaaatccaggtgactgtcatctggtttcccctggcttacagtttgaagatcttttccttctcaaaggcactttcttttctcaatacaacctacttcaaaataagcatttttgcttattttattattttgcatgtttctcttgtaagtatcgcaaaaggattaatagcttgagacaatatatactagccttttttgattctctcaggagcagccttggaacatatgtagagaaagcattatgtctatttttaagagaaagaaatgagacgtgaggtgatttgatgaaggtctcaaagttagtacacggagctgagaaagcatgtttaatttcctggctcccgatccagcttttctgtcaccagcaaacattgccagttctggtccctgactcctactattgcgtttaccacatttttggacatctgaggctgtgtttgcaactatgttaccatccatcccccttgattctccaaactctagaaattccagattattctcatttttgtgtgtgggagagaaagatggacagtttaagtccactcatatttcatattgtctttttataaaaagtatcttttaatctcactgacatccagatcaaactctgaaaggataggaaaggtcttgcttatggaattcaacctaaggggaaagtaaaaatgggtgaattgctgagcaccagtgatatccatctatacccaagaaagagggtcccatccctggctaacgccacctctgcactcagccacagtgccactctgcgaagacacagatgagaaatacaaacgttggttgcaaagggtttcatataaccagtgacaggctagttgattaagttgggtccagaatttcgaaatgctatatctcatagtccttcgaaaaagaagatgcaaatgtacagctataaaagaagaaacagttcagaatggttggaataacctcctgaaacttttcatatgggcaggtaccttctgtgtgtgcatgtctactgacagtctgctgacatggttttccaggaggccatgtttgcacattaggagccctcggagaagacttttattcttcttattcactattatttgctgaaaatatgctaggattattttaaatcaaaggcagtgtgtttgttactcaccatttctggtacataaaggactcaaagtatgagacaactgtcttaagatttttcagtgactgtcatgcttgtctagcttattttgtgggaactcagggtactggattagaactcctggatagaagactcaggcaggtggatttttataaaacataagaataaaatttgagaactttctgaagattggatgcttgagttcccaagctcagcaggtgttcaaacagagactggaagaccttttggcatttgttatcgcgatggaattcaattcttaaatgggcaaacgaaccacatactctctaagacgtcctccagctttgaagtgaggtgatcctgtgttgtcagttggaagttagactttggaatttgaccattgcatcagtgaccatttagcagccatcaaatagggcaccatgatgtaagattccactgcagaattacaggtcaccatatatccattgtctacaggaaaggggaccatggacaaccctgggcatagcgctcctcagtctaatagaggcagagatggtgcatggattccttagaataccttcagatttttttctctaatttctttgctggtaccattcagagtttccattcagaatatactgttcagagtatcttctccatactatacaaaagcacattgcaaatagaaatcaattgagaaaggtttccttccttttgcagggctctggcatcttagatccctctctttaccctcctctttcacctccaggctctgaactaactcttgggcagctgagaaatgaattgatagctgaaaaaggcttaatttagtaccccttgagaggtctttgcattttcatagtgagttctggatgatcaagacaaaatgaaacaaacctctaacacttagtagaaattgaccttgggactggcagaaaggtttttggtggagggagtggaagggagaagagccttcctggcatatagatcatgatccaacctatccacttacaaggcctgctctgataggaattcactgaaatgtgttaactggaatggaatttactcactactgaaattgggtcgaaaggtaatttgtgccttttccatgactgccacgtctcctctgacaaaaccttctctgatccctacaaagaaaaccttattcaatgagacatataaagataccaaattcactctcatgaaatgacctccataaatcaactgaagcatcttcagtgatttatactttgagaggccagagaacatttataatctggaaacacaggagggcttttagagggttttagtggcagttcttctggtgcatattagactaaagcatactag

SEQ ID NO: 48462 - DNA, 1017 bp, Bovine  19866880526399
  misc_feature (1)..(1): n is a, c, g, or t
nccagaaaacaaatttcctagagttaactgtaggacctgtcagaatatcaagcaatgcacgtagacatgataaccatcgcataaaatatgccatgtcattaacgggggcataaaagccagccatttgcctaaaagccttccagccattttggtgtttttatgttcaaacacatggatggtaccccataaatacctgacctgtaaataaaaacaatgctaaagccaaacaaaatagctgggattatctgataataaaatggattgattttacttttgccttttttctttctttttcttttttggtaaatgccaggaggtcttgcctgtgttgtgatttcactgtttccaaggcaaccaccaaatctggtttcaagcagaagcaaagcacagaaatacaaagaagctcaaggtctaataaaaataaataagtggcatgaattaaatccatgctgtttttcttttcaaccaaatgggtgatccacagaatccactcagacttgtccagatgggaaaacattgttgctcccaaaacctgtgataagaaactagtgaacccctagtatatgactgcacacaaatatgaagacatactctcactatgagttactttcaagtttcacctctgaaatgcttccagcaaatatgctacatccaggcatccctctgccgtgaccatgtacgtgagcatgctaagtcgcttcagtcatatgcaactctttgcaaccctgtggactgtagcccaccaggctaccttgtccatgggattctccaggcaagaataatggagtgggttgccatttccttctcctggggatctttccaacccaggaactgtacccatgtctcctgcattggcaggcaggttctttaccactggtgccacctgggaagcccatgaccacatctgggttctgtctactgggttaaagccagagctggttcctgacaatgcccatctggagcagctgccaccatcacacttactcgaacaacatccagctccttgttcctctgcat

SEQ ID NO: 48463 - DNA, 1802 bp, Bovine  19866880648820
  misc_feature (1)..(1): n is a, c, g, or t
ncagaagtgagggaatgcaaagacaaaagcattgtcagtggttgataagtggccccccccaactggtaagtgaacacatttccaatgtcctcatccaatcgtctgttggccaggcccctctacaattccaggcccttcaaaatctcagatctctgggaaggagaaggaaagggtgatattcgtgtgagaaagaaacgtctgacattgtctcctccacattatcagcaacaattataggcctagtgggaggcaagaaccgtcttaaatggactcttttattttgtatatttattcccttccttgctccccaaattattcaggacaattttgaaaaatattaggattttggaatgtacccaatatggattaaggctgtccttgctggcgaaccacaaggttactttatctcagattaatcaattaaaaatctccctcaagtttgttctcttaagcatttctgagttttaaaacttcaagaataaattaaattctccataagacttttaaagcccaccataacaatgagaataaaagtgttaaacaggatgaagaatagattttgatgagaatgacaacctccagaagcagaggttccagcacatgggaagtgatattgtcaagatactttagagcgctcaggctagtttctattaatagaatactatttgttctcactatggatcccagggcctatggaacatggctgaaagacttagtatcagattttggctatgccttctagcctaacatatgacaagggtcttctgctacagcatgagagcccctcatttgacacaggttggctaagtatgccaagaactgcaccagaggctaggaagcagttgtcatgaactccagcttcaaaaaggcagtgaacttggccaaatccttatttgggtgtttctatctcaaaacagttataatggatttgccacaagatggcgctcatagaccacactgcacacctactgaccccgtcacagtttatctaggagggcaaatagcttcccaagagcttacttacaggtcttcactgtggacttctgtttcattacgttctaaattagtcatatctgagaatcttggcttggatagaaataatattattctactcatggtttgatgagtgctctaatagggtagatattgcaataacccgctatattcatgatgtcatgaggttctcgcctttgagtatgaatctgagaaggcatttgtgtagtattctgcatcccactgatttacaaaatcagtcattccacgaaaaatgaatcctgcttagacccaaacttcaatttttcctaaaagaaatacgtctgcacacagtacggaagaatcgtggtgttcttgagtcagtataaactacctccacacatgcttatttatctgacttctggttttaggaatctcaaagctaaaaaacatgctgaggcaagaaacaccgactaacacatttgaagtattccataacaactcaacgtgatctgactcctggtggatctatatttttctcattcttcttgctttgaccaaaagcacctaacccctcccaagtgagggcacagcacttaagatgacattcttctcttcctaggggtgagaggaagagaaagaattgatgtgaggcagccagagtttccctggatgatctgaagggaggaagtactttatggagagatttttcatttcccagttggttgaaagtcagccagggcgcccatcctgtagccatgccatcagcgggctggcagtactgctgcatgccccgcgtccttggagctgcctgccaaattctacagcag

SEQ ID NO: 48464 - DNA, 1784 bp, Bovine  19866880665804
  misc_feature (1)..(1): n is a, c, g, or t
naggagcctggtaggctgcagtccatggggttgcaaagagtcggacacaacccaaagcaaattccctttcacttttcactttcaagcattggagaaggaaatggcaacccactccagtgttcttgcctggagaatcccagggacggggaagcctggtgggctgacgtctatgcggtcacacagagtcggacacgactgaagtgacttagcagcagcagcagcataacaatatttacccagcttataaaatcactttggtattttcttccagttatagttggaggaaatatctagcttctacccaggagaaggtctaaattgaattatagaacaccttgagaattttgaaccaatttgatgtgatatttcatcactaccaaagtagtttaaattacattgttttgggaagaagcaaaatccaaaagagatctaagcatttagctcatgaaggaatgaggattatattaattgaagttggtattatgggcacatttagtgaaaattgcaagtaatttccttagagcagggaagatttcccatgactggatttcctcctaaagttagatttattcattccttaatccaactagctattagtgagaatcatccaggttctaagcacagaactggaagcccctgggatattaaaaaaaagtagatgatgatacttgggacttcttgctcttctaatacaatgggtcctaagttctatatgggcttccttgggggctcactggtaaacagtccacctgccaatgcaggaaacatgggttcgatccatgagtcaggaagatcccctggagaaggaaatggcaatactcgagtgggtactcttacccgggaaatcccatggacagaggagcctggggggctacagttcatgaattctcaaaagagttgaacatgacagtggctaaaaacaacaggaacaacaagctcttatgcataagaatcaccagggtagcttgttaaaaatgcatacttcttgggcataccatagaaattctgattcatgacattggggctaaaaatcttcatcagtcactccagattatccaaaggcagatcgactaagaactgtgctatgaagcacattattttccagctggaacctgtaaggtagttggaaaagtaaaaaatatacatttcagaaggtcaagggtatggaatgacaactcaggatgttggatgccaaggcagagacaggcaatcagaatttgctgctttgaaaggcagatgatcctgacatttgctgggaagctgtgattacaggtaactagaactagacaaataaacagtcccaattagagcatataataatgccacaagtcaggacaaagccaataattgagactaagcagaaagcctcaggaaccaagggcaatcaagaattacagactaaaaaaaaaaaaaaaaacctacagtaagtcccctatatatgaaagagttctgttctgagactgtaagtccaacaaagttagcccaggtactgtagaaatagctaacagacactggctcagttagtaaagaatccacccgcaatgcgggagacctggattctttccctgggttgggaagatcccctggaggaggaaatgcctacccactccagtattctggcctggagaattccgtggactgtgtagttcatggggtcacaaagagttggacacgactgagcttctttcacctttttcactgtagaaataaagagatggtttgggtggtacccagaagttccttacaggcttcccattgggaaagaaagcagttccagggggatg

SEQ ID NO: 48465 - DNA, 885 bp, Bovine  19866880675462
  misc_feature (1)..(1): n is a, c, g, or t
natttgtcagtaactgcagttcctttcagatgcctgttgcatctctctaaaggagtgtggcagaacaaatttaccatttgttccttcattttgtgtgtcttgcatctgtttcatttgatcttacacatttaaggccagtaatgtcctttgagactttattttctagatgagaacaatgagggtctaagatttgggagggaatcagagggaagacaacatcaatctggaaacaaagctttgacccgactagagtaaaacagtaactcttggcacccgcatttagagcccttccttgaataagtttttttccagagctatttctcattatcactgtgccttccagctccccagcagccggtttggaatttgcctaaattcaaatttacaacatatggtatttacatcgaatctgtgaggtactcagtaatgtggcatgctgtcagaatcggaaacaattctactttccaggacctgtaatcacccaatttgaaattctccgtactggcaatatgttgaagagtgtgtagtgtgcacagaggtgaaaatggaaatttactacaggaatcctcaatttatgatatgtcataatcatgtacctgataatgcccttaaaggatactgaaagttgcccttttttcatctctacctaccatctctatttgatttccatagtctttcatttccacagaagttcacgctcacctctgttctctccgatgcagaatgattgttgttttcttatagcccagagcctttttgctgagatgagtatacaaacctgataccacttgacaaaaggggtggtaaggtatggagctgtgatggagttctatcttattctttcataaatcaactgcgggggtccgagccaaattgtagacccaa

SEQ ID NO: 48466 - DNA, 1708 bp, Bovine  19866880695692
  misc_feature (1)..(1): n is a, c, g, or t
ntttggactctgtcttgtgggctgctgagagcaatgagcgccgtcaactacaaactgacacttgccatctacctctataagggttaaagcatgtgctctgaccttcaacagcctctgaaaggagttcagggtggagcgcagaaatgaggcattctgtgcttgggatggggtgggggaactggcaggacagatcttcagataggtattttgaggatctcattttataggtccaattcttatgtctcctcatatctagaaaagcactaaaatccttcatggtgatgattgtttctcatcactggcaaaaagcttcatgagacttagcagaaaccttctgtacatgtgcttaactgtatgtatttcctcctttgccagaatcagtgtatactgaccttcacccctgcctctttggagcagtctctcagaagtacttgaggcaccatttcccaggctgcagtcctcattttgccccaaataaaacggcacgtaactcacattgtacatttttttttaagtcaacagtgctttttagaaaagagtgagttgagtaaacagattttaggaaaatggttttgcctgtagtgtgtagatagaatgaagtgtgtgggtatgtgtgtgtgtgcaggtgtatgctcagaggaaggctggaggcaaggagattagttattatactcttacaaagaattgaaggcctggattaagtgaagcggatgggaatggaaagaaagtgtctggtgtatggcaaaacattatcaggacctcaataaggccaaccaattgttaaaagagacatgcagtttcgctcataaaatactagaacccaaggtgataggggctgatgtagtaatttaagatatcacgcaaattttattcatggatttctcttgcggtaactatttacaattaaacagggtctctttatttttgaattcgcatgtttctcttcctgcttgttacttcaagtcctcctccccacaattcgcttttatttgttctccagttaatctctactatgtttttgcaggaggaaatttagggttgcaaaacgccaaagacgtatgatttcaaagatgagttttctcccttgaaaacagatatccgcctagaaaggggaggcacgtggccaactcttgcctttcagcacgtctatgtgaccttcaaaactccttaggacacgccggtttgcggcggggctgcatccccgtcagactcaggttggcagaatctcccggggctgccgggtgtgcacggcttgcggttccgaagctagagttcacagaacaatacaaagacacggacaaaagccaaaccacagaaccccatgccttaccacaatgggctgatgggtgaagtcgcggaagaaaggttctgctcttgcccttttaaaattccagtgcagcaaacacacacccgcgcgctcgcgcgcgcgcacacacacacacatacacacacgcatacacgccggatcgggttttcccactccctgctactctgcaccagtgtccttccccgagtcctgattcatgaaccgtgccacctttgtctcattttaaactgtgcagactattttcatcctcccacccccctccccggttccccctctcccttcctccactggaaagctctgatgtaaggcgctcgctaggtgggagagagcttctttccatcggctcgggtcggcgagatcccgagagcccccctccgcggg

SEQ ID NO: 48467 - DNA, 1621 bp, Bovine  19866880719800
  misc_feature (1)..(1): n is a, c, g, or t
ncatggcccagattcacacgcgcccctgcacgggttgatgcacattctcctgactccagctgcgtctcctgttttacagcacagaccagcccaagccccatcactgctctcattcacataaccagttctccttcagacaaaccactctttaactgcacctttgaatatttaattattcaaattcccagataatgatgcagtcatttcatcatcatcatgcaatatgtataactgtatcatttgtatctgtctttctgggaaagaagcagaagagattgtattattctaatgtcttgttcttggcatctgaccaagcctgagaccaaatgagcagtctgttggtcaaaaatatttcatgtgtaactacgtggtgaacagcttgcagtgagctttgggggagtcaaggggaaaggagcagtggatccgcacctttagcgcttaaattctaatgaacaccagggaactcacacacgtggacagcagcaaggaaaggacagagacacgaacaagcaccagcgaatgctgggaatggaaaacaaaggagcggtttgtttcagaaggctttgtagaatatggcgttatatcgctttaaggagaaaaatctaggttgttagggagaggacatcacatcaaagggaaacaggccagagctaaggagatggcccatactggtcacatggaagcaaaggcaatatcctgataagaggagaccacagaaaaggctacacggagtagagaaaggtatctcattttcttccattttacaaacactcacactgctgagattgaggctgatgtcaaaggatctgagggaaggataaactgggagattgggactgacatacaactaaataacgaataaggacctattatatagcccaggaaactctactcaaaactttgtaatggcctacgtgggaaaagaattgaaaaaagagaggatatatgtataacattttgtgaaacagctgaaacgaacacaacattgtaaataaactatatcccaatgaaaaaaaaattcttaagaccttaaaaagcaaagaaacaacaaaacaaggccgggggggaaagttcattcaccgcatatccttgggtctaggtggaggacagggtagtaagcagggcagacgaggggtctcagtttcagggaaaaagtgttaggatggacaaaagataaggctgtgggccaacaagatacttgaagaagtaacactgaattgagaaactgcaggacagaaagaggacctcaaggaagggtgaccagccctcctggtttgcctacaacagtcttggatttagcacctaacatgctaccctcaccctgggaaacccgtcagctcccagaactgctggtcaccccacttcacaaggtagtaaatccaagcaagtgtatggtattatgataatgaagcaaggacggcatgaaagtctgaggatgaatcacgactcgaatcgcagtcacgtgttacatgggacatacagtttggctcggaaggaagacactctagaaactggaaacaggggacaccagggattcgagagcaggaaggagactgggtgcttttcctctggaccttcactattgacaggtatcatctcttcatccttacctgctttctca

SEQ ID NO: 48468 - DNA, 1361 bp, Bovine  19866880778967
  misc_feature (1)..(1): n is a, c, g, or t
nctgcacagcagaaacaaacacaacattgtaaacaaattcaaactaatttttttaattaaaaaaaaaaattaccttggaagtgtatgtcaacaacacaaatcctaagccccatcccaaactagtgaactgaagtttctgagaggaaggctgggaaacatacatacccatctagtgttaactgcatcccaccctgcaaaacgcaaccaatttaagatgctgagattgttcccagaaaatatgtgactctgtgtaaataactagatgagcctttccccagctacattctgcagaataccagttcttcaaatagttaacaggcattcactgggggagcaaaaaatgggttctgaggtcaaatgacttagggatatctttgggttaaataagctgtaactggtttatttattacagaatgcaagagatttgaaaggcctactgtgtgctgtgaaagggcactgaatgtggtcattaccaaacttacttgataactagagaccaacccctttttctttctatatcaatggacatactaaatgaataggtaaaaactcctgacaaaattaagagagggagatacgctgggaaaaaaaaaattatgatcttctactgcttaacagaaaaagaagcatatataacagaataagattttaaaaatggtttttccttctgatgactatttaagcaatatcccaaatgcccttcttggtagtctggttgtcaccaggaaaaataactcatttactgaggaagaggatgtttaaaaatcaatttgaagatttctttgctaaggaggtcctcaagaccaaagctagcagactatggcgtgtttcctgggctcgagatggagacggctagaacataattactgtgcagccagctcctggtctccgggcatcctggatctccggaacaaaactatttcacaaccttgggatgaagccaagtaattttcttagccaggaatcaagatcaagcgctggaagactgaagccctcagaatctggacactgtttttaacttgagctccttggggttaattcaaaaggcatcagaagaaacggcctagttttccaatctcagtagcatacaactaaccagtcagtcacccaagccagagtggaatggttcatcccagactctgctcccttcctaagctaatgagttattaaacctgctgcatttatgacttaaatatttctcagtcctcctcctcttctattcccactgctactgccctacttgaggcctccatgatctcacacctggactatttcaagagcttcctaattgaactctgcctgaattctctctcctcaaatccatccttctaccctgacctatgcacatcggcatcacacca

SEQ ID NO: 48469 - DNA, 1619 bp, Bovine  19866880782693
  misc_feature (1)..(1): n is a, c, g, or t
nggaaagaatcctcattgagcaagactgtcactaaagaggaaaagcttccctggaagaagcagaaggctgaacatactggggactgaaagggttaagaactcaaagtgacctacaaagctataaatattttacacattcatcacctttccatgtaggtttcccaactttccacaaataagatactaagcggtgcttaattcatagagcactgttgccatggtgcaggtccaatcatgttctatctagcttctcctggttatcctaaggcttcctcctacacatacacacaaagacactgttcactgaaggcagatgagattattttcaatctttttgccactgtaaaaatcatcttcttaccttctccaccaaagtaaaattccgttattctttaatattcccatctaaatccatgccttcttttgccctcttccaaataacagaaagcttcatctgctcataaaccaactacctagaaagatttatatttccagatgaaaatgagccaataattgcttctatcctttcagctgagaaaacctcgtatgttgtccccctaaccccaaacgctaaagattaagaataaggggaatgtctatttgcttctacctattaaaggaataactagagtcttaccctgagaacaatcggttcgttcttgacctagcatcctatttatctttctattctcaaagctaattgctcatatgagcgtgccaatttgccttgattataggagtcttaataaatgaacgttgtttacatttcacaagtgtatttgaatttcactccaggaagccaagctcatcaagtctttctaagtggtaaaaccagagatcaaagcaaaaagcctgcattgaaccaacaaaaaattaggcttgagaatagaggcctaagcaaaaatacaattgatttattgattgctctatcccagtagtaaacctcagggtcactgttcactcttaagctagaatgtatagaactttctctgcaaattatcattatgatttgacagccatttcttaaatgcatagttaaataaatctaatattcaacaggctttgacccatctctcctatatttctcatcttggtgctttcagttgaatcaagtatctttaggagctttttttttttaaccctcctcaactttgcctaatttctctagattttcactgtggttttaactcttatgtttggtctcttgggcagggagggagaggagaaaaactactctggcacgtggctctcaaccacagctgcacactcacatctaaggagctttaaaaattctgacacccaggtcacactccagaggaactgatcagaatctctgggggtgggacccgggcacctgtctttttgagggtcccaggtgatgctgactatagccaagtttgaaaagcaccactgtggcttgtcaatccctttgtcacctacttcaaataaagtactcagccaaacttcacagggaaaagaaacaccaaggaagagagggcaggttcctgagcaaagcctcaactcaaggcaggacctgagagaggtgactgaccagcaccagacatggggccaaaacatgaacaacttgacacctttcccaaagccaacaagatttaagg

SEQ ID NO: 48470 - DNA, 717 bp, Bovine  19866880825527
  misc_feature (1)..(1): n is a, c, g, or t
natgaaatgctctgaagagactaatagcattctatgaaggcttataaattggcagtgaatttatgatgactttcagagagcatttcaggatagggtgatgagacaagaagccaaatgctcctgtctgagaagtagactggaaatgaggaagtaaagtcaatgcatagaaggctgctcctcccagtacaggaaggagacagagctccagcaggagcagtagtcatacagcggaagtgtttgtttttattcctgctttgatttcagaatgggcttccccggtggtgcagtggtaaggaatctgtctgccagtgcaggagacacggattccacccctgggtcggcaagatcctctggagaagggaatggcaacccactccagtattcctgcctggaaatcccatgggcagaggagtctggcaggctacagtccatggagtcacaaagactcggacacgactgagcgactaagctcagcacagtacagcttagttgatttacaatgttgtgttagtttctggtgaactgcaaagtgattcagttttatattatatactatatatcgttccctgtgctatacagtaggatagtgctgcttatctattcattttatatatagtggtttgcatctattaatcccaaactcttaatttatcatccccccgcccccgtcacctttcccctttggtaatcataaatttgttttctatgtctgtgagt

SEQ ID NO: 48471 - DNA, 1024 bp, Bovine  19866880859204
  misc_feature (1)..(1): n is a, c, g, or t
ntaagtggagcttatgtcacaaattgctgccattactttcaacccataagtaaaaagtggggacatcacggtgcaaggctgagatcaaaagtacccaaagcacagttggcgaacccaatactaactgtgagtattcaaaaacaatccacaattggtttgctacttggaaaaaaaaactaaatcgagacctcagaatcccactatacaccaaaattaattccagatgaataaaagttaattctttaaaaaagaagtcgctaaagctaaaacaagtcatgtgtatttttggggtccatctttagcaaagaccttttaacattcaaaataaagacaaaaaaatggtcagaaatttttaaatttttgattacgtaaaaacattgtacttctgtagctctaaaacgctgatctaaaaggaaagtgagaaaaacagtcaaaaacaaatcgttaccatctattacaggcgttggcaagctatagcccaaggaccagatccagcccgcagcttctttttgcacagcccatgagctaagaatggttttcacatttttaaatggtggggaaaaaaatcaagagcaagattaattcaggacatgtaaaaacgacatgaaattcacattcagcatccatattggagcacagccacactactgcttcgcccagcgtctgaggctatatctgccctgaaacagtggggctgagcagctgggactgaatctacaagccccacaaagtccaaagtatctactatctggccctctgcagaagtgtgctgacgtctcatctgttatacaaagaccttacgcataagaaaacaatgaggcccagtaaaataagtaggcgaaggagattttttttattatatttcttttaattttattttatccttttaatatatcttttatatacctttaatatatctcccagagtttgctcaagttcatgtcctttgagtcagtgatgctatctaatcatctcatcctctgtcgccctcttctcccttgccttcaatctttcccagcatcag

SEQ ID NO: 48472 - DNA, 1574 bp, Bovine  19866880902422
  misc_feature (1)..(1): n is a, c, g, or t
ngtggcaggaaagaacgttcaggaatggagtgttattttgatatagtgattgcttttgtttggtggttgactgtgatatatctgattcacaaaataaactgacctaagttcattttaatggaataataatggaagccatggctgcagactaggtgtaagctccttccttaattaaaatctcagataggacaaggcggtgttttgtcttgcagtttaaagtttattgcaattgttggtattcacgttttcagaaagaaaaatgactactaagtaatagctacttcccaatggaagaaacatttcaaaatgacttcggctagattctctggccagtgacagaagcactctacttgtattttataagagccagaatcacaccagtattacatgctgttttgcttgactgtaaatatcgagggcaaagtacatgtttttggctcaaattcagtttgaagggcccattagctgactcttctacacaagctgctttgattggctgccagctggcctctgtcttgtttagacacatgatattacagattgcaattctctcattggtgctctcctctttacagatcttagaaaccaaccatacagacgagccgatgcggtgaggagaagtgttaggcggcgctttgatgaccagaacttgcgttctgttaatggtgccgaaatgaccatgtgaaccagagacctgcttgtgtgaatagagggtgtgcgtgaatgaagatgtccatgtgaactttctgtgctaccatttaactgcagccttgaacatagatcaaatattctaagggctcagatttagcaaacacataggaatttttaaatgatgggctctgctttcaacctttgttaacaagtgcctaaaagtggaagtacctgctcagattaatcaaagcaataggatttgatttgattagtatctttttacaccagtatgttattttttaaccaaaatataaatttcatattacattcattatctgccattgtgattgtcccatgatggcccaccctggtttcctgataagttgtaaataacatggaatgcatctgctgtgggcttcctttgctgtcttttaagaaagttaattttgttttagccatacctgtcaactttgtatttttaagggcttgcagcacggaaggaaaaagtcatgtgataaaactccttttgtctatacccaagccccagccaagtacaaataggatataactgcagtggcacagaagtcagtcaacttgtttcacattctgcttctgtgttggggcacgatgcctcatgagatattcaatggtatgaatgagaccatatgatggcatacagatgtgtacaagacttatttgcagtactgttcttcagctagaggcagcttttaaaaatacaaatgtttattaattaccactaaaattaacatctcagtagtcagtattaggatttctgaggaccactatgggtcaatcctgagaatagaaatcagtgccttgctagccaggggagaagttcactagctccatgaacaagcattcaagatttacttccgctagcagagtagtattagtaacctggc

SEQ ID NO: 48473 - DNA, 1831 bp, Bovine  19866880923710
  misc_feature (1)..(1): n is a, c, g, or t
ngggtgcgtaagggtgcgtgctggagcaagaaaggtgccgtggggccgatgagaggctgagcgcccctggaccagagcactacccgcaagcagtacgagggaaggcgagccgaggcccaagggagccgagtttcctccccgtgcagcgtttagtctctccgccaaaaacctccgccaccttcacgtcacctctaaactagcgcgtgccttcgcagtcccaaagccgcacctcctctacgcccggtcctagcgcccgccaacacacattcccgaacctgtttgctttctcctatcttctctacaccagcactctcccccggcttccctcagtaacggaagctcagcgcctggcgccttcatctcccttaggcccaataccgccttccctttcacattgttcttcccgtccctaccacaacttccctctacgccgcggggcaggtctccacccccgccccaccctggcgcgcgccggccagctggtgcgtaaagagctcgaaccggctccgggcgacccctcctctagcttgccccgcccccttcctccgcctgtagtcccgcgcgcaagctactggctctggtcaccgctaacgctagaggctgcttaccccacccccatcccatcccacctctggcggcctcaggtttgtggggcataggtgattcggaaggggggcagaggttgaaggtggcaggcctccactggtccactccctacggggtgtggcagtctaagttcgagaagctgggacaccgttgtcttcccttccccggggaaagttggagtcttccctgcaggggaatccgcgcagaaacttcttccgtccccctcccccaactccatactgtcgacgctgagttaggctgaggctgggggcgaatcgccgaagagctgagagtcggaaacgcagtctgattggacagcagggaagcctgtcagcctactggccccgctgatcccgccccatagcgcagggcagcctttaacctttggccccagtgggcgccagccactcagatcgctttttgttggtatgtgtagcggcagtggccgccggcggagcagtctgagcccgacgatgaggccggggacgggagccgagcgtggaggcctcatggtgagtgaaatggagaaccatcctccctcgcggggtctcggggacggggagcggagattgtccggctcaagcctctgctccagctcttgggtctctgctgacggcttcctgaggagacggccctcggtaagggagcggtggggcagggggaaagcggcacaatgaaaaacggaatcagagagacaggaagcattctccaaaaggagaagaagatcagagtggacgaaggaagagctcgagatgctgggatttgttccgagggagagaaatggagagcggggatgcacaaaggaaaggaagtgggaccctggaagttttcagtaggttcggcctaggcagatgcgcggtggaggtgctgggccctgggcggggtgagcgttttggagaggtaggctgggttaagcagggagggggaggcggagacggagactttttccgtagactttgttaacagagtctgccagaatcttaactaatagtagtggtgttcgcagcggggggatcgctgggagaattgtcagcagataactacctggttttacgacctggaacaatggacacgtaaagaaaggagttgtcttataaaaagcgcattaaggtgcctaaattagttgtttacgtttagtgttcgtaaataacagagcttagtctttggggggggggtatttttttgcataagttattttagctgtgttagagattctattaggaaa

SEQ ID NO: 48474 - DNA, 1991 bp, Bovine  19866880943679
  misc_feature (1)..(1): n is a, c, g, or t
naggcagctttgtctagcagggggtgtcattttagctggggtagtctgttccccataaaaacaatcccagcgcagatttttccagtagccaagaacaataactcctgcttagagttttattagaatgctgaggaaaatcccagttctaaattctaactctgcaacccacttttgaaaactttatgcaagttattaaaccactccaagactcagtcttctcatctgtaaaatagtagtcacacaataaatagacattatcattcttgtttcctagtgctgatatttctactatgacttaagaaaaaagttaagagactctaatcattttcaactcacttataatatatatgcacaatagcccatcttgaaatgtatctgttttattgtatttactgcatagaagacatagttttccccccagttttattgagatataattgacatataacactgtggaagtttaaggtgtacaatgtgttgatttgatacatttatatactgaaaatgattatactgtaagtttgataactgcagtgagtccaaatccgtgcactctatgtactgctttgttttttgttttttaatttttacaatactgtgctggtttctgccgtacaacaatgtgaatcagccataactatatatatatatatcccctccctcctgagcacccctaccccatcccacgcaggtaggagcgccaaggtggactccctgtgctatacagcaacctctcatcaaccattcaccctacacatggtagtacatatatgttgatgctacttaaaaagtgccctttccagagaaaatgcatttgctaaccaaataatagtcaaattcctctgtgcaaatctactgggggaaaatctggaccttcaaaataaataaatacaggatgacaattttatatatacattcattgctttaaaaggagctaccttgaaatcctttaaaatgagagtttctcagaacaaagcttttgtccaaatttaggtatacctgcacaaaatccagagtaagagagaaagcaaacaatgtttctaaagaatatatgtaaccagttttgtgttagttccaggcaatgctttgctgaagtgtgatgtctgcggtagaccaatttaaggtgttagatgtctggactataaagtgattacgatgtgggaagtcagggaggaggcacttgttctgaaaacacgttgtggagaaggctaatgattatagttcacaagaaagcaggctgcccactggagcaatgagtcaaacagctaaaatacacaatccactgttgacactaggaaatggctaatttcctgaaactgcgttaatgacttttcaaatcctggcattcaatcatctgcacacacaagaagtgactcaaagactcctgcaagtccactttattttgaaatgtgaacaagaatttcaaaattacttaataaattctactactgccaaaaaatgtaaaagcgtatagtattctaagaatattggtagaaggaaaaataaagcactgtgatatttactttcataattacagtgtcattggaaggactgatgctaaagctgaatctccattactttggccacctgatgtgaagagatgactcattggaaaagaccccgatgctgggaaagattgaaggcagaaggagaacggggcggcagaggatgagatggttagatagtatcaccggctaaatggacatgaatctgagcaaactccaggagacggtgaaggaccagaggagcctggcatgctgcagtccatggggtcacaaagagtcagacacaactgaacaacaatgacaacaattcatagcatttactccggattttgttttttccttcattgatatccacatttctttgaaggtggaaatcattgctgctgactctcaaggtcctagagatagcagaggtccaatgtcaagagcccaaatttggcccatggacacgttctgctgatttggcaggggactagtttcttgcgt

SEQ ID NO: 48475 - DNA, 1342 bp, Bovine  19866880968517
  misc_feature (1)..(1): n is a, c, g, or t
natttactgtttttgaattctgatgtatttcacaatctgtgtgatgcctttgcacaagaagaagatagtgaagatatcagtaaaaacagtgctgctcatttctctgccatataacctataaagatatgggggtaaagctttcacttatttaaaaaaaaaaaaagaatcagagaggaacatcccggctggtggtgaagaatagagaacagctggcaaacttatcaaatagaacagtgtttattgtttgagctggtaaaaaaactcagtgttcatgtgtatatgtgcacagatgtatgtatgtgcacatgcatacacatgcacacatgtgagttggcctgaaaatgaacagactaagacagcctgtctctccccatgaggactgctcacaaaacccctcaggcatctctgaccttatttgctgatctgctagattgctgctctccacagtttaggagggatggaggttttggaatgaatccagggagcaactaaatgatttctttgaggaaaggtgagaaggttaagtatttcgttaaaaaagagagagaactaggggtgacccagtagtgatcccaaagggcacaggaagactgtcctttggaaatgtggtgggctgttctgtcttcatggaggctgaactcaacagttggctacaattagaaaggaatgatactttatagcaagactttccaaagagtgttgatatcattgaaatggctttccaagaaaggctgtagaattttctctccggagatcacttttgacaggctatttataaatggattgtttattcatgctttaaagttttaggaagcacttaccaaacatttgatacgtacctttccctgcagtagatactgtggaataggaatgaaaagatgaatgagacacagcccctgtacctaaaggattttctgatatagttacagagacatagatgtatacaattaatatggtgaaatggagcaaggaattagggtgtctgcagaatgcccatgtgtgctgagtatatgagataccgtgggtgtcacagcacatacagtttgtgtggcagagtgctccaggttactctcactggggttactcccagttttttcctcctctggggttcaaaggaaaatctgatcagagtggcttgttgacttctccttaagactgcccttattattgacttctccttaaaactgcagagtcttacaagacctggatcctaccagcttccagcctcatcctaggccagatcttagttctggaaacagatcttgaacataccactctcccacctgccacaggccctatgcacatgtgaacttctctgtgtgggggctctcccctctgccta

SEQ ID NO: 48476 - DNA, 806 bp, Bovine  19866880976403
  misc_feature (1)..(1): n is a, c, g, or t
nttgacagcaaataagctgtcattgggcaggaacagagtgatctgagtccgagtctatttaccaggcaaatagtaataccaggttgtaaacatatgtgcacaggtctgtctctgtgtcaggtactatagaatggctcactcctacatttattcccaatcatctcctcccctggcttctctatatagaggctgaaagcaaaatactcactttcccagactcacttgctgttaagggtagcctcttgacacagtactgaccagacatgtaggtgaaaatctctggggaacggtttcctaggaaagaaatgctaaaacttacttttgtcttgggttctaggtcccattttttaaatttagacaatgtacttttcacaacgcttgtctgaagttacttggaagaaaaaaaacttacatgatagctaaaggcaaatctctacattgtcacccaacatatctgtctgttcatgggctaatctgttgaccaccaggaatgatatcctgacaagctagcactgactccccttttaggtatgtgacagaagtcaccagatgaggacaaggccatcaccttttagaactgcaaactatacagctatgcagttgatgcactgcagctagaggacttaggttctagaactgactaccattagcgtatgctatagcagtgtcaaaaagcaggtggtgaaagaaccgtctcttcaacaaatggtgttgggacaactggatgcccatatgcaaaagaaagaagttggagtcctacctcacactatgcacaaaaattaaatcaaaatgggatcaatgaccta

SEQ ID NO: 48477 - DNA, 1106 bp, Bovine  19866880995596
  misc_feature (1)..(1): n is a, c, g, or t
ncccatgcagtcttggctccttaaacaagcagtctgtcgatgagttgtggtggaacaaggacagcagcaagttcctcatttagaaagtttcttacctgttatcctcattctactaagcagggaaatacacagaaggcactcatacactttttgcccccagtcactcacacggaaacgttgtggttttcttagtggccgtatttgaaagctccttccttatgtgagatagtctaggcttaatgctgtagttcctttcaggcagcggatgtttctgatggaaaaacaagttttcactgtgtccttttcatggtagtgcgtgctaagtcactcagtcgtgttcaactctctgcaacccggaactgtagtccaccaggctcctctgtccatgggattttccaagcaagaatactggagtgcgttgccatttcctcctctagggagtcttcccaacctagggatcgaaccctcatctcctgcattggcaggcagattctttaccactgaaccacctgggaaagcccttttacggtacagcatatgataatctttgccaatgaatttttttttccctcaaacagatgggtcagagagtttctgaatgaagaaaacaaaggtctcgatgttctggtagaatatctatcatttgcgcagtatgcagtaacgtaagtaaaacctggcttgtttccttttaaattttatgtggtcacagaagatgcagctcagtggtaaaattagataccacactgaggggaaaaacccagaagcagatgtggtaaggcttaagaaggtttgtttctgttcaagtaactaaaagcaaatcacataattgttggtagaaatgcttttatggcaaaaataaaacgggagtaagatcacccttagaggagtccttatttcaaaagaagtgctttctttgatgctcaggtttcatatgttcatatggcagaatactctagcaattattggaagaggtattatgatatattattgagtgaataaagcaaggtacagaagagtgactccttttttattaaaaaaaaacttgtatgtgtatatttatatgtgctagtgaatacagagaaaattaatgcagaaatagatactaa

SEQ ID NO: 48478 - DNA, 1387 bp, Bovine  19866881024765
  misc_feature (1)..(1): n is a, c, g, or t
ntagtctccaggctcctgtgtccaagggaacttcttgggcaagaatactggagtgggatgctgtgccctcctctaggggatcttccccgacccagggatggaacccattctctctttatatcccctacactggcaggcaggttctttaccactagctcctgggaagccctcattgaagttagtattcatgtattcaaaatgagaccaattcgaatggtgatgattttctagccatgctcggctatgtgagtgcagttgccccacaggcaaagagaactatacctggactggggttttgctcagcaagtattgtaagagttgaaatatactcaaaggaatgataataatgatcgctcatggaagtcacctataccaggtacagagggaagacatgagggatgtggggacagtaaaaaggtgtcagtggactgtagatcccagtggttatgaggactgctggagtcagagtgtgcaagggacaacacgagtcctgcaggcataagtgccgtggaaaatcagaaaagctacaattcatatgggccagaatagttgaggggaggcttctctgaaggatagggtttagtctaagaataaaggacatagaagagctcaagttgattagacaaaggatagaagatggaatatttcaaattaggggcatatctaagcaagggcatgaaacctgctctaaagatataagatttaggaaataggaaggaaaccagttttactaggatataaagtttggggtgcaaagttgatagggcatgaatttttatagtaagtactgcaagataagattcaggtacagaaatacaaggactatttccatcttctgaatattccaaacaaatttttattcctttgtttgcagttagtatgaataaggtttctgcaatttaaatggataatattgcccctgtttgaaaaccttgtcacactttatcagtaacttttcccctatttttaacaccttttattggctccatatggtgaatttatgtgtttgccttacagtgatcttagtgcagatagagttgactgaagcagagattcaatacacattcaaaacttctagaaacttaaccaaaaatatccaactaaatagatttacatgatgacctagagcaaggtggctggtgactgccactgccagttaaaaacaaccaaacacaaatgattaatataattaaaaccaactctccatgaaggaaagttacatggctcaaaatagcctggagttaaaactcccctttccgggtcctccccaccattctatgcaaaacaaagaactctcttacccaaagaaacaaatggacattaagggtggattacgtccagctcccagccagtccagcctctgggccgatctccagaattccttgcc

SEQ ID NO: 48479 - DNA, 1087 bp, Bovine  19866881027004
  misc_feature (1)..(1): n is a, c, g, or t
nctgtgatctgttatctaaagtgtgagcttctgtaatttttttcttttgcctctgtagcatgaatgtcaacatcatcattcaaaaaacaagaagcattctaagaaatctaaaaaacatcacaggaagcgctcccgctctcgatcagtaagaaagtttatttaaaatggtaccataagtatattgaagtatttgttagcatcattatgaataaaattgtttatgttgtgtaggggtcagattcagatgatgatgacagccattcaaagaaaaaaagacagcgatcagagtctcgttctgcttcagaacattcttctagtgctgaatctggtaaacataattttaacttgattaaagtcgttggcatttggatgtcctcaaattctgacacttttcttttcatgctgcttagagagaagttacaagaaatcaaaaaaacataagaagaaaagcaagaagagaagacataaatcagtaagcaaactcttgatttttatactgcacctaagcttttgcccttagctttctcagtggcagtagacatttctgcttggtcctatgcagagtttaggtgagcacctaaactcaagagtttcagagttgtggttcaccttaatcttgcaataaaatcctttggtgaacttgaaacaaataataataaacagcgttaggattcccactctggttttttatattaatcttagagaaagagccaagtgtgtgtgtgtatgtgtgtgtcacagctgtcttagagaaagagccaagtgtgtgtgtgtgtgtgtgtatgtgtctcatagctatcttagagaaagagccaagtgtatgtgtgtgtgtgtcgcatagctatcttagagaaacagccaagtgtgtgtgtgtgtgtctcagctatcttagagaaagagccaagtgtgtgtgtgtgtgtgttgtgtgtgtgtgtcatagctatcttagagaaagagccaagtgtgtgtgtgtgtgtctcatagctatcttagagaaagagccaagtgtgtgtgtgtgtctcatagctatcttagagaaagagccaagtgtgtgtgtgtgtactcatagctatcttagagaaagagc

SEQ ID NO: 48480 - DNA, 1273 bp, Bovine  19866881037961
  misc_feature (1)..(1): n is a, c, g, or t
ngtgcaaagtaaatgaggcccaagtatctctgaattatttacacagagactctaagtgcctcaagggttctttgcaccagggcaatctagtttgcctcactgccttttttgctacttcagaaaacattgtattaaaatttgaagcttaaagcagtataaccttgttttagtacagtcccggccaggagttacattcaacagtgacagtttaatggaaaaacaaacaaacaaacaaaaaaacctacatcccaacagctaaaacttactacaataaaaacagactttattttccaaacttttccattggaaaaaaatctttctgtttctgacatatgagggaaaaaagggacaagtaggttgttgttgctaataaatgtagactgtatttcagaattttgcacataagccaaattgtccagattctttacattgctatattgaaagctaggcaccattcaaagtaatgtgaaatctttcaggccattggtattggataatatgatgactttttttttttttaatggaaatttattgcctcagaattctggaggctagaaatttaagatcaaggtatcaacaagattgcttccttttgaggaatttgagaaagactgtcttccatgcgtctctgctagtttcttggggtttttctggcaatctccagcattcctctctttagaagcatctctccagtctctgcatccatcttcacacaggttctcctctgtgtgtgcctgtctccaaatttccagtttttataaagacaccagtcgtattgaagtaacactcaccctaatgacctcattttaacttgatgatctctataaagaccctatctcaaaaatgaggttacattctgaggtaccagggggttatgacttcaacataggaatctggagggggatgcaattcaacccattacaggaaggaaatccgagaacatgttgtgagtcagaagttgaactaaacagcttctactaggtcctgctgactctttaaattaatacttctaatacaaatcatgcattaaacatcagtgattttgtgggaaataagaattttataagaattttatgctattatgtggagccctagaaaatagttaacatgatagacttgagctcatgatcccacacaccctgtcagtctattcggttaaaaaggagatcttttggtgattgacataaatttgtgtttattctgaataagcaaaacaaatcctgagattctggcacatacccttttcaatgaggatattttagagtgacatcaa

SEQ ID NO: 48481 - DNA, 861 bp, Bovine  19866881042110
  misc_feature (1)..(1): n is a, c, g, or t
ncaacttcagttataacaaggaaaacgaatcatcatatataagtaagatcaatttgagttaaagctttgaataaaagagaaaagaaaataagtgatcaagaggggcatggcaaacattttacctggaaactgattacataagagtggatttttatatctcctgaactatgtgttcagaggaaacgagagaacacaagcttccatttcttcagatgtgaccacagacacagttgaccacagaaacaactccttcatggagaaaacaggtatattattaacacaaacacaaacgcgctctgtggctcaactaggtaaaaagacgttaaattataaaaatgttaaagcaaacacttctggcctagagcaactttatagaacagtcgttaagatgattatcttccttccataatttcttccttacagctgtcactggtttcaacttgactgtggcaaacagaacaatctattttgcccttttgagcatatgcccatcacccttcggactcaggctcacttcctttctgtttaattctcctcaattagtagtgccatctattcagcaccacaggctgaacactggaagcctattcagagagcccttatttccaccctaaaaaagatgtcagcctgggcagagacctctgatgagggggggttaagatacacatgttgggcagcaggcatctcaaaaggagatgagaattctgcctgcttttcatcaaacctcttcttttttaattaagttaattaacccagaaattctcatcagtttatatcatctcaggcagcctgcccaagccctgggtacctggactaacctgtctcccgatgctttcatcagttaggagaaagtgtctctgt

SEQ ID NO: 48482 - DNA, 1275 bp, Bovine  19866881048123
  misc_feature (1)..(1): n is a, c, g, or t
nacagggaatatcctattaactgcttcgtagggcagtgatagtctccaacctatggattcaggcccagacatgagatttgctatgaacaatgacctgtgagcagaaatgtgtgtcacttctggagagaagctttaagagtcagtaaattgcttcactgggatctctgttcactctatcacggggccagcaatgttccagataagacctgttccatccacccaggtctcagagtgcagatggcaggagaggagctacagcaaacctgcggtaagcaggaagcacaagtgagaaacgaatttgtgtggtcataagccactgagacttttgggtgtgcttgttaccgtggaaaacctagcctatcctcaccactaaacctgccattaccaagtcagtcggtatctggagaagacttgctcttcgtgatcacaagctccagttttggaatcgtttcaggcagatacatgctaaaatacgtctttgacaaaaatcaggcatttactcagatgcttttcctttaagctgtcactaaaaataggttgacttgctaacctgggaatcctccaacagttgctctcgctctcactgattactacagtattagtcagaaaagtcaaaaatacacagtgcatctgttatgagcaacaaagtgaaacattagctattcatagcaaaatgagcactttaaggaggcttgagactctcattcagagatacagaaaaaaaaaacatgtaggaatgctagtagtacaacaacattaaaattattaatggcaagataagttaaaagaaaaaaatgttccgtttagaaaatgctctgcataaactttatattccataactacaggaggaatgaaacttgctttttctactctggagaggcttctaagagcctattttgaattcaggttgctgtggaaaccattagaattctggaagggattccatcctaactgctgcataacatggaatagccctatctcactggctcaacttaaaacaaagccatgactctggtttgaaacactgatgagtctctgaatttgaggcttaaatatctataaaacaattaaggctgtgacagtgatactccttcaaacttacatattttgctttcaaagaggtaaagcaactgtcaacatgaccatgacttatagttgaaccatctgaagccaagtcatgatgtggtaccaagtcattcatggaaccagaggacatgcctgtgtatgtgcgcttaagtatgagggtgtttggggaggatatttttatttgtataa

SEQ ID NO: 48483 - DNA, 742 bp, Bovine  19866881083803
  misc_feature (1)..(1): n is a, c, g, or t
nactctatttaatcttaacaaaagcagaaattaaaatcatggcatattcatgaagggcctcattccaaaaatgcttggttcagtgggaattcagatttgggggtattctttgcattccagtcatctagaagaactagtgatggaaaagggcactaaaagcaccgagttccctctgcaagttcccaagaattagccatcttccatttttcaaatcttttccacaacagaatttctgcttttgatacgtcactttaggtccctgaaacacagaaaagttaaatatagtaaatctagaggcttggccactttgccatcttcacaggttatttccaaatcactgttgatcttacccacttccaccagagtgcacagactggctctgtccctcactgaactttcaaaaatgatggtgcaccgtttggtgccctgaactctattatacacttcccataagatcctctttctctttaggttcaaactgtcctgcaaaaaaacaggattcattcccccccccccaaaaaatatcatgatctcctctacaagaacaacatgatgttcatcactacaggaggacaggtcattcacctctgctctcaacgagttcccagcacaagttgtgtgtgggctgcctctatcagcatcacccacagggtctgttaaaagccaaactcctgggctgcatcccaggccattcaatcagtctatctgagggtgagtcccaggacactgcctttctaacaag

SEQ ID NO: 48484 - DNA, 1194 bp, Bovine  19866881096696
  misc_feature (1)..(1): n is a, c, g, or t
naggaaagatattggctaacatcaaaagattggcagatgaacataatttctatgttgtaagttaaaacaaaatatatgcatcattttttgatgattttccacttaatcaactctctttgattagttgatgtacaaccagtcccaattcaactgtagttgaaaagctgtcattcacttagatcaacagcaaggcaaattagagtccctagatcagcaagtgactggcatataataaaaaaacatcagctagtattatcactatccgcgtttggtggcaaccaggactagtaactgctgggacttaactttgacaagtaagtgtcaagtgacaatcattagcaaattgattcaaaccagatgcagatctcagattcttgccaaaatataatgatgctaattagatccttgacttttccttcatccaatatttaagtctaggaaagcttttattgagcagaggaggtttttttttttttttaagagatctgataaaatctaatgtggatgggtttacatcagatcctggtagagctatagggagggaaaaaaaccttctgaaataagtgacttcagtcagaagcttcagcccaggcatgtttttggaagaaagctgttagaaggacaatgtgtctcatcactgcttctccctaaagtccatttttaattattgatgtcactctttccttccctctctgcccaaacaaatataacatttaaacattaaagaggctacagagtcaatgactgaatggaataaagaatgaatggtttaaagaagcagatctctaaacccggttaccacctaagctctgacttactccatcactttcctcataggcaggatttgggggactttgtcatggcagaacactattcaccccattcaagccagctccaaggaccacagcagagaagagaagcaaaaggaagtgtatacattggtgggtgtgtcctgggtccttacctcacttatttcatcttacccaacagttctctgtacattttttatagtgttagaactgtagtttgtgctcaaatagatgaaaaaattatccatatgtttccctgggacacataagggggtagtcaagcctttgtacatgtggctggtattgaggaaaatggtaagaacttggtatatacctgatattgatgaacactgagagattacttttgaaggcagaaaactaccta

SEQ ID NO: 48485 - DNA, 1117 bp, Bovine  19866881174391
  misc_feature (1)..(1): n is a, c, g, or t
ncattcccatgtttccaaggagaagcaacacttgaaacagtaaaagaagtcctcagatattccaagcatactactcacacctgcatccccaccttgatgcattttattgtttttcctccatttcatcaatcatctccatttgtcctgttggttgcttttttgatctatatgctcctcgaccagtgactttcccttgcctggcagtttgatgtatgatgttgagctggtaatcctatatggattagagccacttgttttcagattttgagatctcaaataaggaaacatcttaggaagagaaagtgctcatcattttcaggaaagcaaaatgagaagaattggaatagcactaacgtgaccttgccaggaagctggcatgtactcccagaacatcaacgcacgtgaacgtatttctataatcgagttgtagcctttcctctcatccataacctcgaaggccatttggtatgctctattttctgtactttatcagtaatgaaaagcttaaaagtagagaaaagctacagcagtccttatcacatacaccaaatgaccagtgatttaagcccttgaatgtacaatgtaactttcctctaagtggctcaaaggactttcattaacattgagtcagattttcactgtgctttagctatttcctagaagaaagtaaatggcaccccactccagtattcttgcctggaaaatcccatggacagaggagcctggaaggctgcagtccatggggttgctaagagtcggacacgaccgagcgacttccctttcacttttcgctttcatgcattggagaaggaaatggcaacccacccagtgttcttgcctggagaatcccagggacgggggagcctggtgggctgccatctatggggtcgcacagagtcggacacgactgaagcaacttagcagcagcagcagcagaagaagaaagtaaaacatcttgggaagttacatcaactatttcaggaaccccttcaagatcatttgggtagcagttagtaagttagtgttccggtgggttaatttgatttcaggaggtaacttaagctgtgggaaactatgactcactggtctgttttgtccccaccacagtaaaacttaa

SEQ ID NO: 48486 - DNA, 625 bp, Bovine  19866881301092
  misc_feature (1)..(1): n is a, c, g, or t
ntgactatttacctaagatctggcagagaaaggtaagaatgctgcctcctgcgtctttaacaaggctctactgtgctcagtgtagccaaggtcacctgagcaaatccactgggctcctctccatggtgaaggagagttcacaattgaaatcagtttgtgtaaagctggccaaggcggtgtgattttaagaggcaactctgagaattacccaaacacctgaatggagtcataaaggaaggcagtgattccccaggcaagcattaaggttttatttacgcaactaagttttcctccatcagtctactaagaatggtccaaaagcagtaaactgaaaataggatacaaataaaactttttcgacaggatgttaatttcctagaagatgtatcaattatcaggttgatctgaacaacagagatgacatacctgaacaatcctacatgtaacaaaagcatctaacctgaattgcttagtttagataacacagtatgcaggtaggctgttctacaaattagggtcacctggagaagtttcattaaaaagtatggatgcctaggctctgccctaacaattaaagcagaatctctggggaaggtgagattttttttaaagctccccacttgga

SEQ ID NO: 48487 - DNA, 772 bp, Bovine  19866881306845
  misc_feature (1)..(1): n is a, c, g, or t
nctgataataaagctctgaaagttaaaaatgtcttcctctccctttgtacttaccacaggctacacaatgtcctgagaggattcattatgagaaaaatgtcaatcacagctttaagaccttgctttggaaggaactaataagaaagcagattgaaaggtgaaacttcatctgtgttttcaaataagtggtcttaatttttcttcttatagaaaaagtttaaatgtttaaatcagtttattataaatatatctaaaccattaatttttgcagctttcaggtaaggtccagcacttcatttacacaaagtctatgagaagaggtcagtagagatcatctaatcttaagtcgtgacatcatccattcaagtccttggcataatctataaagaaaataaaatatcttgatcaaattctcaactaaaaagctatgaagagcaaattaaaagaagatacaattttttatctaaacaacaaagattagaaaaatcagtaatattcaatggtgggtgctatacttccatacagtacaactgcacatttttggttctgttatatctctagtgcatagagtactgcctgatacataagagaagctcaataagtacatagtgaatgctcatagaaagtcatttagtaagaagtatcaaaaatgcttaaaataccaacactctaccctttttttctacttttagaaatatatcctaaaaaagataaagacatgggtttatgtattattactggtcataaaagcatttttaataggaaatagtaa

SEQ ID NO: 48488 - DNA, 3282 bp, Bovine  19866881315059
  misc_feature (1)..(1): n is a, c, g, or t
ntttctaaaggtgctacatttacagacattcatccggtggaacagacagagtgtgctcaagttcactgtgctaactcaaatccggggtagtaattggaaccaggagagcttgaaggtaaaatactgggctggaacacaatagaaaatcatacagagctttgtaaaaacacattggtgcttatttcaatgtgccatactgggagaggaattatttactatcatgagttacaaataatgaggtgaaacaaaatgggaaaatgtagggaggctatctgacttcttagcggtgagacttatttaatagtgaggtatgttctgctaagaaaaaaaatccatatcaaatgaagcactgaaaaccagcctggacactgcactagaaaatgaagggttaaatccttcccaaaggggaaatacatggactaatcctcagtgttccatctcatttcagcattttaggacacagtgttcctaaagaaattgtttcttcccattcatatgtccccacagaaagctacttaatccaaaatcctcagaaattagttataaattgctatgggacataatgaaagtgaaggagagagaaaacatctaagtaatttaggctcaataggcagtccataatgaaattaaaagacacttactcctgggaaggaaagttatgaccaacctattagcatattcaaaagcagagacattattttgccaacaaaggtccatctagtcaaggctatggtttttcctgtggtcatgtatggatgtgagagttggactgtgaagaaagctgagcaccgaagaattgatgcttttgaactgtggtgttggagaagactcttgagagtcccttggactgcaaggagatccaaccagtccctcctaaaggagatcagtcctttaggatgacctgatgctaaagctgaaactccaatactttggccacctgatgcgaagagctgactcattggaaaagattctgatgctgggagggatttggggcaggaggagaaggggacgacaggggatgagatggctggatggcatcaccgacttgatggacatgagtttgagtgaacttctggagttggttacagacagggaggcctggcgtgctgcgattcatggggtcgcaaagagtcagacatgactgagctactgaactgaatgagtcactgggctttgccactgttagattccacttcattgtctgtataattcctttcagccttgtctcagtccctaggctaattcaaacattttgccctctcactcctttccctgcccccaatccaatggaacttaatattaagtccattattaggctagggctctagggacttggtgactactgctgcatcctggtggctcagatggtaaagcatctgcctgcaatgtgggagacctccgttcaatccctgggttgggaagatcctctggagaaggaactggcaacccactccaataatcttgcctggagaatcccatggatagaggagcctggcgggctagagtccatggggtcacaaggagtcagatgtgactgagcaactaacacacacacactcgagactcggggactactgctgtacccaggggtttgttgcccagattcttggagtctggctcacagttccttattgcaataagtaagactaccacaatcatgtgtgccttacacccaagtgccaagaaatgacagctacttttgctggcacttcctgctgtcatcacccttagctccaggccttgaacttatgggttatggtgctaaactcttcccctagtgtctcgcagggccctttttaaagatagtttagttgttgtttaacaacaactgtgttacttttaaacaaatctggcttctcctaatttcttttttttttaatgtttatttatttggctcattaggtcttaactgcagcacacaagatcttcattgtggtgcgggctcaatagctgcacacacaggcttagttgcccctcgacatgtgggatcttagttccccaaccagggatgggtcccgtgtcctctgtttctttttaagagcaccactgtactaaaagagtgagggccttttagggtggctcagaggttaaagtgtatccctgcaatgcgggagacctgggttcgatccctgggttgggaagatcccctggagaaggaaatggcaacccactccagtattcttgcctggagaatcccatggatggaggagcctggtgggctacagtccacagggtcgcaaagagtcggacatgactgagcgacttcactttcacgttcataaacatctaggtccaactctttaaagtagtctccgtgttaaagtagtctctgtggtccttggttttagatatattttgcccaagtcttttccagatttaccctgttctgctttactgggcttccctggtggctcagtggtaaaggatctgcctgccaatgcaggagatgcgagtttgatccctgggtcagaaagatctcctgaagaaggaaatggcaagccagtctatggccttaccaccctgaatctgttggatctcatctgatctcggaagctaagcagggccagacctggatgggaaacaggcaacccaccccagtattcttgcctgggaaatcacacggacagagaagcctagtgggctacagtccatggggttgtaagagtcagacatgacttaacaactaaacaacaactgctttgcttttaaacaaatatggcttctcttaatttcttttttttttttttttaatgtttatttatttggctcgttaggtcttagtagcagcacacaagatcttcattgtggtacaggttcaatagctgcacacacaggcttagttgcccctcgacatgtgggatcttagttccccaaccagggatggatcctgtgtcccctgcattggagggcccaccggtgaagttctttctaatttcattttatgtctctaagctcaattggccactgaagaaatagtgattttaccatgttcttaaggtcccatcaagacctcaggtacactttacccaggatcttttacaccatcagaccctaccctgtctccagtgtcttacaagactctgttctgttctaactcttaatcattttttctctgattctcctcttaatttgttatctctttctcactggtaggcctagatcctacctgtctttcactggtgcccaatctctcctggctgtgtggagtatgactgccaaaatagaatacgtaagtgcagaaatttccaaataagagtatgagatataagtatgagatacaca

SEQ ID NO: 48489 - DNA, 1339 bp, Bovine  19866881332022
  misc_feature (1)..(1): n is a, c, g, or t
ncccaccaaatggaagttgttaacttaatgaagcctccttcattgcagacagaaggtcacagaagaacctcaaaaaccacagaagctcatccaaagaccacctgatgccagatgacctctggattgaaggaatgcaggccccgcatgcaccctgatcctcatcagcaaccctgcctacaaactctaaatataagactcctcacagcacattgtagggatgcacaattgtgggcttgcacaattttgagggcattaacctgcagtggccccctttacttggtaaagcaatgttctttcctaaatcgcccaaaattccgcatctgagattcattttggtactggtgcacagaggcaggttttcagtaatattgtcacttcatgtgtgtgcgtactaagtcacttcagttgtgtctgactattgtgaccctatggactcctcagaccgtgggattctccaggcaaaaatgctggagtgggttaccatgccttcctccaggggatcttcccaacccagggattgaacctgtgtctcttcttaaatctcctgcattggcaagtggattcttaccactagcaccacatattcactatagtctaattaaatacactgagtagtaatgcagaatgaagtggtttctggtttcagagtgtgtttaactcctttcaacagtaggtagagatacactttgttgcttcatgaggctgggggactcacctagacagagtttgctgttgttttttcctgagtcattttccctctgtaccatttgtccaagaagcttgaaaggatgatgagttataacaaaaagggtcatgagggaaggaccgtttcctagatattgaaaaagtgtggcttgtcttggggttaagcccttcccaggaagtggaatgggctctttgttgccttgtaggtaaacacaccacatagatgccttccaaagtctgggttaaatactgaagcccaagcagttatctataaagtctgtgctattggcaagctccccctaaagttgtagttgaacagaccacactgcagttgaaaatgatgcttttatgttatccctattggatgagtttctacacagatgcttttcttaatgacaggcaccagaccggggccttgttttgtagtgggcctttgataaatgtttgttaaattttaatattttggcagtttgttgattgctgatgtgtgatttgttgttgttcagttgctaagaggtgtctgactgttttgcaaccctatggactgtagcccgccaggctcctctgtccatgggatttcccaggcaattatactgggtgtgaacagtttaagcctaattcgttgtaactaaga

SEQ ID NO: 48490 - DNA, 1545 bp, Bovine  19866881351598
  misc_feature (1)..(1): n is a, c, g, or t
ncagagctctcagtagctagtttttatattctgttatttggttggagtttcagtctattaggagtttattcctcagtgctgggagagaaacttttcccacgtcttaagttaccaaatcatgttttaggaagaaatgttagccaaagcgactcaaaatttagtgatggctgacatagtaaaatatgccctggcaccccactacaaatttattgatgagggttaatagggcttttgccctccattgtagcaatgccacagctggccaacccacccactgtctttttagggttgttcctaaaggcaaggacaactgtgaataaactggggctggttttgtcctaagcctttcagatgtccttcacaacacagtttattgtaaatcactgactttcagtatggagaactaatttcttagagacagcccagaaactctggctttttcatggtcatcatggtcactggcggatttataatgtttcagcaacaatctcccagagcagacatcactttattagcgctttctaggtggcagagttcatttacctcagagacccttcaaaagcactcatcgctgtatttttgttttgaaggatggaagggtgaattgcctgaaggctgtacaaatcactgtggttaatgtgtggtaggctgacccaggcccctaggaggacaaatcgcatgttcgaaagcatctaatgatacactgtatataggatgttggacatatatttaaatataaaacttgtcaaaaatattatttttttcattcttctcatgtttacaaatgaaatcatctcagtgaaatttggcaagtctgaaaatgttccaagatccttaaactggcctatacatcttgtaatgacagctatgggaagagagaatgctcatgactgtaagaaaaagttgtgtcctttagatctcaaatgttgttttcttttcaacaggtagcttcatgtcatgtttaaatattttaaaggagtgtttctcaaaatgtggcccaataacctcttgcattaaaatctcctatggtgttgctaaaaatgagaattcctaaccttactttagctctagagaatgaaaatcatgagtaaggggggcaggagagatgggcccttcaatttgcatatttgtcaagcttcccagatgaatctcatgcatctgaaagagaagagaacaactacattagattcttagaaggatattcttcagcataaccatgccagtaaaatgacgtaacacattctgagaattttttctttttatctggtacattcactgtgtgtctcctaactacaggaagccatgctaggtgctggtgggatgagaagatggataaagcatagttcctttcctgctaagggaagagcagagagcccagaatagcttgattggggaaaaaagtgctgaatgttctaactgaaatgtgatttgtaatgaatatgtctcatcttaatgaatttttcaagttgtctggattatatataaaatagaaatcaaattaatgagggactacactatagatccatcctcagagactgctataaa

SEQ ID NO: 48491 - DNA, 784 bp, Bovine  19866881416685
  misc_feature (1)..(1): n is a, c, g, or t
nggacaatatgcctttgttaaatgcttgcatttcttacagtggcctgattctaaaggatcctgagagacgtgtgaaggtatagctgcggcagtcttctttcagcacagaaattctcaaataggcatttgctaacaataacctgatgtaataatctataggttccctccgtaagcgtgctgtgactaatgactaattacccagatcctttgaaatgaatttgtaaacatagccagtgttttatttttggaaactctcagttgtgggctaaaggaagctttattctgaaagtattagattctctcatgctattattttagagacaaagaatccttctggatgagcaagtagcacttagaaagtagatttccatttagtacctccacagaaatgaaccaagccagaccacgagggaaagaaagactcctgcagctgccttcctaggaagtccattttgactgccccaaagaacagtgaattgttaacttcaaaatgattattgttatgtgaatttttccagaattaaaaaattgggaaaaaaatgtaagactagcacctcccatcaagaagtttatggttatgatctgatcaagataacaagcctacttgtactcatccaacaaatatttccttaacctgtgtttctttccgaacagaaatgtaacaccaagcaatgtatataaacaatgcaaagcaccctaaggttagagactaaatgacagcaaaactgaaatgtttggaattaacggagaggaggggagtgcggtttcttcaccagaaagagca

SEQ ID NO: 48492 - DNA, 755 bp, Bovine  19866881424093
  misc_feature (1)..(1): n is a, c, g, or t
ntatctttgttgtgaagcacttagcagcagcagcagcagcagggtgttgagctgtatttctcaggattcttcagaagaaaaatcctagagctctcaggcctccaagatttcctgagtgagtcctgcaaaccaggagattcattctttgaagtcgggctgaggtccaaggagctagacaggcagtaccattgaccagaaataccagctaaatttactacatcacttactgctcatactgtgtggccatctgttgaaagcaaataatcattagaagatgatcaagaggaagaaaaatagtattttccatcttagggtgttccttctggctgaaagtgttgttgattttttaccttcacacttggaattaaagggtgcatgtgtgtgagagtgtgtgtacacaggcacatatatacatacattcatacagatacatatatacacatacttggtttttacatacttgtggggaaaacatatataatttacttgtttcttttgtaaaataaatacatagaaacatcttcattcttcaaatagtcaactgttaaactgagaggtcttcttgtccagggttcacagagatttgattcaatcatatttatttaataaaaaataaaattacatggaaaaaatcaaaataaattactgatgtaaaataactatcaaaaataaaaaccttgctcctttctttgaaccatgggagaatgtctgctaagatcagctcaaacacctctttttaaacaattaaagagaaa

SEQ ID NO: 48493 - DNA, 1118 bp, Bovine  19866881553527
  misc_feature (1)..(1): n is a, c, g, or t
nacataataaaatagttaaggcaggaagaggattgaaactggcaaggggcccataagaacttaaaaatatattttaatgttttgtttcattaagaatacaaccacaatgttctttataaatatttgaagaggaaaaaaataaaaagactcatttgattcaaacatccattaacatttataaactctcttaaaataatcagtgagacaatgatgactcattttttttttttaatgtgaaagcctgtagcaagtatggattaagttttccttggagaaatcggatctacttggtagaacacttttgtactaatcttttttgttcactagatttttctattaatatagtctgaaaagaagagttgtgctttcacagcatgcttgttgtcaaagagagctgctattttgtcaaattgcagcttcttttgtgctggggaaacagtcttaccttcctcaccccacttttggaaacctctcatgaaaattactggatcttttatagatagaccatgggtctctaacaaaattttactggcagatactgtttgaaacttgtgcagactgggtcttcattttcagaagtcaacatgttaaaaccattctcagatacgcactgtggaatttgcccttaaatatccttaaacgtgctcttgttcacagatccccatgacaccttcaggaactttgtgcaaaatgattcagaatctaccccccagatttgctctgtcagagcaaattagtgactctgcactaatggcccttttgtccttctgattcaggaactcacagtgacaagcgatgatgatggtactgaccaatgaaacgtaatcattagtcaagtgcaggtgggagacagttcttgctttggatacaagtgagtggtttaactcttgtactgcacacatattactctcagagtatgacaactgagttttaaatgcacacaatggatttttctctcaagcactgtgccatagaagcaatggtgaatattatctagcgagaggctctcatctaaaagtcacttttaggagacaatttcctacctggaaaaccgtcttcagtagacagcctagttggctcgtttcaaattcctaactgaaaacctgctggccacaaat

SEQ ID NO: 48494 - DNA, 1176 bp, Bovine  19866881568250
  misc_feature (1)..(1): n is a, c, g, or t
natggcattggcacccttttgctggcagtctgttgatgaactttggcatgcagtagcatcacaatcaccaagactacttactacctgcagcaattaggatgaaataaagatggaagaagcagcattggattatgcgtaacacttgagtactatgtggctatggtaattaaaaggattgtggagtttgaagttctcttgagtctagccatttgctagagctttattaatagcttagagacctataggtgtaggagattccagtgatcagcgaccttgcctgttttcaagattgcactatgttaaaaataagagtattgtttgtagacctttaaacctcatagcattgagctgccagccaaacctctttcaagcaaatgctctacaggagccagtggatacatggccaaactgttcttgagatgcagttcctaagattcccagaaggtcctgggtgattcgtcaactcattgcccacagtggtggtcagctcagtcatgcagcctgtgttggctccccttctctcttttactcccctgtcctcactcatacaaagcatttgtctcaggctctgagaatcccaaggacagaggaaccttggaaggctacagtccatggggtcacgaaagaggtggacacgaccgaagcaacttcgcacacacacacacgcactgatgctggaggagagaaagcaacggaggagaatacatgagatggagctggagggtgggcaggaccttgcgtttctcttcactagacatttctttgtcaccagaaaaactccaatccactaagctgcctccttttttctcctgtattcctgtacacaatgtcttgaaaattagaattgcaatgagagccaatcagtgaaaatgaagaaatcctagttcatattttggctctttcattgacttgaagtattattttggacaaattacaaaagttctagtagaaaaggtatggaaacaataaatatcacatgaataaatgctctatgtaaaatacacggtattactatcatcatcacaagctatgaagcacaggaggtcaagtacacagtccatgtttcacagataaatgaagtaaaaactgaaagcatagtcaacagccaaaaaagacagttccaggaagcctcaccttcctcacagaaaaaatcacagaattagtgatagaatttgg

SEQ ID NO: 48495 - DNA, 1042 bp, Bovine  19866881605770
  misc_feature (1)..(1): n is a, c, g, or t
ntctatttgctctagtctgcacatctcccacataatcaactggaaatgactctgaagctcagagttgactatctggcaattttcagactcggaggtgaatggtcagctacttcctgaaacacagatgaattcgccactagtgctcaatggccgcccagtgtaaggtgtgatcctcgtcacctccgctttgtaggacaagtattatccagtgtctcgtaggaacctgattaagagctggttctttcagatatgactcagaaatggatgcttctttcccacaactgcaggttaaaaagtagtaagaaacgatatgggtgttttcctaagggcattttaagtaatatttctctttggtcttagaaatgtttgcaaatgaagtaaacatttctttaaaactcagctctacaaagagttccacttccctctcacaagcattctctgtatctttctgaaagtttctataatttttggagaccaaattactcttcgcacaaagcactcatttttgcttcactattcttcatttaaatactctggcgtttagtaaccgtattctgtcatcactcttaatgggggtgttttaagattctttttcaaaggctttgcttaatcacagccttaaccttctggtaaaattcagtcttttaacaaactggcctgtaggggacaagtttttaaataactctcaagttttccctcccccttcaaagttttcccaaactacttaaaagcctctcagccttggggggaaggatgataaattagatgatttttgttctgtctctgttgcttggtattaccctggtctaatccatttttgtctcaccaagaatttgcttcttgcaagcagacttcctcccatattctgcagcaggcagagtgcagattactggtgaagttgcccagaggcccaaaccaggcataggaagcccttcagtttccccgtgggggtttctcaggggtggctacacactcttttaactcttccctttccctttctgtagtgaaggccgtgtttgtgtccttgcttcaaaatctaatt

SEQ ID NO: 48496 - DNA, 1398 bp, Bovine  19866881613798
  misc_feature (1)..(1): n is a, c, g, or t
nacataaagttctctttaaattagatatactaactcaagaatctctgaaaactttcaaattctcccatattctaaaacaggggttggcaaatttcttctgaaaaggaccaggtaataaaatatttttgaatttgcaggcactcaaagcagccacagataatatgtaaagagataagtacagctatgctttaataaagctttatttatggacactgatagttgaatttcatataattttcacaagctataaaacactggtctttgacttttttctccaatcatttaaaactgcagaaaccattcttagctgcaggatacataaaaaaacagtagcaggccagttttgacccatgtgccatagtttgccaacacttcctccaaagtatgtgttttttagtgcttatttaacttttaggcgaaatattctctcaatgacagtgccagcaaaagtataataaaaacgacaatcttatatggaattactctaagagtctaatagtgggaaggaactgaaatttaagataataataacatttacagagaagagaatgagacatttatgtcattatgtaagtgtatataacataagataatctttacttaattaacataaattgcagactgtttgagcaaattactaattcagtgtaaatgagctggctgtataactggttacttgacattcagttattttgcacatgtttaattccattttatttttgttaagaattaaacacaaaatttaatgtttttaagcaaatctctagagaaaccattggcttcttaaaaattgtaataaaaaggtaaaataaccataagtgaaagacccctaaataaatgccagttattcaaattttaattacccaaaatggggacatgtcttctgaagtatatatttcattaaaatttatcttgtttacccaaattttcagtttgttgttgttattgttctgtcactcagtcatgttcgtctctttgcaacaccatggactgcagcatgccaggcttccctgcctttcaccatccccagagtttgctcaaactcatgtccattgaattggtgatgccatccaaccatcttgtcctctgttgtcccattctctacctgccttcagtctttctcagcatcagggtctttcccaatgagtcagctcttcgcatcaggtacccaacctattggagcttcagcttcagcatcagttctttcagtgaatattcaggactggtttcctttaagattgactactttgatctccttgctgtgcaagggactctcaatagtcttctccagcaccacagtttgaaggcatcaattcttcagtgctcaaccttttttattgtctagctctcacatccatacatgactactagaaaaacagtagctttgactgtacagac

SEQ ID NO: 48497 - DNA, 1187 bp, Bovine  19866881637974
  misc_feature (1)..(1): n is a, c, g, or t
nctacactatagtaattataggaacaaataggtgtacctgcagtttggtgtgattttcaacttagtaggaatttgggatttttttgttttgtttttgcagagtgttactatagtctgttgagggtagattcaggtcctgtgtggattccacattctccctgcttgtgttatttttatgtaggcattcaggttaagctaccaggggcagcttggaaagggcgctaccagaggacagtgtgaagagtgggtaaggaaacacggtctccgctgtgctgactgagagaaggggacagtggaagacgggccaaagggtacttgggctggggttctgctctcagcacagctggtcaagaacaccaggggcagaaacaacctgcatctctcagaagatttccaaatgttttccatgagagattttggggaaaacaaaattagataggccttataatcctatattttattttacttgaagtacttccttcttcccaaatatgaaaattacattaacagtgttggatagctggagtggttaaatcataatcagaatagtagagctatataaacttagaaatatggaaaagacatttttattttgtcacagtgattgatctccaaccgtaacccagacaatgcaaagtaaatatggttttctttttaaaattttgtttgcagcactggacaagacactatttccaatcctacttacatgaaccagaactctaaccttcaatcagctcctggtgcagctgcttacacacagcagatggggatgtctgtggatatgtcatcttaccagaacgctacttccaacttgccgcagttggcaggctttccagtggcagttccagctcattcagttgcacagcagcaaacaaattaccatcaacagcagcctctcctttaaaatcaaaccaagcattttcttgaaagccttcataagtgtactactcaacccttgtgattataatctgaaaatactaaaagaaggaaaaaaaaattttctcaactgaaaagacccatgaataaataaagcacaaaaacctgtctttctttttatgctataaaaagttcttttcaagttccagcttgtttgaagtcagacttttgatcagaggccgcttcaatttgcttcccgttagttttttcttactttcaaatctctctacacaaatcggacaaacaaacaa

SEQ ID NO: 48498 - DNA, 614 bp, Bovine  19866881857330
  misc_feature (1)..(1): n is a, c, g, or t
ntgtcttgctgctttgtttactagatgtaggctctcagaatgcctccttcttggagaccagaggagggaggtttaatcagcgtccttgtgtacagtactccagcctcctcattagtcttttctattaggaagaaacagaggcgcagccacggcagaagctaaacactgcagtctacaagcatctctcaagctacttccccagaagcttgctgtgtgtgtttctgcggtgggacctaaatgttcctcccaggcatggacttacatttatgatatatcacatcctcttaaactatcagattccacaactcagaggagcaaactgaaatctgttctcgctgccctccctggttctgctggtgcctctacactgtcagcatccttcagggaaactgaaaaatgaaatgtggtcatctgtggctgtatgccgaaacttggaggtcttgctctggtccttaaaacacttataacatccttataacacttcagttaatcacatgttctgattatagggggaagaggattggagaaagaggagagtaaaattgggtcataggctttcagaattttttaattgaggtgaaatttatataccgtaaaattaaccatagtacatt

SEQ ID NO: 48499 - DNA, 708 bp, Bovine  19866882056906
  misc_feature (1)..(1): n is a, c, g, or t
naactgtaacattttatttcatttaagtcttttaaagttttaatgtattgctaggcagtggtttgggaaatcagtgagtcaaccttttctccttggttaacagacatacccagttcaaccacatggtggaaactatatgggtcaaagtattcaccaagtcactgttgcccaaagctacagcctaggaccagatcagattggtccactgagatctctgcctccaactgtgaattcctcagtgacaacacagcctgctcaaactccgtacttaaggtaagttttggggagctatgttaattttgtaattacatacattaaattttcacagatgttcagaatgagagtaattagacccttttctttataataatagtgccctcttttgctgttgagatgaagttataaaagggctcattcaagatcccatgaaataggaatgctgctgtcttagctttgctacccatactgagatggtgcccagacctggattatagtctgggtccctgggaaaaaaatacagctaacttggagaagaaaatggcaagccactccagtactcttgcctggaaaatcccacggacagaggaggctggtaatctacagtccatagggccacaaagagtcagacatgactgagtgacttcactttcactttcacttcccttatagaagccaagccaatgatatacttagcacggtgctataatt

SEQ ID NO: 48500 - DNA, 1521 bp, Bovine  19866880370238
  misc_feature (1)..(1): n is a, c, g, or t
natcctgcctacttaacgtgcaatttctctcttgccagccattctgaaaggagtgcactctgcacttaagaccacttgtcctgggtgatgctgagagctgcctccctaatctgagatctgggccctgattcaaacattaacagctccgtctggatagtagccttaatgcactgtgttggtggaggcggctcctctgattctcacaggaatgagtgagatacttttccatgttttcatctccttggatggaaatttaccagtgaggttgatgtgattgtccttattttagaaatgaggatactgagcctcagagaggttaaatcaccgtcatgaattgaccccaactacggtgtcaattaaaaatctaagatcatggcatctggccccatcacttcatggcaaatagatgggaaaacaagggaaacaatggaacgttttattttcttaggctgcaaaatcactgcagatgttaacttcagccatgaaattcaaagaggcttgctccttgcgagaaaagctatgacacacctagatagaatattaaaaagcagaggcatcactttgccaacaaaaatccatatagtcaaagctatgatttttccagtagtcatgtgagagttggatcatgaagatggctgagcaccaaagaaatcacgctttcaaactatggtgctagagaagactcttgagagtcccttagacagcaaggaaatcaaaccaaagtcagttctaaaggaaatgaatcctcaatgttcattggaaggactgatgctgaagctgaagctccaatactttggccaccttatgcaaagagctgagtcagtggaaaagatcctgatgctgggaaagactgagggcaggaggagaaggggacaacagagggcaagatggttggatggcatcactgactcaatggacctgagtttgagccaactccgggagatggtaaaggtcagggaagcctgctgtgctgcagtccacagggtcgcaaagagttggacatgacttagtgactgaaaacaacaaagaggatgaggtggttagacagtatcatggactcagtggacatgaatttgagcacatctcctggaggacaaaggagactggtaggctgcagtctgtgaggtcacatggagttggacatgactgactgactggaaaacaacaacaatgtcctgttggaatcagaaacgtcccagctaaaaggctccataatatcagtatcttggctgccgctaaaaaaggcagcatcagtattttccagcattatttagttatctgttcacccaaccggcaagaatttgccaaatccctgcctctaattgatctcaaagagaagagctttatcaaactgaatgggttagagcaatgtcaaacactcggagaaaagaacagtactaatcacacgaatgttacagtgataaggagttaacactgcgacgaaccataaaagagcctttgtgacagacagcagatggtgaccattgcaggctagacttcggaaggtgtccttcctcagaa

SEQ ID NO: 48501 - DNA, 1621 bp, Bovine  19866880553843
  misc_feature (1)..(1): n is a, c, g, or t
nctggtgagagccctgtgggcttagtttttaatagcccctaactattaatagggcttgcgtcttgaatgtagcgctagaatgttaagctgacttatccagctggccccaaatgattatactttgtcactcaattattctctcttcttactaatacttttttaaggacctgcgtgcccaccagagtgaaatgtactttgcatattgatgaatctctctgtctctctctgcccacctttcccttcctccctttctttctcccaatgaaattatttgtaataaatatttttaaaagaaagggcataacaaaatcctgttcttgtaaggctctgatctcactattcttgtttttaacctaggtatttatattagcagacttattgtgacccataatgctaaaccaggtaattttagtgtatattaattcttcttccctggtggctcagtcggtgaagaatccacctgcaatgcagaagacccaggctcaatccctggattgagaagatcccctggagaaggaaatggcaacccactccagtattcttagctggagaatcccctcggatagaggagcctagcgggctatagtccgtgggctcacaagagtaggacacaacgaagcaactaaaccaccaccatattaattgttgtgacctcagtcacttgctgtcagaactttgaggaggtgcataaggaatttctgagaaatatcttagaattaaaattatttttctccaggccttcttagaagcagagatgtaaagatgactttctaagatttcctcttccccaaccatattcctcattccagagctaccgctacctgtgtcagactttgtttcgctctgttgctgctgctcaccttcttgcccatttatttgtgtaacaggtagtgaattttctttcctcagggggcacactgtgaaggcagtgtgcgagtccttccacctggccaaagattctggcttcaaagtggtggctcacatgatgcctgatctgccgaacgtggggctggagagagacatcgaacagttcacagtaagtgttgacccaaaccaggctgccgtgagaatgcctgtgcgtcctgctgctacccgctctgctttttttctctttttttgtttaactttttattttgtgttggcgtatagccgattaacaatgttgagatagtttcaggtggatagcacagggactcagccatatgtatacatgtatccagtaagtataattcttccatcttttgggaattgttctctgactgattcctccactggatatgaatatttttaatgttaattatatgaactttctaggcaatttgttaaaaatattttccccacactattaatatttttcttggtcttttacttttttttctgttgttaagctttcctgtttacttatttatttagtgatttcttaagatgcttctaagcttagaactgcctttctctttcaggatttccctaaacagggaaagaaactattctgttttcttctagcctttctgttctttgaattttaatacctaactctgggggtttgtttgcttttttaaaagataatttattaatgtatttttggtcgtgctgggtgttcattgctgcactcgggctttct

SEQ ID NO: 48502 - DNA, 2797 bp, Bovine  19866880595928
  misc_feature (1)..(1): n is a, c, g, or t
ngctgatgccttggcctcactttgtcagcctttcatatctcctagagataggtaggaattgagcatccctccctctgggtgggagtcaggagagaccaccatggcctccgtgcctgtgtcccatcatctccatcacagtgggatgacctgtgtgtgagctgggatgctcaaagtatgagatcctccacctgatcccttcctgagtccatgagctctgcttcttcctggttagagaaggtggaccaaaatccagaccatcaccagcctattctataagcagaaactggggagaagagcccggctgaccgggggcaaattcatcccacccccaggaatcacagaggggcagcaagttgaccacaaccctgattaacctcagcaatgaagtgtcttgtaactatttccatcatatcccaggacaggggaaccagcctactcagtacaaaccacagcacagagctccggggaggcccagggtaatgcacaatgtcaacacgatgagtcaggacaaggcagaagcctcttaagagtggctaggtctctgctctgggacttggagatttctcaccctcacatccaactcacccaacatgacataagcaatgctgctcgggatcatgcctggtcagaaagaccagccagcttattcctttgtggtttccatggtaacaagggcagtgtttggactcctgactgtgggaatgaacagcagaggctcccactcccccatttcccatccgctctcacctcttgctcacttccttaaaggccagggtggcaaaggatgctcttacctgctaagatgaagatgcccacgagaatcagaaagaccagcaggtagagcccgaggactgcatgcttcagggctgacagggagcccagctgggtacagcagccacctgctcgtcctttgtggcatggacctaacaagaagggtaggaagaagaggggaaaagacatttgagaattcccaaagccgctttgctctttttgtctcatcgctccctgatgcatgtggatgttcatgtggcagcactccccacccccacctcccgtcaccacacacaccttctgcacatctgtaatgcaggtggaatggtagggagcatctcagaactgtgataagcttttcagcttctctctctcctcccaacctctgctcatgaacgagccagaaggcatcccaacagctcacatggccatacaaacccaccctcctggagccagtgcaagtagcagagaaagctaggataggctgccctttacaaacgttattgtcccccgtgatcaggagaagatggagagcattttaaaaagaggttgcaaactccagggaagggaggtgggccaggtgggcctggggaacccagcagtgcatgccccatctggaagcggttgctatgtcagaatgagggccaggtgttgacaggtccaaaaattttaagacaagccagagattatttagagaaatctcccttttttatgtgttgacaactaattagggggtaaaaagacaaaggaaaggaaaaaccactagggagtgtaaacaaaacacatttatacggcagggctgaccaccagtttacaaccttgggtttagatttacaggaaaacatagtacagaacttcttcctgtgaaactattcaaggctcaccaggttctggtcaaaatggaacagcaaaataccagagttctaaaggaccttggggcttcccaggtggcactagtggtaaagaagacacctgccaactcaggagatgcaaaagatgcaggtttgatccttgggtcgggaagatcccctgggggaggaaatggcaccccattctggtattcttgcctgaaatatcccatggacagaggagtctggctggctacagtccatggagcttcaaagagtcggtcacgactgagtgtctgagcacaatggaccccatggattgtctaattcaaccccttcagttaataaaggttgtcaaatgtaagggatagaccctggggtgaggatgccaggtcctgattccaggtcatctttccatgagaattcttcttcaaccctccttaagacgactgctacagaggccagcaagctcacccatctccacctcctcggttgactgacagtggagaggaagagatgccatcctgccctgactcccagcatggcagataagaaatgatggagggcttttttttttttttcataacatgcccatattatgttcaatccccaccccctgcaagggagagtattgccaactggagaactgttcattgcacagggaggcagatgtgggagcccaaaaaggctgacaacagatgttgaaataattggtattcaaaaaacatttgtagagatgctgtgataggacttgctagcagtccagtggtaaagactccatgcttccaaggcaggggacacagattcaatccttgatcagggaactaggatcccacatgccatgaggcacagccaaaagatatccaatttttatttaattaaaaaaaaaagatgctgagatgtttgtgatccttggtaccttggggttcaccagggaggtgcttcgggggctccttactacctatcaggtagcattgccatagctcaccagaggtattgttcagtgaagaaaattttcccacacatttattctatttgattgaaaatactgttgctaaaacagctaagtagaactcttacacaatacttccataaaacatcgggtacaacttggaacaagttgtcgagaaatacaaattcaattaccattctcgtcaaccctcaagtgttagcaaatt

SEQ ID NO: 48503 - DNA, 2152 bp, Bovine  19866880607706
  misc_feature (1)..(1): n is a, c, g, or t
nctttccttacctatgggaatagcaacatctgttcaaaataatgcatttaatgggataagcaggggcttgctgtcttggggagatggagtcccttggagcttcaggtccctgagccctgtgtttcatacagagtagtgcatgcatgacagccgtgaataaaggacactgctggttttgtaagcagatgaggaggtaggtgtgaaggaagaggaagtacagttgttcctgggctgaactgtgaaaaccctttccttccctgtgggcagcgcaaacagaatggtctcttttacttgactagaatggctcttttgcattcacaccaacaaaagtatttgtggatcggagtcatttattgtttgctggagaaaattcagtgtaaccagataaggtgacctgtttctgcagcctgtatgctgggatatgaaaatagcaccgctctttggggccctaattttccccttccattttgctgttacttctattactcaatgatgggaaggctgggccctcagttacaggagatcctgtggagaagatccagccctgaaggggagatgggcagcctttaagatctctgccagtcctgatcgcctaattttaattttactagcagtctaaactgttatacattgagacagtataatccggtttttaaaaaccttcagatgaagacacgactaagatgacttgagaatccaaatggtcatcctctgaacagctgatttagaaatcttggcattgaatcaattactaatatgctcaatgctatgatcttaagctcataccatgaaaaaactaaaatgcacactacacatttaaaaaatggtgtcatagggcctgatgtgtaacttgagagacctagatgttttagcacaggcccttggctactcttggagatttttctgtccaaaaccaggctgagaaaaaggtcctctgggaagaaataatcaatatatgctcaatgaagtgaggtgtttttgttgttgttgttgttgtttttttttacttttcctggagaaggcacccagaagaaaataaagcttgagaaccaggtaggatttgggcagtgaggacaaagtatgacaacttgcttctttctgccaagcaaggttcagatggtgaggaccacagacatatttgcatataatcatcagtatgctgtggacgcatgcggcatctctcaacagagatcatccctggtcaaggattgctgaaaaatgaattgtttgggaccaatgaattgtcctattctccactgaattccattaggcaataaaagatgtggtgtgctgcagcatttttgacctttacgtgagcttagaatgtcacgtggaaggaagacattaagtgaaaatgttacagatttaaaagaacataatagcaacactgataaaagattaagaacaatatgcaaaatattagccaaagatctaaaaactcaaatcgttgctctgtgcagtggttactcaggggagatcataaaacagaaagctgaggtttagtggggaatctcagcagaggagtgacgcccctcaccttggtccccaaattattcattagagaagcagcagtcttccacgctttggcatgtgaaagtcttactccaagcctcaccctctttaatgacaaaaacaaacaggaaaacaaaacaacccctccccccgccaaaaaaaaaacccctttggttgtgtaatgaatcagtttgactctatgacctgtgtcctgcaagtgctactcagtgatgtcatagcttgttgccatgggaggctaaagagagcaatcattgtgcatgagggcatgcacacacacacgtggatgtgctgagacgaggggttgtctggcaacagtcacatgtcaaatggcaatttgcagcttagaaccacagagagggtttgttttcttcttctgtctgttccagttattaaactgatggcagacgtcctcattaagagctgttagcacgtcagaagatgtttgctgagcttggaaaagggctcaccgctttggacatggaccaaaatacatctccggtagccaaccgcaccctgggggcgggggacagcagagggcatgagaagcaaagacaagcaggttctcttaaaactctacatcagccaaggaagtcttttttagcatgagtttatgttttag

SEQ ID NO: 48504 - DNA, 1416 bp, Bovine  19866880611575
  misc_feature (1)..(1): n is a, c, g, or t
ncctgcagcagccacccacaggcaggcagagagcagcaatttccttgggaggttttgaggagaagccaggcagtcacccgttttcccacccccccgccccccagccccaaacctttttatgttgaaaactcccagtttcggcttgctggcaaatgccatgcaaagctcatcttttgttagtctgccgaacaatgttattggttataattggggcaattatgggctgctcgaggaagcgaaacacagatgttgaaacccaggatcagggtattcaagtccaaagctgcttgctttaaatagtccatttcccgaatcatcctgacttacttgaaattcccccagaacttggccatgttcagaatgagatgcgggaggataaagatgggtagcggtgggaggggaaagccagacccacagggagagagacgcacaaagacagaggaaaaggaggctgagcgagagccagagtttggatgagttctgaacgtcattttcgcaggaccccagcagaaacctttaggtggcagagatgggtaggaggaggaaagatgcaaaaaagagaacagacttccgaaagaatgagggactggagaccaaggtcaacccttcggaaatacacagcggaattcacacacagcgaccgtgatcggctgggtaccggtcaagcccagggcaggctccgactcttccccacatcaccactagcgatttgtattcggtgccgaggggagcagggttccctcgggatgaaaaagccaaatcgcaatcgagttcagtgatatgttgaaaagcagcctgcactcactgtgaaaggaagtcatcacagagagaaacccctcctaaagtgtgcctggagggggtaggtcgggagtggggggcgctttcgaagggttgccttgcaaggcaagcccccgccccaccccgccagtgcctgccgctcccctaacctcacttctacaaccacctcttcgccgcagacaagtgacaaagtgaggaccacacctggagaatggaaacttttccaatcctttccaagttcagctcttcttctgcatctctcttcagaataaaagccttagccctcccctccacctctaccctccgccctcacccccatgagagcacggaaaagatgaatgaataatctaaagggaggccagcagcatctacactggacaaaggagaggggctggggagacagccttgccgcccgcccgccagtccgccacttccccaggctcccagcagcgtgtcttggggcggagggcttcgcgcgcagtcgcctacctgcgagctgtcagtaaccgggctcctccgggtgtgaggctccgctgtgtcagccacaccggcatatatatcctcccccaacacgcacagccctccccttccctgcccacctcgatacacatacacacg

SEQ ID NO: 48505 - DNA, 2884 bp, Bovine  19866880623230
  misc_feature (1)..(1): n is a, c, g, or t
nttgcagctggtgaccaaagcgtatctgtggctccgtctgttgaggcacttagagggctaccttgcctggggtccttctctcctgttcggtgtgtcatgcacatagagggcccctcctggctgagatcctagtgtgtaggttggcgcctctggcatgtaaagtggcaccctgggtggggtcctattctgtagtgcagtgtgtcaggcatttgatggaccaccctctctattgttcagctgctgatactggcctgtggggagagagaggccatggtgatggctccatcccctacctgtgactcagcagtatcgccttgcttccatggctgcctggctttcctccctcatatcccctcaacccgtctcttctccctcacatcccctcaatccatctctccgcagtcaacagcagccctcgccctgggattgccccacaatccctaaactccagctcccagctgctgtgccttccagggaacctgtgtccctgtctagggtctgtatggctgcggcaaggactgtctctcactccatttaggctgccacagatcaactgtttcactcagccttaaatgtttctcctctgactcagacagttgccccgatgtgggggattggacccctgcctcagttcccccacccaccgagggcagggtccagtctttctaacactcctgtttttccctgtatttccttcctcctaccgagttttgtgtggttctatatattattttccactggtcaggtactcttgtcctctgttagctggtgttctgcatgtacttctgtctctgaaggtgtattcctgatgaatccttggagagagatgtactccacgttcactgactcctccgcagtcttgttctagggaagatttttacctcttatttttaagaaagttctgtttgagtctagggtaaattgaggactaccttgtaattaaatgttaaaaaaaataacttttagctagtattctactggagctttttatgtatgtttattatatatatatatatacttatttatagtttgaaatcttactgtaaactgtcttaataaatagtattaattacactatttattaatggctatgcctgttttaataaagagtaccatttttgaagccaaaacaaaattaagtatacatttttcgtttttttgtcaactgtggaatatctcattgtatgacccacaagcaagatattgcattatttcttcgacatatcgtaatgttctccaaggacataagcataaataagccgcaactgctaaatgtggaaatccaaatcattgggttcataagtaaatgattcttgtcttgtgtttttaggttcccagattgtggtgagctgtatcctcagctggtggacctgaatttagctggtgatcctactgaaggagcctcagtggcagtgcagagggactatggcttttggtgtgcccgagttgaaaaatgatcctgatcttggctattcctttttgcacatgcgtgattgttcacctccttgtccaaatatgtactttaggagagagagctttcatttgctctatatttcataggattgattccaatcatttgcctctctgccatgttgtttacttttttaacttttttgattgatgtgataagattctgttatcctgaaagacccattatattttatgccgtctgctacatgatggtgtcattaattttgtttattgggtttttgcttgaggaccgagtcgcctgcaatgcatccagccctgcacagtataaggcttccatagtgacccagggatctcataacaaagcctgtatcatgctttttatgatactctgtttttttactgtggctggcagtgtttggtgggtgattcttaccatcacgtggttcttggcagctgtgccaaagttgggtagtgaagctgttgagaagaaagccttgctgtttcacgccagtgcctggggcatccctggaacgctgaccatcatgcttttagcaatgaataaaattgaaggtgacaatatcagtggcgtgtgttttgttggcctctacgatgttgatgccttgaggtattttgttcttgcacccctctgcctgtatgtggtagttggggtttcactccttttagccggcattatatccctaaacagagtgcgagttgagattccattagaaaaggagaaccaggataaactggtgaagtttatgatccggattggtgttttcagcactctgtatctcgtaccactcatggttgtaattggatgctacttttatgagcaagcttaccgcggcatctgggaaacaacgtggatacaagaacgctgcagagaatatcacattccatgtccatataaggtaagggaaaccttgttctaaatttcaaaatatttaacagtgaaaagagctaatcttagctgtttttctttttttttttttaactcttcatgaaaaacctgaacattaaaattttgaagtgaagttaatgaacaaatttattgtaagtaagaatgtcatacacacttttctgttaacatcttcgttttaaaagatcacttccgtgagtccaagccatgggcttttaagcactttacttctgttatcacaaaatagttgcttgttgattacttagaagtctgcaggtttgaggggaagatgttgattaaaagacagtgtctgtggaaattttactgatacttagaactgaagttttaacagttttgaaaaaaaattagaatgcatttgtacaaacagtttcatcttttagttggtcttagtttttcttttttgcatactgaatattttgtgatttatcttttaatttaaagacatcggataatcacagaattttagatctagagaggaccttagagatgggttattcaagttccctctgt

SEQ ID NO: 48506 - DNA, 3015 bp, Bovine  19866880644212
  misc_feature (1)..(1): n is a, c, g, or t
nttgtcttttctattttgagtactctatgaatactttccggcttcccttggggctcagctggtaaagaatctgcctgcaatgtgggatacctgggtttgatccctgggttgggaagaccccctggagaagggaaaggcttcctacttcagtattctggcctggagaatcccatggatgtccattgggttgcaaagagtcagacatgactgagcgactttcactcatttttatgaatactttatagaagtgaacataaaggagtagtggaaaacaacctcattagaaattttggtaaaaattcaaatagtaaacccctttgaatcaagcaaattttgtggcacaaatataataaaaaaataagacaatgctgttaatattgcatgtccttttagcaaaatgggataggccaggtgcttgtaacaattatccatcctttgactaatgattagaaaatactgcattcccttttcaaccttaaatatacatcgttcacaccttggttcttaaaatttgggaagaatcatcaggataccatcatctgaggactcgcagtctgaggtttcacttacaggtttcattttcccatcatgattcaagtctagagtgctgctctctgtcgcttttcattttctggtttatcaaataatttgaaatgtctttctctgttcgtcttcttttctttgcctttaaaggtaggaaattaaaaattcctgagttgtcatttgagtttaatgaaggctgagagcagactacaaagatagggcccactggcttcttttataccttcttgaaaagatgacgtattccttttggcaacaagaaaaccaaagaatgataatttcttcattttgcttcatcttcctaggcagtgccatcatccttccatttaaaaattattttcatcttcttttagcaaagttgggaacagttgatgagtaatgatgaggaaagatgagcaacaataccttccaggtaatggaaaagtagcatgctttaagagacaggaaaaataagaccattaagatcccacatcgtgtcttaggcacattgccctttgataaaagggtttacatagtttagaagttttatttaattaaaaagatagagcttttatttaattaaaaatatgcaaattctctttttgtttctttggaagatttataagaaagaatcataaaataccagtcctcaaagttggaaattaagaaagaaatgcaaaaggagatctggaaaagtgggtgaagatggacaggcactccagttgtggggggaagagttggcaagcagatgcaacagggagaggcaacggagccctgtgtgtatgggaatcagaatagatctgatttatcacagctgactttttgttgagtagagtacactcggttggggatccaactgtggccaccattaatttgagcaatatagcctggattctgcaaggcaaggcatggttactctgaaaccacctgagacctgatgcaggcacactttttctggcagttttgtactatgattgtgatgctttcttcccaaggaaaagttgtagtttttaacatgtaataaaaatcacccataagaatcttaatattcagttcagaccattatgcatttattttcaagtacttcagtatggattacattctttcatacaaattaaaaacccacatgctgttcttcaaactcaattaaaaccatacacaaattaataaataacctacttagttaaatttcatttcactggggatttgtactgcctccacagcctttgactattttaggtaccacactggtttgccagtaggggatatggtaaaaaaaaaaaaaaaaaaaaaaaaccaccagacttctcagtctgggaaggttaagtttgagagtgaataggattgtgttctgaaatggttaagtgtggtagagaaatggagcacatgtttgcttttcaaattctggaagtgtttcatatgcaagaagcttatggacccattatcccaagagatgggtagtgcctgaaaatgtaatttcaaagattacgataaatgtgaagatgacagtcataattggttattaaagaaaactaaatgttttgagtcacccttctctaaggctattgtcagggccatggatttctagctgcttagacagagtcacatttgtttatttttggctgtgctgggtcttcactgctgcaggcagcctttttctagtcgtggctggtggtgatacgctctagctgaggtgcacaggcatctcactgcgggtggcttcttgtgttgaggagcatgggttcaggtgtgtgggcttcagtagttgcggagcacaggcttagttgccccaaggcatgtgggatcttgctggaccaggaattgaacccgagtcccctacattggcaggcagattcctaaccactggcccgccagggaagtcccagagtcacatttaatgcactctttcttacatcctttagaggcagtgtgtactaagaggagcatcttgctttcagagcacatgctcattgatttatttttcttctttttttaaaacaaaatgatcatttattgttgactgggcttaggaggtggttctcacttggagtctctcctgaggttgtaatcaggtagtggctggagctggagtcgtctcaaaggctgtctgtttgttagcctcaaaggctgaacctcaactggggtgagggttgaaaccctactcttgggctctccattgttacttgggcttccttacatcatggtagctgagatggaaaagcagtcatgtcaagagaggaagagccaggctaaagtaccttggaagtcacacaaagtcacctctgcagcatttcttcattagaagtgagtctctaagtccaactcaactcaaacgtaggggaattagactctgcctctcaatgggaggcctactgacttttaggaaaatatgctagtttctttcccacatcttgatgataattacacctaacatctctcccgtgctattcaatcaatcaattattcattcattca

SEQ ID NO: 48507 - DNA, 588 bp, Bovine  19866880681316
  misc_feature (1)..(1): n is a, c, g, or t
ntctggagaggttaatgaaagaatagcacctgcacacacgaagtgaaagaacgtgggaaaattgcccaacacacaaactcagcaatgcttcaacatgaattgtaatttattgggttaaggaattcaggccgactaacagatacaccagggaaccagcagatggcatgcctgaataaggataactccaaatttgggaaattttctgatctggtctaatttaattaatgaaatttatgaagcatctaccatgtaatgagaggcagagtgagaatgcaagaataaaaaaagaaatctaatgaggatgtgaaagtgcaatgtagaaataactactggtgatagaactataaactaatgctggagaaaaacatttcagaagggacatctgggaagtgtaaaacagttcttatgggcagcagctaaccaaattcaaaaaagaagacttttctcattatctcactttctctaaaatacataaaaatgtactctcttccaaggtaaataaatgtaaaccctatgtttatattgtttcattgttttgaaataggcagcattcgtatatctcccatttaaaaagaaaatgaaaagtaa

SEQ ID NO: 48508 - DNA, 1816 bp, Bovine  19866880689385
  misc_feature (1)..(1): n is a, c, g, or t
nacatgaaggaaaaaaaagtgttctgtgcagcactgcccataatagcaaacccttggaaataacttaaatgaccatcagtagaagatggctaaataactacagatagtaatattaacacaattggccattacacagcaattaagaggaaagaaccagactaacaaatataaacaacaaatacagatataaacacagatacataaacattatatatttatatatatatgaaacataaaaaagtatataatgttgcttatggatttgtttgtaatgtatagtaagagtataaaaacaaacataagaagaattaacaacaaattcaacataatgattatctcatctctggggagaaaagaaggaaatgaaatcaagatggatactaatgaaggaatcttcaactcttcctgtactgttttatttctttaaaaaagaaatctggggcattccctggtggtctgatggttaggacttggtattctcactgtctgggtcccaggttccatccttaattgggggaactaagatcctgcaagccatgggggatcttgggtgtggccaagaaaaaaaaatctgaagcaaacactgcaaaatattattggacaaagctagatagtgagagttttataggtattcatctatgctttatccttgaaacatttaagaaaacaaaaaaggcacaacgttatagtataaaaaatgcagtattactaccatacacgttattactaacaattatgttctcttatacaaatctataggactgtcaggtaaatatcctcaagactttaggaactgcttacaatctatatattggaaatgatctgaaaagtatctgacattttctgggtctgggtatgttaatacatgacagtaaaacagaaccaagggactttcctggcagtccagtagttgattctgtgcttccagtgcagaggccatgggttctatctctgatcagggaactaagagcccacatgttgcatggtcaaaaaaacaaaattgaaaaaaaaaagaaaagaaagaaagaaaaatagaaatgacagaactactatagtcattaacactgaaatcataaagatattcaagtcccattaaatcattaaagatatttaataatgaggcaacaaatgattatgttctctatatcttctcattttttataaatggcattacttttataaccaggaaaaaaaaaaaaagtaagggaaagatatcaacaatcaatatcttgattatgtttttcttaattgtttttaaaatttcttcatagaaatgtttttctttttctacctttttcatttcattccaaattcctaaggaaatgaacagctctgaggcatgaaacttctgttcaaaattataagtaatatacacactttgaaaagttcttaaaaactgatgaactagaagacaaataattttaaatatgctgcaaaagaagcaatggtccatgaaaaatctatgattttcacacctactgcattccatatcttcaggccaagcaacaccaaacagctccatgagcttcaaacactcactgtgagcccgctgacagaacctatggcagggaggtgtgacacgactgtattccacacagataggagcacagagtgcacagggagatggccggaaaccccgagagcagtccaaattcaccactgggcggaatggccaggaaaaagttcaaatcagatcattagatggagagttgtatgtatacaagtcaaagttttcttcatatataatatggcaatattcttgttttttctgttttggaagatttctgaaggcaattaaaattttctaaggtaaatt

SEQ ID NO: 48509 - DNA, 868 bp, Bovine  19866880693832
  misc_feature (1)..(1): n is a, c, g, or t
nattcttaaccccctggaccgccatgaagccctgaatcctgatttttcagtcttctgaaaatgtctataggttgttttttttttaattttataggttctcttctattttctttttctttgtttgcttgttgtgaccacaacattggcctgtggaaccttaattgcccaaccagggatcaaaccctcactttctgcagtggaaacacagagtcttgaccactggaccaccagggaaatcccctcttctattttcatctagaaattctaagattatctgtccctgttatttgagggtcctagtagcccagggggcagttaattaggagggaggagaaaatggtattctttttcttcttctataaagtataaaaagtgtctacctgtgatatatgatattccctggttagtagcaaagatggcattttacaggccttgaggttgttgttgaatcaattatttcagtctccattttgcctgccctttgaaagcagaatttgagagtctaaaaaaaggaaggaaaacagatctgttggaagcatgaaaccagctcctcatcctcctccacaaaagggaagaaataggcctgagctagtttctaaataggaatgttctgacagtgtgagagaatttagaaagtgccaagaggaagggaaaaacatggagcccaattttgaaagccaacagagggcagggtgggcgtgagagagacagtcacacctgttcctgctgtgtcttgcttcctggctccagatcgccctcctctgccaaaccttctcactctagttgtcccttcctcacccattcagacagatacacaaagactgaagctcaggaaaacacctctccactaatatgtaaatacactcac

SEQ ID NO: 48510 - DNA, 1161 bp, Bovine  19866880730198
  misc_feature (1)..(1): n is a, c, g, or t
ncttttaaattaaacttccatttttgtttgtttgtttgaatgacatttctttcctcacataattgttttagggagtgcctgtgaaaagaatgtgtataatgtaaagcaggatagattagatagaaggtcctattacttcatctccagtctggattactgctgtttactgctgtaatctcctaactggtcttcttgtctttggttgctcccttcaacaacccagtgtgtatatggttaccaaagtaatctgcctaaaagcacacctttatccttgccgggccttacttcccacagctgacagtggggcttaatccattttctctgggaagtctgatgtgccatgagctgaaccaaggtggtctgcccttgtgacccttccccagttcatagagaaaagaacacttaatgggtagaatttcctcaacttgtaagtccccccccgccccatttgtttttctatagtaaggatccaaactcttatctgctagcattgaagtgttagtcgctcagtcatgtctgactctttgcggccccatggactgtagcccgctaggctcctctgcaattctccaggcaagagtactggagtgagtagccattcccttctccaggggggtctaacccctgaagaagacccagggatcgaactggtgtctcctgcattggcaggcagattctttactgtctgagccaccagggaagcccatctgctcgcattaactgatgacaaacagcaagtaaataataaaagatttggcaattgcaggtcatatttattttaacagcttggttttctcccaggcactcaggctggtagttgcgatcattacaatgttaaagatacggtctttttctttcttaaaaattgtttctctttgggatgatggaatgaaatatatcaaaatttcatcatagcacattagagaaaacaccgccctcccaagtaaatactttggcctcttcttcagagtttattcaaccttatcactgctactccccttcatgaatccttgacttcagaaaaagttttctaatctctgttcacatttgcttttttctttccttctttgcataaacaattttatctccctggaactctgtcctggcccacgccttgcatataaatcccatccagccttaaaggaacaaatcaactctcta

SEQ ID NO: 48511 - DNA, 4693 bp, Bovine  19866880758963
  misc_feature (1)..(1): n is a, c, g, or t
ntgaaactggaggggtgaatccatacaatgtttttatggtgcagagcccaatgagtttcacgtgaccacatctttttcctttgcccaaacagagaggccagcaaccaggaaaccccttcattactgggcaaacctgagggtcggtcaacctcatgtgaggctatacttcaagacttctttcatctgcatcctttctctattataattcacttttgcatggctgcaaatgtagcatgttgcataggttagtttttcatctaaatattttatagagcaaacaagaccatccccaagaaaaataaatgcaaagaggcaaaatgattgttgaggaggccttacaaatagctgagaaaagaagtgaaacacaaaggagaaaaggaaagatatacccatttgaacgcagagttccaaagaagagcaagaagagataagccttccaaagtgatcaatgcaaagaaatagaggaaaacaatagaatgggaaagactagagatctcttcaagaaaattagagataccaatggaacatttcatgcaaagatgggcacaataaaggacagaaatggtacagacctaacagaagcagaagatattaagaagaggtgacaagaatacacagaagaactatacaaaaaagatcatgacccagataactacgatggtgtgatcactcacccagagccagacatcctagagtccgaagttaggtgggccttaggaagcaacactatgaacaaagctagtggagatgatggatagctccagttgagctatttctaatcctaaaagatgatgctgtgaaagtgctgcactcaatatgccagcaactttggaaaactcagcagtggccacaggactgggaaaggtaaattttcattccaatcccaaagaagggcaatgccaaagaacgttcaaattattgcacaattgcactcatctcacacgctagtaaagtaatgctcaaaattctccaagccaggcttcaatagtacatgaactgggaacttcccagatgttcaagctggatttagaaaaggcagaggaaccagagatcaattgccaacatttgctggatcattgaaaaagcaagagagtttcagaaaaacatctactcctgcttcattgaccatgttaaagatttgactacgtggatcacaacaaactgtggaaaattctgaaagagatgggaataccagaccaccttacctgcctcttgagaaatctgtatgcaggaaaagaagtaacagttagaactggacatggaacaacagactgtttccaaatcgggaaaggagtatgtgaaggctatatattgtcatccagcttatttaacttatatgtagagtacatcatgcaaaatgccaggctggatgaagcacaagctggaatcaaggttgccgggagaaatatcaataatttcagatatgcagatgacaccacccttatggcaaaaagcaaagaagaactaaagagcctcttgatgaaagtaaaagaggagagtgaaaaagctggcttaaaactcaacattcagaaaactaagatgatggcaactggtcccatcacttcatgacaaatagatgaggaaacaatggaaagagtgatagactttatatttcggggctcccaaatcactgcagatggtgactgtagccatgaaattaaaagatgcttgctccttggaaggaaagctatgacccatctagacagcatattaaaaagcagagacattactttgccaacaaaggtctgtctagtcaaggttatggttcttccagtagtcatgtatggagctggactataaagaaagctgagtgccgaagaattgatgcttttgaactgtggtgttggagaagactctcgagagtcccttggactacaaggagatccagccagtccaccctaaaggaaatcagtcctgaatattcattggaaagactgatgttgaagctgaaactccaatactttggccacctgatgcgaagaactgactcacaggaaaagaccctgatcctgggaaagattgaaaggcgggaggagaaggggacgacagaggatgagatggttggactgcgtcacctactcaatggacatgagtgtgaacaagctctagcagttagtgatgggtagggaggcctggtgtgctgcagtccacggggtcgcaaagagtcggacacgactgagcgactccactgaactaaagttccagtgcaggggacatggttctgatccctgatcagggaactaaaattccgcgtgcctcagcacggacaagggaaaaaaaacaaaaccatgattgtaaacgagatctcagattctctatcctaggaaaaactgttcaggtgatttccttcatgccaacaggaacaggtcactctttctccatagttacattaatatcagtgaagaatgcctgttgctactctctcaggggctctagaacagggataacacacacatggtcagtgcgtcctctcacactcagtataggatctgggttggagcagatccggaagaggaaacactgattgagatcacaggctcctgcaacccaacaccacactgctgaccatcaccctccacccatctcctggctcatgaatgagtggaggaatgaacacatggatacagatgacactagcaaagcagcttggacacctgtcttatccccaacccctctatatacagagagcattcctgatgtcccatttgttcccagaccctctgtctacagacagcattcctggtgtcccatttgtaatgaaaaaaaattcaaacccatcaattttcaatgacactgttctcattagacactggatagacagacttgtcagtaatgactgcgggcatgaaagataacacactacctctgcacgcggtacactcgagtccacgggggcacgagggccaggatccgggccaccaactcgatcaggtcgctgggggaataactcttgtatcttcctgacttccacagctcatagagccctgtcccacgaatcaccagggtagggtagagtttcaacccgtcaggacggaaagctgggttctcgaaaaactcctgtggagagggaagatgagctccattagttacatggagattacccacggtgaagtttccatcctgggccgacttctctcacacacctgcctggtccctagactactttccatcaagcgtggggaaacagaacagaaactcactgtttttacagtctcacgggagcaagacacttgggtgctgggtgcccaagccctggctgacccagctcctggccactgctgcggggtcatcacttgccagcctcccaaccttgccttcctgccgtggcaaaggcaatttcctctgcctggaaatcttatcaggttttcttcatctagctcacctttaggtctcagctcgaatgccaattcttcaacgaggtcttactgaccttcaaatacaagttgcttcacttaaattttttttttggcgggggggaattctgtattattgctttcttaacatcatcacactgaagattcatctgatgcctgcctttacctccagaccacaatctcctttaataatgaagtatacttaaaagtgacttttaaaagtgacgtagatcattatctgggctgcaaaacctagtgtttcctgtgtggccctctgcagagaaagtatgccgacccctgggtatgactgtgttgctctcaggccagcgggcaccgttcctaacccagaagacacacacagtccatttgtcacctggatgctgagcagtacagctaattcatctcttttgacacagtcatttcctgcattgtatcacctcagctggcttatttctttacttgggatgaagcaaggagacatcaagccttctcctttctatgattttgcactgcaaatctgctcttatctagattccacttgacatgtgatggaggaattaaagtggattcatatagttccctctcaccccgacctggcattagtgtctaaatggccagagtactgtatcttgtgaatggagtaaatgctttctatcttgtgctgttattactccagggcttcccattgtgtaacttgctttccaaagagatataactactgagttttcgatctctctcattgattcctattatcatcttaaatgctgtaatctttgtgcaccattggctctgagggacagtctgctgtaactgcgtgtaattttccctgtaacatttctattttaaagagtcatccagtctttaataaatattctatagccatccacaaaaagtatgtatgcaagtcactctccacctagtctgcatccatacggggaacataggatttcagcaaagtacttctggctacttgcataataaatttaggagatataagggctgatataatcctttcataagaatgatgatagatggaatgggcgcaggatttctggtaaacacagagaattgaaatatgtgtttctttcctttccttccaaaatcacactaaaataacaggaaataattttttttaaagcataaactcggaggaacaaagggaacatcagacgagagaggaggaggagtaagtgatggcagtaatttctggaagacagaaaatggaagactgggaaatgactgcaaatgaagaaaactgcaaacaaaccatctgcaaaggagggtacggaggaaagggcagctcagccacacgagagtcc

SEQ ID NO: 48512 - DNA, 877 bp, Bovine  19866880806034
  misc_feature (1)..(1): n is a, c, g, or t
nagttgatggccatgtgttatagtagggacagaccaaataggaagaaaatttctattttacttctttatttttaataatttattaaattaataataaaaaataatttatttttttaattttggttgcactgggtctttgctgtggctcgcaggcttctctagttgcagtgagcaggcttagttgccctgtggcatgtgggatcttatttccccaaccagggatcgaacccatgtcccctgcattggaaggcagggtcttaaccactggatcaccagggaagtcctgaagttttctattttaaattaagtgtggtctcagatttagaggacccacacctggagcagattctgccactaatgtttgggtgaccacaggcatgtctttttccctttcctggacggacctttcttgtgtgtaacagtgagtttcctgaaatagagttggaaccagctgccattctggctcacaaagttacctgggctgggcaggcttttctgcctcttagaatgggttgaattttaagcctttttgctgttgggttgggatatatgccacaggctcttcaaggtaaactagaataccccctggagaataatgttttaaatggctctacaggaaaatttattgtgagtgttaagtggctaaagaacagagaatccctagggagtgatccgatgccacttgtcagcgctggaaaaactttagccttttggttaatgggaaagagcatgcagagtttggggtaataactatggtgtgcctagcatttgtggagaacgtttttgtgtctttcctgtttttttggattttacttccttcccgaaaacacttccctggcctcttctgtgtcttgtaagcttcaacttaaattgcaca

SEQ ID NO: 48513 - DNA, 883 bp, Bovine  19866880825768
  misc_feature (1)..(1): n is a, c, g, or t
naaactctcagaaattaatagaatgaatgtagaaagaagaggaagaatatagtagaactgaaaagcattatgaaccaattcgatataattaagatttacacaacttgagtcggacgtgaatgagtcagacacgactgagcaatttcactttccctttcatgcattggagaaggaaatggcaacccactccaatgttcttgcctggagaatcccagggacgggggagcctggtgggctgccatctctggggtcgcacagagttggacacgactgaagtgacttagtagcagcagcagcacacaacagtaggatacaaattctactcaagttcccatagactataaactgggagacactgggacatatccagaaacataagatcagctgcagaaacctcatggtctaaaggtattgaaatccacaccttgcttttttcattccataatcattttttagctttgtccatatatgagccctacttcattcatttaagctgctattagtatcccaaaactcatcccttttcaacagccaaaagccatgctgaaagtccaatgtttcccttctttccacccttagaactgggcatcagaatatggagccagatgggctcagtgacttctcctgggcttccagtgggctcatcccctgctatgttacagcctttactaatttccactggggcttatcccaagtgattggattaatgagactgttgatatcatcatttcactgccatcttcgtaattagttcttagtggaaattgttatagtcatgatccttctcagtaggaagaagtcaagaccaaattctgggaatagagcttttcgaaactacgtgaagcaggaaatttgaaatggaacctgactcattcctagttga

SEQ ID NO: 48514 - DNA, 1720 bp, Bovine  19866880878536
  misc_feature (1)..(1): n is a, c, g, or t
nctccccttgtcccccaaagaaccggaggatagacatagagcagaaggaattcttacagactgctgctaggaggaggaaccaacaaccactcaggtgaatatgataaagttaggatttcttacttgacggcctcataaatattgttggaggtatgtcctgataaggcatcatgtaaatttcgaataaaataatctctgtattcttctggaagggccataaatgttccacccatcacgataaattccactttatccacactgtgaccaagctgttttaactgaaagacataaattcgtcagcattagcaaggtatagtcaactactcttaagtggcttactgaaattttctaattttacttggcagtgtttttatcactacagtttaaaaacgagaagcaaacatgttgagcaaattctacagactcaagaaaataggctccagagtctgaaagaaaaataattacggttcaaataagaaggaagagtaagaatttaaaataatcaaaagtttgatgtcaacttacagagttaagtgaacattcaaaaatacagaggatataaattagcagcaaatataatcacacaagatataattgtatacattgtaacagaatgaacaaatctttcttgattatgtattttttaagacttcactgaatttgttaccagactgcttctgttttacgttagcttttttgcccaggaggcacatagaatcttagctccccgactggggcctgaacctgtctgccggctctggaggcagagtcctaaccactggaccaccaggggagccccccagtatgtattttatgccagaccttggggtcagcattgaggacgaagaagcccataggcagtataaccaggacttgatgcaaacgaaagaaagggaacaccagatgagaaagcagcactaggaaagcagtttcacatgaaaacttagctgttttgatttgtgaagattctggatacaggtggcaccttttcagcctggtttccgggtgggggagtaatcagtctgaaatgtaatatctcctctacatggggacacaatgatacagatctttccagttttcaacaacaagtcaagattctactttttaaaaacaggtatttcgatttcttgccaggtgttaggcttgagaaaaactcagtcaaggtgactacaaattatgaactctaatgtactaagtaaacaggatatctgcacttaatatgagcaaaaagttatctttttgaatacttatttctgaaaatggaacatagcaacttataaatacatacatccttatagtaggttggcccaaaacttcactccggcttttccataacatcttatggaaaaacccaaatgaactttttggccaacccaatacatatgtaaatccttacacaaacataagcgtatgtgcacgcatgtgcaacatatacaaatatatgtgtatatagctatcaacactaaaagaatactccagctgtggtcgttcaccaggggtacacagttaaatctttctggtagctttttcaaaatatcttgcctggaccctaaatcagacagcactgcataactccagtggcgaaacggggcgcgtgttttgacaaagtcattcaggtgattctagtacatttacagctgggaaaaaatcactgctctctggtactttctacatcttccagaacccatactccttttggtaaacagaaacctttcaagct

SEQ ID NO: 48515 - DNA, 1954 bp, Bovine  19866881072384
  misc_feature (1)..(1): n is a, c, g, or t
nttcctacagaaattgcctcttgcagtagtttatcctcattctagccccattcctctaacccaccttcactgaagaactaatattcgaataatagactttcacatgtacattatttcacttggttcttgcactggtcttgtgaaatgtgtatgtattatcccaattttgccaacaaggaacagggagctcagaaggcattgatcttcccattacgacatagccagtaggatttgggagctagggactgagtctgtcatccaagtgttctgctttaaatcttctgtgttttttttttaaagttatctttcaagagccttttacttagtatgcagattatgtgtattctttcatcttctgaatcgttttttgtatgctcattttctgtagtgtattttgtatatagttgaccgttgaacaacccccggggttggaggcactgcccccaccaccatgcagttgaaaatccaaatactgctatctctgcctcaaaagcaaagaaattgacaaatgactcacccaggggcagtaagctcacacagtttggatagcattaggactcaaatcctagttcttttgtttccacatattgtggtcgctaattaaacaaaaacttttccccatacttagttaatttaaggatctgaaaaatacaggtactgtatttattgagaaaaaaaaacacacatataagtggacacacacagttcaagccagtgttcaaggatcaatctgtacttattttctttaaacactactttgatctttttactcccaaactcaagaacatataattctccactgtgtattgcatcttttgtcgagtagccagtgtaccctgtgatctgattttacccaaccctgtcagaaaggctccattccagtttggcaacactttcatataaacatgattggtaattcctatacctaacattgttccttctggattgccctctgttttgcttgtccaaaccctgccctttctctaaagatctctctgatttcctccatgaagacttttcttactaatttacttctccagataattttcgatacaccgaagagctgtccaaatgtttttaaatcttcatctccatgtatgcctcgtttcactgtgtttagctttaatgtacttcacagatactgtgttttgtttgtttatttttaccaaatgaaggtttggagcaactctgtgttgagcaagtctgtcggtgccatattgccaacagcatttgctcagttcacaactcagtcgtgttttggtaattcccacagtatttcagactttttcactgtttctgtgtgtgttatggtgctctgtactcagtgaccattgatactactattgtaattggtttggggtcccacaaactgccacgtaagatgacgaacttaatcagtaaatgatgtgttctgactgctccacctgttggccattcccccatcttcatccctctccttgggcctccctgttcctttggacaatgaggactgataaatgctactgaattaggccagttagtacccctacaacagccttcaagggttcaggtataaggcagggtcatacatctttcactttaaattaatagccccaaatgattaagcttagtgaggaaggcctgttgaaaactgagatagactgagtgctaactcaacagccaagttgtgaatgcaaagggaaagttcttgaaggaatttgaaatgatattctagtgaactcatgaatgataaggaaacaaaccagccttattgctgctaatggagaaggttttgggatctgcatggatcagccagccatggcattcccttaaacccaagcctaacctaagacaaggccctaactctaattctgtgagggctgagagaggtaaggaaactgcagaagaaaggtttgaagctagcagggctcacttttgtgaagtttaaggaaagaagtcatctgtacagcatcaa

SEQ ID NO: 48516 - DNA, 1058 bp, Bovine  19866881096972
  misc_feature (1)..(1): n is a, c, g, or t
ntccccatggatggaggagcctggtgggctgcagtccacggggtcgataagagtccaacacgactgagcgacttcactttcacttttcactttcatgcattggagaaggaaatggcaacccactccagtgttcttgcctggagaatcccagggacgggggagcctcgcgggctgccgtctatggggttgcacagagttggacacaactgaagcaactaagcagtagcagcagcagagctaggttacctggtcccaaattcccacacttgtaacttgctagctctgtgacctgttgatacgcctctgtctgcctcagtttcctcatctgtaaagtgggaacgactgtagcaccttatctcaccgacttgttggggattcaataagctcatgtttgtgaagtgcttagggtcccctcaagatatcacagtgatcttagtgatgactcaggaaagagaaagatgcaggagagagctggaggcactgagtttctgaagtcacagactgagacaagcgcgagccagcacgtgatggcggtagaggtggaagcagggtggaggctggcccctaccccggcatcatgggcgtcagtcgagcccactttgcagaaggcatttggctctatctgggctcaaacaactactaattcctccatctctgcccctccttcccgtgctccccaaggagtcctctgggaccggaatgcaaactgcataagtcgaataccttcagctgctggaactggtgctgcatcctttcttgcgcccgttcgaacatgccctcagccacctgccggtccacccctcttctgaggacatctttcattctttcacatgcttttttgcctgtgatctgtgcggcctctggcaaaaatgacagccacagtaacacctcaacaaggacttgcttagatatccttagcatcagaaataaagacaagcaaaccaactatacatacatacacatatgcatatacatacagacacacatatagacacacctggggcttcccaggtggcacagggttaaaaaatctgcctgcaatgcaggagagtcaagag

SEQ ID NO: 48517 - DNA, 1067 bp, Bovine  19866881102146
  misc_feature (1)..(1): n is a, c, g, or t
nacataccccatcaacagcatcacccaccaccggaggagggcctccttcccagcaaagatcccagcaaaggggctgttccacggggcccaggatcagggatgggtggggtcctcagccagccagtttctcagaagcatttgggggcgtgggtctcggggaatcagcgggtggaggagggctgaagaacgccctagacagaggagctctgcgtgcatacccaccccaggtggagggctttcacgtgtcgtttgatgcccacgatagagcgcaggactttgccacagctgggccacaggcacttgtacatcaccttcaccgagttctggagggaaaggaacagggatgaggaggtcatgtccccccgctcagcctcacccagtggggctccagtcacatccaacaggacccagcagaaggctcaatcgagacttcgagaaggctaaacgggttcccagagaccagaaagactgacaaacaggggcagagagctggtcctgggggccggcatcggtctgcagcagagatgggggtgggctggcgggagggggatggaggagaggagatgggctgggggaggggagaatagggctaggggacaggggaagacctgacggaggtctctgcaggggagctgggttgggcagaggtgcagaggccaacgatgcggcattggagaggaggggcgggcttctgggaatatcaagaggaaagagaagcagcaaaagagagctgaaatgatggtccagggcctgggactcggctcccaatgcaggggggccagggttcgatccctggttggggggaactagatcccacatgccacaaccacgatctggtgcagcctaattaattaattaatttttaaaaaaatggatcactgaaacaggatggggcccgagaaggcccaggaaaccaggcctggcccctctgtggctgagcttgaaagctcaagctactcacctttctttttcggggagctggttcatccaacaggaaagcgtctgggtcggtctcaaatccattatcagtctggggagagccgaaggcgtcccccaggtacttgggg

SEQ ID NO: 48518 - DNA, 1163 bp, Bovine  19866881159595
  misc_feature (1)..(1): n is a, c, g, or t
nagtccatgggttgcaaagagtcagacacaactgattgagcacaaattcggtgtgatggctttaggaggtagggcctttgggaggcttttaggactcaagatggagccctctcagttgggatgatgccctttatagaagagaccctagagggcttctgtgcccttctgccacgtaagcacacagcaaaaagacagcccacccctaaaccagcaagtgggcccaagcagacaccaaatctgcctgcaccttgatcctgtacttctggcctccagaatactgagaaatgtctgttgtttgtaagcttcccagtctatggtattttgttatagcagcccaaatagactaagacagcccagactaagaaaatgagtcccacataagagtcttgaggattcaaaactaaaaagtaatctgcaaaaaaatgacatttctttaaacttcactgccgtggatggtatttcatgatattggcaaaaatgaagtcagtgagtctgttaaaagtggattcaaatgtttatatagctaaagactcttcgaagatacttcctgggaactgagtctgtatgacaatctcagcacttatgattggctgcttttcaggggaacaaagcttactgcctccaggatcacttctctctcctccatcctgctatgttctggatctcatggcatctgttattaggcctacccagagcctagacactccaagggaacaagtaggaaaaacaggcaacctccaaaatcctgctgggaagaaaaccactacctaaactcatcgccctcttcactttataaggatcttacctcctggatcaggaaagtctttttatagctgtcatatttccagccatttcttatcccaatttcagtcatcttctcctgcagagagagcttaaaagcatctatgtgggggatcagagctgaaccatcagtgggcttcccagacctgaggaaagcaaagtaaaatgttaagagatagcagcagctattgtgggattaaaacaaagaatcaactagctggtattcttttactcatttttaagagaagggggatgagatcattagttataaaatttctataatgttccaagcactgtgctgtgctaggcccttgatataaaacctatgaagtcagtgcaatgacacccattttatggatgag

SEQ ID NO: 48519 - DNA, 975 bp, Bovine  19866881322430
  misc_feature (1)..(1): n is a, c, g, or t
ntgggccctggaaggggtcccccctcctgcaacagcctgagatacttttaattgtggtaccaagttaacaatgtgaatgaatcatgaactttgccctccccctatgcctacccccagttacctgatataacagctattttcccagatccatgttcttctctggctattcgttctgcttcctccatcagcagcatgccaaagccctacaaagaagcaataaagggggttagggaactgtgaaggagagaagtcattaagaggggtccataaaacaagaaggctgatatttagtagctgctaaactctttaaaagtgacaaaaacccatttataggcataaggaaagaaatgattcaattataccaaaagtactcagtggcagactaggaataactgcaacaaaagccatcccaaggtattttgcggatgatgtaatctagtcgcagcaagggaggaattgcctgtcaatttctgtcgctttttaaacaagttctaggcaatctccaggtgatgaaagtctggagcatctaatcttgtattattagtcaccctttcagtttctaaaaggcttttggaaaccaggcaatattcttaaatcatcaatagattgggggtttaatgctaggtccaccattagcagttttaacttgctctcctgaaagtgaaaaaaagtggttatttatttaggttgtttgggggagtagaatagtgtgccactatcttttagcttgcattgacaaagtgctttaaaatttcataagtgctttctttcacattatcatcttccttcgattccaaactagttgaatcacacaaaattgctggtattagatcatttctgactttcaaaaatagcaatttcctatgggttcagtctattattatattccacttgattgagtctcaattcgtctctccccctccctcatgcccaaagggctacaatttaaagagaaaacctctctgaacaacagta

SEQ ID NO: 48520 - DNA, 1031 bp, Bovine  19866881329983
  misc_feature (1)..(1): n is a, c, g, or t
natggaagaagcattatattcaaatggtcaaagaactccatgttaccaagcccaaggtaaatttgggaaaagaagcaacagaattactaacatcagctacttaggaattctggaactaagttggggaaggcctttggttcaaaagaaatataccatgactacaaaattcccttgttctaagaactcaacagctcttttcaagatatccatgttagttgaaagtcatctgacacaaaccacagttccacctaggttaggacttggagctcctcattctctctggattcctggatttctgtgtctctaatgcctacagaacacaattctgacacaattctgcacattctgtgggtaatgtgcagtatttattacctatgggtcatcaaattttacttaaccaattcaagttttctgtgattctaccaggcaaactgaagtttatgtttctatcacttataaagaaaagttttgcaataaattagtaattaggaaagggcataatgggcatactaaaattctttttactttagaaactagcaatgtaaagtccttacatagaatcataaacagtaaataatatgagcatacatttttctaatgggtttctatgcattataaccaatgtttatgttcattcttatagtcacagttaattagataacttatgggaaatttttatgagctttttctttatggcatgatctatatacatgcagagttgtgcatcgttttgtataatagaagagttcctgaaaattatgtgtaaattaaaattttttaattatttttaaaaccacagggatttttttttatagaaaagctgcagtgagtcctttttgaattgaagaatccttttgaaatacgaatagttggttcttaatatgctcatttacgtttcctgttattgtgtttacttgaagtagaaaccctctacatttaatatagtaatgaactgcataattaatactgttataattacaatgataaaagcagcctttctgatttcaatgatggctgttcttcatgagaat

SEQ ID NO: 48521 - DNA, 1112 bp, Bovine  19866881334493
  misc_feature (1)..(1): n is a, c, g, or t
ncagaaagactgaaagtcaaggaaggagaagatggggttcagagcatggacagaaaaatgaataggaggaacacccagacccctccctctcagatgggtaggaacatcgatctgcttggtgggggaagaggaaggctcatgcagttcgcccatgccatcttaccggttggtatctctggccacatcctcatagacactctgcaccccaatctccagccttgtgcagccataggtcaacatgtcactgagatgccgcttcatgcagtaatctggtctggtctcaatagtaattccaatgcactttgtgaggcttctctcagaatacctatagagaaaagagaaaagtaaatagcctgccaaagctttaggacgttggctctcatttcaaggacgtcttccccttgtcctcccagatctaacccagtggttgagagcaccagctctcgggtcagactgagttcaaatcctggttctgctacttcttaactatgcaaccaggaacgtgattaacctcctcgtgcttcggtttcatcctcggcaaaatgagggtaatagcagctacgcctcatgggacagacgtgcctgagctggtacacagtgtacggtattcatcgtcaccatcaccatcgtgttcctgcagcgtgcggcagccataatctccttgaaaagcagggatgtcaactgtgaaaaccctcattttcagttcctagcaacgatttttcatgtaagtgaaaaccatctgcatcatttatttcctactccatgttttagagtcatgttaaaagaaggaaaacaaaagaagggggagggaagggtatgcataatgattataatgatcaaaggaagaattcaggtgaaatgtttccccccaccccacacacacacgtcttcttgtcaagcctatgaatctcagcaatgacttacaaaattaggagtcatttttctctttcactaaaaccaggtatcagagtggtgagcaccacttaccacttgagattcaagctgttttgagttaatagtcttaatgctggccagaaacccaggaaaatgaaaatgactccctaaggggaatgctgacgtgcaggaataggacactctacctacagaggcca

SEQ ID NO: 48522 - DNA, 1295 bp, Bovine  19866881383071
  misc_feature (1)..(1): n is a, c, g, or t
ntgggctctggagccaacaaatgtatggtcctcccggggtacagatccactgtagaccttcgattggttgtactagccagtgccaggaacaaatacagaagatggatcaggcttccccgactgccaatgcaggggacacaggttcaatccctaggttgggaagatcccctggggaaggaaatggcaacccactccagtgttcttggctgggaaatcccatggacagaggagcctggcaggctgcagttcatggggtcgcaaaagagtcggacacgactgagcaactatacaaacagtaacgatagtcaaaaggagcacgattgataatacggtgatttcaggttcattttaaagagcaaaagacccagagtccttcctcaaattatgttgggctccactttctcccccaaagaggcagcaaccgtggtgtgttttgtgaaacctgtttctgcagagaagcagttgaaaacgtccacacgtgtggctcacagggcaaagttttgatgtgtggtttatttcgcttgtatttcaactgtgcggttagcgtgtaagttttgatttgagtacttatttacattcatgtgcagagagcctaagaatagcatcttttaaaagggactctgcatatttagctagatgtgggaaggctgcacagcaccagtttcctgtcaaataattgtgacttttgacagtttttcttgcttctctcactctccctttcctctttttgtgtttgcgtacactcttttttccttaagagaacataacagaggtgacaccaaggcagtggtcactcctgtcctagaagagcttcctagagtggaatgaaataatgttcttgagccccttctacagatgtggacactgaggcctggagaggggaagggacctgttcaaggtcagacagtgagtccaagttcagggttctcatcattccaccaagaaacctctaactggtactatttaaaccatctctggagcttcagagtaagagatggagagaacagtgaacacaaatgaggggttccctttaatgcacgaggaggcatttggggagtgaaggctgttgagtaggagcgagagtggtagcttgatgaaactgggcttaaggacaccaactgaatctagtgacctcagaataaaacaaagccagactgccggggggcattgggggggtacacgtgagcatgcgtgattgtgtgtgtgtgttgggggggcagtgagtagttcattgctttcagtccatgtccagagcagaatttaatgtgtttatgaagaattacaaacatctaagt

SEQ ID NO: 48523 - DNA, 1157 bp, Bovine  19866881748626
  misc_feature (1)..(1): n is a, c, g, or t
natgggttttagaaaacacccccctggcaggattcacctggtaagaaaaggacagtacgggggtctttggggtcaagactgttggaaacggccgaacccagtgctcctgggggtggtataaaccttagcaaatggccgtgaggtgacctgggaaaacagttgaccccaagagtcataactctctaagctcatataagggcatgaggcccccaaactgagtgtgacactgggaggtcatcttccttcaagaaccacagaaagggcgcatcactcagggacccaggatggcaacctgagcagaaggcccaacctcccgcatggggctccaggcccgagtctcccagacagctcaggcagcctcagtctggcatcttcctgcacaaattcctcagtgttctgcatccagctcacaccccagggtacctgcagtgcagggtgagctgtctgccaaggcctgaatcttggcccactcctgctcacgcagtgacagggagttgaaagagcttgtccgtagactcttccatctcagacattctaaccttacaagtatgctccacacaaagaatttatcctggctcagtttaaggactgccttagaactaaacaccaagtggttgctggctcagtggctagagctagagagaaaggggcagagaagaagaaaaatgtacgccacgagctaggtagtttgggatggacatgtacacactgctgtatttaaaatggataacaaacaaggacctattgtatagcacaggggactctgcttaatgctctatgatgaccttaaagggaacgaaatcctaaaagaggggatataggtacacgtatggctggttctagatagcatattcaaaagcagagacattactttgccaacaaagatccgtcaagtcaaggctatggtttttcctgtggtcatgtatggatgtaagagttggactgtgaagaaggctgagcgccaaagaattgatgcttttgaactgtggtgttggagaagactcttgagagtcccttggactgcaaggagatccaaccagtccattctgaagatcagctctgggatttctttggagagaatgatgctgaagctgaagctccagtactttggccacctcatgcgaagagttgactcattggaaaagactctgatgctg

SEQ ID NO: 48524 - DNA, 1344 bp, Bovine  19866881804989
  misc_feature (1)..(1): n is a, c, g, or t
nttccctggcggcacagtggtaaagaatcccctgccgggcaggagacacggattcagaccttgtgcggggaagatcccctggagtaagaaaaggcaacccactccagtattcttgcctagagaattccatggacagaggagcctggtgggttacagtccgtggggtcgcaaagggtcagacacgactgagcatgcatgcatgcagactaggaaaataaacatgaatttactaccttacatctgagagaggtgagccacactagggaacccaaatatttttcttaaataccatctatacaagagaatttagatcagtgagatgaatgtccatccaaaaattttgcaggaaatgttatgtccaaaacacagtatctctgggctgctctacattttgcaaggatgtcaacgtttgaaaagttttctgcgttctgtagtaccaaccagacaactatttcttcaaattacacaaagcttccctaaaaaacaaataccaactttattatagggagctggcagtaaaaatttacctccacaaacacaagactgcaaattggctttctctagattatttcataaaagcatagaggccaggagaaaaaaaagcaaaacatgccaagtgggctggcaggactcagtgtagcatttatggctggctttatggctcccagactgtacttttactacttcccgagagccattcatatttgccgcaatgaaaactcaaatcacatataaatttttatctgaaaataaagtgtttgttgcccccttgaggtaaattaaagaacagaaacaaaacaacgccagctctggtctgtcctttagagaaagaggctttcttcttcaaaagactttttctacacacataccgtgatctgaagttacagagtaaaagttcatttcacccccaaaaaggacaatttatacacaccactaggcatcagaccatttctgtaaaaatagagctaaaacttcacacaaagaatatcagttcagtcattcagtcgtgttcgactctttgccaccccatggactgcagcatgccaggcctccctgccatcaccaactccggaagcttgttcaaattcatgtccatcgagtcagtgatgccatccaaccatcttaccctctgccgtcctcttcttgtcttcaacctttcccagcatcagggtctatttctaaggagtcagttcttcacatcaggtggccaaagtattagagtttcagcttcagcatcagtcattccaatgaatattcaggactgatttcctttaggattgactgatttgatttccctgcagtccaagagactcttaagagtcttctccaacaccacagttcaaa

SEQ ID NO: 48525 - DNA, 1727 bp, Bovine  19866880698234
  misc_feature (1)..(1): n is a, c, g, or t
ntaaagaatccatttgccaagtaggagacgccgggttgattcctggattggaaagatcccctgagaaggaaacggccaacccattccaatattcttgcttgggaaatcccttggacagaggagcctggtgggttgaagtccacggggtcacaaagggatggacaagacttagtgactgagcacacatgcacacatcagtgctaagtaagtggccaaaccaggactgcaaacacagatctgtctgatccaaagctcaggccccacaggtatttgtctctaagtttaagattgtagtgaacataaagataaaaagcattaagaagtttgcttcatctaaacgttgggtaatccatatttaaaatttttaattgaggtataattgtcatataacatactagtttcaggcatataccataacgatttaatatttgtatacactgtgagttatcaccacaatatatctagctaacagcccttatcacgcataacccagagtaactaatgttttcttagaagtgcttactagggcttcccaggtggtgcagtggtaaagaatctgcaggttcaatccctggattgggaatatcccctggaataggaaatggcaacccatttcagtattcttgcctggaaaactctgtggatggaggagcctgatgggttatagtccatggggttgcaaagagttggacacaattgagcgactgagcacacacacacaggaagtgcttattaagtatttgttgcatatagcaccataagtcaaggagttcttactgtccccatagcaggagatgtccttacctcagtgcctttatgcaaacccttgtcctgtaaggttccctcatagttccttccaaacacaaattctacttattcttaaagattttctaatgctgaacatgcaataagacctcagtctgcttagaatataagtacatgaaattacaaagatttttgcaaagtcatctctgaatcccctagaggcaagcaccagctacaagaaaggtgtcaataaggatttgctggactgaattgactatctgtccatctagtctaccttgcccaatctttcttatcattagttaaatcttgtgacagactgctaaatccattctctgtttcttctctagtattagctaggtgttagctggacacatggttttgctgagactacatgtctaagccttccctgcagttaggtatggccagccatgtgaactaagttcaggactagagaatgggttttttttgtgtcttggccttcaaacactgggtatattttttttctttctgtgggctgaaacatgaatgtagcagtgacctagttttgacagttcaacagggtaacatcctggagagtgccagagcaatggaaagaatctagattactgaattactatatagaatacagcaacttacctgctctgacccaccttctatctctgaatgtgacatcagagagaagtatactcctgctttaagctactatatttcgagtcctcttagcctaaatcctaatgcatattattctagactgttttataacaattgcatgctacttaacaatgagatgtcctgatgtgatgggaaaaatattggatctgttcttatctacagtctcatgcacttataaggaaaccaggcttcttgctggacaaaccatggtttttttttttttttcctgtatctatcctttttaactgctaaggactttacatatttca

SEQ ID NO: 48526 - DNA, 1002 bp, Bovine  19866881049873
  misc_feature (1)..(1): n is a, c, g, or t
natcatcatcggatcctttggtatacttctcaaagtattggggaaatgtttactctgaatcatcttaaaatgaaaggaaattatttgaatagacacattttcctgaattttaattgtccccttgggtaaatagagaaatatacacattaaaattattttgaaaactatataataccttcagcaaactgctctgtggtaaaagtatcactgttctacataaggaactatttttattatttaaagctcccagaacccagttcaatataacagtgtaactaactcaagacaaattcaactgaaaccaacaggcatgttaactttttctttcctgtaagtctgtgattatttgcatgatagaaagaaactgtttaacacttggtcttcttcaacctccatgcacaccctttttctcatgatcttcaccctgcaatcctgcacagtttcactataactgctgtggaacagtggagtatctttgtgctaccttgcagaggcaggccaggtttacctgcagccatgatccaactctcacccccttagaaatgttactacaagtgtttactgccaccctccaattcaaatgatgctacagaatggtagctaaaaatatactttgcatgactgaaagttggccctgtaagggaaagctaatagaaaggcattttataaatcactgtttcctgttaggggcacccctagcatttgaatagggtagaatagttttccgatacatgggactgtcctgcatattacaggagatgtagcatccctggctctgcccagcaagtgccactgtgacaacagtagcactctcatacatttttccacaaccccaccagagactgtcacaataaaggaaataccatctcttttcagacagaagatgactgccagggttacactcaggcataagaagagagctcccagagtcaccaagtgattcctcttttttgctggatctagatatggttctgaaaaacaaaataaagtgaaactgactaa

SEQ ID NO: 48527 - DNA, 1064 bp, Bovine  19866881109130
  misc_feature (1)..(1): n is a, c, g, or t
ncatcataaagttataacataaccttgtgcaagttaccttgtctgttacatccctgcagtatgtgtccactcgttctcagttgcctgagctaggaatctgtgagaggcagctaagacactgatacatgtccttgaaagggagtaaaagcgtttccctcccaaaagttgaagaggatcctaggaagaaccctacataatgcatttgactactgagatatagagagatgagtgcgggatggttaacagggcttaaaaaactcctttcttcatctaacaggcacccctgggtacttaaaacagtgacacattggggaatttaaaaatgtactaaagtacaaacagaattcaggaaacatgaagaaaataatatgaggttccatcacacaatgacaattatggacattttttatgattatgagcagtttaatgttttttattggcattttaatgtcttcattttggggggagaaagcaggtatggtgggtatattaaatactttctttaaatagagaactaattatatgatgaatatattcttatgctttatccttttttcttttttatatagaaagcatttttcctcagaaacagaatgttaaatggtaacatacggtctattgtttccctgttgtatcagtcaggatagcctagattatgctgcagtaacaaacaactcttaaatctcaatataataaataaaggtttattcttgctcatgctccatgcccaccgacagtcagccaggcgccctgttatttgttgttactcagaagcccaggctgatgtagaaatcactaccttgaatgttgcagatgaaaacagaaaatacagcaaagcacaggctagctattatatattctaccccaaagtaacagacatcacttatgcttacatttagttgatcacagcaagtcatatgaccacacttatgacctaattaatcacagagaagtgcaatcctattgtgtacacaagagcaagagatctagaattgtgtgaaataacactaagactaccacattcatcatggagaaggatgggaaagagccatctcctggctaca

SEQ ID NO: 48528 - DNA, 1076 bp, Bovine  19866881375934
  misc_feature (1)..(1): n is a, c, g, or t
ntaaataattattctgaatattagtgggtttatctgagccctccacagtaatctctctcctggtgccatggaattgctgagaggtaaaagttcttccaaattaccattgtttttattgtttaaagaagctaaccataaacctggtttgagattctgcctgaagcagttttcctgtcagtttatatgcttcatggcagttgactgagatatcagaggagatactgtggcagaaggtgggtggccctaagattctggctattcttaaaaggcctcagaatcataaaaacagaaacacaataaatgcagtcttttgtttgtttgtttaatttaggtcactgcttagatttcagtgatctcccaagcaatggaattagaaacttttatcaggattcctaagttgtgactgacagatgatgattatagttgaacttgcctgttaggcgcctctccatgaaggccagggcaagcagcaagattaaatctgtgaaaggtcactgtgggcgcccattgtgcagcagtagtacatactgttgcccaaagcaaagtttttgattaaatcacatcctcagaaagctctgccacaggacatagaccagagcttttttggagtcagaaagacaaatttatactcttgcttttctgctgatcttcaacaagttgtttatttctttgtttagaacatatatttttatttttctcttatctaacagtcctgtttttgggaacctgatttctttcattttggatttctgacactcttgagggcaggggattctcaatgtgtggtctacagaattctgggggtttctgagacatattcaggaagacttcagaatcaaactaattttcatattaatattgagatactatttaactttttatcctgtgcttatatttgtacatgggcattacactctgcattaccatgcaattataattttttaaaaagttctaaatgcataatttcaacaagttgtttaactcagttttctcatgtgtaaaatgagaatgatatacctctttttgagagtcactaggagaaatgaaagcgtgtatgtaaagttgaagaatatatg

SEQ ID NO: 48529 - DNA, 797 bp, Bovine  19866881621784
  misc_feature (1)..(1): n is a, c, g, or t
naaataaaactacagaggaagcatgataaataagagcaaaaaatgactgtatattttatacacttacccatcagattttctttcaatactataaaggcatattgaacagtctgctctaaaaactattaccatgtcccggaagacactaagcagtaatgtttctgcttgtgttttggtgacatgagcaaaagcattgtccagatttgaggttcgcaaatacactctgagctgtagaaaatagaaataaagacaactgtaaaaagaagatacctaccatggatgactaaatactttagacataccattttttcatctacttttttttaaataagaggagctaaagactaatttgagcattaataataagtggatgtttctattttgacaaagtaggcacattctacaaataactaaaagatgagtgatcaaaactgtgatgtactattatgagatactccttttagacctgcatatttagacatgacatcaggaaatgtagtttctcaaaaaataaatatatcaatcaaccaatcaatatatctctaaggacagacattcttataaacttttcaacttttaactattttttattagttacaaattttataacagagaatggctaaaatcattagaaaaagcaatcacagaagtcctgattattcctttaattttttttaaaacagtaacttgaaaatcccattagctaaaaacgtggaatttttgattaaaaggaaaatgtctcattcattttcagtaggttatttttatacagatcaaacaatgctgtgaaagtgaaa

SEQ ID NO: 48530 - DNA, 923 bp, Bovine  19866880533396
  misc_feature (1)..(1): n is a, c, g, or t
ntctgcagcgaggatagcttcagaatagtcatccagatctccactctcaggaacttcaggaggggcaaaaaaattaaagaaagagtcattagaaactgttttggtcacagtacgaactgtcccacgtcccttgtgtttctgctgcttcttaatcgttttcaaagtgacattcttcccttttttccaatctatctggcaccctgtacaacccataatttctggtccatcaaaagaaaagggatcagaatcatctggttctgacctcatcctatatgtctttgtcaacacttcatttgtgaaatattcattgggttcaaagtgaaattctaagacaaaactcataggttgaccagcatctgagaacttcactttaatatctttcaagtgcttcagaataggctcacatgttcctgaaccatatcactgagcaagtcaacattcttaaaaatggtcaaccaaaactcaggaagtcccttgggatcttctttttcttcatcctttttctcatcttcaatcttggccttttcttttagctcctctgaaatttcatcttcctcatctggtttccattcacactcttcttctgtaggttcataaatggcattaacgatctcaaatcgcttatcaaacagaggctgataaagaacagcatactttcttccaagatcatgaacttcctcatagaatttggcttctatctgtgcacatttaacttgaaggtttttgagagcattcactcgtcttttaactaccctaagcaagctttcaatgtatcctgttggtgtttctaccagaccatcaagtctttcttgaagggctgcaagaatctgaggattttgcatcatctgaacagtcagctgacgcgctttgattttttgtttcttcaccagtttcttcttcttctacttcttcaacatcatcca

SEQ ID NO: 48531 - DNA, 1547 bp, Bovine  19866880690739
  misc_feature (1)..(1): n is a, c, g, or t
nttctttgagcctggatttttttatccaaaagtggaagggagaaaattctagatgaagggaaccttatacccagagacctggaggtgaaggttatagaagaccttgggcttgactaagatattggaaaaaggaagaaggtggcatggatataattagataaatggggtcagaatacagatgtaaacataactcagtgggtcactggcaaccagagtaacatgagaaaagggtgtgtaaagattggccaaaggagttagtaatatgcctcaaagagcaaagtgcctggaattggaaaagtccccagaagtgagttgcaataattcagatgtgaggtgaggagatgtgaagtagcatcatggtagagggactagaagggtgaaaatctgtataacttggtgagtctttcatatatacatatacacatacatatatattaatatgtacatgaaaagaggagaaggatgagtcaaggatgactgcaagttttaagtctgggtgatagcaaagatgatgatgtcatacacagaggaagatgatgggagaggaaaagagaaagggtttctaaaatactgaattagagtggtgatggcaagtcatccattgggaaacattgtttgagcttctggtgtatggacctggtgatgtggacatatccagattaagtatgatgatgatagttgaagccattggaacagatgagctcccttggtgaatagtgaaaagagagcataactcgggatttaggatagaatgttaaaaaattaaatatgattctgtatgtaaagtggtgggcatatagtaagaaatcaacaaatggcagcttttactacagttaagaacatgcagatttaaaagacaaggtagacaaggagctttcaaaggagaggggcatgcatggcgaaccacaggagcactcctatctgatcagagagtgcatctccatggtaaggtggtcaggcctcagtgtgaggatgccccagggctcctgagaatcaccttccataaaccttaccaactacaaaagagggctgaatattaacagttttgttggtaggttgaattcctaagagatatattaattgatcattcagctattagctgaaagtgatgtaaaatatgacccacagatattttcttaagccagagtttgtaggagcctaccagtattcttacctggagaatcccatggacagaggagcctggcaggctacagtccatgggattgcaagagtcaaacatgacttggcacctaaaaccacccaaccaccaccaccattattagtattctggtcagttaagatcaaccttgagatcatgaagtattcttgcttgagttcaaaggcagttagcatcacctagaacagggacttccactttgtaatatgcctgcaacatcatggccacttggcttcagtgctctgtacctggacagctctctaatcaagaagccctaacatgaggtctcataaatcccagtagtacccatggtatccatatagggagacagaaaatcagtcatccatttgctaacatatatgagtaccaa

SEQ ID NO: 48532 - DNA, 1209 bp, Bovine  19866880753550
  misc_feature (1)..(1): n is a, c, g, or t
nttgaggtttttcctacttaattgtcaaataagtatcttttataaaagatcttatttatagcaagggtccttttttaattttaaaaaggtaacttttcttgattatttttaatatttaaagggctaatcttttaatgtgtgttaaacatgaatgttttgatttaaaaatatgtattaagtgtatttttaaataagtgattaagttttagaaataaagaaaattgtatttaaaggatttatagaaggtagttgtaaagaacagaatataaaagctctaaaaagtgcataataagccttcctgtacagaggcttgattaaatggagcattcatagtcactgaaggcatataacaagaaggtattttgacaattttaattattccaaagatatttattatacagagttaaaaatggttaggacataaatcattctcaaccaactgactataatgagtgaaataatgtgttttggttgatgtatcagagaaatcactcatgatactttctagacttacataaaatattaggaagaagagtatgattttagttctattgaaggcccagatataccaattgttataaatggtatagagaatgactttgaatatattatgtaatgatgatacataatcaatataatgaattttaattaaaatatatagtttttaatgtattaattttagtagcttctgataactggattatgtatgtacagtaagtatatatcttgaattggaaatagcataaaagcaacaaataatggggttttaaatgtagatttaaagagtagccagagaaaattgttatgttttttcagtttttctgctctgttaatcacctgtacatttcagtcacattagaaatctagtactttaacttaaatgaagacaataaattagactatcaagaaaattgattggatggcttaatgttcagtctgatttgttcattgtaaattgactaaagacctgtctttaagtcttcaaactaaaaaaggttgaaaataagtagtacagtaaattgagaagttagattgtgtctgggggaaatagttactgtttgtaaacatttaagtaaatggaaatgtaaagctagcaaaagagaggtgagagaacttagcacaatgatatgaggaaaactcaaaagtagagacagataatctgaaaactttctttagaaagaatattaagaaagagaacttcaagggtgt

SEQ ID NO: 48533 - DNA, 1476 bp, Bovine  19866880885918
  misc_feature (1)..(1): n is a, c, g, or t
natgaattgtgtgagtaggaggtaggggacagaaatttaaaccaaattaaaagtgtgagagactgcagcacatgggaaataaatgctcattgccactagtctcaattatttttcattattttcaaggtcaagctggcaaattttcacaacttctacctgcaaatgcccttctcgattgattaactcttacagctagaagctctctttatacccaggaggcaagcctgcttttttattgtaataaaaaacctaaatgccaaagcaaaaagaataccaggcttctgtttatttttatctgaatatcaaagcccatgtgaactctaaagcaattaattcagtactaatccaggatttttaaaaaagtttaaatgatttaaaaaataatatgctgaggaaattattcttactgagaatccgaataaagcctattataaccctgctaggtaggaatcttctaaatcttccttcccacctgataaaatgtggtccctggtgtggcaaaagaagatctttccttcaccataccttcaccatgtttctgttgtggaataatgaatatcttatgttcacttataactgtgtaggacttttccttattaatatttttgtcctaagacgtcaaccgtagcccaaagaatcagggtaaatgttcttaattttgcatgtagagaaggtaagaggttcccagtgattcttaattgtcatactgataaacaaagagaatgacatatgtgaagcttggtagaagcagtggaatgtggttaaatgtgagaaggagagaacaaggtgggagatgggaactattagtaggagaattctctcttcaattaccaaaggagtggggtcagagtgagaagtcacagagggtccctgatgttattatctattattatcttgaagataatcccctggagaagggactgcaacccaatccagtattcttgcctggagaattccatggacagaggagcctggtgggctacagtccatggggtcacagaatcggacaccattgagtgactaatgctgactaatgctttgaagatgatagtaggaggacaaggatattcttattccattttctcagagaggggagaaattggacagttggggaaaatacaaaggttatgaaatagttgatatagcccctccttttttgctttttcccctctactttcttcttttcctttactaccaaacttcttaaaatactaatttgtgattaagtaccaattcttgctcttatttccattagctccttaaatccttaggagttgggaaaagatgacccactgaaggaggtgaaagagacctcaataaagtagaaagtcaacatcgaccctgtgttgacaaagctaaggataggaaaagattctgggagagctaaaggcaaccctctttattctttcaccccttcttcactgtggcaatagaaagaataatggtctagtctttcaatgtaatcacagggctctg

SEQ ID NO: 48534 - DNA, 836 bp, Bovine  19866881144560
  misc_feature (1)..(1): n is a, c, g, or t
ntccttggggtaacagagagtcaaactctctgtagtttgactgaagcacaactgaagcaacttagcacacacacacagtttgtttgcatctctaccccagccagaggaaattaagatcactacagtggtgctggtcagatttctggcatcctgctgtcctcctgtttccccacatttcactattaaaggagccagagcaagcctagtgattgcttgcagaagtaaaggaaataactcacacccacctgaacagcaagcttccaactgaagcaggtccaagttaggggggaaaagatgatgtaactttaaatgaagttcagaatttttactattacactggatgaagcatattaattactcagctaagactgttttaggaagtcaaatgaccagaggagacgagactttatgatctgattgtgggcatgaaagctattcagtctgcccaagatttcatctgggagcaaaggaaatgtaactgcacaaaacacaggcagtgaagaagaagtacaaagttgttttctgatggcatcctactttttcctctatgtccacaggtcctgctgaaaggacaaacccgagacaaccaagttttaccccttgtaactccacttcactcccagttcctggccaaagttgattagggaagagtatctgtcctcagtcagccaaacaacagctcagccagagactataagatgctcttaagcaacaagataagtagggcaatcagtttccttggcatttgaatataagaaaaagaagataatgactatcctcaatcatggcagttgaagctaaaatattattcattgattcaacaaatattttgtgag

SEQ ID NO: 48535 - DNA, 1430 bp, Bovine  19866881284584
  misc_feature (1)..(1): n is a, c, g, or t
ntgttgaaggacgcaggtatgaataatagaataccaggaagcgtgcgaacttgagcaccttcagggctacaggagagcttatcctacatctgactctggacaattctgcgaactgggcaactgttttgcagtttatcacttctgagcctcttcctgctctccgggtgcatctgcttgtctcccctcactgctatgcaacttgtataattgcttaacaggtcacatctgccaaatggaatttaattgctatagttacagaatttatattaatagcataccagatcccaaggaaagaatcgttcacgttgttccaatatatacacttgcttttccccccattttcatatatacgaaaaaaaatttgaaacatttttctcacttagtaaaccatgtcaagaatacattttaagctttttctatgagtcacagtaatcattttgaaagatgcactattcggtgcagggttttggttttgtttttgttttttaaaccagcatcagaaagggaagatgtggttctgagccctaacttgctactgaattgggggaatttgggacctcgatttcttcatctctgaaaataagggcctcgcaggggaccgtagccagctgtcgtctataatctgggcaatgcaacagaaagtcaaagtctctacagtccatggaattctccaggtcagaatactagagtgggtagcctttcccttctccaggggatcttaaacaacccacgtatcaaagccaggtctcccacattgtagggggattctttaccagctgagccacaagggaagcccagtgcaacagagttccttagtaatcatctcatatattcttacattttagagatcttctaggataacctcttcttttcttttcccttttattattttcttttcttttccccttcagaggaaggggatggaaggagtgagggatgaaaaggtagacctgaaagagaaatgagttgtctgatgtcacatagcaaggaaatggcagagatggaatacagcccagtttttggaatcctcaggtcaatgctcatgttcttttttattttcttcagtactattttactcctttggagacctcccaaagaaccccaatactgcctggtagtctgttattgccacagctagaaagtaacactattgtagtcaaacatggtactgtatatttctaccttattcagcacctgacataatgttttacatataaaaggtgcttaaaggactttgaataatagggttattaatagttactagtaaaagatctatgagatggtacccaactatatccagaaccatttggaggggtaaaaacaagggtagaacaaatgccatgtctgatgtaaactagtttttagtagggttccaaatactatagtgcttcctaacaatatatatcagtccttactctctttcttctctt

SEQ ID NO: 48536 - DNA, 702 bp, Bovine  19866881795532
  misc_feature (1)..(1): n is a, c, g, or t
nttgaaaaaattagagagagtttttaaaatgataagaattgataagcataatcaactaaacagagcagaaaaaacctgacaaagtgaaacatataattttagtaatgcttataatttcagtttggaggaagaaaatataaaagttttcatagaactgtaagattggaaaagactgtacttcacatgtttgattttgaaatttaagaaataataacacaaatctccattcaattatatcagcaaattaaaattataactttgtactatgctattgttatttgagggggaaataagaaaataagcacagggagagcttaaaggaaaaaaacaatagacggacctacagaattgtaatttaataggaaaactaccaaatttttaaagaatatttaagactcaaaaataggttggatttttgccactgtagattaactagagatgtgtacccttggaatttgttatacaaattgaataggagaaaaagattcagaccatagaccatagatgctctgaccctaatgtagatgataaaaactataatttgttgagtctttgctgagtttggactatggagataagtggaaacagttcttttataactggcctctcttgtttcctgaaactttttttttcttagctttttattttgaatcggggtatatccaattaacaaacaatgttgtgataggtttcagatgaaca

SEQ ID NO: 48537 - DNA, 728 bp, Bovine  19866880276884
  misc_feature (1)..(1): n is a, c, g, or t
naattgatgcttttgaactgtggtgttggagaagactcttgagagtcccttggactgcaaggagatgcaaccagtccatcctaaaggaaatcagtcctgattattcattggaaggactgatgttgaagctgatattctaatactttggccatctggtgcgaagagctaactcattggaaaagaccctgatgctgggaaagattgagggcaggaggagaaggggacgacagaggatgaaatggttggatggcatcacggactcaatgggcctgggtttgggtggacttcaggagttggtgatggacagggaggcctggcgtgctgcggttcatggggtcgcaaagagtcggacacggctgagcgactgaactgaactgaaccttccctgtctatgtttgtgacacactcttacaaacatgtattaagcatattatttctctagtatatagacaaggtttgatgtgcttgcagatggtggctattttgaaaaaaaaattaccctctggcattagaattccatggggtggaaatcaagctcaggcaatggaaaggataggaagataatagaattatagaacaaagatacataaaatggttagtattaatttccgaggccaatacatatttcaacaaaataattatgggttctttttattcaaattcattattacttgacttcatttctttcctctcaatttttgtctaaatgacatctatatattgaacat

SEQ ID NO: 48538 - DNA, 1551 bp, Bovine  19866880466186
  misc_feature (1)..(1): n is a, c, g, or t
nctccaggcaagaacactggagtgagttgccatttcctcctcaggggatcttcccaacccagggattgaactggcatctcctgcattggcagacaggttcttcaccactgagccacctgggaagctgataatgctcactcttctcccaacaaaacccccttccttcaggtctgggatcaaatgtaaccactaagaaaaaccttctctggaagtagcacctaatggcatttccaatctcagcactcttgcctctaatctcattttactttcttcttagtacctatatccactgaatatatctatttattgtcctttctcctccactaagaggtacactccattgatatgaatatgctgctcacagaagaaatagcagtgcctaaaaaaatgaaagattttattttggcaaggaaagaaataactgaccataaatttaagaattttaaaatggaagataaagagaagcacattttattttcccctataaactagaatagattctttaaaaagtaaagaatttcatactgtagatcatctgggacccagttagggaagatgaaaatccatacaaccttctggaaagtgactcaaggatgcagaacaagagatataagaacccatatcctttgatttcaatactttgtttcttgggcctatcctgtaaaaatagacacccaaactcgtttttgagaacatccctatgatattttttctgttagtacaaaactatatatccagtactgttacatatcggatattcttgttgttgttgttcagtcacttaggcatgtctgacctgccatcccatggactgcagcacgtcaggtttccctgctcttcaccatctcctggagtttgctcaaactcatgtccattgagtcagtgatgccaaccaaccatcttgttttctgtcctctcccttctcctgcctttaatctttcccagcatcagggtcttttccaatgagttgcttttcccatcaggtggccaaagtattgaagcttcagcatcagtccttccaatgaatatctagggttgatttcctttaggattgattggtttgcaatccaagaggctcttgaagagttttctccaacatcacaatttgaaagcattttataaagaaatcatatgaggatatataaacaggaaaaaagtactagcacaatatttcatatcctttattaatgatagtgggattatgaacaacttgaatatttttaaatgtcttcattttcactggaaccaaaaatgcaatttttaaatgaagttatatcattttcatgaagtttgttatatccaagttcttactgattcctcccggtacttcaccatttcttacaagagctctgtcatatcttattaaagctttcagaatgatttatagataaaaaaattattcagtgcagttcagtcactcagtcgtgtccgactctttgccatcccatgaatcgcagcatgccaggcctccctgtccatcaccaactcccagagttcactcaaattcatgtccatcgagtaggtgatacgatccagccatctgctcctctg

SEQ ID NO: 48539 - DNA, 2927 bp, Bovine  19866880501946
  misc_feature (1)..(1): n is a, c, g, or t
ntggaaaattcaaacagcttttaatttttactcttgtagaaaacagaaccttagtaaagttatttaaatttgaacaaaaaaaattaagaagctagatttaaagaatgtatatagaactctgtatcaagcaagtagataatatattttcaacaaacaattttttataaaaatttttctcatagtaggtcaagaaggaagtctcaacatgtttctgagaatgggtacaatttgaaccttagtgtctaagcaagtaacagtaaattagatgttgatgaagatacacattttaaaatattttgtacaggaaaacatgtaaataagtcagggataaaaagtaacacaataaaaattttaaaatacattaaattgaataatattacattaaaaaatttttagaatgcaactaaaaatgttaaaaagaatagtacagctataaatacttttgaagaagagaaaaaagtgaaaaattaatgaacctagtatctatataaaaggttagtaaaagaacagaacaaacccaagggagcataaggaaagaagtattgaattactgatcaaagataaatgaacaaatagcattcacatgtggtttctagatagaaaagaactttgaaagcaattaagtcacagagtaaaagactgctgaattagaatatcttaacttctgtgcatgtgtgctcaattgctcagtcatgtccagctctttgcaaccccatagactgtagcccaccaggttccttgtccatggaattttccaggtaagaatactggagtaggttgccatttcctactcccagatcttaaacttctgtacctcaagacaaatcataatattaaactttcaacagcaaaataataaagtagctaaaatatatgattcatatatgaccaagaaataatataattatattaataaaaattttacttaagtgagaaaaaaataaaatctcaaatgaaatggatatagaatattaaaaactaattaatatagccattaataagataacaagtaattatatgaaaacattttcaaaaacatttgaagtaaaggaataaacaacaatgaaatatctcttttaattttttctcccaatcaggttacaggaataagaaactcaagagctatacatacaacttttgggggacaaactgaaaatatccattaaaaattacaatgttgatattttttcatatgtattgctttcttccaaaaaattaagagatgcagacaattacatagagctcccctggtggtacaatgagtggtaaagaatccacctacaatgcagaaactgcatgagtttcaatccctgggttaggaatatcccctggagaaggaaatggcaacccactccattattcttgcagaaattccatggacagagaagcctagcaggctatagtccatgggtcacaaaagaactggacacaacttagtgactaaacaacagacaattctgtgtacacttgtaaacagaaatgtatactctatgttgcaaaactcactctaataaataaaaaaatgttaaaatctaaaatgtcaggtatgagatttattaattacattataaactatctatgaagtagaatgttaataactcaaatgctcaatgacatgaacattcatgtatattatttaatgaaaaaggtaggatataagcataacactaattatgtacctggaaggaatttaaaccaaaatattaatggtagatcttagagaattgaaattatagatttttctcttttgtatttctatatttttctgtattgagtatacatgaatgaaaaaatacagaagaaaataaggtgaaattagttgctgttctctaagggaaacaaattcatattatattcaaatttattattttggtatattaagagtagtcaaataatcatacttaatcccttagaagttgcctattactgctattaaaccagcttaatcatatttgtgtttcattttcatcctaggactacatgtattttgaactctggtcataagagtcagcctgaaaaatcataccagacattactggcattaagttttgccagtcctcagcaaaattaaacaacttttacttagaatatataataaagttttatttcactaaaattatttgtatgattttttttacataataggacacacagcatttaattttctacataatgaaccacaccaaaaatttaggaactataaacaaatggaatctaatcaaacttataagcttttgtacagtaaacaaaacccattaacaaaacaaaaggacaacctacaggctggaagaaatatttgcaaatgatacaatcaacaaggacttaatttccaaaatatacaaatagctcatacaactcaataacaaaaatagcaaacaaccaagtcaaaaaatgggcagaaggcttaagggacatttctccaaaggagacatacagatggccaatagacaaatgaaaaaatgcttagtatcattaattaacagagaaatgcaagtcaaaattacaatgatgtatcatctcacacaagtcagaattgccatcatcaaatgacaaatagggtgtggagaaaagggaaccctcttacattgttagtgggaatataaattagtgcagcatagcaaacagtatggaggctccttaaaaaactaaaaatagcattgccatatgatcctgcaaagccactcctgggcacatatttagagaacactctgaattcataaagatccatgcaccccaatgttaaagcagcactgtttacaatagccaagacatggaaacaacctaaatgtccaattacagatgaatggataaacaagatgtgccacatatatacaatagaatactattcagccataaaaagaatggaataatgccatttgcagcaatatacagaacatagagaaacatactaagtaagctagatagag

SEQ ID NO: 48540 - DNA, 1668 bp, Bovine  19866880526887
  misc_feature (1)..(1): n is a, c, g, or t
ntaatgtctctgctttttaatacactgtataggttggtcataactttccttccaaggagtaagcgtcttttaatttcatggctgcagtcatcatctgcagtgattttggagcccagaaaaataaagtctgtcactgtttccattgtttccccatctattttccatgaagtgatgggaccagatgccatgatcttcgttttctgaatgttgagttttaagccaactttttcactctcctttttcactttcgtcaagaggctctttagttctttgctttctgccataagagtggtgtcatctgcatatctgacaaaggtatgtatagttaaaaatatgatttttccagtagtcatgtacagatgtgagagttgtaccataatgaaggctgagcgttgaagaactgatgctttcaaattgtgatgctagagaagactcttgagagtccgttggactgcaaggagatcaaaccagtcaatcctaaaggaaatcagtcctgaatattcactggaatgactgatgctgtagctgaagctctagcgctttggccacctgatgtgaagagctgacttattggaaaagaccctgatgctgggaaagactgaaggcaaaagcagaggatgagatgtttagatagcatcaccaactcaatggacatggctttgagcaaactctggaagatagtgaaggacataggagcctggcatgctgcggttgatggggtcacaaagagttggacacaacttagtgactgaacaacaacaacatcctaacaatattagttcaaatagaaacaaaataataaataaggtaacattgacacattgttatgaaaataactgtattttctttaaaaacccagaagagtggcaatattttaacattttttggtaaaactccttaatgtctgacagtagaaaataggtaggttttcacattcacttttgaattcattgtgttacaatttgttgttttggttgaaaaatgaaaaaaaaaaaaaattcagccttgccctaatatgcagttagaaaagggaaggggatttttataaccttttcagatagtatggatatactccttgaatttcacaccaaaatttgtgagcagtagtttcttagataagtttcttaaagattagttgcactgtgaagtctggaaccatatcaatgaaattttgtactctgtttcattgaaatccattggtctatcttgcactttgaatggaactttcagccagacataattttgtaacattgtactttggccatgtagaaaagaactggcttgctgatttaagcacatcttccaaattttgacgtatgtatagtatataatatcaaaaacaccaccaagctcatcagaaaagtcttgcagtattaggaagctgctcagctcacagcagaaagtcctaattgacaaggttttcctaaaaattcagattttagcttgaaaggtttgaattttatcattgtttacaatactatcagtaactatcattgaaacgacagactcattcttgttcattttttgagaaagtgctcaccaaagacctggggcttcccaggtggcgctagtggtaaagaaacctgcctgccaatgcaggaaacataagagatgcaggtttgacccctcagtcaggaagatcccctggaggaggtaatagcaacctgt

SEQ ID NO: 48541 - DNA, 1033 bp, Bovine  19866880776844
  misc_feature (1)..(1): n is a, c, g, or t
nttgcattcaattttgcaaacagattctcagactattttcaataaagattcattttctacctttcattatttaataagcaatagtgggtttgccaagaatttcctttacacttggaaagaaatcaactttggaaaaagtttagcagttgtcactaatgaaataaaattgaattaactcaatgagattgaatgtattcaatgaaaatagggctaagcaatagcaccagtggtttccttacagaattaatgtgattttgaaaatatgttccactatttattttcttaaatcctcaaacaccaaattccactgaaaaactggccttctcactttttcagagcaaatagaccttggactagagaacatactccaagttttaggaatgccaaagctatgtatttgttcatagtttcatctcatgtcattttactaaaacagtcttccagaaatacggcatgcagtacccatcaggcagtaggtacaaatagcttactatattgtcattataccagagaacaacagggtattttttcgattatggttcagttcagttcagtccctcagtcgtgtccgactctttgcaaccccatggactgcagcagaccaggcctccctgtccatcatcaactcctggagcctactcaaactcatgtccattgagtaggtgatgccattcaaccatgtcatccccttctcctctcgtcttcaaattttcccagcatcaggatcttttcaaatgagtcagctcttcgcatcaggtggccaaactattggagtttcggcttcagcatcagtacttccaatgaatattcaggactgatttcctttaggatagaccagttggatctcattgcagtccaagggaatctccaagagtcttctccaacaccacacttcaaaagcatcagttctttggtgctcggctttctttagtccaaatctcacatccatccatgaccactggaaaaaccatagtcttgactagatggacctttgctggcaaaataatgtctctgctttttaatatgtgtctag

SEQ ID NO: 48542 - DNA, 743 bp, Bovine  19866881073732
  misc_feature (1)..(1): n is a, c, g, or t
natttcatatttcattttagatcaaagacgtcaattcctttctgccaaagacaacctgcaacatatctataattgaaaaagtttgatttatttcttgttgcatttacatgagaatgcttattatggggaattctattataggatttgtgttttggctgtgttattttggagcaggactaaggaagcagggctttggatgttgtcatcaaacagacattagtctatgattgggtacttctttcagtctcatctgtaaagaaagcagactggagctagaatgaagtcgtagttgattttttaaaaagagcagcaatcactcatactagacaggagagaaggaagtttggtattgtgtagattacatgatgaccttaagttgtatcactttatcatacactcaagagtgactttatgttgctgttctgtgaaatggtatatgttcaataagagaacaacacagtttagctgtaagcatcagaccaagatatcaggaacctctttccctttccccagtgatttatttagataagcacttagaaggcaacttaattaaatctatagattacataaaattgcaaaaagataatcacaattaaaaagaaaaacaaaggctatgtgaactctagagataaactgtatgttagagatcataaaataagaattagtcttttataaatgagaagacaaattctaaagcaattaatgacttatccaagtgtaagggcaaacaaattaaagacaag

SEQ ID NO: 48543 - DNA, 1306 bp, Bovine  19866881096469
  misc_feature (1)..(1): n is a, c, g, or t
ngatggtgaccgcagcctgaaattaagacacttgcactttggaagaaaggctgtgagaaaactagatagcatattaaaaagcagagacatcactctctggaaaaaggtcggtgtagtcaaagctatggtttttccagtagtcatgttctgatgtgagggttggattacaaagaaggccaagatgcttttgaattgtggtgctggaggagactcttgagagtccattggacagcaaggagatcaaaccagtcaattctaaaggaaatgaaccctgaatattcattggaaggactgatgctgaaagtgaagctccaatactttgaccaactgatgcgaagagccgacctattggaaaagactctgatattggggaagattgagtgtggcaggagaagggggcaaaagaggatgagatagtttgatggtatcactaactaaatggacatgagtttgagaatactctgggagagagtgaaggacagggcagcctggcattctgcagtccatgaggttgcaaaaagtctgatatgacttagtgactgaacaacaataaatcacttaatgattgaacaacaataaatcacctgttaagctgagagccttgctcacaaatagacgtctggttgagagagattttgaggggaaaatatgaagctttaaagaaacacacagatgtaaaacaaaatattgtatatttggatatttttctgaaatttcattcaagtaatagtattctatggcttcatttttcaaactgtagcctattagtgtgagagcagtttgaagatagtcttagaatctggtattaggatgaaaatccaggctgtgtacttgtgctgtttcttataattgtatatttgtgtacttgtactgagataaaacccggttctttagaagagtgttactgaattataatgatgtttttgcatctcctgcctctctcagttaacaataatttttagaatttagggatataacacaataacaagctctatgtatgtaacctcattgtctttgttggacaactactaattgtttcctatctgtaatggtcaaaatggacataattcaaaattttacatttttctattttacattttattttgcaaaattttctatttctattttatatttttctgtaaataagtgtatataaaaaaagttcaaggagaagctatattcattaaaaagaaaaggaagacaatataactttagacaatgaggaatttgacatcttgaaggtaacatatggatgttaactttcctttttttttggatgttatttataatcagtttaggatctcaa

SEQ ID NO: 48544 - DNA, 1439 bp, Bovine  19866881168885
  misc_feature (1)..(1): n is a, c, g, or t
ntgctgcaactactggagactgaatgctatagagtccatgcttagcaagatgagaacctgtgcatgacaactagagagtagccccagctcgccacaactagagaaaatgtcgtgcaacaatgaagacctagtgtaaggcccaaataaataaataaaagagaagaccagatgaggatgcattaaggaggcagcctttctttcctgggaaaaaccaaacctactaacactttgatgttgaacttacagtctccagaacagtgtggaaattaatttctgttggttcagccacccaatctatggtattttcttatggcagccctagcataatattatacgtataatcagctttgtagcattgtatttatctgacttggttttcaaagtttttattagtttaaagctatttttaaaattcagtaagatgatctgagttgaacccaaaagtctagaggatttcaagcatggctgcactctagtcatttatcactgaacctgagtctcaaggtgaaaggttaataaactcctccaccatttcccactgccaagctttgaaccttgaaaatggtgatgaaataccagaagctagttctagctttctaagaataagttcggaaactttgtaagagtgctgtagatcttggctttgttataataatgtacattatctcgctgggtggaatcctgttgaggacatctgcacctgaattagatacacacaaataagttgtgataaactgatattcttaggggcttgataggatctgtctctctgccatatgatactaagttggctaaagtcttttactgttcatcagtgtgctaatgtgattacttttagagcagacagatgcttggatctaggattttcagaaatgcttatttggcatcaaagagattataaatctatgtatgtgattaaagtaaagacaccggcagactgatatatagacttgtgatttggccattcacagcaatgtctaaggagttgcctctaagctgccaaaagagctattcaatgtacttgtgtaaatttaaagatgacaatttagtgaaacatatcagttatgctagttgtgacataaagaacaagagaattttggtaagtttgatggttgttttatattttaattttacatttttgtcatttttttttagctattatgtatttttcattacctgatcatgatttgagcttagatttgatggaaattgtcaaagacgactgcagcaaagttatggagacataactttttagcatttttaagcagatttgtacattttggaataaataaaaagtggcataaataaaaaatagttagcactgttttattaataataagagctgagtgctatgtgctaaattctacattaaatcaaccacttgtaaaagaatgaaactagaacactttctaacaccatatacaaaaataaactcaaaa

SEQ ID NO: 48545 - DNA, 2079 bp, Bovine  19866881257727
  misc_feature (1)..(1): n is a, c, g, or t
ncactcttttcagagagaataatgggtggagtcggaaacccccagagtagggaattagtttaacagacagaattggaaagcaaaataactgacctcataaaactgcagctaaagatgggtcctgagccatggttcagggaaagtggtcagccctaaatttatgatagaaacatatagtttactgttaagaatatagccttcaaatgtagcaaatatgagtagagcctaaaatatcaaataaataccttgaaaaaatttaagtacttgggaggcagtactgttttttgcacacatggaaagaagcatgaaacatatagttcagaacatgagaggtgttaaaacaacttcatagtaactgattaaagctgtaaaactagtataaactgagtatataggagtcactataattaaactgtcaaaaggaaactttaaatgaattaataatatgacttgtactattatttccaagagaattggggggtgggtgggcggagctagcactatcatccacttaaatagattttatttaagaatttaatatataatagtttaacaaattactttccattgtactgtggaaaactcgctgttttttccaacactaagaaagtagttaagaataacctagtttggcaaagaaaaaatcttaatgagttacaaggaaagaaattacaaaggaaaggcaaaataatgaaaagacaagaatatgaatgccaccgagtcccaagataatttggcctattgtcaaaatcagaccaaaaatatttatatattttaaaccactgtcttaatttaattaagacaggaaagaaagggagagaaggagagaggaaggtgggaggaaaagggaagagagagaaagagaaaaagagatagatggacaaagacaggaaggcagagaaggaaggaaggaaggaaagaagaaagggaggaaaggagaagaggaaagggataaaactacaatctttggtttaaaaaactaaaaaaacaaacatgtttgttcacttggaacatctgagtgaagtgggtaagctaggttgaagggtcattgcctctgtcaggacactactcttccattaagcatggcagaaagataattgctaagtgaagttgctcattaccttccacagaactgatttcgctgacttcataaaagtatataaaggcattaacagaaatggtccctagaaacatctttaaataagcatagctccctttagagctcaacaaaatcctagctttatccctcagtgatgacacagattagatgcacattatctcattcattcccaaatccctatcttacaaagagcattcattttttaatattcttccttatttgatgttatacagcctgaaactcatatttttaataggaagaaattgaggtttgaagagaatacatcatttgaccaactcacatagtgactgacctgggttgtgcccatgtgactgtcaactatatgcattttccataaacagacaaatttcacactccaaatatcaggccaaatatatagtttctatcaaatggatggtgattaccaataaaagaataaaagcatagatgttgttctcctgtgaagataaagtaaatatatagggaagtcgtcaagattctgtaaatgtttgaatctagatttgcagtttgaccatatctgtctgataaactggtggtttataacctcactttcttgattctaagtgtctctttatgtgagtttatatgcatagaataatggggcttgtcaagagtgaggttatcatggaaggggagcttttttgggttttgtattttctttcatttgtttttaacatttgccttagtttttgttttgcaccagccaaatgagtcaatgagtcagggatgagaggaacaagataatgacaagagagccttctgtagaccagtcccatggattcaatattgagcaccaggatagatgccagtcttttaaaagaaattgacaaagcttggtccaattgagacaatgagacagattgaggagcaagtgaaacctactttggacaaagtcagttgcagatttaggtagagtgttcttttcagtttcagcaagg

SEQ ID NO: 48546 - DNA, 1568 bp, Bovine  19866881263758
  misc_feature (1)..(1): n is a, c, g, or t
nacttggagctggaggtcctgggatagttaggttgaggtgcagcttgtataaatgagcatcctagctctagataatgaggtggaggagagtgtcagaaggcagggaccatgtcagttgccagaaagttgcagcactaaatggagaaatggacagtgtgtagtcttggacttagggtgttttgttctctgagaaggttctgagcacgcttgatttccaggtgacagtaggcactcatatgtattgttatatttgttttgtgctataagaagataactgtcaagcaaggatattttatgtgaaaagttaattggttgttttatccatctgagataccaccaacatgtaccaagctttcaaatatagacattcttattatgtttaattctcatatacatttttttttgcatttccctgttcaagcatattattatcaacagtcaataataaattggaagagtttgcctaaggagaaattttcccatctttaatatgttctttaagtatagttatgcaaggtatgggcttccttggtggctcagatggtaaagaatctgcttgcaaggtaggtgaaccaggttcgatacctggcttagaaagattccacagagaaaggaatggcaacccactctggtattcttgcctggaggattccatggacagaggagcctaaagtcagagatgactgagtgactgacacaaattcaagatacatttaattaataatataatgtctctcatgacgactccttttgcccactggtttaggagaatttaccaaaataacatttactggttgggagaatttaccaaacagtatccctttgggcttgactaatcacatcaacatgaaataaccttgagcttttattaaattttccagggcaggcaaattccattagcacctgtcagagttcactggttagcatgggcagaaaggtcaaggactttttgacactataattcatttctcctctatctgatgttcttcaaacaacacactcccaactgtgctgcctgcaatagtagttattcattgctgcctgcaatgaataacacagcactgtaagattggaaaggaaataacaattcttgagtaacttctgtgagttaggtactctgttgagagattcacatatgctctccaggtaagctttccccaaaagttcatgatttaattatccccatttgctattgaccatcaatggctcagaacactattcagctctctgaaaaacctgaaaaacagtcgtacaatcagtaaaactcagagccttaactggaatccagatctttctgactagtagtctgtgagggtttccttcatggctcagatggtaaagaatcaaaaaatctgtccatgatgcaggagactggggtccgatccctggatcagggaagatcccctggagaagggaatggctacccactgtagtattcttgcctggagaatcccatggagagaagacactggagggcttcagcccatggggtcacaaaggtcgaacacaactgagtaactaacactaaaaagtaaatgaggcaaatccagggttagataacagataag

SEQ ID NO: 48547 - DNA, 746 bp, Bovine  19866881405295
  misc_feature (1)..(1): n is a, c, g, or t
nccaccatgaattaaattctatgataaaggcaatacatttgttactatttcagaagcctttgaaaatatatgaaaaaatagactccttgtattaatgaagcacatccatttctatcaagattttttcccttaatcactgtttacaaagaccttactttcaaaaccaataatctttcacaagaaaatgaaatataacaagtgagataaacaaggaagaaaataaagtaaaatctaagaacactaagaaaagttctcatgtatagaaccatcagagggtttgctcctgaatgtcatttaatattcattctgtggagcaagatcttaagaggagtcatactgaaagaccagagcactgggagaactattgtattaaagtaaaatagcctttagtgcttaggttttttctctattttacaaacttaatgtcacagaacacccagagtatcagtgcattttaaatctagtattttcactctaagttaaaaaaagaaaaaagatttgacaatgtccagtgctttctgaatttaaaagtaacagattaaaacccaaatattactaattgcatgttatatcattatccagactcaacacaatagtctactggaaatgctttttacagatgctacagctgttctcttgtaaccacttttccttagtctattcctcactggagtgttttcaagtgcaatattatacaaatacaatgataactagtgtcagtacaggaaaatataaactgccaaata

SEQ ID NO: 48548 - DNA, 1117 bp, Bovine  19866881501785
  misc_feature (1)..(1): n is a, c, g, or t
ncacaacattataaagcattatactccaatttaaacattaattaaatgatttttaaaatgacagatacaaaaactaataaaaaatgctgtagtcagtttcttatcattttaatctcttgaaggatatcaaaccagaactttgagaaatacaaaggacctcatagtatcacttcaattcatgacagcataatctcatgatacaaatgcattcacaaagaacctaggctaaatttacagaaggtcatatagacactaaatttccccagagagggtagaggataggggcttataactcagtctgcctagttctttttgtcacacagcatagttttttctatacaattctcaaaataacttggtatcaaaaattccccaaccagtaaaatactttacaagtactccatagtcagcaacgtgagcaactgattaactcactgatttgtttgaactattcaaagtggaactgcccagaagtaaataatgaaattgtttctgagagtcaaaatatgatattaaagcataaaatcttataactgaaacaacacttagctattctatttcttctgcttttatacaatcctgttcatgaagtagaggtacacatttctttcagtttaaataaaagtgtaaacagagaatttatattagttcatagagctctgggaaaagtagaaactgttcaaaccacaggaagggaagtgatctgacccagaaagaggtccaactgtcttgtaaaatgttaggtcagccaaaaattcaagagaaaaactgcctgcactgatttatttttaatctcctgggagaagtagcctctaggtaaacttaccaattaaaatgataacactcatggcagaaagcgaacaggaactaaaagtctcttgatgagggtaaaagagaatagtggaaatgctggcttaaaactcaacattcaaataaactgagatcacagcatccggtcccatcattttcacagtaaatggaagggaaaaaatggaagcagtggcggattttattttcttgggctccaaaatcactgcagatggtgactgcagccatgaaattaaaaaacaaaaacaaaaaacacttgctcttcagaagaaaagctatgacaaaccta

SEQ ID NO: 48549 - DNA, 1453 bp, Bovine  19866880418963
  misc_feature (1)..(1): n is a, c, g, or t
ntctttaagatccagttcggatgctccttcctaaagggatctcacctaatctctccttcctgtgcctcagtaaaaccgatgacaaccactaacagtgatgaagtgtgtgcaacagggcacgtcctgtgctaagcgtgccatatgtatcatctccccaacctcttgtaaaagtgggtgaggtcagtgtaaccatcacaatttccattttacaaatgaagatactgaatctccttgaggttgtgcaacgcccacactccccgttacctgggggtggagacctgtctgggtccccaggtctacctgccacatccccttactctcaggacccttcccaacttctaactgtgtcctgggtctctggagacacatctgatcattactacttgactccacgagtcttagaggcaggaagtgcttctacttccccttttattccccgtgcggtacctggcacagaacagacactcagtaagagtctgctgaaagagtgatcacatggggaacccattctgagctctgcttttgagaggcgagtcatatgctgtcggtcttcaccggttttcagcaggctctttctttatggaattgggtttcaggagaagtcatttgatgatggcatgtctgagtccacacatacaccaagagtctggtttatactcacacctgcagcgtcaagaggcaggaaggtcaggattttcagccaagaatccagagacttgggtgcagtcggcctgctggggtgaggagctgagagtgtcctctcaggcctggactcgcctctttttaaaagagcaggtgagcctccaggaactgagccgaggagccttgtcttctgagtaaggggccaggaggcggggaggtggggggtgaggagagaaaataacattcccctcgctttgggttctgggcagctgtgatcctgtgttaaaagctcccactttgccccaccattctttctggaaacctctagtttcagagcttgagaaaacaaagtaaaacaaagcaaaaataaaaaacaaaaacaaagcagggacttttgggggtcatgaggccagaatagtatttcatagtaggcaaaaatttttaatgacacctggcggatgaaaatagaacaaaggattcatttgaagactctagaagtgacattagcaagtggttagattcatggaatccaaatatctgtttcatcagtcatggccagatggagtattaacaatacctcgaattgatgaaattatttctttcttcccacttcaaaactttttgagtaacctcatatttatactcctgaaactactgtgatgtattctgtttcttgtttgagaaattacgggattgagatctgttgagactagattgatttcatccagggtagagacagaactaatttctagtttactcatccatccggttttttttttttttttcgaaaaacaaaaacaaaaaactttat

SEQ ID NO: 48550 - DNA, 2337 bp, Bovine  19866880537398
  misc_feature (1)..(1): n is a, c, g, or t
ncctgagcatgagcggggtggctggaccaggccagtggagttgggcttccgggtgcccccttccccacccacccctccagacacaacgaaagggccaggtggatcaggagactaggaagagtgaagtgcttctttctgaaaagaagaaagagaagcaggtttttaaagaacacaaagtgcgtgctaaggaggtgatgggtccctttactctaaagagcttggaagtgatgggtccctttactctaaacagcatggaaagcccactgggctccaggaggctctcaggatagagggagatgaggaaggtgggcagagctgtgaactgcacaacggctggctggttggggcaggccccgcacaaaccctgatcccagcacccacttttccctttgaggcttattttgccttcagccttgtgccaggaaacaaacacttttggagggtgctgcactacaaaggcttgtggactcttagttccccaaacaaggactcaacctgggtccgggcagtaaaagcaccaagttctaacccctgaccctcaggaacgtccccaagaaacatttgaaacaggagcgataacgacaagagctcatatttacagctctctcacaggcactacgtgaaaacgttgtgttggctgtgttaatcctcaaaatcgggtccaccttgttctcacccccttctcgtacccagtaaactgaggctcacggagatgaatcagttatctcatggaatacaaccgtgggtgtgggggtgccagatggcagccaagctggctccatgcagggcctgcattgttgatgattctcgtaaactgctgttaataaagaagtttagtttctccttttgaaagtctgctctgagtaggccccactgcccctgtggttgttgataaatgaaaagcctgttccgaccgcatccagccccagacgcccagaggccgcctgccgtcttctcgaggggctggcttttcaggcccgcagaatccctgaagtttaaattctctaaatcctgttctcccccctcctacccgccaaacagcagctcggggtgtctttcctgcatttgactgggcttcaaagaaagcactcgtcaagccacgtctgccccagccgcccacaaagcaaggaaattctgagcaccttcaggcatgagtcaacaccaccatgttcaggaatctctgcccacagaatcacccactcttctgtttgggcccaaaatagatacctccttcagaagcctccctgctttctgtagcctcagcaataagaaaacaaaggcgagggtaggtgtgcatccaaggcatgatggagggagttcactctgctgtgaagttctctgcagtgaaaacactgccgctgagctgggcacgcaggacaggtgtggcagggggaaggggtacgcaggagggcggctggggacggtcgttcctttgttcattcattcccttggcgaacatttattaagcaaatactatgtgtcagatacagggtcgggagatgggtgcaacccaaccctgggtctccaggatcgggagatgggtgcaacccaaccctgggtctccaggaacccaccatccagcaggagaaaaatatatcgcacagacaatgccaaccgagctgagactcagaatgcaaatacaaagaaagagtggatggccacacagacaggcatttgttcctatgcaagtccctggacattgtcactcaagaactgcctcactgtcctaatacctgggacagaaacaagggctgaaggcattgctctgtcattactaaagctattgaaatcatacaccgtggattttgaatttagaacagcacagtcagaaaatgtgcagaagttgtcctttgctcaagaaactccctgaccaagaaaataggaatatttttggtgggagcggttactttccttaaaggagaaacggatggctctcacagcccacgggtgttatagaaataccgttaacatgcggagctgacagatggcacctcctcaccagtgtgtgagccactctccaatttcaaacacccaggaaggaactgcctctccaagaaagggatgaggggaacccagtcagtctggttatgctaggtacttaaaaggaacagtgtttttttaaactatatatgtgtgtatatatacatataaatatatatacacatatatatatatattggattcataaaaaaaatttgtgtttttctgtaacatctttcagaaaaacctgaatgacttttttggccaacttgatgtatacaggttgtatacacatgctatatgtattgtatacacatacatatatgtactatggatatatatgtgtatgtgtgtgtt

SEQ ID NO: 48551 - DNA, 721 bp, Bovine  19866880563350
  misc_feature (1)..(1): n is a, c, g, or t
ncaatatggtcacaaattcagtaaagacttttaaaatggtctacataaaaagaaaaaaaaaacttaaaaagaatcctctgggtttcctgtccttgccttaccatgggtgccctccccatggaatcatcaggctgtgactcaacgctcagccatatctctttttgttttcctcttagaacagtgggtcaggtcatcatcattctgagcccatccatgcctttcccaatttgcaagccccaaatcctgctcattctaagcagaaagccctccagcgtgattcatcagctgcctctttgtggtgttacaggaagtgaaaatctctagcccggattacaaagattgcaactccgcagaagctatggacgacttcatgaagagaattaactgctatgaggccagttaccagcccctcgaccctgataaatgtgacaggtaattcctgagcagtgactgaaccacctgcttcagggctgtgaatattattcctgatgaataatattcccatgaagcgtttgctcatggatacttttatacactctttttaaatgtctcaaaaaaaaaaaaaaatccttggtgatatattcggtataactatcgtaggccccgtgtgctgctgctgtgtgcaaagtgagtttctgagccctgtctctcccgtctctctccgtcctttgctctttccccttattttcctttcaatcctcttgcttttctctctcctatc

SEQ ID NO: 48552 - DNA, 1852 bp, Bovine  19866880691621
  misc_feature (1)..(1): n is a, c, g, or t
ngttttctgaatgttgagtctttaagtccactttttcactctcctctttcactttcatcaagaagcttttgagttcctcttcactttctgccttaagagtggtgtcatctgcaaatagaaggggggaaagtggaagctgtgatagattttatttttgcctgctccaaaatcgctatggacagtgactccttggagggaaagctatgatagacctagacagtgtattaaaaatcaaagagatggcctccagaggggtcaggccattgagggctgacaatgattgcccagcccagcaacaatgcagcatggtgggccttgtgcacatctgtggtgccagaagcatctgccaggtgtgcttgcattgaactgagaagatgtccctgtacggcaacccgggagtggcgaccagtgactcaaaaacagaaggctggtccaaatacttcaaacttctgcattctcagcaccaggtgaagaaggtagctctcactcaagccaagagccagaggacaaaacaaagtgcaatccttcctctagcaattggcctgaatcgaagtggcttttcatgagcaacaaataggggaccccccaccacacatgaccacgggcatcaacgaccgtttccagccagttttctgcaggataagtgtttatcccctcagctgatgtataggatcccatgtttcctaatgattataagaaagtagtgaagcaccaaagagaagagcaacagagacagcaagaactggaaagacagaaggaaacagaagagagagaaaaaaggcataaatagacatgaagctagtggattttccaggtgcaccagatccagattctgttgaagatgtagattatgagtgagagaggaggaaaagaataagggcggagccaccatcacaccccgccacgtctcttgtggagaaggacagagttaccccaagacgtcccttatgaagaggattcgccacctcgctcacagtcttccaaagtttctatcccttccacagtgtacaaggaataggacagactgcgatcccagacaaccagcattggcaactctttcctcgccaacatggggggcagggtagtacataaatttatgcagaaataaggcttctgggaaggccagggtatcaggaagcaagagcagggtctgagcacagcaccatcagtggagaagaccaccaagtggggaggcaatcatcgtgggccaagccaccgagatagaggcaaccaagaagttgaattgaaatccactagctaaaatacttgtgccctaccaaagtgatcctagtcaggaacagggttggtgcaggagaggtggatgaagatttggaagttgaaaccaaggaagagtgtgaaaaatatggcaaagttggaaaatgtgtgatatttgaaatttgtgatggccctgttgatgaagcagtgtgaatatacttagaattcgacagggttgaggcagcaattaaaactgttgttgatctgaatgggaaaagttttggtggccaggtagtcaaagcatgtttaagaaagaagaaagaaagtcgctcagtcgtgtccaactctttgcgaccctatggactgtatcctaccaggctcttccatccatgggattttccaggtaagaatactggagtgggttgccatttccctatccaggggatcttccccacccagggactgaacccaggtctcccacagtgtaattttacatgtaaaacatgtaaaaagcatgtttaatttgcataaattcagggtcttgtatttggcagaacaagtttgattttaaaaactagaggctgagtcatctccagtgatccttatgataagtagtagtgaccatgctttatcacaa

SEQ ID NO: 48553 - DNA, 1461 bp, Bovine  19866880784566
  misc_feature (1)..(1): n is a, c, g, or t
ngggagcttcgtgaggctgctcttcctcacttagccccctccaggcggtggaggtgggaaaatgctctctacagcacggctgctctttcagaagcacttttcagcgccttccaggtgcctagggtggtcgtctcagtgctgctgtgtgatcctttgacccgatggtgaccactatgctctgggaggccctctctactgtctactctttggggagcctcctcaggtccggagctgctcagtgaccagggcaacacgggaaggacccccaggaggcaggcacataggaccttgccctgctctgtagcggcctcagggacacggaaagactgagctgagaagatataccacattgtggcttctttctgaagctgagaatgctgtattattaaaaaaaaaaaaaacttggacctgcaatcaaagtaataaaaactgtaggaaaaatctggcaccttacctttgttctgacaaagaaggacttgtcttcagtctccatgaggtagaagaggaagttgctggaacacgcctccctcaccactcgctccagcttgacgcgcaggctggagcacaggtcggccaccaggtcctcataggaggtgggctgtgggccgcagacacagagctcgcggggcatggccgctcccaaagccccaggcgggttctgtgtcctggaccaccttggcggctgctcagcatcaccttgttgaactcggcatactcgctgagaatgacagcgatgtcattgcgcgagtctttcaaatgtactgttgtatttcagcttgtggaggtggaaggaaggcggtctgattctggtctgagtttgtgaggtgatttctaccatggccacacctcttcttccaggaggaggagcggtccacatggttgggcatctgatgcacgactgtcaccacaagaggactcctgcttcgggaggcgggaggcagccccaggcatgcgggcattggggtcccaggaaaagccccggtggtgacctgggatgggggctcctttggaaaggcactggggaagagggcagaatgctgagcggctcccatcttcacaatttgtttcagtttgtgcgcaaaacgcaggtgctccaagtctaaagtgttctgggtgaggtcgtcggttctctgccaggtgtccatccaggagctgagcaagccacacggggccatgcccctggggcgccgcctcaagccgtgcagggttcttggggtgtctctgagctctctggtcacggtgaagttggcgtagctcctggggaccccgcagacatctcggatttggacgtaacagggcacacacgtagcttccttcttcagtccacccagccaacttctgggaggaatgctggtctccagccctggagcctggctcgcgtagccccagtcgtggtgatcactggtgttcaggctcaggaaagagtcgtgactgtctttggatgcaccttctcttttccca

SEQ ID NO: 48554 - DNA, 3411 bp, Bovine  19866880900451
  misc_feature (1)..(1): n is a, c, g, or t
nacctggctgccttggagctgactcatccccaatgtcagatgccttcatttaaaggctgttcgttaagtgaagtatttaagagtgaaatgatagaaggtctggcatttgctgtaaaatatttcagtatgggcacagatgaaacctgttgttagaccaagatccattatgcaattctccccttttgtgtatgcttaatttttcataacatgaaggtgtttttcaaaagttactctctatattaaactaaaagtttctgtaggattttagtatctaattcttttgttttaattttggattttttttgtttgtttaatgatagtatgttatgttctcagtgatgttcagatatttgacctttcttgtaccatttattttttaattttccattactcattagtgtccttcatgttttaacaatgagaaacaacatttactttcagcgttccatgtttcttgtatatactgtacaaatatctgacttttgagagatattaacattttgtacaaacttggtgaaatagttatacctaaacacatgtttagtataacttgttcttgttttcacaggagccaagcaataaaagagtacgacctctagctcgggtcacatccttggcaaatctaatctctcctgtaagaaatggagccgtcaggcgctttggtcaaacaatacaggtaggagcaagtaatgcagtgaggcaatgttttatagaagcctaaaatttgcattttctttgagctgtacagacaagtttgtactgttatacttaaatataattttcctcttttggaatatgctgttaaggaatattattgtcaaaacaatatttatataacctcattatattagtttacatcttagagcaaagcaagaacttggatagtttttattcccagaaagtaattttgactgacaaatattttataatactgtcagattgaagctggcataaatgacttttatgcataaagaaactgccagaaccttttaatttgtccctttttttttttttttgaggaaaaaataaatagtttctgtatcctccaaagctttttcttattcacttttctttcttttcttttaagtcatttacccttcgtggtgacagcagatccccagcttcagcccaaaagttttccagcaggtcgacagtcccagtgcctgccaagaggagaagcagcgccctgtggtcagagacgttagacggtagcatgaagcagtctctaacctccagggagatcagacgtcaagaggtgtgcaccccacagcaagactttatgtgcactagcataaaatgaaacatagactctgattcttaaacatgtgttttgtcggaagaatagcaaactaacacctccggcaagataaacttgcatttttgcatttgagtagccgttttcagcacttgcagaaggtggtggtcatttggtttaacaccctgatggggtagaatatgaaacgtatggcatcctcttattagaggttccattctgaattatagtgttcagactgagtcactttgaaaagcgctgttcaaacataagttaaataatggtaactatccattgcatgtaattttcctttctgaaaggaaggagtgacctgtgatgtttgctggatttttttaggcaatctatgaaatgtcccgaggggaacaggacttaattgaggacctaaaacttgcaagaaaggtcagtaaagaactttctctcctgtgccataggttttaagaattatattccacaaattctaaaggatgttacctttagaagttgaaaagtagagaatatctactggtgtatattaattttagatgaggtttattagactcatttcttcaaatatgaatatcaggaagagtttttcaagatgaacatgtactttaatttctgttatgtataaaatagtagtcatgctggtttttacatagtcaggcttgattcacatgcggacctctctttgtgttttatttgcttgatctgtgtgtgatgtacttctctcctccaacaggcctaccacgaccccatgttaaagctgtctattatgtcagaagaggagctcacacatatatttggtgatttggatgcttacatacctctgcatgaaggtaagttgtgctccctaattttcgtaagattctgaacagcaacaacaagtaattttaaatctaaacttctaatttagttcaggatatttttgaaatttttattgacatagagttgatttacaacattagtttcaggtgtacagcatagtgattactatttgtaaatattatactccgtttaaagctacggctacattccctgtgctgtgcagtatgtctttgtagcttatttgtatcatacatagtagtttgtacctcttaaccccctaccactgtcttgctcctccctgaattatttttaaataaacttgttcttggaatttctgctttcttacacttcagatttgttggagagaataggagaagccaccaagcctggcgggacagtggagcatgttggccagattctcgtgaactgggtatgtagcaggtttatgcagacagggcaggcttgtcacttgtgatcagaatcacactgatttgatccagttagtggattctgaaatcagataaatggggcacttaaactgaacaaatgtacatagaagttacagtcactgtttaagaaaaacatatcatgaatgacactgtttcatttgttttaagaatatgttcctccttggacagaattcccacattacatctgttaattacctgtcttactctctcagttaacatctgagtgcctgccgatgccaggccctgttctaggaggaatggctggggttctgtgatgaaagacagcctttgcatgtacagtcaagtgagagaacagtcacccattatcacctgcaggagattcttcacagcttgttaaaaactttcacgaatagctctaagtttcatggacggaggagcctggtatgctacagtccacggggtcgcaaagagttggacatgactaagcgacttcactttcactttcatgtcttagaaacagacatgttgcagtctcactaatggactattctttgatttctcttactgctctttagttgccgggcttgaatgcctacaaaggctactgcagtaaccagctggcagccaaggctcttctggatcagaagaaacaggacccaagagtccaggacttcctccagcggtgtctggagtctcccttcagccgaaaactggatctctggagcttcctcgatattcctcgaagccgccttgtcaaataccctttactgttgaaagagattcttagacatactcccaaagaccacccggatgttcagctcctggagaaggctgtaagtaacccaagaagtggttcctgtgctttgccagtttgcatgttag

SEQ ID NO: 48555 - DNA, 1062 bp, Bovine  19866880949992
  misc_feature (1)..(1): n is a, c, g, or t
ntttttttttctgtagcagagctgtcatgaaagagagaggtggagaattcatgttgaaaagagaggctagggcagattataaaggaccctgagtaccaggccaaggaacctgggcttaatctcaggaacattaaggacattcctaaggttctaagttttggataaaagaagagaaaaaattacaaggttctttaggaagattaagccgaatctaatgagtgagaattgttgaggagtgagagacacatctgagcccagggaagcccatgtgggaagctgggtaaaggtctagacaaaaaaatgatacaggtctacgcaccctccgaatacccccagcccctgagcccagacgccacccagaacctgctccaggcaactattggtaattgatcatcactggcttgagagagaaaacacgttattatccatccccaaactagagccacagtggaagaggtgagggggcttttactgaactccatatagcaaacacatcctgctctcaaacagaaagggagaaaaggaacctcacttttggacaaccttggtggaatcctgctggaaaagtcctcataagcttcaaaatgacaacaaaatccctttttaaccattcgagatggaggacttggtttttggttcatgccaaccagctgtttactccctgtattttatgggtggggcaagccacagcttcttggataccagatgtgtgagtcggggagaggaatttgatgcatagtgggttttgttttttccatggtaccctttgactagtgagatctggtggaaattacgaactgcagaaattcaactcagcgtctcaataacaggatgcacctgtagatttcgtagaatttgcagcagaattctctcgacacgagtttgagagaaatgggactgttttcatagtaacaactggggcgaaatctgaggtactgttatgtccctctcagtgacagcaggtatcagccatggcagataccatctaccgtctaacaggtgtggtttgaagacctccacactgcagcctctcttgcattgattgatcagtttgggggatta

SEQ ID NO: 48556 - DNA, 1472 bp, Bovine  19866880979774
  misc_feature (1)..(1): n is a, c, g, or t
nagtactggagtggattgccattcccttcttcagggtatcttcctgacccagggatctcctgcgttgcaggcagatttttattgtctgagccactggggaagccaatttataaggtcatatacccaaaaatctctagtatttatgaatatatacattatttgatttagagtttatagatttaaaaatttttgtgattttaatagttttgttttcatttatattagaaaatcgaaattttgaagctctagttttagtgtttattacattacatgatattgttttgttttttagaccacatgaactagattttaagtatgtaatgaaagtgtcatctttgaaagagagactaccagaagctgcttttaaaaaacagaattacatggagcacaaaggtctgttcagatgtcatggtacactgcgtgtcctgagctttgttccagttgttttccactctctcatacacacacatgcgtgcacacacactttctctccctccttacttctgtttttcccttaagtgattcttaaaagggtcttttgtgaaagggatagagtaaccatgtgattcagttcctgggaggccagctcaaagtgatgaatggtagtttcattcaatatggcagagactagctttaatatagaatactgagggaattaagcagagatacgcttacaaacagttggaaactcgtaatcattactttcaaggagaacagaggttttgtggttgtttttatttatttaccactgactctggaacaacacagatttgaattgcttaagtctacttataagcagttttttttcagtagtgcatattacagtaccacccagtccttggatgtggaatcataattacccagggtaatcatatattggaaatactgactgcacagggggttgagggagaggcattcaagggtcacctgtactttaaaatgaaataaagcagaaaacatgagaaggaaagttcttagtcatttagattaattcatggcaacattgatgtttttatttatatatatttatttgtcttgttaactttatattagtgtagtataaataaaagcattgtttttaaatactgtatacagtaactttttattaaggggttttataaccaagaacattgaatgatccatgttttttgaatagtattcctatttcttcttttaaaatataaaatgaataaaccggttgtaaaaaaaaaaaaaaaagcatcgtagtatttaaaaataagaaatgttctgtgtttctgatttttttccacagtctgttgccaagacatgtgcttcaatatgtatgaggtggagctctcaaacaaacggggggagaaagtagataaactaatagaatccattaaaagggaacagttggtaagagtcatccatttaacatataattattattttccctgaaattgagaacttgatacacagggactgtgggagaaacatatggagacgcacca

SEQ ID NO: 48557 - DNA, 1546 bp, Bovine  19866881074821
  misc_feature (1)..(1): n is a, c, g, or t
ncttgatattccagttatttattatatgtagccctaacaacgcaaagattatttgagcagtaagggacttgaaaatttctgatactaggggacaaaattgttctgcttcccataaatactaacatttcaagaatctttttccttaacttttcataaggttaaaaatcactgaagaatgtggtagaaggagaaggaaattgaatcttctttcttgcttttttatgtttaaggcaatcatcaaatgcttagaagatcgagaatttttcattttacttacgtcatcagccctaatgtacgaaacaggtaaggaccacttttttgaaaaaatgttttccaatatgtttactagtatcaaatcagcaacctgattttcttctgattctcattatgtgtaggttttagagaggagcagacaggtctacacgggttgcatttattccactcacctccaccagcagcaggtaagggcacaggcagtccatgacagctgtgggccacgtttcagtcctcatcttaaacccccagcagcacatgactctggcaactgtttccttctctgaaataactttccccctttactctgcctggtcagtccttcatttctgcaggcttatccttgcttgtctgttcccactcagtatccacctgcctattgacatctctttccacttaggtgtctcagatattcttcacattcagcgtgtccaaaactggattcatttgttcttgaagagcgatagccaggaagtagtttcatcaaagtctccccgtcagtaggacttaaggtcttcacagaagcacttgcctttatctggactgcttgtctccttccccaggaccaggaattgtctattaggggcaaaaagtattactcatctatttatctagtataaatagatatacagtagatcggtggtattagaatttcagagggtagttaggaaacaaagtccagaaaggctctggtcaggggagataatgaataaaactggagaataagcatggtctagcctctgacgcagagctgtcaggtgtaagcctgattatcactttaatgagtccattaccactcttccttcattgaggaacacagactagtcagtctgctgctgctgctgctgctgctgctatgtcgcttcagtcgtgtccgacactgtgcgaccccgtagacagcaccccaccaggctcccccatccctgggattctccaggcaagaacactggagtgggttgccatttccttctccaatgcaggaaagtgaaaagtgaaagtaaagtcgctcagtcgtgtccgactcttagagaccccatggactgcagcctaccaggcacctccgtccatgggattttccagtcagtctagttacatagtattaacttgagggttacttaggggtttactttgtttgagttcagttggttcccatcacaaggaaaaaaactttatttctttaattttgtatctatatggtatgatggttgttcactagacttactgaggtaactgtttaatgatgtatgtaagtcaaatcattatgctgtaaatt

SEQ ID NO: 48558 - DNA, 1127 bp, Bovine  19866881150108
  misc_feature (1)..(1): n is a, c, g, or t
nggaaattgtgcgtaccctctcttctctagtctcaaatataggaagtggttttaaccaggttttttttttttttctttctcaagttcagttgctgggaggtgtgggctggggttggtgagaaggattggggttcgtttatgaatccgttctttggcttacccctgaaaaagacagggagattcccactgccgttaaagcagggtgagcaagcccttcttggcagtggtctcaactagagtttcataatctgatgtcaccgtgaaactgaggtcccggactcgcagctccccggggagtcggcaggtgccactcaagatggaggggcgccaggtcatgccaagcagtcttggccctagatgggaatttcctaaagctgtctgaccacggagcccttgaagaagtccactgggtcttcgggtggggtctccaatattcagataattgaagaggaagcacagactgccccacgctcagagctcctgaatattctcccaagacttacaatcagtactagccgtaattctctcaccatgatgccctgggtcctgaatatgagttgtcattttataagatattttgccaccagctgtgtttttttcttgaaagatcattactaaaagtggattttggttttcaacgttggactttttcttgttttccagagagttgaatcttgctttcctgtttaatgatcagagctatcttctgattttcacagaatagttgactatgttttgccctctagaaattcatgtcatggtgtatttatattaaaataaaatttaaaaaatattagcaagtaagcaaaaacattgacaaaaggaagactatccaggcatgacaaagcagttcatagttccaatatgtgttattgataagctctaagaatattctgacattctctaagaaagacaattactgggacttccctggctaagacttcaccttccaatgcagagggtggaggaggttcaatcacatgtcccaggaccaaacacccaaaacatgaaacagaagcaacattgtaacaagttcaataaagactttaaaaaaagatgtgtgtgtcttagcagctaagtcctgtctgacccttggcaaccccaggactgtactctccaggctcctc

SEQ ID NO: 48559 - DNA, 1892 bp, Bovine  19866881217740
  misc_feature (1)..(1): n is a, c, g, or t
ntggtgtatgcattcccatggggtcgcaaagagtcggacacgacttgatcaactctgaacagcacccacttagaatagttctgtagcagcaaagtactacttgttgaaaatctcccctctccttcaactgtgttcttgctggtcacccaaatatatagtacttctttacctcaaattataaatgggtgggaaaaggcagtaaacaccatgagtttgggcaaaagcactgactttccagctgcagaggtcaaggaattagtgcgttgggcgctgctttgagggtaggaaattattttgccacatgcagtgggcggggatggggagggggcaggaaaatgctcaggactttgtgatctttctcacggcttgttaagtagagcagtggttttatttatttattttttcccgataaacattgtgctcagtacagtaaggaatagctgtgggtaatgctgtgtgttgtaatgtccactctcatctcatctgtggccaagcattgcagaagcagtgccttcctcagtggggcagtggctttacattggtgttgaaggagcctcagggggcagggagttgcaccctcctccccttggtcttctgtgtgtaatttatgtaatttatgcttcttcttcagatggtgtttggaaagaatgagggatttgcttaaaaggaaagtctgctgctggtctcaggaaacaaaggagctgagagggtcctgaaagtccataccccacctttttcttcgtgggttgttcttcctgtttgcagcgaggcacagggctttatgaaagtgtgtggcagaggattcatctggcagagagaaggggcaggggagaagggttggaggccaagcaggtgagacatgaggtgggggtttctgagctatgctgggagcagcaataagagagtgtaaaaaatgtggtggaaagattgtcagtttggattcaggggcaagagataaagacagataggtcagtctcaggtttcaagatagaaaattctgttttgaaaacttagaatagtgatgtctgccactgaggctcctgttccatgtgagtggctgtgcagtagggaatttccaaggaccctctcaaggttggacaagccagggatgcgcagcacggtttgcagaggccaggcctcggtggtgacggcagtgtgttctcattctttggtgggtgctgacgccatctgttctgttcttctcccagagtttccggttcggtgtagagatagcctatgtaggagctaccatcttggatgtctgcaagcgagtgagaaggaagacattggttggaggcaaccatcagagtaaggctgcaattcctcgtatttgttacacagattaccttccctcgttgcctggatcggccccagagtttgtgctctctccctcaaggtggcatccggggtgactcaaaggggcaggtggctcttctgtcccgcaccaacgccaatgtgtttgacgaggctgtccgggtcacagagggagaggtgcctgcccggattcacttgattggggtaggagtgcatgtctgtcctctgctctcactcggaaacctcacccacacacagagccgatgaaagtgcccctcgctcagactcatcctgcacacaggagttggggtaactgtcctgcgtctgcgctgggagacactccctccagctgttctgctccagcgagtcctgtaaagtaaggcccagcaagggccgcggaccttttcccctgctctctagaaaaaactccatgcccttcttgccctgtgtgcatacacaaaagctcaccgcatttatgctcttggtgcagtttgagaagtctgttccaaaaagccagctcatttcaaaatcccacctgtacatcctctttacattggcttgttaacaacagtaatgaa

SEQ ID NO: 48560 - DNA, 1055 bp, Bovine  19866881344651
  misc_feature (1)..(1): n is a, c, g, or t
ncctagagccagcatctacagtctttgagcaaagatgcagcctttcctatctgaaagcatcattttgctttggtataatttttaccacaacttctagaactttttaacatcctcaggtgcatttttgcttagttcacttcctaaagggccgacagggcacggtgatcaccaccctcagaagtgagtcttggctcaggcagtggtcagtggtcctgagcccagtgtaaacgagcagtccatcagccagccgtgagctgaccagtgtcagataccctcccagagtgggctgactgctggtttctggttccagtctgtgaagcttactgctgcttcctcaagctctatgtcaacatgcctgccaggaaaagttctcttccttcttcaggaaaaggcattcagctaagactgattcaaaactactgagttctgctgcttaaagtgctaaatcatgtttgactcattccagtacgccctcactacagaacagactgtaacaatcaaatgaaaataaaacaccaagtaggcatcacctaccagaagactgcaaaataacgctacttttacagaacagccagtaagaaaattaggatgaaagcagccagaaaaaagcaaaaagcagagaacccttacaggatagagatacagcagaaagaataactgatatactctgtatggctctgtgttgctataaaaacacagtaacggttgtatcagtataacaaggctctttccggaggagaagcaggcatgccaggatttctggagtcctgttcatttctgccaaagcctctcatcttcttttcctcctacaggcgttctctgtcctgaactatttgtaaagatgggcctcagaactttgtttccaccacccagagctggaaggcatcacgatgaggaattctctcattcaggatggcctgcccccgcccatacccccaggagccctgcccgaggggaagcccacctttctcggaggcgtcgcccacaatgatcttgccgccccgcttgctggtcttctccaccgacagcgctgtgctcaggccctgctcatgctt

SEQ ID NO: 48561 - DNA, 1131 bp, Bovine  19866881706176
  misc_feature (1)..(1): n is a, c, g, or t
ntggggttcacctaatgtttctcctcaaagtgaaaccagtgcgggcggtagtctccgcgcgtgcgttcgctgcggcccgcgggtcgcgtggtcagctcggaacctgagggtgtgggggaaggtcggggcgtctggggaagggtcctgacaggcagggtggaggaggatcgcggggcgggtccgggggagggtcgccaagcgttcccgcaggactcgagcccgtggccatgaccgcgctccgggttccgcggcggctgtgctggttggtgctggatgagaggagctgcacgcggctgggcgcgcgggctgcgcggggtctgccggagataccctcctgcacactttacgcgccacagccgctgggacatcttggcctatctgggacctggacatcgaagccgtccaccaggactacaagcgggctctctctgcacgaggctgcctccatgggacacccggactgcgtgcggtacctgctggcccggggggccgccgtcgactgcttggaaggccgactggtaagtggtgggccctgcagagagacccccaccctttcctgccgattgcagattcccacgcttggtcagcctccacaccatagcctctcaggcttcccctacagaacgtcattgctgtccttgtggggttaactgctccagccttctgtttcagactgcctcccatgatagagcagagagctgtaatgaacatgttcagatcccctggagaaggaaatggcaacccacttcagtattcttgcctggagaattccatggacagaggagcctggcaggctacagtgcatggggcctcagatttggacactactgagcgactatcactcattcactcactgcctatagcaagggtcccacgtgttctcgctaaatgattattgcacagatgacattgttctaattttctgttttgaaattcctagttatggcttatcagaaatttgcaaagacagccgggaagtcccatgcaccttttccctatcttgccccaaagttaatgtcttacaactagagtacagtcacaagaagaaactgacactgctatgacattgctactctcagggcccttactcccatttcacaggtacatagatgagcacaggtgtgtggggtc

SEQ ID NO: 48562 - DNA, 639 bp, Bovine  19866882018670
  misc_feature (1)..(1): n is a, c, g, or t
ncccacagacttctggtgggtttctcaacagaaaaaaattttttattaatttagtgtatcattttatttatttttctctttttttagtttcaaacccttttgttgaggactgactttcaatagaccgcagtgagggagctgctctgcgaggtatgaaaccctgacccagaagcacgttgtctacgaatggtttagcaccagcttccccaaaaacatgcggtgtgtgacgggcaagggggcagccaccattccagccacaccccatgtcccaggaggaagggctctgcacactggaccccggctccatcgtgtagctgggtggaccacaccgctacctgagggatgagggcctcaacagaaaagttctaaggcgaggagaaaatgggatgatatattcaaaatattgaaagaaagtgtcaaccagtaatgctgtacccagcacaacttcccttcaaaatgaaggaaagagaaagactttgccaaactaacaaatgcttgtataaggaaaatcaaccactaaccccactttacaagaaaggctaaaggcagttatttgagtggaagtgaaaggatgccatttaacattattaaagcataagaaggtagtgtggaattcactggtaatggtgaatatatagg

SEQ ID NO: 48563 - DNA, 1016 bp, Bovine  19866880485496
  misc_feature (1)..(1): n is a, c, g, or t
ngagttcacaatttcaccaggtaaccctcatatttagtcttttcttacggtacttagttttttttttttttttaacaatttttattggaggatgattgccttacaatattgttctggtttctgccttacgtcaacatgaatcagccacaggtatacatacggcccctgtctcttgaagctgcctcccatctctctccatcccacccctctgcttatctgtctttgggtccttggaggtgattcaaacagacttcattgccagtgaaccacattgttggtttacatttcccagaagtcatgtgtggtacatattatcttcaacccatatttaaaaatttacagtaaactagggacaattctaaaagaatccagcaaaataatggcactagatataggtcagtttcaagttacctaattatggtgtacaggactatattggactgtgtgcctctgcctcctagaatgatgaatttgctattaaggggaatgtcttagactgtatatattccctgaaatataatcctgtgattgggacactggggattgtatcatggggagtttcctggtatgcagaattcttacaagaaacactatatttgtagggttggccaacatgatgccttcttatttattatttagtattaccatgataaatagtaacatttatataatactttttatttaaaattattgcactaacattattttctactttgatttcccaaataatcctgtgaggtaactataatatgttcttgctatcctttttcttattattaggtataactacattttctctactttgtgaatgaagtcaatgttttgccaaaagtcacagttaacttgaactgaaatcagtgcctgaagttcaggaacagaatttctgattccacatcttgtactctcttcacctcttaatttaatatagtactttgggtggttcattgtttctttttttttccttacagattaaaaaaaattaattaattgtttggcagtgctggtcactggtgctg

SEQ ID NO: 48564 - DNA, 1198 bp, Bovine  19866880514254
  misc_feature (1)..(1): n is a, c, g, or t
ncggtttggggattatcaaggcccacagtccttgtggcaggcagcgtggtgaggagcaggccactccccccgatattggtggtctgggcactgtcttatcactgcacaagtgcagggcaacctaacggtttcaggggccacaagaagaagattaccaccagaaatgcctctgctgacaagccctgtgagatgcccatgtactatcctggcagaatccctggtgaggactcagcccactaccccagggactgagtcctcaactcattggccctggaccatcctctgggtccccacccgaccctgccatcgggcactcacccctaggaacgtcaagaagaggacgtggacttctagggtggcatcggggatctgagccacacaaccctcagaaacctggcttgttacgtatgtcacctcggagtccacaggctgtaggtcacagtagactgtttctgcaagacctgtgggagatcacagtggggagagggacaagttaagaacaaggtggtgacaactgctcccactttccgaatgcctactggatgcttggcactgtttaaggtctttcttacatcttcacagctactttccaaggtgtgtgtgtatatgtgtgtgtgtgtgtgtgtgtgtgtgtgtgtgcttggtcactcagtcgtgtctgactcattgcgaccccgtggagcctgcccggctcctctgcccatggaattttccaggcaagaatactggagaggggtgtcatttcctcctccaggggatcttcccaacccaaggtagatatcatcacattcattccacagatgaagaaactgagcctcagaaatgaaaaatctcttacctgaggtcccagtgctagtaagtatagggtcaacagataaaatgcaggacgtccaaatttgaataaataaatacgtatttaaagtataagcatatcccaaacattgcatggggtatacttagactaaaaatttttcagtgtttatctgaaattaaaatttcactgggcatcctatattttcatttgctacatgcggcaacgctaatggtgtggcagggcccacatgtacacgcacccaagcctctcggctggttcgctccaaaggatcaggaggcaaaacttcccctcgtgagcctcaaggaggcttgagagtctcctggccccagcggagagagcgagtccaggttcagagggcagggc

SEQ ID NO: 48565 - DNA, 1000 bp, Bovine  19866880904634
  misc_feature (1)..(1): n is a, c, g, or t
ntaaaaatgagaaaatactttgaagaattatgcttgacatggaagtatatctcccttgttatcagtgggggttccactgcttacagggtgggtggagataatgcccatgtctttggacataatggcttttgacagacagaccaaaataattcctttttagccatgcaattgtctgtaaatctgcttagttggtcattcaaagtgacgacattcgagatatagttgatgcactgtttatcttaaagaaacattttaaaattaattcgtcagacctgtgcaatattttatcttttcagtttaataatatccaaatgtgctttgggttgcttttgggaggcaaaaaaacacatgtgtttctgctcataaatcagtcagttagctttgaaaatatagtacatttcagatatgtagcaaagaccctcagaacagttattaaagcagcaagaggagttgagtttgcttcagttttggacttttaatagacttcactgttacgtagtgaagacagaattgtgccatagaagtctctggttaagagccaagatgttttcttttctattattttcgagccttttgtttcttttcgcagaaggaaacatatgcatttatactgttgggtaaaatttggctcagacagtaaagaatccgcctgcaatgtgggagacctgggttcaatccctggattgggaagatcccctggaggagggcatggcaacccactccagtattcttgcctggagaatccccaaggacagaggagcctggtaagctacggtccacagggtcgcaaagagttggatacgactgagcgactgtgcacattagaaaagataattcccataaacctactctcttgactctttagataaatatgttggcccatgaatttgaaatttcaagttatgactttgtaagaaatttccatgtacttccaatgaaggtattattgcactcgtgttctttgcttgatttatcataaaattatgtgagacctttatgt

SEQ ID NO: 48566 - DNA, 1917 bp, Bovine  19866881076158
  misc_feature (1)..(1): n is a, c, g, or t
nactagagtctcagaaagactgttaccaagagggtgtttcaggagattctgggtagagcttgtaggaaatgaatcactaaggtccctcaaaactctgagattctatgattaaatattctaccaatgctatttcacaaatatatattttaatggttcctaacagatcctgttttactcatttttgaaaggtcatttaatttttttaagtgagttaattagtgagcaatgtagtcttgaatgactttcggtggcaattctaccctattaccctactaaaagctaaggtgacaccaattagattaagggtgactgataattctcctttattactatacctgtattcatatttatatactttttactaatgctcctggggtcagttaaaagataaaggggaactcaaatcggctcattaataaaatgtaaaagttgagattccgggctgtatgtgctaattactttctgctaccactaaggcattttatactgcaaagatgaacacacaagaaatgaaagagattgtctggaaatgaacctagaagaaagaaaaaacaaaaaaaaactaacatggagaatagacaagatcagcaatcctgccaattcttctcttgccccaatggtgcctttaacttattaatgttggctgatgctattctaggctgccctgctattataaaagcgtcattatttggtaaccaaaggggaaaatattcttacagctgataatctgattacgacttttgaagacaagggacacagcaggtaatgatctttcttcatgggacttctgtactttgtaatcactcaaagtttcaggccatcagaatgtgacctctccagtccttgtgcttcctacattgtgcaacactggttggtacaaggaaaatgccaatagaatcctaactggctctcaatacaagtggagtgatcaccatgcaaatcattaatccagactcatatcgtttattttaaataaaagagcattaacaagcctcttttatttgaaattccctttgtgtacgtgtgcctgtcatttaaaagtatgaccaggtgtgactcttaagcatttttgttagtagtataaactcctgctacatttgcagcttcttcctgacattagcatttcagttgaatggtaatcattaaatcaattttaacagaagcattgagagcattctttgattgcaatttttaagaaggtgctgtagggacttccctggtggtccactggttaagaatcaactttccaatgcaggggacgtgggtttgatccctggtcagggaactaaggttgcatataccatggggaactcagcttgcgagtcacgactattgagcccgtacataaataaaaggcgtggtacacatgaatatttcccttgtaatactgaaaactagtgaaaagactacattgataatattctgttaaacacagaaactagagttttactattacttattacttcttcattcacactgtggtggaagatgatcttccataagattattgcattttatctattctgcatattgttgaagggccctaagtctcctttaatctttcttaagaataactcatttactcccttgacatcagcacaccttacgtaaccttcaaacaatacctcttttgggaaatctttcctgataacctccaaaacaaattttctcctccttatgtcaccgtattttactttttctttacagtgcacaattctgaggggcatcattcacttggactctgacctgaacagcaaccccttgagttgtgtagacacaatgcacacagacacaggtagcagacctgaggagactgacctcattcaccttctctataatagtacctggaagccagggtatatcatttaaagcaataaaaataaaattgtagaaatataagcaaatttaagagtagaa

SEQ ID NO: 48567 - DNA, 764 bp, Bovine  19866881289464
  misc_feature (1)..(1): n is a, c, g, or t
ntaatttcacattcatggcttttctagtgctcaatttatcaaggagagccaaagccacatcctcctgtattttatcgcagtaccatcagggtaagaacgacaggttctctttcccccgcggtgactctgcagctaaatcataattcataacgatgcatctttcctgggttcaatttttaacgttgtttcccctttcggaatgcttacataacaggagaaaagagggcattgtatatgagttgcatccgtatcactctcacgttctctatgaggggatgaaaccagatagctgaataatacttggtgatttcagccactcactttggacattttttttttttttaattttggaagtcgcgcactttttcatcatcaaagacaagaaaaatgaggataaaggtgatgagggctgaagtcatgactttcactttccttctaagtttaaaccgtgaggtggctagtgatattgcacatcgattacacggtccaccaacaggtagaatggggagcatatggattagtgaagggtcattatccatcagcaagcgaagctccgtttttatgcttttcctcatgctgtgaatgggctttcccaggtggtgcagttggtaaagaatccacctgccaatgtaggagacacaagaaacataggttcgatccttgggtagggaagatcccctggaaagggaaatggcaacccagtctagggttcttgcctgggaaattccatggacagaggaggctggcgggccccaatccatggg

SEQ ID NO: 48568 - DNA, 3551 bp, Bovine  19866880201313
  misc_feature (1)..(1): n is a, c, g, or t
ngggcatgggttctgtacctggtcggttaagatcctgcatgctgtgaggcacaaccaatagataagttaaaataaaatagtaacttaaaaataataataataacagaaaattaattttaaaaaagaatattcacctctagctggaaaggcttgtgaaggacactgaagacaaacgtacaaagacagtgtacattctatgaaagtgttattcactcagttgtgtccaactgtttgcgaccccatggactgtagcctgccaggctcctctgttcacgggatttcccaggcaagaatactgggagtggtttgccatttccttttccagggcatcttcccgacccaggggtcaaacccaggtctcctgcattgctgctgctaagtcgcttcagtcgtgtccaactctgtgcgaccccatagacagcagcccaccaggcttccccgtccctgggattctccaggcaagaacactggagtgggttgccatttccttctccaatgcatgaaagtgaaaagtgagagtgaagttgctcagtcgtgtccaactctagcgaccccatggactgcagcctaccaggctcctcagtccatgggattttccaggcaaaagtactggagtggggtgccattgccttctctgtcctgcattgcaggcagattctttaatgtctgagccatatctgccttatttgtacattctataggctgtattactggtttctgttttatggattaggaagctgaagctcagagaggtcacgtgacctttccacgttcacccagcaaataaatgatggacttgagattggattccagtggagtcttgtctcccatgcccaccactgtatctccatggggagcaactgtgtctgtctccttcactgcctttctgcagcaccttgcacaacgtttgacacaggaattaagtcaaggatgacttacagattggctggccagtgctgaagcacacagaggagttatcgtgttctaaaactgtaaccttggcgttgagctcaatttgttttctttcaagcagcctttacatgattgggtacaagacatttttttcctctgtagggcacaatgattacgctttctctgctaccttcttcatctgcccctgcctttagcaaactgggaggctctgactttgagcttggggagggcagtcctcgggtggtactggctgctgcatgctctctcttccccctagctctgtggacctctcccagtgcctagtcaggagcttggctgcagctggggtgggggaggccctctctggctgtctgacctcagaggctcaggcagcagggagagagcagaagggccctctgctctgagccagagcttgctctgcttgtggcttcctaagtgcaggctgggaaatgcgacttattatccttcattagaagatcactctaatttacaggccttagaatgaagttatgtgcgtgatgcacttttgaactcattactgagtatattaaatcatactgaaaggctgctcctgcagcaggtgtaccggtgactgggagctcagatagggccttgggtatgaaatgtcagtctggcaacgttattccctcttcttctgtcttctattgtcacattccttccacagtttggaacatctgttcatatttgtttattgagcctctggggctcacttatccaaaatcatgcttaacttcatgaaattgccattttaagggcagcttttttccccactctgctaaaaatgttgctgttaagtcgctcagtagtgttcaactctttacaatccccatggactacagcatgccaggcttccctgtccttcactatctcttggagtttgctcaaactcatgtccattgagtcagcgatgccacccaaccatctcatccgctgttatcccttctcctctcccagcatccagggtcttttccaatgagtcagctcttcacatcaggtggccaaagtatcggagcttcagcttcagcatcagtccttccaatgtatattcagggttgatttcctttaagattgacggtctgatcttgctgtctctgctaaaaatgaatgatacattaaaaaagaactgggatgggaggaatcatgacattgtagccccttttgttcgctgcaaatggttagaggacaaagactacatttacaaaaagaagatggctttggacactgttttccaagcttgggtcagctagattttcagtgtgggttttaaacttagctctcagtacagggaagtcaggagtggaaagtgacaaggatagcaaggtggagagtgctgctgtggctgccactgctgctggtgaggggtggggtgtgttagtctcctagggctgtggaaatagaataccacagactgggggagctcacaccacagaaaggattgtctcccagttctgaagaccagaagtccaaggtcaaggagtaagcagggtggttctctctgagggctgtgggggagactgttcttgcctgtctcctagtttccagaggtttgctggcaatcactgatgttgactaacttctgcatcatcctaatctctgccttcatttctgtgtgtatctgtgtccaaattgccccatttatcagggcaccaatcatattggactaggggtcgcactcatgacctcattaaaaaaattatttatttttaattgagggataattgcttcacagtattgtgctgatttctgccaagcatcaatatcaatcagccataggtatacctcatttcaacttgattacctctttagagacctactgtctccaaattaggtcatattctgagacactgggtttaaaactccaacataatattattattttagctctcccaccagagattgaaactgtgccccctgcagtggaatcgcaaagccttaaccactgaaccactagggaattcctgccaatgcaccttggatagaattcaacccataacataggaatgtgtccgtccccagttgtgcctgactctctgagacctcatggactgtagcctgccaggctcctctgtccatgggatttcccaggcaagaatactggagcgggttgccatttcctcctccaggggatctttctgactcagaggttcaacctgtgtctctggcatctcctgcattggcagatggattctgtaccactgagccacctgggaagcccataacataggactaggagaatttaaaaacagaaacattttctttgaaagaagaagagaaaaaacaatacaaaacaaaaaatgaatgcctactctctgagtgctgtagtgtttggtgtgaagtgtcttctacagtctttatagacattctgatgcctggggaatgctgttcttctgattgtgtctcttgttctcctaggatttgaaaggtaacactgatctcagccctcttctccactaggctcgtatgccgtccatcagtggggtgcatgagcatgttggctagcggggtttatattcactcagctgagcaattggtgttcatcagccattattggttttcttctaaataacttctctgacagctgacaaaacccaaggcag

SEQ ID NO: 48569 - DNA, 1702 bp, Bovine  19866880385658
  misc_feature (1)..(1): n is a, c, g, or t
ncttttaacttctttcagcctaagtttcttcatttgggggagcgaaaaaaaagagaagttgaagaagataatttctatggttttttccaagttctaagtgttctaaacatgtattataaataattaatatcttgctattacctctccaagtaattgaagtacaaaccactacttgtggtctgtgaacaatccagacttttctctatgtaaacatcatcaactgcattattcaagacaagctgtggttactgttgtggggtcactaaattgtgtgtccagctcttttgggaccccatggactgtagcccaccaggctccactgtccatgaattcttcagacacgaatgctggagtgggttgtcatgccctcctccagagggtcttcctgaaccagggactgaacctgtggctcctgcactgcacacagaatcttcaccactgagccgctggggaagcccatcccgactatcaaaagactggcatacgctagtggtgtccaaacctgggtagtaatcagaatcactaggaacggttttctgttttttattttgttttgttttggtttttatggaatcagagtatttcatcatagagcccaggtttgttgttgttttttttttttttttttcatttcttcctctgattttgaggtgtagccaaatctgtgaaccactgttataaacaacaaatcttatgagttctgaacactgagggacctctgtgctccagattagtttggaaagctaataataatgtgcattattgaaattgatgtataattttttcttgatcagccagtgattgtacaaactgacagtggtaaaaccctgctgctgctgctaagtcgcttcagtcgtgtccgactctgtgagacctcatagacggcagcccaccaggctccccaattcctggaattctctaggcaagaacactggagtgggtttccatttccttctccaatgcatgaaagtgaaaagtgaaagtgaaatcactcagtcgtgtccaactcttaggaaccccatggactgcagcttaccaggctcctccatccatgggatttagaggtacaataatcaactcaactttccatacaactagaggatcgcattcaaatagactcatatgttctttttcaaatttcataacaataataagtattacaccttacatcagtatagtgttttatggattatgttgtgctccacatgaatccttatttgaatctgactgagttatgttatatccattttaaaaatcagaaaattagctttttcgcaatgggtttaccgccaggacacaggtgtcgtgaaaaccactgttaaacctgagccaaaatcggaaaggaaaagaaaaaggaaagatctacatcagcatcgttgtcattgggcacgtagattcagggaagtctaccatgactggccatctgatctacaaatgtggcgggatcgacaagagaacaattgaaaagttcgagaaggaggctgccaagatgggaaagggctccttcaaatatgcctgggtcttggacaaacttaaagctgaacgtgagtgtggtatcaccattgatatctccctgtggaaatttgagaccagcaagtactatgttaccatcactgatgccccaggacacagagacttcatcaaaaatatatttcaggcacatcccaggctgactgtgccgtcctattgttgctgccggtgt

SEQ ID NO: 48570 - DNA, 2507 bp, Bovine  19866880573551
  misc_feature (1)..(1): n is a, c, g, or t
natcatagtctcctccttatatgattctgggcctgaaatactgagctaaattctaaagacagtttttgaatccttgcagatctttgctgatcttttagtactatggtgacatatttattgatttattcattgtatacattaatatttaggatgaaaacttaaattaaattgtatttgacatgataagtgacttttaatacatttttaagccagaaatagcaagggctgcaaaataaaccttactgagaaatttatgtaactttcatacgaaggttttgctttaaagtttgttaatatgattaacaaaacaatccacaaatgacttttcacattttgtcctagacttcaaagaacattttcttttatagatattgaattaactctttgcgtgtctgtgctcagtcactcaatgttgtctgactctttgcaaccccatggactgcagcccgccaggctcctctgtccatggaattttccaggcaagaatactggagtgggttgccatttccttctccaggggatcttctggaccaagggattgaacccacatctcttgagtctcctgcactgcaggcgggttctttaccactgagccaccaaagaagcaactctttgcttactcatgttctttttccttctgcccaaagtattttaacctgagatagttgtctgtatacctctaaccatatttttaaacctccaaagttatttttatacagagttttatggagaccaatttaatctgcagagttacttataaaagaacaatgtcagattgctattttagaagtgtaactaatacccaagaactatctcccaccactgaatagcaactttctgaatacttagcagtgcatttacacactaggggatggaaattaatctaaattcagcatcctataaaggttccaatatctttgcctatttatgagcttaatatcttcttaggcgtctccatctgagtagctactttaaatttttagtcaaattcagtaacccatcaagtagatattaaagcacaatttatgaaaatacataattagatattccagacatgaaaaatcctctggttgctaaagaaaatataatactctaagtgattttaaagtggttacttcctgaatgtcttttttttccccacacattagacgaagttgcattgtttataaaaatttattcatacaaattttacacactttatataacagttatcaaagacctagttatagatatcatgtgtgtaataatacttgggtaagatgtttttataatcagttgcacacaaaataagagcttcaagactaacatctacctaaattatcactatatcataaatctgctccaggttagtaaggctcttggcatttctagaaagtatacaaaagattaaactgggtgatcactgtaaatgcttgcaactagccacgggaacactaaattagacttcataaagaaaaggttaactagcggcctatgtcaccactaacagctgacacaaatacagaaaactctgcccgttatccaaggaacaaataattaaagactaaaatgcaagccaatgtgttgcagcattgtagggccactaaatagccatctgtgaatcgtggcaatttaaaaggcgaagaaaggcactgaagctgcaaaccccatcctgtgtcacattgcccgaggagactgaagaattaaagaaagattgattccgtacacaggactgaggcccagatcgaaggcctctgtgctttcactgtctgcaacgtgatctcggggcagcatccatcccgcctggggaatgcaaatccaagtctgttttctttgatttatgactccatactgatcaaatccgtaaaggaaaaggaaaggtccttgacatgctaatgtttaatcttttcctgtttattttttgtgtgtttttcaaaagaacttgtgcctgaaatttggggagtttggctggctggtttgcctgctgttgcttgatctggttgctgggtgaaggtttcttttgttatagagattacctgacaggttcaagaaattgacaggaaacagacagacatgctttctgtagccaagaaagaatacaaggggacattctcagggcctgttgaagcttgcttacctcactcttgaccacaaatacaagatagtactcatacatatgaagatggggtttaaatgatttatcagttagtacaactgagcaacatgtgaacactacacattctaatatcacaaaggttggttttatgaaataaattttactaagcaataagccataaatgtagaaaaatacattttacctacaaactcaatcaacaagaaacaaaagattcatatatagtgcataattacttagtggtaaccacacaggggttcctacactttacaataagtgctagcatcaaacaacaggaaaaagaagcattcacaagtttaagagaagtgaataaaaaacggcaaacagtacttaaacagtgcgagaaggtgggaaagaggagtcttgaggaaaa

SEQ ID NO: 48571 - DNA, 2628 bp, Bovine  19866880578413
  misc_feature (1)..(1): n is a, c, g, or t
ntggttttgaagaaaagatgcccagccagcacgagtcgggttctcatgccttgcaacacatactgatactacaaacaacaaacaaagctgacttaaacgatgcagggaatttatgagctgatttaacaggaatgttcaattcgggcttcagggttggtttgattcaagggtttgctggtgttttcaaggacgtgttacttcgtgtcacttctgtctttcatggtgttggttcagttgcaaggctggcttcttaaatgctgtgttaaattacacaccatgccattcagaaggaaagaaagagtttccttcctagaggtttccagcaaaaaaagaaaaataaaatctccaatcccactatcctgaaatgggtcacatgttaagccctgaactgtggtcaggggaccttatacttggaagtggagtttttattgtctagtcactaagccatgttcgactctttgcaaccccatggactatagcctgccagaattccctgtccatgggattctccaggcaagaatactgaagtggattgccatttccttcttcaggggatcttcccaacccagggattgaacccatgtctcctgcattggcaggcgggttctttaccactgtgccaccagggaagccagaagtggagtcagcattctgttaaaggcaagtcctgcatgagggatgtgtgtcaagagcaaatccaggtagtgaacaagaagaggacagatgtgtgcagatgcacaccacattgttattttcttttaggcttataggtaatcctcctccctgaattaggcttctgtaatacaaggcaaatttacagctagaagaaaataaacttagaccaaatgaaatcacctagggtgatggtccactgctgttaaaaaatatctttcattacgtccctttttctgtctatgaactaacgttccaaatcagatttctatagatgaagaaacttctgttgagaagtttctttggcagctgcagacaactagtaagtatcactttgagcgcagtccaggtcccagtctttgtctcaagaaatcccttttcctttgttcttggaaaaagtatgattttcctgagacataaagtgaattctaatttggaaacacagttcttctttatcaggatgaaaaaattaaggcctggtaggtagcttgagtgtatcacagccatttgcctacatatgaatttgaagttcattttatactggagtgggttgccccttccttctccaggggatcttcccgacccagggatcaaacccgaatctcctgtgactcccagattggaggcagattctttaccactgagtcatcagggatgtctaaggcagaaacatgcctaattaatttggcattcttttctatgtagcttttcctggaggaagatctagtttgatttacaatgagcacctaattaacaagttaattttacttcctatatatgctttgtagccatcctattagactaagcagggggattgtcaaggtgaattctgcaagtcctctggttatttccatcactcaaaagaggtatttattatgttcccagaagtgtgttgggcattaacgtgcaatttgtcatccaggccttccaggagatcatcgagctggggagacaagccatgcatttacaaggcagttcaggaatagagcagagcagtgtggaattagagattagacctagtgctgcagagaggaagggttacagggagaaaaagtgcaaggatggtgatgagaatgaagagaaggttgctcagagaggctgaggaagattcctatagaaggaggttgtgagttggcccttacagaatatttagtttgggtaggttgagagagggcattccaaccatggagcaattgtgggagatgaaaggaagcattccagtttccaagactgataagaacctgtgctactaaataagaaggatcatgttgggtccagagtatgaggaactctggaccctgggacagggcaggctaccccagaacatcagagggtaatgagaaagagaaggagctaaaactacctggttcatgggaaatgaccgaggaaggatgaccagttacaaaccaatgtaggaagccaagggtgaggtgtggactgcagcaaaaggagcaggcatcttccttcttcaaagaagggttacaatggaagagaagagctcatacttggtgttgacttccagccttgtaaccatgcgaacagttcagtggagtgtgaggtcacagggggcctccaagtaaaatcatcttgtaaacagccagattcaagccaaacgtggacatgatccagttgcaagttgacttctggacccgaggttactgccagctagctgcacaggttctattatttcattactctcccaatcatgtgactgaattatttagactctttttacaggatcacacttcttccagaagctcctttaacagagaggtccaaccagaatgtaaaataatgctaactatgggcttagtgacctaaagaaaatattgcatttttccaagaacctaatgtccattctaggagaatacagcttcctgatgtatttattactgtgtgcagagggcatggggacttcccttagtgggctcagtggtaaagaactcacttgccaat

SEQ ID NO: 48572 - DNA, 1811 bp, Bovine  19866880586552
  misc_feature (1)..(1): n is a, c, g, or t
naaatatgtttccttttctcctttgcttttcccttctcttcttttcacagctatttgtaaagcctcctcagacagccattttactttcttgcatttcttttccatggggatgatctttatccctgtctcctgtacaatgtcacgaacctccatccatcaggtttttcaggcactctgtctatcagatctagtcccttaaatctatttctcacttccactgtataatcataagggatttgattgaggtcatacctgaatggtctagtggttttccctactttcttcaacttaagtctgaatttgacaatagggagttcatgatctgagccatctcagttcccagtcttgtttttgctgactgtatagagcttctccatctttgactgcaattcactctcttataataacctataatggaaaagaatctgaaaaagaaaatgtgtgtgtgtgtgtgtgtgtgtgtgtatagctaaatcactttgctgtttacctgaaaacattgtaaactaactgtacttcaattcagaaaaaaaattgttgcgtgtatcactgctttcattcctttttcttggtgagtagtatttcaggtccccactcagcctccattgacacctcagggatggtatcttgttcattattctcatagtagtagtgttagtcgttcagttgtgtctgaccatttatgaccccatggactgtatgtagcccaccagactcctctatctgtggaattctccaggcaagaatactgaagtgggttgccatttccttctccaggggatattcccagcccagggactgaacctgggtcttccacatcgcaggcagattctttaccatctgagccaccagggaagtcttagctgattactaagcctcagtcctgggctggggtggatattcctgcttttgatgtgggtggtttcctctgacaccgcaagggaggtggctccttatcactggatagtggtgacagtcctgactctccagtggtcatgttgtgacaccaccccagtgaggtgttgggggacctcactgggtagaagtctaggctccccaccagggctttgctggcatgggtagatatgggggccgccagtgtttttgagcatggtgtttggctggggcacagcttttattatttaaatgtctgctgtcttgctaggctacccctgtccttgggagagtaggctcttgttgggggcacctttttcatctatgccctttgatgttgccaggttgcttgcttcaacactaagcatggaatggctgaaacaaacagaaataagaacaactctccaccatgtttttctgtgggtcctgagtttcctagctggtctgtcttctgttctccacctttcagggtcttcttaagtttgttttaaatctaacgtccagagttttagttatagttaacaggagagatggggaggagtgtgtccacttcatcttcctgcaagcagaagtcctaaggtttaatttttatcagcttggtttctccaggctctgtatattatgaacatgcggcattacttaacaaaccagaagggcaccaaaccacctgcaggaaacatttgtttctaggatttatgtaagaagaaaagtgcctaccacgtgcttggcactttacgcatcatttcacttaatcctcagaataacgccacagggaggatgttattaaccctgacttaccgaggtgagatctgaggttcagagaaattaagtaacttgttccagatcacacagctagtagttagcagagccagaattgggggccagttttgcccacatttttctcccaccactgtcag

SEQ ID NO: 48573 - DNA, 3160 bp, Bovine  19866880619350
  misc_feature (1)..(1): n is a, c, g, or t
ntcttaaaaagaccttgatagtgaaggcaggtgaaatggatttaactaatgattacccatgatttcattgttgtttaatcactaagtcatatccaactctttgcaaccccatggactgtagcccgccaggttcctctgtccatggagtgggttgccatttccttctccagaggatcttcctgacccagggctctaacccacattgctgcattggcaggcagtttgtttaccactgagccacctgggaagctccatggtttcattacaatctacataaatcatgtatttgactctttatgtttttgtcttttattttctcttaggcattcccttcttggggtgtgtgagatgtgtgtgtgtgtgtctgtgtgtgttctaccagagtaacactccctcccaagcaggagtatgttgtttgactcatgagagaatccaagttgtggggaatgcactgacttcaccctccttcctgtgcaagacagtaagccccagctcatgcacaggacccacccctgccaggctgcacgactccagggaccgctggcattgtatcctggatctgggctccacagaggaatcagcacggatgacacaggcttctcggcctgctctctgccaaataggtacccaaggggaagcccagaagttgtcccggctgtgccagaggcagggtgggccagtctaatcagggatgacatagtagcaggttcattacagccacacatggaagacgctctgtccaagcctgacctgttcaagtccatctgtctgactgttccatttctcagtgaatatcctgtgcatctttttgttgtccttgattaagattaccttgcttctaggtgtccttagttaccaagctttgcatgcagcgtgctgagttgcttcagtctgactctttgcacccctgtggactgtagactgccaggctcctctgtccatgggattctccaggcaagaatactggagtggattatcatgccctcctccaggggatcttcccaacccagagatccaacccacacctcttatgtttcatgccctggcaggcaggttctttaccactagcgccatctgggaaagttaccaacctactagttattaatataatattttacaccccacttaaatcttgaacatagtgatgtcataattatgaaagtaaccagatttgcgtcaagtgtctaatcttaacaaaataacagctgtgaaaacagatgaaataattagaggaagaaactgtttggaagtttcgggatattttaaaagtaattagtactaataagcaataaagttctgttctcggaaattacacttaaacgggaaacatggtgactgcagccataaaattaaaagacgcttgctccttggaagaaaagctatgatcaacctaggacagcatattaaaaagcagagacattactttgccaacaaaggtccatctagtcaaagctatggtttttccagtagtcatgtatggatgtgagagttggaccataaagaaggctgagcactgaagaatcaatgcttttgagctgtggtattagagaagactcttgagagtctcttggattgcaaggagatcaaaccagtcagtcctaaagggaatcaatcctgaatattcattggaaagactgatgctgaaattgaagctccaatactttttggccatccgatgcaaagagtgaactcattggaaaagatcttgatgctgggaaagattgaaggcaggaggagaaggggatgacagaggatgagatggtaggatggcatcatcaactcgatggacatgagtttgagcaagttccgcgagttggtgatggaaagggaagcctggcttgctgcaggccatggggtcacacagttggacacgactgaacaactgaactgagctgaactgatggaatacatagggaaaaaaacctgccactagagaatgagccaccagtcttcctaaacattagtttcatttttaacaaaatgtgagcttgttgggacttccctggtaatctaatggttaagacttcactttcaaatacagggagtgccggttcgatccttggtccaggagttaagatcccacatgccatgaggccaaaacaacaacatgaaaaaaaaacaacggaaaaagcatgtagagtccagccatgacttcaagtgagtccaaatttggacaacagaaaagtaacaagaaaggttctcagagtcagagctggcactgatgctgcacaatttcctaggattgactttcccagaactggactcttgtcttcctgagaaaaagaccccaagtgctgcttcttcctttggccatgtgatcacctctcagaataagacacatctgtttgtaggggtggtttagatttgctcaaaagtgacatgaggcttcttaacataataatagtttagattttgctttgagctgatctgttttctagcagagttaagaggttttcaactaatattgagaattgccagatagttaagacagctaagggcttctcaagtggtaaagaacctgcctgccagtgcaggagacttgggttcaattgcttggttaggaagatccctgatgtaagaaatggcaacccactccagtattcttgcctggagaatccccatggacagaggagcctggcaggctacagtccatagggtcacaaagagttggacatgactgaagcgacctagcacacacacaagacagctaaatgagatgtggacaagacttctggtgtgtcttataattccctatccccgtgtccaagcagagcagagataaactccagactgcaggttgctcagacacaagggtcaacttctaagggccccaaaaggcaggtgagtcagtttagaacagtcagtgtgacctgctgaaaagtaccgagcatcacattaataagtagtgatcaataagtccaatcaataagcatcaataagtggaatccctccaaacttggaaaagggaccccaagacaatcttgagatttcagtagccagagacccagactacagtagctgctatggtgactctctaattgtttttagaagaatcatttgctgaatttttagctcagctaatcaatgagtatattgtagtgaaatgctcacctattacactctttataggctagatgttatcatttcatctagttaaaat

SEQ ID NO: 48574 - DNA, 1897 bp, Bovine  19866880635560
  misc_feature (1)..(1): n is a, c, g, or t
ngaagtcctggagcttggtgattccccctttatagatctaggtctagagaggagatattagaacttctatttattttttaatttaaaaatcaactatggggaattgtttaatgggtacagagttttggttttgcaggagacatgggttcaatccctgggtttggaatatgccctggagaaggaaacagcaacctactccaatattctggcttgggaaatcccatgaacagaggagcctggcgggctagagtccaggggggtctcaaaaagagtcgacataacttcatgactaacaaacaaaagagttttggttttgcaaaataggaagaattctggagcttggttgcccaacaatgtaaatgtatttaatactattgagctgtattcataaaagtggttaagacagcaaattttatgatatatattttaccacaattaaacattttttcatgaaaataaagtttaaaaatgtggaagatctgggttcaatccctgggttgggagggatccctcctggaggagggcatggcaactgattccagtaatcttgcctggagaatccccatggacagaggagcctggcaggctgcagtccatggggtcgcaaagagtcagatacgactgagcatctaagcacggtacgcactcccaattttaaaatttaaaatactttgcaaattatttttgttatagttttgacaccctctttgatttaagggcatgttgaaaataaattttttaaaatttaactattctgagtgtgatgttaatcgttattgccattaaactatgagccatgcaatgtctgtaatttagaaatgtattgactttatactgtaacatatgaacagtttttaatatggcccatggatgtctgaatataatgtatattctccattgataaggtatatagtttagacagaaactattaagtaaaggtacatgaattaaattgatgaggctgatatactatttcacaggcactggtgctcgtgccaggccattgcctgtggccagctgtgcgtgaggaccctggggaagaggaactctgtacattccagaagcatcgacactggttgcctctgttcacttggagccagttgcagtgaattgccatttaagaggactcaggtaagtgagggcttcccaggcggcactaaaggtaaagaatctgcctgccaatacaggagatgctgcaagagatgtgggttcgatccctgggtctggaaaatcccctggagtaggaaatggcaacccactccagtattcttgcctggaaaattccatggacagaagagactggcgatgtgaccgaatgactgagcgcaggtaaatgacggtttttaactactttaaactagccctcactaaaagggcaggagactttaaaagattcttgggaaaaaaaaataaccagcagattaaaaaatatgaataactcctgctcaggtagataagaaataatggcagggctaacactttttcattatgagctctttgttggccttgtgtcagtaaaaatgatgatctaaacagatttggcaataagctaaaattttttcaaaatatgtagaagattatttgaaatatggacttggtagcaattcatgtatctaatttataaataaatgaaaatgcatatattcaggagtggatggtaacaataattacagtaataaggatgggaaagaaaaaaaattttgtagaccactgatctggtccaaaacttccaaacatttttgacttgacattccaactcaaaaggcaccatggaagcagttttaagaaagtagcatttcccaactagcattgaatcctccaaacacctgagtatgggagtctttcgaaggcataatctacaagaaatatgttctttgaagaaatttgaaattttctt

SEQ ID NO: 48575 - DNA, 3151 bp, Bovine  19866880673343
  misc_feature (1)..(1): n is a, c, g, or t
ntgctatactaattttacaggttagaaaaactaggcctggagaaattgtgtggtttccccacagctgctatcccacagaggggcagaagcagttgccctaaatcaggtattttaatttgacaagtcagcataacttcaaacggatgtttggagattcacaaaggacagcccaatggtggtttttgtcatttaccataaaatgatatgggcttccctggtagctcaactggtagagaattcgcctgcaatgcaggagaccctggttcaattcctgggttaggaagatctgctggagaaaggataggctacccactccagtattcttggacttccctggtggctcggctggtaaagaatccgcctgcgggagacctaggttcaatccctgggttgggaagatgccctggaggagagaaagggataggctacccattccagtattctggtctggagaattccatggatagtacagcccatggggtcgcagagtcagacacgactgagcgactttcacttcataacatcatacgagaaaggacacaagggttttgaaaatcaggaataacctaatctcagaacaaaggatattcttttaaatcacttgagcacttttgaacaagaggccgtctcagtagcacacagagaacgcggagtgtaatgaacatgcgcagtgtggcctccacgctcaaggggcaaacgttagttacagtgtgaatcggagtcctcgggtgccagcccctcagctccccaccagtaacaggtaaccacgaccctaacaaggaggcttcccacattcactacatgcagggcaacttttgtttttcccgtgtggccaatggtgagtgggcgtggggtgcggggaggagcaatgagcatctaaggcaggcaggcctcatatttgggagccactgcaggagacgtgggtgtggagcgccctgctaacactctcagggaacaaaaacacctttcagggctcacttgcctgcgtctccaaaggcggacatctacctaactcttcacggtgacacatcctctgtactcatgttttctgggaacttcatggcatcatggactcaatggacctgactttgagcaaacttcaggagatcttgaaggacagggatgtctggaatgctgcagtccatagagtcgcagagtccgacacgactgagcgactgaacaatgaacaacatgagagcccctttcacatgacccgactgctgtgagtttgtccatgtggtttccagccagccagtgactccttcctttcacagatgggcccaaaaggtccagagagtcagggccttctcctggccacacagcaaggtgtagggggaggcagggatcaccacctgaaacaccctgtgtgcgggtttcctgggctccatcacggtggaggagctcctgctgttttagtgcttctctgggggtgccccaacaacatcgttttgcaaatacgattcgcatttccaacagaatgtgaatcataaatataaaaacaggaaatactaaatgccagcaaagaaaggaacaataagaaaaagaaaaaaacctaggaggatggagagtctctggatgccttcactccacttacaaaagcaacggtgccaaaggtgggaaaccttccaaagggccccctccgggtgccccgcgcctaaggggccctagcgtcggtggggcgggagggcaccgggacggacagcgcttaccatggcgtccgagccgtggcccccgagtgacgtggggaagcgcacgtcgtggaccgagagccgggagaccctgccgtgcaccatgcccacgcgcgctggggcgccaccaacttcgctggaccggacgcgggcgcgcggagagggaggggcaaggagccggcgcggattggccgtgtggccagggggcgtggccgcactcgagaactcagggaattgtcaaacttacgggggccggcccggttaagggtcccctgactcacacgttttccgcgccaagtttccgccccgcaactggcgcactgttccccaaggcggattccttcggcgtttccaccgaccccgcgcccactccccttctcccgtccctcctccccccaggatcctgctccgcccagactagaaattgtcatgtgaccttacccggagcgacgccccgagaggaagaaacccggtcggttcagagtgcgatcgcctcgcagcagatttggaccagctccaaatctgaagtcactcaaggctggctcaaccaggatagccttgggccagagaatcttgaaatgacctcagcctgtttgccatttgataaactaagaggcgggtcaccatttattacatccttgctgatgcagaaagctttaaatacaggaccgcttatctacccagccctgcaaggtaggcaggtattgtccattttaatgaagaaatgagattcagagagattaagtaatttaagagacttgcccgaggccacacagctagataagtggctaagagtactagctgcaaacccaaggctctgtcctctgggtggcaggaattgtggggttcagagctataggatccctctgacaacatggtgagggctacggacagccccccacgcccaaaaccgcagcactgtgcacagaggttaagtttttataccattttagggatggtccacgtaacctcttgcctacagcacgccacctttcagttcctacttctagggactgttttgacgactgtttgggaagcagtgctatacagatatatttttccattaataaatgctcctgtgggtatggcagggatgttttcagggatctccaggtcacgtctgctgctcaaggatgcatacacatagaaccctggcagatgaattcctctggctaaagactgagatgcttaactcagaagctacatggatgttaactcaatgctacagaggctgggtgggcaccaggaagcaaagagggatgagataagaagcagtgactgcagctaagggacagccaggcagcgccagttgattgtagccctgtaggaattaagagcgcagattgccgcatcttcctagtttccaagagaagtctgaaatttgaatgttaataggaagtagcctttctttccccctggcctctcctgcccactctacagcttagacagttaacttttttttt

SEQ ID NO: 48576 - DNA, 1712 bp, Bovine  19866880677094
  misc_feature (1)..(1): n is a, c, g, or t
nacctcttctccttacacgttacagcttcattccttaagatgtaagcggtatttataggaaatgctgatcactgccaacaagtgaatactcccattaaacacggtttaaaacaaccttctctccagttgtttataataacctcttggaagtttgaaattaaaatctgtctcccatccagcctttttcccgcctcttatatgacgccaaaccaagaacttgcccttgaacatacttcaactccctggcccaccaccctgacatgctctgtagctcattatctcaatccctaaatattagtcttttctcttgtcttctctggtttcctggacatgattcagtctccctgggtatttcattgtttatgtcaacgaacagactctgtcccttcaagagaccccttccccttgcctggccccattgtccctcaacaccttcacgacaaaatgtgtgttgaacttctcttctttcatagggggagaccctgaagttgaaagaatccaatctcttcattaaaaagacaaggtccttgaccctaaatgggaagcaaatccaaaaagagggaatatatgtacatgtagagggccggtaaagaatccacctgccaatgcaggagacgtgggttcaatacctgggtgggggaagatctcctggaggacagcatggcaacccactccagtattcttgcctggagaatccccatgggcagaggagcctggtggggtacattccatggggttgaaaagagtcagacacgactgagcgactaacactttccctttcaaagattttttcttgtcaatagagaccacaccccatgatggtacgaggagagacccctgggtggtgcgggagccaccatattacttcagccccacagaccaaggaagcagtggcctcacctgccttgggactcccatctgagcggtcgtgaggatatattcttaaggaagaaacgtgctcttggcgtaaagccttggggttataagcccatcctttacaatcatacccaaatgagcacgtgttttcactgtgctggctccaggctggcagccagagctctgcctccaacagctgcccagggcacagcccaggctccaaggggggcgagggcggcctccactcaccagacagcgggtctttgccaatcatcaagacattaggcaaattcatgacgatcagctgctggagaacttcctatggaaacaaaggggaaaggatgccattaagaacagaaaacaaaataaagactgattaagaaaattacagtgtaccaagaaactggaggagtgtgcagccattatgaaaacagttgctatgaaaatactatatatatataataggaaggaaaacgtaagatataaataaatgaaaaatccaaacagctaactgtgcttctgccttgattattactaaataaaaattatgtctgcatttgtacagatactttggggggaaagaagatatattagatgctatattagtaggactagcagtgagtttcttttaaaggatgtctttatttttattgtatgatttgcttgtgcaactaaaaaatgcagaataaacattaaaagggcttcccttgtggctcagctggtaaagaacctgcctgcaatgcaggagacctgggtttgatccctgtgttgggaagatcccctggagaagggaaaggctacccactccagtattctggcctggagaattccatgga

SEQ ID NO: 48577 - DNA, 2586 bp, Bovine  19866880686479
  misc_feature (1)..(1): n is a, c, g, or t
naaaaaaaaaaaagactcaatttatctaaatctaccatttctaggtgtttgcaatcataaacaggaaaacaaatgcaatattcttccttctttccttccttcctttcttcttcccttcattcaaatgctgttgtttttgctcagtcactaagtagtgtccaatttcttgcaactccataaactctagcatgccaggcttccctgtccttcactatctcccagagtttgttccaattcaagtccactgagtcagtgatgctatctaacagtctcatcttctgccaccttcttctcctcctgccttcaatctttcccagcatcaggatcttttccattgagtcagctcttcacatcaggtggccaaagtattggagtttcagcttcagtcttttcaatgaatattcaggattgatttcctttaagactgattggtttgatttccttgctgtccaagggactctcaagagtcttcagcaccacaattcaaaggcatcaattttttggcactcagccttctttgttgtccaactctcacatccatacatgactactggaaaaaccatagctttgactatacagacctttgtcagcaaagtgatgtctttgctttttaatatgctgtttgggtttgtcataactttcctcccaaggagcaagtatcttttaacttcatttcaattttcaaagagaggttaactattttacaggcagagatggaaggaaccgacctaataatttcccagcaagggaaaaagtctagctcacaggctttttaaatatacacgctcccactttatataaacattatcttagaagaaggaaaaaagccccaagacacagaagaccacctggtactctctctcttgctcttttttttcttttttgggggggtggtatattctaatacttcatcagtaacccaaaaaagtgagaaagtcacagctcctggtaggccttcttcctaataagggacatggctaaagagatgctttccatttgttgataactagtagatttatgttctcattcaatatgtctttcattaatataagcagcacaatgaaaaatttcatactgtgataagtataaacagatcactgatttgagagaaactgaaaatttttcttggggattattaatggaaacattatgctccttattaaatttgcagacacatgtatttgaataattacccactgattttatgaagcttggagggaatagaatcttccctttttgagtgtagaaatctagaatatagtgagttcagaacactcaagcctagaaaatgctttaatatatctaaagctacatgaaaggaacatacaaccaaatggcaaccccaataatcatgagatcactgatataaggaacaaaactaatgagaagaaaagatagttttccatctgccaattttgctaaattttgtatcagatatctgggaaaaatatacctgaaatgagggttgttgttttcgttgtttagtcactaagtcgtgtccgtctctttgcgaccccatggactgtagcccaccaggctcctctgcccatgggattctccaggcaagaatactggagtgggctgctgtgccctcctccaggggatctttctgacccagggatccaacccctgtctcttaggtctcctgcattggcaggcagattctttactgctcagccaccagggaagccgacagataatacatgagtttaaaaatacccaaaagtaaatgaaataaagaatgggatctgtagcatagcagagggaaatagcgtgctgtgttagggagcccataagcgatgctatttttactcagtgaggaaggcttctcagaggaggtggtttcaactgagacctgaatagtggaaaggaagcagctacggaagagtcaggtgggaagagggttccaggcagagaaagtgaccaagtgcaaagttcctgtggtgggaacaaggaacgagaccagggagcctgaggaagagaaagaaggcgctggcggctgaccgtcagtccagtgaggctgggggcaggaggcggggggagactggagaggtcagagacccctgctgcctgttcagctcccccaggaggccttggtggtgttggaggagctggaggcactggaatcaatccctccgggttcaaaccctaaggctacatgaactcaggctgggcacatcacactcttggcctctgctttctcatctgtaaaatcggattaagaattgtcctcttctcccaggcaccatgagaactgatgaggtttagtgatcagaattcttgtccaacggggctgagccgtcctcccggtctcagccactcattcactgattcattccagtcaagccaacacgtacggcttgggcaggtgccacaactgccgtgcaccaggccccgtgctcttagtgcacagtaggtactcgaggcagcgctgctaccagggtctgcagccgctcccaatctgccaggcctcgggtgcgtttcctctccctccaccttggcgacaggctcagcctttgggacacgcggtggggggcagtccagggccagcacttgaagtcacgccctcctctaggagctttatgt

SEQ ID NO: 48578 - DNA, 1608 bp, Bovine  19866880686582
  misc_feature (1)..(1): n is a, c, g, or t
ncaatatttacttgcaagtccctgatcccaaataactaactcaacacaacaacatacgaatcacaagtatagaccacagttgtctatggagccacttaagtagcatcatcaagacaacccaatgcagagagatagcaaaggacagaatcatccagaagagaggaggaggctggacgtggatacaagaggagttggggaaagttcacctgttgttgaaaatcagcaagtacatcactgacagtagagggccagatgtcctgttaagaaatgtcctacttaaacagtctcaaaaagttggcagctgtccttgtgggaaccaacagcaggagcagcagctgtaatgaatgaatcagaagtgtcctttctacatatctgacttcatcatgatcatgtctcccctctgctcaagttcttctagtagtttctcacctcactgagatgaagagcccacaaggcccatcttctctccaaaccttccctctctgacctcagctactctgcggctcactcccgctccagccacactgcgccttgaacataccagacacatggccccagggcctttgcattttctgtttcctctgcctaggactctgtcccttaggtaacccgcagctctctctctctcttcctctcttactttttacaggtctttactcaaccatcaccttgttagagaggtttttcctgattaaccttttgaaaattgcaactccccatctcccttccttattttatttttctctagaacacttctcaccatttaacacactatctgatttactgatgtgagagttagaccgtaaagaaggccgagcactgaagaattgatgccttcaaactgtggtgctggagaagagtcttaagagttccttggacagcaaggagatcaaaccagtcaatcctaaaggaaaccaaacctgaagattcactggaaggactgatactgaagctgaaactccaatactttggccacctgatgtgaagagctgactcattggaaaagaccctgatgctgggaaagattgagggcaggaggagaaggggacgacagaggatgagatggttggatggcatcattgactcaacggacataagtttgagcaagctcggggagacagggaaggacagggaagcctggcgtgctgcagtccatggggttgcaaagagtcggatatcactgagcgactgaagaactgaacaacaataacaacaatctgatttacttatcttttgcaccccccccaacaagaatgtaagtttcatgtagacagagattttgtgagctgtactctctactgtatggctagaatatgaccagcacagtggataccaaacagggttgttgaggagattaaataaaagacacataaaacacctgaaaagcacagagcatataataagaattacataaatatttgctattattttatttttgttttaaactccatataacctaatgggtagtttgtattataatatgcattttaaaattttttattaaaatttttttaagtctttattgaatttgttataatattgcttctgttgtttatgttctagtttttggctttgaggcatatgggatcttagctccctgagcaggga

SEQ ID NO: 48579 - DNA, 1915 bp, Bovine  19866880741951
  misc_feature (1)..(1): n is a, c, g, or t
ntcttctgcatggtgatggcagagggaggggtagtgtgtatcatagagtacaggctccaggaacagacccagactcctatcagtctcttcaggggtggagccaagaatctgaattttaagacctggtgctattttatttattcaagtttgagattaaatgcaaataaataaatacaccaagactgaaatgcgaatcttgaaaacatttaattttttttacaggactcaagaccagcctttctgttcaatatatgtatcttggtattccttctttcaggcaaaagagctactttaaatgtctgacatgtaaatacatgataaacacctaaacaccacaaaagtcagaaactattcgatttctgacttttgtcagaaagttggtgttgcctacgagacatccactttaaatataaagatacaataaaaaaaaaagtatagaaaaatatataccatgctaacactgaaatgaaaagattggtatggatatatgaatatcagataaagatttcagattccagagataaagataataatgaaaaggtcacttcaagaagaatacagaacaatcctaaacatttgtgcatctaatatcacagcttcgaaaataaagtaaaaactgagagaaatacaaggagaaacagatgaacctacagttaaagttggaaatgtcaattcttatctatcaatgttggatagaacaagtagactgaaaatcagtaaggacatagaagatttgattaatacaattcacaaacttaatctacttaacatttatagaatattgtgtccaacagtagcaaaatatacattcctttcaaattcacatagaacatttaccaaggttgactatgttccgggccataaaacaagtctcaagaaaaggaaaaaaaaaaatttgggggggggcggtcatgccatgcgtcattaggaataattcctctaccagggattgaacccatgcccaccatagtggaagcgtggagtcttcactactggaccgcaagggggaagtttccaagtcttaagaaattttaaaggatttaaatcatacaaagcatgttatcagaccacaatagagttaaattagaaattaagcagctctctgggaaatctccaagcatcagaaaactaaacaacacacttctaaaaactcaagaagaaataaaaaaaagggaagttaaaaagtatttaaatggaatgaaaacaaaaatgtaacatcaaaatttgtatgatacagataacacttggagagagattttttactttaaatacctacagtagaaaggaaatgtcttaagttaggattgccagacttagcaaataaaaatacaggatacccaactgaatttcagataaacaataaaattttatttagtgtatgtcccatgcgatatttaagataaattaaaacattttttatgtaaagctaaaatttaactgagcagcctatattccaccaagtaatctatctaaattaatgctctcagatttcaccttaagaaagtagaaaaagaagatcaaattaaagtcaaaggaactaggaaaagggggaaaaaataaagttcaaagcaaaaataaacaagaaaacaatagggaaaatcaatgaaaccaaacatggttcttggagattaataaaactgataaatctttagctagattcatgagagagataaattacaaatatcacgggacttcccctgtggtcccgtggttagactccacactgccagtatagggcaattcctgtttggggatctaagatcccacatgccacatggttaaaagattttaaaaaagaagaagagaaaaacaaacaaacataaggaatgagagagagggaatgcctctacaaatcctagaaatataacaaggataataagaaactatgaacaggactttcctggtggtgcagtag

SEQ ID NO: 48580 - DNA, 914 bp, Bovine  19866880780704
  misc_feature (1)..(1): n is a, c, g, or t
nactcctatattttgcagccggtcgctagacggaaaggggagagtgtctagaaggacctggaattctaaaatgtgggtcagtcagtgtcagaaagggctgaacacggagtctcttctgctgaaatcactgccctgtcagactcttagattaacttcctcttcgtatttcctctttggtgaggttattagaactactaatgttgggactgttggtttcctttgtggtttttagcgaaattcagaatcatccttgatatacacaaaatgatacaatcatatgtgtcagtattctggtattctaggaatttaggaaactctatataagggtatgaaaaaaatgttttttcagctcactagatgaaccaaagataggcttagacatttacattaactaaaaggtgctttaatattagatttagctaccaaaccctcatttgctcttgagtgtcatgggcattaaaaatttcatgttggttcaccaaccatggtggtccactggttaagactgcacttccactgcagaaggcaggaggttccatccctaatccaggatctaagagcctccctgcctctttggccaaagtaaataaatgaataaataaacatgtcatgaaacttaacatttaacttttttttaactagaaaataaattccttgaactgttacttttctaaacttatattataaactagagattatatctttgtcctaaactcatcttcaaaaccaaaaaaacacctctcagcttcataaaatcaattctaaaatactagttaaaatatgctaaaatcaattctaaaatactaaagtcaactctataagggggtgaggtggctttgaaaatattctgtatggagttttaaaggtgggcaagggtgtcaaaatctctccatgttttgttacattcactcatc

SEQ ID NO: 48581 - DNA, 950 bp, Bovine  19866880788293
  misc_feature (1)..(1): n is a, c, g, or t
nccaaggggtgaggggagctctgtcttcccagaactcgagggagtaaatgtctgaactggaatcattccacatcctagtaagaagagccctagagaacacggaaggtgtggggatcagccctaaatactcagtatgagcatcacctgagggctgtgtcacgcagaagccaagcgtatcctgtgaacatgttcaaatactttcaaaatatctttctcctaaggtctgtctaaagtaaaactgtgtctctgagactaccctatgaagtgatgtgagaattttaatattgaagcaacggctatgccaaacagaaagtcaatcaacattttttataataaagtcattgctttgaggctaagttgattattctggccatttaaacatagttttatagattgagcaaacaataaaagggtctttgcagacagtttttttttttttttaactgattcttcatctgaaataacactacaaattcttatttaagtagaataccaaaaataagtaattgatggtaatgctgacccaaatgaaggttaaccttcaaattagtttaatgttcatgaagttttttcatgtactttaacattttacatgtaaatattaagctaattgcaaattcatttcatctttaatatagttacattgtgaattcaagatatcttctatacttgacaatgatgaaaagacatttctaaaaattctataaatcagtcttattacttgggaacaatttaatagcaagattgtgttttgcagctgacatatggacactttacaaagtgaacaggagaatgatttgggaacatgctttaaactttcaggtctatgttcttttcatgtggcagccaatcaaaatggatttgctctgttcaggaattaagctctgaatataggtgaacaactgttctgtttattagttgtaacaaccacagatgacatatttgaggca

SEQ ID NO: 48582 - DNA, 3588 bp, Bovine  19866880828121
  misc_feature (1)..(1): n is a, c, g, or t
ngatggcagatggagggggctctcaggaggtagcatgatgttttgagtttgtttaatatgtgtggctacgttacacatatgatagaattacatagagacacagacatgcacatgagtgtgtataacagatgagaactgaagacactgaattatattaatgacaactccttggtttttatattgtactataataattgtcagatataaacactggaggaggctgactgaggggtacatggtacaagctatacattttttggaaacttctgtgaatctataattatttcaaaaataaaaataaaaaaaaattatttaggacttatctgcactgtcctgggcattgtcttcctttttaattttctgtgtattgaatgtttgtccctcctctgcatctctactgctgccctgttttagatctcctaagagcatggactgttgttttacttattgtacctacaacagtgtttggcagagagagagagagaaagagtgtgtgtgtgtgtgtgtgtgtgtgtgtgtaatgaacagaattgcttagcatccttacattgcctgaccctggtctgtctttccacattatctccctctgcttccttccgtatgtgagtgctccaactggctaacagttgcctgaatatatcctggttagttttctctccatgctagacattgtcccttccaggtctttctctcacttattacttaacctttagtgttcagaccaagaatcatttacttattcccattctctgggccctcttgaatgtgcccttctgtatcacaccactctacttgtgtgtatacctctattgcctcgcttaccttcctttatttcaacagtttatttacctgttgaatcaggatttgcacagaaaacagaaggcacactcaggtgaaatcatgaaactaactttatgaagagactagtcacagaagtcggtggaggtgaggaaatcggcgattggttatgggagccctgtgagcactggaagcttgcaggacagagttaccatcacagagaaatgggcagagcttcaggccaaaagagcacctcccactggctgaactcaatcagaatccacagagccagacaaccccagagatgcagctaatagagaacaatccttgaattgtggagcaaggcagagagaggaagagaatggatcgggggagacgatggcaaatcaaaagcaaccaatgcatgttttcctttccattagatggaatgttcctgagggcagaactatttccattcattcttattcatttatttatttttggttgtgctggatctttgctggcgcacacaggctttctctagttgtggcaagtgggggctactcttcattgcggtgcacaggcttctcttgttggggagcacaggctctaggcgtgcaggcttcagaagttgtgggctccagagcttgggctcagtagttgtggctcaaaggactagttgctctgaggcaggtggaatcttcccagaccagggaccgaacctgtgtcccctgcattggcagatggattcttatccactgcaccatcaggggaagccctctcattcattcttggagttccagcacctagcacagggcctggcccaggaaaatcattcaataaatccttgtggaagtgaattacaacttcagggcatgtactacatttaacttaatatttgtaggaaggtaggcaaactgtttacaatctactttcacatggaactgtttttatacattttttgatatcatatctgacttagatgataacagcacaaccaagacagaatccactggaaaggttaattttggtcgtcttgctttgctgagttcatgcaactgagtctaatgcaacatgaacctggatatagaagtatccatgtggggctatcagcatgagacacaaagcatgagaaccgcaaggcatatttcaattagtgatgcttgtctagtaattatacaatattgtctccagatcctggtgccaaataggcaattatgaataaaagcttacagagtcaggcaagccaggtacatttttgaggcatgaaaaaatccaggtattctatctaatgatatatatcagaccatagggtagggtgaccaactgtcctggtttgcctgtgactgtactggatacagcaagctccaggagttggtgatggatggggaagcctagcatgctgcagtccatggggtcgaaaagagtcgacacgactgagtgactgaactgaactaaactgtactggatacagcactgaaatcctttagcctgagaaatcttctgcctcaggtcacctgggacagttgatcaccttacaattagggttaattttaaaatgcagaattttggacttctctgttggtccagtggctgagactccatactcccaatgcagggggcccaggtttgatccttggtaagggaaccagatcccatatgctgcaactaagagttcacatgcctcaacttaaaaaaaaaaaaaaatcccacatgccacaactaaagatcccatgtgctgctactaagacccagcacaaataaataaacacatatttttaaaattaaaaaatgtagattttgattcctcaggatacagcttaactgaggctttatttagagatgataaagctgttctagctctttgatagttatcttgagttttgtaaaacttcaaatcttctttgactgggatctggtaactttgcagatgaattaattaagaagtcctaagaaaaacccttcactgacagtattttcttaaccccaaaccttacaaacaaacttaatctaattagttcctcaggtgtaaaatcaaaatgtactctagtgtatttatagaaataacaagtctgtctttccactaatttgctcacgtttctggatatatttctaaactcctggccagctttctctgcaaactgcaagtcccttgttcaaatattctacgggaggaatatgcacccacaatgattgtaccagtggctatttctaacttttgtatttatttaccaagtgagaaagtggttgagaactagtcaggactttttgcagcaagtcttcatcctcagacttttggctgaaccgtggaaactcaatatgcaataaaactgcctggttctggaaccagataaactccttttattagtgagaaacttcatatagatactgatttatgtgtcctatatggaagtacaaaaaagacttagccagtgtatagtatttataatttatgagagattttcaggaaaaaaaaaaaaaaagacaaatggattgccttgaatcttcatgggaaaggctagagctactgaagcaaattaagaaaaaaaaaaaattcaactggggacttccctggaggtctagtggttaaggttttgccttccaacgcagcagatgcaggttcaacgcctgggtggggagctaagaccccacataccctgtggccataaaaccaaaacataaaacagaagcaatactgtaacaaattcaatgaagactttaaaaatggtccacatcaaaaaaatcttttaaagactccaactactgtacatacagtaataacatgtgagtgataacaggccccttcatagt

SEQ ID NO: 48583 - DNA, 734 bp, Bovine  19866880855050
  misc_feature (1)..(1): n is a, c, g, or t
ngggcaggacttaagggtccctgtgtgtggtttgaggacagactgaggcttgtgttttgatttgagaatcaaaactgaacctaagcttgtaaacattccatgttttatttttctacaggctagctttgctaaaatgcagatgaaacattttgttctttggagtttctaggaataagcatgcctatcagacaaccctcagattattttaactgtatctctgggtctatataataattttttgaaaaaaaaaaaaagataattattcaactaaatgccatgctcattgccaatgccaaggcctccctgggttggtttgtatgtttgtttgcataacctctagctcagttgattctttttccacaggcctcggcaaccagcaggcatgtttatttaaataaacaacgtaatgaataaatctgtgatgaatacctactacgcgccacacactgagctaagagctagagataaaaccagcaccaattttcctgccctaaggggtactggggacttcccaggtagcgctagtggtaaagatcccgcctgccaatgcaggagacgtaagagactcggattcaatgcctgggttgagaagatccccaggaggagggcatggcaacccattccagtattcttgcctggagaatcccatgcacagaggagcctggtggactacagtccataggctgcagagtcagacacaactgaagtgacatagcacacacgggcgcaagggg

SEQ ID NO: 48584 - DNA, 1028 bp, Bovine  19866880858513
  misc_feature (1)..(1): n is a, c, g, or t
ngcctggagaatcctgtggacagaggagcccagcaggccttagttcacagggttgcaaagagatggacatgactgaagggacttagcactcatgcactgccccagaacgcttcccctactccgctcctttttttcatcatctccccaccccaacccatccttcaacaagataacacatgaaacttccagtcagggactcttgttaaatcatggagctgtgtctttacaagagggcttgaggcactgaatgtctgaaaggacagaggaccacgttggtcttctgaaaaatagcagcacagatatacttagccagctagccagaaagaaaggtgttttctgaagcacatggtgagtttctgcttttggtggagagaagaaggttgcaagagtttaccaagaagatgctgaattatctcagggaagctgcttaagataaacacttggctgcctccacttctggttgtttgggctcagggaccaggctgcctgcctctgctctcccgggactcttcccagaagcctggctgcatctttagatctgaagaaggcgctgctttgaagttgtccacctccagtaaaaagaagggatctagcatccctctcagcacagaccagtggagttcacccctttccctgataagaatgccaggaatttccatcatttcctgtagggaatggctaaaggagcccagcgtgaggctgtcctttcaacggcaccttttccaaacatctctaaatggaaagggtacaactgcaggcaaagtgctgaccctgggcagagataagtgatgatcgatgtgagatgaacacggtgtccctacggggttcctcttcaaagccgtttgcttccctgagtggcagagtcttctttatgtggctttgcaagtcctgatggagttgatatttatgattttataagaatctggagtcaaatggcatgtggagaagtggacacagcaaagagattcagaatagttcacctggcccctctccccctgcccctcacttccaggaaatcatcagggttc

SEQ ID NO: 48585 - DNA, 1749 bp, Bovine  19866880866223
  misc_feature (1)..(1): n is a, c, g, or t
naaatgcagggattcttattgaccaaatggccaacctgcttccatattaaggtattatacctgcacaccttcccaggtgactcagtggtaaagaatctgcctgcagtgtgggaaacctgggttcgatttgggttgggaagatcccctggagaagggaatggcaacccactccagtatccttgcctcgagaatcccatggacagaggagcctggcgggctgctgtccatagggtcacaaagagtcagacacgacttggtgactaaacaccttcacttttcaggctttttaagctagggcagatcaataactttctgtctttgcatctgcaccttcttcttgtaagtcctgccacaactcctgccagacagaatgctctcaaccacttctggtttggtgcccccagagtagaatgggtttttgttcaaataaactcttaacattcttcatatgcctcagtttacctctgaatagttcattcaagtcagagaggagcccagaccatgtcccccctgtgacgaggacaaaacctgttggcggtggtggtggatgggcacaaaaacagaatccgtagccagggcacttttcatcggtttcctcctaacttcccatcttgatgaaaaatgtgaaatttctctgcatgcttctgacagtcacctttccccctccagagtgatcagtaagggggtctgcagatgcttccagctgagacaggaggagaagacacccagcgagaggaaaggtgcggggaggcggtgtggacatacagctggagtcagacaagactgggactatttccttagccacactgatgaagggtttctaccaggtccttagtgaggagcaactggaacctgatatcaaaacccactgtatgtccttcctagtttattgtatataattaagtaccaccaactgtgcaggctttgcattccagggcatgggatcagtcattctcaacaatccttttgttgacttccttaagtcccagctaagaagcccttgagggcttccctgaactgggaggaactgatcaccatggtagaactctagtgcccaggaatgcccccctattccctcctccacctcacccccatcatctctgcccagtgtgcttcatggcacaggcacaggggagcatcagacaacagacacaccaggcgcatgccttgcctccaactgcagaagaggccagtgcgcagccatgtgactaggaatgcatatttctatcaccatactatgcaaagtcgctaggccttcctgttaaatccccctcttagctccccttctgagcctggaccttgtctagtgtgcgggccctgctctaccaaggacccaaggggtttgggagggtggtcttccaaatacctcaggcctaggctgctgtttcgaaccacttggctcatgtaaagctttgctagaattggaggtgtttcaaaggcaatgaagagcatatgagaacaaatgatctaatacagagagtgaattcctggagacttagtcactgagcaaggaagcaaaacagaccttgagtgatggtacaccttgaggaccttgaaaagacatcgtctgagggaccataatttatcctatcatttatccataatttatcctatttattctatcttgggaacactataagcaatatttgtcaaatatagattttacagattcttaatatttagggaacaaaaagttccctttaaacccctttatcaaatgtgtacattttcacatgcttgcacacaggt

SEQ ID NO: 48586 - DNA, 832 bp, Bovine  19866880933499
  misc_feature (1)..(1): n is a, c, g, or t
naaaataaagccttaccacatctctatattcataaagatgtattcaaatcagaaaaataatttacatgagttttatgaatttgaaatctttagcattcctcctgagcttatattaatattctgcacatttactaaatgtatagtttctttcattaatttttttcatgtatatgcatggggcttccccattgattcagcagtaaagaattcccctgcaatgcaggaggcacaagagacactggttcaaaccctgagttgggaagatccctggagaaggaagaggttaaccactccagtattcttggttggaaatcccatggacagaggagcctggtgggctatggttcatggggttgcaaagagttagatgtgactgaagcgactaagcacgcatatatgtataaaaagggcagccagttctgttttggttttaatgtaaaaagtatacatgcattatttgtttaaaatttataatgtatacgttgtctgctaaaaaaagaattgttaaggccaaaagccagataatgatgccactcagaacatacaatgtctgccaggatgtatactgtctcaaaagaatgccattactttctccttgtagttttataataagaaatcctttattatatgaactgtaaacaaatgccttcagttctgaggagaggattcctcgccccggggggcagttcatccatcacgtctcttacatctgcccctcgcgctggccgcttcctcctggccctcttcctattcatttcattctatgggcatggagtttattgtcaaccctcctaatgatacacttcagcagccctgactacttcattatcaa

SEQ ID NO: 48587 - DNA, 1497 bp, Bovine  19866881062578
  misc_feature (1)..(1): n is a, c, g, or t
ngaataaacatgtgctttgagttttccaaatgagtcagacgcacgtcgcgagataaatgctgatcgcaagcagatgtgacgtgtatgtttcaagagggacgagcagagggggattgtgtcttggcatgttccacacttgagatgatggactgacacttcatggagtctggtcccctaacaagaaacacggggtggtgagtgatcccccccgcaagtccttctttctttccgtaagaggaatctacgttttaagacttcaatgtaaacgtgttctgtctgcaatttgtcggctgactctaatcgcctcggaacttatataaactctaggtgagtaatttccccaagtgcggtgcccccttgcaatgtgtgtgctgtgaactcagattaaacttttaacctcacatttttctgggaaggattattatccctgtttttattgtttaaaaaaagagggaatcagagactaaaatgtctcgtgctctttctgaggttgagttgatacacctcacccgagcctgtcctttgcgctgtgtatgcccggagactggggacacttagctccctaagctcgagatgagaggatctagggtgcccaagttgggactctccccctgccttcctgtgacactcccaactgaattgtgaactgtttgtaggaccctctgccatccccactcaactacagaaaccccaggtggctttctgctcatgtacaccacatcctgttgccaggtgacgtacaaaactcgttcgtcagcagagcgggtggtctgggtcttaggtttctgctgtgttcctccacgtttggctttcctgcacctcatctccttcttccagcaattgggtcaatggtaggctctccgagagtgtttgctgaaccatcccaaatgccaagcttgaaggtaccacctctctgcaaccttagtccctgtactctttatcactccctgggtctgtcagctgaatctgttagcccttcaatacaagggtttttttggactgcattggcatcaatgtggaaacaaatggactggcttattctcccaggagcttctggttatttgtactttggtttttgttgggtgactgccacgaggcagctagtatggtgtctcgggaggaatggtgggcagggagcccagtattggttctgctgccctggtctgtgtggccttggtcaagtcagtggtgtccgacggggcctcagcttgtccatttgtcagttggaggtcttggattcaattgtcttcctgttgaaacagtaataatccccttagttttactgtcaggtttcaaaggaaagcaaaccccaaagcaagaggcaaaaatgggaaagcttcaaggtggaaagtgcgtgcttgctgtatctctgagcaaggccctttttctatggcgtgagacagcattccgctgaggctgctgtgatgcgcttttcgtgttgtattttatcatcctgtggatattctggattcttgagcaaacaagaaacacactttg

SEQ ID NO: 48588 - DNA, 1924 bp, Bovine  19866881076263
  misc_feature (1)..(1): n is a, c, g, or t
ncccagcccacctctccatcccagaaaaacctcaccctgggggcagctgtggccacatcaagcccaggaccaaagggtcactggaccttctccaggggccagaaaacaccagcattccaggcgctgggaaggccctgctaggggaccaggttcctgaggctgtggaggacttgtaggggacgtgtggaatcctctattatgctttgacattggagtgatatactgggaggaaggagaggtttgcaagtttcccagggtcctgaaaccttgggcactttctcatctgtgtattttgaaagaggactgaacagaatgcccagaaatggtcaaagaatggggggttgggtgagtattggaagtatccaaggagtccacgaaggcccacgccggaagggactttaaagacagacgtttcactttataagtagggacacaggcctatgtgtggagagggacttgtccaaagtaaaacaatggagagtggagggcagggagaagccaggccctagacccagcctctgcacacctcccatacacacaacacactgacacagaagctggccctgatacataatttaatgcgtgtgcaggtccgggtcccttatttctgctgctcacgggcccactgctctggggtcagggttttctgctcaaaagcgtgaatgtgcaggagctcttctgctaggcaaagtgttcacaagcctgggagagagatgaggttagaaatgggcaggctggggcctgggtcgcagtccctgaagctagggtctgccgggagactggaggggtcccccaggttgtagtccccgggacctgggaacaagagaggtagagggcttaagtctcaatatttgatgctggggccacgaaggcgggatccctggggtggtggtctgtggttgggccgcatggatgggactgagagttaaagtttcaggaagcggcccggtatgtggtcccagagctggggccgcgctgaagaaggtgttcccggaatctcaccggtgtctctgaagcagcggcttcccctcgaatttggccgacaccacgaggactcggaagctggacgcgcaacggttgggagtcgtgtcctccacttcctatggagcagaatggcgtggatggtgccaagtccgccccccaggagccctgttcccctcgttggacgagctcaggccgctcaactcaccacgtgctccgcttccaggtcccgctgcagcttctcccggaggtactcggcactgagttccattgtggcagcccagggagggtggcagcccaccggggatgggaccccagttctgaccccagccacactgcttccgcccttactggcgccacttccgctgaggcacctacttccgcccttactaagacgtccgtaaactcagcacttccgccctatcccaagcccagttttccgactgccttcggttgccgctcctgtcagagtcagcatgaggctccagcagactctaatcggtacccgccgcctgaacagcaacccgggttctgtgcgctggtttggacaccctagctccaactaggagagggtgcacgggtttgcactgctgtgacttctagggtacctcgggatagctcccaagcgctttttctgaaacaagcatcttgtggccctggcaggccagccctccccgggtcacaggccacaacaatcgacccccaaattggcgatgggccccggatgcttcttcggcgtctacctgctctactgtctgaaccctcggcaccggggccgcgtctacgtggggttcaccgtcaaccctgcgcgtcgagtgcagcagcacaacgggggccgcaaaaaaggcggggcctggcggaccagtgggcgcgggccgtggtaagagaaggcgggtcactgtctggaggaggacttcaaggagaaggcgggggccggcgaggg

SEQ ID NO: 48589 - DNA, 924 bp, Bovine  19866881129660
  misc_feature (1)..(1): n is a, c, g, or t
nccaacttccagaacctagaaaatgtgatttcttaatgacacacctacctctagaggagtcagattccttcataaagagtgtgaatattaaaaaccatgaaatttatggtgtagtacagctaattgaaaatgtaattagaaataaattaaaaccaacttcatgttttaatcactgtggaacacttaaagtattccagcaacagggcaagtaattttcttctggaaaatgtataatgatgtcattatttttttacttgggactccagagaaggaagaaatattaaaagagacagatatttgctgaacgcaacagataggtggtgctgtggttcaccaaagccttggaattagactccaaaggcctgggtttttacaaaggctatatcccaagtttaaaaatcacaattagaaagtcaaataagtgccttgaaaaggcatctgacttgcatagtagctgaatttttgccttgacaaataaacttctgtagtttctaagatgtccactaattttctatttggctaaggaatgttttgggttaacacttcaattttaagcatttgcaaggtctgtcacagacttctatcacttagagaaatcaaatactaatgcaacattggcttaaacataatgagtttattgctttatgacataattacaaacccaaggaaaactctgtgttggttacctatgacaaattgtccaaatgattctacttggtaaaggcagctttcttttttggctaaaaacacactctgcttggcttcagaaggcttgtgtctgatttcttggctccatcccttcctggctgctgcaccagctttgagttccttggctacttaatcgtctgagaatcacttttcttccagtccaggggttctatctggtgttctaggtctctccaagactcacagggaaccggcaaa

SEQ ID NO: 48590 - DNA, 1447 bp, Bovine  19866881167080
  misc_feature (1)..(1): n is a, c, g, or t
ncactctggatttaacaccctccctggggaactctgctgatttctaggctgcagatgtttttaaaccctgccttgaagaatggctatgtcacatgctctggccaatggaggcaagcacagtatttaagcaaagcatatatggtcagcaagtggaccgagttctgtccatccgagttcctcacctctgaaataaaggtggggagttgttccaatctgtgaatccttcgatgaagtttgctgagctgtcgagaaatggacgcctgccaagtgcatgatttatttacttaatgtaaggtggtggttgttgtttagtcgctaagtcttgtccaactctttgtgacccccaggacttcagcatgccaggcttccctgtgcttcactatctcccagagtttgctcaaactcatgtcccttgagtcggtgatgtcattcaaccatctcatcctctgttgcccccttctcctcctgccttcaatctttcccagcatcagggtcttttccaatgagtcagttctttgcatcaggtggccagagtattggagcttcagcttcagcaccagtccttctaatggatattcaggactgattttctttaggattgactgatttgatctgcttactgtccaagggactctcaagaactctcagtccctccaatccccggccttctcagctgcttcctcgttttgctcctctcagcactccacaccaaggagaggagaagaaaagctttcttcactttgcatctggaaacatcactgccaacagaaacgggatccttgaccgttttgagcatatgattaaggggatggcatgtcttactggcaggatatgggtcatttctcaaaagttacagtaaatttatcttttaaaattcttccaagctacataaatacatcgtagactgcataaagatgtggtcagccagaggcactgcatcttctttggggcaaaaggaaccaggctagacctgccagaagagagttcagaccaggggagactgtggctgagataaatctcaagcccaagagttgggaaaagggaacaacattcagcttattggtgatcttctggggagggggtgtccatttgcagctattttattgttctaagttttcttaggacttccctggtggctcagtgataaagaatctgcctaccatgcaggagatgcaggtttgatccctgggttgggaagatcccctggagaaggaaatggcaacccactgcagtattcttacctgggaaatcccatggacagaggagcctggcaggctacagtcaatggggtctcagagagtcagccaagactgagcagctaagcaacaataaagttttcttatctgttaaatgagtcatttttaagaatgctctcaggggaggactacatcaggaccaaaaactccatcactgatttcctagctgtccttgaaacatccctctgagg

SEQ ID NO: 48591 - DNA, 770 bp, Bovine  19866881190033
  misc_feature (1)..(1): n is a, c, g, or t
ntattttggttctgggtgttatatattgacttccctttatagcaaatgaggatttagttctcctacccttcacctccacctgactactatcacggatacctcctgatgcccctcatcatcccaatatagttgtatcacaatctggactagatcaatatttggggtttatattaataagatgtgtgtctgtgtgtgctgagtcacttacagtcatgtctgactctttgcaaccctttggactgcagcctgccaggctcctctgtccatgggattctccaggcaagaatactggagtgggttgccatgccctcctccaggggatcttcccaacccaaggatcaaacacgcatctcttacgtctcctacatctcctaaattggcaagtgaattctttaccactagcgccacctgagtttctgtaatatgccacagatgtgctagctgctgaggggacaacgtgataactgtcccgtttttagagggctttccatctgcgggaagtcaaaaccagaacaggaatgtaagacagatggagacaattgccgtcacactgatacagagcgggtgcagggcaaggagaggtaaattctaaccatggggatattgcacaacttggtccacagattgattggaacatattaatatgtatgactctcagttccccaagccaactaaactaaatttcacttgaactcatggcactctgaaatcagtgatgctcaaagaatgtcagcaagaatttctgttcagtgttctccatcacgaaacct

SEQ ID NO: 48592 - DNA, 986 bp, Bovine  19866881387941
  misc_feature (1)..(1): n is a, c, g, or t
nctatattttacaacattatatatctacataaggtaactttaagtatttaagacaccctataatcttattttcactataagtatataaacatcacaaaggctgtgtttttgtgcctctgctaacaattagcataatgtgcataaaaaagtgctaagacaccaaatatttgagtaaattagtacaggcttttcaaaatgatagtacagtaaaattttctagagagagatcatatatagaaaggagattatggtcaaaaaccagtagacattagaaccaacggaatatgctcttggcagccagcagtggtaactactaggaactcagttcagttcagttgctcagtcgtgtccaactctttgcgaccccacagactgcagcacgcaggcagctggactgactgaaaaagttatagatcctataatccatgtttttggttgcttcttactagcatttttacctctgttccttcttggatggttttctgtccccaccagccatgcacttttttatgtcattgaatatcttatcaggaagaagtgtgttttctactaacgggaattttaaatagtattaaagcagatcttgtacttctgaagaatttgacactgatcacaggtacagtagggatactgacaaaaaacgagccctgctgttgccatatgtgcacagaaagaaaccagttactgaagcaagctggtcaatactgttttaggtgcaaaatttccaatcaagtggacagctcctgaggctgcactgtatggtcgatttacaatcaagtctgatgtatggtcatttggaattctacagacagaactggtaacaaagggcagagtgccatatccaggtgagcttgcattcatgtacctggagtttatgggggagaggccttttttttcctctttgtttatctgttttctttcttccctccctccctccctctctctttttggcattgcatggtgagcagtctgtgagagccacagtc

SEQ ID NO: 48593 - DNA, 1602 bp, Bovine  19866881418249
  misc_feature (1)..(1): n is a, c, g, or t
natcatttgtaataacccagtgaaaactactttcttagttcttcccaacatttatagctgtgtttgctgctgctactgctgctgctgctaagttacttcagtcgtgtccaactctgtgcaaccccatagacggctgcccaccaggctcccccgtccctgggattctccaggcaagaatacatggagtgggttgccatttccttctccaatgcatgaaggtgaaaagagaaagtgaagtcgctcagtcatgtctggctcttagcgatcccatggacttcagcctaccaggctcctctgtccatgggattttccaggcaagagtactggagtggggtgccattgccttctccatagctgtgtttactcatctgcaaaaaggtgtttataaattttcgttgaattgggttctatttgtataaagactgggatatgtctgacccagccagacatgtatgacttctcttaaaattcaaatgttgggatttccttggtgatcccatgggtaagactccacacttccaatgcagggggcctgggttctatccctgctcagggaactagatctcacatgctgcagtgtgagacccagtgcagccaaaataagtaaatattttaaaaattcaaatgtcaatgtagttgtctccctatctcaactttaccctccatcccccagaatatgagcctattgagaagcaagactaataatagtccattgagaggttcttccttagcagtgaatggggctcagaaatattcagaaataaggagcccccttcctgtgtgtgcttccctcatggctcagatggtaaagaatctgcctgcaatacaggagacccaggttcgattcctgagttgggaggatcccctgaagacgggaatggctacccactccagtattcttgcctggagaattccatggacagaggagcctggcgggctacagtccatggggtcgcaaagagtcagacacaacacagtgactacgactactactattcctactttctgtgtgtgggatggactgtgtccttaagccgacccttgaagtcctaggctacagcctccacagttaaccccatggtgttcgagcagcctgattactgggcttcagccccagttcctggttttcactgctatcctctgctgggccgggagccaagactgaacccagtccagctggctgaaactctgaccctttctcctagtttctgccaactttgtttctggtttttctaccttgatccatatgtacttctttgggccaagactctggtcagcgggatgccaggaactcttatttcccagaatgccacaatcctccccttaccctcagaccaggcccctcccactgatgcttgacccaagctgaacctgaatcccctccaactgcacctgaatccacacgaagaccttgaacctgaactgttagcatctgcagtctgggtgagtttccctgccctgtgccagctacctcagcaaaatcctttctcacagtaaatgcccacatacccatcacttcagccagtcctgctgctctgacaaattagtccctgttaatgagaattaaacccagagtagtagttttcctgattacattaacag

SEQ ID NO: 48594 - DNA, 1028 bp, Bovine  19866881464415
  misc_feature (1)..(1): n is a, c, g, or t
nccactgcaaggagaggggtcgggaagagggtggcggggcgggaggcatccggtgagtagacgcggggtgagcaggcagacccgacccaacgagggaatcttcgggggagggcgcgagctctccgcgcccagcacgccaccctgcccggtcagggagcagtcgcagggagggcagcgatggtaaccctcgctactccctccccatcaaagatctcggggcgccaagtccttataggatggacctgggaagaggtcccgggccaaacgcaagcgatttaaccctaacccctctccaaacgctgccctctcaggtcggaccatcagtgcttttgcgctcaattgtcctaaccgttcccggacgcccccacccacgcagagagaaaagcaccaaagagccctgaatttcccgttggctgttgccgtggagtttacatcgattccgcaattcccagtcagaggggagcactgctctcctacgcgctaagttgaaaaacgtgataataatacaagtcgacaggctgcaggcaatacttttcatcacatgaattattcagtgcggaaaacgtattctggtgtcccatgggctctattaaaacattgccttctggtgacagaagctcccgcaaatcctgtgctttgggtttgtctggcacgagcaaaaactgtttgcttccttaggtgtccaaatttgaggatttgtttatttcgatttgaatttaacagtgaaagaaatgtggggaaagaaaaagtaaatcgtcccaagaaacttgaaggttttgatggtctggagaggggggaccacttattattattatttttttttattcaaaacggatcagacataccgattttcctgcccgctcccctcctcgcctcattcccgagctctctggccaaacttctggcacggtacctaaaccttagcctgtgggcagggggctggccctgtagaccctgcagcgcagacgcaccctcggccccacgtgcacgcaaggacgtagaagcagccccgccctcccagtgcgcac

SEQ ID NO: 48595 - DNA, 1201 bp, Bovine  19866880415729
  misc_feature (1)..(1): n is a, c, g, or t
ntttggtgagcttggggcttttgtcctctggcgctatgcccaaagcaggtacatagctgagctggactctagtgtggaagatgtccgctccttcccctgtgagtttagacttgtgagcccctccacgtatttttatcttcagtgaggcaggctgttgaagtccctgtgggtatgtgcaatccgcacaatcagcttggggaccttagcagtgtgcctacctaggctatttaatttcacagccatatactcatgaatacctttatatgggttcctagcactttattccatgttacagtgtgatcaaagctacttgccacctgttctttttaaatctaatttgcaaatggaaacttagcgtctggctcacagtgggatatgaaagcacatctggctgcttttcctcctgggccctttatctccttcagtaaagctgctttctggctcaaggagagggaggctcctttcaaggtgccacagtgagtactgtttaccctgctgacagctcttaaattttttactccccctctgctcttgtcagcagcctcacagctactccttaattttcaacttgttgaacactgattttttttttttaaatcaagccttgggaactaaatgaggccattgggatgagaaatgagcatattctaggtggagattatatttagatgcatttggggtgtctctaaaaagctaaccactaagttgtgggaacacgctggagcctacttacttacttagactcccctgagccattgttcttaccaaaacagaacttgtcttaacctgaaatggcttgttgtggcgtgtgtagagcactaacttctgaaaacttaagaagctacaaagggaaaaggaaacagtggttactttttagaagatgtgacactgacttaaccatactgcccctgtgccgtacctgagaggtgggagaagcaggctttgatggggttggccttcttgattttgctggcaggaaacacacggtcctagaagatgaattgaattttgctgtagtcttctcagccagcaactgcaggcacctccagctgtcattttctccccagctgcagaccacttggatcctggtcttccgagggctgtctttgtgctttaaagccagacacagagtaagactgggcctcgcccgtttttgtcagccgggtgtgtgttgttgagcacgtcagcctggaggctccca

SEQ ID NO: 48596 - DNA, 2347 bp, Bovine  19866880516880
  misc_feature (1)..(1): n is a, c, g, or t
ntttctgtttgctcacagcagagatgaaagcccccaagcgccggcagccgtttgtcccttttgctctgaggaatcatacaggctgcactctgtggtttgccaccctgaccaccacgcccaccaggtaaggaacacgggatctgtcacctggtgccatctctctcaccacaggctcctgtgtaccaacccagcagagcaagccgggccctctgtgaggctcttgggatccattgcatttgaatcaataacatgatgtcttgctgaggctaatgatggaggttctggttctacgtatagtctgtagtcggagaagtagattttgagtctgaaatatccaaactgtgatcttgatgcctgggcatccattgtttttaaagtaaaagttgagtagtttaaggatgtgaaagaaaagtcactccatcctttctcctcggtcttcattctacttccctctttaagaaaagctgtatgctattatgaaatcaaatggtttgcccatttttcttccaaaactgcttgaaaatacttctcatatccctcacctccaccccgaattatcttccaaacctgcagcacacttgagaccaggtggaactgggtggagttgggagaacaaatgagttcacctaagccaagtgagaaggctctctaacaactttctgcggatttagaccttggctcaactctccaaatgcagactgatcttcccaatttagcagtgaagtatatgaaatgaggcccagaatcagttgatttgagaacgtatttctcttgcctccaccaagtatggtagtgctctagaagaaacttttttttttttagtcagtttttttagtcacttaaaaaaaaagtcacttaaatattgggttggccaagaaattcattcaggttttctaatactacagttagaagtcacaactagcttacataactccttgggtaccagactctactgctggcagcaggtgcttctgcagtgattgctttctagctatttgtaaagtttcaaatgttgtgattgatcatgaagttaacttgagttactgacctttaaggtcctcttttgcagccaggttatatggccttattgctgcgaattgcctcctgagagggttcctgtttccagccctgagttctgggtgagagaggggtggagagaaagagggaccagctgatactgtctgcttgggttccagggctgcactgtctcacagcgggagtccaggggtggttccggaagggaacggaacgcttcttgatgatgctcacaacgttagcgagtggcgagaagtcctgacgggtgaagagattccctttgaatttgaagcaagaggaaagctaagacacaggtaaaatgtgtttttctttttgccttaaaaaaggggggggaatatatatatatataaataatcgtctctagtgttttgcctcttcactttcctttgttaatgactttactgttttatttttaaaaggcatttagaaaaccagtgtttcctttttaaaaaaatacaaagactatttgggaatacgtttctttccatcagttatccctatatttgacaggtgaggtggtaactggtatgttccatgtaactactttggttgaagcatagacagatcatagctctccagttcattgcatcctagctggttttcatgatggagtggtgacatggtcttatgaaaaacattatcaaagcacagtgagttttaagctacacatgtgccctttcagcaagcagatggtttcaggaagcaaagctgataagatgctttcattcttttttttcttaatatttatttatttggctgtgtcaaaccttagctgtggcacgagggatcctcactgtgtcatgtgggatcttccgatcttccattatggtgcacggactctctagttgcgaggctcaggctcttgagtgtgtgggctcagtagttgaggcttatgggtttagttgctccacagcatgagggatcttagttccaagaccgggggtcagacgcatgtcccctgcattggaaggattcttaaccagtggacccccaggaaagctgcataagatactctcattctaagaataactcacttaaggagaccacttactgatgcactcaaaaccaccagttgaaggccgggaataaatgcaaaagaacattgtgcctggtaactgagagggtgtaaaatgtgtaataaaatgttcttttacttgccaacatttttaagtagaagggctgtctggtggatactgaatagttaagattttagcgtttgagcctcatcatctaaaacttaagaggttggcttcagccttctgtggtcacgtgtgttcttggtgcgttgatt

SEQ ID NO: 48597 - DNA, 1565 bp, Bovine  19866880618017
  misc_feature (1)..(1): n is a, c, g, or t
nacctgtacgtaatgtcccagcagttttatttgtctagcccaaacagaagcgatcccacatgtccatcaacaggggatgagacacacagactctcgtttccgaacaatggggttctgttcagctttaagtaggaatgaaactggttcacacagcaacatggatgaatctcaaaatattgatgccgagtgacagaatgattccacttacataaggctgtagaaaatgcaaactaatctacagtgacagaaagcagatcagtggtttcctggagacgaagggcagtgcagagggtaggaaggggggaccccagaggcacatgaggagtctggggggctggacggttcatcagctccactgtggtgatggcttcacgggtacacatgtatgttcaacacttgtcaagttgtgctttacatccgtatagtttaatatgtcagctttacctccgtaaggctgtttttaacattctgagtaatgacatcagtaaaatggcagaatggggacatccaaaaagcctcttatccataaaagcaatgagaactttggcaaaaatgatcggaatcaactgtttcagacctctggaaatcaaccaaagacttgcaatgaggaatgtttattcaagaaaaacagctgaatctcagtaagaacagcgagctctgtggcattttaacttgccctcctcccgtctgcctcccccacctccacagtagccttgaaaacctggcagctggtggagggggcagaaaggaggtgctgcccccaaccatcaattcccagaagatcatcacggtctgacatgtccctgaagaccacgcttgcaaggccatcttcatctgacttgagctggagctcacccaatgggaacagccatatccccaagggcatttgtttcttaatcaaaagcaagtggttaggattctgggcttttactgctatgacctgggttcaatccctggttggggaattgagatcccacaagacgtgcggcactgccaaaaaagaaaaaaaaaaaaaaaagaaaacaaaccagaggcagtcatttaacgttgtagctgcctaagccagcccataaatagctgggggaagaaaaagacaaacaaacaagcttaataggagacactggggagtcagatgtccacagggagatttggaaagctcccatgtattcctgggagcctggaaggccatgaacatgcccagcgctgtgcattgtttgatgaagccctgcattctcacttctggccaaccttcaggtaggaagtgaaggctaaggcagagttggcaactgctggctgagtgttgaaggtgccccagcacacacacacagagccccccagcaatgactgagacatattggtcagcagtttaaggagctctctgtccagccatcagctgacctctaaggtagctgaggagacgtttcagtagctacacaggacaaagaacacagactttacagattgactcagaaaatcagaaacaagaaccaccaaaatacaaatctgacagcaacaaaccttggggagggaagacaaactgacttccaggcttgccccattgcatt

SEQ ID NO: 48598 - DNA, 1529 bp, Bovine  19866880721497
  misc_feature (1)..(1): n is a, c, g, or t
nactctacgaacagctgaagcagaaatggctcccaccaccagaggccaccctcagagagagcatttacacttcctcctaccccagaccaccagcaggtgccatgtcccggagggagcatgcgattccggtgcctccccctcgcctgcagcgtgtcccacacttctgagatctgtcaccccatcacagcacaggtggggccacctggagacccacctggagaccacctgccagacagcaggcagctgcagatacacccagagttttaaatcaagctcacctgaggggcctttgaaatcatggtctgtgttttatggttccagtccttcctctaaacctacaggttcctttctttttcatcccacaaataaatcctttgccacaaggtatcacatgtgtgcagaagagacacttgtatgtcaggagaaatggaaggacccttaagttccctcatttcacacaagggaaaactgaggcccagagaagtaacatgataccgaattctcacaacttgctacttactctccaggagtaaattttgttgaatgaatgactgatgggagaatagggaatagaggaagattgtggtgaagacgcaagggacagctgagctggagccaggtggcctcctaacgcctcctgcaccttcccattcatcccacaaacctcccctggaccatggtcaagccagcctctggcctcagagccatcaatccagcaggaaagggatgttacacaaatactgatgtgaaagggtgatgtcaggggggtaggctcacagaggtggggaatcagtgggccagtggggtcctaagagagctccctgaggtgtgttgaagtaaaggggtgcatgacagcagtcctgggggccatgaggacatgacctggtcagggagggcttccctgcagaggagacatttaggctgagactagaatgctgagagggaccaaccaggtgcagggacaggtagaaagggcagcaatggtggctcaggctgcaggatggcttgtgtgaggctccaagttgggaaggagccttgcaggttaggtaaaggcccagaaagttcttattgctgctgaaacaaatactgttaactcagtgtcttagagcaacacagatttagtcccttcagtttagttcagttcaggtgctcagtcatgtccaactctttgcaaccgcatggactgcagcataccaggcttccctgtccatcaccaactcccagagctttctcaaactcatgtccattgagttggtgatgtcatccaaccatctcatcctctattgtccccttctcctcctgccttcaatctttcccagcatcaaagagtcagttctttgcatcaggtggccaaagtaatggagtttcagcttcagcatcagtccttccagtgaataatcaggactgatttcctttaggattgactggtttgatctccttactatccaagggactctcaagagtccactccaacaccacacttcaaaagcatccattcttcggtgctcagctttctttgtggcccaatt

SEQ ID NO: 48599 - DNA, 1736 bp, Bovine  19866880728958
  misc_feature (1)..(1): n is a, c, g, or t
ncttcactttctttttctttcttagaaaatgccagaaaagaggaaggagcaggggagactaaagcgatgctttcttcttcctcctctactcttgctgagcatgcagcataatatggtcctggaatgagcgtcctccgtctctgttctctccccataaatatgttttactttatttttattagaacatctcaaacatacacaaagtaaacagaataatataatgaacccctatgtacctttcacatagcgtcagtgattaatgtatttattttcacttctgatagtaacaactgtattacatgaaattagggaaggggtgggaaaaacccaccttaatcccacctatctcacctacataatctctcttgacattttgaggtatttcttccccctatagttttggcgtaatattttgattgggctgttttttcacaaccagtattgtaactgttttcctacctttctaggtagtcttttaaacttatttttaaatggctgcaaaatactctgctgagtagatggggaatatcttgaaaacattgattctcttaattttttttttaaaatttagcattaaatgatgttttggttaatttttctatgttttgattacttccttggactagttcccatcaagagtaggattattggatcaaagggtgtgagatttttaagtctcttgttatgtattgccaaactgcctttcccacgggtgaagcactgtgctgctggcagtgggtgagggcaccagtctcactcttaacagtgttcattccagtggttgttatgggtcttttataggagaggactgatggcttccaagatggcccccttttctcctggtggtgagactcttcctaaatcagacattaattcacgccatattgcatttcaccctctaggtgttttcgtgccgactggggaatgagcacgacacagctctttcaatcgtcgatccagtacaaattcatgtggagctggtgggaaattcttcttaccagaatagttcaggattgatggatgcattcaatagcgaagattttcctcccatcttagaggtaatgatgacaagtctggataacacaccgaggctctcccaaacacttccctttacttgaactacttatttactctgccagcctcaacaacagttccattacttcagcaaatacaaaatatatatgacattgtctctgccctagaagatctttgtcttgaggatgaaagaccttttgattgtttggtatgatcttgaagttctatgatagtttatagaaagcagagttcaacatagttaaggatattgactgtgagtgaaacaaaagaagagtctgatcagggggtaggatgtaaataggctaagaaggagagcagttctgaattaggaagcagcaaagtcagggggtagaagtggcccagcagagctgagactgagggaggtctcactgcaagaagtctggggacgtgaggaggagggagaggagaagcagagcaggtgaagccaggccaggaccagttaagacttggatgttttatttctttggtagagagggagtaattaattcataatccatttgaactgtagcaggtttgaaagagaaaagccattctgattttggggcttcaaaaaaaaaaaaaaaaaggtagaagcaagtaataaataaagcactatacccagacttcaagcagatatcccattttaaagtggtcttgtgtcggtgtctgtacagcttttt

SEQ ID NO: 48600 - DNA, 2437 bp, Bovine  19866880811765
  misc_feature (1)..(1): n is a, c, g, or t
naagaaacatgagctagttctatttcaacctcctcaaggtcaatcggcctgctgctttgaagcaagtgtgagaaagccaggggaatgaggcagtaacgtggctcagagccgtgatggagcagacaagagagtcaggtttattcttaagacagaaactgacaggttggaggcagcatgtgtgaccagtgatctggggtcatgccccaagttggtgacccaggaatctggaaggatgaggatgccatccactgccatgtggaggcctttgacatggatgagctgtgcaggcagtgggtggagcaaagcccagggcacaggtgtgcagggtcagcaaaactgactagtcatgcccaagccactgctgagagcccttccaaaaaaaagaaagaaaaaaaaagaaagaaaaggtcacaaccaaattctcagaaagcaaactagggtggaccagtctgagtcattactttttaagtgaaaaatgaatggtttagagttatggtgaaatctgtagagaaatcactctagatttcctggttcttaaagatcagttacgccttttgttcttctgagagcatcagattccttccaagagtcaggaggaacccacaggcaggttacagtgggaacttccccctaagtaaagttaaggtcatttcaaattacagcctgtagactttctcatgtcagagagagtttgcataagaataaactgaagagacacacaaaaacaaagggtttccaactaggttttattttagtgtccaatattatcagcactgatacaggagtaattcaggcaaatttatcaccttaaatacatcagagaaaaaactcactgtgtcaagcacatctcgcactccagcaaatgaacataaagacagaacaaagttagcagcattaaattaaagtgctttttgccacaattctttcagagtctcaccctcagtggtataaactcaattttatttgttgtgtaagaagctcaaaatcccaggggatacattaaaaaaaaaaattcatgtttagttattttaaataatttccccccacaaagcacaaaattcattggaattgtgcaacgctgatttctctggacatactgtgaggtgaccaccatccgggtctggcaaaaagcttggccatcctctgctgcacaacaaccttggctaagtccatcactttgttccacacaccagagtagactgagggtttgaaggaccagtgggcacctggagagcatgccaattgcatgatacccaccagcgagcagaggccactgagctgtttccctgaagtcagaggcggactcagaagggcaggacaggccccacctctctgcctgagcttgcctctttctgggagagcagtactgctggcttctaggaagctctctgacctgcccggcaaaggctgtcacctgaaggctgcctgccccagacagttaacaccatggagacaggaacctgcccccactgtgaccggtaacaatccccacactcaacataggaaacacttttcaagatcaactcgaggccccatgtgccacctggaggctctggggtcaggaagggtgggaggctgggcgctgggttccctgtgctgtctgctggccgtgtgcagcatggctggcacaagagacttcatccagaggtctggtggccaagggcggcttgagccaaggaggggtgaggggtgggaacacatttcttgtggaaccttaagctggtagggtgggctctcggaccccatgagcccctcccagagtgaggtcaaacagaaggccctgttttgtgcccactactgatccttcagccgtcctgggtggggtccactcccctcagcctgccgccaaggtccccatcttccgccatctttccttctactacatcctttaacgatctggaccaaaccatctttcaccaataagaagccagactacgaggctaacaaccgaaagcagaacaagggacacgagaagggaggcaagtctctctccatcatggcactggccgcccaagacagcacagacaggacacagcttccgcacaccacctccctcccggccacgcgctccagctgcctctgcgctatcttcctgcccctcatggcagaaagcctgcctccgcctaaaacccaagccacactcagcccactgccaatgcggaaaggctggtctggaaggctctgcaaacagactgaagcatgaaagccaaagaaccacactgacacaaaagccacaagcctcctgggactctctgaatcattcctggtgcaaactgggaagaaaatgcagcctccccacaaaggcggcctttctctgcaggggagctggggtgcatggtgggcaagtgtgtgggagctggggtgcatggggggcaagtgtgccggggggtttggcgttaagcgtttgccaggggcagggggcggtacctgcctgata

SEQ ID NO: 48601 - DNA, 1312 bp, Bovine  19866880835225
  misc_feature (1)..(1): n is a, c, g, or t
ncggctcagtcacgtgagcatctgagtctatgttgtgggtttgtacgtacaacgtagtgtttgtatccatgtatgtgtatgtgtgtgtgaggcgtattcatgcagacatatgtgtgtgtgcgtaattacaagtataaacacaccgtacatgtccacaaatgtgactccatgaagcagcgctctgcgtgtgcatagataacatttgaatgtatgaagatgccagcacgtgtgcacatgtgtgtcatgcttgagtagaaagcagtgctcagtgtcgtgtgtgagcacatgtatgtgtgcacgctgcatgtacatgtgggcgggcctgtgaatgtggccaccggggctgtgcaggggttggtgggcctgttggttggggtccggggggtctaggttccccagctgaggagggacttctgctcctctctggtctcacaggtgtgtactgttaccgtgtcaaccggcgcttatttctggtgcctgcggatcctggcaccccttgccgcctgtgcaggaagccacgggaccagcggggtgcggggaccctggcagagccagcgcaggtcaggtgagtggcctgagtgggcaggacacccaggggagtcgcaggggcagcagcagaggggagcagcctgggacccgtggtcttgagggggcaggtcaggctattgaagcctggagagacctgcaggagtgcccccactgtcgccaccccccagggtgagcatcccactgtccgtcctggatcccccacaccggcaccgcatccaccggcggaagagcttcgacgcctccgacacgctggcgctgccccgggtgaggatgggggtagggctgccccctgtctggcccagtcctcagatgtgtcctgaggcccagagagggccagggactgtcccagagccacacagcgacactgggctcaaggaccccagtctctggagttgagactgggccactcacgtcacctgtgctgcacctgttccctgatggaggccaggctccccacccacccgctgtctgcccatgagctggcataatgcagaagggtctgatttctcatgcttttgtgtgctgtgtgcacagtcctcagggggtttatcttgtggggtcaagcaacagagagtgcagtggtggtggtatagtcactaagtcgtgtccgacacttgtgaccccatggactgtagcccgccgggctcctctgtccatgggattctccaggcaagaatactggagtgggttgccatttccttctccagagagtgcaggtcctgctgttattcaagtttacagatgaggagactgaggcagaggg

SEQ ID NO: 48602 - DNA, 2503 bp, Bovine  19866880857545
  misc_feature (1)..(1): n is a, c, g, or t
ntctttttacttcagtgaaatgcagtccaaagagttttagcatccacattcactgataaattaaaaaacttctacaaatggttttaatgggacatgatgccacaataataagttattatacaagacacagtcactggggaaaggaattcatattagctgagcaactattattttgccaggcagagagttaagagttttacattaattatctcatttattaaagaaccatgccactgtggtaggtaacaatacaaataaatcaatctaacttctcagaggagtatgatatactccctctggaaatgaaagaaaaacttcttagacatctttagggaccatttttctcaactctggttgaacattaaaatcactttggataattaaaaaaaaaaaaaagaacacaacactaccacagaccagaatacttgggggcagagatgaatatccatacattctgacagctctccaaaaggctgaaaaaccaccttttaaaatttctgttttctgagaaaactattctttaataactacataggcctaaaaatgccttctaaattctaaaactgaatacagattgtatttatactggaagaagtgcctaatgcaatttaaaacccattatcttcaacaactttctcaggctgaaatcatcccagatcattcagagctaaatggaaattgatctaacacagtctcctcactatttcaatagaaaaacggatacaaggagattaagtgacttgttcaagtcacacaacacattgctgtgaaaccagactataatgataaccacaattatttcaaccataccccctttatttcttaaagcctgagtagcccacttcaatgcagatccatttgaatataaatcaagattcctcacaactagatcaaattgattctacataagaggctatgtttttttaaaacttttcctcattgcttagccgacaagaatttgaaacaggaaaccatcatgatggaaaagcttgatgtttttacttgaaagtctggaagatgagggcttcttctccacttgtagtgaaccgttctcggtagaactctccatgcgaggtaaggtcacttagagataggctcccaatgcttccctgtaaggccaggtctccctctaggaagattaaaaatcagaatgcattcttatggtcttttttctgtcacacaccctaactctgcctgaaacaaaaattgatatacacatgcctcagactttacatcatttaataaaacgaaatgtcaaaagtgaatattcatattttaacacacccagaacgatattttatgcactatttccaacagcctcaatgcagaagtccaaagggattgaaataataccacagtatcacactttaacacttataagggggaagaaattaagggtaaacataaattaaaggataaaatatttacaaatatagatagaaacatgctctattctgagatcagaccactaattagaattagcaaaacagcataaggtctattttatactatagataaaagaataaaggaaaaaatctcagagatgtattaatcaggcagtattaaatgggttttagtgatatttaattaaaaggcgacattaataaaataagacactgaagacacagatttgaaactactccaatattacacaagtgaagctcctggaaggtgggcataagaaagaggaaatgttaaaacatgcacccctgggctatgaacctatatgaatcattcttaacatggggtagatactgaaaaggaatattctgaactgttgcttatgtaaaacaaattttgtcatcataattaacaacaaaacaatgactgaggtgtatgtatttggcaggctagttctgctcccaatgaagacacatacttatttttggttctgaatgtcctctaacaaaaatacccacccgccccccaaaaaaagtgaagtcactcagaaaagtgaagttgtgtccaactctttgcgactccatggactgtagcctaccaggcttctccatccatgggattttccaggcaagagtagcagagtgggttgccatttccttctccaggggatcttcccatcccagggatcaaacctaggtctcctacattgcaggcagacgctttaccctctgagccaccagggaaacttatcctacccaagcttctcccaattcaaaggactcatctcttctaggaaccttttataaattaatttataccaggaatgaaaccaattttagttcatcatttccccaaaagacattcttattttactacagagtcaacatttgagctttgtagtcttcttattttatcaccagttgcttaaggaaggagcagtattttatgctcactttgtaaattcctccactttagagcttaatgtagctcttcacttgtgttctactaaggattacagcctattgcatcccattaggaagaatgccagctttgctacaatatctccctgcttaaaccacccactctcagtaaaggaaagtcg

SEQ ID NO: 48603 - DNA, 797 bp, Bovine  19866880929376
  misc_feature (1)..(1): n is a, c, g, or t
nacagggcacatgctgtgtgttttgcatagagtgcttctcagcaaccaaaggaccaagggaggtcctctaatcctcacttgtacaggtaaggaagcactggaacagagagctcagacttgcccaggtcactaacaaggagccagtagggacagcgcaaggatctgaagccaggcagtcggctccagagcccacatttacatccaccataaaatactgcatcccattattactggcccaagattatactcagcccacagaaaaccacagagggctttcaaaacacactccagctcactaaggcatccatgggagtaggggaggaaatggaaagataaacattatcaaacattattgtttatcaagataatagataaaggaaaaagccttattcaaattaccttgacacaccaagagagctttgcggcagtcatccgtgctaaaccccagctcctgcagtctagccagctgtaattctacggggggaaatggtatatatatttttataagtaatttaatgtaaattaacccacagactaactgaagcaaaaaaagaaatcagaaactggtgactcagtcatttctcttctataggcaaaaataagctcctaattggaagttatcaagtataccctgaagtttttaagtcttttccctatattggctgtgttttaaaagcctaaaactgaaactcagtattatccatatacttttggaagaaaacaaagtttaaaactaaatcttagcattatccgtatctctagaagaaatggtaaaaggaaaaatactgtaggttaga

SEQ ID NO: 48604 - DNA, 2865 bp, Bovine  19866880940081
  misc_feature (1)..(1): n is a, c, g, or t
ntacaagaatgtgagtcattaagtggcaggtgctctgggcagaggctccccatatttcctgttggctatggatggagtcaccgagagacagggattcagcccatgctggtctgagtcagggcccctcagccacttgagccccaggcttcactccacctgcctaccactgtcacctgctgggcctgggctggccagcctctgtctgcctcaccctgggctccctggagggaacactggcggaaggtgccgcttccttttccctctcttctggctgcaggagctgcaccgccacatagaggaaggactgggccgaaacatgtcagaccgctgctccacggccatcaccagctccctgcagaccatgcagcaggagatgattggtcagtgccacagggctcaggaccggggctctgggctgcccgagatcagtttcaggccagcctgcagaactaatgacctttccttatctcccctcttttatgatgagtcagctccataccttgaggttctggacatgtgttgtgagttcattccacgcatagactaggggtgagcaggggaggggggcgtcttgtgttaccacatgggactagcagaggctgagagcttggcctgctccttaaatccacatagtaacgggtatggagcctcagtctgcgtaccccacccataggccggctcatcccggcctggtttctcggtcgcactgccggcatccttgccagcagcaggtgtggtgaggctcagcactggcgaggcacagggctgagctgctctgctttctccccactttctttgttcccaacagacggcttgaaacccctccttcctgtgtctgtgcggagtcagatggacatgctggtccctcggcagtgtttctccctcagctacgacctcaactgtgacaagctatgtgccgactttcaggaggacattgaatttcacttttcccttgggtggaccatgctggtgaaccggttcctgggccccaagaacagccgccgggccttgatgggctacagtgaccaggcaagcggagtccctcccccttgggcattgagggcggctactctgtgccctgggcacccaagccattctaaatggggctcccggaggtcatgtctgtggcatgtgggccaccaacacggtcaggtttctgccacagatcaacctacttttattgtaggcactaatatttgtgaaattacaaaagcaagctgtattttttttattaagcttataggtatgtaattattaaatctagatgacctgtctgtccagataccaccgttttcacgtttagatgttaacccccatctctgtacctctagaggtgtcacctgggctgctcttgggccacgtcccaggcttggggacctaagctgaggccttccagggtggccacagctcatgatctgtggtatccatggtgtttacctttgggctggcaggtctgtcaggaagccgaaatccttgtctgctacacgtggagctcattttctattttagaagttgaagtaatggcccatgtccctgttctggactcttggccctgagggttcctgagggtttcacggaatgagggatttgctgccttcttcttcttagcaccaccctgtttctctccacaggtgcagcggcccatgcccctgaccccagccaaccccagcatgcccccactgccccagggctccctcacccaagaggagctcatggtttccatggtaactggcctcgcctctctgacgtccaggacctccatgggcattctcgttgttggaggagtggtcagtgacaagcccagcacaggaagggtgggggcaggtgggtgggaccgaggggcaatctggcggtggtccctgcgtcagccctgcactttacatccattatgactttttgctgtgatctcaggaaccatgcaaccttagccctgaaatgtacatttctgggcggaagtctcattcaacataaggtgacattgaggttcccattttacagaagaaaatctgcagttggcttgccaaggatacacagcttggatttgagctctggccccatctgactccaaggccatgttctttcccctgtaggcctagtcctgtgggtagggaagtaacctgagaaattgacaaacccgggttctagagaggtgggcatgaccaggagtttctcatttatacgtgaggaaacagagcagaacttgcaagggcttgagccagaaagaggccaggctgggctgtgaaccctcatcttgccagctgtggttttatggcccttctcttctgccccgaggcctgaggtcacaggctgccttcttgataactggggtattctccatgtcttgacccaagacacactgcagccagagtgccttgtgccttgaattttcctgatgatgtgggcacatgctctctgcgacgttcatttgagttgtagaatggtggcagaatgtagctgacaaagctgctgggagttggcttctcagcttggaaggccagggtaggctggagctgaggccccgccctcccggcctgtagacagtacctactttggttctttttttggtagatggtaacctggtagaaggtcattagcttagaagctgacacttgacagttatgtaacccttttacaattggtgtctcattttacccaaaccaccctgggaattgggtggaagccatcattcctatttcaagaggaaacgggtgtaaatagacttgccgtgggtcacacagccaggatggcaggcagcactggagcctctgtttctggctccacgtccccagctctttgactctgactgtgctgccttgcgccaaagtgttacaaagcagctcaaaaggagctatctgctgagcacca

SEQ ID NO: 48605 - DNA, 863 bp, Bovine  19866880993563
  misc_feature (1)..(1): n is a, c, g, or t
ntattgtatggctgagagatttgcctttgttgtattgacctagattaaaccaccagtaattagtatcttgacatttactcttaagccaaaagataacatgttccagttgccaagtcgttgctgacactttgcagccccatggtttgtagcctgccaggctcctctgtccgtgcgattttccaggcaagaagactggagtgggttgccatttccttctccagggtcttcccaacccagggatcgaactgtgtctcctgcattggcaggcagattctttacctctgagccaccagggaagcccaaaagataaaatatattcctgcaaaattggcagagttttcagcaggtactgaattatatgtaatgtctctgcagagaattacacatagaggaaagaatcatgaccctgtggcccttttgtttatgggatctggggtacttgggaaataccatgtggcatagagtctttgaagagtccaggactgggaaggaacttccaggatagtagatagagttaccacccccattcctgctgctagttttcttttctttcctcccaggagtctgtgccttcatcttccccaactggtactcccaagcgcagtgtgaggaaaatgacaagcatggaggacctgaaggggacccactccgaggggctgatcatgatgcctcctgctggaatgagtcgaggcagcttgaagagtggagtctgtgcccagcacctcgaccaagcagcaagggcagccagccacaacctctgtcggccgagcttccagcagtccaggtaaaggaggagagaggagctgcatgaggaaggaggggaaattcacgagaccgttgcaggatcctaaggggcgctgcat

SEQ ID NO: 48606 - DNA, 2813 bp, Bovine  19866881076870
  misc_feature (1)..(1): n is a, c, g, or t
nttggcctgttgttgttcagtcactaagtcttatctgactcctttgcaaccccatggactgtagccttccaggctcctctgtccatgagattttctaggctggaaagaatactggagtggttaccatttccttctccaggggatcttcccaacctagggattgaacccacttctcctgcattgcaggcagattctttacctctgagtccttgcaaatgccccttctggtgttgaggtgtagtttatactggatggagttaaagtgcgagcacagtctcatttaatccttacgacagccctgtagaatctgattatacccattttgcataggaagaaattgaagttcagataactcagtactgtttttattgagtgttccatgtattaggctctgtgctaagtgctttacatgttttatctaatccttgctgtatcctcgtagatggctattctcattcccatttgaagatgaggagacagagaggctcacagaggtgaagttactcatccatggtctcacagctattgaatgtcacagaattcaaactcaggtgtgaatgtcctgtctttatgccatatacctgcctccttggagttttcctttgtccgagtatctgccaccaagacttcatttccatttgaagcatcatcaatgaaaaagtttcaacgtgaattcaattttcaatgtgtctggcttttctttttaaaatgtggaggcagagctggggcgggcagtgaaagatttcctacaccagtcactcctacgttatgttgtagctctcatgggcatctctgctctgtttgaatggtcattttcaaagtcaaggacatggatgaaacagtacttcccagcctcagaaaagaccagttccagagggcacccataaagagtgcccactgcaattacctccctctccagcccatgtgtcctcaccctgtcttttagggagaaatgagatatagggtgtgatttactttcccaccgaggtggggaatgagagatggaattaagggtgactcagtgctcccacagtgggagaaggccgcaagctttgtggtgccgtggattcgactctcagaagaccagtggactggcccaaagcccagcctttgatctttcatctggctggcttcagtttagttcctataaatgtttctccctgcaaaatcttattaagctctcatcagtatgggtttggtcagatcatggattcctacaatggcacaagttttctgagttctcaacatcatatttctaggggtgaagactttggtagtcatttcctgttaataaaatctctttgtatcctttctgtccattcacaagtgacaaaggacaagcccagctggcctgcacagtggttttttaatagagagatggacattcagatggaagccctggagtgtgcagagtataggcacctttccacggcagtggtaaggctcctgagaagcacagggaagaatccaacatttagagggaggaaagggatctcttaggtcatcttgtcccacccttctggggtcaatgtggtgtttctgtacagagaacaccccaggccagttggtgctagggttgccaaggctgctgcaacagaatcaattggcagttaagctttgacatagcctccctcataaatcttggctattatacttgttttattggaggatgggggacagttaagggaaaggggttggtattgggctatttgcctagattattaccccacattctcttaggggggaaagtattatggggtttttaacttctaagtcagctgccagaaatatgtagacaggaccttaacttactatctcttccaggaagatctctctttttaggaaagtcagagttgaaccattctttccttcttctgtgacatcagggagagacatttttgtccagaccctgagtgaagaccactggcaacctctgtaattccagaagatagcaagaatgcgctccaaaacaagggtcacatttctctctcctctctcaattcccaagtgcaaagagtttttgttccaggttcttgttgctggccgtgtcacgtgtggaattgttgtcttcctaatgagactgtcacttttgagagtaggtccaaggccgctattcgcttgcctccttagcaggacctaaatctgtgctgggcccagagtaagtgcttaataaagacatcctaacttggatcatagatcacagactgtcagagctggaaaggattttggaaaccaccaagtccaacactctaattttatagatggtaccactccaaaaattcactttggaggctggtgtttatctgctgggaagagagtttcggttttttcctttcaatgttaaattctcgcgcaagtgaccatcattctaaatgtttgaaaggctttctttagacagtgtgggatgttcctccttggactagtagctgactaataataacctgataacagtaagagtgctgaccagattccataccctgagcaactgtcactgatcctgtcagccacaggacagcatcaggactatctccctcctacagatcctgggagggaggcacagcggtcaggcccctggctcagggtcacgtggctaccagaatggttgagactagaatctggtttggccagacccccgagcttatggctcacagtggttctaagtggggtcgctggagaaaatccccacttaataagaaatcccacagtgtctctgtcctaaaggaaagtgtaaaattacttttcattaacttcagctctctaattagacagggagtgacagggaaggtgaggcagaaatcagtcatgacagaggt

SEQ ID NO: 48607 - DNA, 3763 bp, Bovine  19866881140037
  misc_feature (1)..(1): n is a, c, g, or t
nctaagatatgagggaaatgctaagaaacatacctggttacatgttacacagagctggtgagagggaggtaagacccaagcccagccagtctggcccccagacatcccgaatccttgctctgttgtatctaaagctttctccccccaaccaaattgtgctctgagcccacctcttctaagaagccgtctccacgcaccaggcactttctctctagggttctctggcactggcataccctgactggccactctgtgagctgcttactcccgtcagccctggccctggccctcccctggcccaagatgccccctgctcacctcataatccactccaacccggttcagggcgatgttgatggtgaaggtggaggcgtcgtggtgtggcaccagtgagggctgctcatcgggcttgtagcggacgacaaaggccaggtcgaattgggcctgcgccaaggacgtgggacaagagaactggagttagagagaggcccccaaatgctgggagaggcaggggtgcacagaagggacccctcatccaatcgctgcaaagtcgaccaagacagcagatctgcttatgctgtgttctccagcgtctggcacagacaagtttctcaattaaaacatggggtggaagggaaggaaaagtaaagaaagggaggacgtggagggaggaaaggaagagcaggagaagaagatgaagagaagagaggaaataaacgtaaccctcacgactttctggctggtgattccttgggggcaaggccctggcacactcaaagcaggtgtttggagaaaaccagggtaaacaaggaggaggtgactgagtgaaggagggcaaaagtcaaaagaggcagccagacacacgagggagggagctaaaggaatgagcatgccagccagctaacacgggcttatatgagcctctagagcaagatttaagtacacagaggaggatgcaaagaagtgagtcctggctggaggcagagtggcctccccttaccaactagatgactcccgaggccccgcccacagtatccgcctcctgaggccccaccttccgggggcctagcctcacccctgaagggaggagacgccactcctagagactaaatattcagtaaactctcccccaagcctggaacgccttcctcccctcccccaaccactccaccccacaccctcatcccggttgcaccccagtcgcgcccaccctggtgtagtagcccgggtagagtttctccgtcatgggggcgatgtactccaccaggaacttgtgccactcccgctcaaagttgatctggttcatgtggatgtcgatggttggcacgttttcgtagccaccctggatgcggttgtcctagacgtgaccaaggagaatttggtaagcagaattctaagatctaaccccctaacacacaccatgaaattccagctccctggtgtagtgcgtgttgtttcagtcgtgtctgactctgtgcgaccccatggactgtagcctaccaggctcctctgtccatgggattttccaggcaagaatactgaagtgggctgcatgccctcctccaagggatcttcccgacccagggatagaacccttgacgtctcctgtgtcttcagcatggcaggtggattctttacccctgagccacccaggaagcccccctggtgtacatgctctgtctaaattccctccctttgacctgtgaacctgatggggtaaggttaggttacaggacaaaagtgaagggattcaggagatgtaattaatgtaatgtctactgcctttgggttcatccagagggagatcatctcaggtgggccttcaaggagggtttggaagacagagattttgtgtcctgctggcccagaaaaagcaagctgcttgaaatgatgcagctgcaaggatgtgagttctgtcacatgagcttggaaaaggaccccaagcttcagatgggagcccagtcccggatgacaccagggctgcagccttgtgagacactgagccggactcccaacccacagagactgggagataataaacgggtattgttttaagctgataagctttgtggtgatttgttacacagcacagaaaaccagcgcagaggccacaggttagttggggtactagagccccagtgctggctgggtcactggagcacaagagttcaccagaccccacatgtgggctatttgagttactgggttctggagatgagctctggcaccaagtatgtcagttgggcagacccatgaaccatgcttagtccagctgctagcccagatgttagctggtcccagcggcatataggcccaggggttcatgtgcctttaaaaatggctcctgaactttctaagaggcttgcaggtatgaattcctcgtacagggaaggcacagcctgtcacatgccccatgccccttgcttcttaacactggtgtgtggtgatcttaacactgctgtcgcttccaaatccttctgcatcccacattatctcattcctccccatctccatgcccaatctggggaaggaagagaaatcattctaatgacacaccaggaactggaaacctagcaattcaagacaaaggcagctctaagtcacccagcagcaatggcaacttgaagaccaacattccatcccatttctcactccctctactcctaagtgtctgcaggcacccctgccaatgcccccatctctaggagtcccagacaggttggctagcttgtcaagaaaagagccccgagggcaggcatggggaaggggcagcatcccaccatcgcagtccaggcatctggacccccaccttgttatctcccagggaccactggccgtagtgctccatctcttccaccagctcatcacaggccgtctccgtgaagatggggaaccagtagacgtccggggcaaggctgaggagggcggggattcagtcacagggtccagagaagcatcactttgtcctcccgctgcccccacggccctctgcagaccccgctgcaggcaaggcccctcatgtggcctatgtcagtcccaaaccccagtctgtgagccctccgtgtctccacaagtgtccccagggaacaggagctcagcaggctgctgaagggaggaggaaccagagctcagagctggcccttctcagccaaggtcacagagttgcctaagcctggaaaggaatatgcagatccagggagcagaggcccacagactccaggagaagcagagaaggaagcatctgtttctcattctaggcccacagtccacagctgagaccacaattggggacattttcttctttcctgctctggccagggaagatgcctcaggcccctccacccccgaagactccagctgcaaagtgccatcaagatgcaggggcaccccactgcatgttcccttgccccatgcagcaccagagcacaggaagggggctcctgctcctcccccaggtcagctggtcttgttgctctgccgtctgtcccctgcagccgctgcagggtgtaaatccagcagctttgttcacagagggcgctggggccttaccatctccaccatcttccccgccaaggccttggtgtagttctcatggatgtatttctccttccagtcctgtggggagagggggggctgggtcctcgggccagcctgggccagctgggactcacctgcatgggctgttccaagagggagttctgccccccaggcccggtggggtgtgggagcattgggggtggagtgggggagcctgtatgcgcct

SEQ ID NO: 48608 - DNA, 1859 bp, Bovine  19866881273237
  misc_feature (1)..(1): n is a, c, g, or t
naaatttctgagaaaagtggacacatcttggttacatagccccagcttccagaaccaggatcgatgggcaaacactttgaagagatagacttcagcttatcctagagaacttctcgatgccagagtgacccggggtggcataaggtgcctggggaggaaggaagggagcaccctgtccccagaggcctatgagaagctgagtgattactgggaacagcctgggacaaaagccctggagccaggcctggcaccaagcagctgctcctttaagatttttctgaatgagtgaatacttggatgggcctgaagggttaggcacttattgggtagttggactgattggcatattaaagaccctctccaccagcaaggccactgagaatgcctaggttctcgaccctaggcagcgaagactctagaacgaagctcctcccctcatcccaacagcccctggcaggaaggggaagagagagcgaagttggaggaccagctttgcctggagctgcctttttggatcgtctgtccatagcgtctggggctctggtcctactttgacttgaccagtcctgaaactgtgggcaagaccctcccctgcctctgagcctccacatccttgtttggaaaatggggaccgtggtcccagacaagccaccagcagggtcagggcacccaggaccaaagaagaccacatgtggtccaagctggacttaactaaccaaccgtgccaaggaccctcaagcctcccggggctcccctaagacatcccttggcttcattttccttctaataatgttcctggaggtgaagggagggttgaggaagatgtgtataagtctaagcatgaatcacaactcaagaaacgagacaaggtcagatatgagtgggagcagaagcagaaacttacagtaaacgctctctttctcccagcactgacggctctcgagctgagtaaagctcccccaccatctcctgtcagcccaggcctccttctgaggaagaccagctggcatctccttccactttttcacatcaggggccccctctccggctcccctcctcctggtagagagtggatttctgccccccaggcagaactggtacagcccttgccaagacaaaaccagaaagtctgtcctgcatccacctcctgctggtacacctgggtcagcaccccctctatggggtccgaactgaactctggaaaccccaatgggaggcgtgagaacctgcctcagcaggatggctaagtcagcgcagaggtccgaaggagctggaatggtgaagtacgggtctgggagggaggctggctgtagcctcagcgctggcctggaggaggatggggggaaggcagagctcctgaaaaggccttggacctccctgcccctggcccccctcccctgacacctcgatgaaaggatagagaagttggggaggctttccgggtaatgaattgtactctcaccagaataatcctggatcacattacaaaatcgcatgtggggaggccttagggtgaagcatcagaggctaaatctttttctcagaaggtaacacacagcaagaaagccttcttgcctcagagatccaaccacaaaatgatggggtctcataaaaccagagggcaaagaaaaaaaggactttaatgtttgagccctgattcaagcccttttaaataatgaactttccaagtttttattggggcaacagaggtggaaggaaggctagaaggtgggggggagtactgagatgggcaggcagccctgcccccactggcaccccaaatcctgcccagaaatgacccatgtctgagtgcccgacagaccagggacactcagcctcctgggtcggcgggaaatgca

SEQ ID NO: 48609 - DNA, 763 bp, Bovine  19866881286650
  misc_feature (1)..(1): n is a, c, g, or t
ncctgtgacttcccccgcgtctgacccctgacccccagcctatgactccacaccattgcctgtgaccccctccatcttcccctctctcccttaggggtgtctggaatgtaccctacatctcaaacatctacctgatcaagggaagcgccctgcgggctgagttgcaggagacagacctgttccaccacagcaagctggaccccgacatggccttctgtgccaacatccggcagcaggttagctgggctgggcagtcagaagaggccccgttgatggggaagacgagttaccttgttcccgtgggccctgtggcttctgagatcccagcaggactgcttacaggctgccaggccctggtgggggcacttggagccccaggcatgagggctgcccctcgggatctgtaggatcattttagcagacccagttatcacactatctttatctttttaaaaatttgtgtttatttatttgtggctgtgctgggtcttcattgctgtgcgggctttcctctagatgcagtgagcaggagccgctctctagttgcagtgcctggtcttctcattgcaatggcctctcttcttgtggctcccgggctctggagcacaggctcaatagttgtggcgcacaggcttcgttgctccatggcctgtgggattttcctggaccagggattgaacccacatctcctgcagtggcaggtggattctttaccactgagccaccaggggaagccctacacaatctcttttatgtacatttt

SEQ ID NO: 48610 - DNA, 967 bp, Bovine  19866881395674
  misc_feature (1)..(1): n is a, c, g, or t
nagattttatttatcctggcatactttacccagagaactgtctcacccatcaaagctggataaaaaggacataaaactctgttttgtcacaagacaatctgaaaaggtttaaagtgacagttaataaaccacagggtacttatcctcatcattcaggcataaaaaaggaaggatatcaaatatataatgaagcttcacgggaaggatctaccaaaacaagtggtttaagtgccaatgacccaggactaaccttttagaaaactcacaggaatgttatttagatataaagctcagaggaaaggctcgaggcaaacagcctgacatgaggacgcagtacactggcctcctggccaccacaaggccactgcattctggtttggcgaggtggggcacacagatctgccctggaagccatcaatcctgaggcttctgacactgagaaatgagggaaggtgagttctgggcacaggagagaccagaggaagaagcagcgattccacgtaaagcaatggttcctggagcaagatctgactgctctttctccttgtactcttttgtttttgaatttttacaatgttgtgtttgtttctgcagtaccacaacatgaatcagccagaattatacatatatcgccccgctcctctcccaacgtcctacccctccaggtcatcacgagcgcaccaggctgggctccccgtgttacagagcaacctctcaccaactacccatttcacacaagacagcgcatacatgttgatactaccttctccatttgtccattctctcccttccacactgtgtccacaagcccgttctctacatctatgtctccattcatcccctgcaaacaggttcatgtatggaatggagaaacggtatggatgaactccttgcactcttgaccaaaagcttttatgacctcatggacttttccagagatgcaacctctgtcatgactgatttctgc

SEQ ID NO: 48611 - DNA, 1327 bp, Bovine  19866881505767
  misc_feature (1)..(1): n is a, c, g, or t
ntctctccttccacatccctccgcccgccacctctgcccctgggactgactgccctgtctttccccaggtgcctgaagacccctctggagaccctgtggatcaccaactgcctgatttcggagtcagatctggcgtacctgtcacagtgcccgagcgtcagccagctgaaggacctgggcctcagcggggtcaacctgaccagcctcagcttggagcccctgaaggtcctgattgagtggacttcagccaccctgcaggacctggacctggatgagtgtggcatcatggactcccagttcagtgccctcctgccagccctgagttgctgctcccagctcaccaccttcagcttctgcggcaaccccatctccatggcagtgctggagagcctgctgcaccacaccatggggctgagcaagctgagccacgtgctgtacccctcacccctggagagctatgaggatgtgcgtggcaccctgcacctgggtctcctggctcagctgcatgcccggctcaagcggctgctgtgtgagtctgggcggtccagcatggtctgggtcagtgccagcccctgtccacactgcggtgagcagatcttctatgacaccgagcccatcctgtgtccctgctacatgcccgcctagcccagctcatgagttgcaggctttgtccccagcactgggacaatgccacccagacctcagtacatctagaaggaacacaaaccacagtttcagacaatagttaagtgcatgctggaaaaggaaaggtgatttagagtgtgcaggaggggagggcttggtgggatttttggagagatgtgttcctacaaagttagaaatatgaatctgaattttggagagggaattttgggcttgggaggttaatggggttgttacctctccattgaattgttaaaaagaaataaagggaacttcagtgtcaatcattgggtgtcctctgtgatctctgaccatgattctcccctttaaattcatgactctcctgttagtgtttaaataaaagggcctgaacgtgagcgggacctagatgctctctggtaggcaaggatcagctacaggagttcagggcaccatttacccactccctgtggttctcatttccaaggcattcatctcctcacttatctctgaggctgttcaacctgtcctcttatacaaggtgcgttctcagggcctggaacaaattaaggatccaggagtgagcatggctctagggaaccttcttccaaggggccctcactgctaaccccaccaaggccctggactggagcattttccccagtagatccagcagatgcaaagc

SEQ ID NO: 48612 - DNA, 966 bp, Bovine  19866880783025
  misc_feature (1)..(1): n is a, c, g, or t
natttcaaaggcttttaagatagtgaagaacactttaaataagttttttgaggtatcatcctgaatacaaaaatctgatacatccttactacaaaactgaactttctaaaaggaaccaactcaagttgtcttggaggattctcaacttatgagcattttaattcaaaggaggtagcatctgacaataaagtgatataagtaagaattttaaaaccaaataatttctattatttaacgtcaagagcaaaaaattcagctctagagtaagtaccatatcaagattaatttatgtcggttatggttatgtagcacaggtgatattcagccaccaggacaatgaatgtgtcaaaatattttgaatgacttcaccttaaaaggagacaaagacaagcatctattaacacacagttcgcagtagaatattatctctttaaaagcaccacaatggaacgctttccagagcacaatctttgaataatgttttaaaatattattttaaacacactgaagaatatttcggattaagttggtgagcatttttactaaaatacagagcaaatcttccattaccgtttctgcccctcccccaacatctgcctaaactgccactaggggtcagtatgaagacacagttctccaccgtcggaggaaaatgggctgcggaaaacctttccccgtgaaaagccctaacaaagaccataactgcacagctttagcattaccaagtccagcccgtacatcaggtctggaacatgagtttgcattttttcctgagactgcattttaatgttgtaaatcacagtggattatttctatggtcaatatttctttgattaaaaaaaaaaaaagtgttgtaaatgacaagattacttattcctaagtgaatctgtgtggattggtcaagaatatgatctagaacagatgttaaagtttatttgaaagggtgttggtatgcatctctagcca

SEQ ID NO: 48613 - DNA, 3844 bp, Bovine  19866880792668
  misc_feature (1)..(1): n is a, c, g, or t
nttgccgcatgtgggatctagttccctgaccaggatcaaatccaggccccctgcattgggaacgtgaagtcttagctgctggaccatcagggaaatcccactggagaggatttgcaggagaaggcaacggcaccccactccagtactcttgcctggaaaatcccatggatagaggagcctggtgggctgcagtccatggggtcactaagagtcggacgagactgagcgacttcactttcacttttcactttcatgcattggagaaggaaatgagcaacccactccagtgttcttgcctggagaatcccagggacgggggagcctggtgggctgccatctatggggtcgcacagagtcagacgcaactgaagtgacttagcagcagcagcagcagcatgtagctagtagggaaaggggtcaggattctggctctgggcagtgattctcaatcttgactgcacagtggatttgcctagagacctttttaaactctcacgcctgggtctcagctgcaatgcccacgtgccatgtccagccccaattccagattctaatttaattggtcagggaattaaatatatgtatattctttgggcaattctagtgagtggccatggttgggcctccagtcccttagcatccttctatgtagcccacaagaagctcttgaacagtgtatctcagttcctgtggttttccccactgggcaccaactggttaaagtcagtggaagaacaagtcttgtgaatgaaatgatgacagcacatgggtatcagccagccaaaggttttaggaaagtgccttaggacttagtttattcatctgcaaagcaaagggtttgacttgaataatttcctgcttccttccagtcctatgagtctatgaatgaaatcaatatattaaacacttgattatccatgagtgaatgatccacagaaagtgtttaatctgaggactagcttccttcagtcagcctccttatcaattggtgtacgcccaggaatgcacatcaattttgatttttggcctaagcagaacataatgaggaaggaaagaatcatggtgtgtttgcatgtgtgtacatgtgaaaatcattcaaaagataaattaaatgatttggagggattatctgctgttttggattatccacatcactgccccctccaagagcgttgataattgaaagttgcctgtagactgattgctgacagctgaaggatccatattgccaaggaagctatggcgggaagccaagtagcgacctgattaattatccttttatttgtgatgtcccagttctccgtcctcttccctcaccagggtggtatctagtttcaggagcttgtaagagaacagtaaccccctccaaatgaaaagcccatctttcctgaggcagaaagctctatagagagatttctcatccttcctcaggtcctttgctcactgccctgcttctgactctacctaagagtcattaaatcagggaggctgggtccattcatactggctttccacatggaagctttcagcaaaatgctctctgttcttcaatctgatgcatgcgaggttgcccaaaatagtatgacagaggtttccaagataagaacaaactgccatggctaagaggctaaaccttatctccagtggttctatgctgactgggcttaaaggagtgatgatcctcagtgtttcagtttggagtggcatctagaattctgacagtcttttctaaaaccagttttaaatggctgactttcacaagggcattaaataggcattgatggcaggaaggtgtagtttctggtctgtaacacctgccaggaatggcctggcaacagtgaagagcccacatgcatttctccttggcttgggctaacatcagggccaatggatgctttgtaccatggcaatttgtggattccaaagactttccctgactatgactcagtcagtggcctcagcacagagtccccaccagtgagaggccacattctgatttctacaaggtgtgcctgccaggagccagtcctgtgctggtctgcgggagttttccagtgctagccctcttgggctggccttggatgggtcaccttaactctgggaaataagccctggaaagagggaggttctactcagcaccagagcctttcctggctggctttccgtgtgatggagtcaggtatctgcgccatctgaggctcagtggtggtgattattccactgaggaccagtctgattttgcagagatttcaaacaaatcttttaagagtaaggtcctatcctgggggcagctggagggggacagatttcctcttagaatgtgggctttgaagtggactctgccagctctcttgctctgagcttttcatgaacacagttgtaaatcgatttgtgaacttgtcctaatgggctggaaaacacagctttcctgtgtggggtggctcagtgaagcatctattttaaaacccgtggaggatgacacaaagctcccttccaatgagatcatttcagacaatccttgaggtcaatgaaaaagagttgagtctgtttctgctagtaaaatagacaagttctcagatacttggacactgatttaggcatagatttgtgcttaaaccacataaacagattactctggtatctaagccatatagataacttgatttcactatctatacttgtctatggatgtaatttattagcttgtcttaatgcctttcttccaaagaataacttatttagcttttagataacacgttgatttttaaaataataatatagttttataaaataactttagcttagtctaaaattgtttgcttctttgtacattccatagatttactgggataaattgatattctttttatctgttcactaaattactttatgactttacctattgccctaagaatatttgctgataaatatggagacctattacatttttctagccatcaaaggaatgtaaactaaaacttgaagataatgattttcccccatcaaagagtcatagtagcaaaggaactaatattgccacatattgccagtgtgacatctaggaatgtatgctgacacagaattacttttaaataggaggaaaagttttaggtacaaaacttagcactactctactttaaaataataaaaaaaaggttaaaaataatctaactatttgaattaaaggggaataatggaatgactggctctaatggatggtatcactgactcagtggacatgggtttgagcaaactctgggagatgaaggacagggaagcctggtatgctgcagtccatggggtcacacagagttggacaagactgagcaactgaacagcaacaaaattgcaatgaaaagtggctgtaataaagaacattaaaaatgtttatggagacttccctgatggtctagtggccaagactccatgctcccaatgtggcgggggtgggaagggcagtgttcaatccctggtcagggaactggattccacatattgcagctaggagtttgcatgccacaactgaaaatcctacatgccacagctaaaagatcccacacgcaactgagacctggagcagctgcataagtaaataaatgaaagtgtagttagtctctcagttgtgtccaactcgttgcaaccccatggactatagcccgccaggctcctctatccatggaattttccaggcaagaatactggagtgggttgccattcccatcttcaggagatcttcccaacccagagatcaaacccaggtctctacattacagataaattctttactgtctgtctgagctacagggttggcacctaggtaaataaatatttttaacaaagaaaa

SEQ ID NO: 48614 - DNA, 1660 bp, Bovine  19866880826370
  misc_feature (1)..(1): n is a, c, g, or t
ntttttgaacagaggagcccccacttttgtttgccactgggccctacaaaatcacaaagctgatcctgggagtgcagccgacctaggaggccagctgctaggaccccaggagtccctaccatccaggagagtcagaaggcaaaccctggcatgaccccacattcgtgtacttctggtactttgggcaaggataccgcatttggaacaaagcagaagatgggaacattttgtcctaaacctgcagcgtttcatagcaagctcccagagatttgtttaaaaagaaagaaatgcaagctcagagcttcagagtgggcagaagggtccttctccactccctatgttcccctcctcctggagagagcacaatgagcaacctccttcggccccttccttcccccatcccaaggaggtgagcattctggtaataaatgtagtacatttgggagcaagaaactgggcttcctgggaggggttggtggtgtctgtctgggattatccagccacaacaaagccagcaaggctgtctaattctgggagttcagcattaaggaagccatctggctctcacctgagccacacccttcaaccagcctcatcagcaacaacagtgacttagggctttcgttcattattattctactcctcacactgttcagttcttgggtgggaagaggttgctatctaatggtcaccctcaatgaccccaggagccacaggaacccccaccattcatcttgtgacttaggattaattaaaacgctttattaaaagcctcacttcctcagaggaagcggtatggtcaccggggagaatctgagattcattgcctctccaaggtgaaatctctccaaggcactgaaatcgtctacagacggtccccaatttacaacagtttgaattaagatttttcgatggtgtgaaggcaatatgcattccttagaaactgtattttgaatttggggttttgaacttttcctgagctggtaataagctgtaagacgctctctcaggatgcgcggcaagttcccagtcagccaggcagtgacaagagagaacagcctgcacatttacagccactctgggccagaaaccgctctgtttttcacttgcagcacaatatctcataaacatgaggaattcaatactttattataaactaggctttgggttagatgattttgcccaactgtaggctaacgtcaagtgttctcagcctgtttaaggttggctgggctgagcaaggatgttctgtaggttaggtggattaatgcattttcagtttacaacatgatcaacctacgcatgatgggttgactgggacctaacccatcccaagttgaggaagatctgtattccagaccccttggttcaaggagaaaaatccaaagagcctaaaatcctggccccttggttctcaaacttaagtgtgcatcagaatcgtctggagggctcattcaaacacagatttctcagctccatcccagttttggattcagtggatcttggggtaaggcccaagaatgtgcatttccaccaagttccctggtgatggtccaggaaccccactttgagaatcactgacctggcacaaaacgcgttggccagttattacagagcagggtctggaacccgggggtcctgtgttccaggtaaacgaacg

SEQ ID NO: 48615 - DNA, 1367 bp, Bovine  19866880863533
  misc_feature (1)..(1): n is a, c, g, or t
natgcctttagtgggcttcccaggcggtgctagtggtaaagaccctgtcttccaatgcaggagacacaggagactcaggttcgatccctgggttgggaagatcccctggaggagagcatggcaacccactcttgtattcttgcctggagaatcccatggacggaggagtctggtggactatggtccatagggtctcaaagagttggacaagactgaagcaacttagcaatgcctgtagtaataagccatttaccaaacttagaaaatatttttaaatactcgtctggttttccattttggaatttctatataaatgttcacactgtatgcaaatagcaatggctttacattatcttttataccttttcccatatcttaaacttcttgagagaaaggattgtaattaataaatgttagtgatggatgataaacaccaaagttatattcatagaggactcagaaagatgaatttgatactcaccaaatttcatgcttcaaatgaaacaaaattttgcaatactgtaggatgtatccaacagtcccattaaatttgccttaaagacatattttattggagtgtataacagcgtactttgtattaagactgagtttttaataccattttaatgctctaaactcagagtatatttatagagaacattcaacagttttcattccagaaattattcaagaaactttgtatttggcctagattcttgtgccaaaaatagattaccaaaatgggaagaaaacttcctaatgaaagagtcttgagatcataaatcaataattaggttaaaaagcctcactggagacttctagttaaaaaacaaaggaaaaaaaaaaggacagtttatttggcatatattttctactattacagcattttataaaataagggatcagatttttataggccatctgaaaactacacgttttaggaatctcagtaggcaatctgccttattctttaatgtctttgaattctaatgtaaggtgttgtaggacaacagaaaaaatagacagttcaagttatttcttagttaactgcctttgttggaactgaaacaagtttttggaaaacaaaatcctacagagctcaaaggaaccgtcaagtctgcagaacattatagttgatggccctgggaacaccacccctgattcttaattatccaaataaccaagaattctggggatgtttttagtaaagtctttttgttttaataatctaagacacctacatgcaatttagaagtgcctagaatattatgattatagctgttagttaaattaaaatgaaagatgaaagtcgcttggtcgactctttgcaaccaggccagagtcctggagtgggtagcctttccctt

SEQ ID NO: 48616 - DNA, 1550 bp, Bovine  19866880935316
  misc_feature (1)..(1): n is a, c, g, or t
ntgaatctgccgcaggtatacatgtgtcccccccccaccctgagggaggtcattgtgattttacacagggcagagatggggcaaagaacctggcctccttcccctaaagtgcagtgtccattcgctctgctcctcaccactgctggtgcatttggccctgtggtggacagaaccatgggctcccagagatgcccttgtaccctggagggttctggcagatgtggttaagttaggggtttgaagatgggaagattgtcctggattatcaagtggacccaattacaagggtttttataagaagagggagataagagtgtgaggagtaggcaaaggaaatttgtagaaacaggtattgcagtaatctgcttggaagacagaggaaggggccacagccaagaaatgcaggtggatggtcaaagctagaaagggttaggaaacagtcccatcgagtctccagaaggatcacagctctgttaatattctaacattaacccataagacccattttcagacttctgacctcccaactgtgagataacagaatcatatctggccgcctgataggaacagccgactcattggaaaagaccccaatgctgggaaaaatcgaaggcaaaaggagaagaagacagcagaggatgagatggttagatagcatcatggttagatagcatcactgactcaatggacatgaattcgagcaaactccgggagataatgaaatacaggggagcctggcatgctgcagtccacagggtcgcaaagagtcagacacgacttagcgaatgaccaacaaaaacaattgctttaagccactgagttgtggtcatttgttacggcagcagtagaaaacagacatggtctccaaagctgggcaggagtaaccgatgcagggaagtggcacccgtcaccagacactgtgaccaacccagccgtgtggccaaggcaatgctgaagcagttctccagaggaagatccattttatcattcatatttcttcaaggagtgaaaaagaaaaagaacaagtagagaattggagagaactacactaattacactattaaaagaaatcactcatgtataaaattattcaaatcggggggagaagaaaagatttgacagagtgcctgtctccctgtctgaaatgtaatactgtgctatctaagcctggaggacaaaggaatattctacaggtgtctctgtgtagtatttgaaaacaggagcccttatgagacatgatccacttccaaccatgttctcaaacacaggggccctgatggagattacacaccagcacaactaacttgggcagctttgaaaagtttacttgaagcatctcatgcttagtaagccaaacttctgaacatctttatttctgagtataatacaagatagaaatctgattccatgtgctcttttggcaaataactaactcgtttattaattcctccactcattcctccattcatttattcatccactcattcattcaacactgcttattaagcctatactgggtgccagatatgtatcaatgacatgaacacagg

SEQ ID NO: 48617 - DNA, 2797 bp, Bovine  19866880972220
  misc_feature (1)..(1): n is a, c, g, or t
ngcatcgccgtacctcataactttaagttttaccttcccaggcagattgcttcgttcacttaaagtttttcatttcaaattcctgacaaggagagaatttaagtggtccgctcaccctttcaagcctagtcatgccgtgtcacgcctgtgaatttactgtcctttcagctggggccaggacgggagttgaagggggtcatgtgatccgtgtacctcaaatctgccctcttaggaggtgtggggggtgatccatcttccttagaagtaactggtttcagcaggcaatgtgtttgacattcctaggatattctcatcagcaaaagaaaagcctttgcgatgcaagtaatcagcagaaaacatacaaagtcatctttctttttttccacctgatgttaaaatatagatatgtaatgatagtagacattttaaaaaaatacattctttaaaaaaagaaaagctctggtttggaatgcttatttgatccagctgtggagcattatcctgctgattcaagaaattaataatattctttagaagtattagtattatgatagtctactcctgcaagcaataaaaaccagaatacaatggttgatgtcaggatttagttttgtgtacctggacctcaatggggtaaaaaactttgatgatgagatggctttggagagaatgtgtatgttccagctacaagatccataatagatgttaggaatttccaacccttttctgcattatttaacatgagtttaacccaattttcccttaggctcaatggaaaacaggtgtcaggagaacaacaggaagatgtttttatccaaaaaaaaaaaaagatgtttttatcttccttagctatttctgcagtgatgggagaaagaattttcccatgttctgaatgaaaataagattttacatttccatctgtcatatctagacaaaaggtagacatcgtcctagatttcttccatcccttaccatccctttccagccaacccatcatcaagtcctcgtggttctgctttcaaaatatattctgagtctgaatgcttctctctgctttcacacctatcactcctgtgtctgcctggaatactgtaataggttctgtcttaggaatgcattcagtagcaaacaacagaaaactcatctatgataactttgacaaagagagctttatacttgtctctcataaaagtagtccaagggtaggcaatccaggtctggtgcaacaatgccattgaagacccagctctatcttccttttctatcatccttaatattttagctttcattctcatgctcgttatcccatgttctccagatggctgctacattgccagccattgcatctgtgtttcagataagaagaaaggtatgggtggagaatgatttccttcacaagttttgtcttttgttcagaaaaggaagccccttggacctagaggttatctattaagtgaagtcagaaagagaaagacaaatatcatataatatcactcgtatgtgaaatataattttaaaaagttatacaagtgaacttatttatagaaacagacatcaaaaacaaacttatgggtaccagaggggaaatgtagggtggaggaataaatgaggagtttgggattaaaatacacatactactatatataaaatagataaccaacaagaacctgctaaatagcacagggaactcttctcaatattctgttataacctctatgagaaaagagtctgaaaaagaatggatatatgtaaatctatgcaatgtaaactgaatatattaatgtaaaactgagtcactgtgccttacacctgaaatagaatgttgtaaatcacagcactgtaataatacaatgttttttaaaaagaaaaagggaagcccttgtcagaaaaatagccatcaccatttcatcagtgagaacaggattccatgcctattcttagactaatcagtatccagaggattaaaattgctgaggtagatattgtgaacttatttacacagtatgacttctaacctccttccactgtgtcttcccgtacagctgagactgggaggctaaaaactgcagttcccagattctgtggcagctaggaaaatggagtgaagtgaggagaggcagatacaagctggccattttgctggtggccattagcagaggtagggtggagctggagtcattaaataggaactttcttgattgccccttctttataaaatgtcttaaatcattattaactccacttgagtttgtccctttttggtttttgtctctagctatttcagtacaaaatattaccaagttaggtaacccacaataaactactttatagtctatttggtttcctcacagttgatgagctgtacttagaggatgataaatttctttggtctcacaaccacaaattgctaggcttctccaaaggcaggctgctgctgctgatggtgattttgctggtgatgtgatctttctaaatcatctatgctgtgcatgcttagtcactcagtcacgtccaactctttgcgactccatggattgtagtccaccaggctcctctgtccatgggattctccaggcaagaatactggagtaggttgccattcccttctccaggggatcttcccaactcagggatcaaacccaagtctcctgtatttgccagcagatactgtatcactgagattctgggaatggcgaccagtggtgttggtttttccctcttgactattaaaattaaaaactttaaggcagagcttccctggggtccagggttaagataggctgcaatgcaagggaca

SEQ ID NO: 48618 - DNA, 1382 bp, Bovine  19866881024605
  misc_feature (1)..(1): n is a, c, g, or t
naagctgatggatgacactgacagagaggatgcagaaatgaaaaccaagaaggtcataaaagggaatttttttttttttttttttgcaagaggcaaaaatagcatgggatggaagcggaagcaaggagccaggaggactgctactgtaccccagaggaagaatgccttaaaaatcataagaaaaagaaaagaatagctgcaaatctctaccagtgttaagccaattcaaaccaggaaaagaagggggcccaccccatgtaggcctctcaccaccaccctccccagtcccaagaaaggagggctttcagattagagaaaagtgtgcctgaactacggtttggactccatttgagacagttctctgaatagttaaccccaaatattcatattacagctaaaacagtgtgtttactccctagtgaaactaaagaacagccgaattttatatatatatgaaggacaccaatcagtcaagttacctcttgactttctcttctggaccatctcagaccctgttttgcatagctcttactttctaatcctggctgaatttagggatagaatcttccccaagttcttagagtccttctaactacagaactcaggaatggaccctgtgctccaggaaagtttgagaaaaacaagcataaagggaggggacctcaccgcccctccaggctcttgttttcacatcctaacaccaccacccagttttgaaaaagctgttgttatgactgactccagcttatctattttcattgctggctcctgtttagacatccttgcctgtaaccagtcacttttcctctcctttttgcagagttcatttccctgtcctgaagggacaccctgcatttatcttcagcgaacttaaaaaagaattctgaccacttcaccaatttagttaggttattttaaattttgctcttcatcagcgggcttgtgttggccttcctactcctgggtgaggaagtgactcatgcgttctgagtttccttcatgacagcgctgtattctagagtatctgtttgcaaacattttcagccttcgttgttgtctacatctcctgtgtcaggccttgatcatctttattctgccctttagcagcattaagaaaattacttctctagtgtttcaaagcttaggttaaatttttgtagatactaatgtcgaagagaggtatttctaagttaatatatgcaacaaaaaattaaacttttagattaaaaatcaacaccttgattagcatgtttttgttttttaaagttcttgcaggacttccctggtggctcagatgataaagaatctgcctgcaatgcaggagacccaggttgatcccagggtcaggaagatccctgaaggaggaaaggcaacccactcca

SEQ ID NO: 48619 - DNA, 4052 bp, Bovine  19866881076937
  misc_feature (1)..(1): n is a, c, g, or t
ntagcagcagcggcagactatcaacatccaggccacagaatctcccaatcagatggaaacacatcagttctgtaaggcttgcacgtgcttcatctgtcacatcacagctcacagaggaaagccaaaccatcaccatgccacttaaatggcccttctgagaagtctgacagtattaggaaaggagtaagtttcactttcttaatatcagcttttagggaaaataaataaccaacagctgggtcctgccagtcttaacagttttaaattgtagaattacgacagggcttatctggttttgtgcttcctagttgcagtgctatttctccaagtatgttgaggtatattctctttctacatttacacaaagaagtccaaaacaaaaattatgtgagactttcatatccagattctggtcacaaatatatacattctcaacgtggaaacagctagttattgacatgttggatcatttcccaagctatgaacttgtgtagacgttccgcttatgtttttaaaggttatatgtactttcttgtgagaaaacacctgttatctttactacttgtttgaactttacgcatattcactaatttgcttttgcatgtatcaaatttgtgacttggatgttttgagaagcagaactgattttattataaaatctttaatctctcttactacccccaaattgataccacatatgtgatgttattcaggcaaattatctttatcccagctccaatataaggattatctaaaaagtctctcccttacagaaatatttctggagtatatcttcagccctacagactctgattcttatgccgttactttggcaagcctgatgaaagggggtttattctttctttgcaagtttactttcatttagatgagcttggactaacaagtaaatcagaagcatcagcagtccctaacttgagacagtaactagtacatattttttatgttgtgcattcagttccaagtgtaatatggctcatcaaagggacaccggacagcaattttagacaccaaggcttacaattagactttttaaaaacaggttgccaaatgagcacgttgaacaaaaattcatttctttctgaaatacaagtcctttaatcagagagtgccatgctatgcatcattcttttcattgaaaccttctggtgccagaatcctgtttgcagtaaacactcgagtgtgatagaagtacattccatcttcctgttaaggtttccatcctcaaatgtgactgtatatatacttttggctctgaacatttgaagtacatgtatttttaaatttttctgttagtagcaatttaatagactctttgtaaaacttaattgtagaatgatgttaaaagccagtatattttcatttgaattctgtatttgaagtttttgtctgtaaatacagattttaaatatttgattttaaaaatgtttgagtcatccaaaagacattttagtgacattaaaaagctaatgaaaatttccatgtaatttctggctttactaataactcttaacatatccaatattattaaactccacacgaatgacagcaatcatgcaccaagttacagaatccaatgaaatataacttattactaacaggttaactctcaaatataaaatttaaatccttttagtaagcatatttttgtttttggagaatgtgcaaaattcagtaatttaaaattttaaagtttattaaaagtgctaaatatttttatattagaagcaaatgcaaagtgcaaatgccttgcattttctaaaactctttctaccatcctaatggaaggaagcagagccctctgctcccaggatccatgatttctctctggccaccgccttctgctaagctggctacagaggcacagttctaaaaacaatgctctggactttgtagctcttagttatgaatacttttccctttttcacctcaaactgctggccaaatgagtcctaagagatcatttacatcttttattggatcctagggaatacttacgtattcagaagtgtttatacatttagaatactgtccacacatcaattctctttaagccctgatgcacataaagcatctttgacaatgaccaatattgttaacagtgtgtttcttactatttaagagtatggacttgctgagtgacaacctataatactgtagtttgaaagaaaccaagaactggcactctccttgtggcccagttaagactcagggctttcactgccaagggcctgcatttgatccctggtcagagaactacaatcccacaagccgtctagcatggccaaaaataaataagagacttttcgcccaatagtgtagtcacaaaaagcaaggagggaatgtttatcaggaaacagttttctttctacagcccacagcaaaaaaacccactttagaaagtgttcccaaggagcttgctactctctagtttttggggggtgttttctggttactgagatttcaattagtgaatctttgctttaagtcagcaaaatcgcattcactaagttacccaatattatcatttactctctgagaaaaatgaaacccatgaaaaattaagacaaacttctgtctttagccatatatataactattttattccatattaataaataccgtaaaatatactttatcagtctaaaattttaacttacccagttactgtaaagcaacattttattctcacttggatttcagtgaagctttctggctagggagagcttttgcagtgaccagaggtctttctggctaggaggattcagtcccggtttggagagcagccaaggcaggggcgtgcacagcctctactgcaccttgtgtgactcagtgaagtgaaacagcctcgagacagtcacgggaggtgttcgtgcctaatgaggaaacctgaaaacgcaggcagttgtaaacatggcttactgatatcccaaatttaaagagcctatttcttctagaaaatcaggaaggatagacgcctatattcattagtaggaaacacttagtaacaccattggtcatggtcaaaactgatgggaaactaaggtgcaaactaatacccagtgagttctcactgccaagcactgtgtttcctggcttttcattcagtcactaaccctactggataagtgttgttaatatcccattatatagacgaggaaactgaagcttgaacggattgagcagctgggtctaaacaccccagctgttataaaagtgttaaatatgccaactttgtattttaaatcttgctctggatttatcgctgatgaacttttctctagattcacacaccatacttgagaatatgaccagcaaataacaagaatatgtatatgtaactccacgcggcaaggagagccctaagctttttaactgtacaaatgagtgtaatactcacaacagtgttgtctgctaatccccatttaaagatgaggaagccaagccacagagaaggtcaagtaactcgctcaagtcacacagctaactggaggagctgagatgcaacccaggtggcacagttccagcctatgctcaaaagcgcatgcttcagtctgtgtcccaagtagaaacctgggccatactgactctagctgcgggggatcacctggcaggaaagtaccaggaatagtcaccgtgccaattgcatccacccagcgaacacaggatagcctgcttgctgggagaccagtgtcgctctgcttatgccgttagctgtgtttgtacatttacacatcacatcagtagagatgaatgccattttgagtccagccaaccccagtagagtcacttcctgcaaaagggatgtaggtgtgagctgtgctggcctgggttttacacacctcactccctggccaggccgggcagaccaaggagggcagcgtaggaagggcagggcacctcgtcctccttggctttgccgcttctaagcaccatgtgaggtactggaggctcccagtctacacaacaccagctgggagaacgttaacgcagagttaataaatgaagacctaacctacaaccacttcaaaaaa

SEQ ID NO: 48620 - DNA, 1469 bp, Bovine  19866881219217
  misc_feature (1)..(1): n is a, c, g, or t
nctgggaaagcatgtaacataatgtgtacctatctgcccataatttgctatgtgcaactctaagtgcaaaatgcataaatgagattaaattttgatatggaaaatcaagctattagtcttactttaaaaaataatttcagttatagaaatggagtgcagactttgtatttaaaaaaaaaagaattgcattaattttgtgtcttttaaacccaagacactatgtcttatttcccgtgtgtctaacatatacacaagccaaatcctatcctgttctaaaacacatttgtagtttcctaggtggaacagcattattcaaatggacaggatataagtcaaactgctttgttacaaaatacagaattaccgggtcatatgtcattgcaacaatctgaacctattttctgatatttactatcattagtctccatccggttggactttaatcaagtaagagtttaaaatgtaaattgaaaagtttaaccaaactaaaaaccaaatatgggggatgtataaaaacatgtttatatatgtaaatagaagtgaagtttgacaggtcatggtctgtcaatttattacaacgtcctgactatttccctcctctgtatttctcaaatccctccctttcctccatctccatctctccctctgaatccaatccaatatcctttcttatgggttgatgtaagttctctcctaacacactttccccctcatccactccaaacttttctccatcttacagttaagtgatttaaaaataataataataatatatatatatatacacacacacacatatatttatacatatattatgtatatataccagagaaggcaatggcaccccactccagtactcttgcttggaaaatcccatggacggaggagcctggtgggctacagtccatggggttgcgaagagtcggacacgactgtgcaacttgactttcactcttcactttcatgcattggagaaggaaatggcaacccactccagtgttcttgcctggagaatcccagggacgggggagcctggtgggctgctgtctatggggtcacaaaagagtcagacacaattgactgagcctgcagccaagtgtatttatgtcaaacctcatctcccagtgcatcccaccctgcctaccccacctcgtgcccacacatctattctctgtgtctgcgtctctattccagccctggaactacgttcatttgtgccattttcctaaattgtgcatacatgtgttaatatataggtgtttttctctttcttagccataaaagggaatgaaattgagtcatttgaagagatttgggtggacctggagtctgtcaaaacagagtgaagtaaagttactttttaaataatataatcatatttctcctctacttaaagcttccaccattccctgttgctcaggataaagccccagatttctcatgtgtcctctgaggttaagcatgagttg

SEQ ID NO: 48621 - DNA, 798 bp, Bovine  19866881753992
  misc_feature (1)..(1): n is a, c, g, or t
nttaagctctactaaagcgtactcatcaaaagaagttgccctcaccttgttaaaacattgttctgtgtgaaagagacatctggctgggtttcacatccacagggtgaaaacatggttaagtatttaattgcttagaaggtaatcctattatttcagattttcttcataatgaattctttttttcccctaatttgaggatttatgaagggaaagtgaaattctctggtaaatttatttttgaaaaggtacttgaaagagttgtaatatctaagcagcctctgtctcaggaacaggctctgagcagcagggtgatgattgggtaccagagggtgaatgtatgagacccacgtgacagtcaaatgaggtgatgtctgcctttggttctgagcatgaaatcaccataaaaacaagacttttgagaagcggggcataaatgaacactttgtttcattaaagccttcatatgtctcgaagaaagtcatgcgtttgaggacaggtctcagtcctgagtgtttaacagtcaatttgtgcacctatgagaagtttggggaaaacaaattgtaaaattggctttattttacaatttctggcacaaatgactggaccagcaggtgaatggaaacagaggagaaggagaaaaggacaaatgggtcagtggaggtgttgggtggatcaaggaattatcggcaccccagagctcctggggcgtgatgcaggtatcagtagggatttgttttcctggatgggatggatggagtgaaagcttttgtgatcacaaagaaggtcaatcagtgctta

SEQ ID NO: 48622 - DNA, 965 bp, Bovine  19866880624445
  misc_feature (1)..(1): n is a, c, g, or t
ngttcttcttattactctacagccctcaagtatttttcttggtcgaggccccttacttaacacgagggtttgaaaaaggacggtaatagggtcaggaagtaagagtctccagattttctgcttagctttgtaactggaaagaataataatctgtgaccaggctaacaccacctactattactcactttcacaaggtagaattgacagagagtgtaaccactactggaaaaataattttcaaaatgggtatcgtaggaccaatccatatactccctctcatcagtaactccacatgtccagctctttctccctctctaactccatcatcaccaccgtgcttgtcagccacttctccttctcccctagatggtctctaccagactacagtgggccataaagggtagaaagcctcttcatgcaacttttgaattttaattttatttcagtggagagaaaacactggaatttgatctcactgccccttcggctgcagatttatctaggggattactcagagaacatgtgttcacttcctctgaatactgtcaggtcagatgtgttaagccagatacaaattttgatactgctccaggaaaatagctgagtaattttttttttactatatatctcaagagaaaacacaaggaatgttaatttaaatagcagtgaattaatacagcaaagaacacatgcttattttaggctgctttctaaacttcaagtgtgtttttcagataaacatgtgcttatgatgctgattttatgtaaccttccagctaaccccatattgtagtcacattactagtaaaaataataaacattcttatttaattttattaacatgaacacgaaaggacttcaaaaaacactttctttaacaagaacaaacacaaatgtaagaaacttgcataaatatgccaaaaacgtagagcaaggcgactttcattacaatcatcataaactag

SEQ ID NO: 48623 - DNA, 1065 bp, Bovine  19866880809033
  misc_feature (1)..(1): n is a, c, g, or t
ntctcccttatttcctggggtttgttttcccttgctatctcttcacacaggtgagtggaaagatgcagaaaggtcaaggggactgagtgatgatgattcctgttggactttagttctgctccaccccacctccctacccctcccatcaccacctaccatatatcctctggtcctccatttgaggagctgtttggggcaggggaggggaagggtagaaaagtaactttcctgattggcagagaaataaaggtcattcaagaataactgtttaatattctgattaggtagatatgccaggaattataggatagaaacaaatatatgtgggcattaggattccagtgacaatggtaaagaatcctgttttctgtgttatcttttctcagggtcccttctgaacagaggcagcttcaaatgagctgtgttttcctataaatatggttcctacattggtataaagcttagatttttttttccccctgtaagtgttaattttagggacttttatcccctgaaagattgtattatggaataatcaagaaagcgaaaggaatgtttctcaaggaatcactttttaaattgtaaatcattagaatgtgacttaattgataaagcacttttggcttacatggttattttctattttctttaaagagtgggcagtaatatgtaacattatttaaacatatgagtgttttatgatactatataacaactttctaagtagctagactgtccagaaatctttgtgaaattagtgtagcggtacctgttttcacagacaaaaaggatgtgtttaatgatagagttaagactggctctccagatctgttcctttgataggcagattgtgttggaatgagaaaaactttcattgtggcttttcccctttgattattctttaatctttggtgtctgagacatagtggttgctctgtggttgccccacaatcatggaggtgaaaattaagttcatttgttgttaatcttaactttctatacatatataactccaatattttatttggttcatagacatctactagcatcgtttcggagaaggca

SEQ ID NO: 48624 - DNA, 1567 bp, Bovine  19866880878401
  misc_feature (1)..(1): n is a, c, g, or t
nggaatatgaggagtaggttcaatagagatgtccactgaattacttagtgtcccaagaggaaacagttggtgggtcaaaatagagtaattcaatgaaggtttatttacaaagagacattttcaatgaagtggactagggtcaccatgcatccaagacttcataataatagcctaatacctaagctattaagaggggagggagtagtactggaaaccagggaaagagtcatgcctgctgccttgagagaatccatgactgctggagagacacagctggctggaggagaccttgcaggaagggtgccagggcctccctcccctttctctgcctccaatctactcccagcactttccattggaaagactcaaccagaaaccccgtgggaagcccctggtgtggtctgtatgagtctccctgtctgggcagaaggcaaggtacagaatagttgagagtgaggccagtgggggtcagtggaagagatctggcctgcctgtcttaaatacatgaaattaagaccagcaatatttagctctgtagaagtaccaatcaataaaggctgcatttaaaatctttgataaaatttcagagagactgaaaattctttgaaattgtaagtaaaacaactactccagtataattaggtgggtcatccaagcaagggacacagaaatcactagatgattcaacactgtacaaagaagtatgattgaaagagaagagaatctggaaagcatcaggaagcaacaatgagccatgtttcctttaagcacaactgcccacaaggtttaccagctccctactgagaagaattgaaagcaaatatcaaaatggtttggagacacaattttgcctgaattacccattggtaaactgcatagagttctcatacctttgtgtagatgcagtcctttccatttaatctttttgttgctgtataaagttcaaaagtcaaaacttctccaggtatgtaaatatgaatcgagtaaatgtcgtatttaaattacagtcaataggtttttttttttttaaaccccaaattgacaagtaaaggtaaaggactttaaaggacaggtaaaggactgttctcaaaaatgaagtcttaacaaggtttcttcctggctgactgtgccaaacgctcttttaaaaaaaatttttttttaatttggaagataattgcttgtgttagtttctgctgtacaataatgtgaatcagccatatgtatacttacatcccctccctcttgagcctccctcctaacctctgcccatctcacccctctaggtcatcacacaaaccttctgcatgtaaagtgcagacaggtgcagagaacgagaacagtttgcaatcaggttaagtctgtctcataggtttcctcatatttaaaaagcttttaatgcaaataagtcaaagaggaaaaaaaaattttctgataatagtaactttggcctttatggtcatcttaaaagagaatttacaatcattatatatctttttataatatttttattttcatagcaacactgtagaatactcagtctacactagcccaaatttatgtgaagaaa

SEQ ID NO: 48625 - DNA, 2580 bp, Bovine  19866880904308
  misc_feature (1)..(1): n is a, c, g, or t
ntaaatgctccatttcaactatgaccggctttctgttcctagtgcaatttaaatgacaagatgttgaaggaatttgagcctgtatttatattcactggactttttcaatacaatttgcatcatggctatccatttagatcttacatctttgctctgatgttgccatttttcagatcttttggtcacacacagttctacttccagtcttatcactttccatttatttgctgcacttacatctttgttggacagtcctcttttttgattaaccatctgtaaaatggcatgtgggtttatcgctggaagacaaagaagccatataatcaagtgctttgctgtctgtgcgtgaacccaatacaggtgtgtagttaccaatacccactaggctttaaaataagtggcacaactagtcattccctgatcgtggtgtgtatctggtgtttatgtagtgatttgtggactgaagagctagcagcaaatttgtactttatgcagttatatttaatatacaatggtaactgaaatatgatctgtgttactaggggactagtgtttcttaaaatgtgacaacaagtttgtacatactggggctatgcaaagcaaggactgcctgtagtaacaatgggtgtttgacaatttgttatatatcaggtcttattcagggcttccctgatggctcagatggtaaagaatctgcctgcaatgtgggagagctgggttcgatccctgggttgggaagatcccctggaggagggcatggcaacctactctagtgttcttgcctggagaatccccagggacagaggagcctggtaggctaatctcctaactcccactattagttcccactttacaaaggaggaaactgagtcacaaagagatttaataggaccaaggtcacacagctggcagtggtggagctgagcctgtgttttacgtttatatgctgtacttcctttggtagagataaggaagagtgatttgggctagggctgtcatgtggctcataaaaggggctgtgtgtaggctagtccatcacagctgcccctccctcccaatctacttgggaagattatcattccaacatgagtgcctttcaccacctaccctgctcaccgaggaagacacatgcacctttgtctcttcatttttctccatttcttttggaatcggtaatacattcacgtaagcacatattcaaaaggtacaaaggactgcatcatcctctctcatcctctccttcagccatgactttcctccccagagacaaccaaggataccagttccttctccctccactccaaaactatcccagaatgtctcacaccacctgcccctcatttcctgtatctactaagactaaagtttggacaggaccagaatcctgggttcagagaaggcgatgggaccccactccagtactcttgcctggaaaatcccatggacggaggagcctggtaggctgcagtccatggggtcacgaagagtcggacacaactgagcgacttcactttcactttttactttcatgcattggagaaggaaatggcaacccactccagtgttcttgcctggacaatcccaggaacgggggagcctggtgggctgccgtctatggggtcgtacagagtcggacacaaatgaagtgacttagcagcagcagcagcagcagcagaatcctgggttacagaaaatcttggaatacaaaaagtaataaaggcactaaaattctttaaaaattattttggatttgtgtgtttcccatggagttgagaaccatttggataccatgaataaagagtctgtctgctttggaatctgagaagggaggagcagagaaggaccgagaactcctggtaggatgaatgggcccacgggagtgctcagagaaggaccgagaactcctggtaggatgaatgggcccacgggagtggtcagagagggccctgactcccgaggggaggagggggaggcagggggggccctaccctacctcgaagtctgccaattgctcatgttccgagagggctccacatgcaggctgtgaatctcacacagtctatttttaaaaggatttaaagggcaaagaaaagaatatcttcatctactatgctggctttttcaggataatactgatttcaatggcttccctggtggctcagtggtaaagaatccacctgtcaatgcaggagacatgggttcgatccttgggtctggaagatcccctggagaaggaaatggcaacccactccagtattcttgcctggagaagtccatggacagaggagtctggcaggctacagtccatggcattgcaagtcagctcgacttagggactaaacaacaataaaattgattgcaaatattctatcgtgatgtccccttgaggtaccacaaatgttttagaaattccaactttgcagtctctaaaccataccttcaaaactgcctctctcctctaaatgtcttaccttctgcagcacagaagccattctttgaacatatatttcaaattttcagctcagataataaggtaatcatagaatattgaacagaaggaacggcaatttaaaggcaaaa

SEQ ID NO: 48626 - DNA, 1194 bp, Bovine  19866880937215
  misc_feature (1)..(1): n is a, c, g, or t
nttttcttaggaatctggcttttcaaaggtaatttttagccaaaaatcaggtatctacacaattgttaactggaaagcatcaaattaagaaagctttgaaggactcatcttagcatataataatgggcaatattaccattaaatttgaagtaaaatacttaaatgaaactcctaaactccttatcatatattttacaaaaatgttggaatccaatttcaaatggatgttttcctgccactttagtgtttttaagtgctttgtctttgagaaaatactgtaataaataaaagtgggcaggtgaagtggctgaataccctgtcaagatgccctgtccaacgagtgcacatgtgatgagtgaggaagggagaaaaggttaatgtaattagagaaatgaattctgggtagccccaaagagcatgtcttgtgagtcatctacattcacatttctttgaactttgtctatcctaagggagatgaagcaattacatagacataatgtgttaccctttcagtacaatgcaacccacattcctccatacattcatcatcatctgtggtatttgtgttcagtgctgtcacgcaagctagttgccaacaattattaaaaagaaaaccgaaaggttatgcatttaggagataaagcaaggttaacttttgaaacatgctctatgaagatgtcaatccattaaggggaaaaaaatcactaagaagctcctcaaagatactcctgcatcaagaactatctccagagacctacgaagtaaatgaagtgattatctggtcactcacaattctccgaaatggaatccacaatggctgtgatatagctgcatatgagcttcccctcgcatttttacctacattctcattcactgattgtgaaagtctttttctctggactttctctcattacctgctttttttttctttaacaacaaacaaaaatactctagatttcattaccagaaccacttatgtagggagcatcctgtctggcacggtgttaatactacctctctcaacttctcaggaaaaaaagaaactattttcaacacatatttttcctcctcttacctcctcccctccctttctcttctttcctccttttttctctctttccctccattcccttcctcttactcctcctcccactcttcctcctcttactctggaattcatgtttcccttaaaaa

SEQ ID NO: 48627 - DNA, 1012 bp, Bovine  19866881040031
  misc_feature (1)..(1): n is a, c, g, or t
naatcagcaaagttatagtagaggtgaaaacttcccaattagtaattttaccaggaaatgagttgactccctttgcctagaggattaatttagcttgcattcggaagtaaatctaggattatatgatttaataaaaatatatatcacatgtatgatggtttctttgtaacaataattataccccaagttaagattagcatcgtatttgtaatttgattttgaaggatcctctggtggatggtaagctggaacatttcccaacactttagccttaagatttgatagatgctcttctgattgtttatcctcaagcttacttacttttttccttttatttttttttacttttttccttttaaaaagagcaaaaggggaattaaacaggaaatgatgcttctcagggagcagaataagcttacattcattcagaatacactgatgtaataagtagcttgaggaaaagggcttttgtaaatcagatgaaatgttacttataacttttaagcaaactataaaacaataagccctttggaaaggggacttactgagtaggaggaaagacaggaagctggttccctcttagctgtgggcttatttattctgggagagaaacctatgaaggatttaaaatttgaggaagggctgtgtgttcagataccagcatatttctccaggaaagacgtcacttaggattttgaactgattaaaagcccaagtttcttagataaggagagagctaagcaaaatctgagcaagaaggaaactttcaaaccattgaagggattttaccacccaaatggggtggaggagaggtgaaatgtcagggcagagccctacatggaaaaagaagaccacaagtgtcgccttgggagtcttctgtccgcataccctcactttggagacacatgatttttaatacaaatcactaggaaaaaaagttatagctatgttttatcttatcctacttctctgttaactgttgtatacggaaatcataagtaactgcatttta

SEQ ID NO: 48628 - DNA, 3041 bp, Bovine  19866881046716
  misc_feature (1)..(1): n is a, c, g, or t
ngaagagagctgtttctgaaatccatattcaagtgaaacagaaaagattctcatgattgagcaatttagagtatgtatgggaaggtatggggaccatggagggaggctgtgagctgatcaacagggagtgtgaattaattcttcagtaacaacaacttagaaaagatgactgtgggttaaaaatgtcctgacttggcactagcatggtgtgtaatcaagactgtctgcaattttgagccaacaattatgcaatgtctaaattatatttgtagtttgttacttcaagtgccacagaaataactcctaggcattttagttatgcacaaaagctatggaatcttcctgagtgaatatatgttacactgtagtacatattttgtactaaaatttagctaaagctaaaagtaaaacagaagcaagaaaacaaactcacttgtcaaactcatcaaagatatcacaattcggcagtttccaaagagccagtcgaaagtgtgtggctagaaaacaagtggactgttaggaataaaagcaatcatgacttcttaggtacatggtaaaccactttatcctctgccctcccccaaatccacttcaaactggtatgattacctatgatttattccctggtgaaaattcatgatataactgcaactagtcagcactacttaacaagggcacctaaaatataaacactctaaggacactttgcaaaaatctcagaaaaataatatgcttaatctgaaaacaatcataaccaaaaattaccatatcagatgattcagaaaatgatattgatatagaactcaatattctgcaagtttaaacttatcgaactctctacaatgtattctaaatacacacaggatcagctgaataaggaaaatctaactcaggaaactatagacttgtcacctaaaaggctttcaggatttctcaaaaatctagaatgtaaagcaaagcagtggtcagtaagcagagggaaaattgtttcatcattagtggatggagcaattctctctaaatttagcaaaaacaaaatatcctttgattaaattaaaagactgaccaaggacctagagcttgctgatgacataaaactcctaggtaaagaggcaaaatgggagacaggaggaagttaatccacagaattgtcttcttaattctcaactggaataaagtaaggcatcgaactcacgaattacggtggtaaaacaaaagcaggaaaaacagtttctcaacaacaacaacaaaaatctacctttcttcattcttttattctacactgactcaaaaggaatggggatttacatattaaaatataattcctttcacccaatctcaaaaatcacatccttaggaatcactatgaaacaaaaagattaaaagaccttaaaattatatacaaacatatggttcacatcaaacaccagtcacagtattagggcagggtaagagtaatattactgacctgatgctttcatcccatagggcaaatcaaacttatcgctaccatagaaggaagcagtatttttaaaattagctgcacacagaaaagggtgaaactgatgatacctggaagataaggatgaagaatgactttcccaaatgtgtataatatttgcaggtttttaaaatcacaactgtaaaaaactgtagtatgtcattcctatcattatattgactataaaatgagcatataattatttttaagattctttcaaaatcatcttaaacactatttaaatgttacatagaataggatgggcaatggaaccacacacccagaatggaaatgctttccaggcagtaaaaccaaaattatgtaacagcttgggggaggggacacagaatttaaatacaagtgaaccccaaagacagccatctacaggaagaaacaaaagaacaaaggagggaaaataaaagtataaatgctgacccactccccaaagaaaagataccatatatataaagctgttgtcagcagtgaaaattaaaatacactaaaagctagaggtaactagaactgaactctctcctgatgtcattaaattaaaatatactcaagaatgatgggtgtcttattgcttctctaccccgctgctatactcgggtactctctcagacaagaatgcttcatgaggcatctctgtttttttaatggtcccttctttccgcctttaccagttttgttcttcctaaataaactgcaggcagagaccagagtgcccctgggttttcagaggccacatgacaaatggaaataagaagcactagaataggaacgagggcttccccaatggctcagtggaaaagagtccaccttcaagtgcaggaggcatgggttggatccctgggttgggaagatcctccggaggagggcatggcaatccactccagtattcttgcctggagaatctcatggacagagaagcctggtgggttacagtccacaggggtcacaagagtccgacacaactgaagcgactgagcatgcacgcatgcacaaataaggatgaattagcttcagctttatcctggttttgcttctcaggaactactaacctgggcaagtcagaggagctcaagatctccagagctgaactgagaactgacaccatattcaaactaggcaaagagttgagagaccatcccttcctacctgagaagagtgtgtatgtcagattcagttgtgacaagtgttagcagcctggagagggggatcccagccaatttcaaaaggtcattatctgtatcagggttgatctctaagcttgggatctgctctgggaaaagtgtcaggtcttttgattttaaatttctaaatgaaataattgttcaacactgtgggcaaagaatgtggcctgccatttcagtaaacaaaggatgttgaagccttaaaggcttcagctactccatctgaactccaactgcactctatcgggaattgaggaagaaaaacaaaaacaggatactggccccagatagctatggtgccatatccaaggagtaacttcaataatccagtctcttgcatcttccca

SEQ ID NO: 48629 - DNA, 1673 bp, Bovine  19866881077326
  misc_feature (1)..(1): n is a, c, g, or t
ntaattagcctccaattaaaataaattttaaaaaaagacaaaaaattttaataaaataaatcttctcaaacttcaaaaaaaaaaaaaaagaaacaactatatgatggaaaagtatacagaatgataagggttttgagatcttaagtaaaatgtgagatcttaaaaaaattcacagcctttacttttaaattaatctgataaatgttagcagttaaaaaatcaaataggatggggaacacatgtatacctgtggcagattcatgttgatatatggcaaaaccaatacaatattgtaaagttaaaaaataaaataaaataaattttaaaaaatcaaataggaataaaggtttataatgaaatgtagcagttctctgtcccctggtcatctatccgtagtcctgatctacaaaagcaacttgttttaaaacttttagatctatcttctgttaacttctatattattaaatgatcagctcaatctcttttctgagaatattaattagagatgtctgttttctctgcttctctctcttatatttgggaagttttcctcaaatatctgatgatctatgatcttaaaaaggcaacaaaaaattggactgaaaacgctagatgtcgggcgtatgagggtgcaggataagaaaatagttgtgcatggtgaaaatgccaaagatccctcctaggggtaaagcttttttttttttttttttgtctagaactattctatgaaattgttttctagaaaagagctcttgaatttcctgcccagctgtaggtgaaattcccttgagggaaaagtcctcagtcaggaggtcacttttcaagaaaacccctattgcggtgccagcctgtcctgtatttttgaagattttaaataacagagggaagtgtttaagatataaagttaaggggggaaattagtatgcaaaattgtatatacagtatgacttgactaaattcaaatttacatgaggtagctagaaagaactacaccaaaatattaagtggttatggttatagttatttctgaacagtggtacaaaatgtgacgattatttccttttgatacagctgttttccaaaatttccataaagtattgacactgatttaaatattagggaaaaatacttgatttttaaagaaacacatatcaggatgccaaaaggaaaactcacagaagtagatacatgctggtatcaaagtaaaagaatctttctgccctagcttaaagggtataattaaacgtttactgttttttaatatttagaaaatatgaggatattaaggaaaatccccctggtatactgaaatggctgcttgcatacaagaatccagctaagaaatagaacactgctaattttgaagctcttggaagctttgcctcagtccttttccccactcaccagaaatgtatttgtccttggcttttccttagttttttcacctaaatacagtttatggcctagctttgcatcttctgaattttatacaaatggaatcaaactgcacgttttattctacaggttgcttttttcacctcatattatgtttgtgagttttatggataatcctagtttatatttttattccaatgaacatctctactacaacatctttatttaacatctacagtctccatttcttttagacagtatccatagtccctctaaaa

SEQ ID NO: 48630 - DNA, 1542 bp, Bovine  19866881186862
  misc_feature (1)..(1): n is a, c, g, or t
nttattgtgaatagctataagaaaagaaaattcatctaagaatgcttaaccaactatgagtttaccatatcactgaaatagacatctacctaataaccatccaggctggatgtaatcctgggctggatgaagcacaggctggaatcaagattgctgtgaaaaatatcagtaacctcagatatacagatgacaccacccttatagcagaaagtgaagaagaactaaagagtctcttgatgaaagtgaaagaggagagtgaaaaattggcttaaaactcaacattcagaaaacaaagatcatggcttctggtcccatcacttcatggcaaatagatggggaaacagtggaaacagtgacagactttattttcttaggctccaaaatgcagatggtgactgcagccatgaaaattaaaagtggcttgctccttggaagaaaagctatgaccaacctagacagcatattaaaaagcagagacattaatttaccaacaaaggtctgtctagtcaaagctatggtttttccagtagttgggtgtggatgtgagagttggactgtgaagaaagctgagtgccgaagaattgatacttttgaactgtggtgttggagaagactcttgcgagtcccttggactgcaaggagatccaaccagtcctatcctaaaggagatcagtcctgaatattcattggaagaactgatgttgaagctgaaactccaatactttggccacctgatgtgaagaactgactcatttgaaaaaaaccctgatgctgggaaagattgaaggtgggagaaggggatgacagaggatgagatggttggatggcatcaccaactcaatggacatgggtttgggtggactccggaagttggtgatggccaggggaggcctggcgtgccgtgattcatggggttgcagagtcggacacgactgagtgactgaactgaactgatgactctttgcaaatgcaaagttaatagtattttaaatgagaaaatacatttataggtaaagtaaatctataatcattctgttgaaaacaaaacatattgaagaaaaagcatatgcagaaaatagtcttataaccactttctttttctgataaccacagtgactaggcagaaaactctgagtgcttgagcaagtaaacaaaccaaagctttccctggaatgctttgttcagtgttttaggcagaaaataatccaagacactaccccacagaatttcaaatttcaaatttctctttagaatcgagcaattaggaggtactcccatgtaccagagtcaaggatggataaagtggacaacgaagcaaagtaataaaacaccaagtctttcaccctgaagtctttagacccataaacagtgtgaccatacacaatgatctatttacattaatggaaatgtttagttcaaggatattgtaacaaagtttattatccaggctaaactgaagtcaagtctacaaataagtgaagacttatcaatggcattcctctacctttaatatcactttatataaagaatctgagaaaacca

SEQ ID NO: 48631 - DNA, 1407 bp, Bovine  19866881197640
  misc_feature (1)..(1): n is a, c, g, or t
nattacactgtgaatgaagaaactccaaatattagttccatttataagatacaaattttcctctttctgacaattgtcatatcaatgaagtttgcatataagcattctcagaccagctcagtgaccaaggcttctctattgtgactgttattcctccctatggtccattctgatggttggactttgaccagtcgtatgtcacattctagcagtagaggggacaaaggaggaagggcatgcccctagccattgagacttgcttccttctttaaggctattccccaaaaattacatataacccattattacatccagtgatgtgctggagccagttggtaccaacttgtgagagctgctgctcttcccaactctgtgttcagtgccatcaaggtggaagattgaagttagccatggtgggaatgtataccatggaaaatggcaatgctacgaaccaaggctccccatcatctccctgtctcccaagggggactaattgttaaaaaaaaaaaaaaagcttgctagcagccaccaattatatcccactggctagaggtataatcacagggccacacctcgctgggaggtggactggaaagtgtagcctctattctaggtggctatgtgcccgcctaatgaaacataattattgagtggcaagtaacagtctttgtcagtgttgtctaccatcttctgtttctgtgcctggaaatattcaagattctaaagtcagttatgtaacactataccaacctagctcacttgaagcagccaattgtggtttgtctcttggagatgaaagctgttgaaaaatgttggtgttgcagatcattcggaggtggagtttcttccagaggtcttttttatgccatctttgtaggtaacgtgagtaaagtaactcagtgaggcagatcagcctttttctaaagttagtaccatgaagaacttgggccagaattagaggggagggaacaggagtgtgtgtttggccataactctgtgtggaagagccttggagttgtaacaattccatgcttgttctttgttctacctccatgcttccctaacctctttgcccccaccaccaacactgctcccccaccaacccgttctgtttcagagtttttggtcacttagcaaaaattgtgataattggcctctcctcttataattacatctgttatatttttgttatatgaaaagtattcattttagaaaaaatgttcattctagaaaattgtctttctctgtgattttgtgacagttctcagttttttcctgtgaaaagatgagaacacacaataggccatttgcatcccccattcttattttatttgtttatctctttggtatgtggtttttttaatgaaatataattgctttacaatgttgtgtttctgctacacaata

SEQ ID NO: 48632 - DNA, 843 bp, Bovine  19866881217537
  misc_feature (1)..(1): n is a, c, g, or t
ncccattttttccccttcggggaaagtgtaaatgcagtcccctctaccacaagttatgcagccgagtttcccatgtttggagaaatcagaggggtcagcacacccagagtgcaatgggtaagtctcacctggggcaaaccacattcgtgatcatggtaactcccctgccaggtaagtatcccatttttcaattttttaaaaaaatttctttttgtatgagctatttatatgcatttaatattaaccccttatttgtcatatcatttgcaaaaattttctcccataacccctcctattaagtagatggtctttctgttttgttaatggtctcctttgctgtgcaaaatctttgaatcttaattaggtcctatttgtttatttttgcttttatttcctttgctttaggagaaggatccaaaaaacgtattgctgtgatttatgtcaaagacataaatctgcctatgttttcctcaaggagtcttaacatgttaaaaaaaaaatgagtttttaatatgataaatgattgtttttcccccttgctttactataaaacacagagtgagacacaataagagaatcctcatggcctttaaaagtaatgtattcaaaattttcaatgtaaaaatctagttaaattcagatccaaattgttagatttattgtgccaaatttcaaatggaaatgtggttctctgcattttaaaatgtataacaactgtttataatattctgtataatacagacatatcactatgtgcatgacagagttaaaggcttatttatgcaatttttatagaatacaacataaacatttctgtcaaaaggacttgtaaaatcattctac

SEQ ID NO: 48633 - DNA, 1275 bp, Bovine  19866881471622
  misc_feature (1)..(1): n is a, c, g, or t
ncctttcttccttactttgtaaggcttggaattctgtaaactagttttccaaggggctttattgtttccagaaattcaaccttagttcctttaacctatctgtacatatgtgattttatgcacatcatttacagagatgacattccagtcaaagtccaaagtcttgataacgtaatcagtgtttctaattgtgtcctgttataataaaacaggttcctattaaacttatgcaaataactatactaccctgaaaataagaatattcaataatttcctgaattctggagggatcaggaaggggggaaaaataaatgtttcaattctgttaacaaaagtatatgtgccaaactactataattcatagattgattaagagaagaggaatcattctctgccaggtcttgtccctgttgctgccttcaccacctgcactatggctttcataacctggcaattcatgcgttccatgtcctcctcctccaccgccatggcctcgacaaagaaaatcctcatcaagcacgtgacggtcatcagcggtgggctgatgggctccagaattgcccaggttgctgcagcaactgaccacacagtagtgctggtggaccaaacagaggacatcctggcaaaatctagaaagggtatcgaggaaagtcttcagaaagtggccaagaagaagtctgcagaaaacccaaagagtgctgataaatttgtggcaaagactctgagcagcatatcacccagcatgggtgcagcatccgtggtccacagcacagacctggtggaggaggccattgtagagaatctgcaggtgacaaacgagctcttcaaaaggctagacaagtttgctgtggaacacacaatctttgccagcaacacttcttcattgcagatcacaagcctagccaattacaccaagagacaggaccagttcactgggctccatttcttcaacccagtgcctttgatgaagtttgtggaggtcattaaaacaccaatgaccagccagaagacctttgaatctctgctagacctcagcaaagccctgggaaagcatcctgttgcttgcaaggacacacctggatttattatgaaccgtcttctggtgccatacctcatagaagcagtcaggctgtatgaatgaggtgacatgtccaaggaagacatcgatactgctaagaagccaggtgccaggtatcccatgggtccatttgagtgcctcgattatgttgggctgtacactacaaagttcatcctggatggttggcatgaaatgga

SEQ ID NO: 48634 - DNA, 904 bp, Bovine  19866881774739
  misc_feature (1)..(1): n is a, c, g, or t
nctgataactcggtggaaaaggcatagctgatcatcccctcataccacacagccaggggccacagctagactgtggatgctgcgtctggcttcagaaaggatggtgctggctacagaaaaaagtcaaacactaatggtggcattttcaaatgttactgtgaatactataacactggccataatatttctggctgatcttaaaattgaggaatctggtattttgtatagtacgggaattgttacaaacctcaaggtttaagaaaaaaaaaaaggaacaagacacatatatacaatttattaaaaacacatgaacacattaaaatctcactatttatacaatcaaattctagcaacatatacaaatattgagtgactacagtacatgccgaggtaagaaaagtacattctgggagaatatcactgacactcaaagccatttttatttccaatacgtatttcaatatatgttttgtttctacctttcccagtgccaaaaaagaagaggaggagatgagaagaagaaactagttacaagttggattatatgagaactggtgccacagttgacctaaaaatatccaactcttacttagatattgcaatttagggatttcaagttcagaaccaaaaggcaaagccagtaggtaatttttttctttaaataaacagaacttcactgatttctcttaagaagggttgaaaagcttttattgtcccacctaatctaagttgttctttctaatcctattatctgacatgggtgttttcccataaccctcttgctctccaggtaacaatttggagcccagggaaagaggttcaagctttattacattccacagaattatggccacatgtatatttaaataagctcattttctgctccctcttgtggatggggagg

SEQ ID NO: 48635 - DNA, 979 bp, Bovine  19866882007763
  misc_feature (1)..(1): n is a, c, g, or t
ncatttttgtaaaatgtcacatgggtttatcactggtagacaaagaagcaacatagctacacactttgctctctgtatgtaaactggcagcagatgtgcagtggccagtcaccacaaaccgttctttttttaatttttattttatattgaagtacaattgattgacaatgttgtgttagtttcaggtggacagcaaagtgattcagttacattgatatgtatacatctattatccccttaattttcaagttctcttcccatataggttattaaagaatattgagtagaattcccagagctgcacattaggtcctcattgattacctgtttttaaaaataatccatcttatttacttttggctgcactggatcttcattgccgcatgcaggctttctctagttgcagtgagcaggggctactcttcattgcaacacatgggcttcttattgtggtggcttctctcgttgcagagcacaagctctaggcacacagacttcagtagttgcaacactcgggctcagtagttttggtgcatgcgctcagttgctctgtgacacgtgggatcttcctggaccagggatcaaacctgtgtctcccgcattggcaggcagatctccatccattgtgccaccaggaaagtcctaattatttattttgtatatagtagtgtatatatgttaatcccaacctcctaatttatcccccaccccagccccatttcctctttggtaaccataagtttgtttttgaaatctgtgagtctgtttctattttgaaaataagttcatttgtatcattttataaattccacatataagtgatatcatatggcatttttctttgtctgacgtatttcacttagtatgataatctccaggtccacgcatgtcactgcaaatggcattatttcgtgttttatggctgagtaatattccactgtatatatgtactacatcttttttatccattcttctgtca

SEQ ID NO: 48636 - DNA, 1215 bp, Bovine  19866881037064
  misc_feature (1)..(1): n is a, c, g, or t
ncttggtaatttagctgcctctgctctgccatatatcaccaggcttcatctagggtggagtggtggagatggtgagagtattaatagtatgttgtactaagtcacttcagtcgtgtccaactctgtgtgaccctaaggacttcagcctgccaggctcctctgtccgtggaattctccaggcaagaatactggaatgggttgctgtgccctcctccagggaatctacccgacctggggatagaacctgtgtctcttatgtctaacctgcattgacaggtgagttctttagcactagagccacctgggaagcactattaatagtatacctgataggatttgctgactattgatgtagggtgtgaacagaaggaagaatggtggtgctgttaacagaaatagtcaagtgtatttatatgttactctgtgtagacagtatcttaacagaagaaatttttaattgacaatttcattagtactttattttaaatttaccaatcctgagtcttctgaattcttatatttaaaggacaccatgtaatgttgttttaattgagagaaaaatgaaacttctattgtgctaagctactgagatcttgaggtttgttatagcagttagtgttacttaccctaactaatacagaaatgaatttttaatcaaagtaaaaaatactgttattagtatgtctggataaataaaactgtgtcacttttacaagttaaactgagtttgaattgagatctcaaaatccgttcttttcctaatactgtagcttataatccaaaccaattgaaaattcagttgatggttgtgtggtttgttaccgtgtctaagcactgattttccagatatttaaattaaattactgatatttaaactgaattttttcagtattttttttagtggagaaaatgtcaagtcttatttaatttatgcatctgaaaacttttaatctattatcaaccgcagtaaaattaaataattctttttccttttccttctgattatctgaaggcatttgaatattccatttaaagcaacagttttaaaaattgagatataattcagatactataaaatttaccctttaacacgtacaagtccagtggtttttaatacttaacaaagttgtacaatcatcaccactgtctggtgttctaatgtccagaacattttcatcaccccatactcactagccatcactcctcgttctctgt

SEQ ID NO: 48637 - DNA, 1340 bp, Bovine  19866880265033
  misc_feature (1)..(1): n is a, c, g, or t
naaatggtccgtgcattgtttgctgtagcaagatgtcagcaaccagctgtgatatttattgatgaaattgattccttgttatctcaacgcggaagatggtgagcacgaatcttctagaaggataaaaaccgaatttctagttcagttagatggggcagccacatcttctgaagaccgtattctagtggtgggagcgaccaaccggccacaagaaattgacgaggctgcccggagaaggctggtgaaaaggctgtatattcccctcccagaagcttcagccaggaaacagatagtagttaatctgatgtccaaggagcagtgctgcctcagtgaggaggagctcgagctggtggtgcagtattctgatgggttctctggggcagacatgactcagctgtgccgggaggcatctctgggtcctattcgcagtttgcaggctgttgacattgccaccataacacctgatcaagttcgcccaatagcttacagtgactttgaaaatgctttcagaactgtgcgacctagtgtatctcctgaagatttagagctttatgaaaactggaacaggacttttggttgtggaaaataaatgggacacttaggatggcatctttgtagtcttgtctttccactttttattatagcaaggaaattaatgaattgtttgtgaaatgtatattctgaatctgtaccttaaaataggataacaatatgttgacttttacaattgattgacttagactatattaatataagctcaattttcattccagttgtttcctgatatttaagcctatacatacaagataggaatgcacttttttgttttgttgctaagaggtcttttcacgatgtatactgtgatgaatagtaagctcaaacagaaacttaaaaaaaatgtgatttctgtatgagaatgtatctgacttacatgcatgttttattgaagaaggtttcttgtgaggatcacatcatgcttagtgttggctgctactgctaagtcgcttcagttgtgtccgactctgtgcaaccccatagatggtggcccaccaggctcccctgtccctgggattctccaggcaagaacactggagtgggttgccatttccttctccaatgcatgaaagggaaaagtgaaagtgaagtcgctcagtcgtgtccgactctttgtgaccctatggtctgcagcctaccaggctcctccatccatgggattttccaggcaagattactggagtggggtgccattgccttctccatagtgttggctggtgtagtggtttacattagaacctgttgtttactgttgtttaagatctcaaccaaagctagagtaaaag

SEQ ID NO: 48638 - DNA, 2435 bp, Bovine  19866880480823
  misc_feature (1)..(1): n is a, c, g, or t
natcaagtcctagattagggttatttgatcctgtgcttctcccatcccattgtcttctaactctcatcatgcaggttaaaaagttagctgtccttctcattgcttctttgaaaataatgagtctttctctggttgcttttacattttctctgtttctgttttgcatgatgttcctggctgattttgtttatttgttccttttgttttgctcttatcccgcacctagattctgtagcttggtgtatttttatttgtttggaaaattcttggccatcatcacaaacatactgccttttcatactgttcatggagttcttgagacaagaatgctgatttggtttgccactccctcctctggtggaccatgttttgtcagaactcttcattatgatccatctattttgggtagccctgcacagcgtggttcttagcttccctgagttacacaggccccttctccacaagactgtcacccaaggagatcaaacaaggtaatcctaaaagaaatcaaccctgaatattcattggaaggactggtgctgaagctccaattctttggcacctgatgcaaagaatcaactcattagaaaagaccatgatgctgggaaagattgaaggcaaaaggagaagggggtggcagaagattcaatggacatgaatttgcgcgaactccaggagatagtggaggatgggagcctgggagtcaccaagttggacatgacttagtgactaaactgcatctgaaacatttgttttgacctgctctctctcttcctgtctcactggggtgcgactgtatctacggtagaccttttcatcatgttccaaatatgttagctttagaagtgagtacttactgctggtccttgagctggaaatgagttcacatccgtgaagaacagtgaagaggaaaatgcagcccgctggattcctctttcctcttccttttttcttttctgtgtggtttgaaggtgtaactgaggaggcaggttgggacatcaggactattggaggctttgcaggacactcagtgcttactgactgaggaaataaagcccaagctgctgagctggttgggcagggaggctagtggttaagaagagcactggtttggaagcaggattgtccattcagaacctgaatccttactttaccatgaccttgagcaacttgcttcacttgtttgtgttctattgtttgtgaaatgaggataaactacatatttcataaaatagagaggattaaataaaagagcagcataaagcacttagagctttgcctagagcaacatttagtaaggctaattgttcttgctaggcattattatgttggtacttctttgaccacttcctgcccacccagcacccccagacagatagtggtaactgaccgtggagtgttggtggtggcaggccccagagacagggctctgttgggtgtttattcttaagttcacccagttgtcgcccattattctatatgagtgtggctcttgagtgccaagggtttgccccgtgtggggctttaggggctccagatgccctggtgactgactctggccctccttacctcttcagtatgggatgctcctttaccagaactacagaatcccacagcagaggaaggccatgctgtcccacttctcgactccagtggtaagtcaagctgcacctctgaagccacattcctcttcagctgctgcatcagcacgggctgtgggcatcttttctcagatgaggctgccccgaggagccagaatagccgaccagcatgcatttcccaggagatggactttgtcgtctcagcagtgtgactgctgggagcagatccctctctaccctctcccctttcccacgtctccctgcagcattgctttggtgaatggctcccactgagagctctattctagtgttcagaatgttgacagcgcccacatctactgaggagctgccttcaccaccttcgcttctgtccatttcagccggggggtccatggtgctgttgaccatgatgcttgagtcctagtgaaaattgagattgtaatgagtcttcctgtgatctcagggtggactttatgtctcagaggtgcagaaacagttcatcctccccaaatatgatcttaacacattattaactaggtgatgtattaacacattttttgttatccaaatatttattggccaggagtgtcagtacatttttagaaagtgatcaaattaacatcactgtgtgaagttgttagatcttaaaattgatcaaaggttcattatacagtttatgattattgttatcactcatgttttgctccattaggtttttgtagcaccttgtgtatatttgtgaaattttcaaaaatgacacatcgagaaatcttgagtgaaaaaatattcagtgaattttatgcagatatcctctctgagtgtccgagtgacata

SEQ ID NO: 48639 - DNA, 2222 bp, Bovine  19866880528728
  misc_feature (1)..(1): n is a, c, g, or t
ncaatgattgattctgatgcagaaagtgaaaatgaaactcatggtgctggagaaaactttacaggggtaactattgaatgtgataacctgcaaaatgttagtgaaataacagaattaattttttggccagccaaaataaaaagcatcaccaaccacaggtgttagtttctgcagaaatcccccagttgataaggagttaacaatctctcaatgtccattcctcagagatgtcaaagtacccacagaagcggtgcccgtgtttctgtgaactgacttacctgagaagggatttggctgctggtgagggctggctcacctttgacgttaccatttcttggatgagttttttgtgggttttttggtaatggaggagaaagaaagaatgattttattactttgccaggcaaagggagaccacagcaggctaggtcctcaagaactgtgctctcctttgatgagttttaattcacattagagaccctgtggacgaccacacaggtggacaccagtggcctcaccagcagcttctgaatatcttgagagaactggaaggtttctttcctcttcttgagaaaaaccaaagccatttttcttccaagggcccttcagacactaagtgttctgtctgatccttgacagcggggtccttgcccatcctttgctgcccctccctgggtctgcacagctatcccacgcagcagttcctacctgctgctctgcttgcttccctgtgtctcaagaatccacggcctctcctttgcagcgcagtgtctctgagaactcccttgtggcaatggatttctctgggcaaacgggaagagtaatcgagaatccagctgaggcccagagcgcagccctggaagaaggccacgcctggagggtaagactgtggcccagtcccacccctggtctgccccagagaaatggctctgtgctggcggcagggatgcggggcggggaagggggtggctgtgagttctcacctgcaggaagctgtggcttgcctgggcgcctccacacccccggtacctggccacccccacggcctgtctttgggctgccatggaggggaggggcaggagcagagccctgaggccccttggccctcagccctgtccctgctaatgtgtcatcagggcctctggggagagcgccgggccaggcgttcccatcgtggctcaaccgccgaccaacctcccagccttgaacagtctctttactctgagactcaagttcctaatttccagatggaagaatttcacccaacttccaagcttttctgagctttcaaggcaactctggctcagaaagcctccccatccttcagcttcacagtgttcagaaaaggagaatgtccccaaagctacagacctgagttccctgtggaagctcatagttttctcctaaggtgtgtcgggaactgtactgcgtgtcttctgtgtgacagacagcccggcttcagcactgggatcgttagcaatatcccgggatgggacgcttctggttttgcttttaacgactgcgacccataagctgtttgccctcctgctcacatgggaggggtccttgtgaccacatgggactaggcagctgtcatcccgccatcaagggcctttcacccagccagcctcctgccccgtgtgtcccaggtggcgcggtgattgtgttcgcggctcacttggcgctgacgcagggatttcttttgcagaaacgaagcacgcggatgaatatcctaggtagccaaagccccctccacccttccgccctcagtacaggtaaacacggcatgttggcttgatattgttgtacataaataacataaaagcgctcccagccctccccaagcctcacggcaggcctggagtacagcgcacgaaagctgggaccgcaggagtcggggccccatgtggtccccagcgcgcttagcaaggcggctaccgtgcacggagcccagcctaccctccttctctggtccccacagtgattcacaggacgcagcactggtttcacggcaggatctccagggaggagtcgcaccggatcattaaacagcaggggctcgtggatgggtaagggacgcgtcccgggcaggagtctgctgggctcagctcctcagagcatcttgctgtgtgtgcgtgtgggcagagggggcgagggtggtgcaacaacctcattttaagttggagcattgtgctcaggagtatgaaggtggtgcaggattt

SEQ ID NO: 48640 - DNA, 847 bp, Bovine  19866880759886
  misc_feature (1)..(1): n is a, c, g, or t
nagctgctattaatacggaggaatcccttgcgtcattatctagtggaggggaataaggatttgggttttaagctggtagttcttagaattaatttcctattttcaaccaaaggtcaccttccccattttgttcgttctgtcatagattgtaacacttcctgcctgactcagtgtaaaaatggggagaagaggaaaagttcacttatttatttatttggccactcagcttgcaggatcttagttccctgaccagggattgaacccgcaccctgggcagtgaacctaaccactggaccaccagggaattctcaaatccgtgtggttaggtatgtaagcactgagcagtaagggtgagtttggaatacctacagtagcatcaagtcaacgcatctttcatgtctgtcttgctgcttgcctgaaataatccgattacaattcataaccagaagagcaagcatattcatgcacagcccactgtgtgcctggccctctccccaaaaagtaaggctgttgtgaatgttgccactgtcttgggctcactttccaaacagtttgaacctccctgcagggcctgctctccatcacatgtttgcttcagtaaataagagacaggtcgcaaacaccagagccagttctctttggtgagggctaattgttgaaggcttcttcaatttattcatatcaaagaagaaaataacaatacaccgcccacaaatccctcttttaatgtgtcacctcctcctcattcaatcttattcccagtgaagatccagaattgtactttactctgtttgtagtacaagagaacttcatccttatcttgttaaatacagttgtactgctgctg

SEQ ID NO: 48641 - DNA, 2172 bp, Bovine  19866880881612
  misc_feature (1)..(1): n is a, c, g, or t
nctgcaggtttgatagaacatgaggctttcagactaaacctgccagttccttaacgcttcactggttgggtcaatttgatctgaaaatctaatttttttcccctaaatcagaatggcacatcacaatgcaaattcaaactcatttaaataaagtgactgcaacattttgtgatgaagagccactcttcctgatcagcagttttggaataaaccaatatccaattttgcgtgttgtggcatttggtgggggttttaatgtggcttttttcaaagggtctttaaaatatgccactgaagcagcaaaataaaaaggaaactcattaaaaatgcatttcaggatcacaagttcatttcagcgttacattcttatatttaaatgaaaggcacttcattataacagttataataacttcttttcatttacattttccctgtattttccctttcaatttcttctccattacctgtctgtccctatgcaggcaaatcaggaaagagacagacagagtgtgagggtgggagggagagaaggagaaagactgaataaaatgagaagttgagaaactggagggacggtttccatcatccaaagagaagtccttaatctctgtcaaaatctgagctgcactcgagggttctggctttttcctttgcctcctaatcctgcagccttgaagccagtatgaagtctatctgtatctattgaagtcagttctattttcagtacagatattctaagagatgaaattcagttattattgggaactctttcgggagcagaaccgctggagtggtcacaaaaacaacagaacaaaacaaaaaacccactgagctctctgctgtgcgtcagctcatgtccccagactctgagtccaacaacgggatggacaggccgctgcggtcaagaaatatgctattgactagtcacaggtctcagaatctaaaatcagtgaatatttaactctcacttaaaacagggatacatttgtcatgtttaagtaaacatcaaaactctttaaaaagtgcttttttttttttagacaaaaggctttgtatgaccatgatatctggtattgagataccatgaaaatgcacttcctagtaacaactttaccttagggaagaagaatgtgttaaaatgtattttaacaattttcccaatcaatctgcatgattttggtgaacaagacggcacttatcaagagcgatcagaagtgcatctggtactaaatctacaccagattaaatttagaagcctgtgttggcatctgaatttcaagattatcatcattcttaagtgggagggatagatgtgctactggaaaaactgaagcgaacttacaatgatattcagttatagaccatttggaatcctaacaataacaatatattcgtaattttccaaagtctgtatctagattggatctgactgagcagaggaagtccagcaggtggaaaggtgatggtaaaagtaacacttcctcaatctctgagttacaagcccacactagatgaggaggttacaacagctagtagccagcagaaccaaggagcatctaatagacattgttaattttcgactagaaacacttcagggccttcccccacacgtgtgtgtgtgactgcggtctttagctccaagcagatggaagaaggaagaagagtcagggtgaccggcagggcggacccttagggtgagtgttctggagagctaggcggtccaatgccatgaacatgatcatgacaaggatgtggaccgttcctggtgaccaacgtgcctcggtgtgacccgtgcccatgtgacatgccccctctatgctgatgaggtgctgggcgcctggcttctcctgaggtctgaaaggatgcagggaacactgccatccagccagtgttgtcagcggagaaaggacagatggttacagtcatgaatccctccagcagaacagggcaggcaggaaagacaggggccatgacttcgagagtgaaatttgtcttctaatttgctctcatgtagcctgctgggcctggtgtcttaattccactggcaagctttcctggaaatctatttgtttctgactgttgtgccagcatgaatatgtaacatggggcctggggactggaagagagcattccctgaagccatgacacggaattcaactcaatgtggcttcc

SEQ ID NO: 48642 - DNA, 1167 bp, Bovine  19866881094503
  misc_feature (1)..(1): n is a, c, g, or t
ncaccagagaggagcggcgtggccatcagggaaagggggtgtgagctggagggaaccggcatgggcaccagggtaagggggcatgaactggagggaaggagcatggccaccagagaggagggcgtggccaccagggaaagggcgtgagctggagggaatgggcgtggccaccagggaaagggggtgtgagctggagggaggggcgtggccaccagggaaagggggcgtgagctggatggaaggggcgtggctgcactccattcctctgaggctgcaggttttccttggtcacagggaggtccacttcctcatttcccagctctgatgtgtggcttatgcgtcctcctcattgctgctgaggcccaggtcagttgtcgcctagaggaggaaatagatgcaggatggactgttaaggcacaggatgggacattttgtgagcagttggccactggttactcagcataacaaaggtggtgggggacttacatttgagtgtatgctcctaaccttgaccacggtttgcaaatgtcctggtttccactttgaatattaccttataaggcggaatatcagatacattgtatccatctgtctgaatattgggaggtggggtttttagcaccacccagcatcccaattggctgggggatatggttttaacttggcacttatgtgacaccatggttataacctgtagactgtcaaaggggagaggtgttgagagcatgcgtagactgccctctgctgacaaggacaggaaacacttgctcttggctgtactgagaagttccctcctataaacctgaccacttctctgcaggagcccagacacctgcagctgctggccgacctggaggacagcagcatcttctccctgattgctggcaggaagcagtacagtgcccccacagactatggcttctgcataaaggtactgcccaccccgagacggtgaactttgaaattaaaccagcgacctcctttcttgattgttgctttttaaaaataacaaacagtttcacattggatttatgcactggtataaaaatattccatgtgtgctttcaatgtgtcagtccttgagtagcacagatgctcagggaaaagcagaagccctgatgcacaatgccccaggtcttaggggcgatgggccccgggtttagggag

SEQ ID NO: 48643 - DNA, 1513 bp, Bovine  19866881414003
  misc_feature (1)..(1): n is a, c, g, or t
nacttccagcttccagaactgcaggaaatgaacttctgttgttcacaagccacctggtatctggcgttttgtgacagcaaccggcagactgagatgcgggtcagtaaacatggacgggtgtaattgtctactgaagatgactgagatgattgtgtgcggagcacttgtgaggtgctgaccccagatctcaggtcctctgtgagcggttagtgaggggcagggcagcgtgggctgggcagagggattgagcggggaagctggggaggcactgggtgacgagaatgggtcagctgtgaagacaggtcacagtttgagagtcaggtggtcaagagcgagaaatcaggatggacccaggaggtgcccgagggcagagcgagcttggagggcggcagagctctgttcccacggagaagagggccatggtcccagacaggagggaagcccgcggagcccggcgcccaaactccctccacgaaggagaggccgaaaagcaggcccagtaaagcagctgagaccagaagcgggctgtgaagaagctgccagctgagcacccgggacactggccgtggcagttggcggggggcccggggagggagatgcaggaggcggggatgggctggggacccctgaggctgatgctggcaggaaggaaatggggaacttggtgcagcccggacctcaggcctcagctgggaccagatgcctcaaaacatgccaagttctgggctgtattttcctaaggaggaaggtgaaaacctcagtgtgaagtcccctcgctttttccgctttttggcaaagccaaggacaggaacaaggcatgatccctgtgtgatgtctcctccgggcaccccccaccctgctcccccagcataggccgcccgcgccccctccctggcagcggggtgctgcgccggcccagcaggtgtgttgtggctacggggatcacaggacgggaagcagatgcggcccccgcagtccccaggcacaactggaggctggccgcttggggaggagatttgcataacaaggataatttggtaccaaagctgtcccctgaagtgaactgcctggatctcggtgcagttgacaaatttcacttcttctttcccatgttttgtcaaaccaactagatgtgacgttgagtgtgtgaattgtccaaagatactttctttctccctgcatgattccggcctccctccctctgctctgcctgatccagggcctcccgtgcacactcccagggtctctggccctgaaggcagcgcagcagtgcctgccccactcaaagccttgctccctctcggagggacgccacggtgggactccaggcctctgggcaccttgcctctgctccccgcacctgccgctgtgtccccgtcagcttcctccctcctgcttcctgtgggcaagggcgggccgaggcgccaccgtgaggagggcgtgtggtctcgggcccttggtttattcccctttcagggccctcctccctcctgggcactacccttcacaaaac

SEQ ID NO: 48644 - DNA, 1388 bp, Bovine  19866881463643
  misc_feature (1)..(1): n is a, c, g, or t
ntggaattttccaggcaagagtactggagtgggttgccattttcctctccgttgtcttaaaggggcagccaagggtccgtgaagctggaagcagaggctgcctggaccaggcaagagtgttgcttgagctttgacacatttgctggttcccattgaaacgaatgcctggtggttatcatccttcacatgtgtgactctgtgcccaatcctgagatgcagaccctgatgcctggatgtctcagggagcttgctgaccctggaagtctagccagtgctggagacctgaaaggcacgtgagcctttcctaagcccacgagccctgcccacctccttcatggttcacaaaggggctacagccccttcaaagtgtgacctgctgtggaaagtagggggcacatggggcagatctgagctggaagccctccaggcactcgccggtttcttcctcttggtggtttgctttcctgacctgataagatcaggcccaaggcagagggcagagcctagcgggcagtggtgagattgacagacgagggagaggggcagagtagggtagcaggacagccccaggctctcagaggtggggcgcccagcccgcctccccctttgcaaatgtgattaggtctctgcagagcagctgaaatcaggttagcatctctgagccgagcccagtaatcacagcccggagcagagcaggtgctggggttaaagcggcttctgagaatgaggacaagctgactcacagccctcaaaacacgaatacatgggccctgccgtcaccagcctggcacatcttcctgggaccctgggtcccatgctgcccacatgctgtgcagggagctgcccagggatgggcttggttggaagggcctccagcatggccagtgtgcggggttctttaactggcagaaccagagctaagcatacctgcgctctcttcttggtctggtcctgcctgtttatccccagaccccacgctgagtgtctcacttaagctaacagtaaagtagggggtcccaaagacacccaaatcaggagggtcctgatgagtgaatataatgtctgcaaagctgagacatgttctcagctgaggccactcccaggactgggcagtgttttcttgattttacaaaatgctccacggcagaatgaaaatatcaatactaacgtaagaatcacagaataaaagatgtaatattaaccaaatctcatcataagagacaaacagtactaatatttggtgaaattattctagactcactgccatatacacattaatagaaaataattttaacaagaggatattcaggttgcattttaaaaacagatggtatggcatttatttccattaggattttactgaggaacatgagataaagaaaggaatt

SEQ ID NO: 48645 - DNA, 887 bp, Bovine  19866881764726
  misc_feature (1)..(1): n is a, c, g, or t
nttctgtctcctgatttttatttaaaatattgagcattttgagcttacctggtctaaactcatagtttagggaatgtctgttcagtggaacaatgccatctgagtaccaatgctttacctcacctataaatatatagacacattctaaagggaaaggaaagtgatggggaaacagaatctatctgtgaggcgaggccgccagtgtgctatatccctttgcattaacacgttttaatctttcatgaggcatacaatggttggcaacaggtccaggcctcctggcccccgtgaccccgagttctctggattctctcagggctaaccttgtctgtgtgctaatgaccaggcacccagggtcactctaaggactgtcctgttgctaataacatagaaagcctctgagatgtgtaaaaacgagactttcatttccccaaattttaaattgcatcttggaaagaaagtggcttttggctcagggtttgaaggcacatccactctgcaggcagccatgcttattaaataatgacaccggggcctcgtccatcagctcctgggactctgtggaaaagttagctgcacggttaggcctgaaccaatgcgttccagggtcaagaaacacaaagtctccatttcatgttctatatttaatcagttccactcagcaccatactgagtttgacatttttctaagcggtggaaggacagagttacaaaatatttataagtataatccccatattcaaggagagtataacatttcatagaagcagtagtgcaactaagcagcttggggtccaaagaaccagagctgatggaatggtttaggaatttagagaggggatgaccacagagacagcatccatgggctggaccacggaacactaaat

SEQ ID NO: 48646 - DNA, 1234 bp, Bovine  19866880355300
  misc_feature (1)..(1): n is a, c, g, or t
nctgcatctgtagaaagctgggcagccacagttgtcccggagggagtggggcaggggtgagggtggggggtggggtgaggggaaagcccgtccagtcggctaaacagggggatcagatgagcattttatatactaataactgagtccacccactgccaaacggcttttccagctcagcttccaaacaaacggtaacccgtttttcaccatcaagagagaaggtcagaagatttttctctggagaaaaatctaaccagcccaagaggaaagtcttaacataccaacactaagtactccttggtgaaatgacccacaggcggcaggcctcaccatgcgatcagagcttcttatcagctttatggggcactgctcttaagtaagaccagacaaccaggatcaccagacagacgaggaacatctcagacccaaaagatagggaccgaaacaaacaaatgaaaagcaatctggagaaaaaacagtctctagagagagaaaaaggtgtttaaacatgtatcattaatatattctgagacagaagagaacacatgtctaaatcaataacaggtaaatataaaaatatattttaccccatgagttgaaaacttatgtccatacaaaaaaatctgcatatacatgtttctgacagctttattcataattcccaaaactggaaacaatcaagacttcaaagggtgaacagataaactgtggtatatccttacagtggaatatcattcactgataaaaaagaagtcattaagctacaacaagacacagaggaaatacaaacgtatattgttaagtgaaagaagacagcttaaaatggctacatatttatatgattccaactatattaacgttcaggaaaaaacaaaactacagagacagtgtaaagatcagcggttgccaggggcttgtggggaggaagagtgactaggcagaggacaggaaacttttagggcaatgaaactcttccgtatgataccgtaatggtagacacatgacattaaacctttgttaaaacccatagaggtgtacagtactaacagtgaagcctaatgtaaactaggaactttagttcgtaataaagtatcggtgttcattcatgaataactttcattcatcaaacaaatatactacactaatgcaagatattaagaacagggcaacttatgggggaggcagaactagagtgggtatccaggagccctctatacttttctgctccattttt

SEQ ID NO: 48647 - DNA, 1894 bp, Bovine  19866880615033
  misc_feature (1)..(1): n is a, c, g, or t
ncgaggcctctgaggaagacagaaacagtgacggtggcagaactgacgcagaggagaaaggccatcgcctcactgaggacggtgcttttccttcctgggttcctgctactcagcactttgggaaaggtaaactgaaccccgggggcccaaacagggcaacaccatttcactggtcagatcaagcctgagtaagtgaccacaggggaaactgaggcccgtttttcaccgtcagtttttcacaagctggctgaacagtgtacaaattaatgtaacaagggcaattataacagtttttctttttatccaataaaagcacttttattgggatgcccccacccgccctgccttcagttccccactgcgactgcttagttttccttttcatgtctcagtcattttgaaacaagtgaaacaattttcctttgaatccagaaaataagttaaatgcaaagtcactattctctcattctgtatctccatttactctgagaatttagagacaatcatttggataattttaagtaaccttataaggagaatcctcgcttcagtattcctttaatcatgcagaacttgtactataattttatcatttaatatatgaaacataatagtttgacttgcacctttcatatgatgcatgacctttctgggtacctgtgtcaactcactgtaaaaatcatgataaactgaaagacagctgaccataaggaagtatatcttttgaggtctaatgtttataaactgtgagagaaaatgcaatgaaaacaaaaaataacaggagatgcttaaaggactttctcccttagatgcagaaggcaaattatatatgaattacatggatttgatgtttcaattgaaaggaaaacaaaaaatacacagcttcaaacactgttttgtagagtttttttgttgtagttgttctggtacgtttagagtctaattacactctagcaaagaaactatgaaattaaaaagtaattcattagaacctccaactagcttgaaaagctcactaagatctcatggccaaaatattttagctaacagaacacagggggtttcttagttaatacaaaagaatcctccgttcgatagcttttcgacagatgggacattcactcatccggtctccgcagagctggcacgtcccatggccacaaaggaagatcatgttcttcagacgatccaaacacacagggcacattgtctgtaatatgagataataaacaaagtaataaatgctgagctattttctagtttgaaagtataatctgacaactctgcaatgtcattaatttttttgttgttgtagtcaaataatctttggctgctggacacttttaaatttttgaatctttaaggtatcatccttataaaaacagaaatactggctgtactgtcaggtcagtataaaatggtacaatataaaataaatagtacataaaattaaaaatgcaaatgccaaaatctaatacgaaaaggatgaaaatagccccttcagtctgactcagattgttcaactctaggtaccaggttgttcttgtatgaaaattacacagtgtattgcaggaagcagtgggggatagtgctaagaacatacacacatgccaagcacgatgctagatgtgatccaggcccaaagcttgtatcactctcacttcaagagaggaaactgaggcttagggatgctaaagacgagccagaatgtgagctcgggtgcgtgtggccccagagctcctgcttttagacgtgaagctgcactgcactgccttcagtatagaccctctggttaaaaacaattaaccttagctattgctaaatgtaacttcatcaacttagaagaattcaggagtatatttctataaattttctagaaaaaaaatcacacact

SEQ ID NO: 48648 - DNA, 3193 bp, Bovine  19866880629203
  misc_feature (1)..(1): n is a, c, g, or t
naggagcctggcgggctacagtccctggggttgcaaaagagtcagacatgacttagcagctaaacaccaccacaacaaacaacaaaacttacaattactaacatcagctaatatgtaatgttcagtttaaagatatttttccccatgccatctagtagccgatttttatttaaaaccttggcgcagctaccatttgatacaattagtaagtaaacatttatatgtgcatgtgtatgcctgtgtgtatgtgtgtgtaattctgtgtgtgtgtgtgtctacacagtaaggcctccttctagacatcagacttctgggaatcctccaccacccagcctagaaccagtcaagcacccagaaataagagaaaaataaaactttacagcagtgtaatgaaaggaatgtaactggcttgtattataggtagaggttaccctcaggtataaagcaaaatagcagtttaccaggcatgtgacacacagattccaaggagaagtggtaatttatctgaagggaagagactcaatatctatgaaaaacagacagtaaaaataaaaatatggcagctcagaccatttagcgcggaggcaaacaactctacgaaatacttcagtggtcgctgagaaaatcactacatttcagggtggcagaacagtgggactttataattaggaccctgagtaagtgaatgcccatcatttaagaatattttaaaagatagtattaagtgatatattttaggaagttctttcactaaaacttttttttttttttactttcaaggcttcagttatctggaaaataaagtaatctgaaacaacttttgtattgttttacttcatgcagtgtattttgtctctaactttcaaaggtttttctgaatactgatttgtcatgctcagagaggtttcaaggaaaggagatatcttacacagtatcattattcacatgcagattaaattacacaatagagttgattttgtaaggataccttttcagattatagtattatttgccctattaaaaactgtatttattaatctgttgtacaagttttacattataccacagggtttccttctctgcattactataaaaaggtgccattcttagcttgtaataagttatccctcatactattgttatgtaattttaaaatctgatgcacaaatgggtattaaggcctccaaagagatctgcataaggaatgggaggaagagtggcttgaaacaaaaattcctgattcattaattacttgttgagcatcacaatatcatggatgtaatccaacggttctggaatatgcttagaagacaacagaataagaagattttggagtagctgaaatctttaactctcttgctttgaaaatcttctgtcacaagtcagaaggataatgtctcttttcacccaatgagaaagctgttctcacacgagcataattaatcttctgacacgacgacaaagaaattccttaaaaggatttctctgatttcctctcaagacagaagactgtctttatccatcatctgttcttcctgatcccttctttttgaatatccccatcagcagaattgtccatcagaaaggacagcaggagggaagtctctgcatgatggatagggctcaatgctccgcaggcctatttaagtgtgagcatctattgttgcaaacttactttacagcagttaaacaaatataatagtcaccaattcaaccattgtgcagcttagacttgactaaaactagtaagtgaagttggctaatgacaaggcactgagtttgaagccagataaaattttgcagttagcctaatgtctactcagaaaaaaagaaaattctccaagttatgcaattaattacatgcatagattagaaagtgttatacactattctgtatgtagatggccattcccatcaaaaactaagaaaactcagggacttccctggtgggtccagtggctgagactctgctcccaatgcagggggcacaggttcgatccctggtcaaggaactagatcccacatgccacagctaagatctggcacagccaaataaattaattaatttttaaaatacatataaaaaacccaagaaaactctgatacttgttgtcctaacagtcactcggtacttcttaacctgcatcatggttatctggaaagaactccccccaaactacctgtgctgttacccaaaaactcaggtgtggcaaaggaaaaagggctacaaacatgcctctaagaatttctcttcagactcatcctaggaaagttgtttgaagaagagatgcaggtgtgtctgtgtgttcttactcccatctgtgaaagaaaaccaaaaccttttgaggccccttgtgagcaccccttgtgagcacttccttggcagaacgaacgaaccattgttgtggggagtgccacgggtcagttccaaggagaggagcgaagcattctgggcaaaggagaccccaccaaggacaatgcaggcctggccccacttagaaagcaacctgaacaaaatggaaacacgtctagaaatctcactaagctgtaagaggacactcgatatcaacagcagaggttacagcatgctctgtgttctttatcgatgctgccaagaaaggccacttaagcccagacaccaggacacactgacaccatatgtctgtttgcaccacgatgaccttgactactcagttctgagtgcaccctatgaaaatatttgtttatccttccaattcccaaacactgaggccagtccataggccggggcctggctcactggtggtctcctggcactgttagaaggacactgtccaatccactgtggggcttcttctccagctgagctgcctcctccagtgaaggagagcaactgacagctgattcaaagccaggacccacatgttctgcaaagagtggcttgatttcagtttttcttaaattttaggttacattcaggaccagttatcctttggaagatctaagaaaaatatcttctatccaaggacaaagactgaggaaaaaccttacagataaagacgctaagaaatctgaatagagaatatggcccagagtctgaatgtagagaagctggaagccaacagaggtagagaaagtcaccccgagagagggacagatggggaaggcaggcaaacagcccagagggactctaaatgtcccctcaccagccgag

SEQ ID NO: 48649 - DNA, 876 bp, Bovine  19866880690095
  misc_feature (1)..(1): n is a, c, g, or t
naatcgtctggagatagctgctatttaacattttggcagtttttccttttagttgttttcccatatacagtagtttggattctgttttgaattttatctcttcctgcagtagattatcaaggcatatctagtcattacagaaaatgtgaaaagtatagaaaaatgagaatagggataaagtcatcattagtcagtatacctaaaggcaatcacagtaccatgttggcacaattctttttgtaggtatcatttctacgtagtctttagaattactttttaaacaaacaaatttttaaataaccttatgtcctagaattggtatgtttacatttgtctgcgttttatatagcaaggtagatgggcatttgaacattttaactgtaggcatcaaatggccacagttgggtattataagggagaaagaatcagttggatttcaggattctagtcacagactgaaccattcaattcagaaatagtaagtacaggtcatgtaaggaaccagatcacaggagaagacatctaacaccactattcgcagtgcaagtccagtcatgctctgggatggtgggctggtagcatcatgccctctgtaaagaatggcttatggatactgtgggatacaacaaagccagatggtgactcaagatctctcatgatggctcatgtgcttgttcggatggcagatacgatggggacaaaacatcagctgctagaatgctggacgcaattgttggtaaaggaaatgtatcttcaagggttcatggaaaggacaagattaggagatacctctgctaatttaaggaaacttaaaacccatcttctgttgaaatcttacctgttcttgaaagagggcgaactgtaggaataggaaca

SEQ ID NO: 48650 - DNA, 729 bp, Bovine  19866880713227
  misc_feature (1)..(1): n is a, c, g, or t
ntggtgtggccaaaaaaaaagattcaagtttaagtggaccctggcagtgcaaatctatgatgttcaagggtcaactgtacagaaggttgaaggtaaataacttacttttcatctttccactattcactgggttacacttccatttatctatactctgtcacaaatgatgactatttcataaaataattaaacacactaggtaaacttattacataaaggaataaggttaatacatgtgtaaactggaaaaataatttttaatatgatgtcctcctgccctgagacacaataaatttcatcttaaaaagagttaaagtatctttaagaacacaacaatactttgttataaaacacacatggatacttccttaaaaagactaatgcttaaagctccaaaatattacaagttagaaaaatacaatttccggtttcctaagtgcacctgttccttgtagattcgagtcacacaccttgtgttacaagcaaacagtacagcgtgctaggagaaggtgtgtctgtgaaagtcccagcaaagtaagaaacccactcacagatatcgtccgtggcgtcctctgcacttttccctccacagcacatgatgaagggcactcttcgctcaactactgcccgacattgcacacacttcttcatcaggctggcacagtctgcaaagagcaacacaacgcatctcacagaaagaaaacgtcaacaggggtgcctccctccact

SEQ ID NO: 48651 - DNA, 1600 bp, Bovine  19866880720706
  misc_feature (1)..(1): n is a, c, g, or t
ntatttgtgtgctttagcaaatactttgctaaaatgtgtgctacatttctggctaagaaatgctgattacaggcagtcattgattacagattaagaaggcaatctcctacagagggtaaatctctatcagctaaggagatgctgcatatgcttaatgtttgaaatgataatataggctggtataaaattcttacagtctattactttcaaaatacatggaaaaaaataattgttgaagactccataaatattatttgtcaagaagaaagttttagacacaaagttttactcttaaaggcaccatcttctattaaattctctggattgcacctaaaattaatagctaatttcatggtcaaattactattctcccctcaacaagggatacacaagaatattgacatagcacttggtcacttgtgttcactgtaagtcagttgtgacaactgaaggagcctttgctaaataaagcctgaatcttgaattcctctatttggaacaattttcattttcaaaatatatttctgcataattaaaatgttaattatcatttcactatttattattaacatttcagtatcttttcattattttcaggtatgactagttatttatatatattcacctctcccttatgaaaggtaacatgttttattgcttttatcccttatttgagtgatttttaaatcactggagccaacaatcaagtactggaaccctgacttatagcatctgacaagggtctgggaataaaaacacacggtaagtttctgttggaatgaagtaagtattcactactaatgctgtagttttaaaattgcatttcattagacccaagttctaatggcagaaaatatactgcagaatcaaattattaaaattgtaggaggagacatcattgtaacgaaagctagtatttcagcgccaagagccaaatgccaacttttttcttacttgaatacctagtgacatgatgttctctcatttattctaaatgagaatttagaatattctcttctctctcaaatgacaggctttatataaatctcttggacagtttaaaggctagacttaaaatccaggatgaaatggtttttgctgagtccagacacatagccagaaatgtccccaaataaagtcaacttcattatcactgcagttgttactaatatagtctaataatcacttccatcttgaaaataagtggaaaccatttaccagctcatcaaaattccatatacatttggaagagaaatgtcaagtagtgcgatgaagaaagacagtcttttttccaatttgttgtggttgagtgaactctggcagaacacatatgctatgaggtttgtgggtaaaataatactttccaagatacaagtgaactgaaaaaaaaattcactcatacttttgaaatacttttcttcttgcctaagatacaacctaggctggttctgaaaatttttctcaaacactatctgcagggatctcttcagtcacagccctcagcccttcggccacctagacacattaagtcctgctggagtattatcctgaccagagtgcaggcctcctcactagaggaattctcagaagttttagacta

SEQ ID NO: 48652 - DNA, 1672 bp, Bovine  19866880723215
  misc_feature (1)..(1): n is a, c, g, or t
nagcagccttgctcatctagcattctctgtttacacggaaaactacttcttaaggaaattattttaggaaatgcaaagcacatgatagagactttattcaaaatctcccaacactcatttaaacatctaacagctgagaaactctcaaggcttagtctattttcccttttaatcactgtgtacaagaagcacagtgatagagcttttacatttaaaacaaaatatccagagaaaaacatctttcgtccttgattcagctatctttcacagtattttggtcaggcacaccatgtttctaaactaaagatcttgttggtatatatgcagacacactttcacaaattgttgaatcattcctcctaatgctgaaggtgttatatgctactaatacatgatataaaatacaccacaaaacaatcattagtattttgatcatgtattcccaggtgacgcagtggtaaagaattcacctgccaaagcaggagacgcaggttccatccctgggttggaaaggtcccctggagaaggaactggcaacccactccagtattcttgcctggaaaattccatggccagaggagcctggagggctacagtccatgagatcataaacagtcagtcagacataactaagcacacacacactctctctcacacacacacacacacacacttattatcaaaaaaggccaggctacaaaatgttaaatgaccttccactattaactatttatgtatccatttaaaaaaaagtttacctcctctccatcccccagagcatcctctcaccccactttttgcaggaaaagaacgaacataatcacaaagattaatggagcatcaataaagtattttaggtacaaatgacccacttttatgtactgccagaaaaactcagcaagagtttaagaagaagaaaacctgaagttcttttccactgaattcatgtagctggtggtgatgaattgattgttctcttttaatggcagggtcagaaagacagagaggaaacatagctggctatattttttattaattagtaaactgttttttttcttcaaatattctatgtcattgagatgaattatctccagtccctctcaaagggtaactcatctttctagaagagagggcaagaggggcataacagaatgatttttctttcaggaagacaaaacataaaacgttctctctttataaaggaaagaggaaaggtattatatctacgcccctccccgagatttttattccttggaattgtttcttaaacatatgtgctaaagaaaatcatcactttaccttcaaaactcaaactgaaaatagactggtaactaatcaaatattagatcctgcctgaaagtcgagaatctcaaattgtgaacttatacctatttatctaagtatcactatcaagtgtaaattaaagtcacttactcagtcttggctacgaattctcacaaagatctgaatctggtcctgttataatacaattactagttacttccctggtgactcagtggtaaagaatctgcctgccaatgcaggaggctcagggttcgatccctgggtagggaagatcctctggagaaggaaatggcaacccactccagtattcttgcccaggaaattggacagaggagcctggcgggctacagtccctgggggttgcaaa

SEQ ID NO: 48653 - DNA, 1285 bp, Bovine  19866880802278
  misc_feature (1)..(1): n is a, c, g, or t
ncgctgccaggcaggctctttaccactgagccactgagggctgacccctttaaaggcagagaaggaaatcccgggcccattttcaaggagagtaatgaacagggagttaccaaagcgaggcagccagaggttagaagcacacagggtactcttcccggtcttggtaattatggtatgataaaggaatatttctcaatgtccctggcttcaaatccaccagggaaatgagggcataggatcacatgtctgagctggaagggccttgagaccatgtggcacagtgtttcactggggctgtgaacatctggggctcatttactgcataggatgtctccaggtttagcatttcatggtcctcatagatcccctcaccactgcgccaggaggagaaccatgcattttggcccagccataattttataggggatggaattgagacagagatggaataactttcccttttcatccagacaggaagcagagctggggctaaaaaccattccgattcagaagccagtggtctttctacataaaccacagtgtttttcaacagacttagagcagaccaaagctgcgataacacaaacagtccagaaatttaatggcataccaagtgtctagattaaaaaatccctaagtcaccacagaacatgctggtgagagtaagtggtcttggatggtggctctgctctgggaagctgtgcccttgtttactgtactgtgccatgatggccgaggagaggacctgcttggtggcacatgtcacattcctagaactgcacagaaccgcccctacctggtctgctcctgaacactgtgaatgttccacaggacacatgagtcatccatcacgacaatgaaaggccagacacactggcgtttaactcccagctcttccaggcggtttctctccagctccaggttgtggtaagacaactccttaatgaggaacctggcagcacctggaaggcaacacaaagacggcttggacgttcccctcttgggcttggtggaggccccacagacgcatcccattctctccgtatgcgtgcgtgtttgcctggtgactgtgcacatgggggttgaccagacatccagggctgcgattcccacacatcagtgcaggcaagaatcatccaggaagttgtttaaaatgcagattcctggagcccaccaccagaggctcacactagtggtgtctgatgaggggccagagaccttttcacaggtgattggtgagctgcactttgaggagtgctgctaggattcctgtgcttaggcttcc

SEQ ID NO: 48654 - DNA, 1384 bp, Bovine  19866880803868
  misc_feature (1)..(1): n is a, c, g, or t
ntttaaataattcttagtccaaaagggtccaaaattcacaataaacaaaaaacagcattgggcaacacattacactacaatacaagaccagctatttctgccacgtaaaaatgacctagcaagctttgaaatttgaattggacacatcttaagcagcatgcattgcaatttgctaaatgctcttacaggctaaagccatcaaagacataaatttaagaaagttattttcaacattatcaattaatttcgtgcctcagtagccagatagtcaatctgcaatgtttaaatttacaatcaagcataatttggccagctaaactaaaacacttatgtaatataatattccaatactaatacaaaatgaccttctcttgaaaaacttccttgctcccaacaaaatgaaatatgtttatagtttaaacagcaatgttaaattatgggaagaaaaactattagaatagcaccatctggttaagttgtgtgtatgttttgggtcacaaagctgacaatattagaataaaagaaaaaatatggtagaggtgagagggtacagagagggaaccctaatgacagctcttccaaaacattaggaagaaatgctatcagtatcttttagatcccttctttttgaaaagaatacttcaaatacgcaatggctgcatgataaattctgtatgtgcttagaagatgacaattttttcaccgtgtgtatcttgctcctgaagcccagtaaatacgtttttgagtgaatgcatgacagttttggtgggtggtgtttttttttctttcctaacgattctaggaaaagcaaaagctccttcgaggcacaagataaaaagatgatcatgacaagggcacgtcctaactgggagtactgctgagacatatgataagaggtagccatttcatagaattagaggaaagtcacttaaaaaatgatgctcttaaacttattctctctcacaaaccaaaaataaatttaaaattatttttcaggtgcttaaaaacacgaatgaaaaaacattttcttttcactagacaaatttcaaagtggtacaaatggagaaaatccacaagtgtacaccactacagttacagtgactttgtgccttttataatagtttacagggtattatatttttaatatggacgaaataagctagtctggaagatgaaactgccttttagggatgtaagcttaagcactgtagctcagaagacctataacaataagtgaagtaaagctccagactatacaattctctggttggtcacgctaagcacgagtcagccagtgctccctccttacagtcggccttgtggaaaagagatgggcagcacacggaggaaaaccctgactgacactgtttacagatctgaagaa

SEQ ID NO: 48655 - DNA, 1382 bp, Bovine  19866880805915
  misc_feature (1)..(1): n is a, c, g, or t
ncgtcatgtgggatcttagttccctgactagggatcagacctgtgaccctagtaggtggaggtgtggagtcttaaccagtggaccaccagggaagtccctagagtttcagttttgcaaaataaaagtaattgtgtggattggttgcacaacagtgtgagtgtacttaatactactgaaatgtacacttaaaaatggttaacatggtaaatacaatgttttgtatcttaaccataattcaagcaattttttttaactccctgaattttcaggtagtattttgtcaatagtttcagtctttagaatgagcttccctttagttttataggcaatctttcatttaccatttggtttctttttgctctgtggccctagctgtaaggcactaggatatagttgtcttagattctgtttgtttttttcagtaattagttgaaatttcccaatttcagagcagcaagaaaagaggaattgtgcttttaaaattaatattaaagttaggtcatattgctgttatttgtctttttaaatgaggataagtatagaaaaccttttgtaaccagttactgtgctacagcacaagtatgaattactggagtacaggtgattatagtcagtctttcatacttatttgatataaagaaaatagagaatgtttaattttacctttgctcaagagtttctggtgacatcaaaatactcttttttttttttttttaatataactagaacaaaactattaaagagaaaagacttaagacattataaaaaaaagtctgaagtatttcttctaaacttcaatggtagaattatcacaggtacaaaatacatactagttctcatttataagtatttgccatttgaggctttagaactgagtgtagtgttaaagatactttctcagttcttttcagttgttattaaatgctgtggagtgaatgattactaaaatggaaagcaattcttaataaaattacatacagatttcgaaagttagcatcttcatttttgtcatcaacatggaatgttgttttaaacacttctcactctatgttcacattataactttagagactgatattctcaaattattctttcgtgggggaaaaaaaaacccttctgtttgttttttataaataggatgcaggacaaaaaagatttggagcagtttcctgtaatgtttgtggcatgctttacactgcttcaaatccagaggatgaaacacagcatctgctcttccacaatcagtttataagtgctgtaaaatacgtggtaagtggaattcatgacttctaaaatgcagaatcagatcattagagatgaattgtcagattcaagtcatgaaaaaattttgtctttagaaaatagcaccatatacaaagcc

SEQ ID NO: 48656 - DNA, 824 bp, Bovine  19866880902127
  misc_feature (1)..(1): n is a, c, g, or t
nttaaacagatcatttcaagtatttgatctggaatcaccagattagtaatataaaattacatatgccagcttctttgaaatgtttggcaaatgtctagccaaaggctttaattacagttcactctcaattataaaaattaaaaggaagtatacttttaaaaaaatgtatatgttactttgaaattctctgatttaatattccaggaatttacaaatcctgacaacaaaaattataaaaactttgaatataagagttaagatttttcctattagaaattaaaactctttatcaaactgattaaaataccagcctaaaatcataattttacctctaactacgccttcggagaagcctaacaacatataatttaaaggggtaagattcactttagtagacacgttaccctcacaatctgggtgtgctgccgctccacggcaaggtggagggccgtctgctggttcacgttctggatgtccaggtttgcgtttccctgaaagaagaacaaggcttacagttaaatgtgacaagagggaagcacataatctagctctctatgaggaagccataacactggatgctgctgagcacgccccctccaagggctagaccttgtaatatatggtaacagatgtgaatagcaggaagaagtggtgggacagccaactttctgaaatagaacggcaaatttaaaactatttttactgtggtgattccacctaaggacagttacaggacaaaggacaatacagagtcaaacacggctcccttttaatctccattacagagccacagacataatcagctcattttaagtaagtacttc

SEQ ID NO: 48657 - DNA, 1102 bp, Bovine  19866881016481
  misc_feature (1)..(1): n is a, c, g, or t
ncacagaaacgccaaacttccggcgacgacggcgacgcctagcccgtcagatgggagttacctgggaccgtcttgggcgcgcttgcgcaacgctcttcttctgcccgaacccgctccgttgacgtgcccagagcctgaagatggccgccacgctggctgcgtgtcacgccgtttttcaccccggccgggacggcggggcttcggggagaggcgagcccgcgtccggccgcagcgcaggcgcggttggaggcctcgcgtgcgcgcctccacgggtgggcgccttgtaccctaccggcggccgcttcccttgtttcccccctgtcgtctcggaataaagccacccacgcgcccagcggtggaggtttgtcttgaagatccgtcgccaacggttcttctgttggttgcaggtactgctctctgcgacttccagttcagatacctctcatcttccacacgagccagtgtacaaaaaaggggaggcgattgatccgttctccctccttcccggcattgcactccagcgtctccccaaaatccagggcttccccgtctccttgcacactttgctccttgggcatcagagcacaagagtcgacaagaaattgtaggaagttccaccaagtttagtaacggcgtgtgttaagacaaacctttggctcttagaagcctccaaagattgaacctaggatcctaggattcttgattctacactgcttttgaacacgccctctgtgcttctctttgcttatttgtaggactgtgaggatgggtaaatgagtcctcttgcctttgagaatctgaagaggtgatcataagtggattctcccccatggttcttactgccctccttttttgaagccaagtccaccccaatataccctcttaagttgctgaagcctgatgtttttttttgcatcatcttccataaaactttatagagctgcctgtcagtttagtctggagaggtgctatggtttaaaaaccaaaatgagaggccttggtgggtgaagccattggccacgacaccatatcttgtgataattggcaaaaacctgtctgccgcccctcacccccacatcccaaaaccttgacacgttcattt

SEQ ID NO: 48658 - DNA, 1423 bp, Bovine  19866881031740
  misc_feature (1)..(1): n is a, c, g, or t
ncatgtctccaagtgttttgaatgcaataagttcttaaaggctaggtctttgcacgggcacttttaagataaaactcaaagtgtatatacaccacattcttacccccgtgtgcagttactgttgtttactagacttgcatagaaactgccagataatctcagatttacattaaaaatagaaaaagaagttcccaaatggaaagttactggtagatttgttttttttttttaattctgaaatgtatctggggaaaaaaattcttagaagggctaaactcctaaccataaatataatatttttcagagattttctaattggttttgaaagtatccctaaaggataggttagctgttaatgatgagctttcttcacttactgattcaaaggtgtgatgttagttttcccctgtaggctgttactctgcttctttgcacttcaaacagatctaaggtcactgatgatgactttgccacttcctgccctattgatcttacaaaggggttttgtggggttagaccttactgtaaagaaatcagcccaagtaaaaattcttgatatttgcatgtctattaaattcaacatgttggctttttatatgagcctgttttattttataatttataatgtgatacttactgggtcacaaagagttggacgacagagcgcacgcgcgcgcgcgcgcgcgcgcacacacacacacacacacacacacacacacacactgccccagccctggctgtctgcaaggagaggaccccgaggacttaggagggaaatgagacagtccctccagggggcttgacactgcagagtcttgagagggaaaggagggtaccctaagggtccgggaaaaaaccgaggttctccccgagttacgaaagaaaaggggaaccccacgacgattgcagtgtccctcggggtgcgcgttggtgaaacggtccccatctgaagcccggggtgcagatggggtctcacggggggttaggattagaatggcgcccccttggagacctggataaagaattggtgccctcagaaatccaagaaggacggggggtgggtctctccaccctcgggctgggacgcagaaaagaccttgcgggaggcggggacgcggatggagaaggggtcccggggctgggtacgggtctctctcggagtccagatcgggcagtatctcacctgcggagagttggggaggcgggcgtgggggtcggaagtctgctccaggcccacggggagaatcgagctgggcgctggactggaaaccggcgaggcaggggtcccggggacgccccagacccgcaccacgcaggtggcgcaggcagcggcaagcagcagcagcgcggcgctcagagcccagggcagcgggttgcagacgcgacccgggggcgcgggcgaccgctgggcctcggggtccgg

SEQ ID NO: 48659 - DNA, 2693 bp, Bovine  19866881079319
  misc_feature (1)..(1): n is a, c, g, or t
ntataaggttttgatacatagtgatcgtatctaaggaagcataattttgctgttaaaattctgtgattttaaacaatgatttagtctgctctagccactccagtgtttttgcctggagaatcccagggacgggggagtttggtgggctgccgcctatggggttgcacagagtcagacacgactgaagcaacttagcagcagcagcagcagctcagttaataaaaaatccgcctgcaatgcgggagaccctggttcgattcctgggttgggaagatcccccggagaagggaaaggctacctactccagtattctggcctggagaattccatgaactggatagtctatgggggtttcagagtcagacaggactgagcgactttcactttcacttctgagctttgtgttacatgtggtagagggggctgagtgttcttcctgctttttacgaattcaaaatacaatgatggaagacaaaagtagtacagtgcaagatttgcctcacagatagtaggcacttaataaaaatttagtaaattgggggagcaaaatctagtaaaaatccaattctctcccctcacggacaaccagtgttacatttcttatatcctggctatatattttagtcctaacagtagggatgatcataccatctaccatagggacattgaggattaaactaaaatgccttagcgtaccatttctggaacatagagctcgtaaatctaatatagtaccaactgtggcctgatagataaattggttgccttcctttttatgctaataattgccctcttttttccctccaggtgtagatgtcagtatgaacacacatcttaaagcagtgaaaatgaccctgaagaacagagaacctgtacagctggaaacactgagtattcgaggaaataacattcggtattttattctgccagacagcttacctctggatacgctactcgtggatgtggaaccaaaggtgaagtctaagaaaagggaagctggtaagtttgaaggattataaacatttttgtgtatggtatatttataccctaatccactattcaaaatatgtttatatctgcagacaacacagattggttggttgcttttaattgcctatgctcgccatgagtacacctggagtttcttacggttcctggtattgctgttcaaaagaccagtgttgtttggtcttacctgctgggcctttttgcacggcctggtcccgcattccctgcacactttggaacatctggggatgaaccctttattcctgctattctgaaatttcttaatgacttagctttttgtccatttcattgttttgggtacttggcggaccctttccgtatggatattcttgtattttagagctaagaaatttacttgtgtacctttataaatttcttctgttttgcttattctgttctttcttcctggaattcttaataattgagttttctgactgagtcttttctcttatttttctctctgtcttttattctgaacttggtggttgttttctctggtttctctttttatttaacctcttaatatgctctttatgttgaaggctttactgtagtatcttgcactttggccatccattgtttaagaaggaacctgaaaagagaacttctggaaagggaggctggactgcttcgctggtggattcaaagtaaatttgcttctcccccaaggcaaccccacattttaggatgtggaaatcttttctggaactggttttctcagaaaaagattctagtcacatgggagacgtgtctggcaaccagcatcataggagcaggacaggagaaagggactgatactaaacttaccacaatgatttttagacttttcctctcacccacactaagaaatatacttttttgcattatgacctattcattcaaaatttcacaaagaactgtttagtcttaatacatgcagatgcccttaagtttcctgtcctattctctttcagttaaaaaaaaatgttcaggctataccacatagctggaaaaacactgacttgatccctctcttcgtccctctggctctgtgacttttgctgccatccactttgcaactgtgttcaaatccaaaccctttctgcttcaaggtcttaaggttaattttctctttcctttcctgcctacctgtcagggaaataggcttcagcgttgcaggatggggaagagggctagccagtctgctgccccacatgagggctggcagcctctttcccccctgttttcagcctcctgcctcaccttacccctggcttccaaggtcctaggtctttttgaggctactcttcctttactaaacatttgttgttctcagtttgttttctgacttagaaatttgttgagatgtttaaactactgcgttttttctgtgccctcgctccatggatatttgctatttttctttcttttctatcgtgaatagtacctcagagcgaattgaagataagtgtggttaatctgccttgtttcaagagaagtgctagatttactctattgctttgaatgataagactccgaacgatgagtagaaatgtcagggttttaaaaacattcatagatacctgaaaataggaagctcagagctaggatgaccaggtaacagggatattgttacggattaaagtaacaatagattgggtcaaagacttaagattcggaagaat

SEQ ID NO: 48660 - DNA, 1281 bp, Bovine  19866881169863
  misc_feature (1)..(1): n is a, c, g, or t
ngagaaggaagaagtggataaaggtgagaaagtgggtaagaaaggaaaaaagtatgttacaaaacagaataaaaatcgtcaccatcaaatgattattgaaaatagcttacccagccgtacgagatactgtattgtcagaagaatcatgttttccacgctcaggagttggctgccagtcaaccctaattgttccaaatccttgttttccaactgtggaatcttgtagcagttcaccagcagaggactgacaacaatgtcaccaacatttccatagaaatagggtaaagtgccatagcctgccccaacagaagcaggtcaatacagttcaacatttcctcctgaggtccaaccaggtatatttgctcaactaggatccacgatgcctaccaaagttccctgacctctgaatggctaccaaacaaatgactcaaatgtatcaatcctagagaattcactccaacgctctaaacgctacccttttattaaattagatgaacaggaaacaaaatactcaaattatattatatagggacatgctaattaatatctctgccagagaggattgatgaaagtttgcaaaaacatctctgtatcctttgtaaacctgcaggaataaaatattttcagataaaattcctgatcagataagaagtcagagaatagacagactactataacatgcttacttcacttcttcaggttttcttttaaaaagtttaagctaaactcatagatcaacagcaatattctgccagtcacaagtattaatacttggagggtcttactctttttgctatcttagctattgttgttatgttctcttcctgaatgtcaataaaagtctcaaatcatcttaggagtagatagtacaaaatgtgttgaaaatacacactgtgttgatggtctggtggagagaacagtccctccatgagtctttctaaaaggcagacaccaaaggataagttttacttatccttccaaggcttagctgcaccatgcatgtaactcgaatgctcagtaagcacttcctgactatatggaatttaaacaactggatttcccccagtgcctgtaggttcagggagcagcctgataaagaatagggctcaaagcaaaactatccatgtcagtaggctcaagccaactgcaagaaacagataacacctcacatagacataccattaaagatccactgggcttaaacaccctatctgtttagtacccgggggtaaagtcagcagtcttctgctggcctcggctagccactggacctcccccgcc

SEQ ID NO: 48661 - DNA, 1032 bp, Bovine  19866881202700
  misc_feature (1)..(1): n is a, c, g, or t
ncctttttggggatcttattcatttcactgtaatatcattaggtgtaacatcttcagaattaacttctttcatttcttcctgctggcaagctttatttttatcaccatatggttttgaccctaaaaatgtactttgcgtcacttgctgatgcgtttctaacgcaggtagtgaaaaactggttcgtaataagcccgatttaggggaaaattgagagtctaatttattttgctgcacagagttaaattttgagagtttaattttagtccagttggagttctttttagttgagttgtttattccatttagtatacatttcacaggctttgtttttctactggggaagaaacgattacactgaacgtcctgattcgcttccttctgatgaagtatttgtctttcagtctctgtctcttccaattttatttctgtaggcttctcctcctttacactttccatttgtgaagattccttttttacctctacagtatctgactcaatttcaccagcaatttcttcacagagctggagaatgctcccgcgtttgcttgttcctgcttgctccagcccattgtctccagtttgttcaggcactgatggctgtggacttttttgggattttgcactattattcacttgtgtgtgaactgacttcttcatctcgttctttttagagaccactgaagtagccactttggatctttttatctcagaagaagattttgtttcttcttttctagtattctccagacacttttcagatccttttatgcactgagaaccagaagtataagccgtctgatgctccactttgcgcttttttcctttgggggaattgatcgcttcattagtgacagaattttcttcctctttagaatcagactttatttccaatacttttcttttcacatgtttctgatttgttttagctttattagatttactctgagtattgttacagtgctctttttttgttggcggcaaactctgtttaactgcttgagcctgacccgaatttctctactacgcagaga

SEQ ID NO: 48662 - DNA, 1281 bp, Bovine  19866881270991
  misc_feature (1)..(1): n is a, c, g, or t
ncagttttataagcgtctagtatctaagggttctaatttctctttttggcttctggtctttttctttcagcagaatttgaacgtggtcaagagccctattttcaccccctccaccggtcgccacgagcacggactcctaaacctctttcacgccatggagggcatcagccacttgcacctgctggtggtcaaagagtatgagatgccgctgtaccgcaaatactggcccaaccacatcatgctggtgcttcctggcatgttcaacaacgcaggcgtgggtaagggggcgcgcgggatgccgggcaagggctgggaagagagataccaagccaagctccattcctcaggcttccagagggtcccatgaccctggaaagtgtcttgttctgtggaccaaacgacttttgactctttaaaaaaaaattatttttggctgggcttgctcttcattgctgcagacttttctctagttgtggtgagccgtggctactctctcgttgcggcatgtagacttgagtggttgcggcacgtgggctcagtagttgagtcccagcctctagagcacaggctcagttgttgcggcacacaggcttagttgctcctcagcatgtgggatcttcccccgtcaggaatcaaacccgtgtctcttgtgtcggcaggtagactcttcaccactgagccactaaggaagcccttgactcctctttaaatgagttttcatttctctttatcttcagtcttgcagaattttttaacttctgaggactagcatccaaagaagtcactgatacactgagcaccctgggagggcttgggactccggccagcacaggctgcaggtgttgctcgctaccagctggcagcagggacctcacagagaggacagtcagaggaggaggggggttagcagttcggacccaggtctggtgggatcgttgggggtcatcgctgatcttaaaggcacacagcaagttctcgggggttctgtacagctggggactgaagcaccatcactgccgatggcagtcatcttaaaagtgcctggaagtccttcctgcttttcccctcgggatttaaggtcagtgggctgattttcaaggggacacctggctgttgagtgtactgacagagcgggaggaggaactagagacagaggtccagagctgcttcgtttacccctgaaggcaggagacctccaaccggatccagcgtcctagagctctgctctctgcccactccctgcatttcactcactccccatcggacttcaggggaatttcg

SEQ ID NO: 48663 - DNA, 1117 bp, Bovine  19866881277978
  misc_feature (1)..(1): n is a, c, g, or t
ngggtcgcaaagagtcggacacgactgagcaactgaactgaactgaactgaactgaaaaggtagttaatatacaagtgaggtaatgtgatctgagagaaaattaagattacataaaacattatctgtgtaccagaactggggaatgaggaaaggctctaacgtaaaccacattgcttttaaagaaacacaaaacagaacataccaccagacgcgttgctgatggctgatcccgcggacgccaccttggacaccgccgctggattatacgtccaagatgttccacatacttccacctttaaatcactgtctgaataaatctgctgtactcggccaactttacctaaagtcttaacaacaagattagatttatgtttccaagtttacattatagaaatcaatcatcagtttttacatgtttgaagtattcgttttacttgattcctaattttaaaaacttttaaagaacaatcgtattcaaatgggttatttactagccacaaactttatagagtatctttaaaaaatattttaataaaactattacctttccacaagattataaaaataatcatgacaatcttattcaaaaaagtaaccttttaagatacctctagaaaacttgtaactaaagaaaatctgatttctaaaaaaaaaaaaaaacttaaaccaaaaagggctcaaagcttacatctatgtttaaatcctttttggaatcaagcctaatttcaagacagaagtatgaaagtcactgtcattctggggtgaaggatcaggaagcctctttgtctcaccttaacattacattctccactaaaggctctatcaaattagatttatctatcatgtattaactatagccctttaaggatcttcccaggctaatctaagggcttccctggtggcttagcagcaacaactacacctgccaatgcaggagacccgaattcaacccctgggtcagggaagatcccctggagaagggaaaggctacccatatttttccctggagaatcccacggacagagaagcctggtgggctacagtccatggggtcacaaagagttggatacaacctaccaactaaacagacatagagaatggacttatggacgtggg

SEQ ID NO: 48664 - DNA, 1021 bp, Bovine  19866881295537
  misc_feature (1)..(1): n is a, c, g, or t
nctgagggatggctggatgaataattaggtttaaagagtcatgggcagagtaggcctgcctgaggtagtggtctttcccagaggtgtagctccccacagcttctgcttatatacccagatttgggctcccatccatcctatttcaagaagtggaccaagtaagggttggaagtgggtcttgagcacaaaattcttatacataatgcttttctgtgttttgggcatcctagcggacagtactcaggaggctagagatcccagggccctttaccatcttgcctttgtcccctaaaatcccccaggtctaggtgatcaagcttctgacaggtgtcgcctgccaacagagcacttgcctgcactgctggaaggctgagggcgggcttcctggtgtgtcagctgcccccagcgcttcctggaaggcagtgggtgagcatcagtgcacttgaccaagaacaagtccctgtctgctctcagccgtagccagtggggccggccaaccggaggcttccttgaaggtgaggaggaaagaaaacagtggccccattgaggacctaccaagccagctcccgctttggcacctaaaatggtcagttttacctgatcagcttcatttcgcaactcggttatgtgattcccaagcactgcctcttatctctagagagaggtgtgaaaacagagcctgcttggcacagactggctgcctacaggaggggctttgtgttaggcccaaggctggtggggtggaaggggacacgggaggccacccccctaggcttcctgcttgcactctaacatttttgcttcctttcattcacatcagatcagacacaagttcacttgcattaaagagtagacccttggaggagaagatggcaacccactccagtattcttgcctgggaaatcccatggactgaggagcctggtgggatacagtcggaccaggcaaagagtcggacacgattgagcacgcacgcactcaagagacacaatattactaaaggacagtgtacaaaaacaga

SEQ ID NO: 48665 - DNA, 1503 bp, Bovine  19866881311291
  misc_feature (1)..(1): n is a, c, g, or t
ncattgcctgcatatccatccaagcggtttgcataattacactacctaccatcacaatgaccctgtcatttagatatttttaatccccatttttacaaatgatgacattagggctcagggaatttgtttcaaattccaggattcttccccgatctctccgtagcccagcccaccatttttttccccaagacaccacagtcaaagctttcttccttcccatttttttcattgccacaggcaacgtttgggaactggcactgtgttttctcctgccgggtttacccgtcagaacacacagaacctctttagactgtcccctgagttattcccaaggagaactattactacttttaccgcaactactactaaacatggcttttattcactgagcatctactatgagttcagcacatgagtttatatatatataatcttatttatttctacattgttgttgtttcgttatttcagctaagtcagtccaaccccgttgtgacctcacagactgtagcccactgggcttctctgtccatgggattcccaggcaagaataatggagtgggctgccatttctttctccaggggatcttcccaacctaagaattgaaccgacatctcctgcttggcaggcagattctttaccactgagccacctgggaagccccatttatttctataattatacttgttttatatgttagaatactgaagcacagaaagataaatccatttgctcaacatcacaggggtagtaagtgttgaaagtgggctttgaactttgaatccagagtatgcaattttcagcactggacttgaaatacacaggtacacaccccaatctgttctccctatttccttaatcattttgcaaatactcactaataaaagaagcctgacattttggaagcaatcaaaacagggagaaacacatgacaaacttttcccaggacccttctgtgggaaatggtgtcaccatctacccagttgctccagccacatatccgagtcctccatattcagtgtattttcatatatccgtatatattctgatcatgaagaagcagggtcttatttaaactaattggcaattcttctgtgcaacagaatttgagtccattaaaatggtgattattcttcctgagctgtgaactatcgacgttagttgtattcagttttcagccatgaaactcattatatacatcacgagaaatcttaactatctgctgacaagggccatccctcctctgaacaagtgagctacccagcctaaaataaatagaaacttttatgactggccacattgttttcacttctaaacaaacctccaggaaagaacgcccattaccgacatgtttgtccattgtaaagggccatcattaaaaccaacaaagtttaaacctttccagtgtttggagttcagaatctggggagctgggctgggggttgaaggaggaggtggcatcttttaaaacagtaacttttaagtttaaaggcgaaacttcc

SEQ ID NO: 48666 - DNA, 1574 bp, Bovine  19866881677332
  misc_feature (1)..(1): n is a, c, g, or t
ncagaatctcatggacaatctcttctggaaacagaaagccacgatccagtactctcttctttaaatctgttctgctttggcttctatggcgccgacactcctgggtcttctctcacctccctggttactcctcagcctctctagtgctgttttccttctgttgtagcttaaaggctgattttctctggggtcccctgttcatcttcttattccccatgctcccttgaggtcattttattgacttgtggtttgaattatcacctgcagtccaaattgctttcccaaggctcagagcactgtggccactgcctctggaaagcctctacatatttggattttgctgccccaactctagcaacttgattcttttctgtgtttcacttttcagtgaatgtcagcacgatcttagttgtccaggacagtcatccttgactatccctattgttttatttcccatgtgaaattgatcactaaatcctaattctatatcccaaattgctttattttttttaaagtgtttaagttataatttactcaaatttatttaccttctgtctttgctgattcttctacctccctgtgttccccaaatagaagcagcctcagggactccatggctccctttttcctctcctttctactgtctatctgagtcactttcactttttcagcttttcttccttttccatcatggtttgttataggattttcaatatagttccttgtgctatgcagtaggatcttgttgtttatccattctttatataacagtttgcaagtgctaatcccagctccccagtccatccctcctcattcccttattttggcaaccacaagtctgttctctttatctctacttcataaataacttcatttgtgtcatactttagattccacatgtaagtagatatcacatatgctatgtttggtatttctctttctctttcttacttcacttagtgtgatattctctgggtccattcatgttgctaaaaaagataactttatttcattctttgttatgctgagtagtattccattatatatatgccacattttcttttattcatctgttgatggacatttagtttgcttctatgtctttgttattgtaaatagtctgctatgaacatcggggtgtatgttatctttttgaattatggttttgtctggatatatgaccagaagtgggattgctggatcatatagcaactccagttttagtttttttgagggaccttcatactgttttccatagaggctgcaccaacttacatcaccaccaacagtgtaggagggttcccttctacacactctcagcatttgttatttgtagcctttttaaaaaaatatttctgtcctttttatgtattaagtatgctaacgacatgcaaggccaccagtaactttgtgtttctttaattcgggttttcttgaaactgtatcatctgtggagaaagaggatttctatgtcacaaaattttccagccacttaaacttggagctcatcacccagccaaagaagtagaagcacttgtagtactacccagtcacaagctcccagggcgtactgt

SEQ ID NO: 48667 - DNA, 2047 bp, Bovine  19866880476253
  misc_feature (1)..(1): n is a, c, g, or t
ntgcacatgccgtggggcaactgtgcgccaggactactgagcccaacgtgccacaatggcctcagttcgccccaactagaagaaagccagtgtgcagcaacagagaccaagcacaaacaaaattaaatgaaaaagaaaatcattttttttaaaagctgaatataatatagaccttatgcttacagagcttacattctatgctaattttaaaacaaaagcttgtatatgtacctctaattttttctggtatttttcacattccaactgacactgtgtgagatttcttgcagtctcctcttgtagaagttgagcacgctcactttcaaaagattttattttactttgatggagatattctgttactttgctttctgcactaagttgtagttctctgtacctgaagaaagaaaacaattatgaaacaataaagaaatctcaatttatagaaacataagcagtacttctgcctgttcaatatccctatattattattcagttaataacttttatttattcagcaaagcttttgtaaataatttagatggtcgtgtgtatggaaatatgctaagtctggggaaacaaaacatgttgattaaacttcctctactgctccctttattttcattcttcccattccaaaatagttattacctattattattattttgcaagataagcatttaaaataaaaatggtaagaacaaggttcagttattacttaaaatgacttaatttccatatatttcataggctttcttaaatctatagcattgtttccaaccttgctatttcattctaagtctaaataatattaaatggagaagaatggcatgaaatatatgcattaacttgcaattcctgagacatatataaaataaattttaagctagtaaatatagatttgatttgtataagaaaacataatgtacaaattacaaaggtaaatatataacaataagcagtctattacaacacagataagaaacattctcttcattccataggtataactagtaataaaaacatttccatttaagatataaatcactgcatattatagatctgaaaatgcttcaagttgactatgttctaacagaaagcaaaacaaagacatagtatgctttttcagggagttattatgaacccggtataatgctagatgttcctaaaattcgattttttcaaatatttattgagctagtcaccatgccaggcaaatatgtatacagtggaagacaattttttttccccctttaaagaacttattttgggggagttccctcatggtctagtggttaggattcggcattttcattgccagggctggtcttcagtccctggtccaggaactgagaccctggctggggaactgagatcccacaagctgcatggtgtgccaaaaaaaaaaaaaaaaaagaacttagttttctggggaagagatgtaaaatatgaaaattcaatagaacaagataagtgcttcaataaggtaaaccctaggtttgatgtgtacatacaggaagaagaattaactcagtttgtgtagatgtgtgtttgagtacacagcaggaagaagtccaaggtggaagtgctctagaagtacaaacaagagtacacgcaggccagagaaacagagtatagtctgtttcatccatggcatctcatttaatcccacaactctattaggtattttgcagatgagaaaccagagattcagagattaattcatttcttcaagaggaagaacttcctggtagatttcagagggggtctcaagtccagctatgtttgacttcacagtaatgatctttccactgctacataagaaccttagctgatatttctgaagtcagttaaactttcaaacgtgttttaaaggaggtcgcttcacttcttgtgacaacaacatttaaaatataatgagagaagtaccttatcacatatatgaaaggtacttgtaaccagaatctctaaatcaaaatcaaaatcccagaaaatggggtttttgtagaaattgacaagctgattctaaataaacatcttctgaaaa

SEQ ID NO: 48668 - DNA, 873 bp, Bovine  19866880589541
  misc_feature (1)..(1): n is a, c, g, or t
ntcatttgttgacactttaaaaataaattgcactttctattaacaaaacaaattaaatgtatcatcttattcagtcctcacaaatccatgatttaggaataagatttctgttgtacacatgaggaaactaaagtttgtggaaaataaagtcacttgctcaaagtcatatcactaggaagtggactcagagatgttgaaactataagctcttttccttaatgccccatttaccaaaaaatgagttaaacacacacacatatatataacccaggaagaactaatgcttatttcacaaaggtctgttgcaagatggtggaaaataaaatatttaaagtttgtgtatcctactcaagtcaaaattttaaaaactgcttacctaagacgtttattttgacaccataaattacctttaatactacccttgccctgatatacttgacctctagtcatagaaaatgaaacgcagcttgtacagattgatttttagatctctttattcaaagtaaaggataagccagaatcaaattttggtatgtctaatatttatgcttgcaaagacagtctggcaagtgtcaacgttgggtgtaaattagcattatgggaagatcagcaggtattggtgaaaaagctatcatcaataagaaagttctgcatgcatgcttagtcgcttagtgtctgactctttgggatgccatggactgtagccagccaggctcctctgtccatggggattctccaggcaagaatactgcagtgggttgccatgcccccctccagaggatcttcctgacccagggatcaaacctgcatctcctgcattgtgggaggatcctttactgctgagccaccagggaagccctaagaaagtcctat

SEQ ID NO: 48669 - DNA, 1832 bp, Bovine  19866880608644
  misc_feature (1)..(1): n is a, c, g, or t
natttagtatatggcttccctggtgactcagaggggtaaagcatctgcctacaatgtgggaaacctgggttcaatccctgggtccggaagatcccctgagaaggaaatgccaacccattccagactcttgcctggaaaatcccatggactgagaaacctggtaggctacagtccatggggttgcaaagagttggacatgcctgagagacttcactttcactttctttcactttcaaattataaaatatactttcagttttaaggataaacgttataatttgactttcagtgtctcaaattttaatatggtgccatatgtactttctttttaccttttatataagtcccacttcatctttttacatttcaggagtaaccagtcatctttaaaaaaaacactaattgtatgcccccactaggaagaaaagtattctatgaaaatgtctcagtcacgttgtcagattgaaaaaatattcttataaaataggtaggccaatgattgaatcaaacattgaagtcactgatctgatatctttatgaagtataaatttaatttttctttaattcaaatcatcaaatgtgtctttaatcttctacaatttcttatttgttaaatttgcactagtatgacagttttttaaacttggtgtattttttccccctagcaatttaaataaagaaaagtcagctttgcagcaaatgaaggatcagatggcattagatttggaacaacttctaaatcatcgtgaggtacttttccattttgtcttgctttttaacactttaggctttttgagaatcaaattgggttgagattattggatcccagtctcccatattcattatgagttaattcttattcctggaattcctaattcttgatgctcccttactgccttattcatatctccatcattgaatttccatgttatttaataatcatgtgtgttacacctttctccctacagacagtaaatttctttagtgtacctcttgtcttgtttgtcattctgtagccggtgcctagtgtacaatatttgtgttgaactttaaaatccataagttttctttaatttcttcctcatgaaaaatcttttagacttaatacaatccccatcttataaaagaagtaaatgagttttagggggtttgcctagagccagatggtcactggggtaacttcagtgttctttctcatttttaaagtcagatttattgagatataatatacaataaaatttaccctttctagcatacaattctgtgatttttggctaatgcacacaattctgtgatttttggctaatgcgcacagttctgtaaccatcaccacaagcaatatataagatagtttcatcatcacagaaaattccctcttgaacccttttccccaactctagtctgagcaaccactgatctgttttctatccctgtagttttgccttttccaacaaaaggtattatcctttcacagaatgtcaaataaataaaattatcagggaattctttgacagtccagtggggtaggactctgctctttcactgacaatgggacaggttccattcctggtctgggaattaagatcccacaagccaagtagtacagccaaaaaaggaaataataataataataataataatgaaattattggtcttttcaatctgggttttgttcagttgccataaaaaagattcattcatgttattataaatattagtaacttgtcctttttattgctgagtagtattccattgtatggatataccacagtttgttaatccatttcgcagttgagggtcatctgcgtcgtttccatttgggaacccttaaa

SEQ ID NO: 48670 - DNA, 755 bp, Bovine  19866880621978
  misc_feature (1)..(1): n is a, c, g, or t
ncccacttgacttcacattccaggatgtctggctctaggtgagtgatcacaccatcgtgattatccaggtcatgaagatcctttttgtatagttcttctgtgtattcttgccacttcttcttaatatcttctgcttctgttaggtccctaccatttctgtcctttattgagaccatctttgcatgaaatgatcccttggtatctcacaaaataagagtaagaggtgatgatatatttgctcaccaaattgtgaacatcacttctttttagtaagaaattttccactttgagtaaaaatatagattaggagttgattgtgcctcttagtacctatatttaaaattcttcagctatttttcatgtgagataatactctgtatttatgtaacacctttcttcttaggacctcaaagcattttaccaaaatgcattaccttatccatcctcataacatctcctttcaagaaaggcagtgtcaagtctaatgactacaattttacagatgagaaccctaagacaaatggagctagtgacttgccaagatcagagaaaaacctgtagcaaacctaggtgtagaacttgggcttttatgaattcaaaattctttccaatctcttctttttcacatctcattttccaatctcttcttaataatatgtctcaaatttgtcttaactttggcattcctttatctgtaaattagcatgtagagagtcatgctaatgattgtaatctaattttatctgtaaagtgtg

SEQ ID NO: 48671 - DNA, 808 bp, Bovine  19866880626817
  misc_feature (1)..(1): n is a, c, g, or t
nagtgaatttgtcttctctactggattcaagcctgtaccttgatgcaaaattccctaaaagtaaagccaaggggaatttctatccatgatgttaatggaacagacaatgttggttctgtagattggccaagacaacatcacaattagagctgtaaaacggcgtaggacattaaggaagcaaggaggaatgcatagtcatccttaatacttcatgtttactaatagtaatctggtgccctccccagtattcatactgaattcaaggaagagagaactgtcaagcgtgctccctccttggttcctggaaagcgagtgtgtgttaatcagctgtgggcggggtgggtcctggagagaacctcttctggcctgtgggaactcatctagaaagtgagccccagcagttccagcctgattccttttaatgtcacagttcatttgcagaaccataactggaatcaagaattaaaaagccttgtataaaagtcagtaacattaaacctttaagactcatgtttcatgtgtcataaaaagtctatgaaaggattttatatttctgtacagtgttttagcactttcaatcacttttttttcaacataacttttgtgaacacttttatagcctctaaatgaaaaactaaactatgtgtcattcaaaaaaaaaaaaaaccttttatggatcacagaatttaataaaagttctgcaccataacaagcgcctgataaacctttattaaaattcattaaaaatactgaaaaatattttaacagaaattagacctcacattttggtaaacatggcaaatcactc

SEQ ID NO: 48672 - DNA, 920 bp, Bovine  19866880653648
  misc_feature (1)..(1): n is a, c, g, or t
ngaaatagtatactgacatttgatagctcgagttggtagacttagaaggaatatgcagtcatatctgggtcttgtctttcattctcttgatggcccttgtcatgtattgtgagtttatcgtagataatttacaggcatcatgtatttaataactgcattaatcatatgatcacaagttatctaatcatacaattggtagcttttaggaatttctgttaatctacagtttgaatgaaatctcattatcagacctgtaaaatattagtatagtttttttttttttcccaacaaactgttactttttttttaatgtcccaacctatagtataaattctgatcttgattttttcttttggtgagatgaatttattttagcccttttattattccattaataatatgattttcttctttccaaggaaattgttgtcttaaaaacatcactagaaggatcttatttatttcctctgtgaggtataaatgtgaatacattcaggggaaaagatatactattgatttttaagttcagtgatcattaagcatttatgtccaaagactttttacgtgtgcttgattctgttgatttccatttcttatctttctcttttccccttttcattacacttagagaaacttacgtagaacaattacagggagaaaattctaatgacaggaatgatagagccatccgagtagctgcaaaatggtacaatgaacatttgaagaatatgtcagcagagaatcggctgcaagttatcttcataaccaatgacaggaaaaacaaagagaaagccatagaagaagggataccagcgttcacttgtaagtctccatgtaaccagactgttcatgtttgtaaatgcatgcaaaaattatcatcaggcccatggtcagatgttcatttgactgtttttgactgg

SEQ ID NO: 48673 - DNA, 2248 bp, Bovine  19866880761218
  misc_feature (1)..(1): n is a, c, g, or t
naaggacacggtaaatgtttggctgatgactgtgctggctactagcagcctctccacccacggccctttagcaccactctaccaaaggaatggttttcccctaggtaattaaagatctgttttagatagggatatgaataggaacatttcattatcatattaaccaattacagaatctgctgattaaaatcaacatttagatcaaactggtggagaagttggttggttctctcagtggatagtatgttttgctcaaaacatagtatttaagtttccattgaactgtaaactggaaaaggcacttaaatagccaaagaatatgttttatattagctatttcagcaatatctacccaagcaaaaaaaaagagagaaattttgcaatattaaccttaaccataaaggtttactgaggttttttttcccttttcaaccactggatttacctatatgacatgaataagatagagataatttggccttattacaatactgtattttcagttgtaatggagcagagaatcctgcttatatatgagtgatgataaaatatactttattattgcatcagaaaggaatattttttctctttgcttcctttttcttcttgatttgtctctttcagtttttgtctggggttgactgggtgcgattctaccaaacacttgttatacacattttcgtaaggtttttggtgacccatttgttacacagttgacaaacctgataggtgtataagcaacacttagaggagtttgccttggtacttttcatagaattgttgggaatttttagtaagcagtttgttcttcccgagatgatgaattgggcggattatacatatttctatctcttcttttttagacaagatgtgaaatggagaagtacctgacacctcagcttcctccagtttctataattccagaacataaaaagtatagacgagacagtgcctcagtcgtagaccagttcttcactgacagtgaagggttaccttacagtatcaacatgaacgtcttcctccctgacatcactcacctgagaactggcctctacaaatcccagagaccgtgtgtaacacacatcaagacagaacctgttaccattttcagccaccagagtgagacgacagcccctcctccggccccaacccaggccctccctgagttcaccagcatattcagctcccaccagaccgcagctccagaggtgaacaatattttcatcaaacaagaacttcctacaccagaccttcatctttctgtccctccccagcagggccatctgtaccagctcctgaatacaccggatctagatatgcccagttctaccaaccagacagcagtaatggacactcttaacgtttcaatgtcggccgccatggcaggccttaacactcacacctccgccgtcccgccgaccgccatgaagcaattccagagcatgcccccttgcacatacaccatgccaagtcagtttcttccccagcaggccacttacttccccccgtcaccaccaagctcagagcctggaagtccagatagacaagcagagatgcttcagaatttaaccccacctccatcctatgctgctaccattgcttctaaactggcaattcataatccaaatttacctgccaccctgccagttacttcgcaaaacatccagcctgtcagatacaatagaaggagtaaccccgatttggagaaacggcgcatccactactgcgattacccaggtatgtgatcctgcctggttgaagaatctgtgtgtgtttagtgtgttcatgtgtgccattttccacctcacattccagctgtacatgggagaggagtggttgacatttaaaaaaattcacctgctctgctcttgtcgcatcccagtctccagtgccttacccaagtaactgtttagttactttgtgcttatttgatatagtaaaaaaaaaaaatttggaatattatggggaaaaaaagttactggactctcttctttttaatgttaaatacgtgagagtcttgctacacttacgttgttactgtagcaatctaaattggagttcttaattctaaatgaagtaacctggaaaggaattacttaagtaacataggggaaaagaaggggtggcaatgaagagtggggttggtgcaagacaagaccatctatagaatagatttcaaggttggttctgatagcatgtgagcatatgctctttcttgaatgagatatgtggtccaaaatataaattg

SEQ ID NO: 48674 - DNA, 2021 bp, Bovine  19866880767359
  misc_feature (1)..(1): n is a, c, g, or t
natgggggaggagttatgtaaagacagagagcaggcaattgatacttgttagtaaaccagcaatgtacaccacaactaccctcccagggtttttctgtttgttttttttaattgcaggttgctcttctgcattccatgatgtcttcttcctctgcccagcccttctatgtggacagtccccagagtctcactcttgctttcttcccaccattctgttatcccccaagacaatttgttcacttaaaaaaaaacaaaacaaaaaacttttcattttgtattggagtaaggctgattaacaatgttgtggtagtttcaggtgagcagcgaagaagctcagctatacacacacatatattcccctcccgttcaggctgccacataacacagagcagagttccaattggtttacttttgaggctgtatataccaacttccaaatctacaactccagttctctgagttctccaaactgtagacttgcatatcgttgtgtattggatgtagatacagacgtgtttcaaactgagttagtcaacatgacccaaagatcagcacatccttctgtattcctcacctcagtgagtgacttcattaaacattatttcctaagttcttttagacccctttcacttcccagcattggagtaatcacaaaaccctgttgatctagccaccaaaagttaacagggccacatgctcagaaatcttttctgtattaccctttctctccaatctgttatttgctcttgtcatatgtaatccatggcactgcatatgaaactgtataaaagaacctccattgactagcctcttgactgcagttgccacatcttactagtttttaatatccctgttctcagcaaacaacttgaacactgttggtgttcaggaaatgttagatgattgtagaatgactttagtctttagacacttactgggtcactgtgatttctagacattctcccaagctctgaatgtttgatgttcttccttgacagacttggtcctgccttcaagtgggtggagtaatgggaaaatgccagaagctgtgtcccaaggctgtgagtgtcaggtcatggccagggtaaacaatttgaaactaggtcagggatccaaattgggctgctgaatctaggagctaaagcatgaaaccagttgtgttggtatctgggtttttgaagaggctggcgggaagaaaatcccaggtccatgtgagacagctatggcagcttttcatgaagtttgagatgctcagactgttatggaccctgtaatacaaagatgaataggggatgatccctaatctagtaggaactcagagtcatgtgggaaaatagatatgcaacaaaaacttagacttcaccgtaagaagtgaaatagtgaaacatgcctatagcactaagggatccagacatggaagctgatgcctgtgcttaggagaaattgtggtgaccttgagaggatgcttgttaagaaaagtttctctctctcttttttaagattatatctcagatttggcatttaactccatagatgtcctcaggacaaaccactttctttaatacataggcaaaagttgttttcttccactgaatctatgtcacaattttttttcccgggctcatagggcctgttccctggtagaaattttttcaatagctttgtattcaagttataaatatgagagcatttttaagggtagtttttatgcataaaaatgattattcatagtttagtatataaaaattaatattcatcatattaaaattaaatatactatacatttatgtgataaatatttggttcttaagtttagcttgtaaatattatcctaattaaaagtctactaaatttggacattacttgtatggaactttaaaaacgtttttaaaataaacacccttaagcctttaaaaagcatttatacatttaacacatgtgattttcctattaaatgctgtatcaaacacttgtgtgatttaataaagaaaattcttcccagattcttaacgttctaagta

SEQ ID NO: 48675 - DNA, 1549 bp, Bovine  19866880780790
  misc_feature (1)..(1): n is a, c, g, or t
natgttaagtcaaaaagaattcttcgaagaattgtgactatattatacatttgtgtttatggtccatgttcttgcaaactcaagctggtctgataaaacactagatggattgattcctgtcacagctaagatcgtaactgccatgtaactaataaactatccacttgaaaacgttaaatgtatcagaaaatgtaaaagaaatacaattacagaacaaatagcaggaactcaaatgttcttcaaaaggcaaatttgaaaaattaagagcatgaacaagctaatagagttaaaattttcaaagttcaaactgagtatatataatcaaatataataacagagaaagatgttggaaggtggccaacattatagcaaatgttttaaattatacaaattcaaatattttacccttagaaatgctttttagaaagctagcatttgattcttaaactgtttttcttaactgattcctaaattctaattctttcatgttgcttcctactaactccatcttccatacacatatgcttatctcttcccatcattttatatttgcatgtgggaggtcgagtaagaggaaaggtagtagaaaagggaaaagaaatcttatcaattccatgtaaaatgcaaaaaaacaaaagtgagtatcctagtattatcactgacattcattgaagtcgctcagtcgtgtccgactctttgcgaccccacagactgtagcctaccaggctcctctgtccgtgaaatttttcaggcaagagtactggagtgggttgccacttccttctccaagtattatcattagtgtgcaagtaatatacatttcaacttaggtgctttttgagtaaaagagggtgctgttaataattatgccagggacttccccgatagtcctgtggttaagaatctgcctgccaatgcacgggatgtgggttcgatccctggttgaggaactaagatcccatatgccacagagcaactaagtccatgtgccacaacaactgtgtctgcatgctctggaatctgagtgccacaacaagagaagccttggcagcacagcgaagacccagcacagccaaaaacaacaacaacaaatatgattatgccagagaaataggcataaaccaggacttctatggaaaaacaactggaagatataaattatatcattaaattataacattcaaacaataaaccttaagagttaagttcttaactatttctccaacaaaagaatttaactgttacaacaaaatagacatatttcatatgcaacctagtatatttgtgcagagatgacttcgaacatgtaagtttatccaaaagtatgagcttctgtggcttctatggctcagtggtaaagaaccctcctgccaatgcaagagacatgggtttgatccctggtcttggaagatttcctggaaaaggaaatggcaacccactttagggttcttttttttaattattatttttaattggaagataattgctttacaatactttgttgtggttctgccacacatcaacatgaatcagccataggcatacatat

SEQ ID NO: 48676 - DNA, 816 bp, Bovine  19866880789492
  misc_feature (1)..(1): n is a, c, g, or t
nccaatttttgaagattaaaagaagcagtgtgcaaagcaaatcaggctgatgctaggctcctttagctgtgactttaggattctgctttcttggactccttgtattattttaattgaatttgttcttcctcttcccaccctctactttgatagttaattttttttctattttatctccccttctctttgcccttggtactggtgggcctgacaaaatctttttactgtagttttagggagtttcaggagagagagcaacagtgtttagtccatccaccatctttaactacaaaccctccctacttgattttttcactagatatttctgactgttgtccccagagtccttgaaaatatagttcacagtacacgattgatgggactttgtttcccagctgaaagtgacttgcttgcctttccaggtttgggtaacctgggctcatacatttctatcttcaactctccctatgcaaatgaaacaagtgtcatattttattgaccaatttccagcatttcctctagtctggggcttgttaggaccattcttttttttttcccacatctgggagcatctgtaagggaatcattttaattaataagaggttcccacttgtcttagaactgatttatttatagctgaagagaaagctgattttttattaccctctggaactctaatttggttctacttggttttttctactgtctttccagataagtatacagataaagggggtatcacaaagaggtcatctgtgataatctgcatgtcttttctcctttttctttttcttccctgctacactccccaacagg

SEQ ID NO: 48677 - DNA, 3790 bp, Bovine  19866880793656
  misc_feature (1)..(1): n is a, c, g, or t
ntgattaaagatatttttcctgctcttgaaagcttagattctaaggacatatgatgaaataagaaaagtcattctaaggaatcatatttcttatactcaaaactgaatgttgaatttgaagccctgatactgttaactaaaagtgaggtcatgttagtcggtcttttcctttatatttttaaaaacctaattatttaagatttatattttatatttttaatacataaaagatcttagtataaatggaggcactgaagggtaaaaaagatttcattccacttgaaagataaagagaaagctactttgaagcatcataagtgaaagaaaagaaaaagattacaacacctggataagatatttagctctgagttttctgtcaactaagacaaaaaggaaacacgttaaattatacagttctcattttctggaaaaaaaaaaaaagcatatagcttcatctactgtggcaaaaattttcctggaactcacgcaaacaataattcatcatgagatttttgtctaaatgagactaagaaggatcataagcttctgtttcagaaaaaaaaaaagttttaacagtaagtatgtaatcatggttgagttacttaaccatgagttactcagcatcagtttcatctgtaaaagtagggacaacgatacttatctcaggggacagcagcgaacactaaattatataatataaatggaagcatttagtaggtccctaaagtttcacaaaacaaagagaaatggcaccagattttgttctgatcttctataaaggcagggatcatgacattaaattgtgtcttttttaataagagtgattgatttttggctcttctgggtcatcactgccatgggtgggttttctccagtggtggggagtgggggttactcttcactgtggtgctcaggcttctcttactgcacagtactggctctagggtgcagaggcttttgtagttgcagcacatgggctcattagttgaggttcacgggctctagagcacaggctcagtagggcttccctggtggcgcagtggaaaagaatttgccagctacgcaggagacgcaggtttgacccccaagtcaggaagatcccctggaggaagaaatggcaaccctttccagcatttttgcctgggaaatcccatgaacaaaggagcccagtgggctacagtcctggggtcacaaagagacaccactgagtgactaaacaacaatcctttcttaacatttttttattaggttaatatactttctctaaagaaaagatgagaataaaagtcacccaatacactttccaaatacatacaatggttttgaatgtatcaattctaaaaactgatagaataagagagcactattgattttatccttcctggaaattcttaagaccacaactgaactattaatgtgaatgaggttttaagctgccgttttgagctaagaccaatacagaaaagaaaaaccctgtggccatgcctcacctatcctagcatcgtcaacccaggactatcccatccattttctttttttcatgtaacacatatttgataactatgtaaatgaagtggggatctcattttgtattaccaccacacacacacagtcttaccagaactaagtaacatcacttataaaattaaagcaagacatgtccaatgcaaaaaagaatatgaaacactttaaatgttcatttggtctctttatgaatcacttatttaaactaagaaaatttggctgattgaatcaatgactcatgctagatcatttccacagggtcctgacaagggtgaggcaagttctcagctgcccgccctgcactgggcacgcccctgagagggggcacctccactattttgtgccctcggtgactgcttgccctccccttagtctcagtcttgatgttcactttcaataaatttgacttaccagagtcattcttattcaactgttatctactaggtgttctggacatgtcaccctcagagtcataaaatgaataaatcaatcttgcagattctgtctcatcaggcaaatgttcaaaggaatggtcaagcatattcctgggttacaggctattttctttccatagaagccttctgtatttgcatttgggtctgcacacatgttaagggtttcccaggtaatgcagtggtagagaatctgcctgccaacttgggagatgcaagagatgtgggtttgaattctgggttgggaaggctccctggagtaggaaatggcaatccattccagtattcttgcctggaaaatcccatggacagagaagcctagggagacacagtccatagtgttgcaaagagtcacacgtggctgagcatgcacgctgtacatgtgatgcaagttggtgctaaactgtttctttctttcttctttttttttggccaggaggcttgtgggatcttagttcccggactgcagatcaaactcagacccctggtaatgaaaatgcggagtcctaaacactagaccatcagggaattccttaaaccatttcttagaaaagattacaagcttatatcagatttgtttcattaaacttgaatttttactttgctttggggaaaaagaaaagctacttttctttgactggcataaagaaaagttataatgttggattatttatataccaaaatgaagaaatctcaaatgcatgccaattaattgataattatttaattagatgtatatccttgcaaaatttattgatgccatgcggtagctgtcaacttaattcaccttgctagtagttaatttttatgttaagacatattttcctttaaacctactcaagtctcaacccactattaaaacttatagtttttatttggactcatgaataatgtgattccaagtgtgacatacaaaatatataaatgaaggctttcatatatttttcagagttaagcataattctctaaattcaaataagacttgccattctaaatacgttatctattatgcagctttttttggggaaaaaaagctttttggtatgtatgacttaatggatctctgtagctactacttcttatatattcagttttaaaaacttttgttatgatacacatactgaatgaatctggcttccacagtgaggcaacaactatttgaaatggaaatcctaggacacaagtaatagtagatgaggcctggaatgcttgaagtcggaaaaaagaataaatatcttcagaaatttctctactctgtaacttgttgtcaggtctacttatctacctaaaaatcacctctaaaatttagcccagggacactttcttatccttttcacccatcacataaaatacacctttaagagaactcactccaaaggccatttctaagataaagacagtctcccaattcccttgacattatttctaggatatgtatctttaagttgtttctaggaatattccttgcttcatctctctcaataatttccttccagtaatttcttcccaaatacctgatatatcttttccagatatggaaatatatttccagacatatatgtcttcaggatacttataaaccaatgacctgctttgagcatttctttctctgttaggactgcaaaacagtaaaaacgtggctaagacaaggcagtgatagtacagtggaaaaaattcatggattaaaaaactaagcttaatgataccaactgttagtgagaatgcagagcaactggaactcgcacttgttgctggtgggaatgcaaaagacatagtcacttggaaaatagtcggcagtttcttacaatgttaaa

SEQ ID NO: 48678 - DNA, 2056 bp, Bovine  19866880847735
  misc_feature (1)..(1): n is a, c, g, or t
ntacacatgggatcttgcaggaaatggcaacccactccagtatgcttgctcggaaaattccatgggcagaggagcctggggggctgcagtccattgggtcgcaaaacagctggacatgactgagctactgaacaacaacaatctgtggaagacacacaaaaaaatgatacaaatgaacttatttacaaaatagaaacagactcacagacatagaaaacagagctaccaaaaggaaaccatggagatgggagaaattaggagtgtgatattaacagagtcacagtactgcgtattacttaaaagagataaccaacagggacctactgtatagcagagggaactatatgcaatattttgtaacaagatataaaggaaaaaatctggaaaagaatatgtgtatatatatatatatatgtgtgtgtgtgtgtgtgtgtataattgaattactttgccatacacctgaaattaacacaatgtggtaaatcaactatacctcaatttaaaaacaaaaatcccctgagatctggaagagaacatgaaaacaagctgagttcatcaagagatgactttcttcatctagtaagtcttcgatttttagaaattgtcaaagcattctgcacactaaaattggcaaacatttgactgttcctcacccagtatttctgccctggccccattccatgggtcagagagggagtatctagtagggtctcctcaggtcataggcagaaggcatatttctatttaggggatcggccctggccacagaaataggtgttagaaccagaacgacatgtttgccttaattagttcttttctttggaatgtaacacacactgtatgtaagctactctgttcttccataccccagaccgccactgctaattatcattataatgttttaatagcaatttccccagcagagaattcaaaattctttagtatattatctcctttctcttcaaaatacctttatgaaataactggaggaaagctattactatctcattctaacaaaatttgtttgactgagaaggcaaaaacctggacctttgaatagagcatggccagaaactaatcaaactaatttttaggtgaagcttgtgaaatcagcttcattacatctgtagtaatacctgctacctccctcaccatcaagttttcgatcatttacccaagactaactgccctggcctgaaacacagacgtgactgaatagaaacatcatccattctaagaaaggttacctgccaccaaaaagtacctattaataggcagatggtgtgcctctttaaaaaagtcagtcagaacacatctaattgtctaatacagggttaattaacagcactccaagtgtttttctgttggctgcttagcatgtggaatcttagttccctgaccagggatcgaatccatgccccctgtattggatgcacggagccactggactgccaaggaagccccagtactgacactttcgataatcttttgacgtagggggttgtccagtgcattttagatgttgagcagcacctctggctccacctactagaagccagcagcatcttccccagttgagataactgaaaatatcctgacgttccccaacgttccttcaggagggaagaaggggagacaaaaccatccaccattgagaaatgctgccctaatcaaccaaaagcaagtaacaatggagcactagcctcagcctgacattatagtaaccagatgctggaggctaataaataacatgttcttgttttcatgggactgaacgtaaagacagagcttaccaccagtatactggaggttgagaactgagagtctatgcaaaggagggaaggtgggagggacaaattaggggtatgggattaacaggtacagactaccatgtgtgaaatagataggcaatgaggacacactgcatagcacaggaattagagccattaacttaaaacaacctataatagagtataattgcaaaaatgctgaattactatgctatacacctcaaactaatataatattataaatcaactatacttcaacaaataat

SEQ ID NO: 48679 - DNA, 809 bp, Bovine  19866880867595
  misc_feature (1)..(1): n is a, c, g, or t
naaaagagctgagaaatgtgtgaaagcatcttctcttttccacacattgttttccctagggactcccttgttaaccagatttactgctaaatcccaacacacattctaaaacctctccgaactgatgaaagtgacagtggagaagtcataataatccatcacaacagctctcttcctttctaagtcatgctcatggctgctcccttgaaaggtcaagtccacaccagtttttcctaaggctacggaagccccacggtctttgcgcaatagcattggaaggtaagaacaggttacagagtgccattgttgtgaaatggaagcacttttgtctctgttccacacaaaatgcttttttctcactctttctgaacctggccttttccatttctatcaggtaaagacaggtaaaagcaggaactgtttatccaaggctgaaatgaaactttacagacctccctctccccgacaattttctattagcagacttccagggaagctcctatctagccagctattcgctcctgttttacatgatgattgtcagtgttcaccaggaacaaagatcactgatattcccactgggtttttcagaagcaactgaacgttgagctctttttatgttgaaaatagagatttaaacgttagtcatacactttctcccaacacattctcatcctcgtgggcttctttcactaattagctatgcaagtctttgcactaaaatttagctacctattaatccttgattttccttgctatgcaaacacagtatatgtttacatacaaaaacattttgtctatgtttccaa

SEQ ID NO: 48680 - DNA, 1516 bp, Bovine  19866880867983
  misc_feature (1)..(1): n is a, c, g, or t
ngttggacttataaagaagacacacacccataggagaaaatcatttcaagaatgtaatcttctgctagaaacagactgtgataaaagaactcaggcacaaaatattagttttgtttttacctaaaaattaataatgatcagctttatttgcaaggctttatagcaaaggttaaaataaatgttgataaattaagactattaacacagactggtaatagtctaaatagcaatttactaactgtgccatcttacactttaatgaaatgaaaatgtgaattgattggataaggaaagaatctcttgtttattctaatcttaatattatggttgataatttcgccagccgtcctgatgaaaatatacctgatataacaacgccgcaggaaactaatgatcataatgaatcgacttgtcgctgaagtacaaagatagagactcataaatctcttaaaaattactaaaagcaaacaagtgatcaggataaacaaatgattgttttatcatcatttatttgttttctactttatagctattatcttctttcctggggaaaatgtcaaaatatcttttaaatatttgcactttactttaacctttactatctttacaccacagaagcttctaaagactgggacttctgttaaacctttgtctaattattagtattatgagagggttgtttaatcttttcttcttcataagataatcagtagtcaactaacaaataatattagtatatacctcttaatacaacattttgcctatttttaggactttataacttgattataaattatcttcaaacttgaagtatacatgggtggcacactttttaaaataatttttccaaaactgtgtctaaaaatcacaaaatatattttatttattatttactacttgaagttagcattccataaataaaatgaaaaatgcaataaattactcagaaagttctattgctcctctctccactgaagaaaccaaagtaaccaaaataaaacaaaacttttgctcaaagataattgcaatcatttagataactgcctgcttcataaactttctacttttattaatggatagtctaaatatgaccaatttgtcataagcaaaaactaaatccatgcatgttaagttcagatgaataggaggaagaagtcatcaatctacttttaaatgaaaatcaggatatctgattatttgactgcaatattcactcttgttatagatttgaacttctcccataatcttagacactgtcatgtttacgatcattacttacatgataacaacatatctaatcactcacaagattattgggatgatgtcccaaacttttgattacaaaagtctcttgaaaatatagaattctgcaaatattactattttatgaggaattttgatattagccaggagtgattttatttatttatcaaaaaatgtatcaattcttattagtgtatgcatgctcagtcatgtcagactctttgtgaccccatggactgtagcccaccagggt

SEQ ID NO: 48681 - DNA, 1504 bp, Bovine  19866880929970
  misc_feature (1)..(1): n is a, c, g, or t
naatgttccctttttcttctctccctctgagatctctcctaaatctgtgtgagaagtgtaatattttagaaactttcctgacttatatgcccttagtaataaatcaatttccctctatcagtgctgggtccacgtaagagggaaaagaagagatgatcattttggtaaagacaaagatatgctccaagagaatattcttttcccttgggcagagaaagtggaccccccacctttccttgacaaatcccttgatcatcagacagggggtttggtggggaaatgatgagagggctaaggaaagaaagttgtcaaaaatgtctctcagcattccctctttatggtcccccgctctaagatatgagtggggaagaggtgaattagccagcctaagatgcaaagaaaaagtagaaagtgcttgttttttgatttggttatatctctgaagagccactgagcagggtatccaggcactcatatggggcagaaaaccagagggttcaagcagatagaggttttagtttgtactcttgaacttccatggttacaatgtgatgtgaataaagagatgagagccagagggcaaccctggagcttgacatgccaggggctgagaagaatactggaagactggagttggacagagtatgatagagactcagaggggtgtagtaccagtaagaatggaggagtagaatagaggtcaagtccgcagggtgagccactaagcaatggccaagccaagaagaaatgaaaaactgctttgtcagccaatattattaactgtagtgtataaagaatgcccgtatgtgaggatgaaccagcccttccacagaagatgccagaaagtaatgcatgtccaagagccagggcaatgtcaagagatctcattaatccccaaaccttcaagttctgtgtgtctcacaaagacaacattttgcatggcagaagacagggaacaatcaaatgatgaacatcttccagagactgatttaaaccaagagaaagacttttgattactggctcccatacatcttaattcagaatggactcaatttaattttccttccactacttgattggttggggcctttatgagaatgatcaaatcagttataaaggagccatgttttccttgcatatttgagttgtaatatgataaacacatgtaatggggcagaaaatttaatcatatcaatagctgttagctctctatgggttgaaactaggaggaactgctcttccttgagcctgaagaaagctggagagaccagtgggatggagtctctacaatgaggtcattaggctgggggccaactgagtgtgctgcccagacaaggccttgaggtcccataaaggaacacatatgtctagcttgcaaagtatatgcaacaacataattattaagccactggtggaaaatttcaatctgaaaatgagagcatctgggatgaatgacttctctgtaaatgtcggcttgtgtctgaatgatctgtttctccaccat

SEQ ID NO: 48682 - DNA, 1154 bp, Bovine  19866881015458
  misc_feature (1)..(1): n is a, c, g, or t
ntaatgtctctgcttttgaatatgctatataggttggtcataaaatcttattaggtttatactattataatccctcccacattatgaatgaggaagttgatgcagagaaattaaatgatttgcctaaggtaattgtctgtgttgggattgaaaccaagcattctgaatcaaaatctgtgcttttaagcaccacactgaaactcttgtcagaaaagccattaaagacaattttaaagagtagtatcttgataaaatattatgttgataaaaacaccaagtaaaaagagtaacttccaatagacccagagaggattacatattaatttttaatatgttttttaaaatccttggaaagatgataacttctgtttatgtgttattatggccctaataataatcactaataatattgtaaatttcttgctgtagtcaaaatgattaaaaagtctctcctgaatggtttatacatatgtatcacttataacttactagatgttcattcatctcaatttgatctggagtaatggaaactgcttactaaaaatattatccatctaactcttacaaaactcttacacaaaatatttgcataagatatatttcaactggtatcaattcagttcagttcagtagctcagtcatgtctgactcttttcgacctcatgaactgcagcatgccagcctccctgtccattaccaactcacagagtccacccaaacccatgtctattgagtcggtgatgccatccaaccatctcatcctctgtcgtccccttctcctcctgccctcaatggttctcagcatcagggtttttcaaatgagtcagctattctcatcaggcggtcgaagtactggagtttcaacttcaacatcagtccttccaatgaaaacctaggactgatctcctttaggatggactggttggatcttcttgcggtccaagggactctcaagagtcttctcaaacaccacatttcaaaagcatcaattcttcggcactcagctttcttttgtagcccaactctcacatccatacatgaccactggaaaaactatagccttgactagacggacctttgttgacaaagtaatgtgtctgcttttgagtatgctatctcgtttggtcataactttccttccaaggagtaagcgt

SEQ ID NO: 48683 - DNA, 992 bp, Bovine  19866881052532
  misc_feature (1)..(1): n is a, c, g, or t
nctaccttcaccctgcaatctcaagtgactgttgctcagttatgtttgactatgtgaccccatggactgcagcccaccaggctcctctgttcatgggatttcccaggcaagaatactggagtgggttgccatttcctcctccaggggatcttcccaacctagggatcagacctgggtctgctgcattgcaggtgattctttaccacttgagctaccagggaatccaccttcaccctactgcccatttaacaggggctctgtgtgttttcttcatattttcagtgtatatatataaacatgcacctatccatcccattaaatattgaatttgtattagggaaaaatacaaacagcaaataatttcagctaaaggatctggaaataaattagaaatgttccattttagctatagaaccataaaattatgtaatggttagatcttactttcaaatattagcaccataaattcctattaaacaagatcagagaaaacataagaaaagcattgctatggaaaattgaaaatactcagtaactgtagaaattatgatgctttaagataatcatggatgctagtataaaagaagtccaggccttatatcatgtaatcttgctccttattttacagataagaaccagttcagggccttttagtgacttgccccaggtgacccggtcagttctcattccaaattctacattattagcaacatagtcttgatttgactggtatatagcgtgggctctcagttttcattaggatgtagctgagattatacctcttttgaaacattttctctagtatataagaaaaagattattgtagaaaaaaagaaaatacagataagcataaaggaggaaataaaaactactcaattaagactttatatttaaaatcttatctgtcttctctttgcaaaaccttatcttgacatcctggagaaatctgttacttttgtatgggtgacagtcaggatttcaggatatcagaa

SEQ ID NO: 48684 - DNA, 1540 bp, Bovine  19866881079420
  misc_feature (1)..(1): n is a, c, g, or t
ncaacaccatattggacagcacagctccccctgatcagccacaacactctgtcatcatgggcttggtgactataccaaagaggctatgtgtggtatttctagcatcttcctgattcacatcactttaaaacaggatactttaagtataaaatgtttaaaaataagatcacataagaaggttgattcacctgttcaaaaatccaacattaaaaaattgggggcagggaacctagtatctatgaagatgttaccttggatacagaatttctgagctgggagggatgttaacatataaccatcttgtttaactccttgattttagaaataaaaaactgaggccaaaggcactgagaaagttgatcaagatcactccttccagcttataatacagaagggctacaacccaggtccactggctattgcacaccacctttactttgtaacgaatctgaactgagtacagaatctgaactaagaaatgcttcactttaaagccaggttctgacaccttatttctgtaaccctggacaggtgctctaacctttcaaaaactagtttttctcacttataaaatgaggtcaataacagcacctatttcatacaagctgttgcaagaatactgaaagcactgaacactgggcacatgaaaagtgatcgacccatctttccatctttccaaaacacaaaaaactgttgtgttttgataaagaacaggactaatattccctcttatactatgtcctattaatgtgtgttattctgaagagtagcaattccaatgagagatgtgtatatagaagtaatatttgaacactgctcacaactcaggacagtaagtaaccatttcctggaggtagaaaaacatttgaaagattgttggcttgaccttcagtttccttattaactttgcagataattggccgtattacactaccccagaggtcatataaatgcccattcctcctctactactataagaaaccagcaaactagcaaaaaacaaagcaatttaaggatttcattaaaaaaactaaccttcaaaatcactgcaaaaatcattaacaactcagatctatatccaatactatttctgtgtctatgggtctctataaccatcattataacttgatattcacaatgatcatgaagaaaaaattaaattcagaaaagaatggctaaaaaaaaagaactttgtaaattttagtcaagttttgaatccttacttttaaatagttaaacctggtatcccagaaatttaattttatagcaagcttcctcccaaagcagataaactgatacttcactatatatgttgttttacaatcactgctttctatttttatgagttttattcatacaatttttaatacactcacatttactggaatgatactctgaaagctgtttcccttcatgatcagtccaaggagagggtacgatgacatccttagtgaaaaactaggagaattaaaagtccttcaattaggcatagaaataggaaaaggtagttgtgctaaataaccatcaaacatgctacaca

SEQ ID NO: 48685 - DNA, 987 bp, Bovine  19866881218910
  misc_feature (1)..(1): n is a, c, g, or t
naaaactttagattctctttagagtcagcaggtgacccaactattttcataggtttagataaaaacagcatttcctttgcattgtttgaactctaaatttataaaacacacacatattataatatatattattattattatttttatttgcatgtgctctcagtcatgtctgactctttgcaaccccatggactgtagcctgccaggctcctttgtccatggaattttccaggcaagaatactggagtgggttgccattttacaagtattataatgttagcttccaatttatagtgttgctgctaagtcgcttcagtcgtgtccgactctgtgcgaccccatagacggcagcccaccaggctccaccgtccctgggattctccaggcaagaacactggagcgggttgccatttccttctccagtgcatgaaagtgaaaagtgaaagtgaagtcgctcagtcgtgttctgacctctcagcgaccccatggactgcagcctaccaggctcttccatccatgggattttccaggcaagagtactggagtggggtgccattgccttctccgatttatagtgttacctttggataacttagctatattaatatctatgtatattcactataagaactttaacaattccattggtttgaatcttttatttactcataaacttggattgcttccccaaatttcagatttgttatttatatagcagatattgctatacattaaatttggaatactaactatgcttaattcattgtgctatttgacaataacgtagtgaaagtgaaagtgaaagtaaaagtcgctcagtcgtatccgactctgtgggtccagggaattctccaggccagaatactggagtgggtagcctttcctttctccagggcatcttcccaacccagggatggaacccagttctcccgcattgcaggctgattctttaccagcgattctgagccacaagggaagcccaagaat

SEQ ID NO: 48686 - DNA, 1903 bp, Bovine  19866881415608
  misc_feature (1)..(1): n is a, c, g, or t
nggagagggtatatgtatacctgtggctgattgatgttgcggtttgacagaaaacaacaaaattctgtgaagcaattatccttcaattaaacaattaattttaaaaaatagatactttctagtcctttctggaagcctgtgagcctgccttctaggtaactgtgcacctgtctgctctaattcagatttgactttcactccagaggactgtttcatccttacgtgacacaatacctctgcgctccaccccagctatacaagttgtattttcctttgtttccagcactgctactgtcacgtgattttctaaaaaattttattggaatatagctgctttacaaagttgtgttaatttctactgtacaataaagtgaatcagcagtccatatatatatatcccctcttttgggatttcctttccatttaggtcaccacagagcatggagtagaattccttgtgctatacagtaggttctctagggccatatacttattatttattttattttacttgtttacttgactgcagccagtcttagtcgtggcacatgggttgccctgaggcacgtggaatcttcccagaccagggatcccttgctaggtggattcttaaccattgaaccatcagggaagtcccctatacttaagtcttcctttctctgccctttccccctcactccctctccctctttgtctttctttttttctttcccttcattagtacattggtacatgaatcagaataatgaacttttttttttgtatcttctttgatttgatactttttattatgtatttattgaatatgtattttctatatctaatgatgttttattctctctttaataacagtaggacaattaaaacttttactgagaatctaaaattaattcctattccctaaaccttcatagttcataaagtgaagtcactcagttgtgtccgactctttgtgaccccatggactgtagcctaccaggctcttccgtccatgggattttccaggcaagaacactggagtgggttgccatttccttctccagaagatcttccctgacccagggattgaacccgggtctcccacattgtaggcagacactttaccatctgagccagcagggaagtcatagttcatagcatatgtaaccccctaaatccatctataagtgctttactaagcaagttgttatatagcaaaaatgtcactaacattcaaaactgtgctctaaaatacgtgtagactttctaaactgctgatgacttctctctcattactctgctcacttatttgtaatactgcagagtcataaatctgcctcttttactttcacttccttccatttatttttggtacaatcatcttgatttactattattagcaagactagatcattatcattactggatactaagttccagggacacactacctattctataaaatgttacctcacttttattttcttctagtgtaggttaacattatctatttaaaatactttcaccaggatctagaacaaattcacaggatctatgacctagggacctagaacaaataaaacatttctctaattcctgttacattttgggaagcctgttgagctgccgtctgtggggtcgcacagagtcggacacgactgaagtgacttagcagtagcagttggtgactaaaggataaaacacagtaggcactggagaaggaaatggtaacccactccagtgttcttgcctggaaaattccatggacagaggagcctggtgggctacagtccatgaggtcacgaagaggcagacaggactgagtgactgagtactaaggcaaactttaggaggacaaagatctttggaaggggtatgtcctctgctgagggcttcccttatgactcagctggtaaagagtcca

SEQ ID NO: 48687 - DNA, 1579 bp, Bovine  19866881427350
  misc_feature (1)..(1): n is a, c, g, or t
nctgggagggattgggggcaggaggagaaggggatgacagaggatgagatggctaaatggcatcaccgactcaatggacatgggtttgggtggactccaggagttggcaagggacagggaggcctggtgtgctgcgattcatggggtcgcaaagagttagacacgattcagtgactgaactgaactgaaacacttataagtagtagtgtgtgaaaacacttataaggggatgttaaacaaagttcttatactaaaaagtttcattagattgaaataaaatggaaatggcaaatgaaatacaattagtaactctgtgtggttcagagagaaagtctgtgcttccatgttgagcatttgcaaacagaaagactgagacctcttcaatgttaacatgtcagcatcaaggtggacatgtgagctgtccagcatgagatgaagaacggacacttttttgtcatttaatacagtgatgagtgtcaatgatcaaaagctagaggtaaaagttatgatgacaagattgagtaaaaccatgtaagcaatcagtactgacagtcttagttacagagatatatttggatatagcctcagctacacaggagaaaaagggatggttggaggacatggaggaggaatggaggtgatggaaaccaaaagaatcccttttcttaccacctttgttatccacaagctttctcaagggaagtctttaaaaatggaagaagggggatccaaagaaaaatatcctcttcctctctcttaaacctttggtttgcctccttccattcagtaaaggactttttcatcagtacttcatttgatccatacaacaatccaaaaacagagacttaagagagttttgatttcatgggacagttgaagtaactaagcctcagcaaaattcagtgatttaccctgaggttgatcttagattgtaagttgggtgttccatctcccaatatgtttctgttttcactaaggcattttattctcatgcattatttgatgttgaactagtctttttgctacataacaaaaagtgtactatagtatgatatagtatactgctgctgctgctgctaagtcgcttcagtcgtgtccgactctgtgtgaccccatagacggcagcccaccaggcttccccccattcccctggattctccaggcaagaacactggagtgggttgccatttccttctccaatgcatgaaagggaaaaggaaagtgacacgactcttagcgaccccatggactgcagcctaccaggctcctccatccatgggattttccaggcaagagtactggagtggggtgccggtgccttctcaaatagtatactagactatactatacatagtatactaggctatactatacacgtctagtataatgtctattatttgacattaatagatatttgctagtaatgtctattaaaaggaaatttggaatctgggcagtggagcagtattggattagaaatcaaacaatatatgtctaattaattcaatgaatacttgattaatatttggcagttgcattttcattacaatgtaattaattagaatttctagataaacaa

SEQ ID NO: 48688 - DNA, 967 bp, Bovine  19866881641060
  misc_feature (1)..(1): n is a, c, g, or t
nctgacgtgcggccgcaacgccgtgcgcgcgacaaactacgcaggaacggagagacgactctcaaaggatgggaccatcagctctggagctctggacggtcccttgggaggatctccaaaagatgccgaccggggcaggaagtggacctgaagtcctcgtgggcccagccccgccccagggccttggctctggggaacagaggcaaggtaaagggggcgaaacggacactcactgtccatggtctccctcaccgcattcagattcgctgccgctgccgccgacccggcgccactgctgctagccatggcggaggccgagggaggcgggcgaagggcctgacccggaactggagcgccttcctttctcctgggcaatcacaccgcgcgttcccggctcacgccgggcaggctccgcctctcgcgctgatcgccagcgtgaggctgcgttgatttgaatttggagccgcggtactctgggcggaacgcgaagcgaggagttgccattcgaatttactacgcggcctcgctatgattggctggttcgcggacagcggtacgacgtgattggccagtcgcgcacaaggcccgtgccctggttggcctgagacagcgcggaagcggggagttaaagagtctgtgcctgtcgtgggagcttacccggcaccgtcgggagcgccctggagtcgctttggggggggcttcctttttatacacacaactaggtatgttctttgtgattcctggcctttcctcctgtctcgagttggagaactccctttgcccggctctggaccagctgcacgctcgcctcgggatgaatgagagctaccggggagtgggtgcggaagaggggggcccaggaaagagtgaccgagtagggatgggaaggacactggcgtcagtgtcctcctttgcccgtcacccgaggaggctagctacacatcagccttccgtgagtggttctttt

SEQ ID NO: 48689 - DNA, 1247 bp, Bovine  19866880454972
  misc_feature (1)..(1): n is a, c, g, or t
nctcagctgtcatgccctctccacacacttcaggtaagctggcccaaccccaggcttccctggtggcttagctggtaaagaatctgcctgcaatgcgggagacctgggttcgatccctgggttgggaagatccccagctctggagattgcatcttgattagttccaaccagtcaaggaggtcacgtggctcttgccagttattgattgaaagatgggtatgacccaattcaatgagcagaaggatgctgggggcttctgggagagttctctcattgctcagggagaaatgtggggtgtatagggtgtcaagtctggatgcggtgcctggatcagctctaaccatcccagggggatgagagacaccagactgagggcaaaggaaagtttttagagacaacagatgggaaagaagtaaagaactttggtcttagatgagatttgtccatcatgttgaccaaatgacaacctgccttacaaccaaatattctgaaaaagaatgaaatacccagcaggtggaaattcatcacaatgggcaaaagaaatgtcctttgttcaaatggctgcgatggaatagatgcaggtagatctttacttcccacaggttggaagcagagactatgccagttggatgcagcagaaacacggtcaaatagctggacatttttttttaaatcctcaggctctgtcttttactgttgccaatttttcttttcctactacaggcacagataatataaagaccttagaggtttgttgtaaagatgcaatgaggtgttttatataaaggccctcaacagtgcaatcaaccagcatctcctttcccctgtcatttcttcacaatgacaaaaaagtaccttttttctgtcatagaaaactgactgtatgtaggaatattataggaaagatgctgactttacctgattttaccacatttaataggaaataaagtactttccagtcatgagattctatgactttgggatgactttaactgcaatcaaggcatgtgttcagttgtctgagatctttctctatttatattgtagaacgtttgccctacatgaagattaatagacagaccataaggagtacagtatgtctactcatgcgatcctagagttaacaattagttatcttcttccatcaaaattataatttgaagacttgtaccaggctatgtcaacagggcatgaatgattcacatgaaacacactgatatgtcttagcttgagcaatttaaaggttt

SEQ ID NO: 48690 - DNA, 2686 bp, Bovine  19866880589874
  misc_feature (1)..(1): n is a, c, g, or t
ngcatgtgggttattttgagctaaaagcaatcaagaccttgtgcggtcaagagaaaaatatcagttcagttgctcagtcgtgtccgactccttgcgaccccatggactgcagcactccaggcctccctgtccatcaccaactcctggagtttactcaaactcaggtccatggagtcagtgatgccatccagccatctcctcctctgtcgtccccttctcctcaccttcagtctttcccagcatcaggggcttttccaaggagtcagtttttcacatcaggtggccaagggattggagtttcagcttcagcttcctcctcccttaacgatacagaagaatttaaattgggggcttttctgggccaatccccagaagaattatgagcagaggtaagttttacctgtatggcagggcaaacatctgattacccagcctctgctcttcttcttgtcccctgaattatgacccccgccccgtcacatcccttagctcaggatggcatatgtatcttattttacctttctgtttttgaacctcatgtgtgtgggcttgtgtacatgcaaaattaagcttgtctttctcctgtttttctatcctctgtcaatatgattattagatcagttgagtaagctttgaaggtataagaaacacctttctcctcaacactatcttaccataggtgactgttaacctctgttcttgagttttcttaggtttgctcttaattattataaagtgtaggaactgccccatgcagaaaacaaataaaagaaatgctttatctgatgttttcagggaagtaactgtattcagattagcattcataagtgatgaataattcagaaataatcaccgtttccattcatattaatgcaaattagccccaaagattaataagccccatgggttcaggatccaaaagaaattggttacacataaaataaactgcactctgagagtagaggcatattagtgataattaaaattatgacccaaaagcaataatattgttattctctgggttcttaatattcacttccacaggatatatcataactaggataagctaggaaaatgtgggaagtctagtgaaaaaatcacacactggttaaattatgttgtaggacaatggattttaaattttatttgcaaatttgtgtttgctttcatgaactagaatctcataaactcaactttatgaatgtgaaaggcctactccgattagcaaaaacacgtatactttaaagatttttaaatgaggacccaagtatatgtagtaactacaaccagaataacaatgagctgtcttttagaaggccagagggaaacctatttttaatgactaggagagaaggattttcaattagcatattcattacttgtatgtaaattgatgattccaacagctgcttaacggtgttaaaaaacaatttgttctattaagcagtttaaacattcttcttaaaaatcgtgtttacctgtttgatttgctgaacaatgtctttcttccttcggagcactgggcaaggaaggctcagatggctcatcagtctcccattttcccactggtgagatccttgaacaaacagggagacagaggccacagctcaacattaatatttgggttacttccggtgttcttttgttaaggattgcaacattctttggtttgggcaaggagatattttgcagcaacaaaggtgttctagacagcatcagaacttttctagtcctgaatcctctagtgagctcagaggaaaacggtggagacttcaagagaatggactttttttcttcaaggactatttgtgaatagtcagctgtggcctccacccaggtcctgatgatctgcattcccaggtggctcagtgggtaaagaatctgccggcaatgcaggagacccaggttcaattcccaggttgggaagatcccctgggggaaggcatgacaacccactccagtattcttgcctggagaattccatggacagaagcaattgagcacacacacatgcagatggatgtgtggataataaggggtggagagctgtccctgctggaggattccaatcatgagagcctttcatttcattcctaagaagacttgagactcttgaagagaaaaccaccctgtgggctgctaggatttgctctgggatcgctcatcatctctccgttcctctccctgcaggaaaccatggcaaaccatcccttgccaatttctgttggcctggaagatgaatcagtattaggtcaggacaggatttaaatcctctaaccaccacccacacctctgccctttcctctgcttgtccagtgatctagaccagggctttgcaaacttcactgtgtacaggaagctgccggagcaccatgttaaagcagattctgggacttctctggtgatccagtggctaagactccaagctccctgtagaggttcccaggtttgatccctggtcagggaacatgggcttccctggtggctcagacggtaaagcatctgcctgtaatgtgggagacccaggttcgattcctgggtcaggaagatcccctggagaaggaaatggcaatccactgcagcactcttgcctggaaaatcccatggacggaggagcctgataggctacagtccatgggaaagcaaagagtcagacaggactgagcgacttcactttcactttcac

SEQ ID NO: 48691 - DNA, 932 bp, Bovine  19866880675158
  misc_feature (1)..(1): n is a, c, g, or t
ntagacacgtttaggtcgtttcatctgcatgcctcccttggagggagcacgtgcctggattattaatgaattctgggttacattggagcagcatctaattcccttcagcgtgtgcagggggacaacaggagcaaagaggagcctggggagatgtgtgccatgtggagtcctaaatgctctttgttgtgagcctgggatttaaagagaaagtggggagccctcctcactccccgggagagcctgcctccttgcaggatcagtatgaagactcttttgtgtcctgcagaggcaggaagggcagtctgatcccagaccactgctcacagcagcgacttccccataacaaccgaaatactggctacaatgcatgcccccttgagggttcagtgcctcctgacagtaaaaccgaaaagggtccccttcctgtttcctgacctttatttccaaacagaggtatataagaatcttgtgttgcctctcatggtgcctgctgtataattaatgtcccaataatggatgtatggatgtccagatgtattcatgaataaatggaaatatgaataaatgaatgaaaaactaagctctcttcatcaagtcatacataaggcacagtcagatacctgggcctagagtctagcctctgagcagctcggaaaggcttctggaatattttagttgacttgaacaaactcagaatggcaatgcttgtcatgcttcaagcagcagcataaaacttgattaaacagccggagctaccaaggaaaatgtcagtccacataggaggaaggtcttagatgtttgcttatgactctccaaatgtgaagcaattgattgtggtcgctctgccattttccctaactcatgtgcccatctgtatccctttgaacaagtccaaggactcctactggtaaggaattagcatgctgatcaat

SEQ ID NO: 48692 - DNA, 1760 bp, Bovine  19866880871218
  misc_feature (1)..(1): n is a, c, g, or t
nactgtgaaaacagctgacatggcctcaagtctgataccgttcagaaaacaccaggtctacacgatggagaaatactgctgctgctgccgctaagtcgctcagtcgtgtccgaccctgtgcgaccccacagacggcagcccaccaggctccccatccctgggattctccaggcaagaacactggagtgggttgccatttccttctccaatgcatgaaagtgaaaagtgaaagtgaattcactcagtcgtgtccgactcttagtgagcccatggacggcagcctaccaggcttcctctgtccatgggatttttccaggcaagacgactggagtggggtgccattgccttctccgggaggaacagtgtctgaaagcaaatccacaatggccgcctggccccctttagggtgtctgaacaacagttactccattttgattttttaattgatcttaaatatgtcatcactatagatttttcagtcccccaagccttaattttagatgccctaatgccatttcctatcatctaaactacaataggactggcataatatcaacattaataacagctgaataaatgcttgatacaaaatgttgcaaggcatccctagaggctcagatggtaaagaatctgcctgcactacaggagactcaagttcaatccctgggtcaggaagatcccctggaggaggaaatggcaacccactccagtattcttgcctggagaattccatggacagaggagcctggtgggctaaagtccatggggtcccaaagagtcagacacaactgagtgactaacttttacttttcaactttctttcagaaaatgttcaatttttatttcctcttcacaattgatcagtagaatacagcagaaatggtgctgtgccaattctgagctcagcccttcactggcctgaaagctcccactttcttcttggaatgtcctttgttggaagtcagatgacatgcccctggagaagaaccagggccccccccggtcactggaactctgagttcccagtccagccgccagatgactcgagcctcctaggacctaatctaatgtcacatctgataccatgtaaagcaaaagaaccactcagttatcctacattgtgatgcaataaattatagttttaagctaccaatttgtggggcagcttgtttcacagcaatcaatagctgaaatagttactgcaaatatacccattttacagatctagaaactgaagcttatgagaatttaattgtgggtcacatatcaaggaaatggtggaataaatatctgaacagagttctaccaaattacaggatccacagctgaaaacgctatgccagcttgtgtctcatcttaaagccaagtcatcagcgtatgtttctgcaacatttgaatttggatagcattttctcctatgaagagaaccgctaagcttacacaggcattacaaaagtctgttctctttaattaattctacaattcctagaagtatttgacaaataatgtgtgctaaatgtactcagatacttcacatggattacaaacaaaaagccagaaacctagaggaatgttcttctcttctcgtctcgctggagctctttaattttctaaagcctaaggcagtgacgtgcagcctttaaattcccttgtccaccttgtcagcagtgcctcagacacctgtgcattaaattagtgagatattgctttcaatctacacttagcgtttccaagtttttatcatctagaaaaaggcaccg

SEQ ID NO: 48693 - DNA, 1881 bp, Bovine  19866880948361
  misc_feature (1)..(1): n is a, c, g, or t
nttttggcccctgatacaaagagctgactcatttgaaaagatcctgatgctgggaaagattgaaggtgggaggagaaggggactacagaggatgagatggttggatggcatcaccaacacaatggacatgagtttgggtaaactctgggagttggtgatagaccgggaggcctggcgtgctgtagtccatggggttgcaaagagtcagacatgactgagggactgaactgaactgactgaactgagacagaacaaagtttacataaagaaaataatactgtaattcaagtcataaaacttttgtttagtaagctaatttcctaataaaagaagcagagagcttttatttacctttttactaattcctgccttgtttgcatggacacctcttatctgtttgatgctagggacttaaacatctgacacatggctccagccttgagatgatcacgtgtgtgctctccatgaccatgctagtttgttgatcacccaccttgaaagagtttccatggagcactgacaatgggggagccaaaataacccttaggtcttcctgtgagttaggaaagacaatttggggagggtgttggtgacagaaacctacaagcaaggagaccctggctacagagatggagatgcccggcaggacctcactgagggccaccagtgggtaaggaatttgacggaaccctgagcagctaagcatgaccgaaccagaagaagggggtgtggcagagggcgagactaatgacacaggcaggagaaatgataatgaacttggaggctgtacagggaagtcaagatttttaatcctgaaccactgaagaattctgagcacgtatgtctcacatttgcaggttctagggtcatttccagctgctgtgctgagaagagaggaattagagagtgagcctttcaacagaagtccagggttcaggtgagaaatgaccgtgttccgaaatcaagccagcagtggagggggcctgttagtgtggtggggactgttaagagagccacagggaggtacacttggttcaatcaggtgattcacatgcaagagaagaatatgcctttcaggttctttcattttgaaaagatctccctcgctggaatcgctgcccggcttctcgtgtacaaaggtgtgtgccaggcataccccgcagcccacagcttaactcaggcttgattgctggtcaaactccctagcaaatgcttctccacgtttgactctgaaggaattgaataccatcgctcacagaagcagaacactggccacgtgtgaatattgcactcttcctcctgggtacgatctctatttttattgaacaactgtcagtagaccatgcagcattgccaacaacacgctgaaaatagaatgaaggcaattacctcagcaaagattaacgcagaaagtaaaattgcacttatgtaacgctcatcttccaggcacggagaccagcccgcctctggtttctccgtctgtctccgcatgggcatcgtagtccaacggcaccaccccggaccacaccggaagaaacaactgtctccgcccttccctcttcctgtgttcgctgagccttttctcagagcggcccgcggaacacggtggtgctctcggggatggtcccctcaagacgccgccagcagatgagagagaatattagccaagaaggcaatggcaccccactccagtactcttgcctggaaaatcccatggatggaggagcctggtaggctgcagtccatggggtcgctaagaggcagacacgactgagtgacttcactttcagcttctaacaccatttccgcactcttctgctgcttggcaattactcgtcagtgaacttcaggaaaatacttgtgttttggagaatgtcaggt

SEQ ID NO: 48694 - DNA, 915 bp, Bovine  19866881023876
  misc_feature (1)..(1): n is a, c, g, or t
ncctggggactcagcaatagctctggggacaagtgggaaggattttttagggaaagagggcgattccttaaatacaatgagtttaaaggtctgccatccaaaagactaggaacccagaatagtcgagtggtagaaatattaaggatatatgtttgttttcatacctgagcttgtgacctgaaaaaatcaggacctcttattaactcaaaactgaggttccaagacaaagtgaattgccaaagatcttcaaaacagttacttgcaaaagcaggactcacactcaggcttttggacatcaaccccagtgttctttaacttaacactttctccctgcaccctgttaggaaactcagctaacactgtgcagtgtttggcacacagcaggtgctagataaatgcatgctagtgaatgctaattgactcatttattgcatccctgaaggtccaattagctgcacacacaaggctgaaaggctttaatgctgggttttaattagcaaaccaggatgcgccgaagtgccttagagaaagggagagaggcagctgacaccaggattttaaatgatcagaaccactgatctgtttacacacatgatgccagaatctcactggtgagtgtttacagaaacattgttaacagccaaagtgctgggcatagagctggaaccttgaaacggcagtgctgaatgtccatctctttcctgtgaggacacccccacctctgagctcagacacgggactgctcagtttcgaggctattttgacattagcatccctccaactgtttacctccaagccttgaagtctgggaaccagaccaacttattttatatttcaaatgcgaagtgtttagcataactacattgattcccaaagtcaattctactttaactcacacacacaaacacacacaaa

SEQ ID NO: 48695 - DNA, 1062 bp, Bovine  19866881077556
  misc_feature (1)..(1): n is a, c, g, or t
ntgcaggaagaatattggagcaggttgccatttcctcctccaggggatcttcccgacccaagggaatctaacccatgtctcttctgtctcattcattggcaggcagattctttaccactgtgccacctgagaagccctagagaagtcactaaaataaaaggcaacttcccttccatgaaaaaaaaaaattaagaaatgaaagaagtatttagaggacaagtaaaggaaatactaaattatattgaaaaaagaaagtaagaacttaacaaattcattaccagaaatttggcttgaactaaaaacaaagaagctcagaaaagttcttggataggagacccataggaatcatcattaagacttccctgatagctcagacgacaaagcgtctgcctacaatgcaggagacctgggttcgatccctgggtcgggaagatcctctggagaaggaaacggcaccccactccagtagtcttgcctggaaaatcccatggacagaagagcctggtaggctacagttcgtggggtcgcaaagagtcagacacgactgagcaacttcaccttcaccttcaggaatcatcaacctcagaggtcttctaaatgttcacaaaatctgaaatacatgttagggacatcaagcacaccaaaaggtcccctggtgacaccgtcagaaaagcagtgtatcacagactgatccctgcactgcattcatagtttcttggacacagaaaagaataagcgagaaaaaaaagacagatttttgatgttttatgtaaagcataattgctttcaacatcatggtgtttatcttggcttatctgaatgaaatttgcctttgttcaggcttcgtgatcactgcaagctttatgattaaaaccagaagcaagtgaagcatgagaatcatattgtgatgtacagctggcacttgctcacacaaagcaggacatgactgctggccttcagggatcttctctggttcactctgcagatgaaaagctgaaaacagagctgtctagaagacttagaacacagacttatggttaccaaagggaacatgtaggggag

SEQ ID NO: 48696 - DNA, 3957 bp, Bovine  19866881078244
  misc_feature (1)..(1): n is a, c, g, or t
nttgggagctgttttttttaaactactaaggtcagaaatcctcccagaggttctaattgagtagacatgggggaagggcccaagaatctagattttaaaacagaaagttccttaggtgattgaggtgtgcactaacatttgagaagcaagtgcgtggtccctaagctccccttcagtttcatgattccaagaagataagggccacggagggaaggtctccacaatgcctcagtgaacttgacctcccctccatctccttgtgtttcttcaaggtctatcaaagtcaggcaccgtggagagacctttacagaggttatctcacttaattctcaccacaaacaaatagagaaggcctatcctgaggtgcctgctggacttgtggaaactgaggttcagagaaggtagatgacaacttagaagcagaaggaagattcaatttcagattgtctgatggcaaagttggttctgtccaccaattctctcttctgtcttccacatactgttctgcaaacaaaagagcatcgggttctaagatacataaaagaatgtatcctggaaaaggtagaaagatgataaatcttgtttttcccttcttatcggccccctcctcagacccatggagttctgcaggtttatcctgccttctgacacattagtgacacatatgtttttttcaccctttctactctttgtattttgttttttaaaatctattggattacagttgatttacagtgttgcattaatttcaggtgtgcagtatggtgattccattatacacacatacacacactcacacacacactcattctttttcagattcttttcctatttaggttattacagaatattgagcagagtcccttgtgctgtacagtaggtccttgttggttaactatcttattaatgtatatatagtagagtgtgcatgttaaccccaaggttctaatttattcctccctgcatgttttccctttggtaattgtaagtctgttttccaaaactgtgagtctgtttccattttgtaaataagttaatttatttcatttgttaaaaattagattccacgtatgagtgatatcacatgatatttgtctagttcctttagttcttaaattgtcaaaaccttcctggatctttgccttttttccaaatcaagactaacactatttctgtggtcccttgagagctagtttgtttgtgtagaagttacctgaatggattgaaggggagaatttgtttcaaggaatagtcccagtagacagagcccccacgcctttgtcctcacaagcatcctgttcagagaagaatccataataagatgcatgccacataagtgcggttaggaatatataggaaacacatatgaaaaacctgcccagctagtcatatcataatgtgaacaatgcttctgaaaattctgctacagattgagcacagtgggcctggttgcatatcctctctttgaggttagaataacacaccatcaggcaattttctgggcatcatcaagcaattgcccagaaaatcatgtttttcagctataactataccacgtctgtctgtccgtctatctatctatctctcatttctatggacttgaaaacacttgagctggaattctaatttcttcagtatatctggagatattctgaaaatacctataatcaccgtggttttaaagcagatattctggaactatctacaatcaccaggtttttaaataaagcttcattgatggagagagccagacagagagtgacagtcctgtgacacagctgatggggaaaccaaggctcagagaggctgcagagagtagcagaagtcacacagcagcagcagcccgtggctggggtggcccagggccaggctctgttcttcattcctgtatgtatctattttaaaatgtatgttctcagatgggatttaatcaagacactgtgtaaaaaccacaaaacataaataaggaagtaaataaataaacaaagcttcactgaacacggagggaaacctctcctattgtttgtcagctcttaacccctctcatcccagggcctggagaccaagtttcatagagctgatgaccttggaaacacaaatcatacaaatcgaatggctccttcattccaagtgcaggctgagttttatttttttcaaagcttcttgaaaacacattaaatttaaataaaatctccaggcaggctgttcggttatgtctgaccttttggtaaacatgatgaatggagttccagtacaaacgctgccctcggtacagagttctgctagctgcaacggtgggcctccgggcagaggcgaagtggtcttcactgaactgtttcactgggggtgcaggtaggctgtcagtcaggagcagccttgccagggttttcaataaaccatgattaggctgtagagttcttttcaggctttcggctctgctcgcatttaaccgatcacattccctcttcacagctgcttctcacagaacatctttaagctcttgcgggagacagagggaggtttgaatgtgatccaagcattgggtttccattaaattcatcgaggaacaaaagaccggaggggggaggtatatttggtggagactgggtgcactgtctgatttccgtgttctctgggaaatcctgcttctttctggtcacttaataagcaagtggggagctgtgtcttggggaggagcctggcacagctcagaggcttgggaggttagcctcaaggcttctgaggaaagggaggggcagaccttctgtttctctgggcattggtttctttatctttataatcagggtggtggagagaaaattctggctgctttggcttccatgattctagtatagaggttgacagattattttcctatggagggtgaggtagtaaatattgggttggccacagcgttcgttcagattttctgttccatcttatggaaaaacccaagcgatcattttggccaacccgatatttttgacttgtgtaggccaagaggcacaatcaaggatcttgcataggtattatagaacaagagggcaaagaaatgcccatcaattttaactgagacattgtaaaatataccactagttatcaagtataattttctttcttttttcttttttgtaatggaggtcttctaatgaggagaacagaattctggtatttatttttttgttgggagtggataacatcttgcttcagtgggattcaaacttagtcttctctgtcgtcagagagattgcaaatattgatctgtagaaaccgttcttgggtcatgcatgcgtgctaagttacttcagtcatatccaactctttgagaccccatggactataacccaccaggctcctttgtccgtgggattttccaggcaagaatactggagtggtttgccatccctcctccaggggatcttcccgacccagggaccaaacccgagggtttcttgtgtctcctgcattgacaactgagttctttaccactagcgccaccgggaagcctgcttggcttctgggccgtgtggaaacaggagtgggcctcgttggggccacaggaagtaatgtgtcggtgtgtctggtggtgcagaaatgcccctgaaggagttgacaaaggaactgagttaaaaagaggcatcagacaacacaaaaaggaaaggtgttccaggcagacgggaacacgtggaccaaaacatgggagcagttgatggcttatatctcaggtcaggacggcagtgggagctcaggatggggagggcatgggctctcagtgaacacgtcctgcggcagaagccacaccagaaacaaaatgcagcttccaataccagccaattaaaaattatttttgtctgctgctgctgctgctaagtcgcttcagttgtgtccaactctgtgcgaccccatggatggcagcccaccaggctccccagtccctggattctccaggcaaggaca

SEQ ID NO: 48697 - DNA, 1871 bp, Bovine  19866881080756
  misc_feature (1)..(1): n is a, c, g, or t
nacactgcccaggtgacaggtgacacagtccaggtgacgggtgatgcaggtctgactgtgacccactgtggagacatggaggagagacatcactgatgaaatattcagggaacagagatcatacttgagactgacttcaaaaatagaatctaaaatgccttccaaaggttcaacttggggatttccctggtggtcctgtggttagactcacacttccaacacaggccgtgtgggttcgatccttggttggggaactaagattctgcatgccatacatcagggtcaaaaaacaaagcattaagaaagaaaggttcagcttgagtaagaggaaaaacaatggcaccacagagacagaaatctccaggtgatgtttccacttctctcctctgagcatgtctaggcctcctctcctaggctcctcctctgatactgaggtttctctgaccttcaggatgcccccacaaggccggggaagagttcatgatccaaacccctcaccctgccctggaaggtcccacactaccactggactgctctctgcccacttcacggctactgaacagctgagaaccggccagagggaaacctacccaggaggaaagcaccttcacaattcatccagagaatcccaggaatccaggcagggcttttaggagctcgtcaattctctttttctagctggtagctaaagggtgtagacagagaagctaagggcatgcctttccatttcaaatcatttctttttaaaattatttatttatttttggctgtgctggggcttcattgcgtcacccgcgctttctctagctgaggccagcggacgctactctctacttgtggctcacgggcttctcattgttgcagagcatgggctctagggtgcacgggcttcagtacttaaggctcccaggctctggagcgcaggctcagtagttgtcatccataggcttagttgctccatggtacgtgggagcttcttggactagggatcaaacccctgtcccttgcgttggcatgcagattctttaccacaaagccatcaaggaaggccttaggtcatttcttagtgctgtgggaggagcattttccttgaccttaggctgtactacttcactgctgcttcagacccaagtctttaattgctacagagggatccctacccttgtcccaaggggttggtggtcttcacagcaatttgctatcccagaagtgactctatccatcttactctctctgatccaaatgaacatcacagctggcagccacagcagaaagtggctaatgaactagctcacaccacggtgtaaatggctttgaataggtttagctgtctcacatgaagcaaaaaaattaatccaaagaaatgaatatattatgcggagtttcagatccacaggactttagtttgaaatggaaaatacatctttttcttttctgtgtgtgtgtgtgtgctcagttgcttcagtcgtgttcaattttgtgaccccatggattatagctcctctgtccatgaaatttcccaggcaagaacaggagtggttgccatgccttcccccaggagatctttcctgcccagggatcaaacccatgtcttctgagtctaccgcattgctggtgggttctttaccacgagtcactggggaagcccttcctttctgtttgtgtgtgctaaatcacttcagtagtgtccgactctgtgtgaccctatggacttcggcctgccaggttcctctgtccataggattttccaggtaaaaatactgaagtgggttgccatgccctcctccacgggattttccagactcagggattgaacctgtgtctcttatgtttcctgtattggcaggagggttctttaccaggagcaccac

SEQ ID NO: 48698 - DNA, 771 bp, Bovine  19866881125871
  misc_feature (1)..(1): n is a, c, g, or t
ntagtgaaagttgtcagcccgtgatccatccctttttggtaggcctgcctcctcacgaagctgaatgcatgaaaatcctcccattaagctcacccccacacacacacacacacaattctcccatctcttaaaatagctgtaaaagtcctctgtatgcttttctcctaccacaaaaatgagactaacacccacgaatcttaaagaaatatttctaaagtaccatgagtcagaggagtgagaaattatgtatacatgttattacagaaatgtctaaaatgattaagaagggattcatttcagcatcaaaaatctttacagctttccaacatcatggaaaagttagcagatataaaatacattatgacatttctcagaaaataaaagagaggaatataaatttcaaacaaatacgaaagtgtcaccaagaaaaatgtagagcaaaagatttaaaatagaactcctgaaactgaaaaacaaatcctttgtgggccttggtaacagtaatgatgatattcaagatgattaataatagagtcagcactcagagagcgtgcttaccaagcaaggtattcagggattatgccacctattagcggaggcagaatttgaatacttcttttaaagaggaaaaccatataggaaaatcaatcctgtgtcttgtcaagacaattgtcctctcttttcattcatagctttgtttattgtaaacaatgcagaaatgaagcagctcactgttaaattgggtttttgtttttctttgttatactgact

SEQ ID NO: 48699 - DNA, 1082 bp, Bovine  19866881286419
  misc_feature (1)..(1): n is a, c, g, or t
ntggcagctgattgttgaaatcaggggtggggtggggtttatgctctctttggaggatgtttctcttaatcgggcactttaaattgccagcctcttagaaacgcatgccaagccctgtcaatcatcaaatagtttttgcccatatcagcttccctgctgaagcagccaccttgactggttaagatcccaaatgggaccaacctttccctccaactcttcccaagaacagtctttccatgagccaggcacttgtccacacagaggaaatccacttgtcaatagtgccatgaaaatcttagatgagcttcattgctatgatgtgcagatctaatatcaaaggcagtcattcctatgcctctcgggttcctatatttagccagcaccagtctggggagacaacagacaacactcagagcccagcttatctgatagaacaacataacctttaggtctgataatcatgccaaatattgaatgcttaaaagcaaatgttattctaattaactgcattcacaaatgacagcagcttctctttctaaagccggcttgaagattttccctcaagactcaaataataataataataataacatataagcatagagccagttcacaccagatgccgggaagctacccaagaccttcaaagttcagcagatattgttgtctggtttatttggtagatcatggtgagagtgtagacaagccacagagcccatgaccaccgtgatcctgcctgggcagattcccaggaaaggattgttaaccaaactcaggtttagctgctctccactcaaaaatcaaccaccaagaggcaagtgttggtagaaaggaaaatgctgcttttaagtagaaaaccagccattgggaagaaggcagactcagtgtcctccaaaaccaactctgaagattcagttcagccgtgaacgtttctaaaggaaaaagagaagtaatttcatttaattgctgagatggggtgggggtggtcagagtcatcaccaccagaggtttgtgatctttctttagactccgttttgttcacacagtttattcacaagattactgaaggggaagctggggaa

SEQ ID NO: 48700 - DNA, 760 bp, Bovine  19866881368215
  misc_feature (1)..(1): n is a, c, g, or t
nagagctgagctcaactgtacagcgctactttaatcatcgggaaaggggtttcttctttcctccttccttccttttttttcaaggttataccgaatacaatctcactggcaaataaccatgccaggcaggcaatgtaaaaagagtatatacttctgtttgaagtaagctataggaagtgagacaggcaattaaatacaaatcctggcatccagcttgtttcaacacttttcgtattttgcatagaagctgccacgtgttgagaatttattaaatgtgaaggcttagcagcccttttatgcacatgtctttacctgaggttcaggttaccatctgaccattctctttgacaaaaatctgcctctgtaaccaaaccattcacgatcacataaaagtgagggctggtcacccaccccatctcatcgtatcggagactattgttcaggccttccagctggctttcggggtttgtttccctactggtccttgtgttaaaaattgttgagctttcccctgaagaaagaatttgccatttttcaccctagaatcacacatctttccaaatgaatgagttgtgaaaatgcatactttccagaaagaccctgaacacgtggtttcagtgtcttttttttatgatctcacaacctattaatcattatatgttatttgtaaccaaaatatatatgtaatggaatcgttatatattatttgtcatgaagaatgtttctgactgcatctgaacgcaagtctacatcttcccta

SEQ ID NO: 48701 - DNA, 1420 bp, Bovine  19866881402778
  misc_feature (1)..(1): n is a, c, g, or t
ntcagcatagaattttgcaccaaggaggaaagcatcttgcctttacaccagcaggaacttttcattgtgacactgttgccatgggaatgccacgctggattgtgacacttatcatctctctctcactttctattataaagtgagtacttgggattccaagccatgaatatgtgtccaccaattgttaatctgtaaactaacctgccaaccagcttcagagcagaactggtactctggccagcggaactgttgttccctttgtttttgaaaatacaaagggaaggaagtgatgagacagtcatcgatgattaaaagaggtcatttactttccatgccttgtggctttggtccaaaggcagaaagtgaaaaggaatgggatctgcccttgcaagggatgaaatctactaatgatctcccatgtttcccagtctcatccagcatttttcagctaatcctttgaaaatattttctgaagccagtctgagtttttacctgtgggagagaaatatcctgtcggtaaataccaacattatggccactgcatgtatttaaagacagagtgcagggtgcctcatggagttccgtcaattgcgtgtaacggttttcagaagtcctcattcttctggaagctaccaacagacatgcacattcaggccttcagtggaactaaaggggaattcatagaaaccagaactgcacgaaggcaactgaaaaattgagcttcccaggtagctctgggataaaaattctgcctgccaatgcaggagactctgggtcaatgcctgtgtcgggaagatcccctggagaaggaagtggcaacccactccagtattgttgcctgggaaatcccatggacagaggagcctagcgggctgcagtccctggggtcgcaaagcatcggacatgactgaaacgactgaacaggagcacaaacaggaacagcaaattttaaacaaacttgtttgtgcaaattggcccaccctggctgcagacctgtcccttcatgacaactcaatttcaggaagcagctgcccatgcaaactatgttactgaattggatgaacatctattttctattaactttaatgaaaagattacctttaattgcaatgtgccaatgtgttactatccatcaaggctctagtttaatagacttgttctgctgtgatcatgtgtgagcatcttctttcaaggaaggagccacatctcagtgactgtttttaaagagcatctggaacaataccctgagaaaatcatacgctaacaatccttatgaaaggtaatgtttctacaatctgctttgttcagaaaaaagtaaacccaagagtaaagtactgttaccaatatcttgatatcatgggttctgtgattattccatatatccagtatttttcccctgtagaggattatatatccttgc

SEQ ID NO: 48702 - DNA, 1694 bp, Bovine  19866881583782
  misc_feature (1)..(1): n is a, c, g, or t
ntctttgtgaccccatggagccgccagggatttcccaggcgagaatgctggagtgggttgccacttcctactcgaggggatcttctggacccagggactgaacccatgtctcctgcattgcaggcagatcctttgctgagccaccagggaagcccccaaaatacacagacactgctatatgcgaaatagataactaaaaaggacctgctgtgtagcacagggaactctaatcaatgctctataatggcctacacggagaaagaagctaaaaaagagtggatatatgcataaccgattcactctgctgtacacctgaaaccaacacaacactgcaagtcaaagtgaaattggaagttgctcagtcttgtcacactctttaaacccccatggactatacagtccatagacttctccaggccagaatcctgggaggggtagcctttcccttctccagtggatcttcccaacccaggggttgaaaccaggtcttctgcattgcaggtggattctttaccaactgagctaccagggaaggccgttataagtcaactcgactccaataaaaattaaacaaaacaaagcaaagtccgactgtacagtgcagagaacaatatccagtattctatgataaaccataatggaaaagaatatttttttaaagaacatatataattgagtcactttactgtacatcagaaattatcacaacactgtaaatcaactacatttcaataataaaaagaaacaatgagtagggaatttgtcaacaatgaactgacactacaagaaatattcaattaatttcttcaggctgaagggaaatgaaaatagatggataggcttttttgtttgtttgcttattttagagatactcttccatagaatttgaagttagatgaaagaaatttttttaaagcatgattcttcagcttaaaaagtacctagaatgtgctgaaaaaaagttgtctttttttttttttttgtggtaataattcccccaatgcaaaacaaacaagtaaactcagcaaatggaaaagcttatataacagcctttcagttaggaagatgtgaataatttccaacatttgtaacacttccaagaattcatgaaataatgctttaacattctgactcaaaagatagtagcaaaagataccaaacactgactaagccaaatgataaattttattttgagaaatatggaaaaatcacatggccataatgaaaaataatgacttaatcagacactgtcttgaaaagattcagagaaagaattctatgggaaaaaatgttttgggagaaaaattaatctgaagacacaaacaggctgctccttactcctaaaatagatctcaatttcaagaagaaaatagcctatttttctagtgttgtatctaagatattcagggcacacactagaaggctgaaaatatgagaaaggaacgtgtccggtgaccttttatactttccccaggaatttttttttctgctggcagaaaaacaaataaaagccacttgtataccaaggatgcaatcaacgacaagagataaatgtgtgcatatgtgctgaaaacaacatcactctcagctaaaaattaggtatgtcttacctatgcgtgggcttccctcatagttcagttggtaaagaatccgcctgcaatgcaggagaccctggttcgatttctgggtcggga

SEQ ID NO: 48703 - DNA, 1063 bp, Bovine  19866881662088
  misc_feature (1)..(1): n is a, c, g, or t
ncatataaagccccgtgggaattccgtatcccagtttctggatcctgactgtgctctgtcttagacacaggccttttgctggcccacagaggaccactcagtagcctccatcagatgaaacggagcacagttcaaagagcttacaagccttcctgccccttggggtcggggcagcgataggaaaaggcggagttctctctcctcctccggtcctctcctgccaacaagaacagtcacaggagcggcaggagaataaacagacttagtgctgtctacagacagctgctggagcactccgtcatctgaaaagaagcaagctgaaaatatgaatggctttgctgccgttcaaactaacgcagacgctgccccctcctcccttctccactcctttccccatttattttcctggtgacagtttccagagcttttctctttgattttcttataatgaaattcatgaaggagtgaacagagagattttcgaggagaattataagcttgacagacgatggctatttaggctattttaattaagtcctaaatgcttcaagagaacacaggacgtcaaccgccaccacaaagaaacacgggaagggtgtcagctttactgctagtgaaacagataaaacgcagtaacgccatcctgcccagcacgaatcttctgtcctttattcctcaggctgtgctcatcttgggtccgtcctgttccattgctgttgtcgcgtggctcgaggcagagctgtctaagaagcagcctccgattctgttctcatccctgggatctgaggtctttgcaggccgataggcgtctctggctttcctttgttggaacagataactgcatttccgagatggagggaaatctgactttgcaggccacacggaaagcttcctgggcccctctgatttcccccacagggcctgctgacagaggcctgctctttgacatcaaatttaaccatcgtttcactgaagaagccattattaaaacgatgttccctttctgaaattaaaaagtaaaagaaggaactggattttatttctcagtgaacttgccacatct

SEQ ID NO: 48704 - DNA, 2612 bp, Bovine  19866880362655
  misc_feature (1)..(1): n is a, c, g, or t
natataaatgatattacattgcatttttcttctctgtctgacttatttcacttaggataatgcctgccaaatccatccatgttgctgcaaatggcaaaacgtcattcttttttatggctgagtagtattccattgtgtgtatataccatatcttatttatccattcatctgttgttggatacttggattgcttccataccttggcaattataattaatgctgctatgaatattggggtacatgtatatttttgaattaatgtttttgcttttggatatatatccaggagtggaattgctgggtcatatggtagttcttgggagaaggcaatggcaccccactccagtactcttgcctggaaaatcccatggatggaggagcctggtaggctgcagtccatggggtctctaagagtcagacttgactgagtgacttcactttcacttttcactttcatgcattggagaaggaaatggcaacccattccagtgttcttgcctggagaatcccagggacgggggagcctggtgggctgccgtctatggggttgcacagagttggacatgactgaagtgacttagcagcagcagcggcagatagaggtttgtgtttcattaatcttttcaagagacctcttctcacttctgtgtctattttctacttaattgatttctactttgcttttattttattgttttgttccttttactttaatttcctcttcttttactagctccttaagatgaaagctcagatcattgcttttaaatcttttgtcctttctaggtatttccttttaagcattgctttagctgcattcctataaatcttgttgtattttgcttccattgtcattcagttcaaaatattttctaatttccttggggatttcttttttgattcatgagttatttagaactttgttgcttagcttccaaatgtttaaggatatctttttgctattgacttcttgtatcaaagatcatacttttattgtttttagagaatatgctttgtatgcagagaaggaaatggcaacccactccagtcctcttgcctggaaaatcccatgggtggaggagcctggtaggctacagtccatggggttgggaagagtcgaacacgactgagtgacttcactttcccttttcactttcatccattggagaaggcaatggcaacccactccagtgttcttgcctggagaatcccagggacgggggagcctggtgggctgccgtctatggggtcacacagagtccgacacgactgaagtgacttagcagcagcagcagggttaatcacaagagtccttaaatgaaagaagagggaaaaagaagactcagagagggagaggtgaccattgaagcaaggttgaaatgatgcagtgtgtgaaggattcaacctgctgttggaggctttgaagatggacagaagccccgagtcaaggatgttagaacaagcaaagaaatgacttctctagaatctccagaaggaatgccaatgccttgattttagcccagtgagacctgttttgaatttgttatgtggagagctacaaggtaatgaatttgtgtttcttcaggtggcttggtgataaagaatctgcctgccaatacaggagatgcaggagacgtggggttgatccccaagttgggaagatttcctggagaagtaaatggcaaccccctgtagtatccttggctgtaaagtcccatggatagaggaccctggagtgctatagtccaggggcttgcaaagagttgcacataattgagcaaccgaacacagaagaaggaagttactagatgtttggtaatttgttacagtagcaatagtaaactaataaagatccctttcagcaacagctgtccatgaaattatatacatatgcagtgtatggagggtcattggaaaattcccagttaggtagtgatgtgtgctgaaaggtggctactaatgatgatttgaatatgaaatctagagcctgctagagagaagacctgtaggagcagatccagtaaggaggggagacaggatactgaagcccatggaggaaaaggacagtggaaaagatgtggaggaagaagtatacttcatcatttgcttaagcttgaggtatttgaaacagccctaagtactttttctttgattggcagaatggagaatgttgacagatatggctttagaaggaacagaatcttagaattagaaagggccattgaggctgatcttgtaatgaatgtcagaaggcattctactgcatccctgaaaaatattagaatagcactagaggaaaggtcctcaccgcttcctggaacagcccttctattattggaggccttacttcttaaataattttacctgtataaaacaaattcagtcttctcataatgtgcattctttgatcttggtttcctttttaatggatttttgatgctcagaagacctcaagaccaacatctgttaatgaaggggatatgggcatgggatctggggcaaagttcagaactagagagagagagatcaaaaactccaaatcatttgcatatagacagaggcattcggattggggttggggggatttaaagttactataaagactgaaatgt

SEQ ID NO: 48705 - DNA, 1458 bp, Bovine  19866880395408
  misc_feature (1)..(1): n is a, c, g, or t
nttgtgccaaacagagagtgagaagatgtttgtgaaaatgcttaaaaaccaccaagtatatacagatgatcacctaatgcatggtgataatgggaacaggtgaagtgctggtgatacttgtcctcaggctgtgactatcattttccttaagttaggcaggagaggtgttaactcaaatattctctgttggaaggagaaaaaggggagacctctatcgggcacctactccacaccaggccctatgacaggtgcttacatactttgcctcatggaatcctcaccccggccctatggggggattgtctctgctatagattaaacgtttatgtctccccaaactcataggttgaaatcctaacccccaaggtgatggtatcaagaggtgggggacctttgggaggtgacaaggtcatgagggtggggtcatcatgatggaatcagtgccctcaaagaagagatctcacagagctcccttgatttttctatcatgggaggttacagagaaaagataccaagtatgacccaggaataaggctcccaccagacactgaatctgctggcaccctgatcttagacttccagccttcatgaacgtgagacataaatttctgttcatagattatcactcaggcactagtattttgttatagcagcccaaatggattaatataacctctgtccttagatttcagacccagaaactcaactcggtagaggttacaaggactctacagccgctcaaccagaggcagacttgaagtttaagcctctaactccaaatataagtctatcagcccctgtctccagccatgatgccatgaagaaaagcaaatgcagcagaacagtttacatgtggcaaaacaattagaaaaacaagggcagagtacagtagattgattgtttttgtcacctaatatccatttaccactcttccagttgaacagaagccatgcccagtgggcatattcagccctgctgttttcacttcccagatttgaggggtagaaaatgaagatcccgcctggccatcagcaccctgacctccaccacccacagggccagcttcaagaacagctgagtccacctgttcaaatgaaacatgtctgttctgcgctgcgttggcttctaaggcacacagctgtccccacatggtaccaaggctggcccccagcagttgcaagcatgtatccttccagccaagcaatcccaacagatactttattcttttcctcaatctccactttaaagtcctaggctgatttcaatttatctgctttggacaaacattctctttagaaccaataaggctgccagacaaaacacagaatttctgattctttaaagttcaacttcaggtaagtcattttttagcatggcaatattcaagacatacttgtattaaaaaataataacttttttatccgaagtgcaacttttcttgggcaccctattttgttt

SEQ ID NO: 48706 - DNA, 821 bp, Bovine  19866880448452
  misc_feature (1)..(1): n is a, c, g, or t
ntaaatttgctgaattgaatgtcccatgaaatctatgtatcatgtggggataaaatgccagtagtttagtattatctagcaaaatgtagataagtacatttgctgtaaaactacgttttattcattgtaccaaatgaaatgaggctaatttataaagaaaaaattgaaatcacaaactgatttgatagatattcttttcaacctgattgtgataacttttctttagctttctctcagctttttgttatctggtttcacagcttcaaagtcccacttgttaaatacattttttaatattatttacaaagttattataaatcctatatgattgaaatcgctacagttgaatctttcattattctcatagcaggtagtatctgttcatctttatcattctgaaagtatctctttttactaacatcaatagatacttctcttgctctgcatgctgttttagtgaatgtgtcagatgtcattctgttcatttttttttcaactttccttcctgcaccattgtcccagagtctctcttgtttatagtcttgttttagatttgaagtgtaatctgcatatacttaatttatttaaattatttaaaatcataatatgttaatacatagatttttattatagaaagaaggaaaatttcttgataatcaatcgtgtttggacttatggaaagagaaaaagaaagaacgtgaaagtgtaggaatttattagttggctttcattcaatggttaagatttttcttcaagcactatttgaaagatagatgttttatcccagggtatcataaaagtatgatttatgatttagaaag

SEQ ID NO: 48707 - DNA, 2170 bp, Bovine  19866880457942
  misc_feature (1)..(1): n is a, c, g, or t
ncagtagtcatgtactgatgggagagttggaccataaataagactgagtagcaaagaattaatgattttgaactgtggtgctagagaagactcttaagagtccctcagactgcaaggagatcaaaccagtcaattctaaaggaaatcaatcctgaatattcattggaaggactgacgctgaagctccaaaactttggtcacctgatgcatagagtcgattcattagaaaagactctgatggtaggaaagattgaaggcagaaggagaaggggatggaagagaacgagatggttggatggcatcaccaactcaatggacatgagtttgagcaaactcccaggagacagtaaaggacagggaagcctggttgtagtttatgagtctcaaatagttggacatgacttagtgactgaactacagcaaagcactgaaataaataagccataatgccttggttgagtttgggaagatgatgatggatagttgcctcttctgagtataaaaatgttatcacttatcaagaaatcaatgaataatctaggcaaaccacctctgcagtcctttccctgcaaatgaaatttaggaagcaggtggacatcggaacaaagaagctctaatatcaaggtcaaataggttctagagagctcttccgtccatttgccctgcccaccttgttccttttcacacaaaagaatgacacttttcattgatccaagaatattcagttttgagggtgttatttatccctgaattttgagtatatgctgttctggaatgcccgatttcctccttcttcctaatctagctttgcttttcccatgaaacccaaaatcatatcacgaataaaagatggtgagagcagaagaggaaaggggtaaaggaaaaaggatgtagggagaagtgatcaacaatgagagattccagcctggaaacttttgtcttgggaaaacttttccatatgttcaagaataaaattacactcatttatttatctaggtcttattttaaagaaaagtgagtgtctatcctccaacaactggaatgagccagctcattttccagctgcatttttttaattaaaaattattattagaatcacttgatttacttttagtattcataaccaacatcataaaaaggctcagatttgaacagttaatggaaataattagagaacaacttccagatttcttttaattgcttgcatcctattaatcaagcagcaatattgtgaaatattggtgtctaccactactgtttgtttaaaaacccatgtcaccattttgttttattgtttatgcggaacattttgactttcagagagaagagattttcacaaatgccagcaaaaatgctttgtgaggcaagattatttggagctgaaagactaaaagtgtggcttagagagacagttaagtatgccttaaagaaactaaaataagtattccatcaccccaagcatggcaacagtctctggatgatatctctcaaaaaggtggattttaaaataattaagcctgcatgtgtaatggaaaccaagttctcagacatgtgggatccagggttttgttagagcggtggccttgtaatgaacagatgtcatgtggttttcacagtttcatacagaaagaaagactatgatgcctcttaagaggagttcatcagccattaatccctgactacatatgcccccctccctttcaagcacccaccataatattcaaacacattgcatagcaagtttcacaatatggatcacttctttccaaagcacaaatgcatgctaacaaatatccatttgtatcttcacatatttctacataatgttttcttcagtataaagatgtggaatttcagagcacctaggaatttctttccatattcttatgtaaagccaagaagtaaatattatgaccacatgatgaaatcttgaggtcaactgactgtttctacatctcatagcaaaaccaagacagaactaaatttgactcaagtcccagttttcttctgcaaactcttgtgctacccatgggggcccacaatacaagcttagattatgtaagtgatgggttacatttctcttatttattgaccactgattccctcaccaccctttacccattctcatgcctgcaataagtgataactgacagtatcatctccccattgt

SEQ ID NO: 48708 - DNA, 1385 bp, Bovine  19866880466404
  misc_feature (1)..(1): n is a, c, g, or t
ntggggaggggtcctccctggaaggactccaggagtctaatgtacaaatctatggagaacatttgcatattctttctctttttgagacactgatgatgtccaagcacatagcatcagtggcatggactgcgtttttcaagttgaaaaagtcgacttcatgatcatactgtcccccgcagagagacactgcactacatttctgtcataagagcttagctgcgttccgggaagtttgtggtggtgaagtgctgaagtgctgaagtgaagattcatgatgcctaacctggatgtgattttatttttaactctaaaaatctaagccctgtttgatccctaggaactgaggcccaggtagcctaagaagggaggtgttattctgaattgcttctgctgctgctgctgctaagtcgcttcagtcatgtccgactctgtgcaaccccatagacggccacccaccaggctctgccgtccctgggattctccaggcaaaaacaatggagtgggttgccatttccttctccaatgcatgaaaatgaaaagtgaaagtgaagtcgctcagtcgtgtccaactcttggcaaccccgtggactgcagcctaccaggctcctccattcatggcattttccaggcaagagtactggagtgggttgccattgccttctccgaattgcttctgcaaccagagctaatacagaatgatgaggcttctgtggtttggagtcagagagctcagattcagtaactgggtatctgagccctcagggacacacagtcttctcattctgtggctgataatgacccccctggaaaatagtaaggttattttctaaaaatattcctccctctgccaataacaaaagaaaaaccagggccccttacagagcttaaggtttgttgactcatgctaagaaggaaacgagaaaaggggaggaaaaggcctggttataattatcagcaacagcatctggggtaacagcagtcattatgctggcagcactggcccctactagggctaaagcaggaagtgtatggtaaagatttgagctcttttcgcctcactttggcctctaattttagagtttagttgagattttaatataaggtgatgtgagaaaccattttcatgctgtttgtacttaaaatttcttcccctcccccagctttattgaaatctaattgacacataacattgtgtaagtttaaggtttacaacaagtagatttgatgcatgtataaattgtaaaatgattaccatcatagtgttaggtaccacctccatctggtcatgtagttaccatgtcttttttgtggtgagagtatttgagatctactgtcttagagcattcatatatatgatacagtattatttgtattattataatatg

SEQ ID NO: 48709 - DNA, 939 bp, Bovine  19866880566993
  misc_feature (1)..(1): n is a, c, g, or t
ntggctgtaaaattgtgcttgttattaaatgaaatcttaaggctaacttagccacagaggaaattaagctgctaattatgtgtgtctaaaccactaaaaatgggtccagttgttgctcaagatttcagaaaccccccccccctcttctccttggttttgaaatatgcaattatgtctggaaatagtacctgttaatgattttatacaattaaaagaaatattttcagagttgtctattctcacagcctgtcgctttccaaataagcaaaagatttgtagaactggttaattaatggatttttgtttgtttatttttccaaatcatctatgtcaatgtctttataaaatctgagtcatcgtgtttatgccacatataacagagttctaaggattcaggcaggatgaccacactatttttatagcactttcttaaaaaacaggtttcttcaaaggcaaaaattgcaaagatttggcagatttggagagaagcaattctgatttgggatagaaaaggagtgatgatttcacaaatgttcatatgcatttagaaaggtgaatttattgtgagtttatctgcatgacaaggaaataaaaaatgtatctcaaagtaagtcagaggccagtaactggccaatattattttaggttcttcctgctgtgtcaggcagcctgtagctgtccataaatgatcagataagcaaaagaaaaagaaatttaataccagattttgacaaaaatgagaatgcaagttaatagtaaatgtctgtgttacagtgaataacttgaataatttgcatggctcaggcccttcagtttgcaaatagtgttttaattagatctcttgtagtttctgtagctcaacagcatcacctaggagtttgttagatatgccgaatctcaatctattaagtcagaatctacatgttaaccagttggcag

SEQ ID NO: 48710 - DNA, 1481 bp, Bovine  19866880595160
  misc_feature (1)..(1): n is a, c, g, or t
ntgctctggactttgcctcatctgtcttgcaacatgagggaagcaaacacatacatccttggggccaacctgaggaacagggatggctgttttctggagatatggataaagcttggccatgcaggacagagtgtccacacgtgtgtgcaaacccctctgcagagcaggacaaggcaagatggggagtgaagaagggctggtgtgtacagggctgtttctctgtcacagcgctgtattgtgcacacaagtccaagaattctcaattcaaagttggtcttctagggtgttaggaaagtaaatgtgccaaagtagatgagagataaaaggatataaaaacattttacttatcaatttatgagcctgatataaaactttaaattacttatgtagacctatggtatatgggccgccgcttggactctcactttagaatctttgaaggtttagatggacctgaggcaaaaccacacaaaggatgagctgatctgtgcccagagttgccatgaacatatgaatatatgagtctcattctattttaccttttttccttcagttgaaatcatatgcgtatactctataacgataattgcccagaagcatacctgtcatcttatttcacttttatcagtttctagttcctctgtatctttcttttcctgctattttttttaaacaaaatttaattaccatcagaatactataaagtgattatccttcattcacatttctatttatccctcccatactctctctggttcattctgaaattctaagattctttaaaatttttccaatggtattattctatttccacaagtcataattaaatttttcatatatcaaaatgaaaactaaccataagcacatatactaacatgaagcctttaagaggcttttgttttttaactctttttccttgctggcccatttccaaatgcagggttttgccaagttattttagtttcaggctattgagcttttaattattgtatgtcctttccaatccaagaatgcttacttacagaatcgcatctagaagacaaatatctagcttcctaacctctccacacacaaaatcagatttcacttggattaaaaattaagcatattgtgaatcctgtttataacatcctgacaaagcctttgaaacactttgtcaggtgaaactatagaccctgagagaaaggaaagagagcgatggctggaatgaggggacacaggatggaggccaaaaacacactacagggcaggacaagcagagagcgggggctcagggcacacacagaagccaaacacagcaggaggggaggtgtccatccgcagcttgggggtcataccaaaaccagatgtaagggaaatgcagccaaacaaagctagaccagtgggaggacagcgaatcagtcaggtgaacctacacacttctatatggaagccaggaagaaagcagtaccctcagtttccaccactgggacatccctgga

SEQ ID NO: 48711 - DNA, 1410 bp, Bovine  19866880672927
  misc_feature (1)..(1): n is a, c, g, or t
nctttagcactctcacatttgtcccagtgtgtttttctctttctgcatctatgcctctgtccctgtgctgtagtcgatggtgtccttctgaaacatcaggtccttttgtcagccgatcctgtccttgaactgaacaaacccctcacaagagggccatgagttgagtcacttacctctgtctccagaggagttgatctcccctgacaaggttttgtctggttttcgtggcacagttagtgacagcccatgcatgtagcagtgtgtgacccgactccttgcctcaaactgtgtagtcgtcagaactgtcacagcgtcaaaacaagttaattccacgccagcagaagggcaggctgtaataatatagagcctcgggagatggggctgtcaggtggtgtgtgagctgcggccgccctagctgctcacgtctgtgggcagagatgcacgctgacaggcggcctgctatttcccaaggagccggctgggagcaggcttggtgatttcctgtcggttccttgctgctccgggtcctgccagctgtaatctggaaatgacagtttcaacagggaccattttcagctctaaaaaacctgtcttttcctggcagaggctgaaaagtgctgttgacccttctatcttagttcttccttttgacattatggctaatgagaatgatgatggggtaggtgtgtatttgtgagtttcccaggagacgattgctcattaacgagcattttcctctccctgtctttaagaaatccttggtttctgatacttaggggttggggaatgagcctgtttcttggagataggacggttaagagttcacccaggatatgaagggagaacatgtgttgcgggtatttatccataatggaagtttgagggtgtgaagaagtgctgatgagtatacagcccggggactgtagaggttcatggccactcagacacaaagcacaggcattcagtcagctgaagttggaaggcccgtattcctgctcaaggcaggaagtcatagttacatcttagattaagggttaccaataaatgtggtttttctttttcttttagaaagaggggatgagtaaggtgaaacacagcagattttgcttgcaattaaagagtagtgaaaatcagaatcacttttttttaccccctaatgttatatatgatacctggggttgtgtgattcctgttagaacacttgcttcttttgagctgctgtagtttctcctgaagtgattataggaattggtgagcaaagggcagtctttcctcatatataaagagttgtcttgttgaagacctggtgccagatttactgactcaacccagcgcccactagaccagctcagttcagagaccaatctggtgtaaagaaacaagcgtgcgatacatgatatcctgttgttt

SEQ ID NO: 48712 - DNA, 1247 bp, Bovine  19866880672952
  misc_feature (1)..(1): n is a, c, g, or t
nccactccagggtgttattttaaaattatgctaattaaacatattccttggtcatatatcttctgcagcatctaacaatgcaggttatcctcaagtaagaaaaatatttttaaaaaatgcaattttttttttcttgcattaaattctgtttagttttgtctcctttgtaatggccagacctagcctttgaacttggcattaatcaaggcagtaattacaactacagacactgaggaaaaagtgagtcccctttccagttagattaataggagaaagcttaaacctctgacagaaaaattctggaagcgtacgtgaaaatccctcttactgggtcaccattactcaaagagggtcctgttgaaaataagaaattcacagctgtcctgctgacatggagagaaagaaaacatcaaaataaaccttgaagaagtgatttttaaagcagcagagttgaggcttgacccagtaatagattttgaaagggtgtttggtatctctgcggtaagtcggggtgtccaacagacaaggctccgcacccgaatacaaccaggctggaggcaccttaatagtgatattgattgactataaacaaagacaggaaaaagtaaccaggatagcagagaaaaatgtatttgggggaaaaaggttattatcctccttcaggatgactaataccacagccaaagaaattcattttacaacaaatattttttgagattctacaacgtgccaggcactggataagagacacatttctaaccctcaaggcattttcaggctcgtttatgtgttttagggaggtcggtagaaggagggaagaatccatggcttatacacaaaaatcaaacctgccactttagcattatcagtaacctacactctactgaattgctctggaaaaaggaaaaaacaaaactataccatacagaatgcctctcattttgtttctgtcacaaaatagctgggtaacttcaagcagtcacttcattttcctgggtcttaatttcttcttggccaaatacaaggagcaatagggagaggagaaaacagtaaacaaaagttgtttctttccctctttctaattccagcatgcaaatttggtccataattgatatgcatctcaatattagaatgtgacctctaatgatctctgtgaacagaatacaaactctctttgtaagaatcaatctgtagcaaacctgtgggtggactttttgaggacaagtgggggttttaccacagtgcca

SEQ ID NO: 48713 - DNA, 1019 bp, Bovine  19866880681539
  misc_feature (1)..(1): n is a, c, g, or t
ngggagaaaagagatgatgtatgatgtaaggtaaggtattaatcatgtctgacacctctggataatcagctggagttatccttgggaacaactgcttttcaaggatggaatgagagaataagtggggagggacttatcaaatgagatggcctaacccgataagatactgaactctatagctcagcatccttcctggaaatctggctggcaattaaattcaagagttggaaggttgtcaaatggttgttaatgttttgtttaacattcgtctcatctgcaccagagtcatcccagtagaagctcaaagtctgagttcaggagacctaccatcagtcaaaattattatcctcaagatctgtagctttgtgaagcatttcctgtgtttcctagaaaaggctgccatcgtgggcacatctccaagccagctcaggcagcggtggagcttatttctgcctgggtagagattaccacactgaagaatgcctgacaaatgatgaaacacgagctcccagatggcaacctggtgccacacaaaggacacaacaaaacgtgatccatgaagagtgtagtcaaactgcagctacatctatcacttagaattaatgccaaagtccacctatactcacacatctgaaaaccttacttaccctaccctcttgaacttgaaaggattaaaatatatttaaagtgcagtcatgtctttcacggaattcttcatttccttcgctacgaatcagttgtgatttttatttttaataaaaagtgatttagaactatgtagtcctctacgtttcatcaagagtttttgtaatttcaattttcacaacaatgcattttatttcaacaagcactgactgatcacctgctttgtgtcagtctctcttccaggcaccaggaaatgcaaagataaggaagttaagaaagctgtcttgaaatacccagagtttaagaagaaagacaaatgcataaatggtttattatgttataagggctgtgacaaagatatgggcataataata

SEQ ID NO: 48714 - DNA, 2749 bp, Bovine  19866880696598
  misc_feature (1)..(1): n is a, c, g, or t
nggtacttttttggtgatttcactgtttaaaatgtcccaaaagcatgatgttgaagtgttttctagtatttctaagggcataaaggctgtgatatgccttcagagataatatgttttttatagacattccattcaagcatgagttatggtgccattggtcatgagctcaatgttaatcaattaacactatgtattaaataatgtgtctttaaacagaaacccacacaaaacaaatgaattgatcggttgacagaaatgtgaaccaggagctcacaggcacctaactctatttcctttaggagcagcagttcagactttgctaattcagcatttgatgtcactttacagaaagcacctgccaagaacaatgagaatcaatatatatcctttcttcatttaatttccacatccatcctgtgaggcaaaggggtaatcagaaggttcactaaatgcatcaagacaaaggaacaactttgagtattgaaggatcttagagcacaaaggaccttgggagagaggggaggtgggtgggcaatggaatagacaacatctgttgattgcaaagggcttcactagatcagaggacaaggtggtaggtactagggctttgtggcacatttatacctctatgagggggtctatattaataataaatcatttgggatgactggatagatgacatgcattcttctttcccttgactctctctaatgagcttaagcatttgtatggcatttgtctacaattagcatgatagtaggtgatacgctaaatctggggtaaatttctaaaaccaaaatctgatgatatatcagaaacatcagaagagttttttcagtcaacctctcagctaactcaggcaagaaagatgaaaagattcaatatgtctctatctggaaatcatctcttccttgctttcatttcctgccctaaacacactctctcttggacagcacagggatttaaagaactctaaataaaacgcttctttcaaggaagtttagaattactgtttagggacaggaagggagcttgatagccatctgtttcaattccctctatttcaaacaagaactctgaagttatgggagttactgtgacagactgggaaccataacctatttccaacccataaccaaagcccagttaagtggactttccatatctataattatgacacatatgcagattttccaggagagctttggttttgaggacatttggtcccttcattgctctaagagtacttgtatctgttagtttctgggtcagataatatggtcactacaaatattatgctacattttctctaactgatagctagactttaagttctatcctcctgtggctattcatccaagaccgtggcttctcttgtcacatctgtatgaatgatcgccaagtcaagaaagaaattcatagaattttacaagagatagactaattggtcatttactcagtcccttcgttttactgataacggtgaaactgagtctccaggaggctaaatcgtgaccaaaacacagctagcaaaagagagattccgaaagtaaaataagcctcctataaatattttaaaagtataaagagattggttaacatacttgctatttcaacattatgatggacctaagggttgcaagaacatcagaagaagcattacaaaacatacacaatacaacggcaatgacaaagactttcattcgtctcccaggtgagaggctgcaagccggtttcctcagtacataaggcaatactgactgggttatatcaacatgaaaaacaagtgccctgaatagctacctgcaaaaataaccatgaaaacatttaccaggggtttacataatagaaggaataccttgaacaaaatacaaatacctggtctacattttaatagtgcttaaaagtcaattatcatttcacaccagaagtgacagcagggacactgtcaggctcttagtgataaatagacacaataagactaagcttttaggtcatttagaatcttctcaaactgctaaaggccagcagatcacatgagatgaatagttgttctaaatgattaagaaggcaaacaataatttggactccctaaatctttgccattaaggaaaagccttgtttaaaaggcacactgggttataaattagggggtatctggcaatggaagtgcatggatactctcatcacactgccctccctccacaaaggacatgctgataactgggctttacatctgcttatacaaaaagctgagtcactgccaccacctcttccttggtctcagtgactcacaagtcttgcccttctaatccatcctacattctttggtccaggcatttctgcatgaaacatcatgttactcattccagtccctgctcaaaatcctcagttactcagaggaaagccaaagttaggaagtaccatctgggacagaattccttcattctgtctggagtgatgtcccaagatctggggtcaaaggaagacaaaaaacaacctggaagacattactatcctagtgcagcccaaaagccacctgggctacagataggtggcccttatgcttcagtttgcctggcacatcacagtttgtgcctattattccagctggtagcatcccctccagctctaaaacgggctctagtttagatgtttagaaatgtcatgataaccctagttctgactattatgatgcctcgtgccctccaccaacagaaacatttttttttaccataagttacagaac

SEQ ID NO: 48715 - DNA, 729 bp, Bovine  19866880795525
  misc_feature (1)..(1): n is a, c, g, or t
ntgagaaactgaggcaaagctccacagaaagtggatgctggatttaaactctgagctctgagattttcctggtagtccagtggctaagactaggtgctcccagtgcaaggagcctgggtcaatccctggccagatctagatcctacatgctgcaactaaagatcttaaatgctgcaactaagcccaagtacaaccaaataaataaatacatatgtttaaacgtttttaaaaaatatctgaactctgtctaacattcactccatcatccccacaatgccacttattcaaccatgaaatcctttttaatcagtctcagatcccctcctcccatttagtctctagaaacatctacagtttcccaatacccctatgcattagagatatttccttctccaaattggcacaccctcacaaactctaaccttctaaaatcactctcctcagaaagcacaggaagagtccaaaagtaggagttaaaagaacaatttccttttagtaatgtctctcctcccagacaagagcaacaaaggcagcagtctgaatgatcggctctcctggactccttattagctgtctacggcgatctgcggcccaggttggccgcacgctgccaccgtcactatagaagcactcatttccccattatgcggctgagcaggtgccggatgcagagctggacggtgacccaatttaccacgcagcaacaacagaaccgcaccccagctggag

SEQ ID NO: 48716 - DNA, 1349 bp, Bovine  19866880821562
  misc_feature (1)..(1): n is a, c, g, or t
nactgaagtgacttagcagcagcagcagagaagtataagagaactgacccagttctttaaaattgtggctaatcctgagtgcctgaacacctaaagccactgacagcacatcagtaagaacgatgctttggcctctagtttaagtcaccctattatgcttggagcaatggcaaggctaccaagccacaggggtaagaactgtaccaagagggatggaatttgttcaaaagggaaacaaaatgagaagaggagcacatgctcattgtgcaaaaccatgtctaattcaacattttgtgtgacaccttgcatattatcgctttaaattgttgaactttaataatatccttgaacctgattcttcaacaggcacatcataaaagccatcttcaaaagtgatgctagaaaaattacacttacggcttagtgttatttccaacaagtattgaacactacttgtaatgtgtaaaaagtacccatttaatttgccttttcaatatcacagtgaaaaaaataaaagaataagaatgcatttttgaagcctgtaataaggcctgaccattcagagtatctatgtagcatctctgcatccacctccagaaaccagcaaactctctggaacacactcagcacgacttgacttgagtcctctttattcacagcattgaaaatatccacacactcttcttattacacgcactgacaattctcccaaagtctccttgtgtgggacagaaaacactttaatcagaactcaatatatcatagagaataatgaaggctttaaaaaaaaaaaaagcacagataaagatagctttacaaataagccaggactttcataaattgctacctgctgaaagcacacaatgagggccctgtcataaaatcacagtgagataataaccgttttatttaataaaacccggtgaccaactgaacacatgtattaagagttatgcagtaagaatgcctttttgtaatttcttacctgccgcgatgtcagaaatcgagacagtattcccggtgagcccagctggaacacgcatagccaacagcaggccatcttgatgtctgtattctgaagtctaatctgcctgtttggtcactctcagtgtatgacttacacaggcaagacatctgaagtttccaaagtttggttcataataaacatccctatgacaactgccaagaagaaaatggctttctattaattcttttaaaattggaatcctaacatgtattctaatatgatctaagaaataaaaacaatgggacaaaatatggattgtacttccactgtgaagtttccatgggaggaccatgaaaacctctattactaatatcatgaaaag

SEQ ID NO: 48717 - DNA, 1482 bp, Bovine  19866880942264
  misc_feature (1)..(1): n is a, c, g, or t
nctggaccccttacctgcctcctgataaatctgtatgcagatcaagaagcaacagttagaaccagacagggaacaacagactggttccaaatagggaaaggagtctgtcaaggctatatattgtcaccctgcttagccaggctggatgatgcgcaagctacaatcaagattgccgggagaaatatcaataacttcagatatgcagatgacaccacccttatggcagaaagtgaagaggaactcaaaagcctcttgatgaaagtgaaagaggagagtgaaaaagttggcttaaagctcaacattcagaaaactaagatcatggcatccagccccatcacttcatgggaaatagatgtggaaacaatggaaacagtgagagagtttatttttgggggctccaaaatcactgcagatggtgactgcagctatgaaattaaaagacacttcgtccttggaaagaaagttatgaccaacctagacagcatattaaagagcagagacattactttgccaataaaggtccatctaatcaaagctatggtttttccagtaatcatgtatggatgtgagagttggactgtgaagaaagctgagtgccaaagaattgatgcttttgaactgtggtgttggagaagactcctgagtgtcgcttggacttcaaggagatccaaccagtcaatcctaaaggaaaacagtcctgaatatttattggaaggactgatgctgaagctgaagctccaatccttggctgcctgatgcaaagaggtgactcattggaaaagaccctgattgtcagggggtcgttcaactttaagggatccaatatgttttcttcctttgtgtgccatttctcaaggactctctgttccttatcagttcctagaaaatgggaacgaacagagctgcatgtagttctcaggactgagatcatgggaaaggacacctgcttggattcccttcagtgactctcttcagtgaccttgtacttaaaggactatccattttgttgcaactgctgaaatttcattcttcttaatggctgaataatcattttattgaagatatattagcatgcatttctgtaaataaagtacccttgtttcactcaagacttaggtcccctacatccttattcttgttgactccagtccccaagtcctggtctacgaagaccatgacacctgatgctggggaaaagtgaaggcggaaagagaaggggatgagaaaggatgagatggttggatggcatcactgacttgatggatttagtttgagcaagctccaggtgttggtgacagacaaggaggcctggcgtgctgctgtccatgaggtcgcaaagagtcggacacgactaagtgactgaactgataactgatcatatgtcagctcagtgggacattatcgaggcattataaaggataaataataaaaccatgcagcaatagggcaaaatgcctctcaagtaaaagatgtttataaaat

SEQ ID NO: 48718 - DNA, 1808 bp, Bovine  19866880968421
  misc_feature (1)..(1): n is a, c, g, or t
nagccctgtggcttaaacttgggcaatctgatgcactccacttctctccgcttctatccaggcccatccgaagatactttccagtagggatattgtgagatttaatcaattattattaaagggctgaaagatccttggatgaaaggcatgaagataaaagcaaagtctggccctattattatcactttcctctgctcttcattcatctgttagtgaccatgggaatacgctcaagtgtgctttggtgcattttgtaaaatagagaaaacataagtaggtaaattatattttccaaacaaagtgccctttcttgtttgtaactcatatgcagtagattggctggcattgcctgtctcatttatctctctatgttgggttgccctctgtgtctaattttcccttattaatgaatctccccttttgttccacacaaatctaggagggtgacatttatacaaggtaatcatttccatgcattaccaaaaggattatttattggtggttatccagtgaaagtaagcacatctgtcacccaaatctgacctagaatgggctgctcttttcttagtggaatattagaatctgcctgcaatgcaggagacacaggggatgtgagttcaatccctgggtcaggatgctacattccatgccaacatccattctgaggtagtaaatgtcagtgtcaaggattaacttgagttacatagtgagtgtaagttcactgtatagtttttgtaaaggtctgatgatagaaacagtgtcttcacataaatgaaatacttttctatctttctatcatgtgtctattaatatctttgatgttataggtgaatggtgactctgaaaaggccagtctctataggtcccctccatgtcgattgctttcgagtgataaataatattggcaggatcacattccattgagataagtttacacttattagatttgtcttgatttggtattacctcataatttagagaaaaatacagatttcacacacctacattttagaacaagtcatttctttggttgctttgcggacgagattgggctcattcagggtggtatggctgtagactttgttgcttttcagattaattttgtattagctttgagagagaatgaatgatgatttgactatttgccagtgataactgaagcatatcctgtgtactccagtgcagataaaatgttatggggattttttttttttttgctttaatataatacgagaaaaattaccttctccttaaataagacttaagtggattgatggatgtctacctaaattatttaaattatcaaaaaagatacctgaataagtaaatgagaattctcatttagagacagagcaaccgtttcaggactgaattcaaatttgtttaaaaggaggaacctgggcatggagttaaacctgagctgatatctgtagatcctgtgctggttgttcacaaatgacatcttttctgactggttgctgtatctgctttgattcatcagtatccatgccgtgctgctgctgctgctgctgctgctaagtcgcttcagtcgtgtccgactctgtgcaaccccatagacagcagcctaccaggctcccccgtccctgggattctccaggcaagaacactggagtgtgttgccatttccttctccaatgtatgaaagtgaaaagtgaaagtgaatttgctcagtcatgtccgactcttagtgaccccatggactacagcccaccaggctcctccatccatgggattttccaggcaagagtactggaacagggtgccattgccttctccaatccatgcca

SEQ ID NO: 48719 - DNA, 858 bp, Bovine  19866880988791
  misc_feature (1)..(1): n is a, c, g, or t
ngggagaggcttgaagggtatacctttaattgtagttttgaaggtataactttgctgaatcctggaataattaaaatctaaatcctgatgttcaaatgccccatgtattcctactgaagttcttctaacaagaaaggaattttaagagcatagctcggaaataaatatttataatcctttgattacacagctattaactttttgtatattccctcctaattttatagtctccattacaccatacatttaattttatatgatgcttggatcaaaactacttttccaagttgtaacatagagttaccaagtgtaattgcaggagcttcacaaaggtttttttgaattgatatattataatttaataatttctctggttttaatattttgctaagctctgagaataataaggttaaaaaataaaaataaatgctttttactgagtaaaatatttttgactctttttgaagatcaaacttcaactgttgaaataaatttaaatagctctagtacctttttcatacattcatcacaaacttgaagaaaataaagaaaatggcaaatgagagagaaaagaccagaaaaggaaggggggaggggcatggaggagaaaagagaacaggaagataagcagagggaaggacttataattacaaggataaattgaaggtcttacttctgttctgacatttgcttcatgtaaatgatgaaaataccatacaaattcatttgaatacatgtcaagtctttccatgaattataataaatgtcagcctcattctaatatttaaaaacaaaagctatctataactcagacatgaccctttcccctattgtctactccatcatgtaaaatatcca

SEQ ID NO: 48720 - DNA, 824 bp, Bovine  19866881038377
  misc_feature (1)..(1): n is a, c, g, or t
naaacatatactaacttggataaccaggaataaatgagcaatataaaatctcgggggaacacatgtatacctgtggcagattcattttgatatatggcaaaaccaatacaatattgtaaagttaaaaaataaaataaattaaaaaaaaaaatctcaactactgccaatactcatgcaatggttggggatagaataggctggtctttgcagggtttttagagagtaagatgggctcaatacagactgtgagggacaggctttctgggagaggtggggagtgaactatagcagtagagagatgtgcgctgatgcaacaaagtgtaacatagtttgacttacattaggcagaatcatatttcaaaacttgaacataaataaatgcaggcacaaatgaaattaccaaaatcccagtattcatcacacattttcattgaacccgtacctttagtaccactagcactaaatatggacatattttgggtttacataaacaaatctaatcccacaaactggatctatagtcaactctatttttgatggcttcagacttcatgatgaaaattgtacactacttactctaagacaaatgctaaaattaagtttcactaaactgaaatggtagggtttatataaacttaaggtccctagattcactcttagcattgtttcatgaggtgctaggtaagaatggaaaaagagtaactttagtcttgcaatatatgttgccaaaggagttgtcacattatctggtagctgaaactcaaaaaagaaacactttccacatcataaatattagctatagaacagaagggtccttcttataa

SEQ ID NO: 48721 - DNA, 1706 bp, Bovine  19866881056698
  misc_feature (1)..(1): n is a, c, g, or t
nggaacttagggggaagaggatcctggatttaggaaaagtggattttagaaattaggggcaaaccatgaacaagatgaagttctgaaaactagattcttatcatcccatgagggaatttgacaacacaatgtgtatttcaatcattttcactttgaaaaagaagtaagataaataacatattttgatgtaaaatttgtatttcaggtaaatggattcccatttaccttgatattgattaacactgtgtggctataaaaatttgtatttgattgactttatctccctaaacaagcaaaagcagatgcatcagccattagtgaactgctactgttcagagttcatctgagggggaaatgggccaatagaaggctctccttctatatcttatgcagcagtcttgcggacaattttctggtaggatctggccctgctctgatgcacaggagcaggattggaaagtgaacactgaaataagcatacaacccagccaagagcagggctgcattcaaattctagattcatcatgtttgagtaatgtattgacattcaaagtgatttctctcacttgctccaaactgggactagcaactctctgaagggagaaaatgctcattgtgtaagaatttttttgatttggaaccagagatggagaaataggagggaaaggatcagggatacatccttcattgcccactgtatcagtaaagttgcccctcttccttttttttaagagtctgatagtacatgggctcaaatgggttgattcctattgataaaatggactgtttaaaattcttcataaactatacccaactctgtaaaattgtaaaatggaggataaggatgacataggtgatggaaggaaggccgttcagccaatgctggccgagaagaagaacaggaatctgtgagaataatttcaagagagaaatgactagaattagttgagactgacagaaaaataggaaggtccctaacaaagaaaatattgaaaattttacttgatgcatagattatttctgtcaagataggaaaagctggttatctctgggtcagggagctgaggaattggaggacattggtgacaggggaacttattttctgctatagattcttgtactttttggagtttttatcatacgcacttgctagtttttcaaatagttaaacagaatttaaaaagacatgggcatgtggtagacactgctcatagtctcctgatcccgacttcttacacagggatcaggtcctactaataatatgtgaccagaaagaagttatacttcctgatttcattattcaagggaggaagccctccccttcacctctttccctttcctactggctgcagcatgagttgtcttggaccatcttgtgtcagtacttcaggaatggtagaatggtaagatagaaggatcctgggctgctcttgactttgtgaatcagcactgtcataccagtaggacgtttatgtaacagcaagaatcactatcttatttaatctgctgttatatcatgtgtctgccatgactgtcaaaggtatattttaaaaaggtgactacttttgattattcatggtagccaagatatagaaacagcctaagtgtctaacaatggataaatggataaaagtgtgtgtgtgtatgtgtgtgtgtataatgaaaaaatagtcttgacaaaaaaataaatcttgctattgcagcaa

SEQ ID NO: 48722 - DNA, 905 bp, Bovine  19866881064288
  misc_feature (1)..(1): n is a, c, g, or t
ntttaggagcttttagacaatctggaggtagtggaaaattagatgcagtgttgcattagacatgtttttagtattttcttctttttgtaaaagctgtaattttcagagtttagaaccaatttaatgtccctggagttacagcttttttgtatccattgtccattaggtgaattactaagccaagaatggaatccatttataatgtataaaatactgtgaaatgtcttaaaaacagtctttgcagggggagaaaaaagcactgggagtccattaaatttgaagacagtgagttctgaggttcttcttataatcatataatggttttttggtactttgataatacgatgcattagatattggaagatttatttaaaagtttgaattcaatgaaaatttatgtaaaactaatgcaaaatgcattatgtttgacattccagacagctttcaaaactgagtgtattgttaaaaaaaaaaaaaactttgataaaatttattatttttgacacaaatgagtaaataaccaatacaattctactacctgtcttatcaaagatgatgtcactgttactggcatttaataaacttagaatgcttggctttaaacgtctttttttaacagaaaaattaattgctttttaatagattttggaaatgtattgaaactcattgatgtatttcttggttgtccacttgctcagtcatgtctgactctgtgacctcatggaccccggcgtgtcaggcttccctgtccttcactacttcctggagtttgctcaacttttaagatataaaattagccaataaagaaaatcttaaaaataatttgaaatttataatccatgtcttatagactcataaagattgacaattctatagtctcatatatttctgtttattattttata

SEQ ID NO: 48723 - DNA, 869 bp, Bovine  19866881066267
  misc_feature (1)..(1): n is a, c, g, or t
ngtttccagctcatcctttctgtgttctcctttgtccctatctcccccatttcacatctgtcttcccttcctgatattttttacctgataacttgaaggccaacatcgggatatagaagcaacagcacttcagaaattacactaagtcaatcctcctcgataaagcccatattcttatcatttctaagattctatttctttgatcaaacccatgtgtttaccatacacatgtgcctattatctatagaaaaggcatactgctaattgttttctaggatttatctcattcactcctcatagcaaccatggaatgcgtactattactactactatccccattagagatgaagaactgggctcaccaggaccaagtgacccttcccatatcacattcctaaaggagtaatgaagctggaactcaaaccctgcgaacatgataaagagagtccagaaggttatatgctgtatgtactgcatctttagttatgctccttggggcagttctgtaaggtttagacacttattaagtgcttttttcatcagggatttttgctcagaagtctttgggttcatgactaagaaagtgcaattgattgaggaatagaatttttgagatagaaagaagtttaaacatcactgagaccaagtatatgtaaaagaaaataaatcttacagaagagattgtgcaagttaaacaaagtctcttgatgaggggtttctgcctaaattctgtgcccttctgtcacaacatactccaaatgcgagcaaactgaggttcaccttcaatagtcaatgatgcagggatctgggacataccatggagcatctcctgagccaggtttaggactttgagatttgttcatgtgtgt

SEQ ID NO: 48724 - DNA, 928 bp, Bovine  19866881071593
  misc_feature (1)..(1): n is a, c, g, or t
nctcagtactctggaagaggtgtttgctcctgttcctttcactaaaagtcatggtgaggtctcaatccactgaataaacagaagcagaaatccagtttgtcacaggaaggggaaggcatgagtgtgagataaaacctctggaatctgtcactgagaagagggggaaaaaaagcaaggcaactatagaaacacatgtgctgatccagatccatgttttcttctcactgataccccaggaagttcaattcattactactatgaactaaagggcaaggcgagctggctaaaaacaccagtacatcttgtgcttggaagaaggcacaagcagtatgatttcagctccttttcagaggcacggatggaatatttcagaaggctgtgttgcctttgttattaagaagctgtatattatcaaaggaggcagtgaaaggccatattcccacagggtctcaccctcctttctatgcaatgcctaaacaggctcgtttattcccatcttattcgtttccctctagctgataccagtgacccccaaaatgttcagctcccaagttaatgcacatttacagccagggagtattttcctggcactgaatttgggaatgaggagtggggagggagaaaggaggtaatttaagttgctcttttgttggaagggaggggagtaattcttgcttctatcagcagcttgctgagtctcgccatcattcctacccccttttattttatttatctctttatggcctatctgataatgctataaccatttcctgttgtatcctagctgaggaagctttctccaggcccaagagcaaatcaataaaagcaagctatagcgattcataaaaataaaattgtcatcattattgttcaattattgctgtgtctgggaaagaatctcaagaccgaaggtttctcagctaatatt

SEQ ID NO: 48725 - DNA, 1624 bp, Bovine  19866881081569
  misc_feature (1)..(1): n is a, c, g, or t
ncacgtggggccttagttccccaaccgggatcgaactgacatcccctgcattgcaaggcgaattcttaactgctggaccaccagagaagtctcaagagtgtagctgttaagtgtgcagcactgagacttgcctgtgatgatgcactgagctctgctgcttagtgtgccatcctggctcacttgcttaagttctctgagtttctttgtcattaaaatgggtatattaattcataggattgttgtaaggattatataatctaatagaatatctggaatagtcatagtttctgacacaaaaagcactcactcactgttaatgacaaaaattatcatcttgtgactttttaatgatagaaattatcatagttgggacctccccgctcagagatgtcatctatacagaacataggcagtttggaagtgactactagtgcccatcagatttttgccccccaaaacctctttttccatgtgctttctccttcatttcttgactatgccctgtgcccaggtctagcaccattgtatccccaactgtgaatctttgctaaagtcttaaatctctcagggcctcagtttactcatttgtaaaatttactcagtgcccattctatcttaacaaattaaaaataggcttacatcttatgttgctctgagtctaactcaattttgtcttttaaaaaagtaacaagttggcagtctctgatgtgaaagaataccatcaaagagtcactctgcttccctagaccacacctcagcctgaaggctgggaaaggggttccgaggactgtcctgcgcaaaggcattttcaatgtatttcatgctatcaatgaagtatgcagtgcacacctgcctcttaggattatttctcaggttacagggaagctcagaaaattgctatttcttgacctaaaaggaggttaaaacgctttcagtggaaatcgattcactttaaggtatttaacactgttcatattttgtacaagtctctgtgacagggttggtttcaattggcactttttgctgcagttgtaggaagactatcacagagagagtggaatctgaatgagtgtttaacaagatgggctatttcctttgtttcacttccaagatagaaagggaacatgccctagacccccagactggctggagatcctgtgaactttatacacgtctgctccataaaatgtggcaaagtgatttctggaaaaataaaattaatttttcctgctgcctttatttttcctttgctaggggaatttatgttacacgtggtcaaatagcattatgtacaatgaaggaaatgaagcgtgagagaatcattcaataaaaaatgataaatcataaaagatcatttagagaaaaatgctgttagcaagagtttgagaagtttaaagatcttttttcataggtttttaggaagtgctatcacaggaaattgcaccatttatacagttgttcttctcttccttgaaaagatagtgtgatacatttcaaatggaattaaataagaaatgaggcagtctgtcagtcaccacctgagactggttgggggacactgctttctgaggagacaaagtaggtcatagtcatgaccaacaactcagaaaacaaaaccccaatt

SEQ ID NO: 48726 - DNA, 1447 bp, Bovine  19866881114591
  misc_feature (1)..(1): n is a, c, g, or t
nacatcatgctcataggctgaaatggagcatgctgagaatatttacaccatagacagcagaagacactataaatcaagcttcagtttgttttgctgattgtctagacttaactaagtcatagggaaaatattagcaaagcaaattgaacttaaaaaatgtattgtttaggtagccatcatattgttaaaagcacaaaaaaattgaagaaatagttttctagtgttcaaaactgttatctctttgaacaaaaatttttgctcagcatattctgacatatcaatttattgtttctctttcgtcttgctcatgaaaagctaaaatataaaccaatatttattttagagccatgcttgttcagtatttgcagccataggttaactatagatctaagactttgccaaaaattaaagtattttgtgaggattaattgactatatgaaatttgtaatggagtgttgtatattttattattatttgttgtgtatttaagataaacttatgtttgtacatacatgcatgtatttttttttttttttttttgcctctcagaggtttgttgaaagttcacattacatgttatgcacgatttctgattatttacacagcgtaattagaattgcattccattctctaccttatgagattatttcctcaaagcatactatagtggtgccttattctaagcattgagtattttttgtacattgtcttggagatttcagaggaaacagtcaaaacactgagaagtccttcagtgggaagccgtttagctttatgttggtacagtgttttcaaaacattttaatcactgtttcttttctctctctctgtaaatactgatttcacagtttggaaaatgctgttttagagattgattaacgaggctcatttgatgctagatctttaatgatcaggtcccatggcttcaaatatggtctgctattcaccttgatcttatgattagtggttaaaatgtatatttttcagtaagtgctcttatttttttacatagaagaaaatgtataataatgggttacaggtaagtcagttcaatgactttattcattggaagggcttagattccccttgggaattctattgccaacatcctaaatttggcttgttctagtggttccagtgctttggatcttgaaatcttggtgttaattcattccattccaggaagttttaggcttgtgctgaggagtggaacatctttatgaaagagcaatgcacacactcattgcttgggttttagtaacatcacctatgtgacttttattaatatggagatatttaaataatttctcaaagacgtaaggaaatattaatgaaaggtatgttcataaatgatttttgtgatgtaactggaattgtctatctctaccttctaccataaatatttagaaaatggtatcttgaggaactttttcttaacattaccag

SEQ ID NO: 48727 - DNA, 1190 bp, Bovine  19866881125890
  misc_feature (1)..(1): n is a, c, g, or t
ntttacagaaaggggattctaagcagggactggccgatctggtctgcaggccaaatctggctcattagcttgctttttattttaaagttttatttggacacagccatgccattcatttatgtatcaccagtggctgcttttgtgctgtaagagtgaaattgagtatttgtgacacagtatggcccacaaagtatcaactatttactatctgattcttgaagaaaaagcttgctgacccctgatggagagcaaagaagggttaagtgacttgcctaaggtcacaaaaatttctgagtggcaatgctttatcttataattctccacttttggggagtggtttgttcattttttttccccaccatgacctactttatttcagatattgtataggaaacggagcctcctgcactactttccactcccacccccaatcccagtggacaaggagagtttgagaaaaacttctgcaccataaaaatgcaggtaagctccaatattgttaaggtgtgtgaaagccggaaactccagggaaggtaagtaaataataataataatgatataagtgaagaatatatattacatcccctaggtacctaagccacaaatgataacttttgagagtttacaacataggttactgtggttttgtgattttgaattgtggggttttagtgttatatcttttgctctggggcacaattaatcctatttcatgaaaaaaaaaaaaaaaaatccttgcttttttgtagaacttctcctgtccatttctcaagaagctcaaggtcatcagaaaattagagattttaggttttacaaatacctacaatgaaatcacatgtatttacaattgaaggttaagacatcaaacctcaggaggtagcatggattttgaaagagacatgtatgcctcccagatctgcttggattgctttccagaagcatattgagggacttaattccagtatatttataggttcttgcacaggcagagattgctttatttcattgcatgagtaacaaagatcttttgtacgttgctttacgctttgaacaacaagaattgcagcagatctgagatttgtgggcatctactcgatataaacgtgtaccgaagatggggaaaaataaggactaacttttatagacctctctcattaaaactcaccttcaaaaaacactcctgctccttc

SEQ ID NO: 48728 - DNA, 1701 bp, Bovine  19866881311925
  misc_feature (1)..(1): n is a, c, g, or t
ncccccgtccctgggattctccggcaagaacactggagtgggttgccatttccttctccaatgcatgaaagtgaaaagtgaaagtgaagtcgctcagttgtgtctgactcttcgcaaccccatggactgtagcccaccaggctcctccatccatgggattttccaggcaagagtactggagtggggtgccattgccttctccggaaagtagctttagatgattcataaacaagggaacccagctgtagttccaataaaactttatttacaaaaacaacccacagcaagatctggcccttgggatgctgacctctgatccagaccatgaaccctgtgggcactcatgtgttatttaaagtagcagagaggttctcatacttgtaaagattcagacatgagcagaatttaattatctgaaataatcacagaacacaagaagtcacaggtatgacaccgaggacaaggatttcaatacccataaaagttcagacactggaacctcactcatttggggctggcaaaggagactaacctaaatcctcccgggggacatgtttccagtcctcttaattaaggccattcacaaatggcttggaaaatgtttgggaaatgaagcggttgggaaaacctatgaaatggaacattggctattagcatctgctcctccccacttgccccacccacaccaccaccccgcaggcgaacacacacactggaaaataaaagcatgcacaagcgtattttcaatgattaatctcactgtttcactttgaaatctaaaagggaaaaaaatggaagcattcctatttcccgttgaaagtaatcacagctttatatccctgggtgtttacataaagagagctgtttatttagaatccttgctgataagaacaccacacgctcataacttattatatattccctttccattttgtctcttttttggaggggggggagaactatgtatattttatgataacccaaaatgacttatacataaaaaatacagactttaaagataaaaaggattagtcgcaggtaatgcattttccatgagtggctatagggctctcggttccaagaggtaccgactgcatacaaatgaattgataaaagtctgacgccgtggatgggtagcaaggctcatgctttgctggagatgattcttaaagttacaataaatcagacagacagtgtcggcctttgaggataaacctgtgatggcttgttgtgcctctctgaatcgcctcagaggcccagggactcaaaagtgcctagatgtcacattaaatctaccgggagaatggagcacttcaaagacgaacgcaatcagatctgatggaaaatacattttctgaaagctactgacaaaaaagtaatctttgatgtggatgttgaataacaattgatattgtcttccctgacatttttcattattgccgtcttatacagcctacttcatgtattaaagcaatattaactgtttgacagggacaaatcctccaactatcacataagcaattgtttctgaattgtcctagcccactgcctgtaaaacctgtcccaataaccgcttttaaatacgacagtaggctctttctcctgactagctagacagtgtctgagctccagtatagctcagtggggtctggggaatattaaaaatggttaggtgggttatgaggtgtcatttgattataa

SEQ ID NO: 48729 - DNA, 1272 bp, Bovine  19866881352522
  misc_feature (1)..(1): n is a, c, g, or t
nacctttccgagtctattttctcatgaaaaaaaaaaaaaaaatgaaatagccatatctgcctttgagtgttggtgaaagcatttaacaagatgctattcctaaatcaccaaaacaaatctgggtacaagataagtgctcagtcaagggcgataagagatggggagggttcatttaatcacagcctcagaaacagaaagccacttaaagtagaatcaagaaagggagcactttcaaaaggatatacaaatatctcataggaagcaggcaaagaaattatagcaggacttcacaagagctactaacgaggaaagttagaagacgactgaatgatctctttctgaccatgttatttccagtccacctgtctgtgtatctcctggctcctcctcggtctgcaaactgacctctcctgcttcactgagcatgtggcagaagtgaccatcccaggcccaggtttacattaccacatcttccaacactgaacaggctttgaactggtccaaacctgggtccagtgtcaatccaccatccaatccactgggtctgccctcctgccccattacccactcatttctgagaaagggatccactaggaacaaggtacgacaatgggaaggaagaaattgtcatgccgaggacaatcaacagaaagaaaagccccaatgccttctctttaatatcctccacatgaagcaaagcaaacagtggactgccttatcacttgaagaattctacttcaaaggcagagaagctaagagtttctaaccacgacctctgccaagtcctccgcttccaccccagctcctctcctcactgctctaatatattcaggtctcttccattatggctgggtgtgtatttcagcttggcatctccttccgtcgcaaagcggaggtgatcatatttcaggaggtgctagttcctgcttgcagagttgcctctgtgttataattgctttccaccatgcagctgccacacatgagctcatctacatgctggatggctgcgtttacagcaagccagcctcacactgagtttagaaagaggcaggctctgccggcaaatcttgcttcctgaggcatgtcatttctttggacgatttgtagtctgataacgaccgtgtcatgattgtgcggtgatgactccaaatgccccaacacacttgatggatcttagcataaattggccattaatcagtgtgtaggacattcagaatttccatattcaagctgctatgccataacgctgattaattgttcaatgcccaatgt

SEQ ID NO: 48730 - DNA, 806 bp, Bovine  19866881422569
  misc_feature (1)..(1): n is a, c, g, or t
natgcataaacagataacttggcagcaagggtgttgggaagaaactcagagtagggctgtgaacccaaaaggctggtttggggcttctttgtctagaattttgcatcttgttctgttctccttagaggcagcacataattgctttttattctctgtgtgacccactgggtgcacttgagacttttgttcctctaccctcagcccttcctgactaccaaattaaccctctttggacttccctcatgggtctcagtccaaccctttagtcaccgcagtttgtacttttctggatcctctccaaatatctctcaaagatggctcgtaaaacaagggcttcccccaagagtcacaggcagcctgacagctcagcaagagaaagaagagtacagagcagagcaaacaaaggcccacaggctgcctgaggctccggcctcctatggacatctgacctctcatggcactcccttggtgtggcttggctgttaggccaactgggactctgtccagagctctctccaggtaaagaagcaagccctgcttcaggctggggaggtgccattaagtcattttcttagtgcctttcagatcagctttgaactataaataaaccaagtgtccaggagtagccacagtgcctgctgtaaggttatttgcatcctttctctctctgaatcccccttatgccaactatgccttttagaaaccccaccaaggttggcaggtccaccactcctcctgccaatgtcagtgcattagcacttagcttaagtgacacatatgccaggcaggctcttggcttccccctc

SEQ ID NO: 48731 - DNA, 1794 bp, Bovine  19866881683796
  misc_feature (1)..(1): n is a, c, g, or t
ntgtagttgccgctaatgattttttgtaaagatttaattaattcatgagtttgtttttggctgtgcagggtgtcttctttgctgcatgtgggctgtctctggttgtggcaaacagagggctactctctaggtgtggtgtgcacgctttctcattacagtgacttctcttcttgtggagcatgggctctaggggtgcatgtgcttcagtggtcacagcacaagggcttcagtagttgcggatcatgggcttacctgctccaaggcatgtgggattttccctgactagggatcaaacttgtgtccccagcactggcaggtggtttcttaaccactggaccaccagggaagtcccattaatgaggtttttgttgcagtcgtgatgacatagctaaaagtttgaggagaaagagtctgtgatccatatttacccacttatccttatatgaaaatatcaggtcctataactttaaaaattctcctccaaatcatcaaacatcattatgacctaataattaatgaaatgctatccattcaataaattctagctatttagtgagcttttcattttggtgactttagtttgcacattaaccctagaaagcagctgctgttatcatcctaccattttgcagatgaaacacttagcaacaatatggcttatttaccttcccaaggttaatctgttatgtaaggtgaggccaggatttgatcctatgcattctgaaatgtgtgcatgaaaccttaagcactgtgttgttttccttcaaaaattcagaaggatgaaagaatcagctgtgttccatcaaatattgccattgccaagtgtgcatctttgtgtcagaacccagttttatccaaatttggctcatgtactacctatttttcactttaagtgctcagaagttgcataaagggtagatttatacatgagatggcagcatcattctagagactttcaatacctaagtcatggtggagtgagacatacttctaggtctttgtaggcctgcactgataataggcagtgtcttctgttcttaaaaaaaatgctatgcactcctgtcaccctctgtatgaaaataatcattatttgtttggactttcaaggctttctctatctagttgctttggagaataagtatcttatcgtccttagtgcattgcgtttcacattctgttttcccacatgcaacacagatgcctcattctgttggattcctgcatatgggtcaggaatgagttattctttggtgagtaaatgaaagaagaaagatagaaccgacagcagtgagcagagataacttgtgtctgttggcctcagtggccttcttaggatatcatttcagaactttggcgagagcagtggaaaaaataaatgaaaacatgagtgagcgtttgagtcattcttctaaaaaaataattgttcccattccttctcccaaccaatatgtcagcataaagtctcccttgacccaggaacaaagaattatattagtgatcagtaaatgcatcacactcagaagaaaaataaatgacataatgtaccagagagaacaaacgtcatctgagaattgggtgggagggtggtcaagggactgcctgattacaaatggccgacatctcattccatgggtgattcacactctctactggtgtcagtgctagaagacttttattagttaacatatttcagagctcagtgtaggaacaagccaagatgttgttctatagtgcaggtcctgaatgaattttgaaatggttgtttaatactatttaatgaagagtgaaatcaaa

SEQ ID NO: 48732 - DNA, 1534 bp, Bovine  19866880254460
  misc_feature (1)..(1): n is a, c, g, or t
ntattggcatttcagcttcaacatcagcccttccattgaacacccaggactgatctccttcaggatggactggttggattgccttgcagtccaagggactctcaagagtcttctgcaacaccacagttcaaaagcatcaattctttggcactcagctttctttatagtccaactctcacatccatacatgaccactggaaaaaccatagccttgatgagatagacctttgcaaagtaatgtctctgcttttgaatatgctgtctaggttggtcataactttccttccaaggagtaagtatcttttaatttcattgctgcaatcaccatctgcagtgattttggagcccagaaaaataaagtctgccactgtttccccatctatttgccatgaagtgatgggaccggatgccatgatcttgcatacatatatataaaacatggtggacttgaattgtatagactggatttaactccaagcttacacttctctgcagtgcaggagacctgggttcaatccctgagtcaggaagatccccctggagaagggcacagcaacccattccaatcttcttgcctggagaattccatggacagaggagcctggagggctacagtctatggggtcacaaagagttggacacgactgagtgatgaacacacacttcatagcagccttcagacgtaaccagtatcacttagctgctgggataacagatacagctgaaatgtattcaatgtgtctgcgtgccaagcaccacacacagggttttctcaggcatcatcccatcggatccttccagattctccttcccttgggtaaacacatcgcctagtgggtgcagaaacaggcttaatactggatgcagatctaaacagcagacatgctggacttgcaccagatctgattgatgcctgtgactgtgttttgctcacctctgaagtggggttgattaaaatatcgcccttcctgggcagtttgaagatccgatgagcagcttatgtaacggaagatctgaacgctgagtaggtaaggtgattcattatttggtttctgccagcacttgttggaaagaatgtgcatgttttctctgggtttgtccctggcacctcatttaccaaccttgaaatccccgacttgttttctttttcaagtggtaaatgtttcatcattatttttgtctcctcttggagctgaccctctctctccctctctgtctctcatgacatttggcttcatccttcagcctttctctctctcttttttatggttccatgttgctgtgagcagaactcatttttcaaaagacagatggtggcaaccctattctctctaaataaaaaagcaaaacagctgttaaggtgcaaacagagttgcggccagcaaatcgtatctgcttcaagtgttggcgaagtctccctttagggaagaggagctagctaaacaaaatgtgcagccttggctgggctctgccaaggtccaagtatagaatgatggcaaagaaggaaatttatagcccgcgatagatccagcac

SEQ ID NO: 48733 - DNA, 1286 bp, Bovine  19866880370171
  misc_feature (1)..(1): n is a, c, g, or t
ncctacctgcctatgcttgtctggaacacatggacattcatacacattggtcaaatgaattcatctgagccgttgaagatgactcagaaaatgaggcaaagaaaacatgtgcaaaaataaaggcagtgaatagccagcatatgactattcttttaaaagagaaaaaaataatgcaattccaaatattctttcttcacttacctcagcaatatagcttgttctatcaggcacccttgtggttttaactcatacatttacagtcaatgagcaaaaaccaattccactgctcaaattctgctcacttactattcagctgtctcaattcattaatttgcttaatcagccctcatcaataacacttctctccactgcattcctctaactgaaaggaaaagcaagctctgaatactcaaaaatgtgaatctataaagcaacaaaaatggtagttaaaaaaatacttgtataatgtctttggggggattgaaataacttcatattaacatgtctgctattatcagaggtcaaggctggaagacgctttctcattttactgatgctgtagtcacttttgaaatttgaatgaaatggttacaacagttagagactagaaaatgacaattctatggaggttaggtatcaacacagaaggatcatcccccccaccttggaagatgtctgaaatgtatctgacaaagtggagctcattttaattcatatttttacaggcagcacggaaaaagacttacatttgggaaatttgccggtctattgccattagatctacacacctgcataagaacgaacagccattgttagaatcatccagttttctgccgaacagatggctgacacgtacaagaaattatgatcttagggttatcgtaaaccccaaggatgggctaaagggtcataaaatataagttccctcatttgtttgaggaggggaggagagaattgtgtatggaatccttgaccctttattataaaaagataacaggtaacagaccaatggatgagatgagcacaaattaaatgcagaagatggcatttttatgaagaataaatagcatcttctcatcagatagaggaaatcatctgtattcctaccatttttaaagaatgatctgctagcattggtggtattaaggatacataatctatttccttctcccaacctcatttgtgaccccatgcataaatggatgtacatcattgtgactcagttaaactgtcaggaatgaatgtgtttttacccactttgacgataagggaaaaaaaaaagtctt

SEQ ID NO: 48734 - DNA, 1795 bp, Bovine  19866880468544
  misc_feature (1)..(1): n is a, c, g, or t
natttgttacaggtattttttaaaatttgtttcaccaaatattatgtaattttaaaacgaaaaaaaaaaaagacagcaagaggaccatgtattgaagcaaatatatgctatacaaagctgaggcctagaaatctagcaacttgagatgagagagaacacccagaatatccagtaggaatggtacaatgcttacatagattgagataaccatgaactctttaaacccaaatgtttcaactgcttaattttctcttcgatagtttgcatattacaagaagaaatgtgtgctttctaatatcccagtgaacagccgcttaattaaaaagaagagagtttgcaaaaaacacaggctgtgtgtctcacagctaattgaaatagctacagaggcccccaaaaagacaagttcaatattgtggaaatatcagcaggtctggcatttcagtgttctcagatatcctccttgtctgtctgattaaaatttcacttggcctttctgtccataataaaagaaacctatttgtgcccagagctgttcggcagacccagacgcatgttaaatttcagggcgtttattgagtctgtggatggttgagcagcattgctgctgagaacacttcatcaggctttgtggtgggaccgaggcagtggggctgatggtggtgtgtggggtaatcattttcagacagaggcagctgtgttggaaatgatagatacacctccccctttattcctcaaaaaatagtgtgctctatcttacacggtcttcaataatgaacactttatgggcaggtggctcctcagggcaattttcagagttagacaggaacagctggggaaattgagcattgagccttctggtataccctgtcaaggtatgtccacgtgtgtgtctctaattgagagcaactgaaggggcaaagcaaacagattgctactactactactaccaacaatgataagaagattgtaatcatgatatctcctttaagtattagcctttaaagataacacactgctctatataaaatggacatccaacaaggacctactgtataggacatggaactacgttcaatgttatgtggcagcctaggtgggaagggaagtttgggggatacatggatatgtatggctgagtccctttgctcttcatctgaaactaccacaacattgttaattggctataccccaatacaaaataaaaatgttaaaaaagagagataattaatatttagtgagattatgcaatgccaaattcactgatctgcatagtatttaattaaaactattattcttcccaattttctatgaggcaagtgaggcttagagagattgaatgacttatccaagattatacaaatcacccccagtaaaagctctgacccaggcagtctgagcctggtgtttgaattctgaagccttttgatactgcctcttaaggggtgctgcagtccatggggtcgcaaagagtcagacacaactgaccaactgaaccaaactgaagatgtggttattttggcacacatgcctactgttccctcatagccagttttcctatcatccctggtcatttaaaagactctagcactggggtgaagcagggtgactcattctggcaaggaggccatgcacggacaccccctccattgcagacaatctgagagcagccctctgacacactctccccatgcaaactcaccttgggtgatgcagctacagaagcagcctggatcttgacatacatcacagaagagacctgcaccacacctatgcgagctcaggatacactcgaaag

SEQ ID NO: 48735 - DNA, 596 bp, Bovine  19866880496958
  misc_feature (1)..(1): n is a, c, g, or t
ncgcctgcaatgtgggagacccaggtttgacccttggatcaggaagatcccctggagaagagaatggcaacccactccagtattcttgcctggagaattccgtggacagaggagcctggtgcactgcactccatgggtagcaaagagtcaggcacgaccgagtgactaacactttcactttctttctttcctgttgaactgacctgtgtcagtgttattttgcaagctgcaatgagttttacaagagtttccttgagaaaaataaaatgagaattttaggtgcatggaggctaataaagtcagtgcatttagtaccattgaggatgcaaagtctcaacagttacctaatctgtgaataactgcgctgtttgtaacatcatcaacagggaccaatgggaacacactgcttaggattgcaagtatttgcaacctggtcatcctattagtacaaggatcgaatttgctactcagttcctcagcaaatactcggtatcatgtttgcgtcttcttgttataatttgtaccatattagtagcatctcaccatattagtgacattaaaatgtttttaaaattatgtctcttgggtggatggaa

SEQ ID NO: 48736 - DNA, 1069 bp, Bovine  19866880563862
  misc_feature (1)..(1): n is a, c, g, or t
ngccccttgtgtctaagtctgctctgagtctccacatcttcctccagcccatcctcctcccttagcaccagtgactgcggcgtttcctaatataaatgcaggcaaaataaaattagcagtgtgctagtagggaagccagctacccacgggcgccgtaaatggccttcccctctcacccctcctcccttctgcccaccccctctcacccccatccagccaccccgaataacccgccctgccggctgagtcactgtttctagaaaaacaaggccaggggtccagacaagtcaagggaatggtgattagctgatgatcagccatgaaaagacagtgtccccagaaaaagacagtatgatgacctggtgtgggtgacttgtccaggagagctgctgcaagccacagcacttgtcgtttaggatcagggagaggaaccaagagtgagaaaagctgctgagtcgtgtcctcacatctgccgccttggcatatggtccctttgcttgcgcctcctctgtggttgtttagttgctaagtcatgtctgactctttgtgactctgtggactgtagcacgccaggctcctgtgtccttcactatcttctggagtttgctctgattcatgtccgttgattcagtgatgctacctaactgtcttatcctctgccgtccccttctccttttgccttcaatcattcccagcatcagggtcttgtcaagtgaggtggttctttgcatcaggcggccaaaggattggagcttcggctttagcctcagtccttccaatgaatattcaggactgatttcctttaggattgactggtttgatctccttgctgtccaaggggctctcaagagtcttctccagcaccacaattcaaaagcatcaattcttcagtactcaaccttctttatgatcctactctcacatccatacatgactactggaaaaaccatagcattgactgtatgcacctttgttggcaaagggatgtctctgctttttaatataccatctagggtatgccatagctttccctccaaggagcaagcatcttttaatttcacggctgcag

SEQ ID NO: 48737 - DNA, 782 bp, Bovine  19866880566377
  misc_feature (1)..(1): n is a, c, g, or t
ncggtgttagcgacacacattctctgtcaaacacgtcagtccctccgggggccagggacagcttgcgagcggcgtctcctattgttattgtgctggtgtgttatttctcccttcaacagctctgcatttgttctggcgagaggcgcgaacactgaggtgcctgctcactgggcaattttgacaggagatgtgaaattgacagggaccgtccaccgaccgtcttaataaggcgactcctcccgctttgtagagactggccacgcaggcagccctgcctttgcctggagcccttactggggatttgggtgggagcgtaaggactctaaagagctggagcttgtttcacacctggcgcgttggcaggcgtctccggttgtgatttagcccagggactgggtactgcctgccagagggtctaagatctgtgcggggcactgagcaggtgttgcacgcattcacgcagcatacggtccgcctgtcatcggccgctgagtcccggtctggtctccattgtagggacccaagctcccacctgctgcatggtgatggggtggcctggggatggatgaaaagcctccgattgctgagggtaacgcggaacatatgggattcttctctgtctaaacagtggtggggtttgagtgtgcgatgctgtctgcatgtatattttctttagtgtctgattcttgcaaggtcagagcctcgctaaggataccactctgtagagtcctctcctggggggatgctcaaggtgtgtgtccaaagtcatctctgcttcctgg

SEQ ID NO: 48738 - DNA, 2613 bp, Bovine  19866880594182
  misc_feature (1)..(1): n is a, c, g, or t
natgcctaaaatcccccctgcacttaaagttaattccaaccaccttcatataaaaccctcaaagtctggctactgccaacctccctaaattaatctctttttttcctcattctcatcctgttggtggtgactgtcccaagctggccacggtccagctgtaagtcacctctccaaagatctcctctacagctgaataatattccattgtatagatgtaccacattctctttatgcgttcatctatcagtgaacatttgcttccatgtaaacagtgctgtgatgaatatcagggtacatctgtctttttgaattatgatcatctgagtatatgcctagtaaataaaaattttaaagaaaaaggaacttttggaaatagaaaaaattagtccttctctaaccacccttttcaagctagtgactacaacttctgtattgtttgccagggcaccctgtttattgcttcaaaacttttcttaccacttgtaatttaaaaaaaaaaaagacttttatattgaactatagccaattaacaatggtgtgatagattcaggtgaacagcaaagagactcagccttgcatatacatgtatccattctcccccaaactcccctcccgtccaggctgccacattgagcagaattccatgttctatacaatagatctttgttggttatctgttttaaatatagcagtgtgtacatgaccatcccaaactcccttcctaactatcccttcctcctgtccttcccccctggcaactataagtttgttctctaactgatttattattttttctttgtcttattcatgaatacagctctgctgactaacacagtgcttgatatagagtaagcccccccatcagagcttggtaaatgagatccatgtgtagaaattatcattattatagtcctgaaatttgctacaaactctgctttgcctttaagtatgcactggtggaatgcttaaaggtatacacatatgctttgccttttggatatccctctttttctccaggctgtgtcttttcaacagggagtgactttagcacaaggtgacagcctgatgaactttgaacccttcttttacttattatgtatgtctcaggcagacttggcaatatttgagaatttattaaatgacagtttccccttccacttcttattctagtttattttgcccaacacaatcctattaagggaaaagctaattgaccacaagcttcctttctgctgagcttagccaaaaagtcaatcactgctcaacgggagctctcctgactgtttagccaatggacaaatttccatcttgactggcttggctggtcctaagagaatagatgggaacgtgctgaattctattttgatacattccagtttcagcaaaactgagacctacccccaaggaggcagaggatcatgaagaaaggagcagtgtggaaattagtccatgaggatgcttattctgtttccatggcattcagctctgttcagaagaggattttctgttgccttatacccttgttgggctttcctagtggctcagatggtgaagaatctgcctgccaatgcaggagacctgggtccgatcccccaggtcgggaagatcccctggagaagggactggcaacccactccagtattcttgccaggaaaatcccatggacagaggagcctggtggactatagtcccatggagtcacaaagagtcaaacgtgactgagtggctaaaagctatacatactcttgtcagatatgtgggtcatggtaatgaagttgtgacatgccacaagttttcctatgctgaaggaaagccttcccagatcaataaaagatgacccttctgaaggggggggggactaactccttgatggtttagcttctagcaagctaaactacatataacatatgtgtgtatatatatatataaaacatggtacatatagcatggaagtgtaagagtgaactaggacgggaaattcacttgcttttggttctacccatttgccagcaaaaccacaagacgagaaagactagctatcttcggatagtgaaaggtagagctagtactaagtccaatccccagaaaagaagggggatggcctcaagcttgccccttcccagacggcgcaggggtaaagaatccacgtgccaatgatgccagagacacaagagactcggaatcaatccctgggtcaggaagatcccctggagaagggaatggctacccactccggtattcttgcctggaaaattccacagacagaggcgcctggccggctacaatccatagagtcacaaagagtcagacaggactgagcacacacacacagcctcaagcctttgttctcaacctgatatataaacatcatgttctgggtcatagtcagcacttaaaatgaagttttctggatgcatattgtaaaataataataataataatgcagaaagaaaaacagcaaacttgctatctcaccaaaccctgccaaataccttgacctgaatggagaaatcagaagccagtaatagactgcattcaaaggcattttcaatttccaaaaaaaaaaagcaaggcacccaattttggtacatggatgttttttagcatttaata

SEQ ID NO: 48739 - DNA, 739 bp, Bovine  19866880610147
  misc_feature (1)..(1): n is a, c, g, or t
ncttttatagctatagcttggatcccaagaaatttatttctcccgctgcagtctgaaaaagggaatgtctaatgagtttttgctaggcaagtcaaagtgtcagggtggaattcttcttcacaagacatgcttcactggaaggaagaatgtaaagcaggaaaggttctttaagaggcatataaatctacacatcggtagcagtcacactaataataaacattcatttggcgtcatatattttcaaagtgctttacagtgttggcattccttaggagaggagagttctgggatacacattttcatttcccatttaaaagatgggcgatacaggaagtcagcaacttgttcaagttcagcaaaggcgaggaaccagcctgaccgtcctcggtggaatttctggctcttggcttagatcaggctttgcacccaagaggccaagggaacagcttctggcagagtgagctgaaaggagaggatagaaagatgcaggagcaacccgtttcggttggaagatcttcatttctgaaatgcagacattgtgaactaacaaggagaagcttgtcatttgcaacactctttgaacttttgtagctttgcacttatgtattaggaatggaaacgtgcatagtaagggtggggactgcctactagactgcctttcactcattgagctgatgaacaaaccttttttgaaatgaatacgatgcggcccctttgtgggcattaagatgccaatatc

SEQ ID NO: 48740 - DNA, 1104 bp, Bovine  19866880648445
  misc_feature (1)..(1): n is a, c, g, or t
nctgagtcctggggcctcaggctatttggagtgaactctgtacctggctcccgcagggccctgcagtgcatgcatgtgtgcgcgcatacacacacacacaaacacacacaaccgaagatgctgggagggcaggaagcacaatctagccgagcggctgattattcattcccctatccccgagagaccccagggagtatttgtttgcggagaacaaggtcaatacgttctcaaacccagttgccattcatccccagacaggtcaggggttggttcctgaagcattgttgatctcagcagagatggtgtgcgaggttgatattcttagatttgctcattcagccggtcagtctggctttcagaggagaatcaggtcaagaagtgcttaatgatccgagaggaggcgctgcctccaccgctgggggctggggtttctaatgctgatcagcagcttcctcactcataagacctactggaattttctttgtgtgtgttcataaccaattttattgagaggggggtgtgtgatgttactgggtgggggtgacccagtgtcctggattttttgccttattcttgtttcagaggcacttcctcatccccataaatccccaggtgaatttgaaattttcgtattttgttttccaaactggtcttccatggacagtagcaatgcccacatattcattagactctctgtcttaatttttcggtttagagcctggaagaagaaggtaagttcttccaacagaaatgcacctccctgctggcatctgtaaaaactatctgaccagttcgcatttgaagggagggagggttttgatactcctggtttgtgttagtcgctcagtcgtgtctgactctgtgcgaccccgtggactataacccgccagactcctctctgtccatgggattctccaggcaagaagactggagtgggttgcatttcccttctccaggggaatcttcccgacccagggatcgaacctgggtgttgtactggtttgatccttgcaactagatgctgctaatgcctcattcctatgacaactgtgcacccactatcagctctgagccagggcctcagctaaccgtgtctgtatgtga

SEQ ID NO: 48741 - DNA, 1884 bp, Bovine  19866880660821
  misc_feature (1)..(1): n is a, c, g, or t
ngctcgtctgtccctgggattctctaggccagaatactggagtgggttgccattcccttctccatgggatcttcccaacccagaaatcaaacctgggtctcctgcattgcaggcagattctttactgtctgagctactatatgcatatatatatacacacatatgcatatacatacatatttatatttgttgagtatatggagggatgaaagggtggaaaaacaaatagatttcaaacattatcctgatctctagaaaaagaaaacagaataagacagttctttcccttgcagatcctctctgatgtgtgggaggggaaatctgactggtaataaggtcaggataaagcaggaggaactgataagggagagctccaagtcaggagaagatgaaaaaggctgaatctgagaaaggttctgagccctgttgactagatgaagataggagatggggggaagatgaatcctcactattaaacatcttgttcaaccaggagagcatagggtctcatgctggagtttattgcttcagtttctaacctttcataagtgcttacttggcagccctatcaaaaatggtatttgcttctctggaagcatcttaaaggaacagtaccagacctcccacttttttttttttttccatttaggctataaactatattggttttgtgcattagtcccatgggaggaaaaaaaaaatcacatgctagtttccagatgaaatggcatttagtaaagtgtacatttaaggtatttttcagggctggcttttaaaaagtgcatgggaagggtatttcttcataactgatgataaagtgttataatacaggtgtctcttctcctgaacctctccccataatggtgtttgagaatttttttttgagaacctcattagatatgaaagagaaagtctctcagtcgtgtccaactgtttgcgaccccatggactatacacagtccatgaaattctccatgctagaatactggagtgggtagcctttcccttctccaggggatcttcccaacccaaggatcgaactcaggtctcctgcattgcaggtggattctttaccaactgagcaatagtgataacttattaatgcttcagagcatcatcacactctgcttcgagttctgtgtgatgaccaccgctgcagcagaaacacagacctgtgatgggactcagaccgtcaactggcaatttgcacttgatgacctctaggtgacaaacaggaggtcacctgccaccagagccagaagatgtgggtgttaccaagttgatttctaaacaaagagctgatggcaggtgtaggttctattaggcaacagtagaatgtatggtgggcttcccaggtggcgctggtggtaaagaacctccctgccaattcaggagacataagaaacacaggtttgatccctgggtcaggaagatcccctggaggagggcatagcaaccctctccagcattcttgcctggagaatcccatggtcagaggagcctggcgggctgcagtccatggggtcgtgaagaatcagacacgactgaagcgacttagcacagcacagaggtgtttggtggagatgacatccaactcacaaagaatttatggcatgggcaggaacgccaccaaaggagaagctggttattgttactagaatatgaggaatgttactagaatgtagatgctgcccaggaaaaagtaataccatcactctttaattgcatctcccgtttagtttatgttttacatgtagataaatatgtgatccattttgagttaattttttgtataacgtgtgaggtttaaatcaaggtgtttcatttgtttttgcttttttgttttttgctttgcatacagacattcagttactctaacaccat

SEQ ID NO: 48742 - DNA, 1077 bp, Bovine  19866880663615
  misc_feature (1)..(1): n is a, c, g, or t
natcacaagagacccattgctcctgatatgagtcaccagggagagtcaagtgttggttatctgattaaaggggtgtcagaggtcaggatgcctgcagaacttgagagagcctcaaataacaggttttaaagagctgttttctttggaggaaatgctttttgcacttggtgtgccatgaacccacttgttaaataccccattagcaacagaacaagttccccagatctgggatgaggctgtgcaggcagacagattcgacagacaagcacccagcaagaggtggcagtcacaagcggcccctggcacggatcccattctgcttcctgcagccaccccgcttcctgcaaagatgcgacctcttggagctgttgatttcaggcttgatgctggtcttgaagtgagagggcggcccctggccatcaagagccaggctggcctgacacatgtacgcacggttaccagcgaaaccagaaaagtgtcttcgcatctgataacttgcaaggtggggggagacctggtgcctattatttattctaataataaaccattaccccaggcatattcttattctccagatttaataaggtattttgtgaaccaaggcagaggacggtgagagaaaacaattgtggttattatgaagatgatttctatttgtttcagatgcagaagcaatcaccacttttcccttcataatcaagggttataattgctcccccaactccaccccaatcccttgctcggtccaagaaaatctgaacactcaccgaaatgtcctgaggagctaaaagggcttggcatatggccctgaactggtcccctgggaccatcattaccttatagccagagaactctgattatatagcacagggctctcaactcagattttccaatcatccccctctccacatccagaggtgagaaagagtggggagggccaggtgggtgatttacatactatttgcatacctctgcttagatgaaatacagttttcaagacatttttaaactgagatgttttaactagacttttttttttcccccttctggttaaatgttgcaaaatgtgatgatgat

SEQ ID NO: 48743 - DNA, 1243 bp, Bovine  19866880664540
  misc_feature (1)..(1): n is a, c, g, or t
ncctggtgggctgcagtccatggggtcgctaagagtcagacaggattgagcaacttcactttcactttcactttcatacttaccagctgtgtgaccacagataagttacttaaactctctgattctctagcttcccaccttgtcagataaagtagaaatgatctcattccatacatttataggaatatccatggagattaaataagataacgtatgtagagagctcagttcagtgtctagcacgtgactagacactggtcacccatttactagggtgactagacacccaatagtaaccgttcagtttggaaaacttggagtccaaagtaaccggtaacagccagacaggtagacacaagaccgggatgcaggtgacattcttgggggcattcatcctttgtctctttgcttcatgaaatgtccatcccccagatgtgacaaagctccccctttctccctttgttttctcttccatgagctcccacctggagttaagaattgaacgtcttaaacagattcctattttgttttagtggtcagttcctggccagctctaactgtgagcatctggttccttaaggccaatctgtagatattctcagtgacccctacatctcctgacatcactgtattcatagatggcttctctaggaaaaccattattaatgctgtaattaatatgaatgactatggtatatatcaagtgggtcgttaaggcagaggtggagatgcagccatttatattaaagatacatttacattttatgttctgaagccaaaacatagaaagcacttaggttagaaatctcactttgctacactttggaattattttaagttgctggagacccttttcatgcttgcttaatgctccactgtcaaagcctctgggaatctgaatgagttaatagggtaggtttttaatagaagtatataatcagctaaatcacagcctttaatgtcacaaatttcaaagaccaactgatttaattatgtgttacttcatagacatgggaaaaaagttttatttgatttcactggtctctctcccacagacattcagctgcaagaagatttacttataatttattgtgtggaagaatcttcctcaagcagacaccatatgtaactctgcagcttacctttaagggaaaatattgaagtaacaccctcgagctgttctgttctgtgttgagaactcggagctagatttctatctttgtagtgagtatcgaaaccttgc

SEQ ID NO: 48744 - DNA, 1265 bp, Bovine  19866880718239
  misc_feature (1)..(1): n is a, c, g, or t
nagatggttggatggcatccctggcttaatggatatgagtttgagcaaactctgggagatagtgaagcacagggaagcctggcgtgctgccgcccatggggtcgcagagagtgggacaggactgagttgctgaacaacagtctatcatctgtcagcaataggtcggggtatcattgtctacgaacagagagacagagggagtaaggagaccgtgtaaaggtcagataggggttccaacaagtgatgtatttgagctgggacggtagccctggagttgtgtgggagccattaggaaggagactagaaacacgacccaggtgaaggaccccaccacctgtgtgtgtccctgctgggctctgtttcatccgcagccccatttgccctccctgcccctgctcagcgcagatcactgttgaccaaagagcaaagcatttgcccaggaatcctgtgtctctttccaagggctggggccaagacgtaggacacagtagatttttggttacaacgggccttctgaaatagtctgtgcccgtctgcccggagagctgtgagtccccggggagtggtgagcggcagcaggtgactgaactgtgaaactcagaattgaaggagagagcgattagactccatccggcacactttctgaggaacggggctgtcagtctgaaaaaagacaccgcttctcactgcttcgattcctcccaccaactgttcagctgcccccgggtgctagaaggaggaacgtgctctaggagggaggcagagagggttcggctgatgacagcacaaagtcacagcttctgctctgggaaggaagaagcgcaggctcccagggctcggggaggtgggggggggcacgaccctgggattcttgaaagagccattgctgcaagatcccttcctctgtgcttgctggcctgcacgccccgactcatgaagggccgcctgcctcggccttggggtcggaacctctgcttcggctcctcttttcgttctgagtgactgacagcctctgctccaggaagcctttaactcagccaagccccccaggcgggctgtcactcggagagaggaacgttgcaaagctacctggtgaaattagcagtgatgccaacgacgagatctctcattgcttttctttctctttatatgtttatatgttccgccttcatcaggcatctaacttttttttggcctgctcccatctcatgcagctggaagctgggaggacctctggccatcccaatcctaactgaggactcaag

SEQ ID NO: 48745 - DNA, 1509 bp, Bovine  19866880743938
  misc_feature (1)..(1): n is a, c, g, or t
ngcatgtgaatgaatggatctcttatattatcaggggccttggtgctggaggtttcactggaaagaatgtggattctggccctgctaccttcctcttaaacatgtcagaggtcgcaaagagcgtgtttcctttccatttgaattctccatgggcccatgcaaacattgtatggattgccatcaaattagtcacaatgtcttggtcttgaataaaaagctcagttgaacctaacatttaaaagtaagcatttgtgaagtgagagagatagttatgggcttcccaggtagctcagtgggtcacgaatctgctggcaatgcaggagacataggagatgcgagttcgatccctgggttgggaagatcccctggaggagggtgtggcaacccattctagtattcttgactggagaatcccatggacaagaggagcctggagggctataatccatggggtcacaaagagtcagacatgattgaagcgattgagcacgcttgcttgtacacagaggtagttctagatttagaccactgagacaagccattgtatcctagagttgtcttcagtaacagctactcagggagtactgggtccagattttgcctcatgcttgtccatgtgacagccatgcttttcttatcaaactacaggccttctgggcatgaatatgacccaccgaagtctctattgtcaccaaagacagattacatggctttcagaacatgcagaagaaactttcattaaaagtagaagaagaaggggctttcatgatgactttttaaatgacaaaacagagatattttcagacatggcagggtgcctcctcctgttcccacatctgaaacgtgaaaacagccctaagaaaactaggatgttgccttttcttagcttccatgaacattctgtgaactaagcttactttcctgttttatactgtatccattgaacacctttcagaggttttcagagaaatattatttgatctgagccggtctaaacatgggcggtacctcttggcccgagtgtgtgcctataagctccaggattttaactttgtcgcatctgtcgagacccctccagtggaaactgagactgttgaacaagggtgaatgccgatgttgggcaaatagatcctagttatgtctgcgaatgagtcgtgtctatttaacttgaaaatgtgccagctgtgtttacatcattagtaccaaacttcccaattaaactgttgatactataaatatagtacacaactgccttagaaaggggacttacatcagcattcttcttacggcttgtttcactggctttgagaaacttccaccccatggcaactgccaaagaaacaaacaatggagaccatttcagggcatgtggtgccattgctccatttagggaatgagacatgcgaagattactttttgattggtgctgtctcaaccggcagcttcccaggtggctcagtgttaaagaatctgcctgccagcatgggagacacaggagacttgggttca

SEQ ID NO: 48746 - DNA, 931 bp, Bovine  19866880789900
  misc_feature (1)..(1): n is a, c, g, or t
ntggcttttctagtttaaagccctgctctggttaaccaacccacaagtttggtttgaataaatgctagggctgggagcctaccggggcgctgttagagagcatctccagaaatcaggcacacttggtatcccatgtcacatttccaccggtctggaggtggccttcattcgccaaagggcagccctacaaatcacagctgagtaggctgtctggatggttccttcggagtctctgaatctggaccgttgtgtcgtgctgcggtcagcacttctctgagaagcaaaaagatgatggggtgctgaattctgctttttaagggcatgcaaatagagtgttgatttttttttttttaagtgttctttttctaaggagctgtcagtgcttaagaggcgtttttcaggtagggtgcacgcacacattattttgtctcctgtccagtccctaaagccattttctgtcccattttattcagagggagaaaatagaataaaaaccttcagagcatctgcgtgataaaggagtcacactctgggttattatgctgtaggtgatgaagctggggacttaaagagacagagattgagttggtttgggcagagtctgggactccggaccccatcaggtcagggtgtgtatgtgtgtgtgtgtgtgaagtgctttgataaaaatgcctctcccaccaacaggctgttaggcgcggcgctcagaaacagcagtattgtcttagattccctttcagatcatgtaggtgtctataccatgccacccacacaggagagcaagtgagctgtgaaatatattcattgttagagtcccggggaaatggtggcaagcaatcggaggtaataacgtccgacaggcaggggaggccgccgacattacctgcattatttcggttgcctttttcattataggttcgggaaataggca

SEQ ID NO: 48747 - DNA, 2066 bp, Bovine  19866880800356
  misc_feature (1)..(1): n is a, c, g, or t
ncaggactagacatcttttctaaatgtttggagtctttaccaggttggaaaacagctcttttcaaccttattcttggggcttaacgccttcattattttcatacatctggagaagtttggtaacggaataaactagagggatccatgtgatctgagatgaaatattctgaaacttggagaaaaaaagagattgccagaaatgagtggatatgtgaaactaaaatgtgattcattcagatagcaatgttaaagtccttcgaagaaggggtccaatcctttgcaatttcccaagtagaaacatgttttgaggaagcttcctgaaactggattcactggcaggctgctgtcaagaaaggcagggggaacgagaaatggggagggtggggggacagatgggggatggggtgaaaagccaggccatctattactcatcatgtattactcttcccctcagagatttctgaaaagtcatagtgaaaggaaaactaaaccccactcattaaacatgcgttgtgtgaatctgcatgttccaaatgaagcatgaacctctgttggggtggcagcttgtgtttcaaaccataattttcaaaattttctcttaattgtccagatgaaatgatatcctacccagacaagcctttcccagaccaaaaacaaaaaaaaatcagcatttaccataaacaatacactaattttaaaaaaagttcccttgtgtatttcaaaataatcagaacgggagagttatatctctgtcaagtatcatgcacccaaacttataaacatcccatctgctttggagtataatttatctgagttcatctccaaatttcacctctcaatggacacggtcaaaataatacctgtcattccctgagaaaggaaaccgaagacaaattcatcagggcttcaacgtgataatctgggtggtggctccagctgacactattttcggcttatccgtttacctgcttgtttgtttctgattggctacaaatggtcagacttaagatattccttaagatactccttccctatggagttctgagttctttctgatgctgtgtgccctgccacagactagatatacactcaggtggtcaaccgaagcttgtgggtggggaaatgagttgaacatacaggtcttaacagcgatcttaaattggatcaaacagaagtgagtgtacattcagcactgtttcaaaacactgtgataaaccccgtccctgaaactgaagtcattaaaacactgcatccttctttttaaccgaaattcactacttaaaaagctccagatgcttaaaaagagagaggggaaaaaaaaaaaaaaaaaagactcagaataaaccaaaggaataatcagcttggaggatttttcctgcctcgtgcttaagttatataaataaagagaacaattaatgtcaactgccttttattctccattctattagctttggggagcttcaagctaatctctccacaaagaggggacatcctgggattaaaacacaaggttttctgcagaaaaatgggcccgccagtcaagacagctcagggaaataagacatagcgcttcctccactcttctgcgactgaatcaaatggatttccaggagggcagaaattcagagagaaggaaagagatcccccaagcaggtgaggagagatctgggcagaacctcgggacgtggaatgcggaaggccgcccctttctgctccttttataccaaccaggcacatgagtaggtcagcgaatcaaaacccagaaagtccccccaaatcacaggcacaggatcaaccccccccacccccaaatcacagctgcaaactctcctgggttcacaatcagcaggaagcactccttcccaagggggtgaaggtctaggcagcaaaccaggggtctagactgtgatgggagcttgggtgcaagtctccccgatgcacaacctaccccccgcccccagcaatctcccaactccccccttgactccattccagagttctgccatcagataaaagcttcattctcaataccttttagcacgagagcctgcatcacctgtcattat

SEQ ID NO: 48748 - DNA, 2537 bp, Bovine  19866880837495
  misc_feature (1)..(1): n is a, c, g, or t
ncacccccttcccgtaggcctagccctgtgcaactcgtctatcaggctgttcctgagtcaccttttgcaataaaccggtgatagagtagttaatgtgtctgagttctgggagctagcaaactaattgaacccaaggaggagctcgtcagaacctcccttctacaatcagtgggtcggatgcacaggtgacaatcacaggtgacttgggacggggggaggggagagtcttatgggactgagcccttaacctgtggcatctgatgctgcctctgagtcagaactgccatgaactgtgggacaaccaggggtgtcagaaaaagacaaatgcactttgtactttattatcactaagtcactaagttgtgtcccactctctgtgaccccaggctcctgcagtccgccaggctcctctgtccatgagatttcccaggcaagaatgctggagtgagtagccatttcctaccccaggggatcttccagacccgggaatcgaacccgccatctccagcattggcaggcagagtcacttggttggtggtggtgttcagtcgctcagttgtatttgactctctgtgaccccatggactgcagcacaccaggtttccctgtccttcaccatctcccggagtttgctcaaactcatgtccattgagtcagtgatgccatccaaccatctcatcctctgctatccccttctcctcctgtcctcaatccttcccagcatcagggtcttggtactggaatcattttaaagaaaaagagagagacggggaaggagggcagagtggtaagaaggcaggaagggagaaagaagtgggtctcccctgcagacaagagtcctaagtttggatggagctggaaaagacccagaggaaggaggtggcatttgaggagctgctaaagccctgggtctgatgttcctggaattagtgagagagaaagaaaccatgctctagagatcagtctagaaatgggattttattctgacttctgtgctcatctctgccgtgataagtttcagagataattcttagaaactcgaaatgtgctttgctgaaaatctattcaaatatgacagttatcagatgtattgaaaacaatagtttctgagagattaaaaacaaagtaagtttaatatacccaagttccttcccctcctcataaacacggcagctgctcatgaagtctgccggtcccccgagctcagcaagcagagacacttttaaaatacaatgtgaaaccgagtgactatttcacagaaggaacggcatgtgccttcccgtccacaggtttctgaaaaggtggattttaatttccgaaaagacaaagccaagagaaaaagaaaatgcctatctccatgcacttaagaactatgatattacttagctggggacattttattctggaaaaaaaaatgactgtcaatggtgattaatattctccttataattaattcaaaatcttattaaaatcaaacttttataactatacatataaccaggctgtctatgtcaggatggaggataagtcttgccattaattttacctgtatcatttctctcgttctccaaaaaggcaataaaagatacctccttgaaagtcagtaatgccgggccaccctcatctccataatgacacaatttccaattcacgcctcattttcattaatgtttctggccataaatttttaagcatatgataaaaaatttctgaagcggcataaaactaacatgaagagggagttcattagcatgtgaccctaattagaaattccatattaacttcccatttctacttgtgcatttccaagaacgtcacatctctattcttgatgtgcattcacatcattgggaggaaatatcccttttggctgttttcatcccttggctttattttttaaacgatccatgtgtttcctctgttatgtgaataagccaacagacaattgtatcacaggacgcctttcatgttgcaaattatctggaagaattgtgagaaggtccttacccaatgctttattaatgataccagatcataaaagggggggaggaaatatgctgactctgtctcttttctaatgttgggtgataaaaatgctacttcaggattcagaaggttaagttctaatgtgtattttgaatagagtgtgttggaataattgcctcataaagcaaagcattggccgcctgctaatggctgcatagtgcagggctcagcaaagacggccaagcttactggaaaaagtgctgtgcctcaacttttggagcctccaagatgaagttaactttcccctccccttgctttgcagaaaaggtataaaatctcatcacctggttggttttgcagctcagaggagctgctgctgctcacgtcactgagagctggtctccaaagatgccccttccatggactgtgcctccatctgtcttcacccctgctttggcccccttcccgtattgtgcaaccaatggaatgtgctggaagggatgctacatgacttcagagtctaggtcttcagtaagaagtctctcagcttc

SEQ ID NO: 48749 - DNA, 778 bp, Bovine  19866880885209
  misc_feature (1)..(1): n is a, c, g, or t
ntggggaagaaaaggcattctgcttggagggtgttcagttgacttatcctctccatgttccagtgtttcctagttaagcctgtctctttgaagctaagaagatgcttgtgaacattcccacaaaggatggagatcagacatgacgaagcacatgcagataagaatggggatggtggggcagaatgttcaagggcctccctccccatttaggtgaaaagcacactcggaatatgggcttgaatcttatatttagcctccactcatgatccttcaaaaatgtgcacaatgtaatgctctctatttcaggtcttctttggaactatgatgcaatgcagcgaaataaggcaagcttaaattaccttgctgcttcagcagggctaataaagacacaggccatgactcacaaacatctatgtcttccgaatggcctagggcctagccccaccaggaccctcaagcttctgctacctaacaggatagggaggggcttcccagatgtggagttaattttagttaaaaaaataataatgatgatggtattgaaaggaaggttttagagaacaggcccaggaggaggagaaagtgaagtggttgacaaggagggagaaagaagtccagcaacttcacagtagatgcaaactcaagcatcctttgggatccaccaggatctgaaaattattgaaaatgacagcagtgaatgtttccagagcttctgtttataaagagatggtggaacccagatatttgtgtaatggcaacagattcagcatttcaagaa

SEQ ID NO: 48750 - DNA, 2577 bp, Bovine  19866880887480
  misc_feature (1)..(1): n is a, c, g, or t
ntgaatatagactgggtatctgacaataaggtttccctggtgactcagtggtaaagaatttgcctgacaaataggagatgcaggttccatccctgggtcaggaagatcccctgaagcaggaaatggcaacccactccagtattcttgcctgggaaatcccatggacacaggagcctggagggctacagtccatgggtttgcaaagagctggacacgatttagggactaaacaacaccaatctgatgactggattaaggttaatgctcttagttgcaataatgtcatcaaggtttttcacagaatggaatttctttcatatttatttcttttgtatttagaggcaagtttcactgtgtggaaatatcctttcaagtggttctgcatgtcaggtcaattcttaaatcccagtgttagtatacaaggcccactgtatttctctttctcctattctacacatctgacgttttttgtaacaaaaaatactctttaaaaagaaaccagaacatttttctcagtggaaatggaaatacacagtggagtccaggtggttcaagcatgaaaacactaccaaaaaattggaagcaacagaatctctggttttgatataccatgatgctactcgggagtctgtctgctgacaggcagtgacataaatagcctaaagggtattctgtgaaacagcagcacttgcgtttcccacaggtaccagagatccctaactctctggcccccttgatctatactagcacacactaacaaaccatgggggttcccagccgataagtacttgagaggagcagcatcaagggtcacaaagcaagtctccactgggcatttgcatctgtgcctgagaatggattaagtttgttagcacctagggatgcaatgccatgaaccatgagtcgctgttcctcaccatgtacctgtgagccttgccgatgctcagatctttacaagccaaggtagagactttacaatctaaaaagtaatccaatcgcttgacatttgtgatcatcatttaacactttcagtcagaggagaagaaaagaaaagaaaaaagtgtatgtgaaggtaaactgcctaactaggactatctctgagaactacattgatttatgattctgacacacacttatcagcccagatgtttctcaagatataataacagtggcaggcgtctcttgcaaactggtgtctcccatctggccaagaatgtgtgtgtccacagattgatccatattatcatggggattactaggatgcaatatcatcggagccagtagacccagatagtgcaaatctagcctcatcgcttgcagacaaaagcatggcatacaatggacttccacgtaatccgtctctgtcaaatgcattaaggaaattacccatcagaagcatcatggctgagatgctgtgattaagcacaaacatggaaatgctcaagggtaggggggaatcattaggggaaaacattacacacaaacaccgccttcaatttactttctttagaattagttctgtggtcatagatatttgaaatctgcagagacccataacatgaaagttgtcaagcatccactctagctgaagctatgctaggtgttcccaccagctaccccacaatatcgcagttaggtggatgcagtcagattaactccacagacattcctccactgactgtacaatctcaaatgagttacttaatctaaggctcatccccttatctcagcagtggtgcattaatatgcatattaggtggtcattgtaacgcttcaaagaaataatgtttatgaagttttaagcatacatttactgcaacatgaccatttttatacatagcactaattgacaattatgagtaagcattattgctgttgttcattagtatccccttgaacacacacacatgcttgtgggtcaataatcttgtagaaggtttcaagctgataagcagaggtaccggaatttagaatgaaggttgctctgtctgtaaaagttcaagcactgtctacagctccgtattgctcatgttcttaaaaaaaaaaaaaaaaaaagtttcacaagagttcacaaagagctcaggtatgggagtgcatatgtctttatgcacatccaagggattacaaccttatattttgaatcccttgtgattctgagttatcctgctgttgctcacccagcaaggattgccttcacaggcattctagagaaaccaaacttaaataactaagtgaatttttgaccataagggtgtgtctgtgggtaactataaagaggtcaaaaacctacacacatggtgatgaattaacgccctgtgtcatgtggtgagtttgtggatgtatcataaccaccatcatctctcccctccacttctgctaacacctcctagctctcccctctgcttccactgttcccatctctggcccacaaaattcctgcaaattgtaatgtagatgatgtcccctctctcaggtaaaagacttccattgctccgcctgaaattccagctccttgccacaaacaataaagattttctcaatctacttctccaattctcctttctcctctttccctgt

SEQ ID NO: 48751 - DNA, 1499 bp, Bovine  19866880889082
  misc_feature (1)..(1): n is a, c, g, or t
naatagaacaggaaagtagtgtttaccctcccactgcctccatttcagctcagccccaaacgccctgttacataaaggaagagaaataatgacccagactgggcacaattcctcccttgctgaacttaccagcaagttattaaccaggcttccaccaacactctcaacttggcaccaacaatagctgaagttcagttcagtgatctagatgaagggaaattagattcaggcggggataacaacttgtcctggagtgaagagcgaatgcataattcctctcatttgtccccactttatttaatagcccacatagggagcttatttaaaactacaaaacaacaccacaccaaaccagccaatatcaggagacagtctcattgaatcatcaatattacaatagtaattattattattttcttctgtgatatagtaacaaaggggaaggcagggagcagatatctaagagagagtcagaaatacccttttgtgctgtttaaactgaaggcaaggaagcgaattaagacagagctcatgcactaatcctaaatgtttttttattttttaatgaagtataattgctttatcatgttgtattaatttcagctgtacagtggagtggctcagtcatatgcagacatatatcccctctctcttggatctccctcccaccacccccatcccagccctctaggtcatcacagagcaccaggctgtgttcccttcacttcttttctatgtcattgttttccatccattcattgaatcagtaaccactggatacctactatgtgtcattcattgaataactaaccattgaatacctaccaggtgtcaggcctgatgccaggtcctaggagcaaattagaccaggtctccagtttcacagagcttagagtttaaccaggggtggagagacagacataaatcaaagaaatcaaaaattacaatgctgtgaagggaagttatactggggccacaagagtagaaaatggagatcatggatgtaaatccagagaggcttcttcaaagtgacgtttgagaagatgcttgaagcatgggtggcattcaccaggctgaattgggaggagagagagcaacggagaaggtctagggaacttgagggagtgaagtgcaaagtccttaagaatgcaacacatgaggatggatggggctggaggcgaggctggagaagagagacgtgctagccactgcaggaccatgtccggttcacaggctgtgccctatgaacagggaatccactgaaagacatgatgtaaataaatgctgtgatctgtctgtatttttcagctgttattcaggcatcctccctggcagacattgcacactgtctatctacacagtatctcatggaatcaatcctcctacaggggagtaaactaaatattggagacagtatgtgacttgcctgagattgcccacttgtcatttgccagagccaggattcaaactcaggtctgcctaactccagagcacttcct

SEQ ID NO: 48752 - DNA, 1446 bp, Bovine  19866880926393
  misc_feature (1)..(1): n is a, c, g, or t
nccttcaattagccttcatccgtaaaacagcatcctcctggtggctcagaggtttgattatcccacccagggaaggggaagctttcaggagagatttctgaaaggagagaccatcagagagcaaaccagtagggattgtctctgagtaactatatatgcattgcagttgaatatcatcatattttgcttcttaataatccatcctcatctttgttaataaccaacagataccattcctcaggatgaataacttgcaaaaaaaaatcattaaataaaagtcagttaattgcatttcttaagaaatccaactttttaatgtttcttctgagagcagagctgtagtatagtcaaaggatcaattatctttttttttcctcctttttaaaaaaaacttgcagaatacaacattttctttccttaaagggctgcagacacattcccatttctttccataagaataacttgaaaaggatgcaaagttatacagtcgacaattcactgcacacaggctgcttttgattatattgcctcacaaactagatactttgctgggaagcataaaaactgtttatcactaaacatttgagattccactcagataatttacacataattagacagaagcccacacttccgagcggcggcatcacctcctctttcacagactattctttaagaacatttttggtagcataatgagtattttatgaggatttgtaatcagtcgcaacgtaggtgggaacaaaggtgaattactcctcaacacgatcaaatcattacataactcagtgtggaataatgatgagctgaggttggcagaggtaacctgcccaggtatttggaggtattagtaaattccagtcttttccagaagcatagaatcaattaagtgatcccttgcatgctcagtcacttcagccatgtctgatgctttgcaaccctatggactatagcccgccaggctcctctgtccacgggattctctaggtaagaatattggagtgggttgccatgccctcctccaggggacctttcggacccagggatcaaacctgtctcttctgtctcctgcgctggcaggcagcttctttaccactagcaccaccttggaagcctaacagttctctttcgctcctttaactactgctctttactctaggaagtcaagaaacgcctggagtaacaggcaaatttggccctggaatacggaatgaagtggggcaaagactaatagagttttgccaagaaaatgcgctggtcataacaaacaccctcttccaaccacacaagagaagactctatacatggacatcaccagatggtcaacactgaaatcagattgattatattctttgcagccaaagatggagaagctctataagtcagcaaaaacaagaccaggagctgactgtggctcagaccatgaactccttattgccaaattca

SEQ ID NO: 48753 - DNA, 1410 bp, Bovine  19866880950191
  misc_feature (1)..(1): n is a, c, g, or t
naatgatggggtggacacgtcgcagtctccagtgcccatctcaagatccttccaaaattcagttgaggaaccgacattattttagaaccagttggtgtcagctcttttgcaaagcctactttgaaagaactggtgtctccggagctgtatgtaggacagaagtggtgagcggaaggcttatcccagctctgttactcaattagctgatccaactggatcgagcaagttgcttaacgtgattcaggggctttaattgccttctgtgaaaaaaaataggggtaagaataactatttcatactgctctttgcaagattaaatcgaatccttagcacagcatctgggacagggtgagcggccaatggctgtttattaaaaagtgaatgaaagaatgaatgaatacctgtgttaaaagaagtagcatctgtttatccaacatcattttttgttttccatttctcccacgtcaacatgatacatgccccagtggcttgacaaggacgcacacgaggcatgtagggagtaggggtctctctcgggtcccttggttcctcctacctgtcctggctttcttccacttttttctcccgacccctggaagtcctgctggtggtaccgccttgtaaagtggctgcacaactcaattaatgctctgtgacaggaggaggggaaataaacatcgtcttgctcctgtcggtagcaaagctatttactttcaaaaactgacagaatcgcactgcaggggcttcacttatttctattcagaatgtccttgttctggatgcaggaaacctgagccactctttcaagttaattcccataagcttcccttgggtgggagctggctaaagtgaagatggtccctgggagagtccagggagtccctccggggcttggtgatggccgggtccttgactgatgcctgggcaaatgtcccagtctggggatggacggtccagctgacatgtgcatttttagatcctggatctgtcctgccagagggcatatgtgtcatcgtgtcctctttgctgttgttcagttgctaagtcttgcccgactctttgtgaccctgtagacggcaacacaccagcttccctgtcctcccctgtctcctggagtttgctcacactcgtgtccattgagtcagtgatgctgtcttgactatctgaggatagatatccaactatctcatcctctgtcaccctcttctcctcctgccttcgatcttttccaacatcagggtcttctctaatgagttaactcttcgcatcaggtggccagaggatcggagcttcagcttcagcatcagtccttccaatgaatatccagggttgatttcctttacgattggctggttctccttgcagtccaagggactctaagagccttctccaacacaattgaaagtataa

SEQ ID NO: 48754 - DNA, 748 bp, Bovine  19866880976307
  misc_feature (1)..(1): n is a, c, g, or t
ntcaacatcataattaatcaattgcaaagcaatggcctaaaaacaacactgatgaagctcctggtgacctatctgtttctaatctgctacagaaatagaatatcgctgtgaaagattagataatataggacaggcagcactggactttcagctttatgaaagcaagtcttcattaaaaagctgagttactaaacactaaactgaatgtgaaaaatgacttgagaaacccaacctaattagtgctgggacctttattttatatgatattactgtgccctcgcttgacactattatctgtaagaatagaagtcttgagtaggttgatccattttgagccagaagtcttcatttttgtaatagctacaatatccagccataaagccactgttccactcagacagtccacacggcacaaagacgccagtgggtgacctccagtaagggtcttcagcattccatagagacagttaaccacagtctctattagccaggtagcatgggaaaatctaataatttcttcttccccttaaaaccacatagctgtccatgtccagtttttctctctctggcagtagaagttgcagcaaatccaaccacattatcctgaacgctagtgtcttcaaagaatatttaggccaccaaaaagactgacttggacagggagatgcttagatttatatgaattaatcaataagggccattcaattgctgcattgttcaggcaggtattgctaaaatcgtccatgtt

SEQ ID NO: 48755 - DNA, 1601 bp, Bovine  19866880978763
  misc_feature (1)..(1): n is a, c, g, or t
ntgtaggctcacgccttggcttttctgcacttcctgggtttgtcttggggacacttgatactgccctcttccgggcctgaaatgcacgtggccatgggtgcagctgaaattgcaggagccggggaatgtgcttttccagactgtgggagccacctgtttctgggagtgccatggaaacgcacattccgtcccttgatcttgagacccaggcaggaaatgttcagctgtcagcagctgtcccttctgatccactgccgaggagtttccagtcccataaaaagctcatcgtgaccctcactagtgattttgtcacctctctctggcgctgagcaggaaacaggggttccttccaagtgatgtgtgggcataggtttttaattggggtgcctgaaaaatctcccctccaactgtgtgtcagactaggagcatatggtcttgccatggagggattttaaacatctaattggttgtcataataccccatgacggaatcatccttaagaatctctgcagcagagatagccatggctctgtggctttgtggcttctgggggggaaagtcatccagtctttcagaggcggtcaactggatactgcaataccgtgttacctaaatctttcacctgtccccaaacagagcagagaggactggcccctcactctggggctgtgtaggaggagcctgagcttgcctcatcccatcctggatgtggttgtgtgtcctctttaggaatagctggccattctctttcacaagagactgtcagctgttgagcagtagtgttgctgaaacttggcccctgttcaccggtgccgaaatgcagagacagtgttttggatcaagtagaaaagagtaacttttattgctctgcaggctaaaggggccacagtgggctaattctcttaagactgtgtgacccaccctggaggtagtagtgaggagttgtatcttgttcattgagcagggcgtgatcagcctgtggacattccttggattggttggcatcaaggtgaagtttcaagcatcatcagccttctgcttgcaaccagtctagggtctgtgttcttgtggtcagcagtttccatctggaggggatctgcttcctacaaaacaactcagaaatgcgtgccaggtctttatctgtagctttcagggaactgggagttcagtgattctgctaaggggcagaattatagtttaaattgttaccagttccttagctcaacagctagtcttcatttttgcatcttcacgtttcccatcattggctcttgtttagtcactaagtcatgtctaattctttgggatcccctggactgtagccctccaggcttctctaatccatgggatttcccaggcaagaatactggaatgggttgccattttcttgccgacccagggatcaaacccatgtctcctgcattggcaggcagattccttaccactgagccattaatccttgagtcagcattttaattcaaaagatcaggacacagagtctcgtacacatcagctggggaacagtaaaatggacagagatccatcttcccaccaagttttgcttcagattctccacctctgttgtctggtctgttctgct

SEQ ID NO: 48756 - DNA, 1348 bp, Bovine  19866881010844
  misc_feature (1)..(1): n is a, c, g, or t
ngaaatcccatggacagaggagcctggcgggctacagttcctggggtcactaagtcggccatgacttagcaactaaagagcaacaacaacaaacccagtcctggcactgacatgtgtctggagtttggagctaagctacctgagccccggcggtttgtgttgactcggattccaaatggctctgtcagcccccatccaaagccaaggtaccaacatcccaaagcggaattgcatctcactgctggcaaaacagctcttttgattccatggcaaccctgcatcctaactgcattttgcataggcatttaccctacattcatttccaaaatgaaatggtatcttgtactacacgtgtttcttgtgatagtttgtcctgtgaattcatttaataatgaagcatatggtctgtcttcccattttaagaaccggggtcgtgttcacaacagccaactgccaagcgttgcacatacgcaaggaggagcttttcagcgtacgattttgaggatgaaaagaggctcaggtgagcttgcttctattaacctgtgccaatgagaaaatgattgtattctcccacactcaatggcacggaagttggtgaatatttagtagcataatcaaggataacaagtgcagaatgggagcactctgttcaaacttcctccagcttttcacagtctgacagcagaggatgtgtgtttattataaggaaaatgttgtttaaagggccctttgtgtgtgtgtgtgtgtgtgtgtgtgtgtggagaaaacaggttaccacatacgctgtagggatgtaaatgaatgaattctttcgggaggcaaattttagcaacatttatgaaaagtgaattgatccagcccttgccggactaagaaattatcctataaatatacatgcacaagagacagatgtataaataaatgcaatgcttgaaataggaaaaaaaaaaaaagaaacttaagccaaactatttctattggcattaataaggaatctattaaataaataccacttcattcataaaacaggatacaatgaaactattaaaaataaattagttgtatacatccagtatgaaattattatacgtggcatattcatttataaatattagcactagccagttggttaatttctttctttctttctttggtggctagctgatgaatctttcatggaccaattctgagaatattgctacgtctcttatctatggttctttattttgtttcaactggaataaggttgcattacaatgttgtgatagtttctgttgtacaacaaaatgaatcagctatatgcgtacatatatcccctccctcttagatttcccagcccacccccatc

SEQ ID NO: 48757 - DNA, 856 bp, Bovine  19866881048229
  misc_feature (1)..(1): n is a, c, g, or t
ncatgtggccacagccttctggggacagactcttggggaccacctacacccctgttccatgcggctcctggcacactgtgggcgcttaataaatgctaaataataagaatagctcccatctgtcggtgcccggtggtggagaagatgtttgagcacaggacggccgactggcaccgggcagcttgtgagaagccttcagggaaagacgcagctctgagtcactcagagggcttcttgtacccaggggtcagctgaccctgtgactcatcagaagctgggcaagttcattaagcatgcaagtgtccactctgaaccccagatcgtctccatcagaaggcagggagcagaacccagtgaactgtgtgcctcccaggcaatctcgggtttccacgtgtggctggatgcaggaactggtgtcgaccgacaaggcagggactttgttagggtttaaaaggggccctggatctgccctctgaacagacggcgtcataaattcatacttccgtcattttcttggaagaaaatgcctactgggctttgcgcatttagttacaataaaaacaacagcagctgcttgttttcaggcatttactacataccaggccatgtgtaaggcatttcacctacagcatctgactgaagcattgtggtttggagaggaaaaagcaggtggacagggtgctgtcaggatgtggaatctgtggcaggtgacctggttcatctccttccttcagctgtgtgaccttgggcattacttactccctgtgtgacctcaggcagggatcatcacgtctctgggcagcagtcacctcgttggacggcagtgaaaggaaccaaagcgtataaagttcataac

SEQ ID NO: 48758 - DNA, 781 bp, Bovine  19866881052200
  misc_feature (1)..(1): n is a, c, g, or t
nccactttgagaaccatggctttcaagtgatggggttcttgagttgtctgaagggtgactgtctcttggagcctgtgtaaatcaattgcaagttggccctggattagcgcctaaaataaaattcaacctattctgagaaaacaatatatctgagtagggactaattacctcttttttatttcaagtgacaaaagccaatatatcacacttagccactatgaagactccatttcagtaaactaattaaactaatcctatctcaactcattattctcagttccactaaatattttaacactcaagatttatttcattccataaattatatcatacttaaagctccgcacagccctcgagagtttattttggactttttaaatgcaactcaaagctttatctagaatgtatatttttcataatctctcctagctaatcattcaccttaattatgactaattattaaaaatgatatattactttaattaaacgaaagtgctcttcttcttgttagcccttattaaacgctgagaaccttaaaacgatcacacagcacaggaaacggcataactcgcagaattgattctattttcttgctacaagctgacagagatgcacatttcaggaggctgattaatgcacaagatcgccagaagagtgtttttcatagttagaaggaattaaagcccgtgtccatcccagattcgttttctaacagaggatcgccgcataattaaagcgttaatacacatcctcctatccgtacttaggttccaaagccagc

SEQ ID NO: 48759 - DNA, 2453 bp, Bovine  19866881082224
  misc_feature (1)..(1): n is a, c, g, or t
nctctccttttgccttaagcaatctgctgtactgacaggggttggtcctgcctgtctttttttttttttaatcccttgctggcactggaaaaacctgcaaaggccccaagaagaggacagaatttccccctcagctcattttcataagaaacacgataaataatacatggcactttaataagaccttatctgaatggtttaatgaaaaacaaatacattatgtaaggaaccaataactgctctcagctgcactgagccaacactggtttgcccgtccgtttttctcccgaaagttgaaaactctccgtggtgattggattcctacagaccctttttgcaataatggctcccagtttcccccttagacttaggtctcgcagccgggggaactggaagccggcaaagggaaaccgtagaatccagaccatataaacgcgtctcaagatgatccggggccaggctgcattccctggataaccaagtcagaacgttcctgcgcaagtgcatgcaaacaaattcatgcaaacctgactacgcacacagccaagtacacagcccatcaacacagatacaagacagggcaggaaagattttgcagtgaccgagaaacgcacacagcatcgggtgaccccaaatcaaacggtaactccccagctgcaactatggctcagtggaaaaaaactctgctagccttttaagcagtgtctggggatgctgaatttgaattccatctcaacagagactgagagagagccacatcaatgctactagctcccaaatgattcttctattatacatgaataaatgggagacgcgggggaaagaaaatactcttctctctccctacaaagaatgtccgggcactcagtgtcacttgggtgtatattctgagttacattcaagggccgccctcctgctttctcaactacaaggagccgtcatggaatgcttaccccgtaggaagcagagagtgtgcaggaagataatgaataatgccgtcttcagatggaacttgacccacacaacagtgctggaactttttccttcgctcaaatttgccatctcttcagaataaaaaaagaaacattttttttttctttactctctttcataatcccttattctaactttctaagactgtcaaaaagcaggtattcagctaaagaaagattttctatggaggttgccctgcctcaaagcaaaaaaaaaaaaaaaaaaacttcagttagacagaaggaaggccttcttgatcttaaatgcaattttctgttcgaaggctaggcataaagtgactgagaaagtattttattctcacttccaaattttgatacagcaacaacaatcttcaggagagtgagagtgaagtctctgtagggaactggttgttgctatctctatcacaagcaggttaagtcacctacttgtgcaaacatttgaacgctatttagtgggcgttggttacactcaggcactgatcttagtccctaaggctgcatcagtgggagaaagcaaagatccctgacatcgcatggtttacattctggtgggagtgtcatcaagcacagaacaaagattagagtatgtcgattgtacagaatacagaaggtgacgagtgctgtgcaaaaaaataaaagaacaggatcacagcatcagggacaccaaagataaggaagtttgggcaggtggcagtaaatactgtataaattggtgctcactctgcaaatgcagtttcagcttgacaggtacacactgctatgtttaaaatggataactgacaaggacctcctgtacagcacaggggactctgctcaatattctgtaacaacccaaaagggaaaagcatttgaaaaagaacagatacatgtataactgaatcactttgctgtgcacttgaaactaacagaacattgttaatcaagtatgctccgatgtacaatacgaagttaaaaagaaaaaaagaaaaaccttgcatcctcaccctttccactctgattgccaagccccaagtttgctaaaatatcagttctggagttctcatgggtcagtccaccgagagtggcggtgggagagtttgaccctatcaatgcataaacatggggaagattcccacctgcagtgttgtccatttgaagtgcagggtttaatacagtgtctgatatattgtagggactcagaaaatactgcattaggggataggtggatggatgtatgggtagactgatggatggatggatgaatgaatgaccacaacagcaatttggagcaaatgacctctagctatctctttcttttcaagaaacacacagattctaagttttatttactttttagctctctctatattaagctggcttcttggcctctagaatgaggtctcagcccctgatggtccctcggggctaccctggtgaagccctactccccagacagctctttggaaaaatgtccccact

SEQ ID NO: 48760 - DNA, 1607 bp, Bovine  19866881082383
  misc_feature (1)..(1): n is a, c, g, or t
nttcccatttacagtggtccagtcccttaagttgtgtccgaccctttgcaaccccacagactgtagcctgcaaggctcctctgtcccccactatcttctggagtttgctcaaattcatgtccagtgagttggtgatgctacctaaccacctcatcctctgccaaccctgctccttttgccttcaatctttcccagcatcagggtcttttccaatgagtcagctcttcacatcaggtgaccaaaggctcagcctcagcatccgtccttccaatgaatattcagggttgatttcctttaggcttgagtggtttgatttcccatgctttctcccaaatagtcttggtacactaatcattgcatctttattttaatttcatttttacagtcatcttttattattggagtataattgcttcacagtattctgttagtttctactgtacaacaaagtgaatcagctgtatgtgtatactgcccatttattctttaatgggtttactttctttatccatgaccactggctttttggtgtgctttagagctgtgcttttcagccctttggagatcatattgaagggaagagcttttgaagaaaacgggattttttaaaaaatcaacaaactgacatctactttaattagcctctaacaagggaattcattaattcaaaaatgtaaaaagaaaaaaaaaacagagcagcctctttagaagaatatgatatcttctaataactggtgttaaactggaggtaactaagagccttaataaacacatacacaaaaaccttcacatttcatctattcaacttcgtgcctacacttccttctccccaaactgaaaagttagtttagagcatggctaatctattgcgatgcaatcatattttcaccttatcaaatatccccacgtattccttctacccgctcaaaaatggaacagcagtgatttagattttatttggaaaattctttattcatcatacggaaacacattcaattgcattcgaggaattcaatttcaaactaatttatcttacgttaatgtttaaattcatgagattttgcttagactcatccttgtagtataataaattcagagtcaatatgataattattaaaatagaaatgagcatgagaaaaataaatcgggtggtctgagggtgaattctctcacacctgagctgtgaggcttgtagcaaagaaggtgagagagaagaaaaaagagaaaaaaatagttgagggagagatgaaaggagaggaggagatagaatgtgcataagagcacctgtgctaacacttatctgatacacactgtgttccagtcaatttcaggatttcttcaaattcttgcatcccttggacagcaaggagatcaaatcagtcaattctaaaggagccaaccctgaatatccattggaaggactgatgctgaagtgccaatactctggccacctgatgtgaaaagtccactcattggaaaagaccctgacaggggggaaagacagaaggccaaagaagaagtgggagatgagatggttggatggcatcaccgactcaatggacatgagctggaccaaacttggggagatagagaaggacagggggaag

SEQ ID NO: 48761 - DNA, 1427 bp, Bovine  19866881201213
  misc_feature (1)..(1): n is a, c, g, or t
ntgcaccataaatggaatgctcttgaatatcccaaaaccatacccctctccctccctggtccctggaaaaattgtctttcatgaaaccagtccttggtgaggactgcagtcttacaggaaaacccaaatgaagtttttggccaacccaatatatgtaatgtaaaaatacacataatgtcaaaatcaaagtgtacatcatgtcagactttgaccaggattttaaaggacaagtcagggtcctctaagaccctgtggatgcagtgagcaagataagaaagcccctgttcttaagtgcccgagactgttggctgggaacttcacttgctcgaggctaataattgtttttgtttgtttttgacacaagcacatttctctttggaaataccacctcataagccaccatgtcaaggctactgattaacaccaagtgccataaatatctgattgtccctaacttttaaggagttgagaaaaacagcctctccgttgccttctgtggctccacatggaacgtcaggatggaacatttcataagcgtgacacctcactgtcgcaaatccaccccgcctcccctgcttcatgtttctggggctggggttttcagccacggcaaggtggctcctggcctctctctcctctgtgcctccctgcggaggctgggaaagtgaaatgaaacaaattgctttttctccaatctgtgacatggattcctgttatcgtggttgtttgttggttttttgtgaattatggtcccagagcaattgcagagctctttgttccagagattttttttttttttttttttagtaagctcatgtagttaggaaaccaaggtttgtatactcaccttaccaactacaagatcagtttgtaagctgacctggaggtcagctttgaacccatctccaggtgtttaaggatgtggggcttggggcttaggagtctgatggatttggttaactagttttttctagttgtgtgaatggcaggaagtactggattgaccagaaggttcatttgggttcttctgtaaggtgttatgaaaaacctgaatgaaccttatggcccacccgataactccacctagcttaaaaagagaatgatggtaggtgctacactgggttcttatcaaatatgataatataggcaaagctgctttgttgaattttgtatctttggtgcttagaacagtgactagtacatagttagtactcgagaaaagttttcttatcatcaccatcatcttcatcaccaccgtcatctccatctttatcattttcatcatcatcactatatcaccatcagcttcatccccaccatcatcatctccatcctctttatcatcaatatcatctccatcttcgtcttagcatggattcagtgacaggaactcttcaataacaccacatcaggttcaagttctgggt

SEQ ID NO: 48762 - DNA, 1223 bp, Bovine  19866881212787
  misc_feature (1)..(1): n is a, c, g, or t
naataagcaaaggtcactttaaagcccctcccttcttcttctttcttatcttcctccttatcttcctccttcttcctccccctcctctttctttcttattaagcaatcatagactggaaaactggatggacagctggtgagaagttggtgtgcagcacagggagccagtctggctctctgtgacgacctggatggatgggaccgggggaggggagagggaggatccagggcgaggggatgtgtgaatagttatggctggttcatgctgttgaatggtgggaaccagcagagcattacaaaagttaaagtatacatatatttaaatgcaaactgaacgaataatgtaaagtattctctagtccttcccctcaaaaggcaggttgaaatggagacaattttggtcgccagctggcattacggtcttggatagatgacctagggtctttacttttctgttacattgtatgtgaatgcaggctttttttatattgcgcgtaagtcctcacagaacgcgttaggtccgtcttatttatctgccaagcagagtggcgcccgtatgaataactcccaaactagtgaaagcatctgcaacttgagactcttaaattttaattttcttattttaataccagtcagtagagctttggaaaggttttgacttgcctgagttgaagcacaaggaatctactggccaatttcctttgagtattaccttgtttgaattggatggaagggcagggaattgtataaatgtcaccacagagagcccttgtcccctggtaattagtaaccttatcaattcagagcaaaggcgcatgttcagggattttgctttggacgatggcacacggatgagggaattttatgactatgtatgaagtgcctgctctggtgatgttttgctttggcaaatgggtaactggcatcattcacaatctgacctgttcctgtcaccccctggttcttctgttccctttattatccctagaagctcagtcttcctcccctttcccccactcagagtctaaataaactccctcatgatctcaggttgtaagcagcaaaacagtttgaggagtttttgggtttgtttttaagtttatttttattgagtgtttttctcccctccatggcagaaataatccatgtctgttgcaaaaatccaaagcacaaaagaagaagaacacatgaaatataggaaattccccttccaaatcctacac

SEQ ID NO: 48763 - DNA, 2288 bp, Bovine  19866881217287
  misc_feature (1)..(1): n is a, c, g, or t
ncttttgccttccatctttcccagcctcagggtattttctaatgagttagttcttcgcatcaggtggccaaagtattggagcttcggttcggcatcagtccttccaatgaatatttagggttgatttcctttaggatggactggtttgatctccttgcagtccaagggactctcaagagtcttatccaacaccacaattagaaaggatcaattcttcagtgctcagccttctttatggtccatctctcacatccacacatgactactggaaaaaactatagctttgactacgtagggttacagatattaaataaaataaaaaaatcaaaacatgcagcacctacatagaacaggaactgtgttaaatgctacaaaagagagaggtggtgctgtaattcacacataacaaggggatccaacttagtcagatgggtagggtgggaggatgactgaaaggacaccgggagggtctgggattcaggatgcttgggctgcaagtaggtgataaactgcagggctaagtcccattaagcatttgttcattttcgtaaatgcattgagaagccacatcatgttttcgtctgtgttcagggacaagacccaatcaatacaaatgttctctactctagcttagtggaagaagtgggcttttggaaagagccaacctgggttcaaatttccactgtactgcatatcagccgtgtgggcctgggggagctatctttcagcttcggtttccttttatgtcaaataggaatagtttccactctctcttccttatttggtgctgccagcaagcagaaagcaagcgcacagaaggaacacggtactccacactctacactgctgctgccattgctacggccaccgttatcagggtgattccctctagatggctgtcagctgctctcctgttgtagcacccttccctcacttccttaactggatacatttctgaaaatgtaggctaaagtctcttctcatttctcactactcattacctctattcgccaggcccttttctaacatggccatggcaatagcaagttacgcagtgtcgcttatctccaagcattgctctaagtgctttagatacaccatctcaaaacgacatggaggaaaagcactaggatgatcttcattttgctgatgagaaagaatgctgatcccaggagataacgcacaccagccaaagtcatacatctaggaaggggcagatgagacgtcaacctgtacttgaacttgaaacttcatggaactagaagtgccataatgctcaccgtgagaactgtacaggagggctctcaatagcactcaccctcctttgcactgtgcatgttctcacgggtcttctttaaccatcttttatttccttgatcaattctacctttcgtctccttgccaccaagcattggtactcggggatctacaactctggatctttgtcatattctcttccttgttcttctgtaagcttttctgaacatagatccctccccttatcaatctcatacagatgcctcataaaagccatcagaggaatgggcagttgagttttatgaactcttgtttatctggcagggagacagacatttagatcaactaatagtagaggccaagaaacagggtagaccagttggcccttccactccctgaatctttttccatacttattaaaccaagatattgagggggggaggaagcctggttctgtattttctttacagctaccaggagattctggtaattaggaaccactgggatatataatctcaaaggtttggacttgttctttgatttctataacattataaaagtagaaagtttcactaacgtattttatatactttgatatgggtgaaagaactagagtttttttaattttaattaattgattactttgttaatgacttaggttataaactataggggcttttgttgttgttttttatattactgatagccaaaatttaaagatggtgaaaagtctgaaataaatgaatatttttaagtggtcattttcaaggtctttttttgttctggaagggtatatatgttgcaaattctagatggaaaacatttggaaacactgagacatttaattttagctgagcaagccacatgttacttatgaaacatctattttgagaactgcagcagagaattaaacctgacacttcttattctggtctactaccttcactgataaacaaaataaaattacaaacacacagggaaaatggctttaaaggatactagaggaaaaaatgaggtaaagggagattcat

SEQ ID NO: 48764 - DNA, 711 bp, Bovine  19866881221304
  misc_feature (1)..(1): n is a, c, g, or t
ntttcactcaaatgcatcaactgggtgtctccttgcaaatatttgactttctttaaatgtttgcagtggaacgaacagcacagaggatgtgtaaacagttctaaatgccacttttccactaccaaccaaatacatacttgtaatagtttgtacatattcaggatttacagctgtaaatccctgtttcaatgtcatggtttacaagcccactcatatacttctcatgagaccctgggatagtgatgtaggtcattctacagcagtgtcacctctcttgagaccacaaaacaggtttcttctggttgttatcttacacactttctaacaattttctaacattgcatttctagaacagcttggaagtatgtgctattagtaggttgggtgggtggggtgggcgagacagcagtctgatttcttggaacagggccattttcatggattagatcccagagattttcctcatccagacttctggtatacctataatttcctgctcagaaatctcttcaagtcttaaccctgggggaatgataactctgaggaagcagcttatcagcaacacatcaggctgctatcaggctagtcctctttcagacaatccgtgaggggggaatctcgtcattggagcaccaaggtaccatcaagtcaatgtggcttagaaggtaaagaatccgcctgcaatggggggagacccaggtttgacccttg

SEQ ID NO: 48765 - DNA, 1291 bp, Bovine  19866881247003
  misc_feature (1)..(1): n is a, c, g, or t
nggtttctgaagtgattaaacttgtaattaaattgtataacagaggaggaggtgagggcggagaaggctgcccggaagaattccactttcctgctgatctgttggtggtgctagttcagggagcccctgggtgatttttttttttttttttaattcccagcttcccagggttggaaagaaaatctggataaacagtatttgtgccattcttacagtcctatttccaatcacagtctggggatgtgattattaattaattaattaatgcaggatgaaattaagcagctctctcaggttccttgggattccctggtagctcagttggtaaagaatccaatctgcaatgtaggagatccaggttcgattcctgggtcgggaagatatgctggagaagggataggctacccactccagtattcttgggcttccctggtggctcagctggtaacgaatccatctgcaatgcaggagaccaatgttcaatccctgggtcgggaagatcccctggagaagggaaaggctacccactccagtattctggtctggagaattccatggactagacagtccattgggtcgcaaagagttggacacgactgagcacctttcactttcactcaggttccttaaagagatgcgtctgctcccctctcaaaatcgcatcaccagaggaccagagcccctcctcaaaggactcgctcaacaggtgggctcagcagtcattcttacgagccacaagctccttgtccaactaataactgaagagctaaacttcagttcttcaatcaaaggggtcttgcttttctcctataaagcaaaaagtatgagaccaagacagaaagattccctggtgttctggggagtgacagataaaatgcaaaaacccaaaacacaaaaaagtcaaaacacccaatagcggagaatgtttcaggtggagacaatcagagtgaggtaataggacattactctttatcccacaggccatcgggtcacctatgggtggtcctacagagccagatgctagaactccaccccagacccaccggcttaaaatctctgagggtgggtgggatccagcctcggatgctgtgtaaaggtgtctcagactattcttatacacaattttggggtgaaatgtattgttttcaaattacaggtgtgatcccttgggatgtaaaactctggtggcgggttattgcatcaacattctctaaatgaaataaactataccgcactgggaaagaatagaatagagtaagagaaatgtttcatgaaacttttatgcgggtga

SEQ ID NO: 48766 - DNA, 1252 bp, Bovine  19866881266522
  misc_feature (1)..(1): n is a, c, g, or t
ncctgtgattctccaggcaagaacactggagtgggttgccatttccttctccaatgcatggaagtgaaaagtgaaagtgaagtcgctcagtcgtgtctgactcttcgagaccccatgggctgccatcatgctggtttaaacacagctcgttattcagctcatgcaatggacaggaatttggacaaactccaggagatggtgagggacagagaagtctggcatgaggcagtcttatggggtctcgaagtgctgcacacaaccaggcgactgaacaacagcaacagttactcatcaccagtggaccaacctgcacaacacatttgcccaggagcattttgtcctcatatatgaaaaggtaacctaaagtagcagttctcaaccaagggcaactttacggcccaggggacatctagcaccgtccaaagatattttggtcatcaccagtgggttcagagttcctgctggcatctggtgggcagaggccagggatgctgctaaaaagttcctataaagcataacaatctggccaaaatgacaaagtgccaaagtggagggactcccctggtggtccagtggttaagaatccctcttgcagtgcttgggacgcaggttcgatccctagttggggaactaagatcccacaagcggcagggcaactgagcctgagcactgcaacgataaagtccatgtcacccaacaaaagatcccgcatgacacaaggaagacccgatgcagccaaataatttgttttctttaaacagtgccaagattaaccatgcttagcgtaatttaaaagggtggattctaggatgaagaagatctcagagagtctatggctctgagagtagtagcatttgcccctgaacttctgcgagcctcggtttctgcctccagaaagtggaaatcatactttctaccttgcacggcagtgacgggaatttgaaacaacgggacagaaagcacctgtgacagaatcaagtggcgctctcatcatcaccgcggctattgtcagtagtgattattaacgtattttgcaaacccgtcaccaaatagaaaccaaaacaaacttcttggagaatcctgctattgctcattgggcaccagggcaaacatccacccccatcctccgaggaataaactagtctcacttcaaacaattgttacagtttgaatccaattgactccagacaaaagtattgagataatcagcatattaaagccaacactataaccatatattaattatgtaaat

SEQ ID NO: 48767 - DNA, 1035 bp, Bovine  19866881340273
  misc_feature (1)..(1): n is a, c, g, or t
nagaaagagagacaaagagaagcagacagacagacagaaagagaggcagagagaaaagagacaaaggtggtaatgtatcaaacccccattcagcctttacccaacccagatcccaggggggaaaaatcactgagcccctggagaagggtgggaacattaaacgacccaagaaaatgggaaatggtgtggggtgtgagatttctttattagtcaatttaaaacaaaatgtggctcagtaatttagaatgtgtctggagtcaagcagaaaattagccgtattcacataggttccctcctcccctgaaggcaggagaggcaccaataaaaataaaaataacaataccttgtatttatggggtaactttctcccagggcttctcctcactcaccctttttatcttttctgtgtccttggaggccagcaaggacccagagcctgggaagtcagctccagagatacttctttaccatgaaggcttcttagaagcgcttcattgggcctcacattcactcattcattcactcgtttatttgtgtttattaagcaacagggttttattcatgaatattaaccaacagggtttattgagcgtctgttgtgtgtcaaaccctgtgaaaagcgtggaagagagcagtgcattctgtcctttgtgtgttagtgaaagccccttgactccagatcttacagaagaatgtgtgttcatagatgtgggaaggatcatgactcctgaaaccctggcagcccaggggttaagactttgtgcttccactacagagggtgcaaggttcaacccctggttggggaactaacatcccacatgccaaaagagagaaaaaaaaaaaaaaaaaaaaacccttggtattgtcttcagaacattcttattctggttcctgggtgtccttgaatgttttaaagtctgagttcagggttgacgtgtctgtaagctttctcctttggggaaacaggtctgcataagattcaccccagtgggaggtacagaagatctctgtggtttgctaagatgataatttaag

SEQ ID NO: 48768 - DNA, 1200 bp, Bovine  19866881375938
  misc_feature (1)..(1): n is a, c, g, or t
natcttattgatggggaaaaggataagtagaagaaacctccaactgcaaccatgggcagaagctccttcctcagatcccctgggtccccctgctaggacaggtgttctgacaactcatcctgacaccccatctcaaggtctaagccagtgctgagggctcagcggtacctctatgatttctcactcttcctgggcacagacaaggtctgactcatctctgtttcccatcaaggacctggcacacagtaggtgttgataaatgttttctgcactaaatgcaattgggatcaatgcccgaaaggcagattctctcatttccattgtttaaaaatatcacagattccccctcatgcattatgtagcacagaaattaatttatccggaactgttttccaatgcagtttccaaaggctctagtctgcattcagctggaaatctgcactggggtgggggcttgtctggctggtctctgacaccctctgtcagtttcaaacactattccttaggtaagtacaacgataaggatctgggtgaaagagtcaggtgagaactgatgtttcctgactcccacctcccttggcaaggtaaagatggatggatctcccaggaccaggtacatcttttacgagtatctgcatcccaaatccagtgggtgtggcttctctactcttccttccttagggagagggctgcagaaaagttgttgttattagcacaggttgtagctacaaatgtgccacgttctagtgacgtgaccttgggataaccatcaagtcatgtcaactctccaagccttcatttcctcatctgtaaaaagagcatcgttacatttacacttgatggtcaatctgacgatgaaatgacaagggactatagcactccaaactagtaacggacattctgttgtttttgtttagtcgttaagtcatgtctgactctgcaactccatggggactgtcccttgcccaggcttccctctgtccatggaattctccaggcaagaatactagaagtgggttgccattttcgtctccaggggatcttcctgacccaagggatcttcctgtctcctgcttttcaggcagattcttttccactgagccaccagggaagcccaacagaacttcacacctgtgcacactgcatattacacagagttttagcagattcttcagtcatttgagaattactccagctctg

SEQ ID NO: 48769 - DNA, 1803 bp, Bovine  19866881385475
  misc_feature (1)..(1): n is a, c, g, or t
ntccaggtgcccacaactcctgaaacctgcgcacttctagagcctgttctctgcaacaagaggtgagaggcccatgctctctgcaagtagggaaaaccccaggtacagcaaatgaagacccaacacagcttagaattaaaaataaacacattaaaaaaaaaatgacaagggctggagtccttttcctattctgatcttgtcttctccaatgaaggggaaactgccctctgtaaagtcaggcagagggtgagcttgagtcccagacctgctccttggccctttgactttgaataagcctgtaacttcctgcagtgagttgaagagtgtgcctgagtgctaagtctcttcagtcgtgtccggctctttgcaaccctatgaactgtagccaccaggctcctctgcccatgggattctccaggcaagaatactgcagtgggttgccatgccctcctccagatcttcccaacccagggatcagacccatatctccctcactgcaggcagattctttaccgctgagctaccagggaagcccctagtgacccttagttaagctcatttggaggtcgggcttccaaacagcaggctggttgatgggatttagacttgtggataaggaaaccaaggcgtatcaaatgtttttctgcagatacacagctaagggttagagctgtgattgtactggtactagaacccgctctcattagcctctgccatatggctttctttgttaatggcaaactttggtatagtctaagtgttctgtgatggcatcaccaagccccacactcctctcagattttctaggtagaccaagtgctctgatgtttcacagatggttcacattttcaaaaaaaacacaggagcacaaaacatccttagggagtctttgatgaatagaagtcataaggatgtttggttgaattttctaaaaggtgggagctccttattgtgattaaatgaagagcttaagatgatcaagcagcagtgagaaagattccaccccatccaatgccagccgaacaccataggcagagcaattttacagcagtccatttccacccagagagagcgcagaccgtgcgccaatttgattagagaatggctaagacgcagggccagccctgtctattagacggagagctggactaatgaatctcggaaatggaaaaatctgtctatccttcttcaaatctgtaagccaattattatattggatcttgacttccaatatttctgcaggcttcaaggcagtgaaaccatgccaagcaacaggcaaatgagaagtcagggctgtgaacaccgtttttgtgctggagattaaataaagtttgttttttttccccttccttgcttcctccctccagcccttcctctttcccgccctctctttccttcctttctctttctcctctccctccttctctctttttcctttcctcctttattttcttcttcttctgcaactttaacaccccaaacacaattataggttacagatatgaaaggaaaggaatctattcattttcctggtaaaatcaaataatttcactactcttttttcatccagaaacctgcctgccatgtcctttgaaagctaaattctgcaaggtgggcttcagggattaaattctatgcatgcttgttccctccctgggtttaatataagtacattagtcttggtcagaggagaaaaagactaaggataagaggaagttgagtggagacatttatagaagaaagaagaaaacaaaactctggagtcacactgcttgggtttaaacccacttactcattatctca

SEQ ID NO: 48770 - DNA, 866 bp, Bovine  19866881397251
  misc_feature (1)..(1): n is a, c, g, or t
ngagtgcaaaagtgggatctgaatctttcacgagggtggatggttgtccatcttgtcaaccggaacaggaaagacctggttgctagtagaaaccatggtctcaagccctcccatcgtcacccaccagatcggctcacttggtccaggtggctgggtaattttttttttttttttcccctgattcaagacctggtccatggcctccaaaaagaattcatcttccaactccatcaaggagatgacttgactcattgcctgtttctgatgaatgatctgtagtgaaactcaagtcacatttctcccaggatgtactgggaagaaagttccatcaaagaccctaatcagcattttttttcttggggaggaggcaacccctttcctctcaaaatcacaagcctcacccttctagtgcatgaggaaaccctgatcaaggataaaatatcatttttgattcatagggggatgctactaatgtttctaatatttgtcaattctgggattgagtggtatagatttcatatacaaccacatttttttttttaaatatgagaagctgccaacaaatatatttctctggtttgattcatcctccaagaggcaattttcttggtggcttaggaggttacaaaagatgcttaatcagcattctttgctgggctgagtgaacaagtgtctctcctcctcctgctcacactctctttcgcattaatcatgtaattgatttaataagctctggctttaagagcttttttttttttttttttttttaactccgctctttcccttctccccataaggtttcagtttcacaactgactggaaggctgaggctcttggattttgccaggcatgaaatccagcaactg

SEQ ID NO: 48771 - DNA, 1015 bp, Bovine  19866881446003
  misc_feature (1)..(1): n is a, c, g, or t
nctcttgaaaaatacaggataaacaatgctggaaggaaagtatggaaaatcacctccggcctgtggaaatgtggctttattttgaaataatttgaaatattggcacgcgcatgaaaaaaaccaagtcagcttacctgctgctgctgctaagtcgcttcagttgtgtccgactctgtgtgaccccatagacggcagcccaccaggctcccccgtccctgggattctccaggcaagaacactggagtgggttgccatttccttctccaatgcatgaaagtgaaagtgaagtcactcagtcgtgtcggactcttagcgaccccatggactgcagcccatcaggctcctccgtccatgggattttccaggcaagagtactggagtggggtgccattgccttctctgaataagtagttaaggggtgtataaaaaaacaatgcaaaatatgatgtcaaaaccaataaatgttgggggagggcaaggaataatgcagggttgttaaaatatgtttgaatttaagagatcagcaacttaaaatatatatatatatttatatattgaaatatataaacaaaaatgaagaagaatgatagaacagtgattctcaaagtatggatccttgggtcatttcagggatccatgaagtcaaaactattttcataatattattaagatttgatttacctttttcactaggttgacactgcactaatggtggaaaagctaaaaccactagtgcttaagcatgagttaaggcagttgtattcattgtcttagtggtcacttattttttactgccatgttcaaaaagaaaaaaaatcacaagtttcacttaaggatgtctttgctgaagtagtaaaaagtattaattttattaaatcaacccttgaataagtgtctttattatattctgtgtgatgaaatggaaagtctgcaccaggcatttctgctacactctgaactatgatggctgtctccaggaaaagcgattgtgcaattatttgagtggagagctgaa

SEQ ID NO: 48772 - DNA, 582 bp, Bovine  19866881630920
  misc_feature (1)..(1): n is a, c, g, or t
ncccctgccttcatcacccccaggcggtcagtgtgttcagcacagtctgatctctggggtgtgggcgggcagagggactgtccccagcttcacaaaagtgcctttcctgctgatggtcacaaaaggagaggcgaaaagggcttcggggctggacaaagccagtctatgcaactgaaggtggccttgaccatcagcagcagccttcgtgattctcctcatcacagcctctcaggctggctttttgtcagccccgtttggaaaaggcttgttaattcacccccgtgaaaatggaagtttcatacgcattgacataattaatgaaaaggcaggcagcatgctccaccaattaacactgcagggaaaagtaaaatgggcttactttgggcgtcttgtgccaaagttaaagactggaacacacagcaaataaatagagatgcttttaatgagccacaagatcgagccgagtaagtcagaaagaatggtaggtaaacactgccaactctttgcattgttacgagtaattgatgagcatagttaaaaagtttgagcatcggatgctgcaaccaggttcatttataaatg

SEQ ID NO: 48773 - DNA, 1418 bp, Bovine  19866881725834
  misc_feature (1)..(1): n is a, c, g, or t
nctgtagcattagggaatttgaagttcactgggcaggttatgcattccagtttctacatgcagttgtttaattaaagcctttgtttcattccagatgactaacatatttttgagcaggatgtttcaaaagttagtacaatttcatagcaaaaacttgtatgccagggatcttgatggatttggtttgggttggggcattgcaagagggttctttacaatgttttgttgtatctggaagttatagtaaagaaaatgtatgtctgttctttacttccatcatgtcttcagaaagactgcattatgaataaatccacacctggaaaacagtacaaatgggtagactgaattgtatgtacacctacacacaaacacacatacaccatacatttatatatagagagagaatattctatgaacagaggagtctggcaggctacagactatgggatcacaaagagtcacagacgtgactgagcatgcgcgcgcacacacacacacacgtttatgagcatccctggtgactcggtactataaaatctgcctgcaatgcaggagacatgggttcagtctttgggtcaggaagatcccctggagaaggaaatggcaactcactccagtattcttgcctgggaaatcccatggacagaggagcctggtgggctataaagtccatggggttgcaaaacttggacacaacttagcagctaaacaacaacgatatatatttatacacactatgcatgcctatgttcatctccacattcctcctctctctctcctaatatggacagatagatatggatattgagatattgatagacaatacatgtgtacataaaatacatatatataatgtacacagttatattggtgggttgtatgtatataaaatatatgtgatgtgtaactctacaaacacacaagtatatgtatacaaaaatgtgtatctctctctgtgtatatatacatatatatatttagaattcctcaacctttgcactattgatactttgtattgagaactcttttttgagcagagtctgtcttgcacattgtagaatgtttagcaacatgcctggcctctacccattgtatgctattattattatcacatataacccagtcataacaatagaaaagtccctccaggcactgccaaatgtcaggggaaggaatcccctgccccagcaacatgagaaccactgttccttcactgctacccacatacaaacacactcatgtacatgtatattatatatatatatatatatactctaacagagaaactgtggttttataagtagtttatcaattgtttggttgctaagttgtgtctgactctttgcattcccatggagtgcagcacaccaggcttccctgtccttcaccatctccccgagtttactcaaactcatgtc

SEQ ID NO: 48774 - DNA, 1708 bp, Bovine  19866881937114
  misc_feature (1)..(1): n is a, c, g, or t
natgggcatgattcggatccggaatcctgcctcccacctccccagggtgtgggaagactcacgtggtctggtcgctttaatcactctcctgagcagaaacgaggccagagcagctgcagaggagacagtcccctctgtcacccgcttcccttagactcacctggtctcccttggacagagtccatttcaaggagcatgaaggtgccaagcagaggatggagtgagtctcagttgagccaaaggaacgattctttcctgctttgggacagtgccactgccttgttctttgatgcaaaatggttttcatctttcccaagagtaaacatctgcttaatgcaaagctttctaagtcaatttaggccccccgtaagtgctgcctagaagctctgctgctattacgggcaggcccaatgagatgggactgcagtaaaatgtgcagtgacacaaatgggtctttcaggcccagaacctgcatgaaacagaagtggtctcactgcgcaggctcatggtgggcagcttagagagacaaggagagagggcatccgggggaggaacgagagctttctccatccgtgagcatgtcacccttctccacgtggtcgaggacccccagcaggtggacagcctgcaaatgtggctgcagactcattttcattgtttgcttttggttccttctccggatggctcactgggactggggactgaggtcgcccttggaaggagggaagagaaattcacatcccgtggatgtgacgctctgcagatgaagataaattaagggactgtaaatatctacacaaagacttcaaggtgacctgggtgacatctctgggaggcgaggcaggaacctggaagcctaattaatggtctgaaggaaggccacattaaaagaagggacttggccaacgtagggaggaaaaaaggaagccccagagtgtcagacattggcagcgtggccacagcagcatccaaaaaagatttacaatagatcccggggacaccagcgtttcaaataatagagaagctgatggtgtcgtgggaggagagctcctctagcctcatggtggcctcatgaaaagtccttcagaaaaacccatgtccctgtgaagagggcctatgctggctcctgcagctgggtttccttcaaacacacacacaactcacactctaaaccacttcattcatttcagccacacgagagctaacagagccactgttttcagatctttccagatcagttaactgatggcagttttgctacgatcggcagcatttcctctttcttccaacaactccgggtcttcttattttaactgcatcagtctaagaaaccctcatcagcaacacaggctaacatttgtaggttcatgacacagagtgtccagcagaacaccacactatatagtgtgaagcatctaacaggtggaatatacttagtgctttagataatatataaagttatgtccctctgtctattggcctgattaccttgtcatcatatttggaggaactatctaagatagctcaatcctatcaagatgaaaagaaaaacagattttccagagtggctgaactggaggttcaccataaagttcttgagattgctgatggagaggcaggtcacatacggtgaagcaccgtggacacggacaacacagatggttccacatctgagccccgaatcaagacaaggggacagagacttcaa

SEQ ID NO: 48775 - DNA, 734 bp, Bovine  19866881944447
  misc_feature (1)..(1): n is a, c, g, or t
nttagcgaggagatgctgcagagtttgagctgatggttgacgcatggggaagttaccccatgtggcgacagtttgatttttcacagaagccagggatatggatttgaagtgagagctctattatttcagtattggtagccaagaacagaaaaaaagcaaaaacaactctatgggtgaaagaaaagtacagagttcaggttcacaacacctgaccggagaaagatgttgaatgaggaggggcgtgggtaccagccttaccgcacctggtgacgacggcaatacatcagtggacccctactggttcctcttcacaagtctataaagtgaggggccagcagatgccatgtctcaggcccaaattctacggctctaatacttttacaagaaactttattaggtagggcttatagagtccaaaagcatttaaccatctcaaatggaactaatatgctaacagccccaccactgccaaagccattgacgctgactgttcttaaaaacatagattattagcctaatagagctttcagaattgccaagtcatgtgcatacagcatcgattctctaaccgcaatgggcttcaatagaactagagagattggtttcagggggccagtggtagaggtggagagtctgggtgtagccgaatctcctgacctgccagggggtcacgtccccctcccaagctctcccataagatcacgtagcttaacttgggtaggagtggcagacca

SEQ ID NO: 48776 - DNA, 2727 bp, Bovine  19866880185888
  misc_feature (1)..(1): n is a, c, g, or t
nactccttggaaggaaagttatgaccacctagatagcatattcaaaagcagagacgttactttgccaacaaaggttcgtctagtcaaggctatggtttttcctgtggtcatgtatggatgtgagagttggactgtgaagaaggctgagcgccaaagaattgatgcttttgaactgtggttttggttaagactcttgcgagtcccttggactgcaaggagatccaaccagtccattctgaaggagatcagtcctgggatttctttggaaggaatgatgctaaagctgaaactccagtactttgggcacctcatgcgaagagttgactcattggaaaagactctgatgctgggagggattgggggcaggaggagaaggggacgacagagggtgagatggctggatggcatcactgactcgatggacgtgagtctgagtgaactctgggagttggtgatggacagggaggcctggcgtgctgtgattcatggggtcgcaaagggtcggacatgactgagcaactgatctgatctgatctgaaggtgctagaaccattcttttccctgtgttatttaacccatctttttattcattgcagtaaaaatcaccctaagtaatccattgcccagtgcttagatttcccctgattttaggacatataaatctctacctgagcttggtgacacagctcataatattatctccccttttttatgatcccttctttgtgacctcttcaccaggacaaatcccagtggttcttcatcattcaattctgaagcctcaaatcccaagtcagtatcttttgtgtttttttttttttttccaggactgctaaagtccctgcaatctggagcttgtgaagctctgagtgaccaaggaatagctgtatatcacacccagggctttcacatcaaagtactcagtggagacttcatcctgctcaaaatgacaaattaaaacgaatcccagagctttattcttaaagaacataagacatgttttctttttgaacatttcattgcactgtcttcagaatcaagctctctaaagaacattattataccttgagattcttgacacatttcctaataatttgaagcttctgacattaatacaataaaagattgcacttctggaaaaaaaaaatcaatgaatctttttggcaatcgtcctaaatctgtagagattaaattcacttcccagacattgctatttcatatcaaatacagagtcccacagtataattaagatagttgtagaaccatatatttcataccctagctgtctgctttaaactatcttgggaagttcaaaaataataaggaagctacatcttaaccagagtaattacatttgctaagcagaatgggatgagcaagagctatgtaaaggaataaaataaatccaccagaaaatcaagaacttctacattcattctgatatataaaccttgctgataaaagaaaaaaggctcacctccagttacaactcccaggagaatggcagctattatcccctattgagttggtacttaccatatacagcctgagcaattcatacagaaaaataaaccgtaacattcctgtttattattactttagctgagaggtggtgacattaaacagttctgcactgctgctatcaatcagcaggctggtgatgttctcagcatgggactaagattccttggaaaccatgctcatcaaagcaagcagctgtcagaattcttcaaattaaactgttattatggtagtattcattagtcagttactgactattaagatattttttatattggcaccattgacattggctgttgctttttaatatgcaagttacatataaacatgattcagtggctcgtgtgaggatgacagactctattagagcttggtgtccactgtctaaaggctgcagcaaagggctcctgtctcatccatgcacacttgaatttccctgagaagttggatgtttgttctggtggttagactagggagaagggtagtaataatacatttcaacactagtatttgcccggcaaagtgatagctcaacatcagaaattacaactctgaaagctgtttctgagcccctgatgacagtggtttatgcttctccagcttgatggtttggatttcctttttgtctgagttgctaggcacgtgtttaacttttgcttgaaatccagaatcaaacaaaggatgtcaaatagggtgtgtagagaagtaaaaaggaaaatcagatgcaagctctgataggagaaaaaataggaaaatacttgggttcttattgatttaaatagtatccttggcatttaaaagttcttaagctttagtttttagtttcaaggcaaatttgacctaagtaattttacttcaactagaaaagaatgtgtattaaatacttactagcctagaaagagcgatgtattatttacacacggagcacaaactccttcatacatagaaaccaagatcttctaggtttccccttccctcatgctaatactcatatggcatatggaacaacagtctgttttgttgaaatggagaatatttagtccaaattgtttatgttgtagatgaagagagattcaatgcattaggtcactggtgtcagccttaattttgtttttctcctctattttcaaaatcatcttggatctcccattccacccagaagtcaagccatttccaggtcctcacatgcatgacgatgccgacaga

SEQ ID NO: 48777 - DNA, 2782 bp, Bovine  19866880506022
  misc_feature (1)..(1): n is a, c, g, or t
nccatgcacggcagcccatgaggctcccccatccctggggattctccaggcaagaacactggagtgggttgccatttccttctccaatgtaggaaagttaaaagtgaaagtgaagtcgctcagtcgtatccaacttagcgaccccatggactgcagcctaccagactcctctgtccatgggattctccaggcaagagtactggagtggggtgccattgccttctcctagaacagttcaaaaccagtaattcctattactggggggggggggggacacaaaaaacaaaacacattcctttagaataggaccactggtactgtgaacagagaagtgagaatttattcatgttcgacaaatatccaatcaatgcttagatcaataacagccataatggaaggtgtcagcaatacttggcataatctcccaaactttagtacccatttttttttttttttggaccacaagaacataagtaggctgattttgggtctcacctagggtcagtcagacctaatagttgggcaatatttgttgaagtctaacaggcaatagaatgagagcaacgtaagtaaaaaattcacacgagaaattatctcatcctcactgaggtttgcatttggttccttcccaactgcagggcaatggaacacctggggagatgatctggtaatatattctgacattctacagctgaatactaagggaatgtacttcaaactgtgtgtaaaagagcgaaaaaagttcaattctattcactgtaaaaaacgggaaaacatttcatctcagtgtctatttcgtgtgtatgtgtatgtgatacgctagtatctatccttagacttcccaggtggtggtaaagaatctgcctcccgtgcaagagactccggtccaatccctgggtcaggaagatctcctggagtaggaaatggcaacccgctctagtatttctgcctggaaacttccatggacatggaggagcttggtgggctacagcccatggaattgcaaagagtcagacatgactgaacaactgagtgtacacacacttgatatgaatgacataaattagtataggcataaatgaatactaatgcctatactagatagagaaaatgaatgatttgacttgctttattgattggtttacaaattatgtttactgtcatatagaaattgtgacgaccatgaacatggctagttgatttgctacattaatctgatagcctcagagcttaatttctctgagtcctatccaaagtgataggatgcctggcttctccaccactatagtagtcctgaaatactgccacttcagcaaaactattaatatctacttccctaaaacataattattgcaataactccccaccaggaaatttaattaatattcccaggtagagaacataactttaagtataactgaaacccttcaacatggcataaaaatctcaaaaatcactgatttaagaaaatatgtaattcaaaagtacctgttcaggatgttgctataaataaatattccatgtctgtcttatcatcagatggagttaggacagaggcatgacactggggaggtacggtataaaatgactgtagcctatgaaaggcaacttttattaaaagttggagagaacctctgaaaatctttacttataagcaatctgaaagctctgcctttcccattgaatacttctgtcatatacgcaccatacaatgcatgcagtgatcaaaaactaaagcgtgtgagctttactcaggaagcatagaaaatgcaatccaacttcttctggctgatgttttattgataaaaatcagaaagtaaaccttccatgaacttgtaattagtttaccatgcaaaatgttgacaaaagctttagttcaacaccctggattttccccatgcttggctgaatgagaacagttcttagcggcaatcatgctgggtcatgaaactaattgtgctttgtgagggtgaaaattctcaatttccgagcaggggacactgccacatgacggatgaatgttagaaatgtggtgtgctgtgctctttcatctctgtcactggatatttattctgactaggcctctaaattattcattttctttaagcaatcaatattaataatctgatttgctccctggcattttttagtcacacttctgtttaactgactgtaaataaaggtcactcagaggcttcctgctgctgttcggaaggtccttgcctaattaattcccaacactttttttccctatgactgtgattagcagttgcaatcaagttcggcaattagctgcctccttgcgctgtgacttgctcagtgcaagcccccaggatgaggctcctttaggtcattcagtcatcattctaaaaagagacctgaggagggaggatttatttttcaattcaaggtttacaaatttgcagataattatagaggagattattaagcccatctgccagttgcttcagtaatctccttgtttagggtcctcaaatcctgagcatctagggaagaagtatagcttgctagtactctgcaatcagaagggttggggtggcaatctagggttcaccatgaataggttctttgacctatggccaattattcactatttcttttaatgaagagtggcactttctcagagtttatagtgaagatttaatgacagtaagttcataaatggattctacagacgtttaagaaatggaaaagttgtaggtataggctgtttgaattaaaacagatcaggtgaagaaagaagagaatctgtaagtaaacc

SEQ ID NO: 48778 - DNA, 1490 bp, Bovine  19866880648263
  misc_feature (1)..(1): n is a, c, g, or t
naggccttcttatagagcagataatatcattcagtctcagccattcacccaaacctgctgtgggagacacagcatgttaaattttaatcaaggggcctgtgaagagcagcagggtttagtccacatctacagcaaggcactgtcatcggttccatgtcctcttctcatcctcccaaagcactcattgagaatgccttccgtcagccctcaacaccattagaagagtaagtgccagatacatgcaggagaaatgttgccttgctggcccttgcttttgtgttgaaaatacagcacagccattgaaatgactaggatatttaatcaaacgtgtaaaacaagaggtgccatgggtgctctatggttttaggttctttagtgaatctaccaagacttcttaaccctagctcagagtctataaagatcagttaccaaacaacctataaatgccacgtggtagaatgataaaaagaatgaagccaaaaaaaaaagcactcacaagcaaggatgaattcacaaggctggcaaagggcacaggtttggcctttgccacagcttccaggcattttctaggactggaggttaggaatctcactggcccttaaaaagaaaagatcccttgggtttagtgcagaaaagacatagagatacccacccatgaggttgttttaacttgaaggatcacattattcatcatgaacagtctctaaactcagtcagcagaagcctttctggcacttttcttgtgtatacttggctccattttatgaagacagaacagactatgtttggcatttttgccttgagttattgacatgttttaaattatgctgttttatgtccattcttaatagaacagaaatctgctacaaacgatctttattaacagaccgcctcaggtgctgagactctcgatttaacaacgtctccaaacagacagacagggagcttgttaataggcttttccaaccctttggcttctgtgagacgtaagtggattatggaggtttgtttgtcaggctatcctttttacatcactgtctgaataattgccacaaaggcctattgctttggcctaattaacaaaatgtacaaaatcccgaacatagaacttttattgactaaccatctccatgggaagcatatgaaccctcatcactcctggccccagacagacgctcttagtgatgttacacactgaactacagcttgttactataccaagaacttgtcttaggatttttgagccactcagaaagtgtcacaaaaaaacacatttattggttttagtttaaaactcagtatccttgggatgagaccaattcttatgcaaatttcaccctatgttcactgtaaaactttatactatcagttctgctttgttttttattcacagaaactgatccttgaggaggtggattcatagtataaaagacttgatggaaaagttagaaatatggagaaaaagtaagggttagtaagcttccttggtg

SEQ ID NO: 48779 - DNA, 855 bp, Bovine  19866880884752
  misc_feature (1)..(1): n is a, c, g, or t
natacagaaaccatgtatttgctaatagttagaatatctttaaaaaatagtcatctttcattggaaaaacatctatgttcacaaaagttatggtacatagaatgctcattttctgctgcagttaacattaataataagagtaattacccaataaatatggataaatatggatcttacccataagatgctggatgaatgttgtaaccttgggctgtgatttgattgagaatagaagacgtagaatgtgaaaggttgtttttcctaaaagatggtgattttgttagaggcaagtagattacacgctgtttaaccatgtaacatgattcttgaaatcgtattcggataatggaggacaaagtgacttttttggcatttaatctaccacttttcagcctcatttggcatattcagattcagtctgtattaataattaaagacttattttttttgaataagttacaacttaggacactaattgttaaacatgtaccgcaatgaaaccatacaacttgcaaaaacaacaatggaagaattttacttcaaatatttagttataattattatgaccatattctgcttccattttcagatttatctgctaatgtttcatgatttcagctagaaatataaatctgaatagcacatttgcctagcactgccaatatttttcttggtaaagagccactaaatgttttctttcattttcattctccatatataaaattagttcttaaacattaaaaacattatcttaaaaaagtttccattataatctaaccctgaaaatgataagaaacaaagacacaccatgctacaaacgggggaaatactataaattccattatataagcatat

SEQ ID NO: 48780 - DNA, 2132 bp, Bovine  19866880887358
  misc_feature (1)..(1): n is a, c, g, or t
nacactttggaagatggcaaaaaataatttttgcgtgagcatttaagtgaccactaaacgatagtgatttagattcatttattgcaaattcacgtttaagtgttccatatttacagttttatattaattttttgcactttcaacatgactatattccaaaggactatgtcaattttatttgggtaaataaataaataataattcactatgttttcaaaggaattagtgttacatgaaatgtcctggttaactgaaaacgatcattgactttgcatgcatgcgtactcagtcgcacagtcctgtcctgcaatcctaaggactgtagccccccaggctcttctgttcatgggattctccaggaaagcatattggagttggttgccatttcttcctccagggtatcttccaaacccagggatcaaacccgtgtctcctgcattggcatgaggattctttaccactgaaccacctgggaagcattattgactttaagctaattaaattgtgatatgattatatttcaatgtaaaatcagtcagcttaaaatacacatgaaggaaaaatctcatagatctcttttctttgtatatatcaaaacaccaatgatatttttcaatgttttctgcttattgggtattatacaggcacaggcactcatataatgaaaaaataaagccatttgttattaaatgatgggataaactcaaagggaaatgatgaaaatacattgaaaaacatgctgtaagctatgtttgttttgctgtctttgcagattgacatttcaaattatgactagagaaaatacgaaataattgcattcagtcttttacaactatatgtgctggtgtttcatagggtgacaagttggatgatacattagtatggatccatttgaatggattcttctttccctttttaatggcatcagtcaatggcaattttcagatctactatctatagcccaagcccaggacaagatcttactgtggaacaatgactttttttttatttccttgcattttcattagtcttttaaattggtctaatgcgactagtttatgtcaagctagcattgtcttaaactaacattactttgccagaattttccaagcagtctagcaattttccagtgttgcttttcataaaaattgaaaggttatatgtattattcagctgaaagtttcaggaaaaaaagaaaagtatggaatggaaactgtaagtttctgttagcatagtaattttaaccttgctaacattttcaggatgctgatacagggtgaaataattaaagtaaaactggagagctggaaactagcaatcattttcctttttgaatactttacattttattacttgagattaatctcttttatgtgagaaattaattcctgcacacctgtcattcataaacataatatgcacacaagcatgtgtatgcactcacacgtttgccccaactgaagcttttcttcttttcttgttctctgatgactccaaatgctcatactctcttaagtacagcataagggacaattcagttatcatggtgcttcatggtaattaatagctgtgctgaataatctatttactcaaatagcaactgaccctatattgactagttctgatggagttacacaattatattctaatagaatataaaatggctaagatgatgccccaaattctacaagctcaacttatacagagatagaatgttactatctatagaactatttagatatgtgctttgggaaaagtagcaaaatgtctgttttgaatagacagccattattcaccaatttgaagcttttgtggccaacacatattgtactctcatcactagacagatgctaaatgttcacataaagggagtatctgttctgagaaacagtgtggccaatctgtattcatatatggaaagccaagatggagcacttataaaatactaagaaatcaagttcaaacaggaatctattaaataaactcaaggttcaaaatcttttcaaaggcagagggatagaggttatatagatggagaaagaagaacacatttttatcaaactgtaagtagaatcttgtttcagttcagtcagttcacttcagtcgctcagtcgtgtccaactctttgcgac

SEQ ID NO: 48781 - DNA, 1731 bp, Bovine  19866880896109
  misc_feature (1)..(1): n is a, c, g, or t
ntgagtaacttgggtgagcaaaagttttatctgaagtattcaaaaaatgtgggcaaaagcagatgtttggtttaaaattaagtgcctaagaggctcagttccttgtcttgtttttgttgatagggttgggatggtcaactcagaaagaagggaacaagtacatcctatttgagactctttttacaatatttgcagagatttactacgatttccaaaggtcatgtagggagctattagatataggatatataatctctcaaactgtactctaaacttctgtcatttagcgattatcatatttcttatccattctgcaccatgttttttaacccgtttctcatgcattctacagaacacacaggggccaatctaggaatgaatgtgaaatataattattgaacagccttctttactaatgctatcttcttttgctacagaatatgttaattacttcttgtctgcacaaaaaatgctgttttttttttcttttctgttatatagaattgccagttaaaaacaaaagtttgaaaggagtcaaaacactaaagtaaattttaaaaagagccaacaagagacgttgagtaattttgaaagaaaccataaagttgaaatgaaataacaatggaaaatgggacaaataatccatttcttcaccaataaatgtagatgcctttgacatggtcaaaataaatcacatcgatgacagtgatatacataattatctcagcattttgatttttatttcaatgatatttcagtgaatcatactgtcttgggacagctcaatgcctatgacattttcctgaccatataaaactttaagctttacctagcagccagagaacaaagagaaatgcaaaggcacagatttaacactgaaagtaagaactacctctaggaaaatactgggcctttttgaaaggcacactttttgaaaggcacactttttgaaaggcacactctctctaacacacacacaagcgtacatatatatattcacatacacatacatacacacatatgtgtgtgtatatacggtgtgtgttagtcactcagtcatgtccaactctttgcgaccccatggactgtagcctgccagactctctatccatggaattctccaggtaagaatactggagtgggtagtcatctcttctccaggtgatcttcctgacccagggatcaaacccaggtctcctgcattacaggcaaattctttgctatctgagccaccagggaaacccatatatgtatatgtgaagtgaaagtcactcagtcatgtcagactctttgcgacctcatgcactatagagtccatggaattctccagaccagaatactggagtgggtagccttttccttttccaggggatcttcccaacccagggatcgaactcaggtcccctgcattgtaggcagatttttttttaaccagctgagccacaagggaagcccatatatgtgtatatgtctgtataaataaagatgtcatacttttaatttaaaatatataacttaatgactttatgaaagtcagtatcacacactaatctggttttgccacagttttagggaatgataactcttacatatgcataattgatttagaatgtttaatacaatgttatatgagattgaaccagatgggccttttctttataaattaggtccttggaaaatatgaatacttttttggagagactcctgaatattccctccaacacatctgca

SEQ ID NO: 48782 - DNA, 1211 bp, Bovine  19866880934155
  misc_feature (1)..(1): n is a, c, g, or t
ncttgtgttattattcacagacttataactctcagtttccattccgaattagatctaggttttatctttatataaacaaaattccattggagggttttttttttttttttcttttctctccagtgtttattttaaaaataagcatcttactaagcagagttcaattttccctcttcagtaattcaaatttagcaattgcagcttcctctctgcctctacctccacagcccctggtgtttcatttatcaggcagggttcaagttcaaggttttggacttctttagctctatatggagaaagcaatggcaccccactccagtactcttgcctggaaaatcccatggactgaggagcctggtgggctgcagtccatgaggtcgttaagagtcggacacgactgagcgacttctctttcacttttcactttcatgcattggagaaggaaatggaaacccactccagtattcttgcctggagaatcccagggatgggggagcctagtgggctgccatctctggggtcgcacagagtcggacacgactgaagtgacttagcagcagcagcagcaggataataatgctatgtcaggattgggttttaaacttatttttaatctgcatatagtctcagttaagaaaagctacttgtaaatttcaaaattttgagaaaattaaatattaaagtgtttcctgattctgttatcacatagtgggttcagattatctgaagtcctaaatcattaaagaaatcctgcaattgctttatatttatttaaataaaagtaaaatattgacctccctacctattctatagaccagtggtaaccttgcctgaaaaaaagtgatgatttttagagttatgattgttaatggcccttgaatgtatcctttaactccccagtgtaagtaaggttcagccctttccagatgggaaaatgataaggacgctaggaagatagcaggtcattcttgggcagctgccagaaacttacagcaaaatgaatcatgtagggctgtgctgctttagccagcatttttccattttaatttatcaagccaaagcttgttgacatgaaagtgaatgaaattgttatacagtgggctctaaaaagccagctcaagggtttagtgcagaagaactctgactataaataacaaagaaaatacagggaaatgttcattcttctagcacctgctctgttatttgagatg

SEQ ID NO: 48783 - DNA, 1084 bp, Bovine  19866880950033
  misc_feature (1)..(1): n is a, c, g, or t
nattcttgcctggaaagacggaggagcctggtgggctggagtccatggggtcgctaagagtcagacacaactgagcgatttccctttcacttttcactttcatgcattggagaaggaaatggcaactcactccagtgttcttgcctggagaatcccagggatggtggagtcggacacgactgaagcgacttagcagcagcagcagcagccatgcccttctccagtggatcttcctgacccagggattgaacccacgtctcttacgtcttctgctttggtaggcaggctcttttcaatcatggcaaaaatatttcattttctacagtcttagaacagaatccaagtgtatttttataagtaacagaatgccaaagccagcttaatctcaaagttagatttattggctagatactagggtagctcacagagccgaaagaaacaccagaaacaacaaaggattatgggaagatgacagagcagggaacaccaggaatctgtctccccacctggacaataattttactggtagaatcgatctgatgtaaatatttttggaactctggagtctactgaaggcttgcaactgtcaggggaagtttggatggtaaaattatggtcaatttcagatctcagcacactggcagttccagttccaggcaggcagctgttcatgtgttcttggagctgtttgcacacagctttgggagccaatgtgggcaaaaggaccttgtcctccaaatatcaaggacctgtgctctgattgctgctgctcctccttatcgcagagtggtcagtggccattgttgctgaaccgcttcccattgtttccctctctgccaactgaaggcttctagggaacttaaagggctggtatccttcccccttcattgttctcttttccctctttaggagccagatactaaaagctaggacattcagaagcaactgcttttttgtttttaattttatatttttggttatactctgtggcatgtgggcttccctggtggctcagtggtaaagaatctccctgccaagaaggagcagcaggagacgtgggttctatccagggggcaggaagatt

SEQ ID NO: 48784 - DNA, 948 bp, Bovine  19866880969401
  misc_feature (1)..(1): n is a, c, g, or t
naaatgtgagttaagaaaatgtatacattttatttgtgctctcatgtcccattatgtaccccttcatataatctatccgaattataggcaaaatgctgaaattcatttgcaagtagtaatatcaaagaccaaatagaatagcaaattaatgcatatgtaaaatagtaaaaatgtgaagaagagctatatagtgcttctaaggagaataactagcaggatgtatttgtttgcaaatgatggagtgatttgtaggcagatagtgaagcaactaaaaaagagagaggacgaaattttacatcataaagatatatgtgaaagaataatatttaaggcgatgcaaatgcaactggaagcctgattatgggagtagcatcctattagaggtcactcaggtacaacatgtgaagagactgccggtcaggaaagcttacgggtgctgccctgcagtatatccagcccacgtcagaattgatagaacacacggtgctttatactcttagctaagctacatcacacctcattaatggtatatctattccctttcttccctcagcaaaacattaaaaacttgagatgaaagcatgtcattctaaaacatatttgactcaaagaaaaagatgcttcccagaactacaaaagatatttctgtaatgaaactttaattaaactttgctttaatttggatcacaacgcagaaaataaggggcttttcatcttgccccaagtggaaagtgtcagtgtgtgtcatgaataaaacgctggcatggaaatctcttacaatcttttcgtgttgtgagccttgttgataactaactatgacaacaaaccaattatttgcaatttcatctacaaatagatatatctttaggatgaataaactaccagaaatatatttttgcctgccctctaacatgctaataagaacaatggtaattagaaggaacaaag

SEQ ID NO: 48785 - DNA, 1099 bp, Bovine  19866881008221
  misc_feature (1)..(1): n is a, c, g, or t
ncttgagatctgttctcaaatttaacctgctgtaaatccgacatgtgttagagaaactcacagagtatgataagaggcaaacagtgaagggagaattttagaaatatcgtctatgggctggcctgaatttctagtcacaaatataagtgcaaaattgcaccttttgaaatgtctctaatttagtttagctctgaggtcatttcagctaattgtcagagtaagcttaaactcattcgagctcagttaagcccacatttaaatgttgttaattcagaattttaaaaagcttttcagggcttacattcagcaacatcgtcattcttcccccctgccttccttctgtctgtgatcatcactaagttcataggggagagtagacagtgctcatgcgtatcactgcttccaagtgagggtctgctccaggtcactctctgaagccctggacattattgagatgtaattctacttttttggtcctcattttcatgctataattcccacttctcaagtcgcaggtccacacattctgcatttttcttataaatatctcaaaataatatcctattaaaaaggaatataaacataaattaacttgccattgtgagaaccctttgttttagggttctctcactcctttatgagctctaggcatcttgagaggcatcacccacaaggcgtgagacgttcattcctgactacacctctgatgcttcaatgccctctctttgccatacccagaagctatatgtatgtaggccaggaatctactgctcctacctttaagattgtgaaagagtagaaagcattctaagtgaagaccgtggttagggtattctggaaacacaggctggagtataaagaacagctcctgaattctaagtgaaagcactctaaccttgcctgactttgtgctcttatattagaaagttctttttctccattgatgctcaacacattacttagtgcataggagaatactaactgtggctaccattagagttaatagaatatgtggaaaatgaatagcgtggtgacagtatagtgattttttgctaatctcgtgacaagttataattatttattcagcatatatatgtaa

SEQ ID NO: 48786 - DNA, 1132 bp, Bovine  19866881014767
  misc_feature (1)..(1): n is a, c, g, or t
natagtgaatgaaaagcctcccccaccccacaaaagccaacaaccaatcttggctaaaaaacaaacaacaaacctattagctattaggggatttctagaactaagaatgttttcatttctctttggtttctagctttaacaaatcagtatcaattagtggagtatatacctgaagtaaaaaagtcaaagaatatgcttgtattatgtacagaaaaagagatattcggctgttttagcttagtaaagttcacaattcagacatgcatgataagagactaaatcacttccatgctaatgctgatacttcagcactattttgtgacatcttcatggatttaatcgtatgaaacagcaagtcagctaagacttcgagaaaaatcacctatagatttttaggtactttttctcaacactgactcatccccattttttcaatgatacattatgaaaaatttcacattagcagctaaggtaaaagaatattacattgaacatctgtaaactcattacctggattctaccattaacatttcactatactggtgaagagttgactcgttggaaaagactctgatgctgggagggattgggggcaagaggagaaggggacgacagaggatgagatggctggatggcatcactgactcgatggacatgagtctcagtgaactctgggagttggtgatggacagggaggcctggcgtgctgcgattcatggggttgcaaagagtcggacatgactgagcgactgatctgatctgatctgatccttgctttaccttctacccatccctctagacaatcaacccatcttagtttttgatgcatctgcaaatcagcatgatggattacattaacaatctgaagaataaaagtaacataatcatttcaatagatgcagaataacttttcacaaaattcaacatccacttatgattctattaactaatagagtctttgcacatgtaatcagttaaggactaagatgagaccattctggattggggctggtcctaaatcccatgactagtatattaataagaagagaacaggacacacagagatattaagaaaggccaggttttggtggaggcagactgcagcaatcaggagatgctgtgaagagaaaag

SEQ ID NO: 48787 - DNA, 1046 bp, Bovine  19866881076251
  misc_feature (1)..(1): n is a, c, g, or t
nttgttaaaataatattttctttattaggaattcacgtgtaataaagaaaagcatattcactcctaaactttgtgtggtactatatttgttgtatctttgtggtgtatctacagataggcttaacttccatatgagcgtccatttatataagtgtgttaaactatctcataaaatgtcatgttgtgtgtattaccttctatgcaatgaagatgaaatatatgaaaatcatgtgtcaaaggtcacttagtgggtagcaatataatcaatgtgaataaaatttagtaaagaactgtttatttgttactagactaacatagcctgtgggatgagcagaatgtcaaaaaagaaatatggggatatgaaatttttgtgcttgtcttcaagacagccatatgtttataatggcatgcaagcaaaactcagttcacaatatatattcaaattgtaatatctaaagaatatttcaaatcactagtaaacaaacataagactgatgccccccttttatgtaatagaatacttatatataaaagcattttaaatgtcaatttattttgtgaaatatatactggaatagagatgaggcagaacaggctataaatcattttgaaacatggcaaagtcaggttcctttctttactaagatcctctagcagatgcctctgttgctccatatcacatcataacccctcttgaacctctgattttaggcagatctctgctgaattcgtcagagctctgacagagtcccaccaagtatttatcctctgttctctgatttctgactatgagcttcaatgtagttgtccaagtgtaccagcatagccctgaggtgcagggagttagttcctccctgacagccctctaccaagggaaaggtcagctgaagacaaagcctcaagtccctacactttggactgacagttctgaaaagtatgtggtttactttcggaagagctgctagaactgagccttcattgcccacacggttaatctcggtggtgcgtgctaatggtaacttctcttttctctaccctccccccat

SEQ ID NO: 48788 - DNA, 3536 bp, Bovine  19866881082533
  misc_feature (1)..(1): n is a, c, g, or t
ntctattggagtttctagtttaactgaaactttatgcattttatctgttctgagataagatttatacatattcactataagaagaggcatagtcttgagaatataaatacagcagatagcagtacagttcgtaataaaattgttatcctaatgatgcttacttccattcctcttgtgttataaagctataagcagagtttctcagaggcatttgaagttcccttcataggccatgagaattggggatgcatatgagaagcaaaaattggtgagtggaggggtagaaccaaagagccttgtagaagctctatctcagacattagtattgggagaggatagaaaaacaaggcgcaacagtaattaatttgtagaggttaagttccaagtacatcgcttacagttatgacacactggtctggaatgtgcacagaacacattgcacactctaaccaggttctctggagtgaaatgtaggaggaaaaaaatttttttaatgctcagctgatctaaagtgagtgcagctaagatacactattccagggtcttctgagatacagcagggaacaagcaagaggactataaattaaaaacacacagagacatttgaacatacagttatatttgaggaatgcattcatatagccagatgcacaattgcattagcttattctttggtcataatgcaccagaagtcctcaagatttctgaaagagttgattctatgtccctcaacatacccttgtaagtaaatgggagacaagtaggacaacttgtactaaacacttttaaacacgcatggttagtgtatgtttccaaattaacatccaaccatgtagatacataaatccaacatgtctctctaagcaatagggaaacctccttgctttgaggcttctgtcctcccctttgctatggctcctggaattcttggactcagctacacagctgatagggggataggaaagggaggttgaggtttggattccactgtgtagtaacagaagaaagaataatcaccctgtggtttagcctcaatgctgtgtgatttcaggacaataagaacctcagatcttaaaaaaagatttattccctttagcctctctatgtgtcctgggttctatctgtgccagatctgaagagtcaaagagtgtgaagtcttaaagtagtcactccccttagatgtgtaatagtgcattcagattctgcccttttcactagtttgtgagctcatgaaaggaaagactattatttgttttaccactggacccttaggttgtgaaaaacattggcagatactagatcctcaacaaataattgctgaatgaatagatgaagaaatgataccaaatggttgggtttcatttaaagacgcacatattagaaagtaccagcaaaccacatgataattcaaaccaaatatatgctgtttggtctgtacattgacacaaaagctgcactttcaacttttttaacctatactatcaatttgatgatcttttaatacaaatccaatttttctatattttcagcacacatttaaaatatttggttaatttttgcttctggtacatcagagtatgacacttttaaataaatatgtgttatagcaaaataaacaacaatagaatatacatcaaaattctaaaaataagataattttaaaattttcatatttaaatcactcctcccaaaaaggagttcttaataacaaggggaaaaataaactattattttaaaaggtgttgttggtactatagctaataagctaatatagctaataagctaccatgttataagaaataggatgccaaaatcagtcattttaaataagctaataacatatctaaatgacatcaggcagttaaaatatcagataaaaggatattctgaaaataactatgttgaaaatgaagtctgctctgcaaaccatttgacaataatggattgtgtgcctgatgaaaatgcagttaaaaataacaaaaggaaaaggaaaaataattcatttgctaagatataagcagattttttccctatagacattcctggatgcaaataattatgtgacttctctcatattaagtagactaaagaccattggcttctaagaagacatgaaaataaagggttagaaaattataaaatctctactgctggaaacattttcacaagttaaaaatttttatttaaaaacccacatattcttaggaaaggtaggtagaatgaccaaaaaggaaacaaacaaacagactttctctcagtatttcctagataggaaaaatacctcttgaaatattcatgaaatacattttaccccatcaaccatcaactggaagaaattataatagaagttttagcgcaggaattctttcagaaccaatctgtacagaatgaggattggcaacttgcaacataatattgcaaagttaatacccactgattttcttggtctggctacagtccccatgttcctcacttaaacagaccacaaattacctaaaatgttgtcaactggtacactcactgagttggagtaattccttatatccaaactcctgggaatcatggatcattattttcttaacatccctgtgcctgatccacaaagaaaaacaaagcccttgatacacctccctggaaaaatgaccatcccttgacaatgatacttttcttttacagacccagccaaaattactttacatgaatgaatataataattgatgctatgtctgtctctccctctagactgtaaactgcatgaaggtaggtgttgtgttcaatattgcatactactacatacaagtgtcttgtgcagtgcttaacttaaagtagtcactctattagtgattgttgaataagcaaaagaatgaaaaaggggaacactgtggtcccacaaggaatggtgccaaggtacattacacgtaggatatttgtaactgccatgaaagaagggatgtccagagaaactcacatttttgacggaaccatctgggtagtgagttgttttatcatacaaaacaaattatgagaaaatagtgtaactttatgagaggggtctaaataaatggcattatggctttgaagtgggtaagaaagaggaaaggcatctatagggaaacaataataggctgctgctgctgctgctgctaagtcacttcagtcgtgtccaactctgtgcgaccccagagacggcagcccaccaggttcccccatccctgggattctccaggcaagaacactggagtgagtgggttgctatttccttctccaatgcatgaaagtgaaaagtgaaagtgaagttgctcagttgtgtctaactcctcgcgaccccatggactgcggcctaccaggctcctccatccatgggattttccaggcaagagtactggagtggggtgccattgtacacattctcaattaaatcagcaaatgaactatttattaaggactgttgcataaagacatcagagcaataggacatgggcagtaatcatgtcaaaggatgttgggctaattcataaattttacttcattaagag

SEQ ID NO: 48789 - DNA, 1054 bp, Bovine  19866881143774
  misc_feature (1)..(1): n is a, c, g, or t
nactgtaagttgttttgatgacagatgcttcaagtatggtctttgggtttttttcaacatgcaatacttttttcaaaaacaaaatttatttcatgggaattacacaggcagtgtttttctcagaacatttttattaataattttcaattttctaaatgctattccattgttctgtagatcagcaagactcacttcaaaaaagcaattctagaggaaatcagatacagttttgcttcttgagactggcctagtgttattccaatattttttatgtataacacacctggcacttctcatcataccaatctttctgagaaaataagttcaccacttcagtctaggctttttttctgttgtcttcccataagatgctttttcttccccaactgtgatggtgcctctcagagactcaaagggcagcaattgtattttaaaattattccaaatacctttacccaccacagacactgtatccaaagaaataaaatgtgcttggaaaaaaaaaaaaagtttaaaatcgtctcctgaagttgtggcacttcagtttaaacaggattttttttttcccctttcttaatctccctttaaactgttatccttttcaaatttgattcatgtagctgctggataaagaagttcttttaaataattgccaggagaacaaaataggaatcaaagtgtcaaattccctaacattattttgtaggtagccttaaatacttctttaatgcctacgagaaatcaaatattggtaatctgtcgctgtccatttctctcttcccagatagctaatgacatgcattatacttccctgactatgtgtacctttcatttcgtgcaaagcctttaatccttctctttttagataaaatgccataactatagtgtagtaggttaagattgattgacaagtgcatataattatggcttcagtcgtggagtgtgttttacagttgaaaaaaaatgcacaaccttgaaaataaagaagtgccctttctctgggataaaaggatcatatcaaatggttcatttcttgctagaataaataaaagat

SEQ ID NO: 48790 - DNA, 706 bp, Bovine  19866881265112
  misc_feature (1)..(1): n is a, c, g, or t
nacattcatgtacacatgacatcacattgaaaaagcattttttgcaaatttgaacaaaagttttaaaagtgttcctaaaaggaatttgtttttgtcctagtttttagtttgcagctctaagtgccaaggtgaaatactctgagtttccatttatctgaaccactattattcaggtttctttttactttttctcacaggacactacttagaattcttcaatcatttcagtgtctcagacttcatctttcccaatttttaagcattttacttagaacaatggtgggaaataaaaatgaaagaaaaacagttcagtcctaggctcctaaaagttattgagctaccagtgtccctcatctgctttagttgtgcttgctaccattgttatgactgccctgtcttgtgtaccttgaatggttcttgcttttaaaatgtttatccagtgtttcacatacttcccttgacttcccgctgataaaacttcagtgtaattaaagtatttatatgaacactgctgaattcaacttgcattatttagacacacaaaggaaaattcctggcatttccaagtcacagttgtataatcagatgacatagtgtcagttggtttaaggatacctttatgcccagttttgggtttttttttttaaatgtgaagttgctattccctttctattctatgcatttttcagtaaattaattttaccag

SEQ ID NO: 48791 - DNA, 2181 bp, Bovine  19866881276311
  misc_feature (1)..(1): n is a, c, g, or t
nattgatggagtgattctgtgttttatcaaatcacttaaatcaaaatggagtgtaagttaattggctatttcaaagcactgtaaagacagtttcatggtttaaaaagcatccgtttccattaccatcaatgcaataagtgtaaaaccattttatgctatttctacatgcttttattgtatagaaaggaaaatgcattatattatgttaaggtacatggatttttttcaacatttcttctttgtgaaaacttataacttatggtaaatatcctcccccccaaatagctctaatgaatcagataaaatgctgctgctctactttaataatagggaaaatttatatgaaaaatacaaaatgtcaaaattgcgcttgtgcatatacaacaaaaacataaagaaaaatcatttaacgtatgtaagagagaaggcaaagtgatttcttttattatcattatttttagaattcatcaaataagtaatatcaataagaaaaaaaaaaggtatagcacaaaagggcttacggtgagagttaattctctttcccacactttcccaggtactcggcctttctcactacagtcaactatctcatgagctgttttatgtttataaatatatatatgtacatacataaacatgggcatgtgtatttttccaagttaaaaaataataagcagctttttatatttttatctttttactaaaaaatatatctaggggattatgcttctagcatgaacatatatgcacacagacacacatagacacacatcatttttaatattaatatctgcataatatcccctctgggagtgcaccactatttagccgtcttttgctgacaggcatttaaattgttttcagtgtgttcttcttataaacagttactgcaataagtccaagtaactatgtcaaatccacatgtagaaataagttcagtcctagatgtagaattgcagaatcaaaagtttatgggcattagttatttttacaaaaattaaaaatttccacactgctgagggaatttcggggcacatatgaaccatttactacctagttaggttgcaccagtttatactccttccaacagtgaacgagaagaccagtctgtactctgttctccaaagctgtgcagctactgtgcattcatttattcagggatacagagcacctgctctgccagggtgctggagctatttaaaaaatatgatagggataacgtccctgatactctggagtttatgcgttcctcatattatgtgaaaaaagctaacaatttcattgataaaatattttaggtagtaaaaagtaaaacaaaattaaagtagacaagaggacagagtgtgggttgggagaacttagtttctcctctctcttagcagggtggctaaggaagatatttggagaaggtgacaatggagtaaagtctaaatgagacgaggagacagaaagattcagaaagggccagctgaaagagggaaaacaagtagaaaggtctggaagctccttactggatgtgttcaatggggagcaggaaaactagccagtctacagtagaggaggggagcagagggcggagatttcacagctacttaggacttcaaataaattcagttaaaaagcagctgtcttaaactatattttcattccatttatataaatctaattctttagacaagcatcccgattttgtttttactgtgatatcattgttatcatttttgatagatggtcttgccaggggtgagaaggaatacataatcgtttttatctgagcatagagagacaatttaaaagtgttgctcctattataattaatgagaattaaagatctaaacagccctgactaaagtacagacagtatccctgtatttctgaactcaatatgacatatatatatacatatatatacatgtactgacaccatataattatgataaacaacgtcattataatacaagggaaactaactgggatgctgcctttattttttagcaactctctctccaatttcaagtgaaaaaaaggtcttgcttcaactaaattattaatgttgtaataatctgtcattagaatcaatacctgctttattattcatagtgcatagagagctaaaatggacctttcctgaaataaatttagtgccttgtcacaatacaatatgattttacaatactgcta

SEQ ID NO: 48792 - DNA, 810 bp, Bovine  19866881323457
  misc_feature (1)..(1): n is a, c, g, or t
ntttctaaaaacatgtatatagtagccaaagccctttctttactgttctgtttgtacttatgtagcaagtttaaacatatataatacattcccaacagggaagctaaatggtcctgctgatttctcacccctcatatggcaaattaatttgaaaattctaactgggaagaaagtatttcatacaggagaagaatggagagtataaattcattggaaaataaggcttaaaaataaaattccaaattaaatacccattttataatgacaccaggtaactctggggcatgctttactgggttattaatacatgtctccagcagctgaaggcacccaaggcacgcattcatagacactaaaacacaccctgtcatgctttaatactaaattaattaagcagtagcatgacctgtgtgaaggtctttcctggtccagtaattactgaatggaagacataaaggcattttcagacatttcttgaccaaacaatcattagtttatataaacaaacaaaaaatttgtataaactacagtttgattttcctttgtcccaaagttaatttcaaagttaagtttaggacaaagaaaactaattgtttttagcacttttaggccaaagctctatcattgtttaaaatatatcccatatatccccttttgagcttacaaatataaacacaaatctgaggactttgatttcacacatttttcatttgaatataattaggctgatcagtgggccataaaagttgacacttgctataggaagcaagtttgcactcaactgagtttctcaatatccttacaatttct

SEQ ID NO: 48793 - DNA, 988 bp, Bovine  19866881368076
  misc_feature (1)..(1): n is a, c, g, or t
ncacctttggcattttaaaatatgcttttaaggaaatcaacatgattaacatggtggtatgttcggggaggggaagtgttgtagcattattatcccagttcattttttaaaccattgagctacctttcatatagttttgtttctgtaggtgacgattaaacaaatttagttctcccatattgttcttggttctgatgctggtttcaactgttgtgaaattagtgttgattgtgaataagttattcataatacagcttctcatgaagtgtggacgtgacatgaataacaaatatcctagctctttaataaggttatctcagactcatcataaaaccctacattgtctctataatcctgcagaggtttactgaagtcaaattaagacacataaaaacacattcttcaagtgtgattcacaatccttaggaaacgactataattgatttacaacaaaccagctgtactgagaactcagcagccccaggtgattctgacagttgtgcttgagtaaatctgtgtgcaaaacacactattctggaattgtttactgccagattgttaaatccaaagatgaaacacgtggttaatggggaacgtttagcaaaaaggactggagaatgatgttgcttaggtaaacattcatttaaacacattagtaaaaatgtcaggtgcattaaaaacttatataaagaatttataaagctactgtgtgtttctaaaatgaatcttttccctctcctttggtaggtcctgctttgtttaagctttcttgtttttataaaatcctggcatacacagtgtactgtatctgaaaatgataaagtgtgcctctttggtacgcccttgtcaattacatgtgccttgtttcattagctacagctaattattagccctagtgttcgaggctatgaatttaaattgaggaaaatgagtggtcattttttatgatttccttctagtcatttcagattcatcagactatttttat

SEQ ID NO: 48794 - DNA, 1188 bp, Bovine  19866881414440
  misc_feature (1)..(1): n is a, c, g, or t
ntgttcagggcacaccaaggaagccagtgtatcttcagtgctgtgagcaagtggttagtggtcttggaaggaatcgccaggtcaaatcataaggagctgtggtaatgactttgggttttattctaagtgtgataaaagccaatggagaggtgaaaacagaggagtgacacgatttgatttcaatttcaagttgtcactttggctggcactggagaacagaggtcaagagtgaaagccgtaaaagttgttgtatagcaaatataagctcaggcaaagataagctcggatgatagtagttaaaaacagtgatcaggtttaagatgtattttgaagattttgctgaactgtcctgctaatggaatggatgtggaaaatgaggaaaagagagaagggtgagagcccatcgttggccagtataaggtaactgtcagttacatcctcaagcataaactaaaccttctctttagggagaaggcattgctagttttcttcattgtctgttcccttgggaggacttactaatgtctatatgtgaggacataataatgggtaactggagaaacagttaactactcctgtgctgtgcaagcccaaggcataccagcaacatggagaagaaaagatcatgacccagtatatgcccatgggggctacactggaggaaagaggccaacattaaagcatacattctgaccttctcatggcagtacagcaaggcaaacgtagtcagcaaggacagataatcctctttaaactgtaagagacaacagtgtcagtttctaaccaaaatggtatttggaaaaggagaatggaataacttttaataaagttttcaggtgtattaagaacacacctttattaaaaggtaaaacattttccccaaagactccttttagatcaagagttgaagatttttctctctccttaatcttcacacctgctcaaactttagtaccaaatatatattacataagcccagtgaatatgttgtatactttgtaacccaggaataatcagctatgtaaagtcccttgatttttttttcagatttatactaaaacccagtatcaagtattttatttagatacaattaatttaaaacatcagtatttagttactgagatctcactatagattctgagaatgtaaatgtgaccactacatggtctcatcctagtaaaaaagaga

SEQ ID NO: 48795 - DNA, 652 bp, Bovine  19866881773699
  misc_feature (1)..(1): n is a, c, g, or t
natgagaagcttggacacccaagtgatgtattatatagcccattatttgcttctgggtttcctttttcatctgaccaaggaaatggagggatcaaaaaatcctcccctcaatccaaattcattttggaatccatattggaatacttaagaagagatgaaaaatcactgagtgatatttgcctgtttaaggtttaaacacggagaaggcaatggcaacccactccagtactcttggctgcggtccatggggtcgctgagagttggacacgactgagcgacttcactttcacttttcactttcatgcattggagaaggcagtggcaacccactccagtgttctggcctggagaatcccagggacggtggagcctggtgggctaccatctatggggtcgcacagagtcggacatgactgacacaacttagcagcagcagcagcaagatttaaacaaatcctagtacaaaaattttttttaattcagatttttacatttatcttgacgctcactttgtcatatgatgcctaaactctaaaggcacgtttccatcgaagatcatgattttgtcattaaaacaaaggcaccaaagctagtctgcatttcccattcattgaaagagggaaatctgcatgcttctcactgttggaacaac

SEQ ID NO: 48796 - DNA, 1494 bp, Bovine  19866882034783
  misc_feature (1)..(1): n is a, c, g, or t
ntattactctcatctatcttcttaacaagaaaaaaatatatgtccaaatacatatatatacatatatgcacatatatatatatatatgtcctagaaaacctctgaagatacaaagttttccccttaattgttcttttatattgtttacctaaatatggctgactaagttgcataatactctcagagatacaaagacatgaagagggaacaaatattccatcctggttaagaagaaaactatactccttaatcaccagttatccaggcaagaaacaaacaaacatccacataggcataagaaaggattctcactcttgtgacaaaacagaacaaacaaaactgaaaaaactgtacacaaaatttggttcaagttttggttcaagttttctaaactctactcatacttagagtgaacacgtagcgtctcaacatagttattagcaacattaccttccaccttcaaaatttccctggtttggttgataaattcatggtatccatgtatcaaccttaatgcgatttattacagtatgtataataaatggaaatagaactacagatattgcagttagggagttttactcttcttcataatagtgtgctacagaatcctgggggattcagagaggaaaatggtaggtacacaaaatgagtcattaattgccctgtaatctagatccattatagtcattaactttctgttttagtttagtcatctgtaaactagagataacatataattttagtaacttcataaccattcctctaagacttggataatatgacatgggaccattttgcatatcataatgctttaagcatttaaaatatatttttattgataatctaaactatttatttagagtacttagcactgtctctttttctctttggcagctgtgtgtgtagatttaagatcataaagtcttgaaataatgacataataaactttttgagtatatattatctttaaatctaagttttgagtttaattaattttaacagtaggaaaactcatatggcattacttcattcctattactttcatagatttccttcttaaggtacaacctggagaaaagtaaaaaagaccactttactctcttgaagttaatttctcctaacatggaaataggcccaaatttctcaaagtttagctgcaagcagaagacattcacagtagtttctctaattttcctggaaatgaatggtgtgtgttacttggtgtgttcttattatgatgaaagaaaccttcttcattagtgacttttaaattaatgacttaaagaaagatgtaataagtagcaatgagaatcaggttttagtttttatctcccttctatgactaatctcaaaagtcctaaattaattgtcaaaattcttacagcctagctttccacctaccaaaatagtatgagtctctatatttaatggatagcttgtttcaacaaaacttttaaattatttcttaaactcagaacactcacatttgag

SEQ ID NO: 48797 - DNA, 985 bp, Bovine  19866882127905
  misc_feature (1)..(1): n is a, c, g, or t
ntggaagaatgagaagtattaactatatgtataacatagccttaaggatgtattgtataacatgagacatgcagccaatattttgtaataactgtaagtggaaagtaacctttaaaaattataaaataaaatgaattgccctctttttctcctatgccttatcagtttctatggggtctacatatatttctaattcttggatcctttatattcttctgctctataaactgaattttaatttgagccagtgtacctaggctctgttccttaaaaaccaatgacactgtgtccatgaatggggagatggagtgtagtctgtcctcattttactggtaacagagcaaactctatgcacaaccaacatgaggaagaaacaggtaatactcctttgccaggtaccagagactttctggactcttgatggctatgttctctccaaattaacccctacttgacagccataaataacagttgtacagcttccacctccaagttcttcttttatgtggagctaggtcagaagttttatgtggtctacctggaagtattataccatctgtactttatccaagaagatcaaatctgtggattgtccccaaaaattctgcagtaagttgtggcacgtataccagaagtttcagaagtgaccataaagtattttcaaatgaaaagacctaccataaatgagacagtaataatcaccagtttgaatttgggtcacttgatctatggctaaaagattttatatatactccagctttggaggaatgacaaaagccaaatttatcttttcatataaataactaaaataacagaccaaatatacaaactagtaaattttgtataatgaatcctaggacacacaaattagagatctttgagaaaaagaagacaaaaggtgatccctgcaattgcttcagcttaaagtgcctcaagtgactaaaaaagtatctcagtcctggtgaaggaagctataatccaaaca

SEQ ID NO: 48798 - DNA, 2572 bp, Bovine  19866880271135
  misc_feature (1)..(1): n is a, c, g, or t
ncaacaggcttttgagttcctcttcactttctgccataagggtggtgtcatctgcatatctgaggtcattgatatttctcccggcaatcttgattccagcttgtgcttcttccaacccagcgtttctcatgatgtactctgcatagaagttaaataagcagggtgacaatatacagccttgacgtcctccttttcctatttggaaccagtctgttgttccatgtccagttctaactgttgcttcctgacctccatatagatttctcaagaggcaggtcaggtggtctggtattcctatctctttcagaattttccacagtttattgtgatccacacagtcaaaagctttggcatagtcaataaagcagaaatagatgtttttctggaactctcttgctttttcaatgatccagaggtacatctgcccacctctaatacagcacctcaatgacaccatcaaaacgaaatcacctctgcttttcccccagaagtaaaagaggaataaaaggttagttgaacagagacttgaagtaaatctatcctttcaaaagataaatgtctcccttcctccttacccgggtgcatttaaattctcctatacctttgatcaaatcaatattctgtttaagaacctgaatgactctctaatgtcatccaaataaatgtccaagcatctttagctgacacttaagtaaccttggtaaaaatgcttcaaatctaccctggaggtacttctcatgttacctctactcacaacgtagggacgtgaatctggagccccaacacatgctgactcttctcagaacacacacgacacttctgagcctcttgctttcactcttgccctcctctccagtcatcagtcttattcgattacagtcaccagccttccacacatccttggagtccagcagttgcacacactggaggcccgcctcccacgacaaagccagtaaccgcaggcacctccagatttttatgccactcactctcaagagattggcttctcactcaatagtgcagcagctgcccaggttctgttcatattttatctcccctccaaactggtaagtgcccagagggtgggaatcaggtttcactgttgtttcccacacagcagctagcagtgtccttggcatttccaaggaacttaatatatatttgatgagtaaatgaattactgtgttccaactacaactctacgtttttgcttttctaaaactcagtctattgcctgccccatgaatacatttatttcaaagggagaattgcaaaaagacaagaacagagatatgacatgggatgggtagtgccatttccctgcatagtttcatcgcaaatctgcccacctagctaattttcatctccaaacccaatcattaacttcatttgattggactgcctgcaggtctttcttataaaagggagtcttagatgatgaagtctgtggctatctggaaggtatactgtgataagaactttttaaatgtccttccttctctaatccattcttcaaaaagccatacttcattgatttcttaaatttttcctgttgagagcctatatttagttttctaggtaactatctttaggagtgcttagctgctcagttgtgtccaattctttgtgaccccctggactgcagtccgtcaggcttttctgtccatggggactctccaggcaaaatactggagtgggttgccatgccctcctccaggggatcttcccaacccagggattgaacccaggtctcccacattgcaggcggattttttaccgacttagccaccctggtggctttagggagaggcttcacctatgatgtgattgttattaactacagtaagaagactctgggactagggaagtgcaaaagaaggggtaagagagaggtcagtaaaaatggggagtgttaaaaagactctgcaaaccacagtttggagaatttgctgaagtttggtcctatccctagtagaattttacatggcaactcttcatggatcagaaaatctctctgctgatgaataaccacaatcctggcatttttttaagcccacccaccctcagctctaatataattgcctatgacagacagccagctctatccctgtgatgtaattattttctctctgggtccttcttatgggttcgtgcacacgagagcctgtgcatacatgcacacgcgtgctgtgtaggcacggagacagctcactgatcctttccaccccattcatttccctactaatacgatacatctgaagcacacgtggaatttccgagtgtgtagtaaaacatgaatctgtggaaaataaattaacctagtaaaatccattcaaatgatcaaatgtcttgtaatttgagaggaaaaaataactactggttttgatggcagcttaaaatatcttgtatttctcataacaggctagttaaaatgcctattttacttaaagcatggtaacaaattctacatgacattcctaagttctcatccttctcttgttaagccctcccaatagtaataatgataataacaataacaacaatggtcatatacaacaaagagcaaagatca

SEQ ID NO: 48799 - DNA, 1770 bp, Bovine  19866880390040
  misc_feature (1)..(1): n is a, c, g, or t
nttttaaatttttaacagtttatgtgagtagaaattgattcaaatcaagcagtgtcaaaccaaaagtgattcagagcactgcaccaacaggatctcaaagagagacttttatagggaagaaacggaaacaaagcaaggccatgatttgattggctatagctggagcacttgccttatctgggaaagcctagttgactgctatggttggtggtccttacatcatgacttcttaactttgaagcatttcaggcttaggatttggtttgcttattatgtaggcaactaaggtattaaagccacctcagtttattggcctctttatctaattattttaacaattatatgggtataaagtctcagtgagaattcacagacctccaaaaacctggtcctgaaatgttgtgtggccttcgtcagggaccatgtacgttcatcaggggtctaatggaaattttgccctatgcatttgcctctctcctgcatttttgcctatcaggattaaatccaggtatacttccaggaaagtcatgcaggatactgctttcagggaaatgatgatgctaaagatcacatgctcttcccctaaaagagcagcttgagaaggtccaaagagtattaactttggagttcagtagaccaggctcctgtgtctggatccagttgctctctgcttcaacttcaggcaaaatgtttgagatgtcagagaaatgggggtaataatgcacacctcaagatatgaaaaagaaagcaaaaataaatccccaaaccccttagttgtcttttcttccagccaaaggctaggttctgactgcactataagccagaaatagcagaccccaaatcctggcagggtttgatggctagcattgcggcagccaggtgggaggaggaagccaggcctacctcccctccttggattgggtttgcaacttaggtagctttacagcagctctgacagcagagctataaagagaggctgcagaacagctagtgtctccttgtctatggggtaggatgtggggcctcactcgagagcccatttctgtaaatgagaaaacagaggaggctgggaggtgatgtccaccttgcgctttggggtaacactccttttaatgaagactccttagaagtcatgttctcataaaggaggatgcaggaagagctgtttcctcccggttgccaactgtacctactgggcaccagaaggggtttcactttcagcactgggccctgcagccaacctcacaaaatgctttcttgcatttgccaacaaggaaactcagtctgcagctgcagcagcaggtgctggctgccaggttcccccggcaacccaggtgtactccaggttagcagctctgccttggagcagtggccttcgtctctgatgcatgtggctcgaagcacagagtggagctgtgtccccccacggtgggaagataatgattttgctgggttttatggggcataatataacctcagtgggtggttcagtagtagtggtggtttttagaggatatgagagattgtaacatgcttgtcgatgtttcttgtttgaaggatttggggacggggggaatggggattgttgccatcattcaatccaattcattatcattcatgcgtttgctcaggcccttggctgatatgtttatgactcaagagggcactgcttccagccacatgataattcaagtttgcatttgtgtgttttgcacagatgtttacatctaggatcttacttggggctccctgtgaaaatcgtgagtgagg

SEQ ID NO: 48800 - DNA, 4155 bp, Bovine  19866880390049
  misc_feature (1)..(1): n is a, c, g, or t
natgttaaattataccacaaaggtataatcagcaaaatctagactctggggaaactccatggacggtagcacgccatgtgtctcagtttgggccaatgagatgtaactggaaagtgtatggggagcttcttgaaagagtccttaaaagagggagacttccctgcccgctgaatggaacgcaaaatgacagcctaagcagccgtcttgaaccacatgcgatgtctgacgttagaacactgagacagaaagacagagggagcaggggtccctgaaggctttcaggtcataaagctactgctctgaactgcttgcctccagacttctttgacataaacaaaacaagcccctatcttatttgcgccctcactgtttttggagtttctctcattcatagcgtaacctaaccctaagtagtagacaagttaacaatgaattcctaaaaaataaatagcagttctcactgagggatacactatatgaatgttaacacttaatggctctgattcacactcactcattcattcacccattgcttcactcattcaaacggtctgcactcactcatacaactcacccaacaaaggatcagtgaagtccagctgaactgatgaactgcagggtgcagaatgggactcaagcttggcctgtgtccacagaccaacggtttcctgaaactcgtaatggacgcgctccatgttcaaatactccatccacaggtcctaaaacggaaccataagactttaactttcagggatgaatcatatattcacatataaaactatatatttaactctaaagtgaatccataagtttcaacatgaggtggtccattccaggttctccaagcattaggatgaatcacatttaaaatgggcattctggagaattccctggcatggcagtccagtggtgaggacttatgctttcactgccaagggcctgggttcactccccggtcgaggaactaagatgccagaagccaagtaatgcagtcaaataaataaataaaatggacactctaacagtctaaggaatctcaaaactttttgattatataccacacttagaaaaagtaatttcaacagccccgctaaacatttactgttgatagaggctgacaattagagaagaatactgagaattaacaatgggttaattctgcactcaaaagatttcaggacaccatgatcacttacgtatttttcctatttctctggccctacaatctcagccttgtttctccatgtcttaaatgttccttttcagaattccatgctgagttctcttcttaatccaaatactctattaccattacacccacgtctcctactgccccactcctgaactacagacaactttatatcccgtccccaccaattcctgaatatgagttctccttgaagcccctcaggcactttctcttccagttttgtaaagagcatctttagctgcccaagctacatatttggaagtccgtgtataccttatctaccctacaagtatatcaatcctaaccagagaatcctattgattctactaatgaattgttctatatatttttaattcatccacttatttaaccactccagctatttcaacatctctccaaacaaagacttcctgctgaaaactttctgccactccacatcaccatgctatcctttcaacttgacaaactcccatttgtcctttagggctcagttcaaggtcacactccagtctcagtctgaatcaggtaccattcctccacctttgcatatgaaacagcaccctgcacatttcactcccacagtctttatcaccagatgtaataattatttagtcccccatttgacagtaagaatcttgaaggcagagactgcatcacttttctttttatatttttggtataggtgactgacgcctcaaaggtatccaatagatactcatggaagtaagagaaggaaagaagaaagaagagagaggaaggaaagaaagaaaacagaagaaagccagacacctagtggagatgaaatagtacatacaatgtggaaacagctaggtttaaagacacagtctatcaagtctctcaagtcttaggggatcctaaatcctatccaaggttggggatcaagggccagtagagttcagtccctagaaaaaataaactggaacaggagagatacatctctacacacacacacacacaaacatatacacgtagagctacagaagctcagaaaaaaatcagaagttttgacctaggaaagacaacagacctctttgtttgagaaaagattagaacatgtggagacgagaattgaccacatccaaaagggcagccaaaactgacagctacaagtcagcctcttcaagggtgagcgcctcgctttctccatgctattaactttctatatgcatgagtcttaacaaatccttacactgaactttttatgggagtagagatgactgcttaaaagtgttcagatgctgacaatttaaaacaaggaagaatatagtcagaaaaaggctgtgtttatgaggctgcagacggtccaagaatgagcttcagtccttcacatgatgccagagcagggccggatattcaaaaggggatatcccagggacttccctagtgctgcagtggctgaactgcattggaagaatccaccttccaacgcaggggatacaggttcaatgcctacgtggggaagtaggattccacatgccatgggccaactaagtctgagcgccacaactactaagcccacatgctctggagcacccatgtcacagctagagagaagctcatgagccacaaggaaagatccagcatgacgcaagtgagattctgtgtgccgcaactaagacccaacacagccaaaaatgaaacaaataaaatataaaggaaagaaagattgatgtcaagcttctgacttctgggcatctctctgccatctttttggggcacctgtgccatttggtttttgatttctgggcatctctttgcagtttgctctatttaaaatgtgactgccagctggtgaggttttggtttggcttggttactttagtttgagcatgcagacatctggtactaactgctggagctaaaatggacagcatttcctctaaggttccaccctgggtgggagctccttgggagattttaaatgactggtcgacctatatctatgatccaatgacaaagaaatatggcctaaaaacaggtctctcacagtttgatcttcattaccacaggatgagaaaatggagtagggttcccacatgtccaggactttctcctataatccaaaagcctggactgatcaaaataagaccccatctcctcagagggacaatccctgatgacacattttatcagccaatgtgtgaccccatagacggcagcccaccaggctcccccgtccctgggattctccaggcaagaacactggagtgggttgccatttccttctctaacgcatgaaagtgaagtcactcagtcgtgtcagacacctagcgaccccatggactgcagcctatcagggcaaatttgaccactacctggtctaaattttaggtatgaccacagacaaagaaaagtgactttttgaccgtgtgcccacaatatcctttagactttggacacaactggttaaaatttgttttccaattgcaaaatttgctatttctgcatgtgcaattagagaaagctagtttgttaaagtactttccccccacccccagaattctgaccctgaaggagtaagtcctactaggagaacatgagtttctttctcttccctgtgccttgagaccatggctctcagggacacttacctagaccacctctaattcctgaaactgaatttaaaaaaaaaaaaaaaagaatcctttaaaattttttcttactccaactgtcatttataaactagtgagttttctattgtgatacctgattcatgactaagtttagaaaacaaagctatgagatctctcattgtgtctgtgtgaatatatgtacgtctcagatgtgtttttgtctttggatattgttgctgaggttaatttgtaaattaactggatatttaattggcttaaagaaaagcagatacttaaaaatcaaacaattctaagcacaagagaaatttaaaggatttcagattcatgtaa

SEQ ID NO: 48801 - DNA, 739 bp, Bovine  19866880401055
  misc_feature (1)..(1): n is a, c, g, or t
ngggaagtgagggtagggcgagtgcattgtagacacactggcactcagtgcaccgtggcttaggggcttaatctctgcagctataaaccaaatgggtgcaaatgaagacaggccctcctccttctgcagcgtggcgtgtggggggcattaaggaaatcaccacagaaatgactgtcttaacattttgtcttgatacattaaagaggaaatcctaagaagaaatgtaaattgcccagaatgcttaatgtcttaatttatttgcaaacactactaaaaagcgctggaacagcacttaaactaaattaaactaacgggttttagtaactcctgactttgaaaccagagaaagatgttaaaaatcagatggcatgtcggagagttgtagagctcagggactaggggacacaggctcccctgaggctctcagtcactgcgtagcagtgggtgtgggcgtgggcggcagtggtgtgtgacccccggcagtgggcgtgacccccggcagtgggtgtgacccacggcagtgggtgtgatgctacagacaccgcaggttcaagtgaactgggtatcatgtgtgtaaaaggcctatttgttcccaacacccttcatcttgacttttttattttgaaaaatgaggcgatcgcatagcaagacctcaactgatgcttcttgttcaaagattctatgctttaaacagagacattttgtcccaagcaagctctctgattctgttagaagtgaa

SEQ ID NO: 48802 - DNA, 1917 bp, Bovine  19866880420576
  misc_feature (1)..(1): n is a, c, g, or t
ntcctttggactgcaagggagatccaacccagtccattctaaaggagatcagccctgggtgttctttggaaggaatgatgctaaagctgaaactccagtactttggccacctcatgcaaagagttgactcattggaaaagactctgatgctgggaggaattgggggcaggaggagaaggggacgacagaggatgagatggctggatggcatcacgaacttgatggacgtgagtctgagtgaactctgggagttggtgatgaacagggaggcctggcatgctgcaattcatggggtcgcaaagagtcggacatggactgaactgaactgaactgaatggcttattcatatgccagttaggcaggactgaaggtaatctcagtttcaatgggttctttaattagttaataatcagagcagggctggaagagagacttttcccaaggaaagactgatgtttcctagaggctctgaaaaatattaatattttatttatcctaatggactctctccctgacttcaaaggaaaggaagtgtcaagtcctctttagatttcagctggtaaagaatccgcctgcagtgtggaagacctgggttcgattcctgggttgggaagatcccctggagaaaggaacggctacccatgccagtattctggtctggagaattccatggactgtttagtgcagggggttgcaaagagtcagacatgacggagtgactttcagtttcactttttttcaagtattaatgagaacctcatgctaacggagggggctgggagtaggcatcttctcacttctggtgtaaaattgatgattttcttctggttggtgtaggaggctatgggcagaagatggagaaaacacactagggagactgctgaatgctcaagccctctcctcctaaacctccccaagagatgctctttgaatttatctctttttagtctccaccttggagtgtctttggggttgccaaagtcttcctttaaagtacaaatacctggaagactccttaatggagagaggggaaggataacaggagagtgggaaagggaggtaagaaggatggagataagaaggactctgaggtgtggggtatcttggggagggagatctgggagggtgtctgcagggagatactggggtgtggcagtagaaaagtactgagtgttgggcaaaggcattgacaaggagctgggagggcactagacacaaactttgcctaatgtacagtctgattataaaacaaaaaagcgttatgtaccaactgtgaggagaggagcttcccagtggtaaagaatctgtttgccaatgcaggagacacaagagatgcaggttcgatcctaagttggaaagattccctggaataggaaatggcatcccactccagtattcttgcctggaaaattcgatggacagaggagcctagcaggctacagtccatgaggtcacaaagagttggacatggctaagcaactgagcacacatgaggaggtagctttttcagacctcatgagggtttcccagctttctgttgctgttgaacaagctacaacaaaactcagtggcttaaatcaataaccacttctacctgatgattttgtgggtcagaaatggggttggggctctgctgggtgattcttctgttccgtgcagagtccatgaaggtcacttggtggtacttgctacctttttaagaggaagaaataaaaaggaaaagtcagccaataaacatttattgaggatctccttagcacgaggctgagagcacagactgaaatgaaaatggccccatctcttcccaatcacatcgtcttgctaagtaacagcctctctgagtgtcatttgccatatctgtaggtggggttgttatgagattcaaagagatcacagagaggctcaataaaatctaag

SEQ ID NO: 48803 - DNA, 1532 bp, Bovine  19866880430233
  misc_feature (1)..(1): n is a, c, g, or t
nattagtcaatgaacttatactttcagtaaacaagctatttattaatatatatgtaatctcaaagttagacattatggaataattcaataaacatgtatagactatctactagtacttgaaagatagcaaagaactttattgtgaattatttcctttaatctccagaatgtggaaaataccactattattataacttccattttagacattagggaattgaagtttaaacaggttgaataatattccataaatcatataaggaggaaatggatgaattggaatttgaaatttaatgttctgctctcaaacctcatgttgcttttagtatagtattgtaatccaggtaataaggagttgattttcaagtgatcttacaattttgctgaagagacaagatatatttatcagaatgtatgaagagacagataaacaagcaaggaaagtttgaatgtattgaatattcactagaggttaaacattgtgctaatgaattttcttgcattgtctgatttgaacctcacctctaaggtaggaactatttcccccattttacatgtgaaaaaactaaggcttggagaagtcaaataataaatcaattaaagaactaagattcagccccagacagttgaactacaaaatcattatggtgaataattatgatccaaatacaatgaatcttcttcactgaacaacttgaagttctgtttgagccgttgaatctaatgtatttcccaatgctgggagtggtggaaagaagcttcaaaggctgttgataatcaaggagggacttaaactggactttgacattgagtagcaaaagtggatgaagtgacagtaagaacagaactcttgccactgcaaatgtggataagagcaaaagaaaggtagaaacaagaaagaatatgacacctgagggaatagtaaggcaaccccaacagttagaagcctaagccacagcttgaataagtgttttgagccatattaggaagggcgaggagtgtctggatgaaaagtttgggctatgccattaaagacctgagagccacaggaaatttttaagtgtgaaagtctgacaatggtgtgccattggggaggtatgtctggaagggaaggatgtctaggttggtataattggcattgaacaggagcagctgtcaggggcttcagcttaaaagttcatctttggttttgcctacagaggtaaggaaagaatcattgctgtccatggttctgttgcggctgcagcctggggcaagactggaaaaaaataaatgtcagcctgatttcttcagttgagaagcaaaaaagagcataaactctgctctgctttagcagtgtgagttttagtattcacatttcaatagttctcaaacctgaatacgtctcagagttacctggggcacttttcaacagcataaatgctccagatacaccccctggaaactctgactttagttttttagtggggagcccaaacaatgggaaattttgaaagtgccccagactattctaatgtatagcaatgggatag

SEQ ID NO: 48804 - DNA, 1764 bp, Bovine  19866880464313
  misc_feature (1)..(1): n is a, c, g, or t
nctcattttcctcatctgtcaaatgggatttaaataattgccctagctttcacatacgattgcagtgaagatctggaatgatatgaacgaatgagcactgaccaagtatacagcagcatactcaggaaaaagttcacccttttttagcaagtctatctgaattgaagtccattcagtccattgaagaaccccaccctcctaagagggactccaggaaggagggattatatgtaaatcactcagttactgcacctgcattacttctagaagatgtgtcaattcaacacaagaaacactcgaccgagaattaaagttggaaggtagacatttacaaggaaaacttacacacagccagttccttgggatagcatgtatcttagcagtattatatccaattcaaataaaacaacacttttcaagggcacagtgtcacttcttcggattgttggatagaaatgatccatgtttaagaagctataaaacggcaaccatacaccataactctaaaataaaaaaccagctttgcagaattgttagaaattgtacactatattggaagtgtggagaaaagatggtgctaacatgattataaagcagaaaatagcactaactgtaggcgccacattctcgcaggaaagaaaaatccctgagggctggagaaggagctttccctataggctggaggttatgggtgtcccagggcacctaccacctaagctggtcctgaaccatgaatataattttaaaggcagaggttttccaagatgacacggtgagtctgggtaggcaggtgagcaaaagggaatagcagatttgatgacaaaatggaccaatccctgagcttgcatttacaaaagacttactgccccaagaccaaagaagaaaaggtaagcaaaactcccacttgggttgtatttaataaataagacatatagcaattcagcttctcttaattcattcaggatgataactggtggttcctgatgaatactggttcatcactggccatgaacaagtgatgagtggtggtccttgatgagcttccccaatttgtctctgactgttggttcttgatttggggggaaagatggatatctgttgctttcatgggaggaatctatgctcttttcccataagcactgatgctaccctctcacaagtgcctgatgagagaaggatgcatcactggacagagacaagagaaaaagtccagtgaccaaaggcaaaatttactcttttgcatatgtggagaaacactggccctccagatgtaatggaggacaaggaaaacaaggacaaagatgttagagttctcagttttttgacatgaaaggatgttcacaatatatcattaaaaattatcttataaaacaaggaagtaagtttccacttttttgcaaaaaagaaaaatgcttatgggatgaataagtataattacattctaaagaataaatccatcagatcaggagtctgcgggaagcccacactcttattaagagcctgcctatgatgacaagctagccagggccaggcatggcaagccactgtgcagtgtggcttgagaggcatggacctagctgagcagaagcatgctggaggacttggagaggaccatgtagcactgggaaagcctggaggggaggaaggaaacctagccaccactctctttcctcttgtcaaatttctgtgatatgagcagccaggagctcgaaaataggtctagagctgacggtctgccagtcatccacccctcagtgcccagga

SEQ ID NO: 48805 - DNA, 673 bp, Bovine  19866880477595
  misc_feature (1)..(1): n is a, c, g, or t
ntttgagtatttgttcttagtcactatttgtttttattctgagcagtcattaacctcctactatgtctccatcttttataataaaaatagcagtgttaaaagggataacaatactcccctccctgcgccctccccaggcagtgctctgcaaggcaagagaggaataaaaatgacagatgctcctgtgccaaatgataaagccacaggggcaggcgggacccggtgatggtttaaaagaagcttctggagtagctttctggaaatggttgttatgaaaccctcctccagagaaagtaggtagaagaatgaaggttgattagctatcaagtggccccaaacagtccctgattagaccctcactcaaggtacacagacttttgcaacccagggagtcagctggggacatggatcctcgccctgaggtctgactctgtgttggaaaatagcctatgtgacccaggggaggcagagcccggggggatcaccagctctagtttctctgccatgcccccaacacccacaccctgacatttgatcctggatttgtctttgtgaatcaacttcaatgtgatctgcccactgtttcctgcaaaggcctggattgcatctccccgcattttaatctccccaggacagggtcctgggaccccagggagagcctagtagaaggtgt

SEQ ID NO: 48806 - DNA, 1492 bp, Bovine  19866880487226
  misc_feature (1)..(1): n is a, c, g, or t
ncccatggattgtagcctgccagggctcctctgtccatgaaattctcccaggcaagaatattggagttgggtagccattcccttctccaggggatcttcccagattcagagattgaacccagtctcttacattgcaggcagattctttactgtctgagccaccagggaagcccatctaagaagataatattcttcccatctcttcaagaacatttgttaactgtgtatcagataaacctatctcatgtccttttaaaaacttcatttcaatattcatgcttatcaatgaatttacttgtaaagcaagcaccaaatatatgcattgagtaaagaaaacagtcagattcaaaggtatccattatttacaactgaacatcttctctgggctagatctgcaaaacgagcatttaatgactctcagaagatagacagtaagcaaacattatgggaagcagaagaacacaagggtaacaagagagtgcctcaaatcagaaggactgagattcgtatccaggttctgcctatatatgtaattatagataagtcctttgacctagctaagcctcattttgtttctctgaaaaggattaaataatgtcactatttattcgttcaataaattgtacaagggttaagttgttttagtatagttttagtgcttaatagatattggttattattattatcattaatagttgagactaacatagagtgtgaccaggtaggataagtgtgaaaagagccttaggacaggagccactaattacagttgaacatcacaacagggtttccctggtggctcagtcggtaaagagtctgcctgcaatgtgggagacttgtgcttgatccctgggttaggaagatcccctggaggagggtatggcaacccacgccagttttcttgtctggagaatccccatagtcagaggagcctggcaggctacagtccatgaggtcacaaagaatcagatacgagcgactaagcacacatcacatcagagaggtgtaacctgcagttatctcacaagtactctaagacttggagacatgggtgagacgtggaatacgaaagtcctcgatgtatctggagaatgggagagaggctagctttgtgaacccaagtggacaggtggaattatggttgtaaaggaagattgggtcatccttggttgtggaaacatgtaggagaggtatttcggggctacgagataaaaaaattggaactagcaatgagaaaatgggtgtctaactgcccaaactgaatgcagagtccctttacctttgtgggtgttgttttgctttggggacgacagcttattccgtcagcccatctctctggcctgtcctcccccacccagccactggcagtcatttctcactcccacgctgacatttccctgagactcatttcatgctatttcttcatgggggcatctgggctgacaatgcaaagagccttttcccacagaattgagaggaatttctgattatg

SEQ ID NO: 48807 - DNA, 1524 bp, Bovine  19866880517849
  misc_feature (1)..(1): n is a, c, g, or t
nccttagaaatccttggtcctatccccatcctgcccaatgcaagaactcactccaaatcctgcctgacatgtggcccaccacgttaataatggctggattgattaatggtgataaatccagccattattggattaatggtgataaatcatccaactaatgattgattagtttggtgattaactgaatcttggcaaatatttccatgagattacagaaactcttgcttgttccaatatccttccactcctttgtcccccaggaaggatcattcctttcattctagcatattatcttacatacttttaacttgtgttgaattagggatgctggaagctatgggtgaataagccaccccttgcaatggcctgggaaatgcattagcttttcaaatctgaagcacttgaggtctgtttttacctaagggcttgaatggtactgaaggaagggagagtagcgtagtgggagtaactcttgggaagttgttagcaagtatggactctgggtttacatctacccctaatggatgcctttcagtgcatcactttctctgctcttagaactccaacagtaaaacgagaaggatgtcatggagctctccagaaccccttctagctctgacagcctgagtctggcctggagctcggaaaggattaatattacaggtctcaaaatgtggtccccagaggaatagcatcagcaccgcctggcaccttgttaaaaatgcaagctcctcccctgcctccccggccggctctaacagacaatgagtccgggacaggggctaggccccagaaatctgggttttaacaaggcttccaagagattctgatgtttgctcccgtttgagagcagccatattaatgtgattctctaaggacccgttaataccaccagacttgccaggagaactggctgtatttagcttgtttcctttcagtttcttgggtcaaacaattagtatgaagaacatagagaagttgtttgtatcccccaccaaatacatattgtaaaatggttaatatgacccagcaggctctccagtcttcaacatgagcaatgaggtaggcagagcagacctgggtcctccctgagaggggaggcccattgccctggtgacacacttagcaggtatcaggggctcacactagaactccagctgtagtttctcacacagttctttcttattgtttgttctggattttgataccacagtcacgagcaacttttcccacgttcagggaatactcaccacaggcaagagccaggaggtgggtttgccaggtgagtgccatgaacgttcctccaattgcaatgcaagctagagagctgttgaagccccagagtccagcgtagatgtcctcaaatggagctgaaagactgagtcctattagggaagacaggaggggtcagagctttggactaaaggcaggatgttctggaaggagcctgggggtggggaaggcatctgagaactcccattggtcccttggaagcaggccttcaagaaaggtctggaatgtaga

SEQ ID NO: 48808 - DNA, 1428 bp, Bovine  19866880518394
  misc_feature (1)..(1): n is a, c, g, or t
ngaggtggggctgcaggccctccccactcctttggccgatcagctgcatttttagcaagaaagatttcaactggttgagaaaaattaagtctagacacatatagattcatgcagacggagaaatgagacagcagaaggggttggatgtgaacagcaggtgaatctgggtgaagaatttgtgggtgtctctcagactatttttaattttgtaagttttcttaagtttgaaattatttccaaataacttttttaaaagttgtgcttccaagaaatttttgaaaaatattgggataagtcaacaggctcctattcccaaagcacccaaggtccatttctgactctactctctttgtttacatatgtgaatgtgtgtatagacacctacgtagaaattaaatcacatttgtcaaatgacaatccaattcttgggaaaatttttcctgttagcttagtcaaaatttcaaagtgctaggtcgtttataccccactgggtctgctagtgctccccacccacaccggattcccctctgcctcccacccctcagctcccaggggctacaggccagtaggtctcagcccttttgcatctccccatacaacctgctcagatggtaaagtgtctgtctgcaatgcggaagacccaggttcaatccctgggttgggaagaccccctggagaaggaaatggcaacccactccagtactcttgcctggaaaattctatgcacggaggagcctggtaggctaccatccatggggtcacaaagagttggacacgattgagcgacttcactttatacaacctgctatcttttggagactcaagaaaggaaaaaatgagtcacaagccctgacagtgtctaaaaacttcagagaagatagtaagcctagactctttactgtgtgctgggagaaatgacctcaggaaaatgacccctgctgagccaggggcgccctggcctacctgccagcagccccacgattgagccaatggctgcatgcaagcaaatgagtggtgagcagatgaacagggccaccaggaacacaccacctgtccaggggttgtcgcagccgtacacctgcccgaccccgacagggatggcttgtagcagctgcaaagtcaacaaaatccaggtcagtggagtgtgggctgataatacaaggaccaagcctcagggtgaggactgagcctttccccgggggggggtcatggtgtggaatgggaggattgctgtgcccgcgagcgtgtgggagaatgtggaagggaaggcacgagctggaacaaatcgctcttcactccaccacttggcaggcatctgagcatccctcatgcaaaactgggcaggtccccagcacagaggctggaagccaggtggttctgagggacatgtggcttttgctttgggggtctacagggtgcctccctgga

SEQ ID NO: 48809 - DNA, 2287 bp, Bovine  19866880603579
  misc_feature (1)..(1): n is a, c, g, or t
nctacagtttctccagtagtcaagtacagatgtgagagctggtccacaaagaagactgagcactgaagaatttatactttcacactgtggtgctggagaagactcttgagagtcccttggactacaaggagatcaaactagtcaatgttagaggaaatcaatcctgaatattcattggaaggattgttgatgaagctgaagctccactgtttggccacctgatgtaaagagccaactcactgcaaaagaccctggtgatgggaaggattgaaggcaaaaggagaagggacagcagaggatgagatggttagatagcatcaccaactcaatggatttgaatctgagcaaactctgggagatagtggaggtgtgctgcagtccattatgtcacatagagtctgacatgacttagcgactgaataacaaaataccctatttggtagaaactattattatctctgttttaaacttgagaggcagagattgcttaagtcacttgcccaagatctcttggtttgctctctctggtcagcttctcttttcccccagttccttccagtgatcgttccctgccctaaatgagagggtgtctgtcgcttttgggcctgccttggtaagcaaatccatgcgggctgcttgctgaggaagtaatatgagctctcagcttatgaggctataatgaatgtacttggcaaaacagaagtcactatccccaagtgtgcagaataactagatttggggataggattccctgactctgaggcagcagcagcttcggggcatttgtttgtgtctttgaccccgagtggacattatctgggatttctcttggtgcagctatacctgagatcactagctgatcagctgctatagcaaagtcaaaggggagtcctgtacacagggcagagtcaggcggtcaaggggaaacagaagaggaggaagtacaaggcctgctgaggtgatcttcagagtaactttatcttccaatcaggagggtaatttcagttcagtaagatttcttctgggcacagggctactaaatcaaagcttcacaaagcaggtagctggtgtaggagggacaaagaagattttacaaataaagaccaacccaggccctagccagctaaagtgtgcctgcttttcttgggaccacctctctagtgtgcagccagcagaaacaacgcccaaggacccaacctaatgtctgtactttatgtgaataagactgtctctaaatgctgacatttataacttcacaggaaaggttagggaggagggagaaagcgtaaaagaacattctgtgtagtgccatgatgcgtgccaacagtttgtgggttggatggggccctgcattcctaaagattagacaaaactgaaggtttcttcttctttaaagtgaggaaatacaaaccctctcctcatgtcagtctcaactcttcagactttttgtacaattttccccattcaggagtaatatttaactgaagggaaatcagaaaagctgtagcttctttttttttctagaaaccaaaagaatttaaagatatcaagtttagctttctaattcaatttctgaactttctattttttaatgagagaaagaatgttagtggatataaggagaaagcacatgtttttgtgattactagactttcagtggttggtattttatgaacatgccacagggctgaattacgaggaccagagagcgattggaacgacccccaatccctgagccctaccaaagagaaatgtcaacaagaagtccaagcaagggagttcttttcctttccacattggataaaacagattctaaactgtgaaaagaaattaaggctgagaagtattttgacttaatacatgttccaagttacctcctcctagcatgtgagctacacctgaattgtagactgagatttggtggttggttagctttcagggtgagcttagagcaagtcattataactcaatcgctcagacggggattaaaggaaaagccactattgcctgctcatgaagaaagggttcattaagccattcagacatgtcacagaattacaagatgacccagaactagataaacaatccaggtaagtagtatcatggccaaaccactctggggaagatgcagtgatcaccatggcatttctttgacctcagtggtcccctcttgctggtagaacccgactgaaatccaccattcaacacaatgctctctgacaaggccgcttctctagtcctccacacagacagccagtcaagcaggtcatgccccttctagtcacat

SEQ ID NO: 48810 - DNA, 1705 bp, Bovine  19866880607563
  misc_feature (1)..(1): n is a, c, g, or t
nagatacaggttcgacccttgggtcaggaagactccaggagaaggaaatggtaacccgctccagtattcttgcctggagaattccatggatagaggaggctggtgggccacagtccataaggttgcaagacttagcaactaaaacaataccttgatgcaaaaagcacgaggaactaaatgggaactcaacctgaatgagactggagtcccatccttgtccacaatctccagccctccctgcaccttgattgcagtctcatgagaccttaagcgtctgagcttcctggacctctgacctacagaaaccatgtgataataaacgttctctgtctcaagcctctaaatctgcaataaatctttacagcaacaatagaaaatgaatacaaatttcactactcctcttatcactgcattttaatgacaggggttagtagataaactggtttctgagacaggtgccattaactagggctcacagactctggctgcagcagaccaaatgtcataaggttgaaactgcttcccttttcaagagaacttccaagccctgcagatgatgccaaaacggtgaacctgcagttatctttgggtgaaatgtgtgttttgtcacttatccaccatcactgtctaatcctgacaccttatctttgtcatcaaatacgattgtaggccagcagatgtctacccttccatgcgcatatgtgtgttcgaagggagatttaacttcaccccagtatgagcataattgggacagaaagcctgctgttcaaagaagacttctgtagaaatctgctgtgttgtattttctgcgcttgaatgtattatccaaagtggaagtgaaaggaaatgaacattattaatgaccatgtggtaagctgtgccctggatgctctcgtgtatactctactttcctttggctctcataaaactctgccaggtaggttttaatagcctcgtttttcagatgaggaaaacgaggatcaatgaggctcagttgcccaaggtcatgctactagtaagtggggatttagtatccaaatctgcatccaggagactttaactccctagcattttaatgctctagtatgctgccttagccgttgctggatttattcccaagctagtgagttgtgctctgtacaactcagattttatctgagtgagtcaagatattcttacctaaaataaacaatacaaggccataaataaataagcactgaaatgaaagttaagatattacttatatcagagaagcaggagatgccagaatggttaaggaaacaagtaagatttggaagccagattgaaaagaagagttctatgtgaaggaggcaatggggtgactggagattcagatccaggctaattatggtattttctgtaggataaggtagagatttagcaaaactcacagcaagtcactaagatgaaaatgatctggaaacaaggtgagataatggagggtctgttaagccagataaagaattttgggctttatgcaagagaaacggttatttctacatctggcatcaattactcattttgttatggttcccttcgtggatgctccacgaaaagttatttcattcttctttttccatttcagtaattaatatatttatttagttagagctataaggggtgtggggtaggccaggaaacaaaggagctttgctctgggctatatttccaaaaggattcccca

SEQ ID NO: 48811 - DNA, 2270 bp, Bovine  19866880633328
  misc_feature (1)..(1): n is a, c, g, or t
ntgcaggtcaggaagcaacagttagaactggacatggaacaacagactggttccaaatagaaaaaggaatatagggctgtatactgtcaccctgcttatttaacttctatgcagagtacatcatgagaaatgctgggctggaagaagcacaagctggaatcaagattgctgggagaaatatcaataacctcagatatgcagatgacaccctttatggcagaaagtggagaggaactaaaaagcctcttgatgaaagtgaaagtggagagtgaaaaatttggcttaaagctcaacattcagaaaactaagatcatggcatgtggtcccatcacttcatgggaaatagatggggaaacagtggaaacagagtcagactttattttttttggctcctaaatcactacagatggtgactgcagccatgaaattaaaagacgcttactccttggaaggaaagttatgaccaacctagatagcatattaaaaagcagagacattactttgctaaaaaaggttcatatagtcaaggctatggtttttccagtggtcatgtatggatttgaaagttggactgtgaagaaagctgagcaccaaagaattaatgcttttgaactgtggtgttggagaagactcttgagggtcccttggactgcaaggagatccaacagtccatctaaaggagatcggtcctggtttttcattggaaggactgatgctaaaggtgaaattccaatagtttggccccctcacacaaagagttgactcattggaaaagactctgaagctgggagggattgggggcaggaggagaaggggacgacagaggatgagatggctggatggcatcaccgactggatggacatgagtctgggtgaactccgggagttggtgatggacaggggaggcctggcgtgctgtgattcatgaggtcgcaaagaatcggacacgactgagcgactgaactgaactgaactgatctgactgaagttctagcacagtctcaggcaaaaatggaggccagtgaatattatcatacataagtaagtctgtgcaccttcgtgcaaaccagtaagctctggtctccctggaactagcacgtggaatcaggctgcagggctcacatgcaaaatggagctaaaaaataacagactttatcatggcatggctgacaacatgcacagctagtgccaagttctggctcacaatgaagggctcaataaatgctagtcattcttcttgttgatagatctcaggtatctagaaagctaggagaatgctcttcttcccatttcctatccaatcgaggtctctgatatctacagtctgacattaatttccacttcctgccttcccacacatctacctgcctcgagggtgccctctgaatggctgcttctcagtcagccaagcagccaacttctcccctgtgggagcccaccccttgtcttggttccttcagcttctgggccagaggaagtgggaagggcaagggcaaatgaggtccaccatggaagctctaccagtcacttcccctgcctgcgcccgggagagatgggacaaaaccagaatgcaaagcaagctggtgacttgcattaaattcctttcacgacctgggctgccaagaatgaggcccgaggaggaagtgcagcaagtttgggggctttctcctattttcccctcctcacatatatacggttggctctggggcctccactcctctcgctgaaccccaaacaacgcccaaggctaatgatgtgatggtgctctgagacagagctcgctctcttcttctttgtgtgtgtctgcggttctctctcggtctttgtctctcccctacctgtcttactctatgaatctgtatttttttctttactctctagctcatatctctgtgatcctagctcttgcttttctgttggttctctagctctcctttcattgtctgtttctgcccatctccctcatcctgactctcctgtctgcccgcctccccacgtgcatctcagctttccagctctcctccctgccacaatgctgcagtggtgagaaggggcccatcgatctgtcagagacaggatctgccaacctcgactacctctctcccgctgctggcaattatctggaggttggcacagggcccggaaactgccgcttgcaccgccccacggctcaggacctgttctaccatgccagcccccttggaggactgcttggtgccgtgcccaggatgtgacaacctgcaaaggtcacacacacactccaaagaaga

SEQ ID NO: 48812 - DNA, 1005 bp, Bovine  19866880664176
  misc_feature (1)..(1): n is a, c, g, or t
ntgagattcaaggaaagactgaaggactgctccagactgagggaaaatagagacatgtgacaactgggtagaacccaacatccggatgggtctcttttgctgtaaaggacatcattggagactttggtgtaacttgattggggaggttctggatatctccttgtactattcttgcaacattttttttgtaagtttgaacttgttgcaaataatattacattaaaaaaaactgagaactaaaaactcgcatactttcactatagcgagtgacaagctccttacaagacaaattgcaactgactgtgataacatccaggaatagtgacaagagtcagtggcctcaggtctccaggactgttgagggaacagccaactctgatgaggatgaggagcaagaaaggaaggaagagggtgttgatggagtggctttgccgtttgtttcttgtcatcagctcccatctgcaaattcctctgcaggagtagtagcataaccagagccctttaactctaaacataatctcaccagttgtcttcctgcatggttgggagtgtgtgggtggcagcaaatagaagaaagatcggaaaaaatagaagaaaaatagatgcaaatggggaaaatgtcccatcataacatatattctttcttccctccccaacaactatatcaaacagaataatgaaagaaaaactaaaaacaaaagtcagccaccatcaggaaacctcccaagttcttctgtgccaaaacccagcagaagccaaggaagtggcatttcacccacacggccttcctgacgacggaccccagctgggtctcccacgtctaggttatttatgaggctctgggaaggcattcagaactggagagaaactccaaaccctgcctctcagagaaatgtggtgacttcaaggactgtgtgggctcaggaggacacgccttcctcctgggagacctcagctccagtccagggatgctcagactgactgggttcaaatcctgactctagt

SEQ ID NO: 48813 - DNA, 2786 bp, Bovine  19866880701036
  misc_feature (1)..(1): n is a, c, g, or t
ngcgacctgccttggcggggtcaggcaagatgcctcatttaagcctgtttctaaaggcaggaaggatttgcgggaggaggatggtagccgccaagggctgtggtgctgccctgagtgacctgtctttgtgatgtttcccaggcaagcagggagtctgggctgggttatccagacccagcatagtactagagactacagcaactttcttggcattctccccctttatttttttagtctcttcttcaaactgagaatcagatgcaatcctcccaagtttggaaagtggagacccctaagctcctactactttactggctggtgtagaccacagcctgctacaaataacccatgggatcctgataagacacttgaactgctccagacttgaactctaaattgatcagttttaggggctgcacatgtgcaaagccatggtatgttctgcattggaagctagcagagttaggaatcccaagcaatctagattgtttaaaggaggtgtccttaaaaatatcccctgacttccattccccaaggcagtgggatgttgcctgttgggcaatatgattttccaagcatgtcagtgtgaattgggaaattagatgagtggccgaggaaggcaagcaagcaaggcaaacaaaaatcctcatgcagcaaacaacatcaactttttaaaaagcctaccaaaaaaaatcaataaatatttgtgatctagaatgaatgaatgaatgcatgaatggaatttcctgaagaaagtcctattaccaaaaccatcagcttctttcagaggacaatggagagctaggcctgtttcccaggaactgtcagggcagaattaagtgtgctccgtggcccttccattcccgttagtgagttatgtagggctgttcccgcccagagctggagctgggggctgagtagagcagaacgaggggcagggactgaaggatgctgccgggaaactgctgccctgagaatggcagggttaaagctcaccctggtctgaaatgttaagggcgagcctgccagagctaccttcttgagtttgtcactgcaagctagacagtttcttgggggcttacggcgtttatgcttctagggcttagctgctctggatatcacggtgaatggtaagaaatgctttcttttcacaaacatcacacccgcagcacaatacccctagttatggcactttatattttggaaggtactttagcattcatgctcccatttgaaatccacaataactcagttgcgggtgtgtggggggcggtttagctcctgtaataagatgtgcaaacttaaggtaagaagtggtacatgactgctttaacagtactcaggggaaaatagtcaaggcaggattagaacccatgtctcctgactcccagcccagcattctttcttccctacaaggtctggtgttgctctcttcccttcgttacctgcttctgcatccttaaatcacttggcaatttgtacaagttgggggccagccacagagactactgatttggtggccaacaccagagactgattccatagaagtctgcatttttgacatgttcaccaaatgattacgatgtatgttgatctctgcaatttgctagtatagggaaatcagtgaattttgaaccagacatcgtctctaattaaactggtttgcttgaaaggtaagtttaaaaaattaaaagaaataggaaaggaaaaaaagaaacaggcttcctccttggtggttgtttccaaatttacacttcctgcatcagctgtctctcttctttcctgcttctcccaaccttccaagcttctctgagcctctcccttcctgttctatattctatattcttgagctgtatcacactttccttcctcactgtgcagtcactacgagtctgcctttgtgtgtgtgttttttttttttgaccctaaccctggggtactttccgagggccttgtacaactcagtgaagctatgagccatgccatgcagggccactcaagatggacaggtcatagtgaagacttctgataaaatgtgatccactgcaggagggaatgggaaacaattccaatattcttgctgctagaacctcatgaacagtgtgaaaaggcaaacagacatgacagaggaaggtgagcctcccaagttggaaggtgtctaattgctactggggaagagcagagggcaattactaatagctagagaaagaatgaagtggccaaagtggaaacgatgtgcagttgtgcatgtgtctggtggtgaaagtaaagtccgctgctttaaagaatattgcataggatcctggaatgttaggcccatgaatcaagttaaattggacatcgtatgagattgctaggtagcatcactgactcaatgaacatgaatctgagcaaactctgggagacagtgaaggacaggggagccctggcgtgcggtagtccatgagtctcaagagtcagaatcaactgatcgactgaacagcaataaaaagagtccttggcacagtgctggaggctaaaaggatggtttagccatactgttgcaatgagccactcaagtctgttggactgcctggcaccactccccagatccactgtgtggctaattgagacattgttactgcagaagcaaagcccatcaccaagtagccattgagaccctcctgatgtaaagtacaaactaaaatgccaaaaactcccttcacaaatatggggtcttagaaataacaaatgttgatgaggatgtggagaaaagggaactcttgcgagctgttggtaggaatgca

SEQ ID NO: 48814 - DNA, 1897 bp, Bovine  19866880709663
  misc_feature (1)..(1): n is a, c, g, or t
ncctccccctcaaacccctagcagcctcaggggttctcatgggcttcctagctcatagcactgtgcaaaacttagctttcctccagggcccaggctttacacagagagttagaaattctaggtgtaggtcccaattctgttcttttctagctcttgggagctcatcgccttggagtaaccatattcatcttacatagaaaatggtcactacaaacacgtcttacttcatgtgccgaacagtgcacatccctgctcttgtggatcttaaaggacaccaaacacaaaatggaagatgtgaccgtgaatcttcttggtcttaatggtcttcattattcagaaaagacacggaggatctgagacattgagcatcgggcccaggtcccctgtagttcctatctcagtggtcttcctccatctcacatggtgacactcccggtgaagaggagatatctgtcctttggtggttatggtctctagagccagaaggctaaggttcaagtcatagctccctcacctgacttctaataagcactagacacatttgctattattattactcttacttttattgctgcttttaatggtttttccaagactgtgaatggactctctcttatgcatgctgtacacatgaattgtccaattagccagtttagggctacaaatagaactagattatcccataagcagaaaaagtgtatgcactcaagcaaaacaaatgtaccaaaaaaaaaaaaaaaaatgcctacttcattaaacttagttttgtgatcagaaaattccaccaaaacaggggtagagaatcataactatatcatttagtgtttcctttccaaaggacttaccatgaagcagagtgtgccctggaggagacagcagagcacagctgcctcctttgtcaggagtctgaaccgggacctgggcttcctcagccgagcccctctggcttcctgcactcagtagccgtggcagtcaccacagtcacattgtcgtttctgggcttagtcttcccagggaccactctcctgacctccttccgcatttgttctcctccccttcatcaggcatgttgaggagtgggaagcggggatgggggttagctgctgaaaaggtttgtgatgaggccagactcagctctgtccatccaggtactaccaggtgaggaagccacttttgatcatcatagggacaaggcattcatgtaactcatgccaaggacccctccaacaccacgccttcgacagcaaagacagctgacatatacaagaaggatatcagcaagctatgagctagggcgctgtctgtcactcttctacctttttcttcaggatcgtttttcttcctatagcaccttcctctcgccttctccccagcagttgcccatgagctggcctctggctgtccagggtaactagctggctgcagccttatgcccaggacacatctccacttcacagaaactgagcctgaatcttcatctcctactttcccgcctccaccacacatacatacctggtgtgtctccctcattattgagaaaattggctcagctggtacctagtggaatatttatcaatacaaaagcatttgtggctactgagagcttccatctgcttcatcagaggggtctatgcacttcagaatgggaagagtggaacagagatcacttgcaaaggtagaaggtcaggccaagtgcctgggcagtgggagggcaattgaaggacaaaggctgggacttgatgagagcctttctaatcacatagcacgatgaggccttgagtggggagaaggagtaaaacctgtcagaatcacagttccatttggcagaggggcagggaacgggtcacccagctgcatgtaaacaataaaagatatttctttggaaatttttagcttg

SEQ ID NO: 48815 - DNA, 1309 bp, Bovine  19866880785848
  misc_feature (1)..(1): n is a, c, g, or t
ncctgatgctctggagtcagaaagatgccgaagcaaacatctcctggctaaagactctaggaatttcatctaaaggttcagagaaagcccaccatgctgttgctcagggaccacctgggagcaggggcctatggtctgaaagcctcacagctgtgagaacacactgagtgctgccctaaggcgagcagagccagaggcaggtggagtcctgagctgggaactaacactctggtgccaccaggcgcctggcagtggcatcaagttactcccccagatctttgcatatgcgggtagaagctggcagccactgcccccttcacacactggaaaccacacctgtggcatgcttagagcgctttgggccaatgtgcatgctgcttgtgcatctgtacgtatgtgtgtatacatgtatgtatgcacatgtgtatacacacatatatatgtgcgtacatgtgtgtgttcaagatatatatgtatgcatatgttacgcatatgtatgccaacgtgtatacatactacttggattaagcacctaggggttagaaaccatagtcgtgaggttgatggagactatacgatgctttaaccgtaatcttggattgagccattcaaccctgctaggctccaccaggcgattctcttgccatcagtgtggataatagaaacgtgggtatccagaagaaaagcccatcatcaagtaggcattgggtccctaagaggtgaaaactgcaactgaaatctcaaaaactccatccaaaaaacgaacatgctacagtgatcgttgccagatcactcagtagggaactggggggacgtgtggttcaggtcatgggtcggagggcgtcactcgaccgtacccttgtgtgccacccagtgcctgccatagtgcttttccatagtattgcggaggtacagtccctggggtcacagaagtcggacacgacttagccaccaaacaacagagaagcaaggactatgttaatacctttggaatgattgactaaatgtacttaaaattgcacttctttctattctttttgattataatttatggaataaactcttcatgagtgaaatgggtgaaggtggtcaaaaggcgcaaacttccaagctgtaaaataaataagtcatgaggatggaacatgctgctgctgctgctgctaagtcgcttcagtcgtgtccaactctgtgcgaccccagagacggcagcccaccaggctcccccgtccctgggattctccaggcaagaacactggagtgggttgccattgccttctccaatgcacgaaagtaaaaataaagtaagccg

SEQ ID NO: 48816 - DNA, 1570 bp, Bovine  19866880800003
  misc_feature (1)..(1): n is a, c, g, or t
nttgtatttctttaagtactagttcaattgcatgatttttcaatgatttaataattttttgtgatttttctggtttttgttttttgcacgttttctgctgggaagtttcttgttttttgattgctttgaagagctcctcaggctgttaacctggtgtctggaatgtgttataatttttctacttcgtcgtttttctataattttatgattctttttgccatatagaagtcaaagtttttatatattcacatgtatcagtcttatcctttattatttctgtctcatcaaatttatcaaagcttttgtaactctgagattaaatatcagcttataatactcttaaacattagaacaaattaaaacaaggtgtatattaattatgaaagttagctttttaaaagtatttaaagcgtatctcaataaaatctacaacctagaatcttttgtttttctttttcttgacgtaatgcagaatcactttagatttttagtaatcatggtaggtacactgcgaatttctggattcagattatcccagtattttaatcttttaaacatttgctttgacttgtccaaaccaaatgaatggattagccagaatttttaatacaaattacattgaaagtgatagatttatctgtgtcaattttagatttcttttgattgtttcatattttcatttagaaaaaattctgttagctgtatatactattccttaaaacttggttgctcaaagaaaagttggggaggggagaatttgatgacattttcccttttcaattgtttttaggtatttatcagtggcactaaatcagaatgcagaaaagtccttgagaccattctgaagaacagaaggctttgctccctcttgtctcctttcttcactcccagtgctgcgcccgcggagttcatccagctctatgagaaggtggtgaagtttctgcgcgaggacaacagtgatatgattttcatgctgctgaccaaggtgacgtgtgactcagtcctgacgttgtcattgagctgtgggtactgctgctgtttccctgtgcctcagaaatgcagggcccttggagctctgtctccagggggactggaggcagacaggccctcttcacgtttgatgtcatcttcaagtagtccgatcccttagctgctgcttctggatgcattgattacatcatgtaggacagtctcaccacatgtagtataaaaaagaccagctcccaagctctttagaaacttcctacagttttgaaatattcataataataatttggtacatccttcttttgaatgtgtcctgaatttataccttaattgtgtttgataattgagttgttaatgtgtcagatgtcaccagttgagaaattcagagccttagctatcttgcttttaatacttctctgacatctataagtcataaaacctggacattttttaggacctggagactgatcgcaatttttagtagggaaaagcatgttttatagtttggaattctggaaggtgagatcagcaccctgacttttcattaaccaatgccgatttagaaacatggccaccagaagga

SEQ ID NO: 48817 - DNA, 899 bp, Bovine  19866880800718
  misc_feature (1)..(1): n is a, c, g, or t
ntctgctctctgtatccgtggatgcagatgccacggtatggagagccaactgtaatttcagagtccaggtgtcagcagacatggttttaacaaaaccaggtattgtagagagacatcttgcttagagaatcagagagtattcactctcaaagatattcatacagaattaaatgacccactttggtctgattcaaattttccactagtcagatttttctcctggtcatagacattgctgcaatgggaataagctgattatttattgctggtcacataccacctacaattcacttttccaattttcctgtgctgcctatacagtgccactttgtcagtccctgcagtttattgactgttttctgatggctggggtaaacaaattacttcaacaatggctgtggttcaaaaagggcattgcttgctgggttctaaatgatggacaggtgtgtgagatccaattggtcctaatgtcaggaagcaatccaccatcacagcgggcagggtacagtaacccatcctatcagggacatgattttgaatggtacataatatctacctttttttaaatttgagcatcagacaatatccagatcaaatgatttcgcagataaaatattccaaattttcaagtctacttttttagcatacactgagaatatactgcacagtaacaactccactttataaatgcaataaaatcaccaataaccaagaagttcacattatttcattaagccagagttcatttattggatctagggcagattcttagagcatctagacctaagtctatgtgtaactcagtggtctctgaatttctttactatgcaattataccagaaaatatttttgagcaggcactccaatacggttgtttaattataatttatattcattca

SEQ ID NO: 48818 - DNA, 1233 bp, Bovine  19866880824668
  misc_feature (1)..(1): n is a, c, g, or t
nactcctccccctctctcttaactcacaattaactgaaaaatattaacagcacttaatgagcatgagcatttaccatgtgccagacattatgctaaatatggtgtatgcattattttatttgttcctcacaacaatcccatacattgggtactgcagttaaataattcctcagggtcatggctaacatagctggtgtggacttatgctggagtctgaagtcaagactataatatattttttagctttatagctaaaaattgttttaccactttattcaggtatagtttacatatataaagctgtatacattaagtgtatataacttgtgtttaggaataagtatatacctgtgaaaccactaccatcatgaagaccttagatacattccctcccctcccaaattcttctccaaaccccccaacttattattattttttgttgttgtaagaacacttaccataagatctaacttcttagagccttgccaacaatactggattgtatacttaaaattttctaatatcagaaagcaaatgttagttttataactgcttgctgatagaattacacatgatatttagtaagaaaatataatgcatataatcaagtcaaaccaaacaatctcccagcttggatgctgtggggatgccatggaaatatgcagcacagttctagaattaaagattctacaacctgttaggctgcagatataaacacgtgatataaacataacccatgagtgatgatttttatttgattgagacaagcctgtgttagacttttagggtgggagagacttgcactccaggtaagcatgataaatgaaatgttatgacactagcgtgcaccacagtgccaggcatctgataaagattcagtcaatattaaatgaataaaccagcatccagaccagtctctccagtgaaggactctccaaagcggcaactccagtgccttaaagagtgtggggcagcgtacacgattttatagcagacactacattcaaagtgccgatcctgagagccagataaggaaatggtgcctttgtggggatcacctaactgcttctgtcatccacaaagacttacttagagaaacagataaatagctgaaccataaagtatgatcagtgctttagctggtttacatataggtgcaatctctctctctctctcaggagacgcaaatcgtctgggaccaacagtaggcttgcagaccacgtcacacctttc

SEQ ID NO: 48819 - DNA, 866 bp, Bovine  19866880850041
  misc_feature (1)..(1): n is a, c, g, or t
ntggggtcgcacagagtcggacatgactgaagcgacttagcagcagcagcaacaccgttatatagagctattgaacaatcagcaactatttatcaagccagttttataattaagtgttgagtgtctcatgtaatttattgaatactgtactgagagtgaagaacagaatggctgtctgggtgcagggtgactgtaagtgtactggttgtttacgcttgtgttcgcatggctggaagctgaggcccatgactgctgcccagcatcatgacagagtcctgcaccacgtatgagtagccaagaaaagatcagtcaattttctactgagtgtgtatcacttttataccatcagaaagtcagaaagtcgtgagtcaaaccattgtatgtcaaggacaatctgtatacttattgactgctcattgtataccaaaaaaagatcctgtccttatgagccttatatatgtcaggtgttggtgagggtcatgaagaaaagtaaaacaaggggaggaggtggaggatggagcggggatactgttctaggcggttgttcagggaaacccgtaggtcacctagagtgacacgtgagcagccctgaaggaagtgagggaggggccgcgcgggtatctggggagaaggaacaccaaaagaagaggtccttggcacacacaagcaagcacgcaggaatgctagtgaggctggggcagtgagtggagaggagagtggcaggagataaagccagagcccagactcttagggtttcagcagctaaggtagcctgtctgggttttgttctaagtgagctgggaagctgttgaagaattaggaacagggaatgatctttactgaagggtcacaggctgactgtgtag

SEQ ID NO: 48820 - DNA, 1801 bp, Bovine  19866880854694
  misc_feature (1)..(1): n is a, c, g, or t
natgtcatccaaaaatgtaaaaataatacaagcatgcaggagtttagaattactaatcttcacccaaaatgctcaatgaataatgccctaaaggttgctatctgtaaaaattgtctgttgtcaggttgggccctaattgggcagccacctcatgcgaagagttgactcattggaaaagactgatgctgggagggattgggggcaggaggagaaggggatgacagaggatgcgatggttggatggcatcactgactcgatggacgtgagtctgagtgaactccgggagttggtgatggacagggaggcctggcgtgctgcgattcatggggttgcaaagagtcagacatgactgagcgactgaactgaactcttagacattggagtccacagtcctgtgcgcagccctttactttgatttcgcagctgtcttgactgacgtgggcctgcttattctgatgactatagatttgggaatagaagaaaatttctcctttacaatgtgcttaatataccagttggtttctttctagtgtcaaaatggtagatacatttagggttccctctccctaattttttgactcttgtattttgcaaatgaattttatcccagtataatgatacactgtttttatattatccaagagaaggaacaacattaaatttcccaaattcccactgttttatccccctcctgcagttttccatcagagtgttggagaaataaagagtgcaggctttttaatttttgaaatttcactcggcaggaattttattgaaatttgaaaaatgagatagtatttattcatgtaagcttcatactgtttattgatgtaatggaaaactaaattttgcattatgtcaaatctttgtgttactttacggaaatagttttatgaattagctaatgatcttatgtattggactacttgaagaatgtatagtctaattttcaaagcccttcaaagagttcaatgtttcctatagcggcaggttgcaaagtgggtggggagtggtggtacagaagtgcacttgtataatttttaatgcttatttacatagctaagttttactcctaagttttcaaaatttgattaaacatatattatggatttttcccctgaaaccttttattttatttttttaaatatttatttatttggctgtgtcaggcctcagctatggcatgcaggatcttccttgggtcttgcaggctttctagttatggctcactaacccagttgccctgcggtatgtagggtctcgtaccctcaccagggattgaacccgcatcccctgcactgcacggtagactcttaacaaagcactggataccagggaagcttccttccccgaaaccttttaaagagattctaaattgtttatacaggcaaccactgacttggattgagcagaaaagttttaattcgcaggaaaagtagttcagttacaggcttaaggccaacagtgccacctctgtcagactccgtgacctccagcctcctggtgttccatccctccctggccatcatggcagtgttcccagggctttacccattgctaatctgtcttcatttgccctgggtgagcccactgcaatttcccctggcttcactgccatcttcttggtgtgcgtgactccatccagacctgcccttctgagccactgtagtctccttgatccaggccacttcccagtggtaagggcatgagggccgtaggttcctgtcctctggggaagtgagttttgcaggtagctgagtgctggtttggtagtctctacttttgcatactgtctctgtg

SEQ ID NO: 48821 - DNA, 1352 bp, Bovine  19866880860322
  misc_feature (1)..(1): n is a, c, g, or t
nagagaaggattttgtgtggatacccccagggtaaaaatatagtcagattcccttagaatcaaaagcccagacttttgtgggccttgatcaaggatgtggagttaattgacccaacacattagactctagagtctgagtcttctagaacactcaggctgatgctgctctgtccctctatacctaagacggctggagaaatctcaactagaggagcccaagagcaagcactctgtctctacatgacttgtgcattgcgtgaagaggtcctctgagttcccatagactctaacgtggggtgaatatgaagataatgagccctacaatactaggttagatgagaaggattaaaaaaaaaaaagtacagaaacttctccatggttatattagtaacaatatattttgatgatgtaagtgaagcacaggatccaccaaaacaaacaaacaaaaaatgaaacaaaacccaggtgggattagccatagtgggcagacaccagtacaatgtgttcaggaaccagaacagaccagcctcactctgtgatcagcagggaagatagcaagcaggtcagttcccactccctccacatggcatgtaaaccctccatgaacacatccaaccatcttgggaaaggaacatagaggtgcttcttgtgaaaaggaatatccctgattgaacatttatgcttcacattcactgaatatctgtccaaattacacctcagatgctattctaaaatgaaaaaggttgaactgtatttaattagaaaatttaaatccaattaccacttgatcggattaaggagaacagtcatagaaaagaactctattcctagagtatgtaaatatccatcctttctcccctgtttaacccaggaggtcagggcaatgttacactatgtatgccataggggtcccctacgtaaacaccacatgaagaaatgaaaggaagaaaatatggatttcatttctttctttcctcttgttccaccaaagccaaaataagtcataagacagatttttttcaaaaataacataattcacagagagcattctggaaagagaactggcattaggaaagtcacagggcttagtccctcgaatattggtactgccggctatggacagttttcctgccaggctttctgtcaataagtcgaagtaaatatctagttgaactagtaagtcccacaaaagtaataagcaaagttttcaatcttcaaaaatgtctgaccgtctctttcttattgaagaaaagccctacaatggctcataaatggatatttcccctggggaactaatatcttttccaaggtcaaaccttgagttttcttaaagattagcacagcaacattta

SEQ ID NO: 48822 - DNA, 1149 bp, Bovine  19866880919372
  misc_feature (1)..(1): n is a, c, g, or t
ncatggtgtaaaataactagcaccatgttagcagtcccctcttaacttggaatgatgtagaaaagtgtgaaagcaaggccattcaactaagcattggaaggccagggttggaatacagaccctgccattggctgtgcctctgggttcatcacatcactctttaatcctcaggtcctctacaggacaattaaagggctggtctaaagttgcggtggaaatcactgtgagtttcaaagtgtgttctaagaagtatttgtatctggggtctcatccctactcattgattcagactctgtatgtgtggatggaggggaggagtagcaagaagttggagaatgaggagggcaatgcatatataggttttggagacaattcccctgacaaatccctggttagcataaactgatcaaaattatagatgaggtcactttcagttctaatattcctaagattttattttaaaaaataggaagactgaaaacccatgcagactattatacatggctattacaaggatcaaatgagaaaatgatgcatatggatatcccagaatacagtgctcttaagcaattattaggactcccataattctatgtgctatccaagtggttcatcaaatattaaccaaatcctcttagaatagaaattctgcaatggtaagtctggagaacaggatctacacttggcacttttccttgcgtttctcctaatgagagcatttagtagtgtaataatatccttatttgttttctggtaatgtgaatgcatataggtcagaagagaaaaaactagacatgtacatatttcccagcaaaagtgagccatggaaagcctggatttatctgaaatctacccattttcccaagctcagaagctgcatatcctgaaaatttctgtcttatcaaaaaggtgtatcattttattgtttccaccctgtacccagaagctgatattcatccctgtgctttgacttctaggatgacctttgaggtggagtttgttagctcagtacaaaggagggaagtctctgcctagaaactttcattttcattgagctaacgagagggctgtcacctaaattttcattgttttaagagcaagtggaggctgacagtttcctttcaagctgaatgagaagagaaaacatcc

SEQ ID NO: 48823 - DNA, 1190 bp, Bovine  19866880933481
  misc_feature (1)..(1): n is a, c, g, or t
ncacactgataatctctcatcttaaattcaataggaaaaaagacatgtatcaaggttgctgtcaccaaatctcacctgttcaaggtatagacttgttagagatgacagaggggcaatggagggagcatagctcttagtttatagtttgtatctgttttgtatcaaggctaataaactactctctcaaactgcatgatatgtcttgtttagaactatcagagtaagtgaaaatatttaaatttcataagtctatcaaatgtttagacattttgcttctaaaagcaaaaggatgaaataatatccaggtgcaaatgcaagaagcaatgaacaggaacttcagaattgtaaagtaatgtatttgttttttgtcatatggggaatcatgatctggagctcctgatcaaaataacaggtcaattcagccaaaagtcttgtccttcaaaaagaaccaaaatagagcaaatatatgtgcaagttgataggatttggaacatctaagagccataagtatacaaaccaaagaagtcatcaaattgtaaaataaatttctctaagtccagattaatcacttaaaatatacaggagaaaaagttcaaaaagatctagagaaaataaagctttatttaaaaaacatatcactcaaatgttctaaagggctacctacccactgatgtttgaagtagctcagaatgagctcagtagctcagtagcaaacagactctgcctagcaagctctactgaacactgaagtcctaaaagagccccttccctttggctcaaaactggacatcctagaaaagctgagttcttgctatggccaaagctgtccaactcaatagacacaagtttgagcaaactctaggaaatagggaaggacagggatgcctggaatgctgcagtctatggggtcacaaagagtcggacacagcttagcgattgaacaacacggctgtaaacatccccaagaagcagcatattctccagaatctagcccctgccttctgctccaaccccatttgcctgaaaacgtcaccagccccaaactcctttggaatccccactgtcagagtgtacttttcaaaaaactaaaaactcatgtcaaagattcattcagctctttaatgaggaaaccaacatggtgataaaactggtccagaaagaattagaaatagaaaatggcattgcaggaa

SEQ ID NO: 48824 - DNA, 1859 bp, Bovine  19866880959359
  misc_feature (1)..(1): n is a, c, g, or t
nccaccctcacccccaccacatacatgtggaatctagaacgatgatactgatgaacctatttgcagggcagcaacagagacgcaggcatagtgaacagacttgtggacatagtcggggaaggcgagggatggaccaatgaattgagtgagtagcatggaaacatatacattcccatatgtaaatccaatagccagtgggaatttgctgtatgccgcagggagcccaaacccagtactcctcattcaacgttgaaaccccagtatctagctctgaggtggcatgggcaaacaatagctaatcattaaatactagtcaaaatgaactggacaactgtctcctgcacaagaccatctgttgcacaaaaacacatactctagcatgatatttactagagttaagaggcattgatttgcttttattttccatgtcagccccagaaacagcaaatcatcctgagactgttctgcaaaaggagcaacctgagagggacctctggggcctctagaatcttctgttcagtagtagcagaccagcttctggctagtccaccaggatatcctccaaaggaagattgttttcaagttaaagataaaaaacagcctaaatggcatggtctatttggtaaatgggtatgtgcttatacagaggaggaggaacttgtacacataaatgttttcctttactcagaaatcctttggggttttcagggtgaacttctcagtggaaagctggagtttacactggcctatgctgatgcgtacttaattattttatatataccattcttgaattctgcccaaagtattgatttctggagggcagcaaccatttcctgtttaagatttgttccattcaatgagtattgagtaacccatgaatttccagaaccttgggctaaatgggatgaaaacaagagaaaaaagattcaggaacactgctattaagcaacatttaatcatatttgggtgtcaagaacctcctgcagagctgggttacatagtagatactcagtaaacatgcctggactggatttaactaattttgctctctccagagctgaaattttaggaaagacagagggtttaatgtcaggttggaaagtgctatgcctgtgagaagtttaactcaatttatcttctccgaatgctttgtacagattacactcccaaccacctcttgctacaatcagaccctcttaaaaacagaataatgataataatacaatttatcatcttcctagtgatagtatcattcacaccttcatcgaagcccagtgggaggtttggctgtgaggcatcacacaccaggggagtcaggtgcgatcattgtaataatgatcccacgctcagaaatgcgggaaagaaaacctcccacacatgaagtgatttctattaagatactcattttatatcaaatattcaaactcctctttataaacaggagagaatgaaaggacagtctttcagggcagattttatgtggccgagaacaaaagggcacaaatattttacgatcagttttgagatgaaagtgacatgcctgccttattcagtggctctttccatttccagaagtctaattagattgttagtttaatggtagtgagataatttagtggccactgaaagcaattgtgttaatgagaagggggggacagtgcttttggtttcctgtaattaatggagagtttttgaaaaacttcttggttccagtgaagttggcatactgagcccagctgtgaagggggacaaggtctttcctgcttattgctgcggaaatggcctcaggcagcgtggaagaactgtgtaatgactgtcattaagaatgatctttagtggtccaggcagactgtaagtca

SEQ ID NO: 48825 - DNA, 886 bp, Bovine  19866880967175
  misc_feature (1)..(1): n is a, c, g, or t
nccgtggccctgcattggcaggcagattctttaccctgtgcccctgggttcccagggcctacacaaaacaggcacttatttgtggagtgaatcagtagcattgaaacgcagaggcctcgtcttgacagtagtcttacctctttgacagacgttactaggtgcatctatcctaagggcttgttagatgaaacagaaaaagatctttcggttttgggtcccctgggcatcaacagtcagaaagcctagcttaagttttcagctttcttgcctgaaatagcctctaggactattgcaaaggtgtatttcttaataataactttctaatctctgtgggctcagaattcccagagggcatgactgagaactgcagttagtggctttggaagtcccagtacagcccagaatagatgatcagggccaagatattgtcactaagaactgcttgtccttcaggcaagggggaaacagcatcaggctgactcagcaaagctcatgtctcaagagtaaaagatacttactcactgtactgcccacagggagtagacgtggcctctgacttctggattgttattcatttaatattatttaatatttataatttaatatttatctttaaattgacctacttttcaaaattagatttgtactaataatacctatattggtagggctttaagaagatgatagctagctagacacatgatatctataatatattataaaatattatcattaactttatattatataattacatataaataaatatataaatgttaaaatatgaaatattattatagacagtctaaaatccgttgtgcatgccactagtgacatatgcttgccatttggaaaatactagactaaatggctaacttttatgatc

SEQ ID NO: 48826 - DNA, 1164 bp, Bovine  19866880985175
  misc_feature (1)..(1): n is a, c, g, or t
nattcaaaagcagagacattactttgccaacgaaggtccgtctagtcaagactatggtttgtccagtagtcatgtatggatgtgagagttggactgtgaagaaagctgagcaccaaagaattgatgcttttgaactgtggtgttggagaagactcttgagagtcctttggactgcaaaggagatccaaccagtccattctgaaggagatcagccctgggatttctttggagggaatgatactaaagctgaaactccagtactttggccacctcgtgtgaagagttgactcattggaaaagactctgatgctgggaggggttgggggcaggaggagaaggggacgacagaggatgagatggctggatggcgttgccgactcaatggacgtgtttgagtgaactccgggagttggtgatggacagggaggtctggcgtgctgcgattcatggggttgcaaagagtcagacacgactgagcgactgaactgaactgataatgttcaaggatcttcttttgtagtttcaattttagtcactatgtcatgaattctttttaatctgtttactttatctctttgattttaaaatttttctttcatttaatcttctatttcacttcaagtattttctgttgtgtttattcactcttgtattccttctggtttcatcttcattttttatattgtattttcatttcttttaatttttttctgacttctctcacttcattattgaggttttcttactctaatttatgttcttttttcatgtctttcagcattttttcatatcttttagttcatttttaaacagtaagttagcatttttatttgttttgtggatatgttttactcgtatatttttattctgcctcttatttctctttttcttttaataactttcatgagagatgtttgaaagttgatcattttctgtctctaatctttatctgaaattaattttcctgaagttttgaagagactagactgtggatagtcctaattttgcagccttccatttccctgcagtgttaaaatgttgacttgttttctaagatttcctgacactgtttcccttcccatttttatctgaatcttctctttccaacctaatatcactgttctctctagtgtcattttaagtgacacaggaattgaccaccaa

SEQ ID NO: 48827 - DNA, 1105 bp, Bovine  19866881006531
  misc_feature (1)..(1): n is a, c, g, or t
ngagccgggcgttgcctgagggtctgactgaggggatgaggacagctgctcaactgcagtaattgagcatcaagatactggaaggaccagtctggggcaagccctgtgattttgaggggcaggttctaagaaagcatagctgctcttctgcacgtcctcactgttctctcctaaagaccctggcacgtgtttgttattcacgaattatttgtgcttgcctagtttatttatttattttttattattaacatttttttaaaaacagatctccttttgaagtaactggccactttgactttgaacccagcaactctccaatgaaatggctggcaaaagtggaggcccagaaggtgggcagcttgctcagggcagggcagcgaaagcccaggggtcctgcctccccgcatgccctgcgtctacacaattgcccagctaaaccccagacagctcaggttttttaaaagtagagttgaaataagtcaaatttctggatataagggacactctgacccctgcccaagttttcaggcatcctaggtttttaataaaacagagaagctgccctctgctcaaggataacccctcaaaaccagcagagagatccgggatctccagccagcttgctctctgtcagtcagggtccctttaagatgcaagaacttggaggtaggggaggtcaaatgcaggccagtggaagtttccacactccgtgtgtcccggccagcttctctgtctatctctgctgggaagggtgggccctgttcccacaggcctgagatttatgacttcagtctgggagggggcgttggtcttgacttcttggcgtgaacaatggtaaacagagttatgaagaaagtttggaactggtatccttcagcctgtgtcaggctaattctctggttctttctctccttgtgagttgtgtacacacacacatggtgtgaacatataccggctgtaaaatgagatagagcaatagtgtagttggcctctagatcttgtcaaatatgcaccccaaactaatcaccagacttccatcgaccactaaaggctgcaactttagtgtcacttaaaatccctgaaggtacacacacacatacacatt

SEQ ID NO: 48828 - DNA, 1196 bp, Bovine  19866881009413
  misc_feature (1)..(1): n is a, c, g, or t
ntgattgtaattgtgcagtagtttgagtcattcttaggctttgcctttctttgggattggaaggaaaactgaccttttttgtattccggtatagtcaattggtgcctttgaattgtggtgctggagaagactactgaaagtccctgggacagcaaggaggtctaataagccaatcttaagggagatcaaccctgaatattcactggaaggacttatgctgaagctgaagctccagtattttggtcatctgacgcacacagatgactcattggaaaagtcattgatgctgggtaagactgacggcagaaggagaagaaaacgtcagaggataagatggctgaatggcatcactaataccatgaccatgaacttgggcaaactctgggagatggtgaggacagggaggcctgccatgctatagtccatggggtcacagagtctgacaccactgggcaaacgagcaacaatagcatagtcaattaacaatgctgtgatagtttaggtgggcagcaaagggattcagccatacatatacgtatatcccttctcccccaaactccctcccatctacacttccatataacattgagcagagtaccctgtgtaatacagtatgtccttgttgcttatccattttaaatacgacagggtgtacctgtccatcccaaacttcataaatgtcccttccctccattcttcccatggaaaccataaatttgttctctaagtctgtgagtctgtttctgttttgtaaataagtccatttgcatcatgtcttttgattgctgggtgataagtcatggggcatgaactcctcctctgttgggagaagatatcagctccactcctctggatcaggcccagtgagttggggctcagagcaccctcaggttattcatattcatgcttctccactgttctgcaaaggtagcagtttgttttaagagatattgctcaaaattaccttaagattgacaaactcaaagcaaattttgacttagagggagaatctaaaggactattagcaacagctgtaaaacctccccttattgagtagtgtctcctgcacttcagagaattgcagctttagagagtgaaggtccttcagttcaggagctttaaagttcttttaactgttatcggtaagaagacttccatctcacattgcaaaatagtgcatacacatgattcaatga

SEQ ID NO: 48829 - DNA, 1292 bp, Bovine  19866881032072
  misc_feature (1)..(1): n is a, c, g, or t
nttattattctaattaacacatccactggtcataaccgaaaataaagtaagctaaagacctgccctaggtgaccctggagctatgattgcggatcagtctttcagatgctaactcgctgcctctggagtgtgcattactgattaaggaaatgcaaatgttacaattctcctctagggcatagattaaaattaacacccacttaccccatatgttttctatgctaataaattttgaagtaaattacagataatttaaatagatggaaaagaatatggcatggattgtggacagggaaggattatcagctgaccaatagatgttgaggaaaaagggagaaagcaagttgtataggaaggtttttggcagattggtgaatcattgcattgcaggttgagtaggtttgatgggatagcctatggatagggtgaccatatcatttattgtccaaagagggggccctttggagagtaaaaagggacactgttaatgataatgctaggacaagagaggtaaactgtcctaggcacaccgaggcataaggccgactcagctacggtcattgaattaaagcgtgaaggagacagggtaaacgctgccttgggtgaagactcatctgtcagacacctctgctttggctcacctgagcacagcagagtttccttggagtgacttgggaggggagaggggctacctgggaaaggactccccctgcctatacttggtcaatcatctcagatttatttatcttcagctaatgttgtgccctactttctcagagcagcatttcaggaacatgttctatttcttcgattttttttttattttgtccagagcaattaaacagtagtaaggaaactacctccctcactatttttcttatctgaccttgggcagttacgtcttggccctgagactcagattagcaggtattttttgagaaactactctgtgctggtgaagggcttttccacgtgctatctgaagtcctagctgctctcagaagtgtgtgggagagaacaggacctgtttcatccataaatgaaggtacaagtatctactctatttttatcccagagtttgtaaaggtaaaatgaggtaagaattccctgaaagtcagagaactggctatcctggttatgaggatagactattttcaccaaagttcaaatgagagtcctcaagattcagcttagaatgactgatgaaagtactaccaaaggaggtaattcaaggtatttgcgagctgctgggtcttaaagcaactaggtagtaaaaatcagaatacaatttt

SEQ ID NO: 48830 - DNA, 732 bp, Bovine  19866881062437
  misc_feature (1)..(1): n is a, c, g, or t
naatgaaatgacaaaggaagtatctttctaacagtaaaactgggatcattattagagtcttcattcatcactctgcattctcaactaggcaggaagctttctgcttcataagaaatacaggattgaaatatcattgcctatattatatttgaaaaaccagaggacacagtcattttatatttgctgtgctgttctccacttactgctcattctttagaaggtaatactggcaagggtagaacaaaggcagaatcttatccaggacatggaccactgttctcaaatgcctcgactggaccagaattcccaagagtgggatgccttctgcacagaacttctcaatgctatggaaaaagaaaaaagcaatgagcatataaggtaatcagttcacaaaatgatatccttttaatgcattatcagcctacaagctacccggattatctcaggtctccaacacatttatacagagccaaatttcacacacaaatgctacaatcataaccccaggaggaagcagcttggggtggagaaacgtatgagagaggttaagaggtacaaacttcaaattgcaaaataaatgagttatgggtatgaaatgtacagtgtgggaaatatagtcaataactatgtaatattttttaatggtaacatatcataaccagacttaccagggggatcagttataaatgtatagaaatactgaatccctatgttgtataataggagctaaca

SEQ ID NO: 48831 - DNA, 2066 bp, Bovine  19866881067518
  misc_feature (1)..(1): n is a, c, g, or t
ngcaccgccactttgggcatgtaacttaaattgctccttgcctgtatttcttcatctgaaaaatacagacaaaaaagaatatccacctttcggtgttgtggtgaggataaaataagttatataaagtgtttagatggtaccttgcataattaagtggtatgacatgttggctaaagctaaccttccatttgaagtctttacaatgtcacagacccaactttggtctgttgacaagctctgcccaagtgatctgctttccacgcggccctcctacctctgtcttcagtgactccccactatctgcagcaaacatctttacttgggaagatcccaggtgatgatcctttccaatgtgagctccaaccttcccaacgtgaattcctatcactactccccaagacaactgaaacagacggatcgagccactgacccctagatagtgactccattcccacattcttctcactgaatccaaactatcatcaccaaaatcttttaaaatccagctggagcccctctctcttagaatcatctcaacgattccacttttcttttcatttctgtctgtctgtcctggaagactcatcagcacttatggaagtaagtgatcagctttgtgtgtagcttggtgctgtactaaatcgcttcagtcatgtccaactctttgtgatcacacagactgtggcccgccaggctcctctgtccaagagattctctaggcaagaatactagagtgggttgccatgctcttctccaggggacattccgatatgggcagcttcactctccccaaaactattaaatgtgggacatggatgatgtactaaatatttctttcagtctttttcaatgatatgccaatattaggaactcaaatgaaattctctgaactatgaggaaactcaatcttacttgaactgttacaactgctgctccttggcactttttaccactactgcctctgcactccaaatgtagtgtggtctgttcttctcgattaacatactgcttgggcattgtgtccaacagttcactatccagcgcaacctgctgagattcccgaagagctgcagttctgaaagacatcatcaggagaagttattttaaaagtcttaggaaaaactttatgatgaatgataaaggcttccagtcactcccagcctgcatcggtgaacaataacacaagaatctcacagtaacaagagaccaaaagtgtgtgctaagacttacccaaaccttctccctggcagtcactggtcaacaagaaagttaagaaaggaaagaaaagtataacaactttttggcaagaaacaaagctccatttaaaatttgtgttatatcaacaatgtgtttttttttaaatgaacccttaagtacacaagaacaaatgagaatttcatgctaatttaatcatcctaagggggaaccttttttctaagtaccagtgacttcttaggggcttccctggaaggtcagtggtaaagaatccacctgccaatgcaagagatacaggttcaagccctgggtcaggaagatcccctagagaaagaaatggcaacccactccagtattctcccctgggacatcacatggacagagagccatggggtcgcaagagagccagacacaattcagtgactgggcacacacatagcgacttcttaggcatcagggactcaaaccgacgtgtggagaccagataagctagttcaacactgtcctaactgtattatctcagtaatctgcaaggagcctgtgcggtgtggtgccaacaacacacacgacacgaataaaccaaaaacaggcccagtaatagatggatgcctatgagttttgcaaagacaaactctttcactttgtaagtaaaacacacacaatcctcctcacatgatcacaagctagaatcaaaacaaacagctcatcattctgtagccaccatgacctcagaatattaaatgagtatttcctgcccttccatcaagtatctatgtaatttttaaaagaattcggacatttagagagcaaagcagtgacaaaagaaaataaatctcattctgttccctttg

SEQ ID NO: 48832 - DNA, 1795 bp, Bovine  19866881082595
  misc_feature (1)..(1): n is a, c, g, or t
nttcttgcattgggggtcttgcgtggaaagagcattgtcacggcccctttcagagatgttcctttgcattcagggacactggagagtatgaggatgaatctgagggaccaggtcatctcccagacccacccagcttgggtgcaattgagagcctgattaacgagaattgcatttctcttagtttcttctccactaggagcagcattctgagccatcccttggaagcatcagactaatctttttatagaatctactctgatttatttttggccctgagacctaccccctcaactcaggaagcttcacacagatatttgagatcaaagtgtccagaataattttggctctgtagtgaggtggttctgaagtgaaatccctgtttgtagtcagagccagcctcatgttcgggcagaacccaccattgcttatgcgatggaacatgaagggcagtgaaaagaactttaaattccactggaatgtatttctctcataagtgcttaaaagttacatcagttgagagtaagagtatagttggatgaggtagcatgacttatcttcagcttttttaagacaaaaatccaaaaggaattttttcataattgctatggattagtgctaggttgttttcctcccagggaaagtctgaggtgaaatggacactgggatcaatgcagggcgggagattgaaaaggaaacatgggtggggttatgatatatacacggctatagagaaaatagctaactgacaaggtcctactgtatagcacaggggcctatacccagtattttgtaataatttatgatggaaaagaatctgaaaaaatagatatatgtatgtgtaactgaaccactttgctgtatacctgaagctaacccaacattgtaaatcaactataatttaattaaaaatataattcaataagaaaaaaaaaggaacatggagcaggagggatacaagggggtggaggagaaaatgtaagaagcaaacgtgcgttttcccagtcgccagtcttacctgcaagaaactcggtcctctcaaatcacccaaaacatcaagctatcattaagagtgacaaaccccaagcaaaacaaatcaatgtttctgttttcataaattcagagaaagtgatatttctttttccctcttcagtagtttcaaacacagggcaaatattttcctactactccgtaaatctggagtctgctgaactgtagggaattttctcttcaaccatactccataacagcatcgaaagagaaaataaaacctccgtaccaaaggcatagaattttagagccagctgactggctggagccagccctggtttccagtgagtctcagccagcatcctccattccgcgtgggcgagggcctggtgtgctgtctagcaggctccgtaaatccctcggttttagggccccctcgtgaagctgccaggcaggtatatattgtccactggagcctgagggctctgagatatacgatctgaaatggagactaggaagagtatatagtcagggagatttttctgcttcggtgactgttccaggtaattgaaatgtacccctttaaggacgagggccattctgaagttttaattatttagtaggaaaggtttctgaatggtagtgtgtgcctccttgagagcagtgtggtggaaaactttggaagcaggcagcttgacatttgaatcccagccctacacttaaagggcttccccagtggctcagaggtaaagaatctgcccgtcaatgaaggagactcggggtttgatctctcgatgaggaagatccc

SEQ ID NO: 48833 - DNA, 888 bp, Bovine  19866881102134
  misc_feature (1)..(1): n is a, c, g, or t
nccatagggcaaatggctgggcagctgaggggtggacagagcacctcgtgggggcaattgggcccataccacccagcagagggcagcagtgcctaagagtcgatcctaaatccatccatttactcagacacaggccaaggcaggttgggggtgactttggaacatccttggcagccccatgcgagtaggggatatttcctttgtgaagcctgttggctgattccatactgaggagcatagaaatcctagagccacaaagccctctagagagcaaggtttgtttctgaatttccaggctgatcctggaagggtccacagtgcttttcgtattgaagatgaaatcagctgctggaggtagggtcagtatgtctcagtcagcagagaaggtctacaaggctccttcaagatatgactcctctcttgtgcggtgggtcaaggcccagtggtttaagaggcaaaggcttcgggtctcagccttctcgttttcaaacaaatgtaatttgcatccaatctccacctctctatgtaatgcctatgctagcatgtcttgtagatagattcttttccacctctactcaacccagaaagtctctctaaatttgttcattttctgggaatttacccttaatattggtccttgtcttcatatccaccctgcagaagaatctcagattaaactcattcacccttctcacctcacctcactgtaagatgccccttggggttgcagggaagaggtgggccctgaagtggagaaaataagcccaggaaagcagagcctagggcagccagccaaaaatatttttcagattggtcttctctagactccagcaaggatagtgatttaaaaaggtttggattatgggacaacttgggataagattaagc

SEQ ID NO: 48834 - DNA, 1393 bp, Bovine  19866881129018
  misc_feature (1)..(1): n is a, c, g, or t
natgatgtaacaaaaataacatttttattgactttggcacagaagtacattattttccaaatccatctatttcttaattcactttattctataacgtgtatccccttatttaccatgagtgaagttcatttgcaaacaagaataaaagagaaatgggagaattcatacagacaaccagcatatgagaaaaggaattaaaatcaagttatcaggatgagtttcctcttgtgaaaaatacatactggttgacccaaaagtcaatgtgttagggaacagaaaagaactttgaagtgagtcaagaggcctggatttcagctccgctttttcctacacatgtgatatgtgagcttgggcactcacctggtcatctttgccttggttttcttatttgtgaatctggagtttcaccctctgactcttggcatccatacatagggatgctgcaaggggcaaatggcataatgcatatcattgctccttgcaagattaaaagccactgactgttcaacaaaacatgcatctcagtccatgccaagtcctacattctactgtgaaaggatcaaaaagatgatggaaggaactaaccaccccagtggtgtcagcctttctcactatgccattctgagttttgtctacaggaaacatctgggcatttgcaaatcttagaattaaaaaattaattaagtctatattaatcacatgctgttttacagatatattgctttctgtagtagatattacaaaatgaattacgtatgatccctggatgatgattctatcagcacttttaaagaaagtatgaaatgaggactcagccaggagttaagatctaatttttactacttcttaccagcagtgtgtttttagatgagttgtctcacctccttgaacctccattttctcttctagaaaacaggagtaaacagtaactgtcccacaaagatttgtttgtttctccataaagaacatgagatgagtagataactaactttataaacctgagcgacatacaaattactctgtggtttggctggtttttattatccaaggtcacaaagctcattacagggatcctgggaaaatcagccactgttagaccctgcttttcctgcatgacccctgtaaccttgagcaacctggggaagaggtaattgaacagcaactactacttcggaagaaacagaatcaagatatcgaagctattgattcaatattgactcacccttaaggcagtaaacaatgctttggtctctgaccttttcgcatcctggggcagtcaataacctggcctctagaagcagcgtctgccactgattctgatttgggagtactttaaccttgaactgagctccaagtaaccaaggcaacaggaagtcagcttctgcatcagagg

SEQ ID NO: 48835 - DNA, 921 bp, Bovine  19866881149094
  misc_feature (1)..(1): n is a, c, g, or t
ntaaataaggtaatgaaatcattcttaatattttaatagttgcgagacaatctttaatattaggtgtagctttcaattgccaagaagtttgaattcaaagatttgtaccctttgacctttgaacaatattcttttcccaaggtggggaaagcattcccatgtgtcctgatcacatgattcacagaacataagctaattcacacagagtgataagaaagaaaaccccaaggggcttattctccaaagacatgactccctggtggagaaatttcccacagtcatggtggtctgtattttttggcaagagtgtcttcctatttccctgtcagtcacagaccggggctcctgatctcctgcagtgcatcaggtttaccctgacttgcagtccaatgaccctagcactggatctttcaagcccggcagaaatcatgggaggggtcaaagctgagaagttctgggctttcagtttagtcacaattaaagacacagcgtaagtacttgtagcaaggtcacatcaattaccatcataaagtaggaaagggtgtctggtttgttacactacttctgaaacacaaggcttagtgaggtgccatgactggcccgagtaaccaccagaattcagtggtcaggacatatggctacagccacccctcactgtcagacagaacgctgccttcttatccaaaagtgcctttggggcttggacttcagcagcgtctgcataaatgttgtgtcaccagtgttcatgggcttggagtggaaaccatgtaatttcatacggagagcacggtgggcaagaagatagtgaactagggctctagctgcagccttagagaatgccttccagactgtgggtctcattttcctcgtctttacataaaagaattatttgtagacacttctcttttttttatcatttag

SEQ ID NO: 48836 - DNA, 1400 bp, Bovine  19866881216033
  misc_feature (1)..(1): n is a, c, g, or t
nagggctgccccttgccctttcctttgcccgccgctgctctgaacgcgctttgctttctcccgggtcctccttcggccgccgcccgcagccgccccgcggatcgtcaacatctctgtgctgccaggcccggggcacgccttccacgcactctgcacagctgaaggggagccaccgcccgccctagcctggtccggcccggccctgggcaacggctcggccgccacgcggagcccaggtcatgatcacggccaccaggtgactgccgagctgcccgcgctggcccacgacggccgctacacgtgtacggcctccaacagcctgggccgcgccgaagccagcgtctacttgtttcgtttccatggcgcctccatggcctcggcgaccgccctcctgctcggagcgctcggcctcaaggcgctgctgctgcttggcgttctgggcgtttgggccactgcccagcatcgcctaggtgggtgcgaccctaggccaggatgggtgctcagggcaagtggggctctcctccaggctgaccacctggcctgacacaactggaatttcattaatgcacctgtggtctccttctccttcctggtcaagcccaggaggtaccagccagagtgagccaattttaccatcaggaagctgaggccggagaggttagggaacttgcctccagcctagagtcacagagatacagactcaccctattgccaagtgccccatcatccagaagggccctgaccacacacaggctttcccaaatagcaccatttcattcattaggttgcagcagcatcccaagcaccacctacatgctgcataggtgctgggaatacacagaaatgaatataacatggtgccctgcccttgaatgggatgctgagaagtaagcagataaatgcagtctgcagagagaagtgcagtcaacccaggtactgcagaggcccagaggcctctctctgatggggcattgggacaggagccaggcggcaaggctgtgcacagtaaagggaggctaaaccgaaagctgtaagcagctgggagctgggagaacaaggagctagcagtgttcctagcagagggaacagcatctatccaagcgtggaagcttgaactagcaagctatcttcagagagctgtagtcacccctccctactctcactaagctggatgggagatttgttctgtgccccagagaaggggcttcctgagcctctcagctcacctaagtgagtagcaccagcctcagactctcctgggatgaaatccaaaatttgccacagttgccttggctgccatctttgctggggccacactggccttcttgcagggtcttcaaacccaccaagaattctgtgcttcaggggcctcaaaaaagcaggtctccctgctaggtgtg

SEQ ID NO: 48837 - DNA, 1256 bp, Bovine  19866881275270
  misc_feature (1)..(1): n is a, c, g, or t
naaactgtgcatgactgttctgtctttccctctgctgtaaaagaattatggcttagggtttatgggatttaaaaaaaaatgtgttcaatcaccaggatgggagaaatgaggctaaaccacctctggaccctctaatggttttatcatagaattatagctggaatgggctggcaggaactttgagaggtcgtgcagtccatcccccgggctccacactgctttatctccagcactgaggtccgtgggtagccgcctctcctcagggatcacccagagaggagtttgtgtaacactctctggaaactgagccacatccctaagcttacagtacaggaagtgtttcacaggtcctatgaaagtcacatgacctaaggccatttctcttcatcgcatccttaggaagtggaagacttttccatgtcatttttgggaagacttcatttgggagaatgcctccagccaagagggtaggagcaactcctaggggtttcaaagagaggaaacccaatgccaagttccctttgcacagaactgctgaatatcaggcttcaaaggaaattcaggggccatccagtccaagtgtgcctgaagatctggggtcttcttggtggtgcccaggcccttctagcaactggaagcccactgtcccctcagccagtttcttctcctttgtgacagttctcatgatcagatagctgtctctcctattgagcccagattcatattttctttctttgcctttgctgggcttcattctgttctctgaagctacatggaagaattcaaattcctctgaatgacagtcatattcctatcatatcattatcatattcatatcatgtcattaccatattcatattatattattatcatatttacatcataacatattcatcccaacttttccctttccaagaactaagaaaggaccaactcagctttttcagttactctgcccctctcccacctccccaatttaatgtatagtctataccactcagcagaatctcggtcttcgtttattctacctacaaaatcggggtaattctgtcatttgttcctactgcctagaatggctgtgaggttgccttgagatggaatatggtttctgttgcacttttcttcagcgctaacacagttggcggtgagagtgagccgttttctcctcaccattttcagttgtctttcctagctgtgtggctctgggccagccgctctacctctctgggggttagtttcttcctctggaaaatcaa

SEQ ID NO: 48838 - DNA, 1709 bp, Bovine  19866881319447
  misc_feature (1)..(1): n is a, c, g, or t
nctctgtttgtgcaccatgcagtgttggaaacaacacaggcattatacaaacaaaatgtatttggggctactctggggtctagcaatggtgaaatttccttagaggatggttgaaaaaagatgcactgcatcccatttattgaatagagcttgcataatcaaccaagtagaaagaaatgttgagatgcatttaacctcattagtttcagtaggactgactctctccaatccatcagagttgagctacattagtgaaactcaactatttccaaatctcatttacataatggatgagaagtgaaatgagcccaatgcaaggggagccgcccggcggcactaaagtttatcacaatatgtaagatttcttttagatcattgcattaaatttccactaacaagataacaaattaattgtattacctgtactagcccaaagtctattgagtggcgagtaccagtgaaggcggcagctgggatttcaagggctgtggttggggaaggatgctcagagggatatggtgacttttaccttagctttcttctgcccctttaagaaattctaggcacctctgtaatctgatggtagactttggctttattagtgaggtaagtaaggatgagtaaatcaactgtatcagacaagcctcaggacatctagaaaattgatcattctgccgaaataagcactctgtgtttattagctgggagttcatcactatcacttctccctcatccaattcctaagagatttcaaagccatcatcatggtattagctcgtctgactgaactagcagagataaagattaggagatctatctaatgatgggtctgagtttctgtgatttttttcctcttctattgcaaaaaagagagcttttctggtacacattctgtgtctatatgtgtgtgcctacacacagtcacagtggtttccattttataggatgatttcaaacagtggaacaaagtaggtggtttgaagaaagccacactcaaaccgttaaagcaatgcaactttctcacacataaagctaagactacttaagggggctatatgctgaactgacttctctagtgacacagtgtgtccatccagtgggtgatatcacactgagagtaattagattctgcaaccacgtttataatcctaacatccatacatggccagactcctacagataggttcttgagagatgagtacatattcgactgatctttcacaaaccagcaagtatgcatttatctatttatacatatatttatagacacacatgcgtttaagctcctgatatcaagctcttttctcagtgtggcttctaaataagcagtaatcaaaatgcacatcaggtgacccagttagcatcgagatctgtgttgccacgcagatgtgctctgcgtctctgtgttctacaggtaaaaaggaagacactacaaaagatgctcatattaacaacttcacatggaggggaatagggaagaacccctcagagccagtggccttatagcttgtatcacaactgccatttttggcttggtctgtttgaaagctgccctgtagagtgtagaataataagtatgtaccaggagagcaagaagactgcttctgtgaagcctcagattgcaaccccgtgtaacagaaagccaacacactcgcctgagacagtcaaaaaataaagctggggtcagagtaatggccctcccatcctcc

SEQ ID NO: 48839 - DNA, 743 bp, Bovine  19866881583880
  misc_feature (1)..(1): n is a, c, g, or t
nctaagtagacagaaacacctgtggggagagagttggggatcaaaaataagaggaccattgtactcatgcggaaggtgaaaccaagaccctcccccccgcacccaacctaaggccgggttactactcctcacaaaccctcctaccaggacatggatgctcacagccatcagagggcgcctgggcaggccaggctgaaggagtagtgaggcagagagctcggtgagcctccacacaggtggaaacagcagtggtctcagagctgaggatcagatcacatccagaccctgcccctaaccccaggacagccaggcctgctggagcagggccaggcagccccatagatcccagaccagacccagagcctttgaaatacagctgcctcttcctgggcctgctccccgcgcccctgtggtgtcatttccaaatccattacattccaatggctttgggatcttttaattacatgtgacgaagcctcgccattgctggaattagacggcctgtgttgacgatttataggcctcagctttcacacaagcagggtaataaataacatgaaatgggcccttcagtattaaaaacttcagagctacccactaagccatgacagaaagaaggaaaaaaaaatgaaagggtaaaaaaattaaaaaacagtaatgtctgtgtttcatgtttaaaatactgtatgtgaaacaggggaatgtcaaaaatacaggggtgctgagcaatacgcaactcataa

SEQ ID NO: 48840 - DNA, 1710 bp, Bovine  19866880376932
  misc_feature (1)..(1): n is a, c, g, or t
ntcacttttcactttcatgaattggagaaggaaatggcaacccactccagtgttcttgcctggagaatcccagggacgggggagtctggtgggctgccgtctatggggtcgcacagagtcagacacgactgaagcgacttagcagcagcagcagtgtgttcctggcccctggatgaaatctcctgcaggactcagcacctctccaggtcctcttaaataacaaaaagattttggtccacttttgttagaggaacagtcttcaaatatcaagttaaaggtcaaaatcctggccaaacctcagacccagacataccctctgtcctatgaacagaaaacccctaggggatcgaagtctgtccccaggacctcatcccctttctggcccattccagagagcacagctaactgccacatcttgggttcaaatgaaatttctgactcaaccagaattcaggagaactagacccagttccctggaccctgaagaagtccatccgcctgactgcatgtcgggtgcctcccctgggaaccagcctccaacaagccacgatcagggtttaccaacaggcagacatcagcagaagctcatgcagaagttctatacttaaccagagatctcatgtattgatagaggctgccccctcattgcccaggccctggccaaaaaccattaagaattcaggaaagtgcataaagctaattgctaagcagcactccagagctgggctctccatgtgaatcattttacagcacaaatagcatggtctgggattgtgcagtgtgtacgccatagggctgactaatgggctgaccacactcccttccttccttcttttcccacccactcactacttctctgtagctgtttcaatggctgggacaaccaactctgacatctttagaaaagatctggatattttcctggggagtggtggttcccaccttgtgccacacttgcttagcacactccattccacagatgctctctctctctttgatgaattttccgacttagctgatacctctttttttccctcctccagccacctccaaagtttctccaagtttcagttctcagccgtcttctatctaccatctatctatcatctatctacctatcatctatttatcatctattttctatcatccatctatctagttatctatcatctatctatttatctatcatatatctatctcagttcagttcagtcactcagtcgtgtccgattctttgtgaccccatggactgcagcacgccaggcctccctgtccatcaccaactcccagagtttacttaaactcaggtccattgagtcagtgatgccatccaaccatctcatcctctgtcatccccttctcctcctgccctcaatctttcccagcatcagggtcttttccaatgagtcagctctttgcatcaggtggccaaagtgttggagtttcagcttcagcatctgtccttccaatgaatgttcaggactccttgcagtccaagggatgctcaagagtcttctccaataccacagttcaaaagcatcaatttttccgtgctcagctttcttcctttcttctatctatctaatacatcatgcccaagatgctctactctggggaaaaactcagctctatatcactaaccctagcctctcccctgagctccagtccaaacttgttgaacccctaatagcaggggtcctcaacccccag

SEQ ID NO: 48841 - DNA, 778 bp, Bovine  19866880388371
  misc_feature (1)..(1): n is a, c, g, or t
ntcactccagtattctttgacggggaagcctcatggacagaggagcctggagggctacagtccatggggtcgcaaagagctgggcacgaccgagcacagcacacatttatgcacatagagagagagagacacaagaaacagagagagagccggaggggcagggacagagaggagagacgctgccaatccggccagcagtggggcatgcgtgtgccacaaagatgaccctgaagggacgttcagaccaggcgctccgtggggcgtgcatgtgccacaaagacgaccctgaagggacgttcagaccaggcactccagcaatgttcctgggttgcagagaaaaccaagaaaccaaagacagatacataaatacatacataaataacaaaccccttgcaaacataacagatgtatgtcatgttcaagtacgcggccatccaggaaactttagttcagctcctccgaacataacaaatggcttttttgttttgctttgtcatttgtttctccctaatgcagacaagaaaaatattcttgaaaagcagctattaatggatagtgacaagtggtttcctgtggtctaagaaaaagccatcaattactgccttttacactcttaaattccagaggcagaggaagttcaataacgctgcactggcttcatggttattgactgaagaaaaggaatcgtaagataaaactttttttccgttttaaatgaagttataaataattttaaaacttgaagagtacaaaatttcagggaatctccaagcttcca

SEQ ID NO: 48842 - DNA, 1600 bp, Bovine  19866880455397
  misc_feature (1)..(1): n is a, c, g, or t
ncgaggcctctagctcttcctgctctccctgaatgaggagccccgttcttggcatccccgggcacgaatggcagagagagaaaacaacactttaagaaaacagatagggtcagagctccagaaactctggatcagagcagaaatccattgagaatcctacatctggtaatggtcaccagcctggaaattttaacttatgcatctgcaagactctgcgggtgtgtgagacattgccgtccttctcaacaccaaagggagctgtatcctgacctttacaaaggtggtaccgggtctaatgggaatggtgccactcccattagaagttttgattggcagttagataaacctctgacacaagaatggggaaacaagttatttttaataatcctggtggggttttttttttgatagatgaaatttttccaaatataagattcatatggggaaatgtgaagaagctcctcaaggggaaatggctgaggacaaggaccctggaacaccccagtcctcagatttctccaggacagttcaccccaagaaaaggattttagctgcttataaaccaaaggagcagttatatagtgctttaacattttaatttttttaaataaaacttttagggagctgcactgtggctggtctctatatatatatgaccagggactagacttcatgtatttacttgtgattcgaaagttcatttgaggtagctgcatggaattcccgatccaagtgaatttgtaaatgtggtctgaatacttgagatagtttgctgcatgaagaggtttgctgaacccccccctttccatgagatggccaagcaaacaactggggaagaattaagcagggttttgcagtagctttctgtggagctgctgagcaaaatatcaaagtagtaatgttgtgactgtctttttcatgcttggaaggggaaaaaaagaaaaaaactgtcgaagtactgggacaagatgaagaggaagaaagatggacagagtgaaaagtagctttatttacagtttatctgtgagaccacgtaagcttggggatcagaagccctgaagtccatttcgtctccaaggcctacagtcatttatcttgtgttgggctctgggaaactccaggacctactccacttgtggtcagtttgatttagtagctggggttcaagatatttttttttataacactaaagagtatactgaacatcgattggctaaaaaaaaaaagtccaatcttgagttagttcccaaaaggcacagctagaataaggtattaatggggattaatgatggcattgtggttcgatattagcaaaagtccagggtcaaaaataaatgtgtacacctcaagggaagcaggcaagtccaggctggcaacagtgcaaagactggaatttaaaaatacctaactagtatattgatactttttcttctctctccttccagattttcctcttaatgtcacctttaaaaaaaaaaaaattgcaattgaatcaagtaagtccccagagaagaaagtttccttctgactacgttttcctgcagtgcttttggtgatggctatttgggtataattcccaccatgaaaaaagggtttttat

SEQ ID NO: 48843 - DNA, 1456 bp, Bovine  19866880473528
  misc_feature (1)..(1): n is a, c, g, or t
ncactcaccatcacacatgggtgatcacactcgtctttcttctctaccagaaagtgacggtcccttccaccttactcctctctgttttgtccttatttgcatggcctcctggcattatctcaaaacaaactaaaatctcttccagttggatccccgaggaattccagaggggagggtttctttgtggcttctgtttgcttatggactctgcacggtgtttgcaaattctacagtgctggaaaacttccagacctatttaaatccgttttccaattacccagtgccatcgaagatgtcactgacttgcagtgaaaatccagaaagagtatgtgtgtttggagtatgtgtgtgaacgtccagaattttcagaaagcacgttgcttgcaggatccatctgctagaccaagtttctgacaatgaccttgtgctgttggctcctgtatccagaggctgttgggccctgacctgggtgagtggccagattcccagtgtgggaaagacttagaacttattttagaactgtgcctctcaccatcagtttgggggctttcaagatgcacaggtgagccatcactgcaaggaagttatgtctggtccctcccacctccggaaaggctccgaaatgtaagaaatctatagtctgattactttgggaccaggatttttttttcattttcattttgatgtattgcttaatattagacctgggagacttcgagaggtgatttcgttgcccgggacctttggggcttctatctggggagtgaaaagcgtgtgtgtggctgcttactgcccaggggcctttagatgccaactgaatttgtcgcacttggaaggggataaagccctggaacatctctccctaggatattccgctgtccccactggcagaaatgatgatcctatggcctaaaacaaagtcttatttagaaagaaatccagctacagcgtatggtcatgtgaccagcagtgtccccccgggggaaagatgctcatcagggactgtcttagttggttcaggctgctgtaccaaaagtaccttagaccaggtggctcagaaacagcagacacttctttatcatagttctgcaggcttgtccaagatcaaggagccgtcatggtctgctccttggctcactaatggctgtcttctcccatgtcctcccatggtagtgttaccaaaaggcgtggggtctgactactcgcagccacaaagccagtaagcagaccaggttggcagaaaggaaagttggctttatttccgatgccggcaactgagagcgggagggcagacatctctccaaagtcaactcctccgtgaacaggcaggggatgagagctccataggttgaggagggggctacatgcggaaacagcacactcggctctgacagtcatctttacactggccatcagtggtctgacttccgtcatcttgattgctttaggcacagta

SEQ ID NO: 48844 - DNA, 1431 bp, Bovine  19866880783198
  misc_feature (1)..(1): n is a, c, g, or t
ntgagtttttgtcgttgtgtctgatgtttttctttctttaaaaaaaaaaaaatgactcaaaagtttccacttgagttccaatcaatatgctgcagatgggccaagtcatcctggcagagggaagagctgagattgtgttcctgcgggtggtgccaggaggcagggtgctccaagagagggcaggggtgaacgctgaagcttcagagacctggaggcagcagtgagacccacgcacgtggccagacctggggctgtgggccgctcccgggtgaatttcggcgggcacttggctcctcccctcgcaacatcactttgtgacttgaggactgactagctcatcacctcctttctccagcccctgaaagtgagagatggtgtggtgaagggtggtttacctttcctgcagaaatgtgtgcttgcatagctgaatagccctttagtaaattaaaatagagtccttcacggacataacattgtctacatttgttctcctccctgagtgatcttcagctggcagtggtcctgacatactcagttccagcgtctctgctctcggctcccttgacaaggagtgaatgattatttaatggggaatttaagaaagtgctctctgcttggagatatttatatatattcccaaatattacatatataatattaatatcaaagactttctcaagcacaaggcagtagccccacagccttggggctgacagctagggactggtggctagatcatgcacggtactccctcacccaagaacagcagccttcatccagagctcccctcgtggttacaggctccagttgggttccagagttctgaaactgtggactccaaatggtttcaccagtttgatggctgctttgttggagggagcaactccaagatcttcccactctacattttgcatgaagtcccttatatggatgtattgtgaaattcatgtaaatgttatctatctaaatctccatttcttactttttcatcaactgttttttaaaaattgtagtgaaatacacatggcacagtatttaccatcttaaccacttgtaagcatatagttcaaaggcgttaagtatatccacactgtccaactaacatcacctccatccactcgcagaactcttttcatcttgcaaaatactgaaactctgtacccactgaggaaagactcccctttccaccctccccacagaccctggtgacagccatccaactatttgtctctgtgaatctgaccactctaaattcttcattaagtggacctactgtttatccttttatgactgactcatttcacttagtacaatagcctccaggtacacccatgcatcagaatttccctctttttgaagactgaataatatttcattgaacaaaatacaccacaaattgcttatccatccatccatccagccacgaggaca

SEQ ID NO: 48845 - DNA, 3128 bp, Bovine  19866880787964
  misc_feature (1)..(1): n is a, c, g, or t
ngaggataaattgcctatgaatgcaaagcaagctaaagacccccagccacacagcagaaccttcttgatcaatcagtgctgtacttgcctgcgtaattttcagcccggtgtcctaagtcaccttggacctcacttccactgcgcgtgtgtggtattggcagcatcttgcccacctggctttatttggacaacttctgacttcctcttgtgtaatcttttccagttgggcagtggtctctttctgaatctcctctgtagttgccagaccatatctccgtgagccccgtgttatcacgtgtgttatgttctgcgttagtgcacacgcaagcagaaccctggggactgtgaagctacagcgtatctggttgtgtgtggggttcattatacagcatccgagttggactgtgctttgggttctaggctggggaaaccacaggctgttaccgtcaaccttgaaccttgtctcatagataaggattagtgggtacaggaggacggaggtggcaggtggggagcataggattagctcgaatactggaataggtccttcagataaagggtcaggaggatccaggtttatgttaacccgagcagaaaaccttgttcactgattacctgtgtgtaagttcatatccaccctgaatcaagtgcaactcccacgttcaaaaccagcgctaatatagactcatttttggaagatattggagagcaatgtatatgggacaggacggtgtgagaaatctttgatcttatgtcagcttttatatgttccgttaccttacttcctaagatctaaaagtggactctcccccgagtgtcactgcaatgttcgcatctgcccctgaaacttaagaccagcctcacaccaagtatggaggcagaaataaggaagggcagagatggggacagggaaaaatactgtgtgtgatggagttcttaaattggattggtagagaaattcttggacttgactaagtttatttgaatataactagattaagcttctgcagcagccagaaggaaagactcaaaatagcagtagagattaagctgaattatattaaagttacatgtttgcatatccagcattatgatttataaagtttgcacccactgtgcatttaaacaaatttacagaattcattagacttatgctttctgtacttgaattaaggagataaaagttagtttcactatagacaaggtcaactttattttatttttctgaagccagattatgaatcttaatagttttttaatttaattatatttgctgtacaatattatataaattagaagtgtacatatatgatataatgattcatgatttttaaagattatactccatttatgctgctactgctactgctgctaagtcgcttccgtcgtgtcccactctgtgcgaccccatagatggcagcccagcaggctcccccgtccctgggattctccaggcgagaacactggagtgggttgccatttccttctccaacgcataaaagtgagaagtgaaagtgaagtcgctcagtcgtgtctgactcttagcaaccccatggactgtggcccaccagggtccttggtccataggattttccaggcaagagtactggagtggggtgccattgccttctccaactccatttatagttattataaaatattgcctatgttccttgtgctgcacaatacatcctgtagcttattatacctaattgtttgtacctcttaattcccgacccctattttgcccctccctattccctttccccactaggaatcattagtttgttctctgagagtctgcttgttttttgtatattcactagttagttatattttttagattccacatataagtgatatacaggatttgcctttttctttttgacttatttcatttggcataatgccttccaagtccatccatgtttctgcaagtggtaaaatcatgtttttttatggctgcacagtattccatcatatccacctggagaagggaatggatacccactccagtattcttgctagagaatttcatggacagaggagcctggtgggctacaaatccacagagtcacaaagaatcggacacaattgagtgactaacatctagtatatttatatgtcttatcttctggatcctatcaattttgaaagtcaaggcaaagaagcccattttgttaatagagcaataacatatacagaggtaataccatcagcatagtaacttcacaattaactaattgtgcaattttacacaatcttcaattatttcttgaagtaaatttatagcagcattaacttcaagttatagcctcatacactgaaagcaaattttgtgtcatcttctgtccttaaaacatggaaagtggatgtaggaaggaacacatcttctagcataatttttctattgacccaaaaagagatgcattagaaatatatgaactatttttgtagtgagataataaataccaggcccttaccttcacaccaagggttgaagagaatgtatgtgtccgtttcggggtttcggctggtgcggatgaccccatagggggtccagacagccacgtacatgcggaacttcccccccaatgcagtctgcagaagactggacagacagccgggacagacctgtcctctctcatgaccaccttcgccccccacttgccactctgcagctcagagaccaaagggactggaatgtaggttcccttattctcctgggggtagagacctacgggaagaaagaagaaacacagccttgagatttcacaagctacctttgttctctgtcaccttaatagctgaaggtggaaataattcattagacttgaaatagtaaaacttgggtttgaatttcacttttgctgccaacttgctgtctgatggcagttacttttcagaactttttgaaggtcatattcgtctggtctatattttttaaaaaagaatgacagtacttacaaagatttttgttggttggtcaatgcactcaaataaggtgtagaaatactaatcttggatgcaaaaacaaaacagagcttacagggtgatgtgaagtcatcagtaccataaattctgctctctaaagacttagaatggctttaaaaagccctaaaaaggga

SEQ ID NO: 48846 - DNA, 1564 bp, Bovine  19866881064966
  misc_feature (1)..(1): n is a, c, g, or t
nggcctccgtgaacacttattaagctggcatactgattcttgctttgtctactggcttaacaagacacagtttagattgaaggaaacttctcatcacctaggctccattcgccacaaacaggaaatgaatttgcttatccctggcccacttactggcagaatggagcaactcattgctaagccatgttttttgtcttttagagagatattgtagctggaaacgtggcagttttctctttcaaagtgacagctttcaaaaagtctacctaacacaatttagcctaattccaaaacatcagaaaatggactgctaaaaaaaaaaatctctcctcatgagccagctgcctccctgtcctcctaccctcctcctaataagaaaaaattggattaaaagtagattattttctccttagtttgtaaaaatattcttcagagaatgattatacctgtcacagatggaacccttaaataagttaagtgtttaggttcacattctaggaattccctagcgaactgagttctccatgcaatctctgataatataaacgataggtataaacactgtctatgaggaggtaggtctctttattgtgaaaacagcaggataaagttttctttctcatattccttttgaatacccagaattttaaaccatcattcattagaatcattaaaaacattttcttaaacagcttattttttttaactgtggctattaatattaaaatgtcctgtactctgagggacttccccagtggttaaaactgcatgcttccaatgtaggagacatgggttcaatccctggttggggaactaagatctcacatgccgtgtggcatggccaaaaaaaagaaaagaaagatgccctgtatcctgaatgtgtaagacatgctcagcagaaactagaatgagaaaactgagtctaatgctctctccagggactaaaacccctctggtctgtttctcctctggcctgaagtatctcagcagcccccaaatgtgcctccttctccccattttctcaatattagcatttttttttaataaacataattctgatcgtgtcacttgctaattagaatccttggcaagtgtcctgtgtctggaggaggaaaggtaaggtcttcaaagcctgttagaatatgattctggcttacttttcccaggcgcctcccccctctattgtcctcactacttaacatacactgttccctctgctagaaatgcccttccacgcactcgtctgcccggaacgctcttactcatctgctaagccccaactcaggtgtccgtccatcatgaagcgctcctcaacctcttccccagtccactgacaccactggtcactcctctcacctgtttgtttcaaccactaggtggacagttgcttgaggccaggggttgacttgttcatttttgtgtccccagagagatcttggcatagttcctgacacaatcattgaacattttcccacaaatcaagagaagtgtgaactggttctacacagcatcatctcttaatcatacactgaaggtcttttttattctttcagtaatcttgaac

SEQ ID NO: 48847 - DNA, 1073 bp, Bovine  19866881082602
  misc_feature (1)..(1): n is a, c, g, or t
nttcctggagcctcctatcctactgagggccgccttttgaatccatgaacttgccttgactttgaccctcgaattctgcctttttgggtgacacacacctattgcgttctttgcatctgagcatggaccctgcttcccccatggctcccagaccagtgacttgtccagaagactaaaactctgtccctcaactggagacaatctcagaggagcacgtgcgacctgtggccagatgggccagatggggcggcaaagtgagcggccttcaacatgcattttgcctctagcagcctcccgtaataacagtaataataatgcacatcctctggtatttctagagggccgtgtttgaccacggggatgtctaggctactgagatgtgcctgacaactttacagagacttgctctgccttgatcctgttggcctcgggtctctttattctctgaggtggaatatcctctaaatcttagcactgaagaaactgggctgtgtttctgagccccagagaccaggctcctaaaatagtacgttatgtaagtgctgtgttttgccactgcacaagaaattgttctagataaagtttattaaacgtggcaagagaaagaagaataggttttcattctgagtggtggagctgggatcctgccagcaccattgacggtgtctggggaaagccaagggagacacagacaggggctgccttgtctcttttcccaaaaatgcaaagaaaactaaatatagccgagtggaaggcatagcaccctggaagatactgaaaggtttaagttattcacatcttcccagctgattctagctcacagatcccctttaatcgtcaatctggaaaatatgctcctgattgacttggaaaactttctctgcaacagaccctccgacaatagaccctgacctgcttgatcaaggtctagaatcctgtgtttttttgcagtacactgcaatgtacgttcagctgcaatgggcagtttattgcatgcagttagtgccacctgcttgcagggtaaagcaaaaaacagtctccgactcccttcaggttattcaggacaagcctgg

SEQ ID NO: 48848 - DNA, 1139 bp, Bovine  19866881151642
  misc_feature (1)..(1): n is a, c, g, or t
ntgtatatgcccatcccaacctcctgtttacccctccccccaccatccagcactttggacatggacactgtgcttgaacccctctctgtctggttcttaaagttacatctgattagttcaagtagcacacactaaagaaagcttgtgtttggtttgggactcacagagcctggattatctgcttaggtgactcaaatcaattagtcagatttcccctggcttcatcctgtgcactgttctgtagacgtcagagagagtcacacaaatgcacctttagcataaatttgaataccctttgtgaacctaaggcgttgggacacaaagcctggtcagcaagcatcgttaagacaagcagcatgtgaaaggcagttttcttgttgctagtataaagcagggaggaactgccagatgtgaagaatcactaacattagggtttatattctggtgttgatagtcacttggaggaaaagttacattaaccatttcaagggaggggttaacctagttgaatttgatccagtagagggcactgtatctctgtccttatgtatatacatgtacgtgaatattacatactattaaatatgccctgtattgcaacaatgtaagataatatggggcatatgtgtatattttacattttcctttaagaacctctttcccccaaggatgagaggctgctaggacatgaaaacatggcctgtagatgagtggtacatggtgaagcatttaaatgaaaagcgggcactgcagtgctgtatgtatatttaccatccttattaacgcacttctgcagtcagatatatattttttcttttcagaatcactgtttttcttgattctggcttttaagggaagggatgactacattttctttatcttcaaggagaaggttaatttcttgaaaacgacttcacggctcaacatgtcaggataactgctgattttaggctttgtttttcgcttgctgcggcccttggagcactgccggtcagcctgggcgcaggcgcgggaggtctgcggtgccccgctccccggcctgcgcgcagtgcaggcgcgctgacaggtgctggcgaggccccggaagacatcgcagggagatgctgcggcggaagaacgccccccgccccgctcaggct

SEQ ID NO: 48849 - DNA, 1555 bp, Bovine  19866881246961
  misc_feature (1)..(1): n is a, c, g, or t
ntttgctaggtgaagggaaagagctgcatgaaaaattgccaaagaagctcatacacaggagtcgcacgctgacacctaaaaggcggaaacacggctccatcggtctgatttcccacatctgcatcgtgagccagatggaggaaaaaactgacttctgaaaggtcactgattttgaaattcctaggacagaaatgcttccaactgggagtaaatccaccagtcactgatgtgtggcaggctaatccactttatggccttcatcaaatatttagagctggtacggtactcagtggaaaaacatagaggataagcaaggaatatttagtgcctatggtttaaatatgcacaagctagacactttattaaaacatcagagccatttttctttgaaaacaagaacctcttagtggatgttagaaacagaattcatgagactatatatccatccatcctaaaggaagtcagttctgaatattcactggagggactgatgctgaagctgaagctccaatactttgggcacctgaggcaaggaactgactcagaaaagaccctgatgctgggaaagattgaaggcgggaggagaaagggatgacacaggatgagatggttggatggaatcaccgactcaatggacatgagtttgagcaagctccgggagttgatgatggacagggaagcctggcatgctgcagtccatggggtcacaaagagtcagacatgactgagcgactgaacaacaactctttttgagattcttttccagtaaaggtcatgacagtgtattgagtagaggtccttgtgctctgcagtcagttatctattttataaatagtagtgtggggataaattgggagactgacatacacgcaccttcctgattcttcaaggtttcttactctgaggtcacctgctatctggtggattcataaatggaataaaactgttaaatatttgtacaattttctggagagagagtctgactctaaaggggctgttgacacccctctgacctgcttgcccgcgcagagagagcagtccactgtgtggtttgcatactgaacctcttccacgcatgggtttatgaaggcatgtatatttaatgacacttttatgaaaataagacaaatgaataaacaggggtggcataaccacaaaattctgtgccatggcttcagagtgtgcccacgccttttccattcaccttgctagtacaggggggactgggcacaagatttgggaactttatagcaaacctttcaccttcatgagagaaaaaattaaacgcgtgtcttactttacctgggtcagtcaaggaagatggcagatttgaatttcacgtggagatggctaagtgaagagggtgtatgacttaaaacaaagcttggaagatacaaaatgtcaactgggaatttagctccttctgtcatgaaacacatcgggcttctgcataagatacgttttctacaagctgaaagaaagctctcttaatttttcagtgatggtggacacgatgccatctctgttcctccttcaacctttccttgctttttct

SEQ ID NO: 48850 - DNA, 1334 bp, Bovine  19866881286998
  misc_feature (1)..(1): n is a, c, g, or t
nctgcattgcaggcggactctttactttttgagccacctgggaaggccttagacactggtacccgccgacagtgagctgactgcctcgtggcagaggagcaagattagaattctgaggataccagtgttactgctgcctctcgagtccctgttggcactgtaaaacgttattgtgatgtccctggctgttttacactagaaagtagaatatatatatttttttaattatttatttggctgtgccgagcctcagatgtggcactcgggatcttcgatcttcgtggcgtgcaagatctctttttttttcttttcagctgtggcatgtgaagtcttagttgcagcatgtgggatccagttccctgagcagggatcaagtccaggccccctgccttgggagtgtggagtcttagccacagaaccaccagggaagccccaggaagtagaatatattatttacagaaattccagagaaacctgggccttacccttttccccagagatccagttattccacaccgaccagctggggacctatccatgagagtagacgggaactggctgtccgagggccacgcctgtggaccagatggagacctttagggacgctgcgtgtgcaaaatagtataaagtttcttttcataaataattacaaaattaaaatcatgctaaattgtaaaacaaaagtaaatacatatacaccaaattcaaagccttctatttttttaatcattttgagtgtaaaattctgagtagatttatggaaatagaactcttcgcagttaactgctgcccgtgtgcacacactctccgaagcccgtgcttcatctgtaccctgagtgtccagagcagctgcggacacagatggaattttattttgctttctcaaacaagcagcatattctttcctgggccaatagccacattttaaggtttcccaaactaggtgagttttgttgttgctattgtttgtttgtttgttttgctactgccagaagctcctgaccacttaggttagcaagcagtaatcaaatggcttggctcccgaaacctggacaggcaccttggctgaactcttaaagcatcggactcccagtctggaacagctatgcgctcatgtctccttttgtggttacagctgccctagaaaatagagggggaaacccagtgagaagaaacaagatttcactcggttctgcttcactagctcacccagagctcccagcttccaggggagcccagcgcctagcaggtgtccggaggaatgaaacacgtgaacctccaaactaacacaggttccgtcagcaaacacagctcagatctaaaccaaacatctc

SEQ ID NO: 48851 - DNA, 911 bp, Bovine  19866881342547
  misc_feature (1)..(1): n is a, c, g, or t
nccttgggacccttctctgctctctgagaccagggggaaagcccccggcacaatgctccaggtcccgcaccagcctccaccctgtgggccagctgaatccctgtgttgtcctctcctctcccccaaatagcccttcattaaccatcaagatcatcagggcttccctggtggctcagctggtagagaatctgcctgcaatgcgggagacctgggttcgatccctgggttgggaagatcccccagagaagggaaaggctacccactccagtgttctggcctggagaattccctggactgtatagtcagtccatagggtcacaaatagttggacacgactgagtgactttcacttcaaccatcaaaatgctgaagaatcttttcctgacttaaagcctcttacaacaatcaacacatgggaaggcagagaaaaattctacatctgattttaataaaatatatttttctcatcaaaatattttgatagcctgggaaaagagatatgtgctcattaaagtttaatgactctctcctgccgttttccatatgaggctcacacactgtgactcacgcgtggtgggtgcagggaacagttaactgggagcacaatttaacccagttcccatctctgtggtcacaggagacatgcgagatatggtcacatgcgagatggggttcttaggcggcaaggacgtgtccactggcctgagcactttggttgacttgatgtggatccagacaggtgggccccatcgtggtccaggttggtctctatttgctccagaaaggagggggaggccaagaacagctgcaaacttgcactcaggcagctccagccctgaggctgagccagggtgcccagaagacagagctctgggcacaggcttgaagggaaaagagaaaggcaggaggct

SEQ ID NO: 48852 - DNA, 1002 bp, Bovine  19866881376519
  misc_feature (1)..(1): n is a, c, g, or t
ncaagggcttagtaactggtggcgagaaagaagacctggtagatgggggcttccggaaagggtctctgggctgcatcggacgtgggtttagaaggttttaaggggacgtcaggggcagaaggaagaaaggagacgtgtgaggagctctgcaacttgggtcaaaccgggtggcatcagaccagcacgtggagacaaatggggaacagagagcaattccattcattccaaagggagaggaaagagccctgatttacaggccttttcacatgcgccgcatgcaaaagctgattattcatgtaagacctggcctgtcgatagtaccgcagggtcttctcggctgctccctcataccatgtttaattctgagtgtaatgatttcaatgacagcgctggggaagaattttccatgattgaaccgcgagcgaggaagttgtgacagagtagtatttcatttcgctaaatagccctctcacctccaggaggtagcacgtgtaagagaccacaatcagcctatgctcctgaacacccatccgtcaacacccctgactgcccaccagcctccctcggccaaatctcggtgcaaaattcgaccctccaaaggtgaccaccatgcacacgtttgctaaaagtgaataatgcctggacagatgttttgtttttacaaagctgtgtaacttttgtgttaaaaaagaatctaggcaagaaaaatagaagcaggaaatataataccccagaaaggattctcattttgtttttaataacacagtctttgcaattgaaccccttactaaccatgaaaaaaatataattaccaattgcattccttcacactcaactaaaattggtgtcaaattctcaagtcatgtaggaattaacatatggtcttagtctaaacgtttgtttacacctgtaaatcatttttgaggccacacgagtactacttgcaaggcaaagtggccagaactacatgcctgtactcacatataaccgactctctcttta

SEQ ID NO: 48853 - DNA, 763 bp, Bovine  19866881546382
  misc_feature (1)..(1): n is a, c, g, or t
nctgttttcctggggggtgctgtcccgacttgccacctccaacccaacgggaaggtccggcctcgtcatccaggcttcattccagcagtggtaattccttagaaaacaccaccccagtgagttaggcttcccgccacagtcagtgctccaggaaatcaaaaagggaccaaaattcctgtggatatgctatctataaaaaatcggaaaccccagcaagaatactgggatgggttgccatttctttctttctttctttttttaataatttttttttactgaaggataattgctgtactagttgccatttttcctccaggggatcttcccaacccagggatcaaacccgtgtctctttcgtctcctgcattgcaggcgggttctttaccactgagccaccagggaagcctataaattattggaatggcttaagctaaatggaagcctcccagagacatactgaggatctggatgcaagtttcctgggcaggtctgtttccactggtacccccgggggcacttgcatggtggcacatggctgtccccccagcttcaaggccacccagagagggtctaatcaatgccttaaacagtttcaatcttacccattgcctgctgcctagtgaaacagaatttactatggcctcaagagatatgggagagaagacaagttaattaaaatcgaaacacatatatctttgaattccatatacatatatataagacttataaaaagcacagccttttgtaacaattaagcaataaa

SEQ ID NO: 48854 - DNA, 1111 bp, Bovine  19866881822398
  misc_feature (1)..(1): n is a, c, g, or t
ntctggagtccaagtgctccacagagagggtcagtccccggagcgctgatgacacccacccggcaggtcttacctctttatttagtggcactcagcttttgtataaaggggaggggagtaaaaagtgtcagtcactcagtcgtgtccaatccttttcaaccccgtggactacagcccgccagcctcctctgtctaagggattttccaggcaagaatactggaagggaattgctattcccttctccaggagatcattccaacccagggattgaacctgggtctcccgcattgaaggcagattctttaccatctgaaccactgggaaaaccccaaaagttgtttctaattcttcactcaaaatctctccttttaccaaaaaggtgagacatttcacctttttgaagaggtcaaatcaccattgcttctaaaggatctcaaacagaaccagactgtgacttaagctgttcaagagtctctttggagataaaatatgggagagcattctagctccacaattttctctgatcccttgccaggcttgactttaaggaccttagaaatggggcttgctttaactttaaaatcacatgaaaataaccaaaaggaaattttcagcccaggtggtgatgaatagccctccttcgccctctgaggttaaacagatactaaaatcaataggcttagcatttatttgtacatgtttgttataaattcttactttctctgggtggggaagccagtggtaatttccacaggggccagaaatcagccctagaagtgagtcctagcagttctcagctcacaatttgcttttcttagctgccccactcctcccactggaggaattataaaatcaaggaggccattcttctttaccccttgcctcccggtagtcacccaggaggagcggtggttcacaaggcatgctgaaggtctgctctgggtaaagtgcacggaggcgttaacacctcagcaatggcgctgtgtttcccttgggtttcactgatggttgctggttgttggccagaggtcgcttaggatcaggaggttgtcagcaggtctgtggtgccgccatcccaactctgcagccctcggacccggtttcttctat

SEQ ID NO: 48855 - DNA, 1104 bp, Bovine  19866881082777
  misc_feature (1)..(1): n is a, c, g, or t
ncctctccagtggaggctgacacaggaattccttggatgtgtgtggtttcaagaccttccatacctaaccttctgtgcttcaccatctcctttccaaactaacaggcagaaaggactccttccctccccatcttgcctggctctgtgaactctgcccatggtccaggcgtgtgctgctcatctagactgtggtgtggagagctctgagctatggccagtcacctggagcctgcggagttagcaccgctggggagcaggactgacctgaggcttaggacttaggacttagtaggcttaggactccttcagatattccctgtccggccacctcgttacccctgcctgccaatcagttttgcatcaataaactttatgttccaggctttgtgagatgaatgaaaggcaagcagctgaagtgtgatctctgaccttggcacgtaaacagcctacagattggacttgacagttaataaaggaaaggccttgcgattctctgatgcctttttgccttgattagattaagcattcataagctttggggaaatcgtcaactggaagaggaagaccccatgagacagtaattcacatctctactcgtacaaccgttcagactgtcagcccttcagtcaataggcaccgacactggtgctgtcctattacctgagctcagctctgtgctaacctctctccagcacaggggcctcgaaaattcccgaagcccacactgtgccctcctggaagacagcgtccagtttggcagtcaggagcactcactttggttcagacaaatctgaacttgaaccctaattctgcctggtgacctttggcaaattatttaacctgtgtgccctcagtttcctcttggggttaataatacccactgccaagggttgtcatcaggactaagtaagaccatctgcacaaggcttgcagcccagggcctgatgctcagctgccagccagacgtgcaggtcccagcacagagcttacagtttgctgtgcaggctctcagaggctggaggctccttcccttcccgacgccctgccagccatgaggagctgatgatgatctccatggtctctgctttccacggtctgagagat

SEQ ID NO: 48856 - DNA, 1149 bp, Bovine  19866881942850
  misc_feature (1)..(1): n is a, c, g, or t
nacctgagtccctgacagtagaagtgctgagttctaacccttggaccaccagggaatttcagattctgaaactctccttaagggccaatgcctgatgaatagtgagactttttaaattagtttaatgataataaattgtaggtgaaatcttccacatctggagagagagattttcctggagaattctgtgatctgtgtaatatgctgtagtgggagttgctttaaatcatgctttttcagtatgttttgttttcctacttatgaggtttctccttgcccttttggtcacttaccttcctcatttttttccagtcctcagatctgactcctcatcagaataaagactagaagtaaaggagtcaggaatgtaccattttaaacatacaagttggatttcacaggctcctagagttgttcctggttcttaccctaagagtaacaatgtttgctgtaatggcaagagctatctccctcagtgggaagcagcagggattatgtttaaagcaagatggtttttcttgaggctatatgaacattttctaacctctcttccatctgtctgcagacaaattcggcatatgacccttgtcggtgttttgcctttgttcatgatctatgtgatgaagataagagttacccaatgcctgagaatagtcttgatgtcatcatccttatatttgttctctcagcaatcgttccagacaagtaagttttaagtcccttaaccagtagcatagcaaaaacaaagctttgatcagggaccttgatctcagagttggaaccttaataaaaatgattttaatgttctgatagacaggaagaagctatttcattctaagcgatagaagcttgtcaaccacttttctaagtttgtcttggagtccacgttggactccaagcatctaaacctctgcctgttgactgcagtggttgattcttcttatgataatggtttaacatctccaaagaatgagggagtcatcttagtggggtatgtggagaaatttcctgttaatgatcacatagcatggtatcttagaactgtgaatgccacagctattcaagaacatctcattattggctttttaaataaaccaggcttattaacagcacaaaatatacagtgaaacttaactcatcaagtgtttt

SEQ ID NO: 48857 - DNA, 1533 bp, Bovine  19866881063071
  misc_feature (1)..(1): n is a, c, g, or t
naacgaccgaagccccattttcctcgacgaggaaaaccatcacaggagaactgcatgtcctgcaacgcagagtggccccaactggttggaactggagaaaatcccttacacagcaacgaagacccagggcagttaaaatgtaaaaaaaaaaaaatgtacatgacactgaatgtgggacccttgaatggggtggcggggggaagcattccttcattcatgcggatgtgaattccaatcacactgatggaatctgatgcattgggatttaatcacaagggactcatgtcactgcttacgctgaccctccaataccttggccagctgatgggaagagtcaactcatttggaaaagaccccgaaacactgaaggcaagaggagaaggcggtgacagaagatgaggcggttggatggcatcacgaactcagtgcacatgagtttgagctgactctgggagatagtgaaggacagggaggcctgctgtgctgcagtccgtgggatctcgaagagtcggacacgactgagcaactaactaccacctcgatagagactcaggtagcttctgggtttacagagagttttacttactaaaaccaactctccctgccctttttgcttctgctctcaaacagctagtcttcgggtatccaactgaaaactcctcacatattgcaacagatttagaatatgcttgtattttttctctgcggtggaaatgaaattgccagagggaaatcttcactgacagtctcattccagagctattttgcccctggcttttcatttttattacattctaatttccaacctgctttaaagtgtgtgcttcaagaaaactcaaaagcaaatgcaagtctctctgtaataagcattacgggatttggtttcccataaagaagctagtacttatgtaaaggtggcttaagaggagttgaataatacatatatatatatttaacatcactgaaggaagctgtttaagccccactaggatttccgttcaggattaagtaagagccgaaacagtcatacactctattgttctgaaattcggttccctcaactatgaaacagaaagtccaattttcagaagtaatgtcccaaagtaactgtccatctgtgcaattagtaaatatgattacttctgctctccatctttctacccttcactgattattagctatatacttcaataaaagaggaatgaaatgaagacgatattctaaaaaatatctcatttttcctaataaggcagttttaaatgccagttggacttttgaagtatcacagtaatttaaacttcaccctacagattatggatttcaattcttttcatacttggatttactgttggctcagtggtaaacaatccacctggcaatgtactagacacgggtttgatccctgggccagggaagatcccctggaggaggaaacggcaacccaccccagtattcttgcctggggaaaaccatggacagggaaggctggtgagctacagtccatggggtcgcaaagagtcagacgcaactgaa

SEQ ID NO: 48858 - DNA, 792 bp, Bovine  19866881082885
  misc_feature (1)..(1): n is a, c, g, or t
ncttttaaaaattgaatattttccctgaatggaggggagagcatattggatttgactgtagtctatttttcttgagggtgaagtcatttttcttgagttgtgtaggagctgctgcagctttaaatcagagatttggtggcagagctgggcacatatgggccataaaatacccagattggagctgattgggatatcaaatggtgggaagacgacccggggtgacaagagaataggtttaccttgtctgaggaaaggagatgttgtttctcttccgtgtaggatgacttattaatgagaacacctgcaaatctgtggcttgtggaagacaatgactggaagaaaccttactttcaaggacaagtcagaagcttctttctttccttttttgtttttttaagagaaagcaggtaaattagaccttttgtagttgttcagtcataagtcacgtctgactgtttgcgacccccatggactgcagcacgccaggctcctctgtcttccaccgtctcctggagtttgttcagactcatgtccatcgagtcggtgatgccatccgaccatctcatcctctgtcgtccccttctcctcctgccttcaatctttcccagtgtcagggtcttttccagtgagtcggctgtttgcagcaggtggccaaaatattggagctttaacttcagtatcagcccttccaatgaacacccaggactgatctcctttaggatggactggttggatctccttgcagtccaagggaccctcaaaagtcttctccaacaccacagttcaaaagta

SEQ ID NO: 48859 - DNA, 1487 bp, Bovine  19866880599161
  misc_feature (1)..(1): n is a, c, g, or t
nttgcctggagaatcccatggagagtggagcctggcaagctatcatccatggggtcgcaaagagtcgaacaacaactgccacacatgagttgggtcccactaaaatttctcagaaacagtaccatcatctctgcatgacccctcttttcagtaggatacctttaaagttgcaaaacaattcatgttccttcaggcacctggaaccctggtgcgccgttgccagactcagttcagattgagaaacagtgggacctgggactgaaacgcctgctgcctgacctctggaggattttcctttttggagttttaataggtgtcatcagcccagtaggggagactcttggcaaactcgagattttctccttccagaagctcactggtcctgcctctgtgaaagggccaaatttgtcagtgggaaaagaattttaagaagtatcatgaagtaaacgattttgccatgctctggatattgacccttactaataaagcttcttacatttttaaacacggcactgaatcatctctttaaataattagtgagtagggagacaggagttcacttagctctttgaaagggaaaaatcgagtagacttaaggtatattgggaaaaagtgaatcaaatggaattgcattaatgtttgcagagttaaatactgggattatttttttcaaagatttttatatgtggctgtccacatagaggagatttattcttaggcctctttcaagttagatatttgttaccattagagagtaaacccactcttcaattattttctttctcagtctcttccctcatccacttcaaaaatgatccaaaccttccagtccctgagtgtgggacagcacggagcagaaggagggaaagaatgacagaaactcagtgaaggccaccagaaagttctgccaagaaacattttgaaaaggttaataatgcttagatgtcaataacgcttttaccttgaagtcatccagctactctgtggagtttaaattatctgtctgaaagtggtgattcagagtttaattatctacttgtaatacatagaaatatttgggtggaccaagttcattcgtggatgttggtcagttttctgagttctaaaaagtgttgctcattataccgtgtgcagcctgtgttcttcacccttgccagccagagttatatcggtttccaaattcagaactgtgacaacattccagcaaaagttgtttttacggtctttgaccaaggagaaaagaaaacgtattggataaagtatgggagaattcttctcctaaatttcctcccaccagaaagaaacaaaatgaaaaaaaaaaaaggaatcagaaaacaaatgggtgtctgggaatccaaaggatacatttcctcataatatacctgtctcagggaaagttcgcagcagaaatgttcgcctgttcctcaaatgtcatagctttcctttggtctctctcggtggatctgatttctcagccatacaaggta

SEQ ID NO: 48860 - DNA, 1460 bp, Bovine  19866880620497
  misc_feature (1)..(1): n is a, c, g, or t
ntggctattttcaacatcccatctgtattagacattaactctccaagtaaaacgttgtctctctttttttaagctttatattttgtattggggtatcatattcaaagaaacaccttatttccaccatcaaacatcaaaaagggatgagaaacaaactttatactagagaataataataagcacaaacctcttaaagtgtttgcttctcagcatcaggataataagttttctgtaactacctgaaaaaaaaaacacaaaaacattatgaaacgaaataaagactttctattaaaatctgttacttcaggatggaaaaataacattttatcatttatctctaatccatgtatttaaatttttacatacatctacattttgaagttagcaattctttcttaaacttcaaattccatgaaactgtggattgaactgtcattactaaaataatagagtcgacacaactgagtgactgaatagcaataactaaaataaaaaatattaccagcttttagggaaaagtacaacttgaggatttttaattcaaataatgttttgtacaaaaagctcaagatgaattgataattctcttacatgcagatgctaatgtcaaaatttgaatctgaacttccggatacaaactgcaaaagaatgactagtgttttatctaatataaagtggaaaatacaaaatcaggactctcagtactctaaaagttataatgagttaccagttcacacagtagatttttatctgctaggactagatacaccattacttcacttgatgaattggtaagacctagtctcactaatatttccaaacatgatttattccaaggttccattcttacaatatccttgaaaatgctagttaaatataagaaaggaagaattattgtaatacaaagagaaagaaacaagagtatatttattaaatattatttgaaccaggctaacaacaataaatacctgcaatttaaatatatcctgaatcaattaaattctagaagtcactgattaacgatgaagcccagaagacaatgcaggcaaccgccacatcacaaacattccagatgcttcttgaagccatgattctctccccacttattaagcctgtgacaactaccactcagtcttttgtattgcctttcaaattgcacactacatatttatttttaaaaaacaaaagaagcaagtagagagacgaaaataaactcaaagacacacagtttgtctagatgaaaagaaaatatgcatttgttgagaaacataggaatgaatttccttacaatgatgcaacccctccaaaaaagtcacaggagtcatcaccctgggtggtaggacgctgagtttcccacaggaagcagctcaggtaattgcttggttgtgtttgtactgagaggcatgccatcatgtgcctacgggcttcttctaggagaaaatctgccgtgtgggtcattt

SEQ ID NO: 48861 - DNA, 1287 bp, Bovine  19866880753429
  misc_feature (1)..(1): n is a, c, g, or t
ncggacctttgttggcaaagtaatgtctcggcttttcaatatgctatctaggttggtcataacttttcttccaaggagtaagcgtctttgaatttcatggctgcagtcaccatctgcagtgattttggattggggggttttaaatcataattgtagtcaataagacaaaaaataattaagcatgttgtatgtcaattagataactgatgaagatgaacataatagacatacaaattactatcctgattcttttttaaaaatacacctattttaaaagaatttaatggaatatttataaaattctgaccataaagcaaaccaaaaagaaatctagaaatagcacagaacacattatctgactgggacctccagtgatactataaataaagaggaagaagagaagagaaagaagagagggatagagagaagaatgaaaattaagaaatttacttgaatctatacttgggtcaaagaaaaaagcaaaactaaaattttgaaatatctacaaaataataatgaaatacattacatattaaaaaaaaatgtaacaacctaaaagagttagggcctaaaccacaatcataaacacactgttaattaagaaagaaggaaaataagcattcaagtcaacaccttagaaaaagaataacaaaataaaattaaggaagtataaaaaggaagaaaaaatggattacgaaaattaaattgcttaatattacaatactaaaagaaaaaagactattagttattggataaataaatccaataactgattctttgaaataatttatgaagtcacaaaccattagctggcctaacccaaaaaaaagaaagttaacaatattagaaagaagaaatagccacaaatatgggagaagtttaaaaccacattcagatgaaggaatatgtatttattcatactttctggagttggtctaaaacatttctcacatattgtatttctttttggtgttcctattatcaatgtcaaaaagtgtcacagcaaagcaaaagaattgttacgttattaaatcaagaaaatcttcaacttctgtggatttttggtttcctctgttgtcagtagcatttttttttttccccacagaccatttctcactgactcgactgattacttcacggtcatgacaatcattgggctacatttcttaaatgattttatcctaaatatagaattctctgatagaggctaaatcaacatcagcaggaaataatatgctaagtataatctcagcctccaccatccccaaactaccgggcaaataaatt

SEQ ID NO: 48862 - DNA, 1229 bp, Bovine  19866880848488
  misc_feature (1)..(1): n is a, c, g, or t
naagcccttttcttaacaaaattaacactcaaaaaactgacagaggaggcaacttaagtctcataaattccatgaaatgtaaggaacataccaaacaaaattacaattcatagttcataataaaagcctgattcaaacaggctgtaaaataaatgacaaattttgaaacaattgtggaaatttgaacactgactggatacttcctgatattaaggaactatttgctaattttgtccaggcttaaaaatagggatattttaagcaaccttacctgttaggtacaccctgaagcacttaccgatgaaatgatagagtgcttggactttgcttccaatgatctggatgtggaacctgggggggaagtgctaaacagaaccagttgtgacttgtttgttggagctggacaatgggtacacagaggctcattatgcttttctctctacctttgtatgtttgaaattttcgataattcaaaccttacatttttcattgtgtcagccaattataattcactgtcatataaaatgtgttaattacatatgaactagcagaaatatttaaccaatcctcatctgtgttgagaccatctatactccaatttgtaccccaaatcttggttaagctcactgtaacacaaacctccaatgtaggatgcttaaattctatatcaagtataacatttgtttccaaacaacaaatgaaaattttcatcttaattaaaatgtttctctgttaaaagaaaaaaaaaaatttagacatcacccttaatatgacaccagtagggggagatagatgctgcatttcctctgaaaaaaaattttttttttcaagaaataatctaaatttaatctacagtctaaatgatttgggcatggaggggaggacattctccagggttttcagtaaaatctcatctccaccctcaattctttagtccttcatttcaaagaaaggagttgttcactctgcattgttataatccattttctagcctaagcacatgttcaaattatggcaacaacactgtccaaattgttcttctgtcacttatatctctttaatggactttctaatattatttaagtatttttttaagtacctcttttgctctcccataggtaacacattttacatttggctaagcaagtactccagtaaacaatgtcactcatttataatacagctaattcttgaatatctactatgtacaaggtacttgtggtcagagc

SEQ ID NO: 48863 - DNA, 2763 bp, Bovine  19866881017082
  misc_feature (1)..(1): n is a, c, g, or t
ngtctccacttacatattagaaaagtcagatttgggtggggtttttttgttttttgtttttttcagtaaatcactagtagagttagtaacagagtccctgtttctgcagaaacctctgcaaagataacaccagaatgacccaggtctgtccttagcaatcaggcttaccggtccttcacaacagatcctcaggagtttttggaaaggaaaggtaaatggagcctgctggaatgccatcttgaaaacagccttacagcaataaaaagcctcagaggttatgccaagaacaggcaattagtcactaaacacaattaatcacagttttgaaagtcacagaccccaattccctcacccaacagtcaaaggcttggctttcccaaccttctaaaagaaaatgtgaaattttctcaaaaactcagtttcatttctgagttgattaaaatttcatcatcaaaaatacaaaaggatgaacgctagaacagtataaatgagttgtacctctttcaataacccagattctatattcactcaccaggcatttacaactaataattttgtgccagatgatgcctttagaagaaaatagatgattatataaccatgaaacccttttcttcaacctagtataacatgttcaaccactttaagtttatttggggtgggctggggatattttcttggattgatatttgtttctgtatataatgttctctaagcagaacttcccatatattttatttctgaggtcctgaaaaaatagaaaataagatttggaaagggtatcacaggatacagctctcaggaatccaaaaatcactttgtccatgtgtagcagaatttttataagtgttcggtcatacagtctgggagttataagattatgtaaacacaatacaaccctctgagagttatctgctgttgtgtggtcttcatcacagctgtaataagttacatgtaggtattttttgtttgtttgttgatttgttcttttctatctcagctctaacttttcatttagagccaaataaggacatcaaattaaaacatgaactgaagagacagatcaggcaggaaattccaaagttaagtttctcattgtaattttaactttgccatgatagacagtttctgtacttactcacatcttgcacgtatatatatatatacagctttacataaagagtcagattctgacctcagtcacacttgttttatttttactgaaaatgtaagagggagcaatgaagaatcaaagaagggccagaggtcagtagactggaaagcaaatgctaaagaagaaggttatgggaggcaggcaaatatgggagattgaaaaagaaatacaaggcacagatggaactgtgttagtagatgcacaatggcatttcaagatttcttaatatgcatgtcttcacatagttcttttcaaatacctgttaaacaacaatttaaaccacattaattttttatttttttatttagagagagcttgagcgtttggttccctttgatttcacctcttgctttataaatcttccgaccagtcattaactgcttgtaaagccctggcacctcatatattgtcacttaattatgttatgctacagtgggcttcctaggaggcaaaaattctacacaaaaacacttataaagaaagccagggcagacagcctgactaagcccgtaagaataaaaattgttgctgacaagggaatagaatcgacaactaaagctttctgaaccaaaggggaaaatgaatagccaagacatttgaattgttgaaggaaaggatgcttcagatctaggcgaggggggaggaacagagcataaaactggaaataggagattaaccactaagcctgctcagaatgaatcataaagagagaaaagggattattagcccaaaggatctaggcaggaagggcccagggcaaagtctcctgatgtatcttgctttcaaatctaagatgttaaaaactgtaccctgttggaagaagggtttctttgctgtgagcctgcccaagacatgagggaataaaaaggactggagaaaaaaaaacagattcaaattgcagggcacaattaaaaaaataataactataagcatctccaggataatactcaatgatggtgaggatgtggtaaaattagcacccacatattactgggggcagcatcagttgggacaatccttttgaaaaataattaaataatatatatcaagaatcataaaactactactagctttaacagagaatttcctttcttggtcatgtatattaaagaaataccttagaattagaaaaatctctattcatagaaatagttaacacaatactataaagttcaaaatggaaacattaaatatgcaataataaaagacaacttaagtgtaatttattgtatatatactcaatggaaaaaagtgatcataaaatcatggttattaaagtatatagaatgatgaagtacttatgaagtaagtatgaaatactccttacccccaaccccaaattgttgaactttaatcaagtttttagacaagatttccaatttacaggaaatacccagctgagaaggcaaactgtccataagcaggtagttcaaaattactgacaactgacccagtttcttcagtaattcagtgatctgggggtaggtaggtggtggtggtttagctgctaagtcgtgttcaactcttgcaaccccatgcactgtaacccactagactcctctgtccacgagatttttcaggcaaaaata

SEQ ID NO: 48864 - DNA, 1154 bp, Bovine  19866881418648
  misc_feature (1)..(1): n is a, c, g, or t
ngtatttttaccagcaagaagaagaaaatataggtaacagaattgagacagtactcaggataaaagggaaaattctcagtatttatttacataaccccccaactaatgagaaatcacagccctagaatgggtggaaatactggttgatgaacaaagatgccacagaagatatttctgctctctgtaactctgtggtagagaacctttaagaaaaaaatttgatgtaagttttcagtaagaaaaatctgcccttatccccagacaatcatgttctcagaaatattataaacattaaagtccactagagaatcttgctcttatgtgcatgttaaaaaaaaaaaggcagactgttccaacaggagtaggaagcaaggcagctgatggtcttagcagttttcctgaatgtagtggaattaacctctcttagagggagaccaggagtttaagaaatcattggaagttgcaaaaataaagtgaagttgctgggagacaaactcataaatagaaatgatgtgccagtaacaggagagcaaaatatatcacaaaaaatatattttctgtgtcacaaaaaatagacacagagcaagatatatcaccaaacttgacttctaccattttttaacccccatttcatgttacttacattctgccatacacatatacacacatatacacacagacccttagagggaaaggattatttcttatttacatttctatgtacaaaagacttagcactgttttgcacacagcagacatttaataagcatattagatgaatggggtgaacttagtttactagttttgaaaggtagaatttataacacaatggtttgaaagtattttaaatgattcatgcaattgatgctaataataataactaactgactgcagccatgaaattaaaagatgcttgctccttggaaagaaagctatgataagcctagacagtgtattaaaaagcacagacatctctttgccaacaaaggtccgtctagtcaaaactatggtttttccaatagttgtgagatttggaccataaagaaggcagagcactgaaaaactgatgcttttgaattatggtgcaggagaagactcttgacaatcccttgaacagcaaggagatcaaaccagtcaatcttaaaggaaatcaa

SEQ ID NO: 48865 - DNA, 801 bp, Bovine  19866881318175
  misc_feature (1)..(1): n is a, c, g, or t
nctttgcaggcctctgagtctcctatagatttctaatctgctttcttggtaaatcaagttataaaagacctttagagtaatgctcaacaatcaggactaaaatgagagaataaattcaaataccactagacgaatagggaatattgctgacataagttgttaataatgaaaatactgaccagcaaagaaactcactgatgtaggatctgtctgaaagcatattgattcttgagtacattaatcccttatagagaagaattaatgtcaaggagtgagtcatgggccaaaatataagatactttaaaatgtgttttcagagcttgcagtgtgctcatctgtggcaacccctggttgttaaacaattcagatgctttctataacctgatcctatgatgcatcagggaaaagaaaacacttccaaagaaactttgttcctcttcaccatctcaaggcagcaaagtaccaattagtactctgggaaggagtaatttatcattttctatcaggatgccttaaaaaaaaagaaaaaaaaaagagagagagagagaaaaagagaaacacatgtaccacgattataatagttcttatttattgtagcaggcactgtccatttatattgttatcttgaatgcattgttgcattgaacaaccaccaaattaaacagctattattatttctgttctgtaggtgtgaaaaattagtttcagagtgttaaataattttatgaatgccatacatcttttaagatacagatcaaggattcaaactcagagatccttgtctcaaaagcttgcacttca

SEQ ID NO: 48866 - DNA, 816 bp, Bovine  19866881349906
  misc_feature (1)..(1): n is a, c, g, or t
naattggactacatttgatcaaccctcatataacaaacagtatattcattgtatgaatgctgaaaagagaagacagctaaggttttcatgtctaatttctgctgatctacatcatgtagagtcggactgagacacacaggcctacgtagaagcttacatttttaaaaaatgcatctggggcacatttgctgtcatccttctgtctaaataaaataatgccttttttattatgaagaaggcagaacatagttttaaggaacaacttttggtaatctgcaatagcataaaatgctctcatctttcagagtggtacttatataatgagattacatctatttatttttgtatatatgaaagattcatagagcttttggcttttttcacataccttgctttggtgtataaatggcatcctgaagtacagtgatgaatttaaaaaaaatttttttttcaaaaatggcattatgtttatagtatatgcaccagagagagcaaactacttatttttgaaaaactaatattaaaaactcttgtgaaagctctataaaagcaatggattttatttcatgaatcaaatccactttagcttttctggtttagctgaactaagattaacatttcagatagaggaaaaatctgcctcgatgccttcattttattaaactagagttgacaacatagaatccatcgtgcaattataaaaggctgcctttagttttagtggtacgatattggatttcagtgtcattatagtttcagcttttatgtactagttaagccaagcaaaatcgctactaaaattaggctttttttttt

SEQ ID NO: 48867 - DNA, 989 bp, Bovine  19866880443289
  misc_feature (1)..(1): n is a, c, g, or t
ncgcgaagcaccagcctcaatgacctgctgggccaggtggagtacatcttctccgacaagacgggcacgctcacccagaacatcatgaccttcaagaagtgctgcgtcaacggagttgtctacggtgggaccccgcccgcgccccgctccccgtgtccagggtctcacagcagtggcccggcatccagcattccacaccgattggtgccctaccactagtgccaaggggcttcctctcacttgggggttggttagctattcctataaaggacgcacgggtcaatatgtttggccactaaggccgctgggtctctggccccagaaagcagctgctgctctcacccggactccgaatttttaatttcatagcatttccacgtgtcacacaagataatattcttttcaggtttctcccaactctctagaaatgtgaaaaacatttatagccttgcaggtcacacagaaactagtcctgaggtggaggcatggttcaccagtctctggtctagttgataagcagcggccacagtttagaccaggagccgacagagggccccactgggcgatattgggcctcatgcgcagtcgcatgacagacctgggcccctgcccttgggttgatgccacctgaccgtcaggtagggcaccaggcccatgctgagtggcaccaatcccagccggtctctgatgtttctagaagtgctacggacccaggtttttgtgaaatcaccctatttttcaaagtaggtggccaagtccaaattttaaaaggacaccaggaggaggtcaaaccaaacatattctacagggctgaaccccattcccatacgccctccagcccaccgccctggagggggtccctgggacacatggctgcatcctattctccaggcagaagctgaggctggggtctttggtggcttgaggcgctgggtccagggtgcaggcctggctggtctagctgcagccggcagccccaggaagcctgg

SEQ ID NO: 48868 - DNA, 1500 bp, Bovine  19866880452798
  misc_feature (1)..(1): n is a, c, g, or t
nctcctgggtgtgggtgggtggtgggggctgccagaacctggcttctccctaggctcgggtacccatggggtcgtcagcaggcacggtcactacatcttcctgagtctttttattgcaacccgaccacacaggaccaagacagatctgaggtggcaccagggcccgtcccgggaaagcgcgcaggcacacagggggagaggaagggaaagggaggggggttgggggttgggcctgggcagcactgcctgaaggggagagcaggacactggacccagcagccacccccacccaagctgccaccagggggcaccagagctcacctcagccacgcactctgggccccccagctggtcaatgagctcatccagggtgttgactggcagctcccggcccagcgcctgcaccttggccagcaggtcctgcttcagccgctcaacccgctccaggactccggggccatgcaggtcccgctgtggggggcacaaggggcctgtggggccagagggtcagggggaactgggccaggctgcctgtccacagccctgctccccctccctgggccctcaagggtgagggagtccctgggtagtgggggtctagaatctttccccgaacccctggctgctcctgctcatgtgcccctgacttcctgctcagagcatgagaagcaaggatggggaaggcggcattgggcctcaccgcggtcatcggctgggagcccgatggcatccacgatgaccacatcgtcgtccaacagggactcgggggaggagtggaagtcactgtccaggccaccgtccgactctgtgctgctgtcgtcactaatgcggatcacacctgctgcctcatacaccaggcctgggtgccttggccccacggggccccgtggccgccctgcaggggagcagtcaagggtcactgcaggcctggtcccagggagactccccaagtggtccatggacaggctgcatgcctggatggttagggcttataggcccaagccctttccccctgtgcagctgtggcatgtctgggcgctgctggtggtggggacgtgttaccgaccctgccagacttccttgacatagcagtgtgtccttgggtggtgcccggggaggccacgtgccccaccctcacaaggtggcactgggtgggtaggccagaggacatgcccaaaccctggggggtggcagtccaggggcccaagtaacctggatactgtcccagacaccctgcagggtgttcccagccagaggggcaggactgggccccaaggctggctgtgtgctctcaggtgagttgcttggtctctctgagcctcacttccccctgatgagaggatgctcagcctttgcctgcaagaacagggtgcagtgtgtgcctgcaggtaggtgctcgggccactcccctatcctggggtgctttgtatgagccccatcctggtcccctgaaccagtgcagtttcagcctcaggctcacttttacctgggaatacgagg

SEQ ID NO: 48869 - DNA, 1920 bp, Bovine  19866880477136
  misc_feature (1)..(1): n is a, c, g, or t
ntgaggagtcatactctgtgatgtcacccctgatttctggcatcccagggacacctacctgagaaactggcagaaggacacaacccacggtccccttgattatgggaatctatgccatgctcttacaacccagccactgtcagccagccctggagaagctccaccatggcagaggctgcctgatatctggcctcccccgcgtcctctccactcccatcactctccctaatggttccctctccactcatcaaacttctgttcatcctgtagggccctattccattggtccctcttctaggatgcctcacctggtctcctgggggtgaatgaacaagaggctcccatggaggcagggtgatcgtgggtggtccaggccaagtgtacagacaaaagcccactggtggtgcagaaaaagtggactccagggaggggtgaatgccagttcctgggtgccctgcagcggctggcagagctgacaagctgcccaggaggttctgatatgagcagtgtatccctctactgtgcttctcccctgtgcctgtccttccctctgcctgtctatcccctccctctatccctagctccctctcctccctccctctgtcccttggtcacccctggcctggccatacccccagccacagggggccatctccttggcaacagtggccatggggtcagtagctggatcaatctcctctcacccgggtagccccgaccctggacacggaaggtgacaaggaagtggggtcaggcctggggtctgggctggagggatgttgtggggttaggacaggggtccctcagccagggcagcggtggcgaggcgtggagagggagagagggtctctggtggtgtggtcagcagagtaagaggtcaagtgagccctgggcacatactgactccaagattttcccaggcctgttcttcccagcactagtcactacgtgcgaggacctggaggaaggctcagtcattgtcccagtttgcagctaataacaaggacacctgactgggccctggtcacagctggccctgaaaaccagggctgtgtccacagcacgccgggcaagtccacattcctgagttggctgccatcacagcttctggaagattccattactgctactgagcagtctgccatcactgcttctagaatattccccccatcaccacttctagaataccccccgtcacagcttctagaatatcccaccattactgtttctagaatattcctccatcaccacttctagaatagcgcactgtcacagcttctagaatagcccaccatcaatgcttctagaatatacccctctcatcaccacttctagaacattctaccatcactgctctgaagagtctacccccaggggcctttaggtttttcccctttgggatcaggccatggaagtttcccaaacacgacagaaggaatgggctctctcccttcctcagcggccgtggggacagcttagcagagcagccacaggggtgagggccacagggggccctgggcacaggtcgatggacctggcctgtgagaacattgatcgctaaatgcgtttgtatagatcctggcacaggtagccctggcccccgggggaagcgaggcagggccaagggagccgtgaggggtcagggagccctccgcaggctgactggggacgctaggggtgcagtacagcacagaagataacctcattcgtgttctcctcttttcgagcctcactttccccatccgggaggtgaagatgtggaggggcttttgcggtgggcctcctgggcccctctatccaaaggaaccacctccatctcagagaggtcaggctgctggcccagaaccacacagcctcagggggtgggggctctgcgacgcgctctgttgatgcaaaagactttctttacccaaggccttc

SEQ ID NO: 48870 - DNA, 1702 bp, Bovine  19866880538327
  misc_feature (1)..(1): n is a, c, g, or t
ntgatgcactattatttttctgagtttgggtgctgctgctagttttctagagggagccacggaaggcgggaggttgtgggttgtgtagggcaccgggagtctccggaacactatgcggctccgccagcctggcgacgagcgttgcggccaccaatccaatttgcgtctgcgagctggggctggccgcaacgttcgctgtggttgacgttcacagcccggccggtgccagaccggagcctgcccctgctctttgctgctcctgttcagtccagggctggccatgattatcagtgtctaggttctgcccttgctcccccaagagttgaggacctttttgcttttcccgcctacaatacgggagacctggtttcgatccctgagttgggaagatcccctggagaagggaaaggcaacccactccagtattcttgcctggagaatcccttggacagaggagcctggcaggctacagtccatggggtcgcaaagagtcagacacactgaagcgacttcactttctttcactttggttttcccgaggcataccccctgcctggtgcaggccctttgccccctcctcgggcccctgatctccgcatttggcttcctctctggggttgatctccagagagcctgtgtcccacagagttgaccatgttcaggcgctctcaacgggcattttctgtcttcctcgaacactgctgtgggtgcacaacgcttgtctccatgtcagtgcacgctgtatccatcgtagaggcctcatatagagacctcgcggttttcctggtggtggtcaggagccagagcttctgtctgagacagctctccacttgatgtttctggcaaaccctaatactttctctgagactcagtcttcttatatgtatagtggataaaaaaacatcccccccaccccgcccccaccaagggtcctagctccggggcctgccaagggagatgtccatccaccttttgttattgacataagagcaattgataatcgttgtgaccattgtgagaagaaatgcaattaggccgggaaagtacactgcaaggctttgggaatcatggagaggaggattatgggaaaaggtgggaagctggacagggggtcagcagcttcacggagaggtcgtgagagagtcactgagtgagcctgggcctgctttcagattgaaaaagccacagcggaggagatacgggctcctggccaacaccgaggaccccaccgagatgacctcgatggacagtgacgaggagacagtctttgagacaaggaacctgagatggtagggtagcactctacacactttcaggggctccttgggtgggtggagggtgggatcagcaggaagagagtcaggtggaccacctgtgcctgtgctcagtgtagtcagcacccagcagcaggggtgggcctggagtgagcactgctttgccgtcacaggctgcgtggcctcatctgaggcccctgtctcaccgtttcagtttcccatttctttaacatgggaaccagctgcatggctggagtaggtgagcacttcctctgtgcctgacactgaaggccaagatcagtgtcagagatagaggatgcctgccaggtgctaccaaagctgggggatggggtctgagactgcctcttcaccgcccagccctaggaagagtgtcccaggcacagggagcagcagagacagaaaggggg

SEQ ID NO: 48871 - DNA, 1888 bp, Bovine  19866880588694
  misc_feature (1)..(1): n is a, c, g, or t
ncagtagaatgggagggggtccctgcccctcctctcctgccagcccagcccagcccctggccgcacccttggcctgcccacacatgctgtgacttttaatcccactgatccagctggaatgtgggtggggttggcaagggtagactgatgggcaggctgattttggggaaggggttcccagaggtgctgacaacagtctggcccccttgctcctcataggtttccaagggaagagctgtgctggggggacacccatgagtaccgcctctgccagcagcccgtatgttctaccccacccatctcttaaactcagttctcccagaagccctcctgcttccctgctcaagcccccaaatatgcttagcaccataccaggtgctcttggggctgtcccagcctctgctgcacccatctctgtccccaggactgtcctccaggggccatgccctttcgagacctccaatgtgccctctacaatggccaccctgtcctaggcacccagaagacctaccagtgggtgcccttctatggtggtgagtagcccagcctcctgttagtccagaggaaacaactcaaaactggccaggaaaagttggcttctaaaaaggaagaggaacttggagggttgcaagaagggcgcattagcactggggctttgaaggatatgtaggagttggtgaagtgaagcagagaaagcatgtggagttgtgaagcaggggcaggaggaggaagggtctatcctgcatagggttgaacaccaagctgaggatttactgggagttgtatccagaggccaagagttctcaaacttataccagtagcaggaaatgttgttgagctgaaaatagcgagttatataactgtgtgcccagggcagcgtgcctccagatttaagggaaacaggcagcttcagacgccacggtgggggtagacacagataagaaaatcctggaatggagaaagttccaaccgtcaactcatgttttttttttttttttccttcaccctaagaattggaggaaatttgccatgatctcactcccacagaggcccgccagggccagcttaggctctattccagcagggtctgccagccagcctcaggaagttgggagatggagggagtttgagtgggggtggggtggagggaacaagaatcagggctgtgagcctgtgggtgtgatcagactatccattgtgccccgctgccaggcagagggggaaacagagtcccaaggagggacagcaacatattcaggatatgcagggctcagcactgaacaaatactttttattgagcacctgccgggtgtagggtccaactgctgagtaagttctgcccaccactctacccagagcctagaacattgtctgggaaatgtgcttgatgactgtttgtggaatgaacatatgaaagaatgagtgaagaataggtaatgacgttaatattgtgtgtgcatgctcagtcgtgtccaactctttgcaactccatggactgtagcccgccaggttcctctgtccatggaattttccaggcaagaatacttggagtgggttgccatttccttctccggatgacgttaataaatgggtcgcctagtattaagacttaacatgaatgaatgaatgaatgaacgaacgaatgaatacattctggcccagtatacgagtctgggacaatcccagggaacgggaagcagaaatgcctaagggtccagtccatgctctgcctcagcctccatgtgttggctttggctgaatctctgagcctcatatgcccaagggaatggctgcctggggaaagactggcaaggagggagctggaattcaaatataaatccccccacattccaccgacttctcccatccccagcacccaaccactgcg

SEQ ID NO: 48872 - DNA, 2058 bp, Bovine  19866880722476
  misc_feature (1)..(1): n is a, c, g, or t
ncccagggagttgagcagagcactacccagacccaggcagagcagcacgaagagtccggagaagtggtagacgcccatctgcagggtctgtgggcaggatgcaggcacatagtccctccaggtcatagcagactccggggggagcccggaccttggaagggagcgggaacagaagttgggccagagagaagggcctggggctacattttcagaggtttcatggacaagagggcactagagctggggttttgtaggatgaatagaatgcacaaaagcaggcaaatacactggtcttgggaatgagcagaggttgactaccctggtgaaggaccacggaaggttcgggggcttccccacgccgaccccacccccacatgcgggggacctgccgcacctccgtcacggcgaagacccgcttcccacaaggcaccatcttgtaccacttgtcgtgcagtaagtcgatgaagccggaggacttgtagcggctgatgaattcggacaggttggaggtgagcggtgaatttctagggagtccgataccatagcctgggggaggccgggcagtgggttgggaccaggctggacgcagacccagaggagcggaaccctcctggagcccgcagatcactggttctggggactcctcaccctcgatgacaaagggtttgcccacggtcagcagcctgcagtccgcgtcgatggacacctcatagtccaggagcgacttgtccatgatgaaggcattgagcttggggggatcgctcctgaggagggcatggggacaggatgagcacccgcgcccgcccgcgtggccccgccccgcgccccgccccgcgcgccctcctcacgtaagcatggcgacgccgtggggagtggtaggtgcactatggcgccgcacgtgcgagtacatctccgggaagcttttcttgatgtaggcctcagcgctgctctcccacaccgtgccgaaacggaagccctgagacgggtggtgcagctgcgggccagtgcccagtcaacacagaagggcctcgacccctgcccccgctcccccctcgcaccccactttcgccgaagaattgatgcttttgaactgtggtgttggagttgagagtcccttggacagcaaggagatccaaccagtcaatcctaaagaaaatcagtcctgaatattcattggaaggacttaggctgaagctgaaactccaatactttggccacctgatgcaaagaactgactccttggaaaagaccctgatgctggggaaaattgaaggcaagaggagaaggggacaacaaaagatgacatggttggatggcatcaccgactcgatggacaggagtctgagcaagttccaggagttgatgatggacagggaaacctgtcatgctgcaatccatggggtaacaaagattctgacaggactgagcgactgaattgaactgaactgaggccacactgaccggggcctccttggtggggctatgaacctccaaaaagctggacctgaggtaagcagggctgtccacaattttctgtggaagaaaaggctctacaactgtgctgttctcaaatggctgttgcatgctttcaattaatcaatttaaaaagtagccacatgtggagagtggctggcccatctagatctccttaatggtttacagaggacactggggtggtggtggattgggcgggcagcatgtgtgctaagttgcttcagtcatgtccaactctttgcgacgctatggactgtatagcctgccatgctcctctgttcatgggattcttcaggcaagaatactggagtggattgccattgtctcctctagagaatcttcctgacccagggatcaaacccatgtctcctaatatgtcttctggattggcaggtggattctttaccattatcgctaactgggaagccctggattgggagtggacagaagaggctaaacaccactcagagacaagatcagccagatccaaacactgggagatactatggggcaaaacacaaaacaacttcaacaaacaaatcactagtaaaaagacaggagtgt

SEQ ID NO: 48873 - DNA, 1001 bp, Bovine  19866880735888
  misc_feature (1)..(1): n is a, c, g, or t
ntacatttggagcacctgtcctgcccttgcttcaaagctcaaatttgccaaatatccctgaaaatgctcagcacagagctgggcacggaaccatcccccactttatgtagattctatacctctgttaatgcagccagatattgattgaaggctgttttgctctgtggcttcaggcatgctctgccccctgaggacctccgagtgggagcatgcctgctgccttcctggaggctgcgggaaggacacagcatccctcagaggggagggagttccctctggcgcacctgggcagtgaagccgctgtagaaggcgaaccagatctggaccatcatgccggccagcgtcttgtacaggaagtagcgcaggaacttgcagacgcgcatgtaggaccagcgtccgtgcaccagcaacagccgccgcaggaagcagaactgggccagcacgtagtcgctgttctgcaccgcctgcatgccctcctgacctgccacccctacgccgatgtctgcagctgcagaggcacacgcaagcctgtcagcccagggaccccagcctgctgctcccacctgctgccagcctcccctagccccgctgcccaccacccactcttgatcatgttgacatcgttggcgccatccccgatggccagggtcaccacattctggtatttcttgaccagcgccacgatcagggccttctgcttgggcgtcacgcggcagcagatgaccgcctggcatcgggaggccagctccacaaaggcccgctcccgccgctcctcagcactccggagggtcttggagtcttcgtgctggggcgccagccccgagctccgcagctggatccccagtgtccgccacatgagggacaggcgcctggcctgcaggaagtccaccctctcctctcccggctcctgccaggactccaacgggtccacgttcacgttctggacaggggcttgggggttccttgcgcagggacagcagtagctggtcctggctcacagg

SEQ ID NO: 48874 - DNA, 1097 bp, Bovine  19866880751437
  misc_feature (1)..(1): n is a, c, g, or t
ntgcaggctctaaatctgtgccaggagtgatcactgggcacccagagcagcatgtgccatgttggaggccagatttaggggagactccagtactcttgcctggaaaatcccatggacggaggagcctggtaggctgcagtccatggggccgctaagagtcggacacgactgagcgacttcacttttcacttttcagtttcatgcattggagaaggaaatggcaacccactccagtgttcttgcctggagaatcccagggacagtggagcctggtgggctgctgtctatggggtcgcacagagtcaggcatgactgaagcgacttagcagcagcagcagtggttgtgtgcactgtatcattaaaactatttgcagttggttttagggcttttctgtttttctttttggtaacgtggctgctgggaagcatggacccactggccaaactcactttgccctcctggcgggcagtcctggactggggcagcatgctcaggctggtgaccagcatccagaatgtcttgggggtctggaggtcatgtagtcactgtgggctaagggatcatctttgaagaaaggctaggcatctggattttcctttgtgaaattgcccagtttctttaaacacagggggcccctcagtctgctcactggccacctaccctgccctgcagagctcgctgtggcccatgacctttggcctggcctgctgtgccgtggagatgatgcacatggcggcaccccgctatgacatggaccgctttggcgtggtcttccgtgccagcccgcgccagtccgacgtgatgattgtggctgggacgctcaccaacaagatggcccctgcgctccgcaaggtgggcccagccccaaggctcacccttactccctgtaccccaccccccagccttgagctgcacacagacccctgtctcttccaggtctacgaccagatgccggagccccgctatgtcgtatccatggggaggtgagtgcccagtggggcagggtcggatggcagacgcgccagtgacacactggcctctctcctgtctcctttctgtgctgccttctcactggggtcatccagaatgtcccctt

SEQ ID NO: 48875 - DNA, 1104 bp, Bovine  19866880756735
  misc_feature (1)..(1): n is a, c, g, or t
ngccctcagtgggcagggcctcagcgggcagcggtgtgcccagcagccagcggggaccagggggtgcagcctgcagcacctgttgggagtgggccacatcgcagcctaggagtacggctgcggggaccggggccttccctccagctggtgcccccaggagtgccaggcgtgcgctcagccctgcatcacccagctcctgccggctcaggtccagcacaagcttcggggcccggcccgcccggcttgtccacaggaccaccaggctgccagggtcacgtacgcggcagagcaccaggccgatgtcctcccaggtgtgagcctgcagcacggataccagcacatccagcagtgtctcaagggggctggcccagtccagctgcaggtggaacgggttctggcagaggggttggtcaagttagggctggcgacctcacagtcccaccacactcttcccacccccatctgtacatgtccaataaacacatatcaccttgagccgatgtcgggagtgggccttatggcagcccaggagtacagctgcggggaccagggccttcccccagccccccgtccccgtctgctagtgcccccaggagtgccaggggtgcacacagcacctgctcctgacaggtgctacaggctgcgtccccgtcccctggctgccgctagctactcaaaggaccttgagtctacctcctcccaccccagcccctgctctatacccctctgtggctccccatcgccatcagcacaaagggtggccctgccttgacctgcagggcctgctcttttgactccagtcactctgaggctttttggattccccagctggaagacctttcctcatctaggtcagccaactcctacacatccttcaaaacccatctccataccatctctctattcagacgtacccaggccaaccaggcactgaagggccccactttgtgcccaggacaccccgaaagttctcctggatttgctttcagtgtgggatgagaactttaccagacacctaggataggcaggatgttgtctgggtggggacagggtgctgagtgcccggagaaaggctggagactactgctcagtccctggcgtggg

SEQ ID NO: 48876 - DNA, 1091 bp, Bovine  19866880813527
  misc_feature (1)..(1): n is a, c, g, or t
nagtggggggcccgggctacggtttacactgaatccacgaaaatcaccgaagcttgaaaagtgctcaatacgccatcgatctctctcggctgatcggcgcggccgctgcagtgggctgggaacaggggcaaggcgcgcaccgcctcccagctcagagccccgcacaccgcccccacttgcccccagcctggggagaacagcccccccagagcacatgcacaccgccaagtctttccccggctgttgtgggtgacacggaattaagacagaaaacctggctggtccactgccgggctgtgggaccctcctgcctttctgaccagcctccctgggcctcagttatacagtctccgtaaagtgggttttgccacacttactccgacgggaattcctggcttcctcgcgtctatctatgggttctgcatctcttcccatctttgtagtgcgtctccattccttctgagctcaggggagaggaaacagtgagtgcaaaggcttggaggccggaggccatgtggggcattcagagaacgcaaggacaggcgaccgggacctgtctctggaagaacgatgggtgacgggtgtttgtggaagctttggtctttaatcttggaggatgtggtgtagcctgaatggttcagcatcttccccctcaaagctatgcctcggttctgacatggcctcccctgccccgcccccagggcccattggtcaccactgcctctcttgacccccccactggttccctggggacctttcaagctcagttccgaaccccccccctccccatcagcactcacataatcccaaagggcagtctgtgacctgtcccactcctcgtctagccccatgccagccagcctgcattgctagggtcacttatgccctctcatccctcctggactttgtcctcctgcctggaggtgtgtccccacccagtgcaccggctaaacctttccttaccctccaagacctcaccccagctctcccaggcagatcccccctgccaaccctggggcctcctttggactgtctggttctgtgtcccatggccatgattgtggggggttgctggggacatttgtagcaga

SEQ ID NO: 48877 - DNA, 2460 bp, Bovine  19866880824032
  misc_feature (1)..(1): n is a, c, g, or t
ngcttacccacatttctcaccaccttctacccctcctttccagatgtttggttcaggaaggcagcatttccagtggccctgggggaaggacgaaaggcaggggccctcccagtgcttggaacaccccgcctggaccagagagcatgtgtgggccctcccggcccactggaagccaactcagccctccctgcagacagggctgcccaggttaccgggtggaagccagaggggcactggcagccctatgcaggactctgaggcccctggccatgatgtgacttataccagtcaccctccctggtgggaatgcggcagccccaggctgaggcctggaaggtgggcaggctgggtgtcctgtctgggggcaccggttcctctggggcggggacaataaaggcagcagtgcttttgtagccggtacccaattccacagcgggccagacccagtgcccctggctcacgggtggggcagggggcagcagatctgggtccatgtcagcctgttctcccacctgtgaccatctggatcatccctaactgtttagagggtcccatgcagaatcccacaaaggagggggaaagatggaggagacctgcccccacctgcctggaagaagaccctgccactagttatctctaggcttagtaaaggagaactcctattcgtccaccaaactgcttaagggctccccttccaggccagcttcagcccagggcccctcaagggcagtgttctctgcttcaccacacactactactccagggccatttctcacagagccccaggctgcagcatccaggtctggagccagccaaggctccccgtgcctactctgcctctctattttcagcctccagtgaaatcactggtgaacttgatcccccatcccaggcaatctgtgctggcactcaggcctctgtcctggcctcctgagtcccacggagacacttgaattccacagcgtgtggctcagtgcccatcctggccacctcagtcccatatttggatcttgaacccctttcaggcatctgagtcccatcagggcaactgatccccattctgggcacctgaaccccttaggggtacctcagtccccatcctgaccatctgggattcatcctggcacctgatctcatgggggtgtttcagtccccatcttggccatctgaggcccatactggtcacctgagtcccattggagtaccttggttcccatcttttgtgatgggcttgatgagttcctctgtgggccttgtttctaagcagagtctggctctggcctattcccccctggaccctataaatttggttgtgggaagcaggaccagtgtggctggcctgtagctctctgcccagcctgaagttaccctcaggcctctggctgaaagcatggaggccacgttgttagaaggagctgtcatcagagggggctgccaccaggtggcagccttgtgctgcacagtctacccaggtgtggcctgagccaaactgtacaggtggggaaataggttcggctgggggccctgtttctcacacctcaactccaccttgttgccatgtccaccatgggatggtctgagcttgctgcccattcaagcctcgtcagcccctctggccagtctccctcagacctgctgacccttcctgcccagcctgagcctgggttcctgaagaaacaccatctctgtcacagtcagctggtcccccctccctccagccggggtcctttgccttggcccccagttgactttcttctctgttggcaatatctcccatcatgccccaaggctgttcacagttcctcttccctttctgatgcgctgttgccacctccaggaggtcttccctgactgcctactaccattctttgggagagccctgtacagagtggccagcaggtccccagtagccagggaaggttgaggaactgaggccacagtccagggaggtactgagatgacatccccgaacccaacgcccctgcgctctccccatctgttcgccctgtgggtctttccacacatctctgcttttttgtctctgtgtctctgtctttatttgattctgaagccttgctcacctccctattggtgtctctcaccatctgcactgcctctcccttggcccccctccatttccgtctgtccctctctgtcactcgggctctctctgtgcctgactcactgggacacacttttaacaggcacgcagacaccgtccacggcccccccaccctgtgatctgcgcccctttcccacagctctgagcgatttctccagcttcaaaaggcacgttaattactctaatgaggtcaggagagaccccacgctctgccatccggagctgggaaacacccgcgtgcccccccagccccgtgcctcctgcccgtccccctcgggtgagaaggggagccccgcccgctacctggcccctgcgcctgttagcgcagtcagcgcccg

SEQ ID NO: 48878 - DNA, 719 bp, Bovine  19866880861922
  misc_feature (1)..(1): n is a, c, g, or t
ncgatggcgcgggtgtgggtaagggccgcacggtggccggcgtcatcctggagaactatctgcggggcaggaagaaggccttgtggtgagctgcctcccctgggtgtggggcgggcccgcagcccgggagggggctcctgaagcctactggcccgcaaccccaggttcagcgtctccaatgatctcaagtacgacgcagagcgcgacctccgggacatcgccgcccccggcatcgcggtgcacgcactgagcaaggtggggtggccgcagccccaaacctggtgtgggtcggggtcacggagcccagctctggccaagccacctcatgcacagatgtccgccctctcccccagatcaagtacggcgacaacactacctcagagggcgtcctcttcgccacctactctgccctgattggtgagagccaggcgggtgggcagcaccgcacgcgcatccggcagatcctggagtggtgcggggaggccttcgatggcgtggtatcctcgatgggatgggggcggagccaagcgcagaggcggggctagaggggcagggtctaggacagggggctgggagaccctgacaagtcccatcctggcaggctctggagaggtgggaagtgcgggaggaattcccggcagggagggtctggtgttgcacgctcgccctcagtgatcgttgctacccgtccctggctggctgcctaggcctcctggctt

SEQ ID NO: 48879 - DNA, 1918 bp, Bovine  19866880897658
  misc_feature (1)..(1): n is a, c, g, or t
nttgtggtgctgaagcagtaatgtaaagaggaggaagattggcccctgtatgaacatggccaagaggttcttgccgaccaccttcccaacgcaggggcgactggaaatacccctctcctgtggggacacaaagagggatagggtcattttagggtcttggttactgggcctctccccattcaggtcaccttgggttcttaagggaaagcaccaagctgaatagacactcaactgaggtctaattggcatggaaaacagtggcattgccacctccttttatttagtgccttagacctcttgtgacatgaccaagatggagttaacttttatggctgctttgctgcacttttaactttgcctacccacccttccaggtcatctaagacctcaagttctcttcctaggggctgctgtttgtccctgcactgtaggattgactcttgtctggcacttcccctcctggagagaagttctcacccaagcgctcaaaggcatcagccatggcctggttccgcaccatgtcgatgaggccccggcccaagcagaagtgaggaaagataaggaagacctgtttcaggatccggctcaccttctgcaacttctgctcaggggcagattaagaaggaggtgggtcagaagccgaggctgaggcccagtctgaccccaacccaaggcccagccttgtgggtcccacctgatcagagaagagctcaagcacgaaggtggccatgctgccattgataccaatgaagagattgatgcaggtgagcacaacataggctgtgctgggcacggagaagaagaaggaggctgggtacatgagtggcgtgatcgaccagctgagggggaacaggagccactgttattgccagacaggctgagcagccctgagaagaatatagatctcccatcccaaactgtgttgtagacctctgtaacatggtcaggtcaagatgagcttttaaggcctccttggcatacccctgaataagatcacacttggagtcctctcagatctccatatcctctccttaggatctgctatagagtcccagctccctcagcagagttgagggagaacaagtcctggaggggctgggaacctcacccatacagtagtagcaacagcaggagggcaggcaggttggcaggggccacatacgccctctgctggaaggccaaaaagatgagcaccacgatgcaggctgacaccaagtagttacactacattggagatggtggttatacttcagtatgctgagctaccagggaagcccacaggcatccttggcattgtgtcccaccccaacctccctgtgctttggataataggacgaggtctccatcatccccaagacttcaggggtgccatcctagacaagttcctgaccagaaagggccagaagaggcagtggcaagtggtggcagggcccccaaccctccaggcggtctgcgtaccatgtcccagagaaagttgccaagccagtagagagtggggggcaggccccccatgcactgcaggtgtttggctcgggtgacacgctcgtcaatgaggacaaggatgaagctggccgggacaaaggacatggcgaagaccatgcagatggagacaagcacgtccaccgaggaggccatcctgggagtgaaggggcatgagctgctcagagaggagctgtgctcaccactgatgggactgaggtccccagggctagacacagctggtggggaatgtcctgagccattttgaactgttaggcagggagagatcgtccaggtctctagtaggatagaagtggatgtgacaaggacgtgcaggcagatgggggagactgcagcccatgaagcctgatgatgccccattaccctggcctaaggggtggagaggggaagttcttgttctctgtttacatagcaagag

SEQ ID NO: 48880 - DNA, 2313 bp, Bovine  19866880921699
  misc_feature (1)..(1): n is a, c, g, or t
nacgccccgcgtgggctcgggcctcggtggccgcctgtgcgcctttgtcctgccgctggccgcgggagaaagttgggcgcggcccgcgctcctcccctcggcgctccggccccgctgccgcctttgtctgggcgcctccagcctggagagcgccctgcgtgcagctcactgcctgggccctgggctcccggaggttccatcccagggataaggaggttgggccgggcagtgccctctccacacccagaaatggcccggggcggttcgctcgcgtgtgaggggggctaggggccagggcattctggcagggtcaggagagagatttggtggcacaaagagggtacaccttaagacttgccagcctgggcaccctgctggggtgagggggagcaggacagggtgagcgaatatccctcccgctgtcagccccgtcagggatctagggtgtgcacaaggaccccctgtgaaagccacttggggggatccagcccgacagcccttctctggccagggtgtgggggtcccgaagcggcattgtcggaggtctttgcagccgccccattgttctctttgttagagagccaggctgggtgacatcaggccggcggccgctcattggccctggagctgcggggcgggcgggccggaggtggtgggcagtgcccggcccagcacacacccacccaccctgttagctgcttgcccaccagcctcaactttctcttgcccacacctctgggctccggcctctctgttggtcagccaggttctagaacttggggtggggcctgggcggagcttgagatggggctgggggaccctgcctctgggacctcggtcacgggagctagagaaaggtgtggggggcttgaattgcaagatgacctgtcaccctaactgccacgggcagaggaccacagggatacctcaacaccaccctctactagttcctggtgggtggggccttggggccagcaagcctgctgcctcggccacaggtacattcagtcattcatttgtccatccttcatgtggacacaaggagggccaggtgtggtgctaggtcgggggactgccataaaggggtccttggctatgggcaagcaccaagagaccccaattgaacacttcccctccctgccttgtcccctcccagcgctgtcccctccctgccctgtccccggtaaccgcactgggacctggaagaagacagctgccccacaccaaatgttcagaagcccgttgggggcagatgtggagactgaggccggggatgccacccaaggtcactaggctggtggatggtggagcatgagggcaagccccctgtggatgcacgtggcagcacctgggggtgtgggcagtaggcagagggccccaagccctggtctcgtctgagccatctggtggctgagtcgtcaggctccgccctgtctcttacttgtgcctctggtacccgtttaccaggtgtccgcctgggttcccactgatggcaggcagcaaggcagggacccccagagctctccccacatctagggtggttcctctctgtgacgggggttgggggagagcacctcaatggaggtttttgtaaaaattctcaagcaagatgctggttctccacccagtcccagccggcacacagttgccgtcccataattagtcaggtgcagggcctcgggggtggagcacacgtgccaggacaggtcagcagcttcagcagcccttgctccccactcttgaagtatctgtggctcccatcttccctcaccagtcctcaggcacagcctggaagacacactatgcccttcttccagtcacagtcccccacccctccccatctaccctgtgggtccctgaacatggagcctgtccctttttcctgctctgctggcccaagtgcaggggtcgtggcctgccctgaacttactcttctgtctgacccctggtctaaggccaccccttccctggagttcatggagggggtgtgcatctgtccagcctcctctggcaaccagagccacaaacctgggctctccctttcctggacaaccccatgttgctccgtgagcctcagtctcctccccactaggtctatgcaacttctgggcaaggggtagggaccatgacccctgtggtgctccctggtccctgaggctgagaggcctgagggactgagaggaccactgagtgggggcctcagcctgccccacggtatcccctagagaggacctgtcacctccaggccaggagggtaaagcggctgaggtggaagtgcagccatagccagctggtagggccggaatttgcact

SEQ ID NO: 48881 - DNA, 3460 bp, Bovine  19866880925806
  misc_feature (1)..(1): n is a, c, g, or t
ncctatgacactgacccttgaggggatgggagtcagggctccactaccagcctgcctcgccctgcccttgcccttggcccccacagccctgcagacaccaatggccaaaaggctgatggcagtgacaccatttttttctcccctaggcttgggcgataaaatgtaaatatacacccaactgcttcttaaaccttggacggaggccagaccagcaacagaatcgttttacagtcttactacagataagtggaaaaaaaaaaaacccacacagaaagagaagcctcttgccctttcttgggggaggcgcaccccttctgagtgcactgcaggctgtggacggagccagcgggccctgatgctgctgtcactggccatccgggggcgggggcgggggcgtgggccaaggacaggacgggctcaagaagcagattctagaaggttagagacagcagctcctctagttcagggaaatcacgtttccttgaaggaaggggagagacagggaacggggtcactctgcatccagaaggccaagtctgttttctcccagaacaccctgtgctcttgccagacctcactgggacggaaaaacatgctctcacctaatgaggaggcgatgtctttcgatgtgcacctttctcaggaccttggcttccgcgctcttcaccttaatcctgcggggacagggacgcccattatgcgccaccagcaatgccaccgaaaccttcgcaaacatattttgctttagatgacaaaagaatcagattcgttttcttctttcgcacccttccactcaaaccaggagtcactgccaaccaggaattcaagcgcctgaggttagaggcagcgaggacccttgtgaatgtggctttttttttttttttcctttccccttttaagacagaaaaaggctggttggatttaagagtaaaaatgaattcaaattgtgacttttatgaggtacatcccactttcaactgcacaaataactcctttgttagatttccagagtggatgataatgtcactaaaagctgtttacagcccagcaggtgtgttttagtttaaaaggatgcgcttcccttttaaactcgagtattcaattactttcccagcctcagggaaagtgtgagctgcggactaagcaggcttaggatcggctctaaagaaagaagggtcgaaggatggggacccggagatgcaggagcaggggctgatcctgtttcattttctacttagaatcaggaattcgcccatcagaaatgcgcaacctgggccattttaatcgtccccagtcatctgtgtccttccaccatgggatgtaacatggtaccctgcgccctccatgcatctgccttctgaatgctaaacaacagtttcttactacaagcacaggctcaaacatcaaatatcccagaacgcagggggctgacacacgtttctgaaagtcacacaaacctatctgtaggaaagaaacaggcctacctgaaccccaacgagagtctaccagcatataatttacacccatcccatttttgtactgatctctctggatatcaataccacatagagattcttcaatttccaaacatacataaaataaaattggttgttttcctcttcgggttactgtgaccacattgataaacaaagaagtgagaagacttaagagcagacttcacttttttttggcggggggggtggggtatcacaaatcccatgcaggaggactacaaaaacacaacacttaactttttgtctaaggagagtatctgaacgtttagaaaatatccttttttcctcttatttttggctgacttttcagttccagccaggacctacattaaaaaaaaaaacacacaaccttgttacaagccaaaaaacacagctgaccctgacaagcagtagcgacatataaacacaaatgcagtgcatgattcttaaagaatataagataggactgcagacacagggaaactgaggcacaaagggacagcagcagaccgagaccaaaagcagggtcttgcctcaagatttggccctcttcccaccacactgctggaaagcgtccccaagacagtcctgttatttactatcagggctgcttgccaaaaatttccttgagttacagccttacatgcctttttatagctgacactgctaaattctttttttttttaaagcgtgagggaaaaaaaaaaaaaaagacacttccagaagtgtaaccttgtaagcactcgaccaaaactccattagaccaggagcaaggaccggtgccaacagatctgagcaccaactgttcaaactcaattattttgctgaagcgactccttaggtatctcctgataaagattttacttgtcacccgaaagtcatttctaattcctgaaattacagaataatggctgtcacctttgcgggccataatcgctttttccatctgcaaaggacatacttggcatccgtcatgatttagactcatgtggcaagtggtaatgatttggcacaaacaaagtacttgaaggtctgacgcgatgtgccctgcaacaaaatttgcacggtggtttataacatcatttgcttcccgcttcgacgcaaccacaattcttaagggcgaaggtgagcttggctgatcctcaagtagatggttcagttccatcatcctgtaccgaggggctccatgccaaaaagaaatgactggccttgatgcctggggaggcgcctggattattttaacaaataaaattcagtcaaattccctcccaaaggttccgcctagattatttttaaaaggctcctgaataaatcgtccccgtgctgagggcctgcctctgacctcggcacgagaggcgttttaaatggtcaaagcttacaaccctcccgtgtttggggagctaacaattgaccccggcgcaaaaaaataaaatcggagaaaaacgactgctcttaaaggacggggacagctgcaggccattcattacatcaaccaggaaggctgatctggctgctgacagaaaagaggagctggggggtgggggtgggggttcgtttgtgcaaagttggggggtgggtcaccacagcaggacactgggcccattagcaggggagggggattcaggcaatagaggtggggattcagacagcaaggaggcgattcagagagaggaagccaggttcacggagcagaagtacgagcgcagacagcagagggtgggttcagggcagggaggagggggctcaagaagcaaaggagaggcttcaaggcgcagaggaaggggttcaggcagaggaggagttcagtgagcaaaggttcagagagcagagagattcaatgaagagaaatgggagatccgctgcacggcggatcaccgccccggggagcctctttcggggttcgcccctccccccaggcccagccccgccgccacggccggcccgaggggcgcagcctgccgggctca

SEQ ID NO: 48882 - DNA, 1715 bp, Bovine  19866880936847
  misc_feature (1)..(1): n is a, c, g, or t
nacttgggcttcggggactcctcgcaggcgtgcatacagctccaggtgctcacgaccggtcagcagctcgaagatggcatccgactgagggcagtagcccatgcggcggtgagctgcagccggttcctgggccacgctggggatgggggatgggggacagggaactcagggcactggctggccctggccatgcgaggggcaagcaggggccttggggctcacccaccctgataagggacaggaggtaactcagggccgggtccattgcagggggactcaaggccaggctgatcctgtccatatatgcgagagcaggggaaggtggggaggaacaagagcccaggagcccctcacctgtggccttccagaatggcctcacccccactgggcagcgtgtccccagtcaccatgcggaatgtggatgttttccctgctccgttcacgcccagcagcccgaaacactgcaggtatacccacagaaggcactcatagaagcccggacaattgtcccagcatctctgacttctgggacaggtttctcagcttccactgggagggctgtgggcaaggggatccctgggcagatactggggtgtgtgagtgggcacaagctgtcacatagcagaagtgctagatgacacacagcatgtatttaatcaatggacacagtagatgttctataaaggtcacttgcagtcagtgctccataaatattgaggcaagagttggctgaatgtttcctgccatgcagtgggtaccgacagcaagagcacctggtgagaattcatgctgggcacacagtcaacccaagatggagaggttgactgaacacagtaggcatttgctaaagagtgatggcaatttataccaacacaccacaggtgttcacaggtgtgtgctagcccctagtaggtggccaggaaatggaccacagcagacaagtttgcacaaagtagttgcttgaatgtgcattggtacagagcaggtgcctactaaatattggttgtgagcaagtgcttaatacagataaagtatggactcataaatgttggtgtttgataaaagttgatcatcacaaaggtggcattcaatacacttttggtacaccaatggtgggggggttcaacaagctttactgtatacagttggtactcaataaatgctaacatatagtaggtgcacatagtaactggcacatgtatgggaggccaggaggtgttcaataacaaatttatcctcactaagatcttgttaatcctattgcacacagtggggatcaataaatgtaaccatgcaataggagcttcatatttgttggctctaaataggagctcaaatactgacagccagtaggtactcagtataggacaacagacagagtaggtgttccatagggggaggtagacacaaacatggtaaagaccagtgggtgtacaatagggcagcctctcacccttgcaccacctggacttacctcaccaggggggatccccaggcacaggcggtcaacagctggtgtcctctgcccagggtacacctgggaggatgaagtccatgagaaaggtgggtgggccagtggaggcccccccaacccagcagtggaggccccccaacccacacccaccttggtcaggtccctcagtaccaacacatccccctgggtggccccttgtactacccgttcccgctcacgggccacatcctcatcctcctct

SEQ ID NO: 48883 - DNA, 765 bp, Bovine  19866881019691
  misc_feature (1)..(1): n is a, c, g, or t
ncgatctcgcgttccacctgcaggcagggcaccatgtatatacacccggtaggcacccacacccgaggcattcatgccccacaggcgagctccacaccccaggccagggacctctctggggacccgcttcggttctggggctcctgggcactgacgcgcagagagtaccttgcagcgggcgcgtagccgcgcagccccgccccctccgcgaggcaccactttgagcgcgaacacagcgctggtggacatgtcggtcagcttgtagcagcggctgaaggcgccctgcagggcaggagagtcaagctgggtgcatacaggtgtgaggacagatggccaggcctcctcacacacacacacagctcacaccttcctacctggatccccaaagcaacacaacacagatgaacacgaaggcacacagatacatcacagacgcctccatacctggacacgctgagtccacagaaccccaacacagtacccagacacacgctacaacgcccgcacacagaaagcacagacctatgacaaacgcagacacacacgcacagggacaacaaaacagagtctgagtccgcaccaaggctcaaaaacacacaacacacccataccctggacataacccacgacacagcactgcacgcccaacaccggttcccgccacacaacgcgcgccgcacagcgagtacatcgcagacccgggcatccacccacgccagccccgcgccagcctccaaactcccgcagacacgcggacacgcagag

SEQ ID NO: 48884 - DNA, 689 bp, Bovine  19866881073706
  misc_feature (1)..(1): n is a, c, g, or t
ncctggaacttgagcaccgcctcacacaccatcctttttgcttctctctcagttctcaccagcacccttggctgtgttgtcccagcttggggctgggctcagtatgagtttgagagaaggaacagctgccctctctggggtgaggatggggctggggggattagacttctcagctcggaccacaaacctctcgcagttgcccaccttggggtcgtggatcccagacagctcctcgaaagtcttgtccccaaccatgacggcagccaggttggctgtgtagctggacagcacgagcaggcagaagatggcccacaggttcatgaggaggcggcccgttgggcacttgggcgtcttgctggataccgtgcgtccaaagaggatggcatagcagaggttgagggcagaggagtaggagaacacggtgtcccggttgcgtccgcggggtgttaggccgaaggggctgcgccactcgtagagggtgaggaagagtgcggtcaggtgcagcgcagcgaagacgcccagccacatggaccagtgcagcggccacatgaaggcgccaatgggcgacgccgtgtcgcgtgcgcgcaccatgatgcccaggctggtggagaagaaagggctggtgaagtccaccacctgtgagcgggccgaattgatgctgaagctggtgacggccatgtgcgcccggc

SEQ ID NO: 48885 - DNA, 889 bp, Bovine  19866881084199
  misc_feature (1)..(1): n is a, c, g, or t
nagttaactctatgctttgctgtctgacctcaggcaggaaccctagcccctgctagcctcagacttctgccctgtagaatgggaataacagtgtctccgcacaagtcatgaagaagtctgagcctcaagtttaccctgtgtaggctagaaggtgattatccagtattggagaggtgttaacctcctcagagcctttctccgaggattacagtctacaaatgagttgcctttttaactttcaattaatttctgcaccccatccccaccccagtcccgggagtgctatggacgctgagattttgccacactgacttttttaacatgacacccaagaagtgatcattaatatcagggtagacagcacataagcctcggctcccgccctgagagcccgtgcccaccaacctgcccttccccaggtgtttcctgttgaatgagattgagaaggaggaaaaggagaagctctggtattactcgcagttgcaggggctatctaagcgcttggatgaactcccgcacgtggagacggtgagctccctgggttgccccggggtcgacagggccccgcctatggcgggaggcatagagcggaggtggaggcctctccctctcccgggagccccctcaccggggcccgtccgctcctcccagcagttctcaatgcagatggatctgatccggcagcagctggaattcgaggcccaacacatccgctcgctgatggaggagcgcttcggcacctcggacgagatggtgcagcgggcgcaggtacggcgcgggcggggcagtgggcgaattagagcgcagatcttgtgggaggagtctgggttagagggcggggttatatgcctgagggcgaatcagagagcagaggctacttgtgggtggg

SEQ ID NO: 48886 - DNA, 1328 bp, Bovine  19866881318238
  misc_feature (1)..(1): n is a, c, g, or t
ncaatgcaagagaccccaatttcattcctgggtcaggaaaatcccctggagaagggaaaagctacccactgcagcactgcagtattctggcctggagaattccactgactgtatagaccatggggtcgcaaagagttggacatgactgagccactttcacttgttcagcgacatcctaggtttgatgcgaggaccccccaccctcacccccggcgtagccaccacgtaaccacccctgggagtggagggacaaactgccccttgttgagacgctctggttttaatctctaattagaatgaataactggatttgctcataaaattagcaagttttgcataggagtgtcaacagatcctcttcgtctactgcagggatgagaaaataaggccggggtcggctggggctccaaccagaactggaagccgaccttaaccaggtctgtggggtcaggatctctggagccacgtggcagcagcaaactgcactttgggagtgactgaagcacgtggcctgaacccctatgcctcagtatcttcactcagctgatttcccaaaagactcccagggtccaacttttcctgccgccctgctgggtctcgaacccttaacttagagctcgcctcactctcctgcgggtcacagcagccgcgctcaagaaaggggcggaatgagtcggtggtgcgcgcggccttgtggggattgtagtcccggcctcgcctccacctcgcgccgactccgcccctggaactacgctcccgtcgtgccccgaggctccaggcggtggcagaggcggagcaggcgggctggttgctaagacttggtgaagcgcagcgcttccgcctgtctcctcaggtaagcacacagccccggggtctcgggcttttacgacccaggctcccgcggaaggcgaggagggcgagggcagggggcgcgcctgcggaggggcgccagcggcgtggggagcaaggcgggggcgccaactggaccaggttcgtgcgcgcgcatcgggcgaacgcggggaggggcgcatgtgcgcgtgcgcgcggggcggccaggtttttgggacccctctttcggcgcccgtcgtccttctgcgcgtgcgctcgcccctgccgtccgttttggagaccccgtgccctaactgcttccactgtgttcaggcctttggtcgtcttggtcacccttgtacctccgtgctgtccgtttacaagctttccgcccgcttagggcgaaacccccagtcttttgtacgtcttgtttgtgcgcgcgctcagtctctcagttgtgtcccactctccgaaccccatggattgtggccctcaggttc

SEQ ID NO: 48887 - DNA, 682 bp, Bovine  19866881361428
  misc_feature (1)..(1): n is a, c, g, or t
ncaggctccacccctgcccagccctcccctgccccagcccacccctcctcccatccaccaccccagtcctctgccacttgctgggctcagggactcacccgcatcacactcctcaccgctggggggggcactctcactcgcctgtccatacaggttctccatggactatatcagaaggagacaggtgagtccagcctgggcttggccctgtgtgaggcccaccctgcaggagacagtcgccacccccctggacagagcgagtggccgtggtccacagagggaacaggggcactcacccgccctgccagcctgaccccaagcgatatgcaggccacccttgctcacctggcctgggtccccagggggcacggacaggaggatgctgctgtccacttcacccatgaggaactcggatacactgcagggtagaggggcaagtgtcaaggggcacatgggtccacatgggtccccacccttccccacccccactcgtccccacgcctaccccaaactcacgtgctgctaaaggagacagcaatggtctccaaggccttctcaaactcctgcttgtctgactcattgttgcactcataatggaaggctggggacagacaaggatgagagaggttggcccagtctgtttgggaggtgaccaaccgtgcaactaattgaggggggaaca

SEQ ID NO: 48888 - DNA, 1055 bp, Bovine  19866881362527
  misc_feature (1)..(1): n is a, c, g, or t
nttgtgcgcatgcgcacagctacaaccccccaccccgaagcagctgcccaccttcagctcggcgtgtgcgcgcagcgccttagccgctcgcaatcacaacaggcgcgcgactccttaccttcccccaaaagaccccagacccgcgcgtgcgcagaacaccttaacgggactacccactcctagcccggctcagggtccatgtagcctccaccgccctttcccccgacccctgagcgccgcgcagctcgccaacggcgcccgggaacatgccgtcgcaccttcctctgcagctcccaggcacagatgtagttcttgcccagctgtgcggccagcaggtactcgccattgagtagcgccaggccgcggggccctgcctggcctccgcggtacgtgagcaagttggcgccagagtgcagctcccacacaacgcagctccataactgggccgccgagtccgtacacacggctacctccatgggcgccgccatcttgccttctccaccgccccggacgtgcgtaatcatcagcgagacgcgggcgactgcgccgtgccggatagagcggcgcacaggttgcctggctcaaggctgccggctgtcctgcgcgcgcgcacacacctcagggcggggagcgggggactgccctatgaaccaggctgagttatcttcctgctctgcgaaaaataaggggtgcaccgcctggttagagctcttagaaggatacttcttccaaaaatagatggcgaaaccaaggcgtagagtctcctgagagcagttagtagcttcagagcctggaggtctggcttggccctttgcactgggcgctttggccaagcacgcaacttcgcagattcttcttcttcttctaattgtgcaaatactgagtaccgacctcacaggatcgagacattgcacgtaaaacaggctacgctcctaacgtaacaggtagtgatagtcgtgtccgactctttgcgaccccatgggctgtagaccaccaggttcttctgtccatgggatttccccggcaagaatactggagtgggttgctattccctc

SEQ ID NO: 48889 - DNA, 970 bp, Bovine  19866881425694
  misc_feature (1)..(1): n is a, c, g, or t
ntctgaaatcccccttcataattaataaatgaagaatatggttgttaatcgatgcagctgtgaagagggtattgattccaacctctcgctattttgtgtgtgtgtgtgtgtgtgccgcttagatttttacacctcatttagaacaaggcttccctggggaactcttaaaaccaaaagatatttgcaaggctggtggagggggcacaaagttggggctgagctggaaaagtgggggtcgagggggtgggagtgggtaggagacaagtagcagtcggcaggatgggagagcggccaaggaaaaattctttatcatcaaagttgccgaatcactgtgtcttccctccaagcacctatttgaatatctgattgagaatcaatcactgcgggtattgggaaaggtcattgggaaaattcacaggagaccatgggggaagttcgtgggtagaaaaataaatcccattattattttttattacacaaacactgcaagtctgtgttggtgaaaatgtagtcaaataaagatcatccaccaccactaccaaaaatatccatctccccattccagagagaaacctttccagatttctcctatacagatgcatacactcctggaaactaatgatacataaatattaaagaattttgtaagaatggcttcgtacactatgaccggcactaaagattaggacctctttctgattgaaaaataataatatgttgccagggtgggaaagtaattagaaaatattgaaaagaacagagaaaagctaattattggtaatttcattccttagaactgaaacaactgttctctccctttaaaaaattttcccaggtttaagcaaacacaaagaatgagattttgtattgtaggatcattttagacatatagaaaagtttgttataaatgagaaattaatgctgatttataccttatagactggttggatttccccagttttctgtaata

SEQ ID NO: 48890 - DNA, 604 bp, Bovine  19866881700776
  misc_feature (1)..(1): n is a, c, g, or t
ncaatcaaggtgtgtgtgtgggctcacctgccggggctgctccacagccttctgggggtcgctcttcaccttgttgctggggtggttggtgatcttggtcactggctgcttaaagatggatgctgtttgcctgaccgggagggccgtgttcaggtcaggcttgccctgtggagacgggatggggcaggtcctcagagtgcatccctgtcagtgaggaagctgtgctccagggcttcagggtccccagcacaccccagcacccctggaccagaggcagtgctatgcccaggcctgggctgatgtgctgccctcggtgagcttggccaggggctgtggacacacacctgccccctcctgcctcgtggccccgtcctctgcagagcatgggccaggtgcccttagccacctctgtcctgcaatcagggcaggggacaaagtccctgaacacttgtttattggagacttgtagacactacaggcgccaggtgcccaagcacagaccgcagctgggcctctcctgggcaggtgacgggcaggtcccgatcttccttctgcttttccatagccgccgagtctcccccaaggagcagccaggcatctaact

SEQ ID NO: 48891 - DNA, 639 bp, Bovine  19866882051450
  misc_feature (1)..(1): n is a, c, g, or t
ntgtctggagcctgtgggtgtgggggccccagcgggcctgcgccgtgtgtgtctgaatctgccatacatagggtgggcttgggggccatgcggcatcagtcggcatccagcttcaccaaggggtgctcaccaagtaggtgctggagaccagggtctgcgcccgtgagagcagctcgagtgggggcagggtggcatggggctctcttgtgctgaacagatgcccccccagcacccccatatctcaggttcttgtgccctcggggccttgcccggctgtggtcatgtgggttctcgcctcgcccagagcaggacaccacggtggtgggtgcagtgttgctgacccctagaggggatgtacgagcgactgagcaagcatgtgccccccagcccccctcctctgccaaggccgcccggggcagttaccctggtctcatctctcgccaggcctgggcacctcttctccagagccaccaggcttcggcccacactttgtttacactcttttggtcaggctgagcagtgatgtggcctaggtaggtggtgcctcctcctccatggtcccccctgtctgcgcccgggccacggacggcacctcctctgctgttctgggcgggggtggactcggcggtgccctcgggg

SEQ ID NO: 48892 - DNA, 1056 bp, Bovine  19866882151570
  misc_feature (1)..(1): n is a, c, g, or t
ncttcttttgtagcgcataaatggaacttcaccaaggtaagggggttaggggccctggcggggtggacagacacagccaccagccacagatgtactgctttgagagtccagagccatggggacggcaggtaggggccactggctcacttcagccccacggtggcctccttgcagttcctcattgacaagaacggctgtgtggtgaagcggtatggtcccatggaagagcccctggtaggtgcctgtctggggagcccgctggggggactcgggaaaaggcatccctcacccccttctcccccgcaggtgatagagaaggacctgccgtgctacctctagctccacaaggtgctgcccctacccaagcctgttgcctgtgttccgagaagccttcccccggtgcctatgacggtctgtctgaaaaccagcccctggtggggcagacctgagaacctggcgtgcactccttccggaggaaggtcccttggcctggctgcggcttggcaacccccacctctggctgccttgtgggaataaaatgtacaacacagattggcttgctcctggcttttgctaacccagggctcaggggcaggtgtcatcaactccctaggctgaggggggtgggggcaagtgggaggtggagttccttcaggattcagagggctccacctgtcctgcctggggttgctaatctcctcagcccagcctagcccggcccagccgctgggggagataatgcctcttcattggctactgctctcagccttggtctcctccagtgtacccaggtgtggggacatcaggggacttgggctggtgaccctgctgttgggaggcccgctgcacccaggctgggcatcaggccaagctggtttgagcaccgagccatgcctggcagggcctgctcaccatgctggccttgtgaatgaagacacagagtccgggcatcaggcctgcccatgggctttaccttggtggatgcagccccactccccgggaagggctgtggggtgggtacagcctgcctgctgctcaaaggggccatcctgtgag

SEQ ID NO: 48893 - DNA, 1273 bp, Bovine  19866880370943
  misc_feature (1)..(1): n is a, c, g, or t
ngtagttttcaaaagaagagtgatcctcgcctgaggcatctttcaggtccagaggtttggcttgtggggaaatggaccatgaggccacacccagcggttcttagcagctgagaagttgaccccatgtgggctctgggctgggaaagttcctagagggctgtgagcatgccacagcacatcccggcactgcactcccacgtagggtcactcccacaggcccctggcaagctcacatggtgagcgcagaggcagacataaacacgcacacagacagttggccccctggcccccctacctccattctcaagttacagggttaaagacgtcctattcacagccaagggggagggatgagagagggggtgctgaagcagggaaccatctggttcagatcaagattgctcattcaggaccccagtggaactcccagagcctgccttcgtgatggctcacagatttccctccctcccccaacttcccactgagaagctgaaaactgggctaggaagggatcgacccataggcaaatctgccaaaggaagataagaaaacaaaactaaaccaaaagaaaaaaaaccagatacaagcaagtctccaccacctctctgagccctggctccctctttccttcaaaccctgaacaccacgactaaacttgagatcaccacctacagtcactacgtcttcctccacaaagagctcagggggcacctggcagcatcattccctttgccgccaaccatctccaaagttagcagcagaagcaagataagggttaggggtgtggtctcccagacttctcttatgccgccatctccaccaatgtaggaggttccctccatctcggagggatggtggagtccaccacgcgtaatgagaggaagaaatgaccaaccagcttccagacaactgtcccaaagacaagatgggagtgtgcatcactggctaggactgacttactgagggactccagagtgccctgagccccctcggcagctttagctgaaagaggctgccactcccttcccaccaccagcacctctcccctttcccccaacaccaccttagactctgttcttcagcgttttactgtagctgaaagcaagaggcaagatgggagatggatgcagttggcaagaaatagaaatcaaaaggctaacttgagtaaatgagtgatgggtggggggactctacaggcaaaggaggccagaaattaaatacaggaaggaggagggggaaacagaagtgggaaaacgccaaaagggagactaaa

SEQ ID NO: 48894 - DNA, 2323 bp, Bovine  19866880404675
  misc_feature (1)..(1): n is a, c, g, or t
ntataacttcccaagcagggggatgttaagaaaaaggaagctttctaatgtgcctcttttttgggaagaagaatctttccaagaaggccccagcagatacctccttatgtctcattggcccaagctggttcatcccgacaccagttcctggtaaaagggaacaggcttactgtggttgcctgtccaggcttgcctcatcttctgggactgggttctttgccgcctgagccaaatcaggactctgttggcaggaaagaagggggagtggctgctggtaggcaaccaacggtgtcggccacagatggcaaaacacacaaacagcgattctgtgtcgtttgtttttttaattttaaagaaggaaaactaaaattgttgaccacattagcaaggaagagtaaggtagagtaagaaagggaataccattcttaaatcacatcaggtttctgccttgttaaatagaacagtactactgaaaaccttagacctcattaggaaagtgtattatgccagcaatttaagatagccactaaaagaggaaagaagagggatataatttccaacccaggagggaaagaagtggtgggagtagggataatgtgtcaatccaacaaggcaggaaaaggaagaagaactaaaggaaaactagtaaagagaaaacaaagagtaacacgaccccagatgcatcagggtaaagggttatactcgtatgttaaacaactaccagataaaaggcaaataacgagtggtctgaagcctggagagactggtcagtgggcacaggggctgaacaggaaccaccctggccttcgccatagaagtggttctgttctttaaataacttgtttttcccttgtgctatattctggcctctcctcaattgtttctgtctgggtttgccttgctactgagatagtattgtttttccagaccgcttcctgccttctgtatatacgtataacaaaaccctggattctgtcctgccacaggacaccaacacaccatgcagggactcgtttaagggcaggtgtggtgcagcgccgagaccctgcaccccccgtccccctgccctgctgcttgcccatgccccaggactcagcatccctcccttggagcctgtttcttagggtgcaccatcgatcctctcgcaatgaagactgatggtttatttctcccgggcttattggaaagttagccaggctggaagagctgtattagctcttgctttctggtttcctggctgccaactctggacagcgtcagcagtcctggagctgagatctcagactgaacatccagtcagagtgaggtgtcctgcagtaagacgggctcctgaagcagacactgccggaggggttgtaactggggagcaagggggcctgagtcactaggataactgaggggtctgtgccagaggctggtgccagtgtgtggcaatggatgagttcaggcagccaggcatgcagaggtcaagccagccgttctcagatcaaggaggtgggctccagttcagtgagaaggggggttgtcgggtccctccctccgcatcttgactgattcccacccccaccccccaggcatctgctgttgccacacccaggaggcaggcaatttgctgggttgctcggtggccaggttctgggacacagggagcactttgattattgtaccccagtaagtgggaaaagcctctctgtaaggaaggcagtgagagcctgtggagggagccctggccttggagccatcagccctgggatggcattaaagctccgtccctcaccgcctggctgacctcgttcggctgtcttgggacttctgtgaataccgaatgagaggctgtgcctgtgaatgctcagaaacgcggaaagcatcacacatgtgagtactaatctgtggcttgatgcctttccgttgaggctctgagacacatccttaggccgcgtgtctgggtggaaagagcgagctttatcagagtctcgggctgggattttctttccttctgtccaacccctccagcttcaagcagccgccctccccccagcctctgctccttattttgacgtttcttttctctgcctgccaagaagattgtgttcagctgcgctggtctgaggctgtgctatcctgtgcttcattaggttaattcgatggcttgtctcctgggaacggaccagagactggctctaaaaccgcactcgcctccaaaacccagttcccactgttctcctttggggctggctttgctgctcagtcccatatgcctgcttttccttttcttccacctgcaagctggctagggcctcctttggcttcccttggttctttg

SEQ ID NO: 48895 - DNA, 1246 bp, Bovine  19866880410382
  misc_feature (1)..(1): n is a, c, g, or t
naggactcacaggactctgcatgtaactgtactcacagctgtgatttattgcaatgaaaagcaaaattagcaaaaggaaaaggccatgttgaaaaggccagaggaaaccagtctcaagcttgcaacaatcctctcctagaggagtcagaagctccattttattcctgcttaattcctctagccacagtcagtaacgacacacagaaagtgttgtcaaagaagctccttagagactatgctcagggtttttattggggtcctgccacatggtcattctttgcctcacaggtaccaaaattccagactcctggaaggaaagcagctgttatcataaacctcatatttttttagaaacatagttagtgaacccttcagcagttttgggaatggtgggaaccttctcatcatccaggctcccagaagcctgccagggttcagctttccaagctggctttctgaaggctagcagtcagacctgctgtgttaagtcctgtgtatacagtacccatgaagcatttggagatttggcactggagttcaggcagaatcagaacaggggtgtaaaactgacaagttaccacaaataaataaaaaagtattgtaaaggttatggtttgtactcgagtttaaaactagttttcagcatcaggtattccctaaagacagttactgagaattggtttcaaatctattttaacctacaaccctatgaataatacaaatatagacctaaacatactcgtatctggttttgtccattctgtttcttgagtggctggtgtaaataaatgttttaaaacactgcttcccaatggttgggtaagaccccttgtattttaccatttagacttaagtacattagcttgataaatgtaattgaccggtgaacaatttgggggttatgagcccccaacccacgctgcagttgaaagtccccaaataacattgcacctccatatatgtggccccacattcaaccagccatgggttgagtagtactgtagcatttatccttgaataagtgaacccttgaagttcaaacccgatgtttaacagtcaattgtaactcatggtattctgttatcaggtgtctctgctcttaagtgtttcttttcattcccattcagatgagtaatttgcagattaaggaagaaaaagtcaaaccagataccaatggtgagtcacaagtaactacgatctacatgtgtgcttccgctttgtactcttagctgcagcgggaaagcag

SEQ ID NO: 48896 - DNA, 799 bp, Bovine  19866880517312
  misc_feature (1)..(1): n is a, c, g, or t
ntcctccctggtccctgtcactcttaccggcctccttggtgctgtgcaggggataccgcttggctcctctatgacacctacgggttccccgtggatctcactgcactgattgctgaagagaaggggctggtggtggacatggatggctttgacgaggagaggaaactggcccaggtaaagtgtttatggtgtgagcgggaaactcagcgccaagcaaggtaggacttggctgcaaagcacgagtttcctcccattaaagtttttaaaatttctgtttttcccaagaccagtgagtctcaagtgggggcggtttggcagtaatgtctaaagacatttctcgggtttctcagcttggggggcaggtgctgctgccatgtggtgggttgaggccaggcatgctgctcagcctccttcagtggacagcctcccagagcaagagttcccagctccaaatgtcatggtgctgagatcagaaaaactctgtttcacagctttacatggggcatggtttagtaattttgagtctttcagagttctttttctctgacattaaggtaacttgtgcttatttctcttgctggcagctgaaatcacagggcaagggagctggtggggaggacctcattatgctggacatttatgctattgaagagctccgggaaaagggtctggaggcaacagatgattccccgaagtacagttaccattcggattccagtggaacctacggtatgttcatttgttcatctagggtggttttcaagcaatgcgtctcaagattgggaacccaaaatatcca

SEQ ID NO: 48897 - DNA, 3704 bp, Bovine  19866880524733
  misc_feature (1)..(1): n is a, c, g, or t
ncattgtaaattggcttattaaaactggttcacaagccctccttttttccttttgtgattgctttggtcttggattttcagtgtaggactaaaaattcaagtcagatttcagttactaggataattttctttgaattttaaatttttgtaagtaaatgcatagatttttaatgaactcggtattcagtggatttgctttcaatttagctggagagttaatttcatgattgatttattagccctttgaaagtataaaaagtggtatctgtagttcatgaagactgaaaaacatcatcacattttgtttagcatctttttaaaaccaattaaaagcttttctaaaatggattgaacaggagaaaataaaacatgttcccgaggtctttatttcaatcaagtttccctgtgttctgcaggagaagagatcgaggggggatagaaaaattgaaaagggctgtcccagcagggagccacgccggagaaaagggctgctctgagaactcagcagcagcagctaagaaagctcccagcctgcttcatctacatgcagagtcacacaaggcacgggggtgctcaccgtcaccacagaggtttcacatgtgcttccctgctgattcctgtgaaaagctaacaattggcttggaggggaaaagaccactgcagttcaccctccctgagctggacgtacaatttgtccagtgttaggaaatgtccggcttagcagtgagaggctcgaagacacccctccttccagtaagattcctaaagccggctcttttgctcgatgacactggggctcttttcaagttttgcagatttatggaagtcgaggggaatgtgcttttcaggatcaggaggatgaaagccttagtctcttcctgtcaagaaagaggcagtaaggccaggtaaaccttcttgcaaactgtaacacgaatggctttgttactttcctcctagatctcttctggcaccttctttttttttttttttttttccttccgggagacaaagtgcctgaaaaggaactcctcagctgtgaaatgacatgacttcctagtttcctcaacaagtgtgagagtagttaagcccattaacccgactgccttaatgtttacctgacagtttttgcaaatcagtttggaagacctcatacatatgtaccagagtaaccttgtaccttacagagaaccactgctttttcacttcagtgcttcccagcccttttcatatcacagcatatagaaaataataacatctgatgatatagttgggtaagtggatgaggccagtcacagctggccagaggtgcatccccaccaggtgctaacccccttcccaacggctaaatagtactgatactatagaacacttacagtttattcacagcattccagctggcagaatctttggaaactgtgaacttttacaaaagaagaccactccaatagcaatattactgaagtaggactcaaaagatctcacagttgttaagacttttagctaaaaaataaagttgttgagaaaaattccttcctcactgctctggcatttagaaatattaacctgagaagaaagaagtagggcttagagctgggaagggtgtaatatgtgaaccaataagacttagtaaattcctgatgggaactcaggcagacatgtttgtttctccatgggtttcatttaaggtcaccgatctctagacaagattgcttttcctgtaatccttatatgatctctcagtgcaatcttacttcagatatgttattaggaagtcttggtgatattaagcaactcctcaggctttgggttgctttagcgaaataagcaaataatggaagagactccaactcatgcaggcctaaacacgaatatctctctgtctatctgttcaaaattaactcgggctaatgactataatatgactcaataagatatataaccactttaggaaagaggtttagtcattttgccagacacattaattgtaatcactgatgtggtgacttttgcattagacttctttattgaaaaaaatctgggtgatgattgacagttcagtagcccagttttcccatttaactcagtgatattagatggctaccatagtttataaataaattctctaaaagtatacttcgcttagtagattatctcagacagttctgtgtaagttatatatatatatagagagagagagacagttttaagttcatcaaaatcagtgaaagaagtttggtgagtccttttataaaatattgctacaaatatctgctaaataaaaccatgttttcttttttttgctttttttttgtattttattttttaaattatttattttaattggaggctaattactttatagtactatggtggtttttgccatacatcaacatgaatcagccatgggtatacatgtttccccccgccccgtcccgaatccccctcaactttattgtattaataattgtttgtttcttctttcagtagttcatttctttatttcctatttaattgaagtattgttaaaatataaatataaatgtatccagccaaagatagaaaatataaaagaaacagaaaacatgattttctgaaatttttcatctatagttataattttcattcattaattatcaccatttaaccatattaatatggtaacatattaatatgttcatgttgcaaaaagtgttatctcccttggaagatgtgtctgggtgaatatgatagtcctaagaagcagcagcatatagtggaaggcatatagagctaatagtaaaaattgccatattttgaactctgcacagtatgccagagattttattaacaattttataagcattatgtcatttaccctcaccattgcctttcattgtttctgttctacagttgatgaaactgagacttaaataacttcctcaaggtcatgtagctagtatgtagtaagatcaggattaaaagcctcctttttagccattgtgctgtgttgccaccacagtcacttaaaatttagcagtgctaaaacaaaatttgaatgattcattttatcccagctatagcttccagatggttaggactatagttacagtatgaaattatgttagaaaactatttcctctacctatgagatttgtgttatgtaatttatagattttttatgaatttagaaaatagatctcaatttatattaggggattttgcttgaatacctatattatcccttccatttccttttgtaaacgtcatttattatggaggtgtaggatatatatttttactcctttagttgactatttggcatttatattgccatctgcttggtgaaattgaattagataaacttgagcaatactttcttttaaagaaagacatacctttgcaataataattcgttagaaatggaatgggaggtagaaggaaacaggaagatgagaggtaagtagaaaggaagaggggccaaaaggtgctagaggtgaaagggaggagaggaaacagataattgatcttccctcagtggaaagaaggcctaatgccagaattcatgttgtgccttgtgaccttagaaaaacaatcttgcttctacttggtggtttaacagtggccattggatccattttcttttagtttgttgatttttaagggaatagaagaatcctctcctttcacacctttagatttctccagaaaatatatatatactagat

SEQ ID NO: 48898 - DNA, 1593 bp, Bovine  19866880779537
  misc_feature (1)..(1): n is a, c, g, or t
ntgctgcctaaggatttcatagtctttaactgttttacagactaccttttcttcaagttgactctaataatacagttcaaatctaaattctcattaactagcatcaagaaactgtttccaaggaagggagtgagggtcattttaaatttttcacactgaaccaacaggattctcttcaacaatgaagactttgggggtggactcctaagatagtacctactttctggtatctactgattaagaaaaatgattgtattattcatgattctattttattgaccatacacagaaatatctatatatatatatatgtgataatcagtagtagaataccaggcatattattttcggtacagctagagctcagttttggggtctttttggccatgatgcatggcctgtggaatcttaagttccctcacctgggactgaacttgtgcccccttgcaggggaaagtgcaagcacagtctgaaccactgaaccaacagggaagactctagagcttagttttcatatgggaacaaccaacactagagattgagagctgtggggctagatttgggtttaaaatccagctcacctctcagttgtgtggcctcaagtcactggtaaaatttggatatcctcgatttccatgtaaagaccctgcggaatcagaaatgtgtggaagtcatctaagatgctgcacggcagataggtggcacatacgtgagtgttacaactgtgtcctcacgttttgcctgaaatccaaccctagtctctcctgaatgcttcatataagaattgttttctaaaatgttacgtttgtgattaagctgactggccctgaaaatgcagttccaggcttcgcgtggtttaacttatagtttctctattttatgacagtggaagtgatatgcattcagtaaaaatcatacttttgaattttgatctttacctgggccagcgatatccagtacgatattcactactggggtgtaaccatctcataaatggaggaaaacctgcagagtatacagatatcttttaagctaattaatgttaggttacctatgttacctgcaattaccaatcatttagcagtctgtgtgggtgcttggtcccttaaatttacacaactgaaatcacaatcttccatctcaggttttcaggaatcaaccaggatttgtcaaatacttgccaaatactcagcatcaggaacagtgaattattaggactgaagatgaaacattagactcaaacactagcaacaagaatgggacttttctattagtaatcctcaattcatatgatagtgaaataactacaccctagaatgatgtctcatggtactgttagaaggctatcagtgtgttttaaaaggtaattgtaaaaatggcttatttaccttgttttattaagtcactagaacttcgatctcaatgcttaatttcccccaacagtttagctatttccaagaaaaacaaccatttgaagactgacattatagataacaaatactattaccttgaactggtttctctttatcagatggtttcagtaaaaacctgtctaccctcgttgccatatcatatctgttaacacagcaaaag

SEQ ID NO: 48899 - DNA, 873 bp, Bovine  19866880804495
  misc_feature (1)..(1): n is a, c, g, or t
nttggaactaactttcctgtcaggtagaaaataaacttgtaaaacattatatactatttgttcccatttttacttgtgagcacacaccaccccctatatacatctgtatgcaaatagagaaaagtcctgactggttagttatatgcaaaattccaaagaattgtgacttctgaaaaatgagtcaaagagtattttcactttctacctctatactgtttgaatactttgccacaataatatattactttaaaaatcttattattaaaccccatttcacaccaaagcagtctaaccaggctatgctcagcctttggagacacaggagtctatagtcaagtttgtgagaaaaggcttgccccttccaggaagatgaaccagcctgatgaagaaaggaacaaactggttcttaccaggaatggttttgctgtctcccaggctctgaattttcctgtccaggatgcgacgccctctgctgagagtcttgagaaactgcacttcttcttcattaatgatgtccttcaccatatctgggtccttcttcagctcaggaaacgcatctccctggcaaatgggaaacacagattttaggccaataaagacaaggattatatcacgactcctctaaaaattctcattaacagtgtgacatcgcccaccctaccccaattaaggtatgcactttagtacagaagaggtgagcaggaaatacacctaccagagactggacaacaacatctactaacgtagcaaagaaacccctgctggcgttgagcttctcgtgagagtatcgaacagcccggcggagaatccgtctcaacacatacctgtaagagagagaacctaagaccccgctagacagcattcccagtcaag

SEQ ID NO: 48900 - DNA, 2278 bp, Bovine  19866880806468
  misc_feature (1)..(1): n is a, c, g, or t
ngagtaactgtccttacctcactgagttgggaaaagatctaatgagctactagatgaaaaggtgctaagtcaaagaagagaaaataatggcggttgggaggtttgctctaggtgctcgggactgggggtggggtgctggggggcaggtcccagccgtgttctgactgcagagctggaaatacggcagaagcgagagcagatccctgccggaacgctgctgctggctgtggaggaccctgaggttcacgtgggcagtggaggagccaccctcaatgccctgctggtggctgctgagcacctgagcgcccgcgcaggcttcaccgtgagtggtcctgatgtcccctcctcagcacggcagggcgggggcttcaagcagggctttccctggtccccgctcctcgggccccactgccctgccccattcaggatcagcatcatgtttgcatctgtagattgggcagactcacccaggtgagggcaaaacacagggccagcctttggtagtagttcagagccagtgtcggaactcttgaaaaatccgtcttgccaccctgggctctccttcccacgtggcagtggcttgctggagctgggatgcagcagcccccgagggtagggcaccagcccacgtcccgcacacacccagtcacttcagtcggtcaccctgctggcgtggtgccctggcacagggagggagggtagctgcagctgtggctgcagcctggcactgggagtggtgccagtgagccgggggaccactgtgtggctgccagccagccccatgctatcgtctgcaagcttccctacaagtggggcaggggtggccccaccgccaaggccgctttgtcccctcatctcggaggggccagggctgtcttgtgcctgcctctggccattggtcttacctgttattgctttgctacttgtgtggactggtgctggggtttctccctggaggggaggctgccatccttggctgccatctgtccagacctctgtcaacagggctctcccacttctgataggtggtcacgtcagatgttctgcactcggcctggatcctcatcctgcacatggttagtagaatgcccggcagggcccacgcaggagggagccattggttcttggggctggacgggaccttagagggcgccttcctctgtgcaaggtgtccactgtgcacgttcggaagcgtcaggatcagaattgatccaggtgttcaaaagggggaattggataaataaaagcagcatatcctctggaggaatgttagacagcgattaaaaggtccatttaactctctgcactcacctgtgcattgactgactctgtgacctggggcagtggtcacgtgatcatttctaggccttggttagcacttcctccttcatatggaagtgttgagatggcccattaaatgtttaaattggggctggacctggctcactgtgagtgtcagtgaatgtgttttcattatttagtgaaaaaggtgagtcacacaagtttgaatagaatgatctcggcttttttaattgaaagtttggttgagatcatcatagatgcacatataagaaatagtccagagagaaacctctgtaaaccttgcctagatccctgcaatggtcatattttccaaaactatagtatagtcacagccaggatattgattttgatgtggttcccaatcttacttctccagtttgacttacactcctatgtgtgtgtgtgaagttctattttctccaccttttaagtttttgtaaaaacatagtctgcatatgaggtatatgaaaggatatacctcaaaaatgagggcaatggttattatccctgagggggtctttttccttttgtgtatctgcattgtctaattttttaccatagtcatttcaaaaattacacggaaaagttatatgagaaaaacccttgtcaaagtccagagcctggtggctttccgctccggccctctgccccaggctcctctgcctgaccccgctcccccagggccgagacttccccttcgatgactgtggccgggccttcacctgcctccctgtggagaacccccaggcccccgtggaggccgtggtctgcaacctggactgcctgctggacatcatgagccatcgggtgaggccgggcccttgtcctgttccccactgtgccccagccatggtctttgctggctgagacaggggacgccagaacaatggctttgggagcccacgtttagttaccaacaaggctttgggtgccagcttttagggggcgcttcagg

SEQ ID NO: 48901 - DNA, 820 bp, Bovine  19866880861945
  misc_feature (1)..(1): n is a, c, g, or t
naaaccctgaaaactgagaggagagagttaaagatgacatgatatacaatgtacaagtcagatcaggcaggactgtacatattgcagcatctctcgggataaatttggttccctggaatttgtggagatctgacatggagcagaaaaaagcatgaagagcccggcctgtctcagaaattacctttgagggcagatggaaaccagaaacgtgcagaggcgtttccgggtgctgaatcgatgaactcactttaacctttaaaaagaaaaaggaacaagagacagcactaagcaaagaaatacaggctgaaaattcaacatggaagagtaattaaaaaaaaaaaaaaaacagaaaacaaaatacttccccctgggttattgaaataaaaaagatttattcaatgttttttaaagagtgagaaacataaaaatatatgtgaagaattattcagggagtccactaccaccaaataaccattttaggacattccttttttggccctggacataaagctctaatgcacatcattatgtataaaacttggaagtatctttggttacatccttaggataaatgcccaaaagtggaattgctgggtcaagagagaggagttttaaagcttctgatacaaaacaggttaactcctgcccaaaagactgcaggaaagggtggtttttaggaatctcaagttgacagatgccaaaacagaaacccggctcagccacaaagtcagcctttatgtaaaactattcccttgactcccatccccccaaaacattctggtgacacacggaagtctgtactttcggcatcgcttttaga

SEQ ID NO: 48902 - DNA, 607 bp, Bovine  19866880885557
  misc_feature (1)..(1): n is a, c, g, or t
ncccattgaatttttgttcatgtatttaaagttgtaagggagaaattgtaacatttaccttactcagatctttttctgtatatctttatataactacaacactgaaaatatgtttctattaacggtttatacacatagactcctaatagcactgtggtgtatatattgatgaactatgatctgcataggtattcctctgttgagcatcaaggtcatgtaatcatcattctataacatttgagaaatattgatgctgtgagggattgtttttgaggtacagtgagaggacttggactagggaagaactgaaagtaagcatcagttttcatacctttgtgtatatagtaacataaaatgtttttatctgtggcttggtttcctcatttatttttttgctccccaggcctttacatttctagtgtctcatagaatttgaactgtctcagctcttgggtatgggatgtgattttgaatgacggccgctttgtgtctgataaaggtgctgttgtcaagaccaatgctaatgcagagaaggctgatgaagaggagaaaggtaacctagcctagagttatgtatacgtggagttctacagtctgagagaatgga

SEQ ID NO: 48903 - DNA, 1870 bp, Bovine  19866881084220
  misc_feature (1)..(1): n is a, c, g, or t
ntctgaatcctggactataaaattttaatgttattctgaaggtaatggccacagaaggttttgaaccagtgatcaattcagagcaaagcccccttccctttaaacccctccacagtgattttttaaaaagtgacaaaatgacagtgatatttgaagacagctctgctcaaaacagtacagatcagagagaatgccagcaaagagacaattccaaggctgccttcaccttccaggtgggaggagaaggggaaaatcaagaatcagatagaagaaattgatctagaccggtggatccatacaatttttctgtaaacagccataaaaaaaatattttagactttatgggccgcctggtctctgttgtggctactcagctctgtcactgtagcacaaaagcagccacagtcaaaaccttgactaccgagtgtacatgtgttccaataaaactttaatttacaaaaccagatgggggccaatttggtccagaggccacagtttgcccatccccagatccaggcgaacattaaagtccctccagcttttagaatctgtcagataataaagatctgaaaaggtgaggtatgggagaggtcacagtgaccttcaggtctcaaggcaggataaatggacctggatggaaggaccggaagagaaatccagtctcagaaggaagatgggaaattcggttacagacacaggtactgagcccataaatacagaagctagacactgagtcactaagttagaaatgccagagttttgaggaatttcgctgtaatgagtaaaatctccagggcctgacatttctacccactgttttccctactcaaccgaacaggtggaaggagaatgtgtgaagctgcctgtttcatagcgccaggaggctcgccctccacctgtggccggcccccgcgtctcacctggtagaggaatctttggctgaagtgctgcatggcgccctggagctggttgcgttgggactgccactgctcgtagttccgcacgtactcggctgtggggcgctgccatgtggtggtccgggtattgtggtccacgtagtagaacctgcctcgggggtctgtgcgtttctcccagctgaaaacatcaagctccgagtgaacacggtgaccacctcacccctacgctcacatagagaaactgggcaggctggcaaggaggatggcgaggaaaggtctggtgtagggtctggcccaggggcttagctgctccagggaggcagaggcaggtggggcccagtcacggacgctctgggggccaggatgattctaacagacatctgtggttgcccctgcagcaaccgatctcaatctttttttttttttaacatttaaagatttttttttaatgtgaactatttctaaagtttttattgaatttgatacaagattgcttctgttgcttatgttctgggtttttgaccatgaggcctgtgggatcttagcttcctgaccaggaatcaaacccacatgccctgcactggaagatgaagtcttaaccactggaccaccagggaagccccaaccagtctcttctaccaacagcccctggatttcatgtcagagatccaagtggctctgcagcagctgactatactcctgaccctggagttgaatggctgactggaccaggaatgggcatgtgacctatgtcaaaccaatcagggtgaatctcataatttttagtacttacagtgggaaaaatgtagtcttccttgccagatgtgattgagaaagcatgcagtcctgggactggctaacatcctggacccaaacacaattatgaagttgacccagtggatggcagagcagaaaaatggggggaaaaagccagtcccctggggataccgttt

SEQ ID NO: 48904 - DNA, 1163 bp, Bovine  19866881198464
  misc_feature (1)..(1): n is a, c, g, or t
nccccgtcctctccccgccgggcccattacgttggcactggctgcttcgtgagtggcctggacgtggcccagtcccaggcgctgcacggcgtggagctgcgtgaccttgtcctgcggggacaccacgtgcagctgcacggtgcacctagccgggccttcaccctcgtgggccgcctggacagctgggaggtaggtgctcagcggcctcccctcacccccatttttaggccttgggcagccccagtgtcctcagcgcagcgcccactcccctgcggggctctgcgagcgctcacctggggaatacaggctgtgaggaggatgcgaccggtagggcctcagcaggcctttccctccctgctcctggctagctggggactcctacccccatttttcaggctgagactgaggttcagagaaggaagcgacccgccttggctgcagagccagttgcagtgggtcaggccggaggccagcattctgctccgggtcccaggcccccgggcaggcatctggaggtgccagggcttgtcgctggttcaggacctgtttgcccgtgtgcccccgtctctcttcctgcgaccccagtcccctggccttattttccctaaccccttcctgtggccccatcagtcctgactgcttccttctcttctcccagagacaggggacaggaacatatctcaacatgtcttggagtaaattcttccagaagacgggcatccggtaggggtggatggccccatggggctccgtgggtcttggcagccggggtggcagctgcctggaggctcagggcccacctccctcaatccctggggcctggggtagttttgagcagcctcatctgccctagcatcttccccctgggctattccaaattcttgaccgtgcccaggctctgggattttgttcagcggcctgggaaaggaggcagggcagctgggcctcccgccctgaatcgctcgcttgtgccgtctctggagggcttggtcctgtccccaggaaggagccaggcccccgctgacaggtggtcggggctggggggaccgtgctcccttcctgctgatgcggcttctccccacctcagggactgggacctgtgggaccccggacgtgccccccactgagcgctgcctcctcagtgcccgtctcttccccgtgct

SEQ ID NO: 48905 - DNA, 1069 bp, Bovine  19866881200829
  misc_feature (1)..(1): n is a, c, g, or t
ncgcagctgtgggggctctgcaggtcaggggagcccgtttctgatgacccccgtcctgccccggggcagccccctacctgtggtgagcacctgctccaggtgcaggactgcgtggatcagggcctccgcgcccaccacgcggcctgcggcccgctgcaccgccgccagggcggcccccgccaggatgctgctggtgcctgcagggcgggagagagggccggcatgaagccgctccgccagcccgtcctgccccacccactcccgctccacgaggcagggcccggcgaggaggccagagcgaggctgaaggggtgaccgggccggtgtgcagcaaggggcggacccactcaccaaggccagacccgtggggcagctcagaccaggtgtgcagctcgaagccacccccgaaggcacgtagcagctgctccctcagcgagagctcggaggagacactgacgatgcccgcgcagacgaaggctgccttcagcagcgcccctgcgtagggagcagtccccagctgggcgtttggtctccagggcggaaacagcccccaacccgtctcagcgcggccaggggctcagcccagcagcagtgcacaccccctccccagtcacgacaggccctgcgggctctgggcaacagcccgcgggccgctctcccttctgcacccgtgtgggctgtgggggtgatggcagggcgcccctcaggcctggccgctgtggcctgaaggctctgaggctccgcccccacgccccgccgcgcacgtggcaggcgcgctgacctggggcctggggctggcagtaaccccgcatgtcgtccaggttgcaacacacgatcttcacggccatctggtcctgccggggccccaccgccagccgcagctcgggctccgggatgcggcgagccctggccccaatgggcccggcggctgtccactcgcacagccaggcccagcacggccccaccgagctcgtaggccaggggcggtgtgtcactccagccccctgtggcaacagaacgagacccagctggtctcgaggggctgccagctcagctctgggggtgccaa

SEQ ID NO: 48906 - DNA, 841 bp, Bovine  19866881246099
  misc_feature (1)..(1): n is a, c, g, or t
nttagttgctattataaatagcatctcttcgtaatatctgtatttataaaagctactgttttccatttatttattttgttgtcatttttaagttaatagtcttagtcatgcaagtttacaatcacatattctacaaaaagtgatcattttacttctttttaagttttaatgcctttattttctttcttacatctcattgtgtgtactaacttaatggtatattttaaattaggttaaggaagtcagaggtgacatcactctgaagtcaaccaacatttctagaaatttgaattttcttatgcactaaacttagaataaaaatccattaaacataaagaaacccaactatttacattttgatcacttaaataaggtctgatatttatattgtcccaccttttgaatggatttgatatttgcctttctgattacgataactgttttcttgtgtaggtgttatcaaaaccaatgccactccagagaaaacagatgaagaagagaaaggtaactaatctttgaaaccctgtcacctaggacttgcctctctggagccagaggcactgtgagttataagattgaggaaatgaaggggattcagccaaggagattgagaatagtcagtgagatagaaccaatagagggtggtgtcccagagaccagaagaaggaagtgtttcaaaggtagggagtcatgtataagtaataagttaacagaactaaaaattggctactcagttgatttagaacgtagaagtcattgatgagtttgacaaggggctattgaagtcaagtggggagatttaatgaaaaaacctctaagtgtgcactcggggagaacagga

SEQ ID NO: 48907 - DNA, 1277 bp, Bovine  19866881248099
  misc_feature (1)..(1): n is a, c, g, or t
natctagttcatagcagaagcttctggggctgggagtggctcccccaaatcccctcacaaccctgtcaggaagccagtcctctgtggaacagtccccacaggctgttctgaggtgatgggagctctgtcataatcccaggcaccttcttttctttcttttccttttgtctgttgtttttttaaatttccatcaagtaatggataccaggtaaggcagacagggaccaggacccttggttgatactgtgaacattgcaggctgctgctcaaggggtgggggctgggctccatagttctggatctttttcagcttttgggttccctgtagcttctggaactgattatttttatttctttaatttctccttgtcatcagtaaagagggagggccatgcacattgtttgttttcaggacagaaacagtgttgaaagctgagaaacttttaagttgggaaaggtgagcgctatcgtgcctgccatccacctggaaccagtgggtgcccccttcagtccctctcagaatcaccagctagagttgagcttgcccctgcagcccatactttctccctcaaacaactcagagtcatcgttagtacagcagtaaagggccagagagtaaatattgtccaaaggagaaagtatgtctgagctcaccagacactgcccctcttgaagcacacacgtaggaataataccaggatgcccacagccccaggtgtctgcatgtatgcacaacatagagattttgctgggatgtgggagtttgagaaccaaactttgcctttaagcaggagggtacagaggcccggtggtgctgagcagagaggtatgagggaaaaggcagcctccccccgtgcccccagtgaccctgcctatgggacagggatgcctaggttggctgcatccgaggaccagagagtagccgtgatggactggggtgggcgccagggtcgaggggaggctgggctgtgtctgcactttgcacacagctggatgcaattacgcctctggtttcagctggcctgctccccctctgtgttgccacaccgcccgcttccctccagcaaaccaaccgaagacggtgcttcatcttgagttgaaaacgtgtatacccctcccctgctccccagtagggaaagatcctctttgtcctttttttcgccagtgacagacacgagtgagccaggcttgcgctggttaaacttctctaacagggtggggacagaggcagagacgcagacctagcacccaggaggtgggagccagaggggagagga

SEQ ID NO: 48908 - DNA, 1011 bp, Bovine  19866881275611
  misc_feature (1)..(1): n is a, c, g, or t
nacccttccccttctttctctccccctcaacccccaacttttagaggctgaaaaaaaaaaaaagaaatttaagtctctcattgtgctgggatggccgggtgttttcagagtgggagataaaagtcaatttaaaaactgagtcctatgaacccacctgactgttgtagagggaaaaaagcaaacttaaaaactattcttacagtttttctttttctttttaacctgtggactatacaagaatggagaaaggacacttaattgagtttttgctcttctattcatgagaccaaaagtttccgttgcaaaactgaaaattctcacatacaccacagaccgtttcctgactctaatagacttatgagaaatttttagtcaagttattaaaaatcaatcatatcaattggagtgcagggtatgctacataggaaataattttactcttgtgtggaatagtaatgccagcagccactggggcaatatttttaagctatttgagttggtttagtttctattatttacaaagatagttacaaatcataaaaaaattggcctgttatttatatatatatacatatatgtgtgtatacacatacatgcacacaggatttgtggaacctttcccccaagaatttgagcaattcatctggacttggagtggtggggataagggagaagccctaagcaaaggagacccctgtcaagtgtctctggggtgggacccctctgcaaagctttacctgcagaccaggaatttaaacttgtgtcaccagagtctacctatctttccatctttacatctgagtcaggttgcccaattctcttcactgccttctgtgtagtaatcaaccctgtgaacattctcttcctatcagaggtaagaaagcttttcagagccaccccaagatggcaaagcagaaccagaaattattctcaaaagtacatcaccgctgtacgctgttgtaacaagtcccaacggaagtcccttcaaaatgggccaaagtcccattcatt

SEQ ID NO: 48909 - DNA, 1082 bp, Bovine  19866881391081
  misc_feature (1)..(1): n is a, c, g, or t
ntaatataaaaaagtatctttatataaacattacattcaaatcctccattacttttgattaaatttaaaataagtgtaaggtcacacatgtttttaaatgtagggaaaaggttatagtaacatgctaccaaccaaaaaaacacttggtgcttgagtcctttttcagattacacgaaataaaacattttccccttggagcaaactttcaaaaataactgttttatagactcaaatgtaattttctatccacagcttgttatttaataactttattatgtgcagtcaaccaaagagctttaaactcactcccatagttgaagataagattcattctgggagatggatctaacagatgtgccaatatgaaattttaagaaataataaatgtataaaagtattttatagaaaaattttaatgttaaaagtatgtattttaaaacctcctgaaacaaaccctcaaatcacactctttaatacaaattttgccagcactgttcatgttgaccagataatgctttagttttctttaaaaagtaaaatgaaatgcataccagcagcaactacagctggaggaggcgagcctgcctcaccaccacttgtctgactcattgatgctacaggtgtttctctagatggaggtaactgtaactcctttgggagaagatcatagacagattctgttgggagaaagagaaaaaatttttatgagcacaaaattaatgtttttccactcacaagaattatattattcatacacacacacactaaacttcatgtaattactgttgtaaaaattattagcaaacatttttattttattataattttagtgaaaggcacaatgaactttccattcattctgactcccattttcttcttggcttttcctttcatgctgatgatatacagaaaaagttaccaaattttttaaaccatataaaactaggcagtagagacgccaaataacacaagatgctccaaaatctctgtttaaaaaaaaaaaaagtattatgtctcatcctttacatgtaagatggcatgtactggtgtatatcagctataaatggcttcttcaaacagac

SEQ ID NO: 48910 - DNA, 1263 bp, Bovine  19866881394651
  misc_feature (1)..(1): n is a, c, g, or t
ngggttgcacagagtcggacacgactgaagcaacttagcagcaagaattaactaaaggaagtattctgaagtaatagtcttttattagatcaagcagttattgacattgtaagattgtgaaaagagtaaggaggtgaccttgacaattttcatatattcacacacagaaagtttctgtgatttaaaacccatttgtaattttttttttttacacatatttacttttaaccaacatagactcattctagaattctagtgtcttattgatagagccttcatcatctaacattataggtaagagagtttaaattgcagaataattattgtagggagttcagttagtatatatatttagagttgctttttaaaaatttggcatattaatatccttagcgatataaatgtcaaaaagagttttggagtaaattaccagttactcagtgttttctggccaaaagactagatatttagggaaagatacattaatttagacttttgtgatttattttttaatctatagcatttgctgttttaatatgaaatgcataaaaatgatgactcttgatgtagttaattcttcagagttttgaaggagctggattggctgctatcaggtatgagggcctggtgggaacagacttctagttctgccataaaggtttgtgtttcacaaattctgaatcaatttaaattttaaaatttagagactgggcatatagatattcatgtacatttaaaattatttaattattaaaaatgtgtttctcagattcgccaatctatatttttttccctttacgtattactgaaggattgagtaatcatgatgctgctaatccacaatccagaatattgggtaaaagaatgtctctgaaacctcctttcctgtctctacattatacacacttttaatactgtcatttataatatctttagtctggtaagaacctggactgggagtaggggaaagagggcttccttcctcacaatgtctctcctctctagagggccagtgtcacagtctggaggtgtagttgaatatcagcagtctgaaatttgtattttaaaccattttttaaaaacatatgtttttatcccactagaaagtttcttagtagtttgagattcaatatgtgaatgtataaaagttttaaggtacagacttcctgaagaatattgtaggtttttggtaattaagacagaggccatttttctaacataaagttatccacatgaacttattatattttttggcaaaataag

SEQ ID NO: 48911 - DNA, 1099 bp, Bovine  19866881556914
  misc_feature (1)..(1): n is a, c, g, or t
ncctctccctcccgctccccattaatatttttctcaccctgcttgggctctgaaaccatttgccagacctccaccactcccacccataccactggattcccttctcattctttacttctgacactcagccctagtcctccttacccttcttgaactctgaactctacaattctttaaagctgatttgaaaaaatattcctataagatgtttggaaattataaatcgataaaggttttactcagtagtcaggtcataggtaagactttgaaagtgtttattctagaacagacttaaataacttcttttgaaaatagtataaataaattaagaaagtataatatataacaaaaatggttaaatagaataatccattctgtatcttataagtgttactaagttatgtagaaaataattgtgaaattttaaagtgaaaaataatacctattagaaaaaatagatctcaagttattcttcttatttcccaaattgttgcaatctgtgctgctgcatattgtttaaaattattgtagaccactagcttgaggaaaatggtaataaaatatattcaaaaaaaggtgatatgattaaataagtaacagcaaactagtaaatggatttaaacttaaatgagaaaattttattaaaacagagatcacatacaagttattcttggacttaataatcttttagaaaccaaatatccagtagacctgcagccagtacattttccagtggagatgccaagtatgatgactgtcaagcccaaagtgtttttaacagaatgaatgctgtctctcttcaatgcagaagtatgttggcacagtggaggtgccaggcattttgttttagaatgtctgatgtgaaaccatagccttgggattcaccagcttattgaggtagttaataaagacatggaagagtaaggcaattagtttgccaaaccatttgcaagaactcttcgtaagtcttttttaactcttctggatgctaaggtagctttgtatatagacttaaaaaacaaagtgaaatcccattttagaaacaagatacaaacatttataaatacatttccagtattagaatgtttgcatctagtat

SEQ ID NO: 48912 - DNA, 1060 bp, Bovine  19866882070176
  misc_feature (1)..(1): n is a, c, g, or t
ngcttacctaataagaaatgttcctgacatccagaaatccctgtcagccaatattttattgaaagttctaagagcataaaagaaaagagactttcagctatgatgaataaatctgtggcattttaaattctctaaggaggaaaactgggttgccaagagacaagggtggagggagaccatcactttttcatacttttaaacttttgaatcatgtgaattattaactagtcaaagaaagtaaatatatattaagatctttttaaaaaggggaaaggaaaattcccacaaggtctctgagatactaagtcttacaaaagaagaactagcaaggatcagttgttcaaaggaacagatactcacagccgaagctcctcgaaggacttgactgagtagagcggggagttggggtcccgctgcagaacctccacttggttggtgttatcgacaaggttgcttctgatcagcttgttgagtaaggactgggcggctctgtcctctgtaggaaaacaccaacagatcttcctcgtactcatcaggcaaaccccgtgtctgcacccacccctggatagcccagcaaggtgggagaaaaatacaatcacaccaacaagcctcactttaactcctgatccctagatgcaagtgggctgagtcgctgggcaagtctttgtttctatacaccaccccccgttcacttgtctcctttcttcagtttctgaactctccactttctcactgccccgagaagtaaacctaatcagaagcaccgccacacactgtggtgactacccacacatccacctgtgtttgtgggcgtcctctaccttcgctgctattacctgtggatggacagttatgctcctgaccccatcccgtcctgtggacaaggacatttctcccagcagtgacctttctctcctgcattctgtttctccctctactacatcattccccccagcatgtgtacacgttttgccatctctcatcataaatcttcctcctttatcctacatgcccatccacttactgcccaaattctctgctcccctttatggagcattcc

SEQ ID NO: 48913 - DNA, 720 bp, Bovine  19866882132771
  misc_feature (1)..(1): n is a, c, g, or t
ngtgcccgtgacctggccccgactcgtgggccctggctgtggacgagcaggaagcggctgccgagtcggtgagttggtttcagccgtgaaagggtcagggggccagttttggccggggatcggatcctggaaaaagtcactccctgggttggtccgaatcggggtggggtgcgtgtggggatagagcctggaccctgagctggctttgtttccccacccgccagcctcccccgggttacgtaagcagaggtgagcgcttccatcgggaaagagccagccgcccccctgtcttcctggagtcaggattgcacttaccgccttgaactgtagtaatcacctatttaggtgtcattttccacttccccattctgagctgcttgggtccaggaaccatagcttactcatgtttatgtgcttcctcagcttgctcattgatgatgaatgatccactctgtgggcccggcagtcagtaaatcctctcgtgatcagcttaactttgttgtgggcctgacacacagtaagcaagatatatgttaaacggtactgtgtagaattaatttttcccgcctaaacattcgcattatgatagtgctttgaacccgcttttttggtacctgagttcagttctgttgctcagtcgtgtccgactctttgcgaccccatgaattgcaacactccatcaccaattcccggagttcactcaaactcaggtccattgag

SEQ ID NO: 48914 - DNA, 827 bp, Bovine  19866880257484
  misc_feature (1)..(1): n is a, c, g, or t
nttaacaagtgttagagtggctacagaatagaaccaaaatgaaaattttctctttgatgcaatcagaattgaaagggagtggaaaagggaataatttttgctcattgctgactcaatattatataaagcagcatccagacagcttctcaaacactctcaaagcctgagccctactgcatcatcccacaactaggccctggcttttaagtttattgagaagagaagctgaaaccagaagctgagagagtttctgcttgggtagaggaaagtgatgtcaagtttccgtaagtatgtttttcctcaagaaatatgaaagaattttgtaaacattttaatgcaataagagaaggttgcaaacgctaaggaccagggcatctcctttcctagacaatgttaagaataggccagagatgtgatgtggaatcggagaaggcaatggcaccccactctagtactcttgcctggaaaatcccatggacggaggagcctggtaggctgcagtccatggggtcgctaagggtcggacacgactgaacgacttcacattcacttttcactttcatgcactggagaaggaaatggcaacccactccagtgttcttgcctggataatcccagggacaggggagcctggtggactgccgtctatggggtcacacagagtcagacacgactgaagcgacttagcagcagcagtggtgtggaatagtcctcagagataagaccttgggagtcatttaatgcagaatctcttcttcagccttccctgaatacatatagtcagacatacaggaatgtatgtgcccagggacacacacacgtgcatg

SEQ ID NO: 48915 - DNA, 1684 bp, Bovine  19866880387971
  misc_feature (1)..(1): n is a, c, g, or t
nacttctttcctgtgatattctgggctgagaggatcacagacttacttcactgcctgttatttttgggaaaattcagagtccccagagaaggagctgaagcctaaaaaagccaaagtggcagataagaaagccagattaattattcgaaacctgagctttaaggtaagagagaggaaacagtgagtgttctgaaggctcttggggccagggcctgcttgttggttgaactccccgccagggtggcataattgggcttcattcctcctgggaatgacctttagcagtgttgaattcagaaaatgggcctgtataaacaagaatttattcaggatagacagcatgaagatgtcttccttttgtggaaaccactgctgagattgggagaggaggacaagctctctcacgtctgtcctttttaccatttaggtacaaagcaaggtgtcctctacttgggaatgtttgatgtcctagtctcaaaattttaaaaggagtaaaaatactcaagctcttcccagtgaactaatttaatagttgatgttttatatttatttgccgtgataacatctctttctttctcactttccggttcagtgctcagaagatgacttgaaaacagtattttctcagtttggaactatcctggaagtaaatatccccaggaaaccaggtacctgccaacctttattttgtgtggattaggttattttacataatggtgtttttccatgtcacctttcaactaagcactatttgaaatagaaatagaaggttggggtcatactctccaagcctcagatgatatggcatatataaagtatagtgcttgacacagaacaatgtttattccccagatggtgtttttagttagatcagaactccttttaggagacgagtaaaatgcattgctctcctgagcctgtgtcaggctaacgtcagcaggataaaggctcttactttgggcagggggctgactggctggcaggatttgagccttctcgccagtccaggttgctgtataatccatcttagtgtctgttggttccttctgctacctctgatttctttgttatgtttgcacacagatggaaagatgcgtggttttgcttttgttcagttcaaaaacctcctagaagcaggaaaggctctcaaaggcatgaacatgaaagagataaaaggtaagttttctgtgcccatcctattgactcagatatttctggtgttcatgcagattaacacagtaacccactttctacatttctgaaaggtgtttgccttgttgagagtctcactgctaatatagaagttgctttgatcttagggttaaactcgacaggacccttcccagccttctctttttcttttttcagtgatgagtgtcctttaaatctcttaatgagaaaccattgctgaaatgatcattgatatacaggcagattgctgtctaggggaatgtgagattagcggattcttctctcttgattatgatccctattaagcatatgtgggctcctaaactgaccttgaggttactctgggtattgatttaccaggtactctgcctaaagaagggattggcttggagacttcctaacttctgagtaatgtgcagattattccagaatgtctgttttccctcttgctaatctaactggaaacttgatctaactggaagcactgtactaa

SEQ ID NO: 48916 - DNA, 2893 bp, Bovine  19866880402750
  misc_feature (1)..(1): n is a, c, g, or t
ngagtgggtgagtgaggtggaatctattaccaaccgggctcacagctggagctaggaggcaggaagggcttttacaacattgactatctgagtgttagaaacctgatgagccaagctacttctgaagatggactgagtgccgctgctgctgctaagtcgcttcagtcgtgtccgactctgtgcgaccccatagacggcagcccaccaggctcccccgtccctgggattctccaggcaagaacattggagtgggttaccatttccttctccaatgcatgaaagtgaaaagtgaaagtgaagtcactcagtcgtgtccgactcttagcgaccccatggactgcagcccaccaggctcctccgttcatgggattttccaggcaagagttctggagtggggtgccatcgccttttccgacggactcagtagatgagtgtttttcaacttttatcatttattatgattccctccccccactcacgtatggggatatacatatatacaacagtttccacaaaagagtggtcagttgtgactacatgtgatactctgtctcccttctctatttcattaatgaaaacagcatacagttatgacactgaattaactgaaacctcgggggtgaggtttgcaaggtcaagggcttggggaagactgaggtgtgaagacagaagggctgggtggcctgacggccctctttgagaggtcaaaggccacacccaaaggcttacgtatcagctttgggacttggcttttgtgtcccaagggatcaaggacaggacgagaaatatgcagcccactaacagagagtaagtcaaacaaggtaacgtcataaggtaggagagacaagacgcagctgctgaaggcaggggaaggacacgtgcagccagcgaggggagtcctgctatgccctcccctcctgagagcctggccagtagggaagcccgattgcactgtacctctgactcaaatgccccttgatgctgggctggcgtcccccgcgtgctgctttgttactgatgcaccagacttagagaaggttaaagaaaacatatcacaggaatgaaggccgggttctctaacagcgacccggaggctgcagtggccaagctgggccagcccacatgccacaaaggtgagcgccccagatggtgagaaggaagcgtgtgtcatcaggttccggaagccctcggtaggcaggccaggcagagctgcaattctggttggggctcaatcgccactatctgctgtctttcccactaaggccccagggctggcctgcctgctcacgaggacagttaattctgctgagcttccaatgccacacgtgcaggtcagccaccaagctgacccctgacacaggcaacactcgaatactgaaaacactgttgttgttgtttttaaatctcaaacattcttgaacatttccttccctataatggggagggcagaatggagaagaaagagacacccatggggccctcgcagctgacttctgccaagggcagacacaggagaggcaggccagacacatctgcttctgctccagaggctccctgacctctttaaagcccgacagacagacctgcctaagggaaaagccattatccctcacaccttctctatgctttctgggataggaaggccgaccaagattacttaaaaacagaaacagaagagaatttgcttgattcggtacaattgagaaagagaaaattcatcaccaggcatcggcacatcatttctggtttctattctgctgctgacaaagtatcacacatctccaagcctcaaggtctctggctgtaaaatgaaggtgctccaaaattctctcctggccaggaaatcctaccatctgcattatgcccttctgagatctcccatgtcaggttcaactctgggagtacagggtgcctcctttcaaatgtcaaattctggatatacataagcattctattaaaaagaaattatacatttagagacattgactaactaggtcaattaacacaaacactttggtcagtcagctctggagcaagaagtacaaattgttgtaaatgatacgataatggctacgtaagattctgttgatggccatatgagggagttgtgtattgcttgaatattttacattatatgttgagttttatgataattaagcctcaaagcatggtgccttttttctttattgaagtgagggaagtatcacaaattcgccttggctagaagtgacacctttccaatggcttagtccagcaaacaagaggccaggcatttgcggctggaaacagaactctagtggaaatagtaaccaataggagggattagttggtggtgtttattactcgtctactatgtgtttgttactgcattggacatcacggagggaaggatggagccttctgccaactttggatacttgcggagatcccctggcagaccttctctgcccctatttcacaaatacgcatcactgcctactctgggttaggcactgggttgggagatgaaaactcaataatgaaaaagacagactttgtcctaatgaagcctaattagcagcatgacaatatcatcttccccaccattgtatgaagtatgctgtcggtgatggaatttatcatcggtctgtagggtgctggatgttatgcagtaacatgccatatctggattatggcgggcaggtgcatccgtgtctaggagactattgggaggatgcactggacaagtcaatcacgagctcaccactgacccgtcccttgctaaggaggcagcctcaggcagctgctttcccgcacgtggccctggattctgtcctctccctggtcacaaattgggaatggatgtcagagcaggaggtgagaaatgagggagagagggcagagttgctcctgt

SEQ ID NO: 48917 - DNA, 5167 bp, Bovine  19866880434707
  misc_feature (1)..(1): n is a, c, g, or t
nagatgggagatgattttcttctcccgagagaaaaaggcactatttaaaacagtaccacagccttgatggatgaccagatttctccagccccagtgtggaacccctagtccttcactttgggaaaactatttttggaggagggcagggcttatttttttttaagattttattattttggccactccatgcagcatgtgggatcttagttccccaacctgggatcaaacctgagccccctgcactggtgtagcacagaatctacagggattctggaccagggaaatccctgggaaacatttttggcctgcaaaacttttaccggtctgatgggtcagtaacaataagcattaaaagatagtgttcaagttgtgggtcttatttttattagccttttcactttccagaaagctttatttcttttagacctggataaatccctcggggtccacagacttgttctgatttgcatagctgtccttcgctctggggccgagttgtagcaatgatctctgtaacctacaaaaaagcaattggaatatgggcttccatctgccaccaatttgtgttttgggtaagcgatgccaagaggtatactctgcacctgatatctacctcctttcatcagaaataccccagtaggttcctgctaactttattccgtgcagtatcgcctaccttgggtagcacggagcccaatggagtgacagctagatgcctacctgtgtgcagttgccctatggaggtatgtgatggaagcgaaagcagaaacaccttctgcttttcaggtggggttacgtgtgctctgccccacaatctttgctgtaaaagaataacatttggtgatttcatatgagccaagcattttaaaacctcttgtaaaatctgaccgtagcttttacccttgccagactgaagatcagaaacggttgagtctgtcttgtcttttgagaaatcccaagcagtccttccgatgccgggcagccgtaggagctctggctggggagtgaagtataaaacctccttggcggctggtgaacagtaggctgcatgcagagtttctgtgcctgtgcccttcagagtatgcagcagccggctgcagacactgctctctcatttgatgtggtggctctgtctgcaagcggaagctgctggttttcagaccggctccctgtaggataatgaattgtcatgcctctgctgattatctaacaagtttgtacaacgtgtaacacaagctgacaagacaaacaattttattaatttaagcctgctgctaatgggattgcagcactatatgaatgtaggagtattagatacacatacaagagtatccaaccccacaaatagtcatactctgcgtttggtaatgggcagagtctattcattgaaaaataaagtttggtatttccatttgtccttaataaaatactattcatttgaatggtgaaatacttagggatgttcagggatttatagagctcaaatcaacggctcaaatgagccgttgtatcagcctttgaagtacgagagctaatagatgccggtgggcagtagataaacttctggtttttacaaaccaattacaagtagaggagcttttgtcgtaaatctgtctggagttttggtcttcagctgggagagtgctggagcctatggggagacaggctagactttcacagcctctgatctgaagtattttcatttcaaattctcatattcttatatataaacttgacaatttgaggccattgaaccttgggttgttggccagaattgattaaccgtgtttatgaaaggaatgcatcatccaagagagagggttagttcaggcagataagaaaagaggtttcctatgaactctgtgtaatgtgatttttggcttctgagagatgtgttcccagcatggaaaatgatctggcctacgaaccagggagtttcagactccgccagagtacacggatgtggggataatttcagcaagcatccttctgtttcagagacaataaacagggacctttgctttcaggaccctgggtaaggaatatagcagcagagtaggttcccgtcagcctcccaacatccagacgtttagagtgcaggctataaactgtgccaagttaatgcggcaggcagtcaagaatttagggcactggtatttaaaaaaaaaaaatcattaaaaaaatcatagtaaatctaaagcagcgagtgattgaggctttctgccctaattgtgtcaactttatgcatcattctgtttggggattatccagtgtttgcaccccaacaattgtggtgctgctgcctgttcatcctccttgcctctctccctggtgcctccctcacatccgctttccgaacagcttctgtacttcagacctgtgttgtcttaaagcatattgccacagggcagggggtggtagcaggcaagttctgtaagtgcattttgtagaatgtttaaaaaaaaaaataagggaacaaactagaaaatcctagtctatatttcccattttgtctttattcttctgaagcagaggctgtgttcccagagtgtcgagtctctgattcttccagtgtccttccctgtccctttgtatcttagacctgcatgtcttcaatttttcttaccaccactctctgctttagccattcctctcggtattcttcccctgcaaggcttatcgcctctcaggtacagaggcaacataaaatctgggctcctctaccttgtttacttgcccccaaacaaattagatacacagcttcattttctaagaggtagaattgccagctgctaccagaaataacaatatttgcataatggtacaaataccaagtagcttttggattctgctcctgttaccaagtccaaactcgtgctgctcgtcatatgacaggtcagtaaaccaagagatgagttgttggggcaagaaacggtgactcattggaaagccaggagacttagaaaggtgggtggattagtgtcccaaagaactagaattcagacttcttttatactagaattcagaggagaaagtcctggttccggccagactctggagggaatgtgtacatttctttcttcttggagccattattcataggtaggcatggtcaggatgtttcttgtgaactaaacaaaggcaagttagcttaacactcattacctaggaggcagggttcctagagatggccctacatataatttaagaataggcagcatcccatgagcaagtgattaacttgtagtagcatacaaaggttcttccctcttaacattcatagtactaatatggttttcttcattaagttgtaaatggtattactttgcctatctttgccattttctgaaagccgtgttctaaaaagaaacctttttgaggttaaacagtcatgtgtataaggtgtagtaagtgtacagcttgatgaattgttaggtatgtgtacacccgtttatctactactcagatcaacacagtaatttagcgtcccagaccgtgtgctccatgttaggtaactgctgttcttaaggacttccaggatagctcagtggtaaagagtctgcctgccagtgcaggagatgcaagacgcaacagtttttgatcgctggatggggaagatcccctggagaaatggctacccaccccggtattcttgcttgagaaatcccaaggacataggaacctggcgggctccatggggtcacaaaagggtcgaacacgactgagtgactaaacaacaacaacaaaccactgttctatcatcactgattagttgtgcctatctgttcttgaacttcactaaatggaatcatgcattaagtacccttttgggtttggcttattttatgcaacactgtgcctataagatttatgtgtataatactccattatatgaattagccatagtttgtttttcagttctattattggacagttagattatttccagcttggatgtattatgataaaatgctgatgaccattcttatatatgcctttggacatgcacatctgtttttcctgtgtacctaataatgcttttgtttgatcacagggatgaatgtggatggatctgaacttttttttttttactttacaacttcattaaccttccctgcttatttattccttgagagacttgatactggagggaagaagaatggacttgaaaggattaggctagttgaattaggctggtgtctgaaaccagcccaccactagttctgagactttaaatctgtttctgaacctgtgagatgggtggtacagtgtctagttactgtgtagtcgccagtcctgtccggctctctgccaccccgtggactgcagcactccaggcttccctctccttcactctctcccgctgttggctcaaattcattcattcagagataatgcataggggatatttatttaacacacattccccccttttttttttactttctagagaaatctgattgcctgctcatagctctaatgaagaggaaaatatttgtttgactttagcactattaattttgaactttcctagctttgtcttggataatcatctctgtgcaaacgtgacaataagaaaagttagtagagaggttaacgtataacttttatgtaagaaatctcaaaaggcacctttgccatgttttgtcatcccaccttttgctattaagggacaagcctctaaaattttaacctgattatctattcagtagttcttttaagtgctagctttatgtctaaagggcttccatggtgtctcagagggtaaaggaatctgcctgcaatggtggggagacccaggtttgatccgggtagcccaccaggctcctgggtccatgggattctctgggcaatagtactggagtgtgttgccattgccttctccaggggatcttcccaacccagggatcgaacccgggtctcccacattgtaggcagattctttattgtcagagccagcagagccaccaggagtgggacacgactgagcaactaatacttttacctttttgtctaatattttcctcttttggttgtttcttcctactttcaaacattgagactctgtgtctcaatgtgtactaataggtgattttgtaataatatggacttgatgaactacaaactgcattgtaatcataaacttctgaacaaatttgtacgtcat

SEQ ID NO: 48918 - DNA, 1966 bp, Bovine  19866880601900
  misc_feature (1)..(1): n is a, c, g, or t
nggtgggttccccagtggttcactggtaaagaatctgcctgccactgcagaaacacaagtgtgatccctgatctggaagatcccacatgacaaggaacagctcccatgtgccacagctattgagcctgtgctctagagcctgggagccgcaactgctgagaccggcgtgcccgagagcctgtgctccacagcaagagaagccaccacaatggaagcccgtgcactgcaactagagagtagccctccctcatcacaactagagaaaagcctgagcagcagcgaagacccagcacactcaaaaactaaatacaattttaaaaattaaaaaagtatttttggtatgctgcacaacacgtgggatcttagtgccctgtgtgcttgcatgtgtgtatgtgtgcacttagtcactcagctgtgtccgaccgtttgcggccccatggactgtagcccaccaggttcctctgtccatggggattctccaggcaagaatcctggtgtaggttgccatgccttcctccagaccagggatcaaacctgtatcctgtgcagtggaagcacactcttaaccactggacagctggagaattccctcagaatcataggaattcactccaaaagtccacagtggtccaagggccatttcttttcaaagcctaaaatctttatggatccagaatgaggagtagagaggtgaatgagaacctacctaataaggtttttgtccaaagtggtatcaaattatctaatttcagcactccatggctttcagagttaaagtactgacaccagagactcaggggaaggtactgatgaagacacttggatggataatcctggctatttccccgggtacatcaatgtgtggttggtttctgagatgtccggtaatgatgagacgtgtgcccctaagcagctctgggctcagctctggcactcatgtcttaattaggtgggttttgactcatcattatttagtaactcatttttccttaacacagtgctttagttgttttatgcaattagaaggaggaagctcccaaaagtcatcacattacagaagagatgtgacagaaaagatcattaactctatcttactgttcaaatcccagcagtaattaaggacttacgtaaatagcacagcttaaattatttagctgacaatccctaataacaacaccagcacttgattcttcagaaaagcgaaagtgattagtctgctatgtaacctcatcatcagaaaaaatgtatttcccttttgtaacatttgttatgacgtccttgtaaaagggcaaattaaagacaagagttttgacacatcaaattgtactgtagcatgaaagtcaaaataagtgtttcctccattagaaggctggcatccatgctgcattggggaattttttctcttgggtggcaggcaatgtggatgaagttgagtggaacctaattttcagcaagttcttatctttttcaccatctattctaggaatgatgctgcagaagttaattctttcaggaagactggttctagaaagatgattgaggttcatgcgggagattaggggggattttaaaactttcctttggcaaactaacatttatcagtcttcttgggtgtgtgaggatgtgggccaggcgctagatacaaaggtggtgaggcagtgatcctggcttctacgagcttcgttctaaccctgaaccatcagccaatgatgtttccagttctcagcacttggtcacctgctggaagataggggtggtcatgtccccttctttgatctataggaactcttgcatgattccttcactcccctatccccctcccaacaagtaagcaggaattttctctttaactacatcaaatccagcccaccttgaccattatagaaagttagacttcctactactcctggtagtagacaatcaatgagatgcagatgcaaaggctctgtggttggcacacagcagg

SEQ ID NO: 48919 - DNA, 864 bp, Bovine  19866880632018
  misc_feature (1)..(1): n is a, c, g, or t
nacaactttggaattcttgaacgttaatttttgtgcctgcatcatcagccaaagcattatgttaaagtagattcaggagctgaattttaagcagtttttagggatatgggggtgttacagcaggttgatggtgataaactaccactgagaagtttatgtttttgtagaatcctttgtaacttctcaaggggtaatgggtggatttcccttagccgagtggacaacggaaaattgttggaatatatttcctagtttaggcagggtcctgtttgtaaaatttcttgctctttaccaaggtaggttatcagcttatttcaaactcttgttcattcctgagatcttcctccattttaagaaagctttaagtgaggctcagctctgagagtcaacatatggcttttgagtgaattgaggaaccccttattggttcgttaaattcctttggaagatcttagtgagggtcacataagagatgaatataaccctctttgagtacagtgatggaggtgctgtgcggagccctgttgtggtgggtgctggggaagtcttcttggaaacagctcactagcctcttgagcgctcatggatgagaagtaagcaggtgggagaaagggcctcctagaccagcactgtctaatagatgcataatgcaagccacagatgtgagctgtgtgttatttaaaattgtctagtagctttgttttaaagaacattaattttaatgcagcttatttgacctactatatccaaaacagtatcatttcaacatttaatgaatataaaaaattcatgagatatttaacttttatctttactgtgtcttagaaatctggtgtatattttatacttggatctcagtttatc

SEQ ID NO: 48920 - DNA, 1610 bp, Bovine  19866880673965
  misc_feature (1)..(1): n is a, c, g, or t
nactgtgcgtgcccttgtgcatatttgcacaattacattgtaggttattacactgcagcctattgtgatgaaaacgattatccccaggtaaatgtataggaagcagttatatttaactaagctacaacagcatcgctgaccagtggatattatactattgctaatttaaagcagtattaccaatgctgccgggcttctcaggtggcgccagtggtaaagaacccgcctaccaatgcaggagacatgggttccatccctgggttggggagatcccctggaggagggcatggcaacccactctagtattcttgcctggagaatcccacaaacagaggagcctggtgggtgagagcccatggggtcacaaagagctggacacgattgaagtgacttagcacacacgcaccaacgccgccaccctgaggagggtgctgctccttcaaggttcgggaaaggagacacatgcaagttctccgctgctccgctgtctctgtgtgaaacctcagcactggctacagagtctagtctgatctcaagaagtggtgtgtttgcagagaggtcaggctcaaatcgctgaggtaatgagctgcagccagcatctcaaatacactctcaggcaaaaggcagccattgtcacccaggtccaggtgtgctgtgtgctctccatgtgcctgtccctcagcagctgagctgttgccttctttacctggccagaaactctgacttggtgccttgggtgcatcaggtgtataatgcagtgacccagaagttacttcacatggttaacatctgtatgtataatcagaagacagttcctctcaattgttcaaatgcacttttattgcatattttttttatgtgtgttttctctgaggatcagtacttgctatgggcaagtttctcccccaccctcaaatccctgcctcaagactgggctgttgtttactcccagggggtcctctcggccagggacagaacagttgtggtcacacagagctgtttctttcaggatcagttccttgtctgaccatcagcagaggtcagaggaccccaaattaaagttgcatctatttactatttgctgtttatgtattttttcttcatctctctccatcctttcgggatggtaaatcctggtccagggaacagaggagaccaggggaggatggagggacaagagctgagtttgccagtctgtcggaggtgtcctgtgtgacacatgctcctccctcttccttcctccacttgataaactttctccctgttcccctcaagctctggagggctgccgtaagaaacggtagagggctttggaaggacacttcaggcttagttgtgtctgtgcgcaggaagtgagtggagagactttaatttgtgcacaggtgtgtcgcttggagtgacattggctccccctggtttgatgttaatgaacccgagagcggtgggtttgtggtgaaatgaggctgcagtttctttctgaagggaaagaacaggccaggctggtgatcatttgtgatattgtgtcatgtgtgtgggttcctccctgtggtccagaagaagaaatgagtatatggccatttaaaaagtaatttagctcatagactcctgtc

SEQ ID NO: 48921 - DNA, 2925 bp, Bovine  19866880736659
  misc_feature (1)..(1): n is a, c, g, or t
ntaatagcacctaccgcataagaactgatgtcttatagcaagtgaatatatataaaggaatattccatatattccattatattataattgttgttactactactactactactattatgtgccaacaggtaatgctattctctattgactgagttcactagttccagtctaggacattcgtagccccacctttgctgccttaagtctccactcctatcatttctgtctctgcttcttcagctgaccctcgtgctctttaggctcactgagcctattatatgacattctttctctgatctagagtttccttatctggagatagttgggtggctatctttctgctgcttttgaaatatccaaacttctgcacttttgaaagggaagaggatgagaaacagaaatcattgaggatctcaggtctttgcctgtatgctttctgaaggttatggaatcctggctgtggtctctctatggagtgagcgggaactgaactattttaatgtaatctagtcagcagtgaaactatgtctgtaaacaggtcctacataggaaagctcagtgctccagcttgggtaactatccacagcttgctgctgctactgctgctgctaagttgcctcagttgtgtctgactttttgcgaccccatagacggcagcccaccaggctccaccatccctgggattctccaggcaagaacactggagtgggttgccatttccttctccaatgcatgaaagtgaaaagtgaaagtgaagtcgctcagtcgtgtccgactcttcgagaccccatggactgcagcccaccaggctcctccgtccatgggatttttccaggcaagagtactggaggtggggtgccattgccttagcaagactcaaaggcaatggggaataaagctccctccccgagcttaaggatcttacttccatcccaggaatccagagctctttcatctttactgtgtccaccgggcccccaaagcaacacctgctgagtccaacagaagtccccatactaccagagggtaaatcatctcattactgtccctggcttggcaccatcagacacaataaccagactttgaatggtccatgtcccaggtttcaccatcagcccagctggcatctctttcacctccacccctcagcttacccagttcctctttactggtcctcatgtccacttcttgccctgactctctcaaatctccactgcgggtgtgctcagtcactcagtcgtgtctgactctgtgtgaccccatgacctgtagcccaccaggctcctctgtccatgggattctacaggcaagaacgcattcccttctgcagaggacattcctgacccagggatcagccccaggtctcctgcattgcaggtgaattctttactgacagagccacctgatctcaactacctgaaatcaattattttagccttccctggactgctccacattcatctctctctttctttttgtggaagaaagtgcaacagtgatgtttcatggaaactcctgtttcctctctgattctctcttctctgttcaatgtttagactgttcaaacccctcattttctccacccactaggccggtttctctttctcctggtactttaagttctttctgttagtttctatatctcataatacaatatataataataatcatctccatcaaacagtgtctggagagaactctggctagagctgcttgacctcagtcaccagggatcagcccctctggagcctgcctgggatgtgcaggtgcccctcagggtctgcacatgggctccccctgcaggatgcccagtgctctgccgtttggtagggacacagactgattgtaattgttggtaacccagtcttccttcatcacatcccctctgagagtctgagccgtgtgattggcaggggactcagcatcaagtcagaagaggcaaaggagatgcagacttgggaaatatttggcagctgccagtgccctgaggcaccatttccccttctaaccccgtacccttcaatatccactccccacaccttgagtctgactttctccagagatggaattgaaaagacaggctcaggaactcaacagggtaaaatcctttggggttattgtcactgttaagaaagctgggtttaaaaagagaattctcctcttttctcaggagagaacaaggaatttattttaaaccaacaggtaaaaatatcagtcacactaacataattgcccaaatgtactaatcttagtaattcagaaaaaataagtctgctggattggtaataaagaatgctgatttgacctctgatattttcttttcatgttacagtgtgagaaaacatgcaccacataaccactttaagtgcacaattccatggcatcaagtccatgatatagccatcatcactatccatttccagaagttttcatcatcccaaattctgtacccattaaacaacaactctcctttcctcaccccctctaaacttggaccttaatgttactttctgtttctattgatttatctattctaggtaccatgtgtgagtgggatcatgtaatatttgttcttttgtgtatggcttatctcacttggcatggtgtctttgaaaagcaagttcttaggcatgcttcccttctcttgattatcctggtctcaaaaaaattaaagctacttttggagctattggtggagccttgggtaagaacagaggtggagtcctgggcaacattggagatgtcagtccatctgcctgcggggatgaagtgtcgaagcaaaggaactctgtaagagtagattccctttgagtttcaagttcacatgtcttgagtactgggagagccccagatgagagagaaaacaaagcaagataatgtcatcagccagtccacggagatactacgcaattcaaataggaaaac

SEQ ID NO: 48922 - DNA, 1660 bp, Bovine  19866880740834
  misc_feature (1)..(1): n is a, c, g, or t
ntcaagttcctgtgcctctccgtctactcaggtggagatgaaagcagaaatagatccgcttttctcgctgcggcctgttcatcttctgaagccaacggggccggaagagaggggcccacagggcctttgcttctgtcacttccccttccccagccctacatgacaggatctggaccagtatcacagtcattggcacagataacctgtttttttccactttctaggatggatctccattatggattcccagtaagttgatggtatgggactgcccagttgagcatcattaaatgcccttagcagcattcctgcttccagccactgcaacagcagaagtgttcctcacatatgtcgcactccctttgggggctgatctgctcctgagtaaaaccactaatctctaacagaagaaagaaagaaaacattttattatagttatctagaaaatgaaagggtgtgcagaagttttgctgtgtagcgtagcttatttttttctttttgtgaagtttcaactgaggttaagtaaagatgaattaataacgaagtcaaatcagcctggttatatgacttattccatttagctatgttctacagccccaagggtatcagttgctgagaaaatagacactaaatctgatttcaccatgatccttctgtgttgatctgtgcagaaaaatggaccatgttgccatctatattcacatcttctctgagttatattttaggagggagattagggccagactctgagagcctttaagggattatatcagatgctgcagtgctacagtgaaattggaatgaaagctcaacttctgagaggttcaaaacccgcctgccagctgcctaggaacatcctgggatggagcttaggggaagctcaaggaaagttaggtcctgcagaagagttttctagagccagatgtgtcctttcttcccagatagactcgggaggtataggcagaggtggctcagaccataaaaagtcaattttacttcttcctggcaagagagaggacattgattaaatgcgtccttagccttcggaacttgtaaaccctctcacatgtgagcctctaggttttccacagccatagcattctatccagatagttactgaattcatgcataatgttgatgcatacctgtttttcagaattaaatcacctacttgggtaactagagagcatgaagttttaacatatcaccgaagtatcttaagtatatttctaaaatcttactgtagttaatcagtgtccatttttttcatgcagtatcttcaaagggtgtttccttacattttttgttttctttctttttaaacaaatcatgctacaaggtggtgaggtctggattcagacatcttcattttgagctacttgaacagccagctgaaacatgaaactagaagaagccttagaatgatagcaaaaacaaatgaaaattaagttctctgagtgcttgccactgtaccaaacacgtgcaaacaactctcctttgcgagaaagaaagacctaaaaccaacacaaccaaaatttaaataccacttttgccatgtgagattgtctaatcagcctcattttcctctattgacatcatcatcttctgtttgttctgatgcttcatttttagtatctttatgggcttcgaaagcagtaag

SEQ ID NO: 48923 - DNA, 3086 bp, Bovine  19866880781514
  misc_feature (1)..(1): n is a, c, g, or t
nccagctaaagccctgagtggagggttagagctgtgtgactttggccagcccagagctgttcctcacacatgcttcctatgggcacctcgctagtagcagtgagttcctgcattcttgctgctctgataggacctgggtttccatccatagggagaggctgagaccctggccaggaggcaggaaagttaccagcatcctgagcctctcaggaacccaggtattctaggagctgactatctctgatttcagatgctactgactgtcgggactctcaagctggggggatcatccctgcttcagctaatcccattatgcagatggagaaaatgaggctgggcacaaagagttgcttaaacaaatctaggcctcatgctaatgcagggaatggtgctgagtcagtccagcttcctgctgagtacctgacgggagtggtggggtgaaggcagggtggagggttgggaagtggaactgaagctcctctggccagtgatgacttggatcaggcaaggacaatctcagagacctgggctctccccctcacccagtgcaatgtcacatgcaggcttcctgtgggctgggaccactcaccttccctgcctctcctcccaggtccctattgtgcccacaagtggacatgccaggctcaggtccactgggcgaacatctatctgcctgacgttgggcagcattcccatgaggccacagccagatgttacctaactctgcagaaggaagctaggaagccagagcatcctggaaagtagccaggagtggggctaggcagatggtgacccagaggaccaagtttgagctgcagaaatcctggggtgaagggaagggggtactgtccttcagtggaagccatatacccttgcggtttgcacgtgttacccacactgccaccacccccaccacacaaagcttcatcatgaaaattaattcttttggaataacagcccttttctgattccccttgtgacctggggaaactcaggatgccataggagctgggcttgggcttctgccttgtgagaaggaagccactggactggggtcactgtccctccttccctgtccctagcctgggatttcttttctctcctctctctgatagctcggaagcaagcagaacaatgacgtcttcagagaaaaggccatttcctgctggcagtgtgcacacttcactccaagtcccagagcttctgtaaagaggcaccctcctccctgagcccagatctcctttagtgctataggctcagtaggacaaagacaacacctggatctgtccccgggtcagctctgacaagattagcctaatctctgctatctgagagaagaggatgtctagggaggaagaatgttctcatttccaggcagaggaagaggttcatggtccccagccttgccaagggtctctgaaatagggtggggtggggcaggatggacagaggtgactttttggcttccctcatccatctctgaatctgctcttcttggaggagttgggatgacagtaaggagacatctgagcaaatggaaagaggtgtctgagacaacattccagtactacttctggtgctttcatcagccaaagaaaaccaggagtggagagaaccacaggtagattggctgtatcctggattccacttgtagagtggtgtggaatgcgggctctcttggaggtctctatgtggccagtgcagcgagtgtgagctacacagagttctgcaaccactaaaattacttttggggcctccagggaagtccaggacacagctctggggagaactcatgcagacattgctccatctagagctccaaagccatgacattcagctgaacactgactgccgggggaggtagagaggcagacaggactcatcctcactgctcctccattagctgaggcccagatttagggaaacaggaatgggcagggctataaaaacgtctgggaaggaaaaacaaattaagtcacttctgtcatgtctgactctttgcaaccccgtggactgtagccctccaggctcctctgttcacagattctccaggcaagaataccagagtgggttaccacgccctcctccaggggatcttcccgacccagggatcgaactcaaatcttttatgtctcctgcattgacgggtgggttatttacccctagtgccacctgggaagccccaggaagggataacagagggccatgaactgtgttttgagaatccagaaaatcctaaaccctgacaatgtcttctgaaggctggtttgcctttgcagggaaggaatctggctttatttacttaattttaataaactgaggtgggaatggggaacttgcaacagggccttagcagcctctgttcagagtcactatcccttggaggaagttagacttcaacgcagagacacctagcagtctgctctggagatttcgccggctggttttacccctccaagcttccagacagagatctgggaaagggagccaagggccagacttgtgtgtgtgttgggggcagtggggtgggaagatctaggagttaagttagaagccagagaggcccaggcagggagtcttcattcccaggcccagcacctagttctgggagggaagaggcggtgccagtgcgggcgtggagctgtccggactctggtgctgaaaacgaggtctgccgccgagcggagcagttagcaagcctaagccttgtccgggtggggaggggtggatggaaatgaattcccccttctactcacgctccaaggagagaagggcacagtgagttcgagcaagaaggcaggttgagctttttttttttttttttaggaagtgtgattccagacgaagctacagccaggtcgggccaaagtgggccacagcctggctgggggtagggtgcgacctggccagccgtggcagatgagctggggggaaaagaccctggacccgggctggtccctcgctggccccccacactcctacactggtcaaggaggagctcctgaggtgttctcacacctatgccactgacacgctcgcccagcagacttccatgagagcaaccatacacacctcaggacacacga

SEQ ID NO: 48924 - DNA, 1125 bp, Bovine  19866880781556
  misc_feature (1)..(1): n is a, c, g, or t
nccattctacagattctagctctccaacagatgactattaacaatccttggttaaagaattcagtgtttctcaaatcacaaagtgtattcagtgtttctaaaatgatgactttttaaattccagctcttcctggagtgatgccgtcctcctactgacctctggcatgaacggtggcccgtggggcctgataccatagcagatgtcctgggctgaccttggaaattcccttcacatcctttcctaggctgtacttcctgaatccatgtcattctccttaaaaatcttcctcctgacaaccttttcctttaaaaaagaaatcctattcttcttttatggagcaaatgttttatcttaggtcaggtaagtaaatataggattgcttttgtagattttatttgggtaaaagactatcctatgcatgagaactttgaacatgagcacagcaatacactatgtttctgacaccactgggtgctttagttatgatatgaagaaagcattttattatgaaacaattatatttgctcaagaatatggacacaaaagatagtggtccaaaattatcaatttataacaaaaaaatgtttaaaggggaaagcatatcttcccattattttcaggctaattatttcacaaaaaacatttaatttagaaattgtagaaaaaccaatttatgtcaaatagatgattacagtgataatagttaaaaggtagtatttctattttaaattgttaaagataaacacaaccaacggggatatgagaaaagggccatttagatttttaacaatgctgctgttacttttctaagaaaaaaagaattatgagttattataggaatactacaataaccatcttgtacatttccagaaaaaggacatgagaatggtctaaaagcatagcgtatacatggtatgtgacactgtgagtgtggaacaaagcacagcaaccagtgtctgtaactctgaattatcaattacaaggctatgattaaaaagtaaaacacaggtctgaaacacaatttaaaagaaaaatttagatcaatttgtatcacttctgaagtctctatatgcaagaggtgagaatttattacagaaccacaaaatggcttgagagatataatt

SEQ ID NO: 48925 - DNA, 1414 bp, Bovine  19866880799440
  misc_feature (1)..(1): n is a, c, g, or t
ncccgtaagtccactttccatgtttaattcagaaaattcccatttcatgaaacatcagggtctgaagtgcagaagtgggcacaattctccttgcattaaaactccccaaggcaagctaagaggctgcccagataaccggtggtaatgtgccccccaggaggacgtcacacaaggaatctgggtgttgagaaagtggatgattcaccctagaactttttaaagaacttttcgggcaactgaatgatgttttaaacataccgggttgctaaacccgtcaggagaaacatctggatctgagaaaatctggcaaagctatctgaatgaacaccaactgttctctatcctaaatgttaagattatttttaaaggttaatttatagatatttggacaacaggggaaaaactgtctggtgggcagagagttggagaagggaaaacagagcaaaggacagataggctgtggatattctatgcatcaatacacccttaataacatgtctgaccccatcctagggttgatgggctgccaagctgctgccaggactccccaggtcacacagtctcaaggtaactctggagacaagttctctccaaaagctttcagcattttcatggtctctcttttacccattattaagccagttaagagtatttctgagcattcacgggtttcccaagatacttcaatgaaatagtgatatccctaggtcagcaatggttctgaagaaagcatctctcatgatagcaccggactggactggagaactaagaattctatgctgtatttccaactctttctctggcctcctgctcactgctctctccactacccactacatctcttgagtccacaggaggtggtgctggaagacaggaaatgcaggctagcaccagccaggctggtgtctgtgggccactgcaaatgacttcaagttaactaccagctactccccacttacttggcagacgattatcaagcactgctcctggccaggccccatgccctcgattactttccaagtttctcccaacctcagagattaggttggaaatcatttttctctgctctttcttaattcctgcagtatgtaggcctacatgactgaatgagagttgggaatattaaagacatttataaattataataaaggagtcacatatattaaaaatgagagtctgttattcaaaaagccacaaattatctcacttagagaagacacttaacaaaatatacatcttaaaacttcggcagtcaagaatgctttttataattgtttccatttgagaaacacaattaaaatgggtaagaattaatagacacaacttcactcagaatatgtaaaaagcgtcccatgtttttctgatattcctctttgggttagctaaccacgcacaggaggaaccaaagtccaaa

SEQ ID NO: 48926 - DNA, 1336 bp, Bovine  19866880855753
  misc_feature (1)..(1): n is a, c, g, or t
naattctgaacttccggaatgttggaagaggaaaagaatataatacggtgaagagcacacttacacgtgagctgggtgtatgggtggagagagtagaaacgctaaagcagaacagtagcaggtctccaaagagtcttgatatcactgggtataatgtgtgtctaagagcgggttacaggagcttgggttagctcccaaactcagaaagcttcccagttcccattttttgccaggccacccgcatcgcataacctttttgtcctccctctcttgctttcttaaagttgaccctctgaccctgtggcttttctggatgcatctccacctgttcccttgttttttcagacagccgttgctgaggatcagctgcgccagcagtcgcagttggaagagcagagggtggcggccctggagaatcaaatatcccaggtgtcggaattgctgggcacctacgagaaggccaagcagaaggaccagctggccatccaaaagctgaaggagcgcattctgcagctggacctggagaacaaaaccctggcactagcagcctccagccggtcccctctggacagccatggagaggagtccagtctggatgtcaatgtcctgaaggacaagatggagaagctgaagaggctgctgcaggtggcggccaggaagagccaggtgaccctggacgtggagaagctctgcgacctggagataatgcccagctccgaggctgctgatggggagaaggccacggcgctctactaccagcaggagctgaaacagctgaaggaggaatttgagaggtacaagatgcgggcccaggtggtcctcaagagcaagaacgtcaaagacgggaacctgggcaaggagctggaggaagcccgggagcagctggccgagctgaaggagaagtacatctcgctgcggctgtcctgcgaggagctggagcgccagcaccagcaggaggccgagggctggaagcaggagctggcccggctgcagcatggccaccggcaggagctggagcggagccagctggacttccgggaccgcacactgaagctggaggaggagctgcacaagcagcgggatcgggcgctagctgtgctggccgagaaggacctggagctggagcagctgcggtccatggccttgtcctccgggctgccggggcgcagaagccccgtgggcggcgcaggccccagggaccaggcggacacctcccccccggacaacctgacccaagccctgcaactcgccgcggtcagcgagcccactttcttcctgtatgccgagcagctggcccgcaaggaggttggagatcacgtcgctgaggaagcagaag

SEQ ID NO: 48927 - DNA, 2081 bp, Bovine  19866880864156
  misc_feature (1)..(1): n is a, c, g, or t
nggaggcactggccagagaatggagggcgggaggagagggaggtaggctctctctcctatccaaacctgtctccttcaagcttccttctatactcagcttttcaggtgatagcgagtctggtcccctgtgtgatgggttatttttatccagtgattctctcagggttccattaactgcccctgccccttgtcctccaggttgtggttaacaactccccctctcttgccagtgctggggttccgcactatccattgttgatttccctaaactctgcctatacacctttgtgtatacacctttactgaacagaatgtgtcacctgcctcctggcagggtccatagaatgctgggttagactagatgatactgaaagacagtttcagcactctgcacttgtggacagcgaccaactcctctcagatgcctgtctcaatgccccggataaagacattgcctggactgggacctgtcctctaggacagaattatcttcataccttcagttgtctcacttgcccttctgtccagtggagatatcttgtcactgccatgccccaccctgccccaactcttcctttgtttacggccctagctttcacctccctgcctgaatcctgactgtcacaagactgtgagctctccaagtcaggtgcagggtcctaggcttttagcacagggccatagcagacgcttcattttcttggactccaaaatcactgcagatggtggctacagccatgaaattaaaagacgcttgctccttggaagaaaagctatgacaaacctggacagcatattaaaaaccagagacattactttgttgacaaaggtctgtatagtcaagctatggtttctccagcagtcatgtatggatgtgagggttggatcataaagaaagctgagtgtgggagaatgatgcttttgaactgtggtgttgaagaagactcttgagagtcctttggactgcaaggagatcaaaccagtccatcctaaaggaaatcaatcctgaatatttcattggaaggactgatgctgaagttgaagctccaatattttggccacgtgatgcaaagagtcgactcattagaaaagaccctgatgctgggggagattgaaggcaggaggagaaggggacgacagaggatgagatggttggatggcatcaccgacttgatggacatggtggaggacagggaagcctggtgtgctgcagcccatggggtcacagagtcagacacgactgagtgactgaaaaacaacaacacatcagaccctcggtgtctgtggagggattactggtcctgtggtgttttctctaagcactgggctcctttatggcccaatggagacaatgggcagcatctgttgggcccctccactcccctctcctggacccgtggcttgtctcatcttcgggaaggagtcaatgacagaagctggaaaatgttgttgggagatcatggtgggggcaaggaggtggagaggtgacactttaattgcataactatttccatcggtaccagtggtgctggggaagatgaggcctgctgcctgcaggatggatgatgtggggacgggtgagttatattttcccagataaaagcaccgattgcctataaactctgattctgcctgatgtaaaagccactttattgcacatccagaaattactacccgtataaaagcacattattgtgatgtaaaaatagatttttatataattttttcatgccaccaccttgtaattcctcatttccgagcaccctgagattgcatggaggtttatttttctcttttaattgtttgccatggcatgccaatttatgatgatatattctccctaagatcagagcaaggcctgggcataaataacagctatcactgcatggaggcaaggttctggggcaccccaaaatgccatcagacaacctcaggctccacgtgatgccacagttgggagtgtggcggggtgcaggttcatactcatttgaagccctccaggaaggcaggaagtagggaggggccgcatccctcccacctgatcagagggaaggtgcagcgtttcccctcctctcagcccg

SEQ ID NO: 48928 - DNA, 1980 bp, Bovine  19866880877132
  misc_feature (1)..(1): n is a, c, g, or t
nattctatctttttacttgattgataacttgaatgaatccaaatacaaagcctttcttatatgtaaccctttgtatgttactttttttttttttcctttttgaaagtttcttggctcttctctttaatttgcctgggtatgggtttattttcatccaaccaacccttataatccagtaactcatatccttctgttctggaaaatttcctccaattagttcattgatgatttcctccctttcatttttctctttttagaatttatattatttctattatcctgaaagtgtcctttaaagttcttatcaataagaacgtaccgtatagcacagggaactctactcaacactctgtaatggcatatttgggaaaagaatcttaaaaagaatagacatatgtatatgtataactgattcactttgctgtacacctgaaactataataacacattgtaaatcaactatattccaatttttaaaacgctctcatctttcctctcctacattcctacattttctctctctctgtacgtttgttttactttccagggagattcaatcagctttacctgcctgtctttctgttgatgtttttgtttctgctgtcatgattttatttctcaaaacataattgttgcttttgctattctctggatgtttctttgtatagcacattgttcttgtttcatggatgcagatcttatccctctaaggatactgtggtctttttgaccctctcttctctctgggtaatctgtttccttgaagttactttttctgactgttttgttactctcttctgcatttgaaaattccctagatgtctggcaatctttggctatgattaagattgtggggatgggagggaggctagtcagaaactctgagctcagagagaggctgggtttgccactgcagcgtgggccagctgggctgtttcttatatcagtaactttaggtctttcctcttggtctggtgaaataccccagagtagcgtcatccagtttcctgtctaggtcctactcccagcacttggggagcctgatggtggcagaaagctcagcatctctgcatttcaccattccatgtggcaaggtcaactgatcctttggatttcagtatttttcagtgtggtatctccattgacaactgtgctccaacccaaacatcgtctatctcatcttcagaagaaaactccccagactctggctgggatatgaaaggggctgttgcccaggagtttggagctgggggagagatggagggatctaactgcccattctggtccttatcttagcaacctcttccacctttcacttctaggaatccataggtaccacggagaggttctctatgcctctgagaatcttgcaatgcagatccagttagttctcagctcccgtcagccgtgacagctgacatgactccttggcgccgataagtcagtgctggtctgccattctgcttcaaaaatgtggctgttgtctttttccatgttctctctatctttgtaagtttatctcttgatttaaaaaacctctttattgaagttttagtggggttttgggaaggagtgaaagtagatatacacattcaattaccatcttaacccagaaccctaacatcccttttcagtatgtttttaaaaatataattcctgggaatcaccttccttggtcatggagggctgttattttaatgtactggggtatgtttatttctgtctttccatttagaagtctttccgtgaacatgattagcaggaaatgagcctttctatgaggaagattaaaggaaaatgtctctagtgggataacttttattaagtatatgagagaagcccagaggctggatctcagtatgcagtctccaggcagcccctaaatgacaaggttgtggtgggggggaggtgggcgggcagagtttcactactagaggaaggaccctatagcaatccctgagggtgcatccagggaatgcc

SEQ ID NO: 48929 - DNA, 1593 bp, Bovine  19866880887591
  misc_feature (1)..(1): n is a, c, g, or t
ntgtcaaagtcctgggatggcaggcaggagaggaggcagcccagcatcaggagcatccggaaaacccactctgtgctgaccccgggccccacagtgggattcagtaggtcagaaagcttttccagcactgagatgagcaagacaaggcttttctttttctttttttccccccatttttaaaaattatttgtttatttggctccacggggtcttggctgtggcactcaggatctcagatctctgttgcagcatgtggagtccttacttgcagcatgcagaatcttttcactgtggcatgcgaactcttatttgccagcatgtaggatccagttccttgacaagggagtgaacccaggctcctggcactgggagtgtgaagtcttaacctctggaccaccaggaaagtcccggacaaggctttacaaagcctgcataggccagaagaggagccagtcagctcaccctgcccctccacccccagcttgaaccaaaggcttccctgaaccatcagactgtgtgctggaggggaggtttctattccagaagtttccgtctcgcagcagagacatacagcagatgccaaaaactcatccatgtgaaagaatttgtttttcccccacaggagaaaaacccaatcacaccttctcccaactggaatatctgcaattacctacttcccgccccccaccccccatgagcgggaaaagaatgtcaggactaatcaaactacatcactctgggaacccagcctgtctcagcaccaatctttttgaaaggccccatatgggaagacaaattcaatttgtcttgtctaggggaaaaatgagttttaaatatgttgaaccaaaagtgatatcttatgtatcagacagggatccagaacaaatgccctgggagaaaaattaccctgaaaattttaagcagtcaggatgccagagaactaggagtttatgctgcaatctaagcacagaaaatccacatggggacaccctcatgtcccgggctgggccatggagtattgtgcctcagacagagcccacgttcccaagagctggcctgggcatcttccctcagggacacctcctgcctgcctcctagagacctgcagcctgggtgacctagggagccagcctggccagaacaagttggtggggacggctggggagtgagagaaagggtccagtttccactgtttccccaagcctagtggacactggttctattaaatagcggtttacaaaccctgaaagacactggttgttctctttcaagacaagctcgtggagcagcaagctccaggaccagaagtctggagattcaggttctaattctgactctgccaatagctggccagtccaagtctcttcacttgtctaaaccttaacttattaaataaagagcttaaataaagagcttaatttaagtgatccctgggatctctttcaattccatgaccaagatgttttgctttctttttcctctctttttctttcaagagtgtagagcatggtgagtaagagcagtctttcaaatcagtcttcgtggttctgaatcccatctctgatgctttttagctgtgtgtccttgagcaag

SEQ ID NO: 48930 - DNA, 1196 bp, Bovine  19866880898511
  misc_feature (1)..(1): n is a, c, g, or t
nctggggctgtgctgagcctgaggggctgtgggcagctgcgctctgggaacgccctcctctcagcaggctgggcagctcctggtgttacataagacgtgtgtgttctggcagggaagagctgcccgagtgagtggttagcaaaaatgatttgtgcagagttattttgagaccccacgggagggaacagcagcccaggccgacagtattttaaaccatatcacccatctacaaggattaatccattagaatctcagaacatgggtaacagggaaataagaacctttagggtcctagtagattagtagtgccagctcttctggtccacacaaggcgacttcagtggtttaggctgaactcggtgcctccagacttccaccatatgtattctttgatcctgtctgccctaagggctgcaagtggccgtgcaggcttctttccatggggttggcctgggtcactgaacagcagcagttggtttaggttctcattcaccctatgggataccaattggctttatgatagatagaggaaggaacgccctttttgtggtccccagagtcatcatttagtgattgagctccttgtggttccaggctggccaggagaaatcccttgttccccacccattttcctttctcctgactcaagcaggaacagctggctaagggtgggtgaaatacagaagatagaattttccagtttagtgacatgaggggagacagcctccatatgaaacacttctcttgtttttgtttttctctcggctgttatgctaggaaattggcctcctcacgcccccaccctcttaccaacagctgtcctctgccattcaggagtcagtgtctccctcaatcgctgccctaggaaggctttctccttttttgtccctgggtctgcaggtgtatagccggagagttccttgtgccagggcacctgattgccttctgaccccaaagagtccatctgggctggaggacttgctggagtatggagcaagggtccagaaaggaagaacccaatccaagactgtcattttgttttgttgcactttttttatttaagtttttttctttcttttttttatgttttgtttttttctggccagtaagcatgtggtgtcttagctccctgaccaggaatcgaacccataccccctgcatggaaggcagggccttaaccactgtaccatcagaga

SEQ ID NO: 48931 - DNA, 1420 bp, Bovine  19866880957003
  misc_feature (1)..(1): n is a, c, g, or t
nctgccataagtgtgtgacacagaacttggcacctacgtgctcaataatcactacttcacaccccttcccctcccccagctgtgaacagattatgatgaaacactgctgttttggaataagagactggcataatgaacaggcccttcattttgtgctttcttcaacactttattgacttacagctgaatcataggatgctggcagcagttcacatctggatcagattgctccagggcctgagtctccagtgacttgatgtctcactatgtaacaagggtctccatcagtcaaagtcaaacgcccggttgcaggtgatgggcaacactcacatgcatgacacgtgacaccctcccatgggcatccccatcagctcagggctacacgcgatccccggctggcagctgtaactccaccctttcttcttttagactgggaggcatatcagaacacaagtgagtgacagaagcatcatcacagggatatgttggatctgttctaattgtttaaaaagtgcatcaattgtctgaaaatcccaatagttaattgttaatagcgaattgcctatgacacacctcataactgctcaagatatgcagcgtgtcaggataccagtgtggatgaattactggtcaagatgatcccagaccaacctgttgtgaaatgaaaaattgtgtcaattaactggttgttttatctacatggtgccaaggaattgatgggagagaacattttgtccacgctaactaaattggctagtggccttggcattgtgtggacccagcctgagtattaagaatgtgagcataatatcaaatcatggaattagactgaaaggaatttccagagataattttcatctgttgcagatgaggaaactaaggaacaatcgggttaaagatttgctgagagacacacagtgcaattattaactactgttttagaagaggtagatgtgtgcacatcttcacccacaacatttttaacattttctgtagctatttcagaactgagaggctcaaccaaatggaattgcatactttctaaaagtagacaagaatttaagaaacaccccgtggtgcaattgtttcattgcttaaatttgctgctgactcatctgccttccacttctttaccaacatggtcgtggcatccgtcacttacgttggctcttttccccagcgggtcccatcctcctccactgggctgggaaacaggacgtagtcacatcacctctgtgattcctcattggtcggtgggcggggctcaaaggtgaggactccagtggaaatcccttgccaataggggtaggcctcctgtcctccagcatgaagaaagctacctgttgcccaggagagtgggctgcttaaggccaaaatcctggaatctctgaacaaggaagccaagggtttcaggcttcat

SEQ ID NO: 48932 - DNA, 1035 bp, Bovine  19866880966865
  misc_feature (1)..(1): n is a, c, g, or t
nccggcaggctccgaggcgccgtttgggtgggagaaggtggctgctctccctgactccatgctgctccctagcacacaggtccctggtctccacctgcagaccatctattgtaattgtctcccccattgtcctgagctcctcaagggcacggcccaggtctttcatctccactgttccctgtcacctggcacactgctggccgctggactgactctaagtgaaccacagaagggcttcagcagccagcgcccattagccgagggtcagaaacctaaagttcaaaacagcactttctccctcgtttaggcttctgaacctaaactgggtgctgacctggaactgtgtctgagtcggttagtagagcagcctatgaccagggaaggtgtctgttctcttcccactttccttcagaataaatgatactctcgctgtgcctctgtttctcccacttgatacccacgggcctctgagcagtctgtcctctctccccccttgccgggacctctgaggagggcagcatgtttgtaggagggtttccctgtgttttttggggggccatcggtcgagtgatatctggcccggtgttcttagaagttactctcctaacctgaatgaaacctccaggccgctggcttcacttaagcaaaaccacctacaagaggaaccctctggagtccgtgacaggactgacctgtctgagtgtgctctcaagatagagggctgtcagcccaggagtgctctcaaatcaccgggatgtatctttaaaatatcagagtcctgtctcctccatatcttatctagcggtggaacgttggatgttttttaaccgctctctccgtgcagataacatgtactggggactgactaccgctgtgttggagggtcttcaccagaaggagcccttgaacacccactgctggccctcccttccccacccccccggccacagggaaggtgaaggggagcttgccgcttctgggcacccccgtcaccttccttaaccggttccaagacaccgctattgtcccaaatgg

SEQ ID NO: 48933 - DNA, 969 bp, Bovine  19866880974838
  misc_feature (1)..(1): n is a, c, g, or t
ntggaggtgttttctcccggtgtgtggttagctttcagttgtttttttaaaatcttagacccacaaagtcgtaccgtgagtgagcttttacagccagcacacagggctgctagtgagctgtgttgcaaattctcaaccttaattaccttgatttcttgttttcaggtcaatgtgactgtggactacattagaccagccagcccagccacagatacggtgcccgccttttcagagcgtacctgtgccaccgtcaccattggaggaatgtgagtgttctggctggtagcaacttgaccatggctgggagttttttctcttctcattgatatctctcccccctttcaccccgatttgctttctgtcactcctaacacagcagcttgtgattgttctgtcccggtgtagcactttgtttgcagcgtacttcataattgttcactagttaatcatatattttcattattgtcattatttaagatttattgggctctgtgtccttggcactatgtagcattcattattactgttaataatgccatttattgagtgtcaatcaggcccttaggtactatgcaaaattagaaagattctctgtgtattagtttaggaagtttaattgtaggccagaaaaagaagagaggttaattggacattttctttgaatagacgtatgtaatcagtagatgacagggtcttcctcttgtgttccactggctataccctggttatgttccagagtctcttgggagcttggttgacgagcagccttccaaggaggtatctgatgggggcaggaggaagcccgctgggccatgcttccacagtaaatattaaaacaatcagtcagtccccagtagcaattcttactctgcataaagtatacccacatgctaattgtctccttctctatttaacagtcttaaatggtgtttgttaccaaactggtattttgcttttgttttaaaagga

SEQ ID NO: 48934 - DNA, 3755 bp, Bovine  19866880975115
  misc_feature (1)..(1): n is a, c, g, or t
nctagaaaatgaaagtattctataatgagagaaagtagatcaaaggcttgtggggtacataggaagggataggaaggggcacaaggaaacttggggggttaaggggcaggtaagagttatgttcacaatcttgattgcagtgatgattccatgggtatatatgcatttctcaaagttttccaaatttcacacttttcctccatctccattatgtcccaataaagcggtttgtaaaaacagaaggaaaagagttgtttcatgaatagtaatgaatatcaaaatataaactaacatgtatacattggccacaactacaaatttagatctacagagataaagtttgtatagaggttttagttacatttgtgaaaagtttacacccactgagtttatctaaagagcgattcttattttccagaaacaagagctgggagatctgcccgtgatcatatgaaaaggtcatacaaaagaaacagaccacataactctgttctacactacacgtcacacacttagaatcccaagatgcttgggaaagagaaagctgcttcagaagtgttggaaacagggaaaccagagcaactgcagcagggcaaccacggtgctcccagggtgaggcatgaagggaacccctgtacacaggacggtgaccatgtccagaaattcgcccagtctcacgattcaaagcaacctttcaaaaatccaggttaacatgctttgacatacacgatgttcacttaaaagccaagtgtgtagtttttgttccaaaaaaaaaagggaaagtcattcttcatcacaagacataaaatgtttaaagaaagagtggggagacacaggtatgtattttctagggctaacaaaaattacccgacactgatggtgccaaccagcacgaactttttgtctcctggttcagagcccaaagttcaaagctcagagagttggcagggccatgctccctctaaaggctccagggcagcctcttctgcctctacccagcttctggtggcagccagcagtccctggcaatgctcggcttgcagctgcatcaccctctgctctgtcataaggctttcttgcatctgtttgcatctgaccctctcatggatctaggacccagcctcaccaggtatgaagacctgaaagtcaggtcttcacagatccaatgtcatagtcgttggttcttagtgtgctaacttcaacatatcttttgcgggagggtcacaacttaacccacaatagggaggcaaatatctaacatagtaaaattctcttcaagtagacaataacgaagaagtgagacttcagttaatgtagcaagtaatattttcacttctatatacatatctgtggccatttcacactgaatcaaaacacctcaaaatggctaacaaaatatttatactgattgataatttttaaattgatttcattttcttcaatggaaaatatttgcaacaaacatccctgattcataactccctcttattagtaagaatgttcattcacaaatatactgcttgaatttggggggacaggggggcggcactgagactatttttataactggaaatgaaataaatgaaacctttgtttttttctttgtaaagtcagacatcaatttgcttctaaaggggtcttgtcctttcaagccatcatcatcataaaggcgttttatgatctttaatataacgtgtgttggtacccttaattcacactttggcacaacactattgttacagtgtacacttacattctaatagaactaagagtaaaggattttactgcagttcaaacattcttttctgctcggtgtctaatgtgtacaaatcaaataagcttagcataattcagaacataataaaaatttgattcctatcctttagatttacaaatgaaaaccgtttcattgctaaacagtaaaatatatgcactaactgaaactgattaaactaatcataacactaaggaagatagtgaagattaagctataagttgtctgatattcaaacgacctctcggatggatgaccgagggttcattctgattttagaagcatatgtctctggttcatatgatttgcttgccagacagtgcctggagacgtctgtttagtatattacttcgtaattaaaaaaaaggaaaactacatgtttcataatttgcttatttttaggcagcatgtaaacagtatcaaaacagcctcttttccatacccttttaacatgcatcagcattgtggcaacacagaaacggggaatgtttgtgatgacctctaatattaagcaaaatacagtgaatgtttaaggaatggatctagatctggtataagcaggcactagatctaacacagtccatttcttcctatcctaaaaatcaccatcaataatggaaaatacctaaaaacataatatcatgttttaaagacacacattaaaaaaaaaaaaaaagcctctctagaactgagttcaaaggttttgcaagcataggaaggcggtcttacagaatgggtgatgaaataccaaacctctgtacacatggaaaaggaccctgtgcctgagctactcaaatctaattctgatgagtgagaaaagtcccctcaaggtctaagtctctaagattcaaggacacagctactattcttcctttctcttggtgaaggtaaacagcattaaatctaaatgagttttcactgaaatacatgctccactcccctcctctaatgtccctttgcattgactatatttgtgaagactatgcttctggtgcatttaaattagacaccatcttttccatcacctacaagcctcaaatgtcacatgaattctgaagtgctacgtgtattatccaatgggtaggagagcaccaatgatgaacaatgaataacacgtctttttaagcaaatggccaggccagacagaactagaactcgggggttctaaacaaacgaagcaatttatcaagtcaacagaaataggaaggacggtgggggttagaaccaaacaatggtgcatagtagaactaccacgtttaattcaatctcagatcctgcttattttaagacacattatttcatacaccattaaagacaaagccgtcagatataactagaagtttcttcctgaaaccagatgttaaaatttgcgaatggggagagagataccttttaagaattcaggaaatgcagtgtgttttcaataaggtcaagtattggcaaatgctagttcatagttattcctaccccgaacattcattatgtatcctcatatccattataatcactcaaacagcaaatagacctttaggagttaagacgatattgtggcaaccatatagaaaagaacgtaggaggcacttgactagcttagctgaacatcacccatccagatcacctacacccatttagggaaaataaacttatatttggccctctgggaaaccaagagcatgtgtatgccaagtattacccggtggcccccgagctgatcatttcctttgcattaagttggggtgaataatgatggaaaagcaattggcagaaacacacagcccccagctctgtttgatgcatgatctgtgacaacacgattagcaagaaccatttctcttacaccaaaatactgagtccagatgtcaacctggtgcctggaaaagacgctgcacagtgacagctgtttgatgcttccacactgaagagctgcattctgaccagacacatgcttgaccaggagacatcagagcattcacgaagacaa

SEQ ID NO: 48935 - DNA, 4317 bp, Bovine  19866880976584
  misc_feature (1)..(1): n is a, c, g, or t
ntgggggcccagccgtggggacacgcatgtatccacagggttcagggagaggtcagtaacaggtgaccctgagaaggtcagagttggcaccacgacccgaagaccggagtagacggaggagggagacatggaaatgactcttgggaaaagtttgtttgagggggcagggagaacccaaaagaggactaagggtagtagggaattctgagatccccaagaggcaagagataaaagttgtgcagagatttctaaggaactgggtggtgccagaattcatagcatccagtattctggcctcagatgggaggcaggatgcggaacaggaaggaagaagaagaagcagggccaaagtgggggaagagcagaagggtataagggttctctctgtattatttgctacagctgtgtatgaatgtataattattgcaaaataaaatattttaaaaattaaatcaagactttcctgggggtccagtggttaagactccatgctgcccatgtaggaggcaaggtttctatccctggacaaggagctaagatctgctgttcagcatgaccaaagactaaaaaatagacaggtggattttaaaataattaaaaattaaattatatatattacaattaaataagttatagttttaaagataaatactataaactcatcacttcctaattatttcactctatttcaggagagaatctgccagcagtgcaggagatctaggttcgatccgtggttcaggaagatcctctggagaagggaatccagtattcttgcctggagggtcccatggccagaggagcctggtgggctatagcccatggggtcgcaaagagtaggacatgtctgagcgactaaacacacacatactcagctcttaaagatattacatctatggtaactgatatcatgtcagcagcttgaaataggccacaatgggagtatgtataccgtaggagtcaggaaacactacaaatcagggttttccccgccccctccagagccccttttcaaaaggctgctgacataccactgggctggccagcttgtcagagtctgagaaggtgaagtagtctttctggaggacagaagcaacagttgactggggacatgggctagtgagactgctgggccccgttgtggtgagaccaggtcttcacggcctgcctgccaagcgttatggaaagtcgttggctacctttgttgacggtttgagttttcccaggagcgttcaagggaaggacaagggagagagggagtctggcgcttggagctggagtgtggaatctgagctgggaaggaaggcatgtgaacacagtggggaccgggggatggagacagcacggaggcattatgggctggtggtcccaaaggacctaaggagcagggtgttacaggtgaccaagcaggtgagctgaaagggtgggggctgcagccaggggccacatgcactgcagtgttatcaggggacaaccaagatccacagcaggggctggaatggaggagagggccttgtgggtgaggagtcaaggatgtgagaggctaggagttcaacaggtcatttccttgcacgctggtgtctcccaggattgtggcaggacatgaagaagaaggagaaaggaaaatggagagggagggagggagaaaaggacccaagagaggaaataaaagtgttctttgagaaggcaagaaagggagactaatgtgtaaagctggaggatgtttgggggcatcatttaatgatattaaatgtctctattttaatcaaaaagcctaaaaggcttgattgagagtctaaattaccccagggaccaggcttaattgctgcctttgcaattcttaagttgtcatagaagtcggaaattatcagacacttctgagtgtgtcccaaaccacaggacaaaggataagcaagaaaatgaagagtgaaaagggccattctatcggtgcactgggaccacccctcccaagcatgagtgtctgctctctgggctacagtgaggcaggaggcttcaaaggggagcatcagccagaaggtaggatctgggacggaatctcaaggagacaagtctgactcctccaaggacccaaacagggacccaggaaccccctcctcaagctctgggagtaaagggatggtgggaagttctgtcaagttgcagaaaccgtatctttcttttttttaaatatatttctaattggagcataattgctccaatgttgttacaatgttgtgttggtttctaccatacaacaatgtgaatcagccataaatatacatatattccctccctcttgagcctccttcccactgaaaccatatctttctcactcaaatttatggggcctggcccagtgtctcgtatatagtaagtcagcaggtgctcagtcggtgtttgtagaattaagcatattttatttgttaattactaataattattaataaaaaaaagtttccaccagttggttgatgtgtttcccttccagatagattttaaatttcaaatgggaaagggaaggagatatgagcacagtgaactcttcagcagtggacttccagctctcagtggaaagttttctggttggtggagaaaaggtggaaagaacctttcctttgcttctcgaattaccccaaggggtgtggctgctccaccggtcagttcaacgagccttgcgcttgtcaccgctcagttaatcctgcagctaggaatgcaggccaccaaactagcactgtccaatgagctgaccccgggccccattccaacctcaccacagcccttggagggagggatgctattatgtccactgtatcagtcaggacctctgggttcccagaggcccctgcgtgacaccactggccaaggcatgggcatggaccacccaccctccttcacccacagagtcggagcctgtcaccctacacctgtcccccatggaccctagggctgaagtcacagcaagtggccctcctctcaccaactcagagcttagttgctgtgaccctttggataaacactcgccccatcttgtcccaaaacttgtgccgaatcacattctggttctggaggttgaggtcagagatggaaaaatccaaatttcactgccagaagagcttcaactggggggccagggaggggtggaaggcagagagaagtagaggaaatgactcagaaacagctcaacttagaacagcacaaaaatctttcgggtgctgcacagaggtatattttttttaatgaagctgtaccaagggaatgaaaaattgcttatgagcagagggcattggcccagggagcgggtgaactgacaaggcagacagaagaactgctgggagggcagtttgctcagaagcagcaaaggaaactcagagcacatttttttttttactttaaccccttttttttttaactttttattttctatgggaatatagccagtttccagtgaacatcggagggactcagtcatacatttgcatatagccatgctcccccaaacttccctcccatccaggataccatgtaacattgaacaagttccactggctatagagcaggcccttgctgattatcaattttaaatttagcagtgtgcacatgtccatcccaaatgccctaactgttccttagccccatcctttccctcagccaaccataagttcattctaagtctgtgagtctccttctgttttgtaaataatttcatttgtctcatttctttttagagtccacatttaaaggatgtcatacaacgtttctcctcctctgtctggcttctttcactcaatatgacaatctctaggtccatgtaggttactacaaatggtattatttcactctttttaatggctcagtattactggaatgggtgaatttaactcagatgaccattatatctactactgcaggcaggaatccctcagaagaaatggagtaaccatcatggtcaacaaaagagtccgaaatgcagtacttggatgcaatctcaaaaacgacagaatgatctctgttcgtttccaaggcaaaccattcaatatcacagtaatccaagtctatgccccaaccagtaacactgaagaagctgaagtcgaacggttctatgaagacctacaagaccttttagaactaacacccaaaaaagatgtccttttcattataggggactggaatgcaaaagtaggaagtcaagaaacacctggagtaacaggcaaatttggctttggaatatgcaatgaagcagggcaaagactaataaaagtttgccaagaaaatgtacggtcataacaaacaccctcttccaacaacacaagactctac

SEQ ID NO: 48936 - DNA, 1257 bp, Bovine  19866880996475
  misc_feature (1)..(1): n is a, c, g, or t
ncaaaccctcacaacacagatcaatcactatgatgaagaacagaaagatacatattagtctgtggcagagcacccgtctttaggatccaaagatctctacaaccagcaagagcagatgggggaaagcaaagaataaggaaatgatactgtttgaatccaacttttctgagtccctccattagtagtaacacaggtgaggaagatgagttttatggactgaaacactatgacctccctaagtgagggcaaaggactctggtaacagtaatgcacaaacattttggctgcagggacgcggaggtttagccagatggctatccatagtgtagcaagtaccccagccctattcggctgaattcctaccactttcttgtgagggtcacagcatctttctggaatcctctgtagcacaactagttggggggtgggggggtgcaaatcccagagctaattctttgtatccaggcaggaacagagcttcctgatcagacacctctctaagaaggtagattttttttcttaatgggagttcaacattgagggatagacagcaaagtcactcactcacagtctcaagccaacacggtacagcaggttacggcagtgagggaccagtgtgagcggtcagaagcctatccaggccaaaagcaggtcactcaagaactccctaagaaccaactgctgtgcagctttctccaggatggtcacagtggtgcggtttgtccagacaaaccacagggattaggtcgtgccctgccctaagtatttcaagtttcccagctccacgacgaactccccaagttcactatccctgggccctttggactaggggacaatctgtcactatttcaaacttcctggtccctctccagcctgcatttatgtccccagagaattggggcagcagttggccagactcaagattgtgatgaaatggagtaaacagtgggtccttgtgtgtgtttagaaattaaatgaactctctttggagtcatgggtactcctagctctgcactaggagtaggatattaaaaccaaaaaaaaaaacaccttattttaaaagacactcacttccccaacttttgcacctctcaatcctaacctctccccactcctcccttcatgcacaggccatcagaagatgctgtcccaacactttcagtatctctggggcccaaggataaaatggcattaaaggcatttgacagaagatcccatcccacactgaggattcctcccaggtcaacacagtgaaga

SEQ ID NO: 48937 - DNA, 3498 bp, Bovine  19866881084633
  misc_feature (1)..(1): n is a, c, g, or t
ntcggcttactctccagcatgaggatgtcattttccaggcagcagcaaagggcaattttggagagctcaggacaaaggggtcattcagaaaggccttggaaatgatgcccccatccccctgggaactgccttcctacagccagaaactgtgaagagggttcaactgtggtgctgatctcttttaataataccttctggtcccctctctaacagtgtaggttctcctgctgcagcggcagcagcgggtgagtgagtgagagctagctagctggccttctgacacaaaggtgtggagagattccccaatgactgtttaactcacaggaagagcctcagaaagaagaggatgacccgggattgctggatcaatgttttagacagcaatgccaaggcaggaaagaatcacttacccaggaccacaagataactggagtgtgaaaaccttggagtttgcacttttaagctggttggttatctaatgctctctctcaccactacttctgggaagatgctagcaatgggcacaattctccatctgggaaattacactggatcttcctgtccttggcagtgtggcagggaattgcctgaaagaggcagctgtatttggggggtggggggatgcctggcagagggggtgtcaccaagcacatgctgtccaatgggacacaatgatctcatgttgtgtgatccagaagtggtccagcctcaaagacaggggacatgagaacaaatccattttcagggctatacccagccatttaaacccaatccagcaaaacctgtgtagtacagtcagcaaacacgtttgataaaaagacagtaagtattctaggctttgcggaccatatacactgttggaaccactcaaccttgctgttataacatgcaaggacccatagacagtatgtaaaaaggttagtgtggttgtgtttcaataaagctttatttataaaactggcagtgggccgggcttgcccacccctgctctacaccaaatgagtgaggctgggaagaacagctgaagtcctttgagagttcctgagctgctgtggccttccaggtcacaaagagaactaggtaacaacgtggtgtctagcctacagttaatgccctgaagctggcagcaccaccaggacacccagaccattgacctgaacagtcctgccaggctcccgactcagggaaaggaacaaatgccaagaggaaccaacggctgaggagaagggccatgaagaaagatggaaaaaaagaagaaaggcaacgagaggtggcagggagacactgaggaaaatgagctgcaggatggccaaaaatgccaggcactctctcctgatgagtgtcattgtaaaaacacattttggcaaagcagggtgctcaggtctaaagataatgggggctggctgaaatgagaggggtcttgtgtgtgacagtgcaggctccacaagaagatatgggatgcaaaaactgcaagtctgtctccacctgaaactgggaaagagacaggcagcacttcctgccccatcgatccaaagccaggacagtgcacctcataaataaggagacacttttcagggccaagtgccctgtacttgagctttttgtctgctccctgctagggtgtttattacacagtctctcccctacttcacatccttctcaaggcagtctctgggttcctgagtccagctcgatggccatgcctccctctgtggggtcacacatgaggcccaggaggtgctgtgaaatcaacgtaagacctgagtgctgctcctttctgagatcagatttgtagtgactggggaaggtaggcaggggatggagaactgctggcccaaaataagataataaaacatatatatatataaaaagagggggatgtggcagggtcaacgacaatcgcatcaccatacctgttttactgagctaaatgtgattaccaagggaacaggcagaaggtaagaaaacccattcaactgcagccatcacagcagcagtttggcccccgaagagttcctggaatgaagtcttcagtggacactgccctgaaggcgagagttacatgcactgcacgtctgtggtcccatgctcagtcacccaggcaaccacgtggtccttctcctaagggtgggaaggacctctaaccttgaggaccaatctatcaggcttttctgcattcttgtggggtagagggaagatggcaaagagaaacgctccccaggacaactcctgaaataaaaacgaggatactatacaggcaaaagttagtgaacaaacctataacaaaataaaaacccttcttcattcctatgccgttcagaaaggagttttcatatactgtgaaggaaactgcccagaataggctgtaactggttcctttagtcagaatcccaagttatcctccgtttaggccatacttgtctttcctctggataaagaccttccaaacccgtcagcccaacaatacatccaagcagctaagaaaacgtggagaggctctctatcaagaatccccaacttacggctatgaaagatggggacactccaactaagaaagatcagtatcaacccgtggataagactaaggatgccaggggcaccaaagaggatggggaaaacgctttagctttttcaacagtcaaatatcagcaagcacacagacaaaggtcaggtcataatagccatgagacggtagaagggctttgggccacccactcctttcagtgggcagtattctctttgagccctttgtgcttttggatatcaccagcgggccagaaacatgatcaggaagaaaagtggctggggaaacaagagttaaaaaagaaaagggaaagcacctttagaagatgtgaaacaacaggaagaggatactggtgagaaatgaacagaaacgtgactgagagagtaagtgatgaggacgttaccaacaaatgtctcaggcagcccagtgagtggatttcctcccccatctaaagcataaccaaccaaccaacctttgttcctgctccctgtgtgcagtcttcaagtcatgaccttgagtgggctcacctgcttattccaacatgaaacagttctgcagttccttattcaaaggggatattgcagaagggaaattctaaaatatccacccctttaactcaattcctatagggtcaaaaatgtcaatagctactgacaacaggagtgtttggattctggaaacacttctctggcacgcggggagtggggtatctttaattgataacaatgcagcctcactgtgcagttgcaaaatagcggggaaagacaccttgcataccaacataaggactgcttcttcacgaacaaatgcatctgaccacacatgaaatagagggcaatgtgatactgatgagacaattaaggaggttaagcacccccccgttaatatattcactgacatttcaaatcaatatgagagatgtgaaagcttataaacaggtatttgtaccacttaacatcccaaagaagcccaca

SEQ ID NO: 48938 - DNA, 1244 bp, Bovine  19866881096879
  misc_feature (1)..(1): n is a, c, g, or t
ngaggctccggagtggtttactgtatttaaagttgggaaccaaataatcccatgttccccccaaggggagagaagaaaaggaaaccttgaaaccctgattgtggtgctgggttcatgtgttgcttctattaaaatgaagaatcattaagttaaaacagtttgtcttctgctccttaggaaaacattgaccacctgaaagcatttttgttcagacttggttgcagaggtggaaactcatttctagagcactcacccaccgcagctgtgtgctttgtttatgcagtgaaagtgaaagctgctcccacatcctagaccttgtccacactgacgttgggcttggtccagttgctaatggattccggggaacaaacaggatttgcctgttcgtgaggtgccagctggctgggttatgggccataaaccataacggagccgttagtagaattcttactcggcccatttttccttcttgacccatttgaaaaaacttcccttgagcctccaccctgagaaggcacctgtgccagaacagtttttcttctaaattatctagaagaagatagttattcttccagttaccagtggctaggtttttcttgtagcagccctccagaatctaggttattattttgaaatccttcctctaaacaaagcattttcaatatatatcagcaaatgctgaaaaaaaaaaaacctacagaggatttgagaaaggttttccccgttgccattttggtctttactggaccttgcgatttggctcgttctcctcgcgctgtcggagccgatcattcccaatgccattatgtaattttctgtcttgggtgcatgtttgtgtgggcgggtggttttgttttgtttttaagtggtggttaatgtcaggctaataataaactggatacgtaggcctggttttgtcataatggccacacgtttgcttatttgtcctctattcccctgagaagcagagaactccccctcctcaagtggtgcctacgtgttggacggggggctcttgtcatcacagctgcctacaaaatgcagcacagtgactagcagctctgccctaaagggacaaactcgaggaatcttctcccggggttttcccacagccaataccttgtcttcctgcgacctaaatggagccaataggaatgcctttgccgttcctgaaccagttccaaaatttggtctgctctgtacccacagttcttagattctgtatctttgcgaaatgtcaggac

SEQ ID NO: 48939 - DNA, 852 bp, Bovine  19866881127427
  misc_feature (1)..(1): n is a, c, g, or t
nggtgcgcccagaccgcagcctgtcagccgtgggtgtatggcatatatgcaggtgctgtatagtttgccttgtggcggtcacactttgtgctggtctgattagccttttctcctggtgccttgtctgtgagatagggtagggttttgctcctgtgatgatggtggattctgtcgctgccttagtccctctgagtgatctgaatccttgctttgttgccaggtttgccaaggagcgcaggctgagaatatggagagactacgtggctcccactgctaatttggaccaaaaggacaaacagtttgttgccaaggtgagtcatctcagcatctggcgctgcactgtgcacgctgtcaggctagtgataatacagagatctgaataatcagtcaagggctgaagcgtttctctggcaaggcaaagcactgatgcgtgcatgtgtgtgtgcgtgattgcctgcacgggtgtgtttgttgtacggaacttggaaactgtaagaatgtaaatttctgctgtagatttgcataacttcattagaaattaatgggttaaaattgtgcaccttgaccctttgaaatctctcatatgctagagattctgtctgtctgcttagcaaataacattctcttagattgctttctttcttgcttgccttttttttttttgtctgtgctgcgcagcttgcaggatcttagttctcaccaggacttgaaccccggccctggcagtgaaagcactgagtcctaacgactaggtctccaggggactccctctcttagatttcttatgcccaaggttataagacctcaaatttctcttctttctgttttgagagtcttgggttttgatttttt

SEQ ID NO: 48940 - DNA, 1106 bp, Bovine  19866881196063
  misc_feature (1)..(1): n is a, c, g, or t
ncagagaggcaatcagagaggttggggtggatagacttggcccctcaacttccaaatggtgtgcgtgtaaagcagagaggcaatcagagaggctggggtgggaattcaatgctcttctgaagagtcgagggagatgctgccttacccccactccccgtggctggtccctcctcctctccagaccccactcctgggtatgaggagagccggagggcaggggtggacaagggattgagggagagattgagggcagctggggtattgacccctcctctccgggctgactgcccagctcccggaagagcattagaaccgcagaagcttaaagggccctctgagagctaatcccagccgcagccgcagccatctgagagcggatgtgtgtggaggaaacgcgggggcgagcggaggcccacctaccactcctccttcctatggcctccagggtgcggccatggccccgctgctccccgccgatgtgacggtgacccagctctcccgctccatccacctgtactgcaggccgggcccagcggggtctccagggccccgcccactgctcctgctcctgccgtggctgggggcgaggccagctgcccagggcaagtacctgcagctgtacctggcctgcggcttcgacgtgctggccgtggagagcgcgctgagccacttcctgtgcccacgccagggcctgaggtgggctgcccacgtgctggcactgctgcaggggcctggggccctggccagccgcccactggtggtgcacgcactctccctgggtggctacacctttgcacagatgctcctgctcatgggccaggacctggggcgccacggcagcgtggcccagcgcctgaagggccatattttcgacagcctggtggtgggcagcctggaccgcatggcgctgggtgagtgtactggggcaagggtgagggggcacctgggccacacaagccaggctggactccaggtggatggacaggtctgctgaccaatgggcctgtgatctaagtgtcccagaggtgtctcgagtctctgaccgtcccacctgatgtggccttcctacctggagtgtcggtcgtcttgtcccacctgggccttcc

SEQ ID NO: 48941 - DNA, 904 bp, Bovine  19866881223178
  misc_feature (1)..(1): n is a, c, g, or t
nctgcttctcaagggcatgcctttgctcaagtttctcccatgtgttcatataggacctgggcccctcgatggccccactgtcttatggtctgtgggatttgagattgcttgtactaagcattggctcataaggggtttgtttttcttcacgtgcccactttttaaagctacaggtttaaacacataagctgagaaatacataagattcaaatggtgttggaatgctgcttcgcccacttcacacatgcggtatattaagggttcacctttagcagcagcccaattagtgactgccaatactgctgaagtacgtcagtgtgggattgttagccgttgctatgagaaccctcacttttgcacttcctgactcattttacactgaacaatgcaaatgtgcagagatctgaaggggagggctgataggatggggaactggcaagcacatgaagctctgctctcaaatccctttgaatggtgcgtttcagcgctcattcagttcgtccacctcctgccctcatggaagcttgttttccctaaatccttaaaaaaagaagtaaaatagtttgacctttatttgcagccagcttcaaagcagttcaagtttaatacttagcaggaagattgcctttaatgagccaagtttagaggaggtggattttagtctcttaatgtttagaagatgagatgtgcatgcacagtgagaaaatacgtttgcagctttcattcttacatctgaaatggaaccagtcccccagcagcatttaggaacccccaaaaaactgggggttccttttgttgttgtcattgattcaattttttgcacgtaaaagcaccgctatagcatatgccggtgtgcagtccgtggggccgctaagagtcggacacactagcaacttcactttcc

SEQ ID NO: 48942 - DNA, 749 bp, Bovine  19866881225724
  misc_feature (1)..(1): n is a, c, g, or t
nttgttgttgacttactggctagcccagaagtaacgttgcagatttagactagcatgcacaagggttttaatcaggtggtaccttccttcccgtggagcatttgtcttgcttgactgttctggacctcagccaagcgccagaaaagcatcttcccactgtatatggatggaagagtgtgtgtgaagtgttcattggggaagttcccaacccactaaagctcattgttaccttacctttttaccaatacgcccttagaaaaacactgagaatagatgactgtctcttcttttctccaagaatctgtttaaagagaaggatgactctcattactataaatattgctttcatcccagcctacctcacggcttctgaatgagaggagcccctttggctgctgtgaagactctcaaatacttgatggcttgttaaattttcattatctaatgtgcattaatttaggtacaatagctctgttgctaggagcagagttaggaaggaagagcttggcgagtgcagacggcttctgtcttccgagttgggcaagtgtgcaaaacctcgctgtcctccgagggagcttggggctctgccggccgcgctgcaaacctctgaaattcatccagtgactattcccccagcaatgccacatgatacctgatgcttgcttactctgtcatctgtttaattagctggagagactgaaaggattttgatggctctcacctcgtctgaagctgagagctctgaggtt

SEQ ID NO: 48943 - DNA, 2096 bp, Bovine  19866881228818
  misc_feature (1)..(1): n is a, c, g, or t
nacacaatagacttactgctgggaaaatggtttttccaatgtgagtacatttacagggacctgctggaaaagattcactgccatccgctacagatttggctctctgaacttgacacagaagcaagaggcatgggaagtaagcctactcaacttctgggcccagagttggaagaggggagttggggggcagcgtagaagatcacactcatgtgagggaatttacaggaaacttagatgcaaagaggtctacaaaagaaagaaagctctgaaggagatttctctctcacaagctgctataaaattctgggcattgatgtatcagtgattaattatttgaactccagtcctccggagagatttccaaggattagagccaaagcaggagactgacgtctgtaatagagactcgctccccaaccactctgccccctgataccacagaggaggcaaatcacgtgagaacagcaactctcaagatgatttcatattaaattagccaagagctggcagaagctactcagaaggaatctggttaaagagtcacaaatgcaaggcatgaggaaggggaaagaggagttaaagggaatacagagctagtcaacgggcttgctgagaaataagtatggctgccagggaagcaccaccagggcaggagtgcagagagatccaaagctgatcctgtccacggctcagtctctttacctttacttaatggttacaattccaactactaaatcattaatgtgccacaaaaaggacacaattttgatttttttcttaaaaaaaaaaaaaagtagttaagaattgtttagggcagtggttctcaaattttagtgtgtgttagaatttcctgaaggatgtgtgaaaagagatggctggggctgaattccagtttctgtttccataggtttagggcgggaagatgtgggcaagacctgagaattcacagttctaacaagctcccaggtgaaaatgatgttgccggtctgaggaccagactgtgagaaccagtggcttagggaatcaaattaggagacattcaaaaatggcaaggatcaaatgttatcactttattgctacaacttatttatttgggattaaaattatattcacagtatgataatcttcaaatgtattttgaaatacgttggaactattttgaaacctcaaatatttagggactgagaggagcaagagccttttagccaaaagaacaatgagatggtggagaacagatgaggtgctgtgggcagataaatggtcacagctgggtgggaaggggcagtgaacacccaattaattacagatgttagtcaagaacaacttcctctgcaagaatacaaccagtgcacattaacaattacagaaaagactgggcaacgaggacttcttcctatgagttcatgacttgactgcccataccttgtgtacacagaggagctaaagcttgtgggttctgactttaacccaaacccctacactaatcattgagacgaatgtcatagcttgagtcgtataggttggaactgggagttgggaggcgagataggatgaagagtgaacagatcctcttaatatcctgaaagagaaaattatttggaaatggagatattatacagctctccagaagtggccatttgtgctgccttaaatgcagattgattactgctatttggatgttgagtgcatcatctcttctgaagaaagggaaaagctaaatttccccacattcagctgtatcgtcaaatcacttccccacacccgctcttgtaatgcactttcctgttaccacatccacgtgcaggagctgatgtgcctgactcccccacggtgaaaccccaacactgatgtgtgctgaatctcatcagcgacctctggctgtgccgcctacaggcaagccccaaatctggtggggtgtgcacgtttggggttacgggagaaaaagaagcagttactaaagagaaagaccaatctccttctcgagctggtgtccatctgtaccagcatcctgtaacacagccaggtgaagagggcagcacacaatttacccaactccagctttctatgactctgggctacaaaaacccacctgcact

SEQ ID NO: 48944 - DNA, 1473 bp, Bovine  19866881249795
  misc_feature (1)..(1): n is a, c, g, or t
nttgtgcttctcctcttagtttcttatagctgttgttttccgactgggtgacattgtgtgtattctacacaaaggcatgagtatctccgtatatttgtgctgcttgtgtggctggaactcctccagggagagttctggacggagtgatttaatttcccctgactgctgctgaccttggaaattttggacacagatgactgtgactgacacttgtatagaggagaaaaaagacccacactcacccttcatcctccagaggaaggtggtggagatggtggctctgaggagaagaaagaagagacaggaaggggacccatgtgacagtttccagtagtgttttgggggccgctggcattcttgggtttggatagtgtggtatgacaattaggtatcgggatgagttaaaccatgatgcgtaagataatggttagaacactgatgcaaacacaggttgtgcttttcagatgcatttgtaggtttataaggacttgggaatcaagagcatgggtgaaaatacttgtaactgtgaggttacttggaaagggtgggtttctgttcatctctgatcctcctcagagttacttgaaatattttcaacagtcagaacttcatccccttgatgattttatatgtgcttgttacctaccttatgcataaacagtgcctcatttctgaccatgttaatgttctgttttttgtcagggtgttatcactatttctagaaatcattgcccagctctagtgacctcttacataaaatgttttcacgtttacttgtgaatctcatgcctgggtatgcttctaattaaatatttaccaaactgagtgttcatcgggaaatagtgatgtccacttaaatgaatgcctaacgtcaggtagagactcttagcatctccacaggccccatctgaagctgggttttacctttcctctcaaaacagatgaacgcatctgacaagggggtgggaagcagtggtttcattttgtcagaaacattaaataagagagctccttgactctgtgctcatcatagaggttgggaagccatagaggttcatgttccattgatgaaaatgaaatgtgctcaaaattgttctgactctgggggagttgggaagggtgattgtagatcggagaaagcaacataaatacatgtgaataaacagccggccttagcacctaattacaatgattttgaagggggtgttaccaaatacatatggctgggttggagaggtaggagaggatcattgcttatgtctccttttctttgcagcataaatgtatatttttttgtcagtgtatctgtgaaagtgcttttaatttaagacatgccaaagctaaatgatgtcctaatgggacatagagatttctgcttttgtctgtgcttataaacataaaatggttcacatctaccagttgctcacctttctagtaacaccatactcaacagaggcattagtcataactaca

SEQ ID NO: 48945 - DNA, 1852 bp, Bovine  19866881261311
  misc_feature (1)..(1): n is a, c, g, or t
ncaggacacttcctgaattgtgccctcagcatgacccagacagcccagagctaagaaagtaatgcaaaataaggcaccgtcatacaaaggtcacagcaataagacactccagagcccactggtgctctgaaataaaaatgagaatcatgggccaggcaatctgcaaatatgtgcctcagtgtccctttacacaaggtactaagtaaaggtgacacgcaggacaagtgaaaatgaactaaaaataaagacaaggtaaacttgtttccttggtggctcagtggataaagaatctgcctgcagtgtaggagacctgggctcaatccctgggttgggaagatctggagaaggaaatggcaacctgctccagtattcttacctgggaaatcccatgaacagaggagcctggtgcgctacagtcatggggctgcaagagctggacacgactgagtgactaattcactaccactagactgcttttgttctaagagaagacagtgtatgaagtgaagtgaagtgaagtgaaagttgctcagtcgtgtctgactctttgagactccatggactatacagtccatggaattctctaggccagaatactggagggggtagcttttcccttcttcaggggatctgcccatccctagggattgaacccaaggcctcctgcattgcaggtggattctttaccagctgaaccaccagggaagcccaagaatactggagtgggtagcctatcccttctccagcggatcttcccctactcaggaatcaaaccggggtctcctgcattgcaagcggattatttaccaactgagctatcagggaagccataagatagtgtatggagctcactaaatgctgccagatgagaaggaaggacgcttttaatgcccacagaatgttggccttgttaacacaggacaaggactgctgtgattgcctcgaagagtgaagtaaatgctcctaggtggcggcctccgcagtaggcgggggactttgagcactctcatttctgagggggtaaggtcacctgttccgtggccaaacctgagccaggtgctgggaggactgaagggtaaacgctctcaggaggcgctgacctgttagctacagctgactctgcctagccccacctgctatcccatctgaccaggcaatcattccacatacaggggtgcaggaaccgtgacagaggccagctggctcgggccaaatgccactccctatcaagctgtggggccgtctgcccaaaaaaggccacatgaaaatggaagtgtccaccccacctcaaagtccagagggctctccaagaggctgggagtgatgagaccagcacatacaggactgctgaacagctctctcgactttccccttgagaatcacaacaataacatcatttttaccgggtgcagggagtgttccacagagagccaccaagttgtgtcacgtggaccactgtccaggtgagcagctggaaggtgtgagtgtcatgtctgtttacactgacattcagctttggggctggtttcagacaaccgaggagcccttctctccaggatctccagccatgttctccatctcactcattctgtttccactaggtcactgcccggtggatgactgacttgcatcccctctgagttcctgctcctgagaattcagaccagtgcttctcaagatcctggtatcctctcacttcatcttttttatgtgcttgctagccaagaagacttcgttgagttttccattctataattggcactatgaagacaataggtatactgaatagcttttctaagtattcatgtcatgttctgttccgatcctaacaattacagtttttataaaggta

SEQ ID NO: 48946 - DNA, 1341 bp, Bovine  19866881265306
  misc_feature (1)..(1): n is a, c, g, or t
ntgccatctccccgctggcaggtccatgatgtactcaggagagctcaagtttgagaagcggaccatgtcggcccagatcgagggcggcgtccacggcctgcactcgtaagtgcggcggcttcctggccctggctggctggccctgggtcgggcaggcggggccgtggttcagaggctgagccgaggtttcagggatggaggctgcagcagggtgaccccagcaccctctccttcagggcctggcccactctggaaccccgccctttagccccccatgcaggcaggccctcccctcccctcggtggtctcaccccccaacccccgagctgggcacgggagatgtgaccatttgtccctcccagcttcccagcccttgcttgctcagaagcttggtggctggtcgcagggctggcggtgctgggctctcgctattggtggcatcaagcaggccagtggaggctgggggcgcaagcccttggtagggagaagggcagagagaccgatgccagagctggtgctggggcgaccatgggtgggggtagcgctagttggcagcagtagttgcaggcatgcagccccgccctgatcgagagggcccgtccccccaggcagaggcgggcatctaacctgtgtctctttctgccccatcctcccatagctatacctttctgccgtgtaagtaactgcgctgcccggggccaagcgtagagtagagcagggggcagtctgggtggggcctgggctggggtggggggcgctgggctggaggtggagctggggtgtcatcatgggacttggaccctaggactacatcctggtgggggcagctggccttggcctcccctgcaggggaagtgtcccttcctggggtgcagagaggcgtccctgaccacaggcctgaggctgtcctgtctgggaccggacccagtgaccacagggggctcaggccactgcgcctgcatgggtgggtggagatgtgagcggcagagccccggcttggtctgacctcttcctgtgaggatgggccgtgctgtccttagccacctccaccccggccctgaggacagaccctccaccagctgtggcccgaggagcatggctgtctctgggcctggcctggctcttctgggagccttggcctgaagtggatgaacagaggcactgggcttgcttcctgtctcttcccacccccgaccccccaccgtggctgaggggcaggggcttcagcagcagcttactgcctcccctgagtctgggggccacctggcagcccagggccagcctgggcaaggggatctgggaaggcggggcccgcttcccgcacgcccactctggttttcg

SEQ ID NO: 48947 - DNA, 713 bp, Bovine  19866881300802
  misc_feature (1)..(1): n is a, c, g, or t
nggaggaggaagcaagacaggttgtgccagactcatcgcatcaaaaggcactcacctagctgctctctgtcctctccagcaatcagccaatctgttttcacccacaggaccaagaagtctttgtcagatagtgaattttcagaagtcaatccaatttcccaaaagtaactgttgtcagttttagcctcacaataatctatttaaacagtaatagcaacattcactgttgaaattttctatccattcccctctccatccctccggtgcagaaggaacagtaaaaaggctaaggtaagagcagcagcaggagagagtggggaaggaagtgataattgccaaattggataagcagtctctgaatacatgaaaattaacaagacttgttttataacagctttatatctaagtgaaaaagaaatcactgataggatgaggaaaaaatttcatttgattcaaagcatttagaacttttccttggtatttctcttctgtgttagtcgctcagttgagtctgactctttctgacctcaccgactatagcccgccaggcttctctgtccataggatcctccaggcaagaatgctggagtggattgccatttccttttccagaggatcttcccaacccagggatcaaaacctgatctcctgcactgcaatcagattctttaccattgagctacgggaatttcttactatccccgaaaggaaca

SEQ ID NO: 48948 - DNA, 1542 bp, Bovine  19866881374824
  misc_feature (1)..(1): n is a, c, g, or t
ntagtgtgcatttatcagttttggctagagaaatggttacagtgggaaaagtttaacaggcctttcccatgatcccctgtttggtcgccccaaaggaaacctattttatccacagtgtagaaggcagttctcatgactttgaggacagatggagtgagatcttccataatttctttgggagatttgggttctcccagtttttctgctcacccctacttcctcatctccatgctatggcctgggttttatacagtccttcgcattcacaagtcaggaaccctgctggaaaacgttgcctgaattctcatctgcagaccaagactcctttacaccctcagaactcacactcctcagaaactcaacgcacatcctctgcacatgggggcgaggtatcctgatctttgggggtgtgctcaaggccgtttccaaagcatgtcaaaggcagggctggaggctctggcagtctcctggggcccaggctggctcctggagcgctgattcctgggcaggcacatcccagccccaaagctaacgttccccggctcccagccgtcttcccaccggttagaactctggtgcaaagttaccccaatccagaaccaagccgtccgccctgcccttcgcctgcctcagtttccccggggtcccgggtgggctgggctgggtggcctgccaagaaagaccggcggagaaggagaaaggagagagccgggcacttacctcgccgctgctggcgccgcgattcctcgatccctccggggctccatgcctgcccgcccctcttatagccgccgaagcacaacttgcgcaactgcccggctggccggggcgcacccgcagcgccggctcccgccctgcggggcggcggggcagcgtcgggccgggcggccgcggtcggggactccagggagggactcggatgcgccaggagccccacgcccaccctccggtatcgcctgaaaagttgggggtggctgggcaggtgtgagaaatcctcgaggtggccccaggatctgaccctcgggtctcggggaacggccgcctgagacagggtggcggtgaggggttcctctgagccggctgggggcggtggcgccccgacagtgaggccggagcagccagctccgctgggcggcaagacccgacggctctgggcccccggggaaacccggccgtaggcctggcctggaaaatcacacctgccttgatgatggtgtggaggggtaaggaaagtcagcctcacaggtcctgaaggcaccggtcgtattgcatcagagacttcctaacgggaacgtgctcccgcaaaatctgtgtgctccgccgagtcccacaggggtccgttttgttcacatctgtatcccacattgatagccccgtgcgttgcacgaagattttcatttttaagatatatttttaaatgaaaatcgcaaatttaggtttaacgtactctttttgcatatttgcatcattaattcttttggctaaaatattctaaagcaaattacaaacatcagggcgtttcatccttaaatacttaagtgt

SEQ ID NO: 48949 - DNA, 1162 bp, Bovine  19866881380974
  misc_feature (1)..(1): n is a, c, g, or t
ntctgtcttagggaaatgctaacacaagaccacagagatgtatcaaagaatgttgacatatcaacagagaaaaaaatgggtaagtaaatacacccaaaccacggaacactcctcaaacactgaagaatgagacagacgtataatcatgacactgaaaagtagttttgacaattaattttaaaaaggaagttacagaactgattataacctcatttctgtttctttaaaaaaaaaatgggggggtgtataaatctgcataaaaaaactgcaaagtacatttacttacagggatgagaatgaatgggagaaaattcgtaaggagggtagagggaggaagatttttgcattcaactttacatagttctgtactgtttgaagtcttaagagcaagcattaagtccaaattttaaacatcgacaactgtaaatgactaacactggatggcactcacctgagcatttggaaggatttctgggatgaactagaaaagctggtcaagagaaggaaaggccaccaagggactgcaaacgtgacccttcatcctcaggccttcaaaggcttgagaacgataggaaaattttatctccgtatttggcaagccagtggaataaaaactaaagaccaagaccaccaaagagatcatttggggttttactggtggtggtcttgttaagaaaggggcttataaacaagaaacaggatggatctaaacagacacatcaaaaagcccacgtgtgtggttctgtaggattaaaagggcagaaagtgaggaacagagactcttcatgcttgtggatgacacaaaagacttccacagtaataacgtgccaaggtactggtgccaaattataggaagatctggggaatctacgcaaatagaaggaaaagtggcagatgagtgttaaaatgagcatatggcctaaatcaggcacattaaacaacttctcagctgtcagttctgacctaggaataagctctcagagtcactgtaaatggactcctggggacatcagcccaatattgagctacagattaaaagcaatgcaaagtgttctgggagccatcgagataagtgctaaaaagaaaaaaagaagctactatctcccctcatatacaattccggtgcacggccccaaaagcatacactcctttgcatttatgt

SEQ ID NO: 48950 - DNA, 1359 bp, Bovine  19866881396932
  misc_feature (1)..(1): n is a, c, g, or t
nccattgtggagctcggttttactttttcttccatcttctggcagaggtgaggcttctgggagaagggaaagggcaggttacttttttcttttttaatcttcggcagggccccccgcaggttgaggaacacactcagtgctccagtccctgtgtgagcacgggaccctgaggcttgccaccctcagccgacgtggcactcaattcagctggtgggtgctcttcaagggcgtggggcttccttgagaattcatttattcttctcacaggctgcgtcgcaaaaatacttctgctgtgtgctaagttaatcccctgtgttaagtacaaagctggcagtctggggattcttgttcttaattacatctgatgcaatttagtttggtttttataaacatttcctttgtcatctccacatttttcacttcatattaatgtgattcactcacgccatggaaaagtcctctacattaatgatcaaaacaggccctagggttgagaatgcattgtgatttaaattgacaggtttatgtgaggttgcttgtccttgccttctcagtgccagctgttaccatcagtgtggctgtaaattttttgaataaatggctgaagatattcaccaaatcgagatgttttgaattggctcgtattttctgaccataccttttccgagtaagacttctcccacttgtacgggacgagagcatgtcagtgcaccacaggagaccaagggtcattggagatgccattgacctcttggctgaactcatcagctctcttgtctggtgtaggtaattaacagaaatgactgtagggtttctggaaactcagttgttcccagcaaggtaacattctcctggttgccacttgagagctcttcttgatgagctcttggttttgttttatctgtaggtgcggcagagtacctctgtgatttagagaccgtcagggtgttgagctgagcatgtagctctttggtgaagtgtggtatttgtatcaagtatattcttatgcctttttcagaaaggacgtcttatataaatgaagaaatcagaaattgaaactgcattcctgaacatttcttctgtaggcttacctgtgggaaatggtttattagataccaggatcctcaagatctcctgtctctgggtactgttagaccttactgggtttaaagaccttcttccctggactcccaggttgctcgtaggttctggtgagagtccttatatttataactgattgtcagttggcttgtcttaagccacccactcctgatcttttcacccaagattctgaaatatcgtccttagggctggaactttccatgcctgttctctgcaaactgggcttttattttaggg

SEQ ID NO: 48951 - DNA, 508 bp, Bovine  19866881443967
  misc_feature (1)..(1): n is a, c, g, or t
nggcaccctgcaacagtcccatccttccactccccaggctcgtcttccacccagccccatctagagatgaggctccagggaacgtggcacccaggtctcactccctcttcctccccacaggcacccagctggagaagctgatggagaacatgcgcaatgacattgctagccaccctcccgtcgagggctcctacgccccccgccggggcgaattctgcatcgccaaattcgtagacggagaatggtaagccacctggacccgagcaaggcagagtcttaagcaggagcaggaggaggtctgtctccagggcacccgtctgcagaagcgccagccagacgaggcattcgccctatcggcctgctttccactgagtggtcgctcttgaccttggtcagctctccagagtggtcctctatgttgcccgtttgcaacctgcagtgtaacccacagtttttctgcagtcggcctctagggcacaggagtatccctcctcctctctcctgggat

SEQ ID NO: 48952 - DNA, 862 bp, Bovine  19866881566023
  misc_feature (1)..(1): n is a, c, g, or t
ncagccaatgagccaagaaaccagaatgtttttcaaactttctacaactataaaaggctgcagagctttgggacaaagtgtcataaagaatattaccagatggaaaagtcagaattgcggcctgaaaggaaatctacaagcctgtggccatcacaaccagaaattctggtaacaacgaaaaaatgtcagtttccaatcccggggaatgttgaggggaggccaacagaggggacaattgatcaagagaatttatattacaaaattatgacgggggttaatttttaatgaaacttgcaaggtttttaattcaccattcaaggatgtagagggtgagggcagaatttataatcaggcagaatttacagtaacagcagggggctgggaatcagaacatttaggctccagtcctggctccaacccaaaccaccatgtgaccttaggcaagtcacttgtcctcttcaaagttgtctcatccgtagtgagggaacaacaaggatagcaaagattcctaccggcctcaggctctgagagccaaagagagggggagcacggatacgaagagctctcaggactactgacttgacgcaagaggtggaggggaaaagacgggaaatgagggccagagagcgagaaaacttggcgtaactgagcgtcggtggaaacaacagcttcaagaaggccaagtactccaagagttccatggaagagcggacgttaggatctacgaaaaactgcaaactactcagcatatgccaaaatggactgaaggacggtgaatcggaggactgataccaacaaatccccgttaactaatcagtaatcgatctgtcccggtaaaaagccaggagacttgagtcccgcg

SEQ ID NO: 48953 - DNA, 951 bp, Bovine  19866881683290
  misc_feature (1)..(1): n is a, c, g, or t
ncttcaggctccctgtaaacggtgggcagtgatggagaaaatacctgttgcgtcctactgactggatcaaaaggaaatgataaggtggtatggtcggtaagctatggagggacagtgggctatatatgcataggctgtcattacaactaccttgtgcctataggattaataatccttcccgttgtcgtaagccaaaaggacatctagtcatatctggattgtgaatccttcagggcgaggcttattcctcatgggacctctgggaaaagtctagtgattctggaggggacagggagaatcagtggaagaataggttaccatttggtttcccctcttctggacaccacttgaagtgacctggagtctcagttgccacccacattcacacctctactctcaagtcagatgcacaccagggtcttgggggtggccgtttgtgatgtattgttgcttgaaacaggtgttttgctaaactgggtaggaaaagttgtgttacagatattcttctcatggatcttgactctggggttcttgtttggtttagtgtagtagtttctcctggaagatttagatttccataggtggcatcctgttgacctggggaggaaagaggaaatagaaaccttcagttggtcacttgctaatttctagcatttaggaaaaaacctggtgagacccagtgggaagagagaagataaagtcatttgttcctttcttgaggaagtgccacggggacagagaagaggttagtttataggaaagagcagtagaagtgatttagaaaaatccaatgaatggtgcaaaataccatcagaattcacagggagactacaaccaacaggttagacttcctaagaattcaaactgacttgaggaagacatctgatggcatgagggtgtgcaaggtgccaagctgtttactaagcatttcactgtcatcagctcatgtaa

SEQ ID NO: 48954 - DNA, 1656 bp, Bovine  19866881902584
  misc_feature (1)..(1): n is a, c, g, or t
ntctgagccttttctcctagtccatcgtcctttctcttccattctaagggactcttgtgattacatcccagataatccaggataatctccccatttcaaggtcagttgattagcaactttaattcccctttgtcatgtaacgggttctggagattaaaacatgaatatctgggtgtgggggggatattattcttcctaacatattatatattttgtaaatattttatctggaaagaatttttttttaattttattttatttttaaactttacataattgtattagttttgccaaatatcaaaatgaatccgccacaggtatacatgtgttccccatcctgaaccctcctccctcctccctccccataccatccctctgggtcatcccagtgcactagctccaagcatccagtaccgtgcattgaacctggactggcatctcatttcatacatgatattttacatgtttcaatgccattctcccatatctggaaagaattttggcaaaagctaaaaatgaaaaatcaaagttcttcctaacttgttggcaataagggcctccaatattactctataattcctagcaatattctttttcatgggaaaccagcagcacctagtgtctctccaaataaatttcaacagaaaatatggtgtcctgtaattaaaaaggtacagctcagactaatggtagaaaaaggaaattctcagtactcgtagacatagaaggcagattctgtcttgtgtgttctttagactgaacccctacacccatgcatccagaagtatttaaattaattctgtggggcctggcaccatgctggattctgtgatagatgcggaaagataaggtcctcatctccaaattgcacccagtcttattgggcagataacacactttgtcagttaaaatgtgtgtacccatttacaaaacactgaagacttgatggccaagtgtgccgttaataaccaggcctagctgtatacacattaaaaccccaaagaacactggcttaaataacaggtttctttcttgctgttgtgaaaggattggtatggccatggtttggcagttcatcaaaaagttaaatatagagttactatatgacccagttgattctactcctagatatatatccaagagaattaaaaacatatttttgtagaaaaatttggacactaatgttcataatagcattattcataatagccagaaagtggaaacaacccaaatgtccatcagctaataaatggataaaaaaatgtggtgtgtccatacaagggaacatttcttaaccatgaaagggaatgaagtactgataacatgctacaatatggtagaaactgaaaaacagtaggttaagaagtcagatacaaaaaaaaaaaaaaaaaagaagtcagatacaaaaggccacatattatatgattctgtttatatgaaatgtccagaacaggcaaatccatagagacagaaagcagattagtggttgccagggtctggggagtggggagggaagggtggaggtgtgactgctaatgggtaccaggttatttgggaggtaataaaaaatgtcctgaaattagtggtgatagttgaatagctttgtgaatatattaaaaccctaaaaacccttgaattgtacactttaaatgggtg

SEQ ID NO: 48955 - DNA, 1393 bp, Bovine  19866881979992
  misc_feature (1)..(1): n is a, c, g, or t
nccaaggcccaagagggcaggagagaggctctgcccaccaagaggccagagggacagctgggacacaccccaagctgcaacaggttgtgagggcttagtgatcggaaatgccagaacaacaaaagacgtgtttggtactgcgtttggaataacaaagcattgacattttacagtcgatatgtggggtctggaacagaaagctggaatgacagagcaggcgagggaaaaatccacacaaataagcttctatatgaaaagctggagaatacaaagcaaaacagtacaaatgtttaatgatccatcctggttaatgctgctccaatcaattcacagtattgaactgagttcctgcgtggccagcagaaccaaggacacaaccctttcctctcctgcgggcttctcaccctctggatcccgccagcaaatatctgcaaaccagttagggcctcagactccaccacctgcttcagtgcaatccatgttttcttagcttcttttccctaaacacagacttttcctgaagaatggctgcaatgttagtgctgaggcacggaaggtaaaaacacaggaaacaatgacagttatcacttacggggccccgcccatgagccaggtgtgtgagaatcacactgcgtgcattttcatctcggtatgtgttgccctgtgaaatcaggctgtattacaattaattcatcatccatcttccaactcaaactgatgaggtcgaagagggcaagggctgtgtctttcttgctctgtagccaagtatgagaaatacagcactggaacattatttcttatcctaagcgtttattagccaagcttgcccagcatagaattaagaacaaaagctttcaacatgccttcccagcttttgtcattctcctccccattatccaagacttgtatttaaagagaatgaaagggagacaaataaaatggaattagccgagatccgtgtacttgactctcgtattcatttctttgggccactaatgaaaggtcaggagatttccctctggccaaagatggctcaaaactcgacactggtgtgctgattagttgcccagtaaggaaagagaacattaaattatgtgccatgacattatgctgctttagacaaatttataaattctgctttcttgagtgtatcagtaattctactccaattacacatgtctggctcgaatggataattcacaatcagcatacaaaaagtgacctaacagtcttgaaagtctaacaggaaatcatctctctctgtatcagctggaaacagaataagtgctggacttgaaatgcttctccaagctcaaggagaattttaggttatatgggaagtgaactgtttccactatgcaggatcagatgttcttaagaaaaacacaagcaa

SEQ ID NO: 48956 - DNA, 1069 bp, Bovine  19866882213198
  misc_feature (1)..(1): n is a, c, g, or t
naaaaaaaaaaaaaaaaagaaaaatggaaacagacagcgagaggtgtaggagaaggtacaaattggtcagaagaagagtgcaaatcaaacatttcctgggtgtatgagagtacgggcaaaaatggcctaaagtcttgcatcgtccaatatgggcagcctctaaccacatgtggctatttaaatttcattaaagatcctgtgcctcagttgcaataactacattacaagtatacaatacccagaggggctagtggctgtcacactggacagaaagcacctgttgttctatactcgcagaaagttctactggacagtgctggggggctgcctggtatctccgctcatttcttactggccacaatgagtaggttctgacacctttttggggaagaactgaactgggggaagccagaaggtaccattattcactctccagcaaacctactacacctgaaaactcgaaagctcagcgcgactgcagcatgaacctaccagtgtatgaggctccctgggccctaaccccctttctcccctctcccctgcatgtttacagccactctgacctttgcatattttattccgattctattttacactgttttaattgatgtttaatatagcttaacgctgcatggtgttcaaagcccctcaccagggggccgttcacaggcagaagcacaattaatagcaatccccagaaaattatgccctgtatcgaagttgtcattgcaccatataaatgcttattattactactgagttctccagccctgacgccttcctgtgtttactaggtagcagatcaacctctgtgttagtgccttccctacgctgccacaccatcaggactaaatatagcccgtgtgtgtatgtttagctccatttagctgtgctttggaagaagagggggtaaaaaaatcagagttaattaaattgccggaaaatgtaatttgttcctcccccacttgacaaccccatgaaagacaaacagacatcactgctaccaagatagctaactggcctcagctataaggtggagggaagcccagaccaaggtaacaggacacgg

SEQ ID NO: 48957 - DNA, 1429 bp, Bovine  19866880393455
  misc_feature (1)..(1): n is a, c, g, or t
ngctgggcagatttccgctgtcaacctggaagcgccagaggggtgtacatcaaatgcctaacgctttggtgctgactgtaagttgaggagtaattcattgtggacgttggtgaagagtttttacaccttgaggaagaacaggatgttaaataggaaactttattctaaatataatagcgtgctagtggctataattttgtttttgggaattgatgaaatgttctagaaatagatatatgtggattgatgtacaactttggaagatttactaaaaacactgaactatatattctttacaagggtatactttatgtgaattatatctcaggaaatctcttattttttaagtgttaaatttcagtaaatcttgtatacgttcagagagagttgggcatagttccgaaagaaagaaggggtgagacagactagcttggataggaaggaagcacatacccatttttcagatgagcaaatgaagagtcagatcagtttgtcctttgcccatgaagccacagtaaatattcaggccacgacttcacttctagcccttcttggctccagtgtttagatgctttccctaccacactgccggtgcccagaaaaaaaccagcccctggaatgtaacaataacacaaatgacaaataacacagataacacggtaacagtgacttccctctgcagagcaccctcgcctctcttttctctcgtctgttcttacggcatccctatgagagtgatgggtacaggtgtgcctgcatctgtggaggtggggtgtgtctaagaagaaggagatcacatctgctttccagtccgcataaagaacactggcttctcttctctaggcattcagggtgcttccacctccacttagggctctgtctctccctggacctggatatgcatcctgtttctccagtgcaagcagagtttctaagtgaaaccatagagatgtgggatccacagatatttagaaacaaggcctggaattgggtgtcgtgtgagtgtaacgtagaagtcagtgctgttctttggaaagagcagatacacgtttccattgtaaagcacatgtctagattaaagtcacttacatcattatctcccctgcagttcataagagagcttttgatgtcattctcagcttactagtgtaaataatggctctcattctcatcctgttggacaggatggaaacctgacttgggatttgtaaatactgctgcactgcatttactttcacggggacattttctcccccagcagacactggaataaacagcatcctgggaaacagctggtgggggaatcacgaggcattaacctaaggagtgagatcaaaacaaaagctctgtttgcgatctcccgccagagctcacatcccggcagtccccactgttcagctgcgttcaggatgcgtaaataaaataagat

SEQ ID NO: 48958 - DNA, 1749 bp, Bovine  19866880436630
  misc_feature (1)..(1): n is a, c, g, or t
ngaagatgcactcattgcattgaacatgtagagacgggttttaaatcttttatctgtggggccacaaatcttctggcttcatatttcataagttagcttctgaatgttatttatccaaagcactcaataatttttgcagcatacttctgagtttctacagtcaacgtaggttccgcctctttttgggtctctttcgggttcaatccctgggtcaggaagagcccctggagaatgaaatggcagcccactccagtatatatatatgtctctgagctaatgggcacagagtgatttacatgcagtatcctctccgtgctctgtcctgccttcacaacaatgaaaacatgccgccttccttgctggtcttgacagtgtaagtccactgtctgcctcagttctcgtgacaacggtgaaagtctgatctcggtttagaggagtgagtaaaagctcacatgtggagggggttcagactaagaaggctgagatttcgctgctactgttttttattttttagctgtctggccatgggtatataccttatgaatttgtgtgtttgtcggtttcctcatctgcaccattgcattgaccagagtatctacagagatccaaatgagcacttagtccttggtagctgataagcctatgaatgagaagtgtattattatttccgttctgcagagaggcagcggaggcactgtgagtttacacactcttgccttgggttatatggcaagtgagtaacactgtggaatttgtatccaagttcaagtacttaaaatccatttgttcctttccattccctctactaaagttcgataagtgttattgtttctctcttccgccccaaactctaatctgaatttgatgggaactagttttctattgtctatgaaggtttcatgctgtactttctttaaaaaaaattgacataatgctctctttctcagtatgaatcatatttgcatagctctgaggatgttaagaactcaattttctcccggaaatcctttgtttttgagcttttgtatgtttatcattgaaatttcaggaatgatagttctatccatgcccatgctcttcaatagacgagtaacacaggccaccaatgtaagccacagatgaaattaaaaatgttctagaagtccaattaaaacagtgaaaaggaaatatgtggcaattttaataatgtattttatttaagccaatgtagccaaaatattatgatgtttaattaatataaaatgactgatgtgatatttctcattctttttttcatactgaatctttgaaacctcctgagtattataccggagaaggcgatggcaccccactccagtactcttgcctggaaaatcccatggacggaggagcctggtaggctgcagtccatggggtcgagaagagttggacatgactgagcgacttcactttcactttcatgcattggagaaggaaatggcaacccactcccgtgttcttgcctggagaatcccagggacgggggagcctagtgggctgccatctatgggatctcacagagtcggacacgactgaagcaacttagcagcagcagcagagtattatatatataaaacacatctcagttggaactagacacattttaagagctcagtagtcacttgtagctaatggatactgtgtagatagaacaggtcttaatttttcaaaggataatgtatacaacaaaaaatgttaaacacctgtgggtgagggaggtactctgtaagg

SEQ ID NO: 48959 - DNA, 2786 bp, Bovine  19866880454595
  misc_feature (1)..(1): n is a, c, g, or t
naaaagaaatgtataataggagggaaggggattggttgggaagagacaagtggacaacgggaatagaacagggcctgcagaagctggagctatctattctggagactgtgcatttagcagaaggatggttaagaccaaaaggttgtataaccatgggagaaaagtaagtatacaccaaaagtgtgtgtcagcttaggagagagaagaatctcccctcgtgattgtgcagtttttaaccctaagtccatctagttttccaatgtctctgtgcaatctaatttgaaaagctgtagaaagttacaaatgcatggcctgccctggattcttcgctgtttgtgagacactgtgtggtttgtttacctattgctgcataatgaaaaaccccaaaatgtagtgacttaaaaacaactattcatcattttttatgatgctgctctttggctgggtggttctccacatgaggttggctcaggtgactcttacggttcattcagcaggaagcttgtagggctggagcattctggactgggtccttgttctgactattggtggaggactttgctttccttgattcctcattcagtagcctagatccaagttgtttcatgaaaaggcaaaacttaacactgttcagaccccctaaagggcttctctggtggctcagatggtaaagaatctgcttgcaatgtggaagatccaggttcaatccctgggttgggaagatatctttgagaagggaatggctacccactccagtgttcctgcctggagaattccatggacagaggagcctggcgggctacagcccatggagttgcagagagctggacactgagaccccataagggctggtctcagatcaaaaacaatactatttctgccatagtttattagctacataaagccagggtaaacagacctcatcacctgatgggaggagctccaagcaccttctgtactatgtgcagtcttatttagacataagctaccacaccctgattaatggaagtatttgatgaactccaaactgtagtcatatacaactatatttccaaagcctatgtcttattcagaaaataggtgaaagatgattagatgaatccacagaataccaaagtagaaacttggttgtatgcagtttgaataatggctatggggatataagtacaaaaagctttctgcggtcacagaagatgaaaattactcaagcaactttctttacttctcagactttcaggatttctcacagcttttaatgtgataatatgcattgctgttttcaaaatactaaatatattgtgaagcattcctgtatggatttgattacagatctcttttttcatggaacactttaatgaagaaatgctttacggaatacattttgggaaatgctgaggcaaagcattagagggccagataaatgtgtgtgtgtgtgtgtgtgtgtgtgtgtgtgtgtgtattaagttacctcattcgtgtccgactctttgcaaccctatggactgtagccgaccaagcttctctgtccatgagattctctaggcaagaatactggagtgggttgccatgccttcctccaggggaccttcctgacccagggattgaagccacatcttttatgtattcggcaccagcaggtggtttctttaccattagcaccacttgggaagccccagatagatggtacatgataatacatcataccctctgagactgcagaaagatgaagaatgtgagggaaagcccacaaaacatactaggacatggaggaaaatgcccagaatgtggagtcagaacacctttaggtcatttccagccctgttgagtatgctgagcaagtgatttcatctgatctatagagtggaaagaatagtgttcctttctcatagaaaggattctgtgcacaggttcaactgggacatgaattatgaagttgtgggaggtagtttccaagtttttttcattatgagagtactgttttttttaatttttctatgaatcctataatctaagtttgcttaccaagtaatgatcaaggaacgatacaggctaaacttggtccactagagagatgtatgcacatatagttggtttaatttttactaataactgttaaggcggattctacctttgatatctctggtggcagcactatcacacgattttactatgtggatttggaggagggccatagatcccctgtcagccctctctttcatctcttagttttgaaattagctgttctctttacattcattcctgccactgcttctcacaagagcaggaagaggaagaggggataatagtcatctcagagacaatgatctcagggcatgttttaaaaatggtggaaagaaaacttctaagatctgtgaatggctggcatgcatgcagttgtacccatcatggttttgccttctgcatttccattcggaaacatgggcatttgcctttttttaatttctctctcttctccctttctttttcatgtttccttatgtcttcctctctcccccccctctctcttcccctcctctctctcagccattttctctctctccctcacaccctttccttctttgttcctctctccatcccactgcctttatcacacctctgttaaatcttcaaggatatactcatcctattctaccccttaagactgagggcctgaatgtacagtaattaagctgcttctggaggctaaatagtgttagtatcatctgctataatgaaaccctgtcaattccacacccccaaccctcctgctcttttaatagtccatt

SEQ ID NO: 48960 - DNA, 1698 bp, Bovine  19866880471520
  misc_feature (1)..(1): n is a, c, g, or t
nccaacaagtggtgacagccggtattgctcactggttaaagacagactccagagccagctgtcatgggctcagactcagtgctgtgatttatcagaagcataactttgcataaattgcttaacctacccagatcttagtttccatcctttaaaataagaatattcacagtcccccattcataagtttgttatagaaattaatagatgagttactatttataaagattttagagcaatggctagaaaaagattttgctcagtaaattttcattccaaaattgaattaaaaaacaatgtcttaaaaattcatcttaacatacctgagatttaccattaaaataactttatataatacacacagtcatataagcacttataaataatggtttcaaggaactacttttaaaagcaagttgatcttgctattctttccaacagaagaaaatagataatttcacctttttaacaaagggtgaaatgtatcacctttttaacaaagggtgacatttatcctttattggtcacatgaaaacttaagtctgttagtatcaatctagaaattttttataaagaaaaaaaaagttgtcatctagtttcaacacatttagtgtcagaaataattgtgctttacagcaaaatggcagccagaagaaagaggtgcagaaatatcaactttaattaaaccctttatttcaaatactcttcacagtatatgcaagaataatttatcactgtgtgaatgaacacttaatacttggtgtggtgtgaaatgggcagagatcttgttgcaccatatgcttttacttttctatttcttcctcttgagattctatggaggcattatcaagtttgtacttgaagtatggggttcaaatcatatatttagcttttactggtgtcctgctcaggcactggccacccagttgtgaataagatatcatcccaaccattaagaagcaaccagtctagtaaggagatggtgctatgaatcagaaatgcctccaaaatctttcacccaaatgagaatgtgaacctggaaaccacctgtagaaaatgtcacccaatggcttccctttacagagaatgaggcacagctgccactctcggagctgaggcatgccccaccgcgagcaaagtggaagatgcttaatcatatctttggctttctgacttaaatgcaggcatcttcctatgacttcacattacctcactataggatttaactcctcctggtcccttccatgcagtcagtttgctttacaagaagcagaatttgatgtagtattgatatgcccaagtcgcgggaggaagctgttaagtgaccacactgcctcctgaatctttctctcgtttctacacagcctttaacatatcctggagtctgtctacaacaaatactgaagtccttattccttgaaaagggacttacataatacatcacaaaatagtattcagggcagtgatggatacttggaattactgtacatgtgtgacttctccagataccattttgccatattacatacaaagcatcagaaaggcttgggtcagtgaaatgaaagagcctcagaagaaaaggagttgttcaccagcaaagtagaattccaccagttcccttatttctgagacttctaaggacagatggctctggtatctccatgtaactcttattcctcaattcctctcttagagaaagca

SEQ ID NO: 48961 - DNA, 2006 bp, Bovine  19866880523689
  misc_feature (1)..(1): n is a, c, g, or t
nttgcttcagtcgtgtccgactctgtgccaccccatagagggcagcccaccaggctcccccgtctctgggattctccaggcaaaaacactggagtgggttgccatttccttctccaatgcatgaaagtgaaaagtgaaagtgaagtcgctcagtcgtgtctgactcctaaggacctcatggactgtagaccaccaggctcctctgtctatgggattttccaggcaagagtactgaagctagattatatttatttttatttgctttccatctcctcttcaccatggccccccaaaacttaaaaataaacttgctgctattttagggcaaaatatatatgtatatattctcttggagaaaggcttttcattttctttctaagtgctcccaggttctataacaatagactcatgtatgtatgtgacttttatagtggatgtgtttagcttttcctctttctctgacattgtattccttttttattcagtagagaagtcatggcgaagtgggaaggcagatccttgggagcatgggaagtgtggatttgaattcttattctactgctaattagctttgttatcttgggcaagttatttaacttctctgaggtttgattcctttctcttttaggaggtaggaacagaataaaacaagccccgaccagtgctgtcgggaagattaattaaaggaaaaatgcatgtagaggcaccaaggctatatatattggggctatgtagtaggtacaagtaaaactggagcatcctctattgcacttgttaatatggtaaagggtagaaagagaaactccatcatttgggcaagaaatagggataaaatgtagagtaggaggaggtttgctcatatgctaggagactgtttgtttattcatttcccaaagatattacaaaggctgtgaatatttatttagttctgctcccaatagcccttctaatagggaattatttgggtacaacgaaagacatttgtaaatgcggctgataagactgacactggacaaggagtgttttgttggacacaagaattctattgtccctggcttcagttgtcaagtgcccggggaacccagaatttatggtgacagcacaatgggcctttcagggcccagcgaaagagctgtgagatcctgctccccggcttttcagggcttctaatctttttatcgggcccggacaatgccggattcagctgctgcctgcgcctcctgactgtccattggccgtcaggtattgtgcggtaattaccatggtgacaatgggccctctctacgccagtccatcggtggtttggaaaacggcaaaggttgtcactttgtattaggggcctctaaaggcatggcttacttagaaaaactaccaaagagaaatcaagataatcgtgttaagagtttgatttaaagggccactgtgtcaaatccatttggagcccaggaactctatggatgtttccttgtaattacagccagacgttgggcatcatcccacacaagcagcaagtagccggccatggcgagtttgcagggagccctgagctgtgggcagctggcagcctttaacgtcatatggagcagagatctcagctgagcctttgaactctgaggggtccctgaacttctctgagaattcagttcctcatatgaaaaggaatggggtggaaaatgcttatggatgaatagtaattatatattccatgagtatgtattaatgtatgcaaatatagtcccatacagatgtgacagttggaccataaagaaggctgagtgccgaagaagtgatgtgtgtgaattatggtgctggagaagactctttagagtcccttggacagcaaggagatcaaaccagtcaatcctaaaggaaatcaaggctgaatattcattggaaggactgatgcttaagccaaagctccaagacattggccacctgattcgaagaacagacacagtggggaaaaaccctgatgcggcaaagtttagggcaggaggagaaggggg

SEQ ID NO: 48962 - DNA, 4225 bp, Bovine  19866880530291
  misc_feature (1)..(1): n is a, c, g, or t
ngtcctgccctcattgatgtcatgttctatggggtggtggagaaatgttcttgttgttcagtcgctaagaaaatgctgttgtttagtagctaagttgtgtctgactctttgtgaccttatggactgcagcatgccaggcttccctgttcttcactatatcccagagtttgctcaaactcatgtccattgagtcagtgatgctgtctaaccatctcatcctctgtcgccctcttctcctcctgccctcaatctttcccagtgtcagggtcttttccaatgaggcggctcttccttcacatcaggtggccaaagtatgtgcgcttctgcatcagtacttctaatgaatatttggagttgaattcctttaggattaactggtgatctccttcctgtcctggggactcccagcagtcttctccaacaccacaattcgaaagcatcaattctttggcactcagctttctttctggtccatctctcacatccatacatgactataggaaaaaccatagctttgactagagggaactttgttggccaagtgatgtctctgctttttaatatgacttctatgtctaaaactaataaataagtgcattatagagtatgttagaaggtgatctgtgtcatagtaaaaagaaaataccttgagctaggtgaaatgatcaaaattgatggggaaggttataatattaaataggaaaataaataccttattttctagtcatcaagtcatataggcttattgttattattcctgtttattagagtagtagactgagttttatacaagtctgtgagttttaccagggtcacactcgtagtaagtgttggagctggattcaaatccgagtagtctcatggcagagagttctaaatttcatggacttctgaaagttctagtttgtgtgccccgttgccaaattatatgtgtgtgtgtgtgtgtgtgtgtgtgtgtacactgtctgcatttagaatcagctgtggtggtcttccaggttctccagggcaggagtaagcaattccagctttcataatcccaggctttaattgcccagtgggcaccagaagccctcagtctcccgccgagtcttctattcaaataagacacatgattctaataaagaatcaataacacaaaggccactgcgtattttctcatatgctgaaatggggaggggctcactggggttatcacaccggggtgcaagagaaggggaacgtgaagagggttgcatgtttatttttagtttcaattaataatttttgctgagccatcaagtttggggagactttttaaaaacgtgcagtacaattactttctaattgctggagatgagtagccatctgagtgcaatattccagtattttttttacttgtgaaattattgggcattgttttacacactctgacatttttgttattacctgagagagagaaaatggtcttaggaccacggattgtgcatacgaaaggagacctcagagatggccttggccaaattcctcattttagagatagtgaaatttagaagccctgagaagccaagtaccatacctgcaatccctcagacagtgccaaagaggaaatgccacatttagaaaagcataaattactagcattggggatcgtcttttcctttcctctcattctctagataaggaaatgaaactcaatgtaaactgactacctttctcattggaatccaacccaacctattctccctacaacccactgattttaatgcagatacaaacatgtcattcacttaaaacacttcagtgattctccgtcttcagaataaagatgattttgttatttgtcttgtccttacttttgcagggacatctcttgaggttctcctgttataaatctacttgttctgctgccgtacactctgctctcctccgcactttcctctgccttggcctttgtcttctctttctgcaggtttcatttcaggtgtcacaccttttctgcctctcacttttttctgggaagatgcccttttgctgtgcatgtctctatctttcagttcttagagttgctgatattctgtttatgtcagtctttccattactggaagcccatttagatcagagatggtggttttatcaatctgtgtatattcatccttgcacctggatatagcctgtgatgaacttatttaaaggataaatgagtaaatacataactaaatgatttttggattgatacaggttatgtatctctaatattatttctgtaaatgtttttcaagaagaaaacaaagcaaaaagtaaaaatagagttttgccctcttgctgagaagtctcaagtgaaatatatccttgtaaactttcataatttagatatggaattatagattattgataaaaaattgtttttgcaaagacactttgttgctgttctgtaaatctcagttttcccctacatgaatcatagttcactggatccctgctcttccattccatagaattgtgacagtctttatcaaaattttccatattatattgtgaattcttcattcatttctttaagacagtaattgaacgtatgctaaatctatcattatgctccagggaaggatgaacagatgagtaaaattaaggagttcatagactagtaagagaaataaacacacagaattagttcatatccaaaaataccggtcctaactatacccaatggccaaacgggtatgcaaagggccaggggaattcagaagaggtaaaaacgtattctcatttggggaaatggggaaaactttgtggaaaggaatcatttgactggaaccctacagactattgacaggaaaggagttcatgtatcatgttaatggtagaaattctcaaagatattctggatttttcttcattcaagataacatcatcgactctgcttggcatttgtcttataatttttactatagaactgtttggacttaatgacctcaggagtaatgaggataaatattgtttaatctaagttgttagtctttcaacaaattagacttaagaatgttgctgtgttagcaaggtaaatctactctggattaaatggcccagagaatgatgagaattaagaaaagcattgaatatagacacttcattcattcagtaaatatttactgaagatgtgctgtatagcagtgatatactatttgctgaaagcttcaagtccagtgaggagtcagccatggtagcagatgataataagatcacaattatttttctaaaagtatacatgactatgagtgttgtaggaagctctgcaaagtaggtgttagttgaactgatccttgagaggtgaggtgtctgccagttactttggagcagaaataaacagagacaccacgtattaataggcacagaaacggagaacacagtgtgttgttgaattatttttaaagtttcaagtgatctcctttacttccttatgggaaataacacttttcattttcttttgtggttgcttcagtgtttacattggttgtctttaccttacacaagtattttaccattttcctcccctggcttttgtattaagattgccatacattttgattctgtttatttataaatcatagaagttttttttttttaattctgcttttaaaattaaaaaaaactttaaagagaatttttaaataaaaaaattatatatatgtgtgtgtgtgtgtgtgtgtgcgcgcatataagtgtgcacacatgctaaatcgcttcagccatgtccgactctttgcgaccccatggactgtatccctctaggctcctctgtccatgagaatttccaggcaagaatactggagtaggttgccatgcccttctccaggggatcttgccaacccaggaatcgaaccccagtctccagcattggcaagcaggttctttaccactagcatcacctagaaagcctacatatatatacatacatatacaccatatatatacacactcatatatacatatacacacacataccattcatttcagaggttctttaattccccgtatagatttcactttccctctgataccatattctttctgcttgaaggaattcctttaacatttcttctaatgcagatccactgttgatggactatttcagatttttgtctctctgaaaaaggcttcattctgtctttatgtttgaaagatatttccaccaagtatagcattcttggttgacatggccctccccccaccccaagtaattcag

SEQ ID NO: 48963 - DNA, 1578 bp, Bovine  19866880565630
  misc_feature (1)..(1): n is a, c, g, or t
naatgatgactagttagagcctattgaacatttgaaacatttgtaggatgtaatttattcataccaaatacatcagaaaagtaactctcgtgttaaatgacagcatgaagaaattaaaaggcaaaagtgagcagtcggctttaaacggatgctctgaggtttgtagaaaaatgtcaaaagagttcaaatgttcataatgtgaaagtaaatatttgggcatactgtggaaaggccttgtcctaatgtaagacaatacagttcttcatgaaatataaagaggagactgtttagtctagcttaatttccatatgttttattaataaacaattataccaaaaaggtatgttcttgctccccctcttccttattcagctctgtctagttttcccataaagttcaaaccaattgtaattttcctttttcttactgattttttgtcatttatcagaaagtttgctggatcaataaaacatatatctatgaagacttgaagttaggagactaataatgtgacttggtccataggatgtagcaatagctaaagtcacctgtctattatgcctccctaacgtgtgaggggagatacagacacaaagaagtcaaaggcaggcatattactgctttacacatggctggctttgaccttaaacttggtaaactgagccaaattatatgcagaatacatttgatacggtgtgatatttaaaatgataattttctttaagcttaaatttgcatcttgggacttatcactttgctattgctattgctaagtcgcgtcagtcatgtctgactctgtgcgaccccacagacagcagcccaccggcttccctgtccctgggattctccaggcaagaacgctggaatgggttgccatttccttctccaatgcatgaaagtgaaaagtgaaagtaaagtcgttcagtcgtgtccaactcttagcaaccccatggactgcagcctaccaggctctcctgtccaatcactttagtaaatctaaaataacaatataacttgtagacttttggatcgaagccattctgagtggcgtgaaatggtacctcatagtggttgcaataaatgctggagagggtgtggagaaaagggaaccctcttacactgttggtgggaatgcaaactagtacagccactatggagaacagtgtggagattccttaaaaaactggaaatagagctgccttatgatccagcaatcccattgctgggcatacacactgaggaaaccagaagggaaagagacacgtgtaccccaatgttcattgcacctctgtttataatagccagggcatggaagcaacctagatgtccatcagcagatgaatggataagaaagcagtggtacatatacacaatggagtattactcagccattaaaaagaatacatttgaatcagttctaatgaggtggatgaaactggagcctattatacagagtgaagtaagccagaaggaaaaacataaatacagtatactaacgcatatatatggaatttagaaagatggtaacaataaccctgtatacgagacagcaaaacagacactgatgtatagaacagt

SEQ ID NO: 48964 - DNA, 515 bp, Bovine  19866880581655
  misc_feature (1)..(1): n is a, c, g, or t
nacactctctaaaagtttttgctacgtgcacttctcactttcctgcattggagaaggcaatggcaacccactccagtgttcttgcctggagaatcccagggacggaggagcctggtgggctgccgtctatggggtcgcacagagtcggatgcaactgaagcaacttagcagcagcagcagcagaaacagtcacagtctcagacttctcttaggaagaagagcaaactgcactggccatagcaatatggctgatatatgatgtagtaggagagggttctctcttgagcccaaggcttctcaaaagtaaataggagtgtccttctgcaatgtaaaattaagaaaaagaaaatgccattttgttattcatctcttcttagacacttactctgaagatacaagctgtacaaattcaaagtgtcgacaagctccacaaggtcaggaatcatgaatgttttcttctttattgtaaatcaggtggacagaggcataaactaatgctcccaagtgatttctga

SEQ ID NO: 48965 - DNA, 874 bp, Bovine  19866880681219
  misc_feature (1)..(1): n is a, c, g, or t
nacaatctggcaacgggtcccagctcacaccagctctctcaccgatgggccagaacaaacttccctaaactcctaaaataggatcaacagttcaggctgagcctcgggccctggctctgacagcaggagcgcccaagccggaattaaaaaccaacctcaaatcagctggaggtcgggagtagcaggtacagaaaaagcgcacatcgtacagagcggtccggaggggacagctgcgatagcccgggcggggcgtaaataaaacccgcactaagcttgtgtccgccagagcctgttccctttgccgggatccctgtgccatcattcccgtcccacgtccgggccagccactgcggccggcacctgcacgcgagctggctgatggagaggccaggcgcgttaaattcagtgcctactcactgcaccatcgcagaggtcaccgcgcaggcgctggccgcctagagtcttccttgagaggcgggagccggccgcgacagtccatctccaaggtaccttccctcctcgatcccagggcacctcccacggggactccagaggctgaagggccgtgagagggtgcggcccagctctgtactggacagtggggagcggcgactggcccgggcagccagagaggcggccactatccctggcaccgccggcagccttgtgaataaaccactgtggcgagacacacacccactgctaatgagtcccacacagacgccagccaggaaggccggagcaagcaaagacaggggcggggcagggccaccgggggggcccacctgggctcacaggtgcggccagcatggcaggggagactgaaacatgtgtcctcccctccaaggaaaagcatctttgccccgccccactc

SEQ ID NO: 48966 - DNA, 1233 bp, Bovine  19866880694558
  misc_feature (1)..(1): n is a, c, g, or t
nattctctgactacaaaggctgtgtatatataaatgaataaattttgaccaaccaaaaaaaaaaaaaaaagacagatgtcagcctcagtacaactataggggttcagaacaagcctccctaaaatgtatcacttttgcatgagaattattttgatctaaaagcaattgaaactctatgttttcaagagaaacttctacctttcccttaactatctagaagaatttaatatccccgcccccccagaagggacttccctggtggctcagatggtaaagcgtctgtctacaatgcaggagacctgggttccatccctgggtcaggaagatctgctagagaaggaaatggcaatccactccagtactattgcctggaaaatcccatggacagaggaacctggtaggctacagtccatggggtcgcaaagagtcagacacaactaagcgacttcactttcctttcctttcctttccccccagaagagaattactagtctagagataaatttcatctaagtggtctcatctatatggcagggaaaacatctcatttccaagtatctggtcttctttttgtcctaggaacgacccatctgtttcttggcggccccgtgtcccactctttacctaagcaaggcacacagacctcattttgcccttctctgaccctctcatgtatgtgagagccccatgtgtatgaaattaaatttgatttttttctcctgttaactcattgcacaccaatttatcttatttttgctgaagtatagttgatttactcacatccgttcttagactagccagaagaacctcgaagagtaaagttttcctcctccccaacacaatatttcgcatgtattaagtacttcagaaaccttaactttctcccatttctttattttcctctaaccttaattaggaccctctgaccagaataaagaaaaattatcctgggaaaaaaattagttcacttcagcatgttcaggccaaagcatgattaagtaatatgctctggctagctcctctgatttaatacttagcttctccacatgcagtgcatggcccagcagcatcagagcttcttagaaatacagactctcaggcctcacctctaggttcaccagaatgagcatccgagcaagacccccatgtgatacacatattattatttaatattattattattcctacacctattattaaagaagtgctgcttatggaaacagcaataattta

SEQ ID NO: 48967 - DNA, 1663 bp, Bovine  19866880709945
  misc_feature (1)..(1): n is a, c, g, or t
naaaatatcttgaatgctggacctaaacagaccttactggctttggaaaattactctgcctgggcaaatccagttccttttgggcctttgacaataattatgcttggatgacgctgaatcaatccattgaattgtttctaccttcctgatcttacttttattccccctaaggaaaactgtgatctgtatatgagtactgaggagcatcatagtatggcaggaaagagaagacttgaatcaataaaacccagggatgcacatattgcactgtctcttatggattgtatcatcttgctcgagtgagttaaaacctctgaaatttagttttctcacctttagaaggagtgcaaacacatatctttcacagaatggctgggaagatcaagagacatgatgtttaatatacctgatccactgcttgggccccagtgggttctctgtagatgctcttcttcttgctttcccctcccaccgcccgtttagtgtggcactcagaggcagctgtgatggtcgcctccaggtaggcatccatgattgcagaatgacaaaacccttgtgttcccaatgtagccagtgctctagaggtccagttgcctgtgtggcagacattcttgccaggtctcagacccgactgcattcccacagggcccctcacagcccttcatctgtgtctgtcccatagcacttactgaattctcccagtcgtggactcacatgcctggtgaaacttatgaaactgcctctcccctcaccccccagacagggaaactgtgcttttcacttctccacagcctgcagtgtgatacctggaatataggagatattaagaaagggtaatgacgtgggactcaggccagaatgaccagctgtttaactcggctttcagatctggtcagttttttggttctgttttgccactgtcaacttgtcaatatctcagtctgaggggttcttgattcacaaaacctctcctgaatgccaggactgtgagttatctcatgtcatccttaccccaacccttggaagtaggtgttactgctttcaatttccaagcgagaaaacaaactccaagaggtgacttaccttacccccggccaggtcattcttttgtggtcagcctgaccctcccatagaggaagaaaaataattggcatcctagcacctaaatattgccagacgcagtgtagctgccaataagtacatgtagaatgaaagaaacattatgcagcatctgaaacagatgctttttattatctcttttgcatcttttcaatgaaaaactggaaatcgagagaggttactaacttaactcatagttacatagttagtgagtagcaggcctcgtgttttaaatgaattccatttgaccaagtacttaacctctgttatgctgcctaaagaaagacaggtaaatatttatgagcaaagggaaaaaaaaaaaagagcccttagcattatcattctccatcagctctgagtacggttacaaattctttagctggcaaaagaaataatgggccataaaacacttatccgccctggaccctcacctttcattgtttgtatattgctactttcaaaatcattaagcctgtgactgttcatagggtaattctgagcatattacaattgcttcgagtcagaagccttatatcccaacagc

SEQ ID NO: 48968 - DNA, 3408 bp, Bovine  19866880715349
  misc_feature (1)..(1): n is a, c, g, or t
naacccggttcgatccctgggtcgggaagatcccctggtagaaggaaatggcaacccactcagtattcttgcctggaaaatccccatggacagaggagtctgaaaggctatagtccatggggtcacagagtcagacacgactgagtttgccattttgccctggttgtttttcttttggctaatacaagactggcacccagtgcagttgacgtatcaaaggctgcttccctatcataattttcccttttaatatcctttgtatatatccctcccttgggtgatatcatcatcatggcccttacgtttgtatctccaaaccggtaccatggagaccatcattatgaagaacttttaccttttgttaaagtaatcacaaagtatgcagataaaaatagcatccagttaggagtctaggttgtagacataaaaatttgaaacctgaatttatttaccattaatagaaatactacagtttgtacaagacatatactagtaattaatgacctcatttgcaagtttttgcctaagatggcggggggcgggggtggtggaaaggaaaggcttccatgtttgtggacagggagaagaatataaggtgtcaggatgaaacaccaaggtgattgaaaaacattttcttaccatgggaaataccttacccagaactgaagagcatgaactatcttcccacctctgaaggaagcgcccttctctgtaggcaattgcattcaaggctgcaatgacatttctaagaattcactttcctctctttgccaatatgtttctcttcctcattagtctactgcacaaagaggagaacttccaaaaaagaattgatatttactggtcatctgcaacagcctggcactgtgctaaatgcctttatgaatggaatcaaatttaaccctaaaaactattaatttcctggatgagaatatagcaacttaagacatttacctaatatgtccaaatgtcaggcaattaatatgtagaagagtcatgattcaaacccagatctgttgaaccccaaatactgagatttgctctttggaagctttataaaagagaatactttgcccacctgatgtgaagagctgactcattagaaaagactgaaggcaaaagaagagggtggcagaggggatgtttagatagcatcactgactcaatggacgtgaatacgagcaaactccaggagacagcaggatacaggggcctgcggtccatggggtggcaaagagttggacacggcttagtgacttaacaacaacagtaataaaggagaaggatttgagaaatctcttgatgaaaacttaaaaattgatagaacatttgtcattttctgcctcgtcttattaaccatggaatcaatttgacacttccctgaaaatatgtcttacagaagctcttattttttttcttgtgtgacccgtacatctcagaaatgtgtatgtccaaattgaggggaccctctcaaagatggatatagagtagcgggctaattaaaataatgagagaatctgtagccaaacctaggatacaaaaatgatttcctacagaggttttattattattgtcagtttcattttccatgtattttgctcgagttgtttttcatggactccctgcctattagtggttcttcttgttcataaaggatcagtgaccagagtggacaacaagaaagaccatcacagacatggtgctgtctcctccaatatggccctccctgcagcaccatcccccccattggtgctgatgtctagatctaaaggggggatattgtatgcattcaagcaacagcaaccacctaagtgccaagctagtctggttagacatgcttctcgtctaactatgccatatcctactccgcaccagttcacgagctctggaggacctggattctggtgccgggttttcctatagaaggattcctgagcttcctggaagcacagcccagagcacaaccagaggtttttattatttggtcctaatcgcaaccccaggtcttccctgtagctcacagggttaagagttctcctgcaatgcaggagaccatggttcaattcctgggtcagaaagatcctctggagaagggaatggcaatccactccagtattcttgcctggaaaatcccatggacagaggagactggcggggtccgtggggtcacaaaaagttggacatgactgagcaactgttactactaatcggaaccccatgaggcatgcttgctatcaacttgtgtcctcactttaaaggtgaacaagtaaggctctggcaggacaaatgactccttctaaaacatgtgtttggaccatgccgaggaacagacattcagtccatttattttccacctctcaaactaatcttaaaatccatatgtgaaacattttttaaaagttcttgagattctactgatgaatcactcagagacaataaacgattcagtcagctgggtcctttgatgagctttcatttcatagtctcagtgtgtctgagaggactcagctgttcggaatatgaaacatcttgaattcacaggctggtgtcctgctcagatacatgttttccactagtgtttgattttcaattacctccatgtgtaagccagcctgctgtcatctggaggtacagttttgcatggattgcacactgaagagtagatttttaagccatggcctccacaggtttaaagaaaaataaaaacactcaggtcacgttcccaccaaacttctccatgggtaacaggatgggactcaatagatgacatctcttgggggtgtcattcatatcagagaggtatatttgaccaagcaatttaattaatttcttcataaattttttcatatttatttttattcatgatggcatggcatttgtgatatttcagatcattaaaatacagtaaatgttttaacatttaatttgtgaaagtcttacttgaattcaaataaaattatgagaaggaaaaaataacatttgaagtaatttatgtatatatgtcagtttttttgtgtttgttaagcatagaacaatggtatagcctacaataggaaagaacagtcagcaaatggaatgttaagtttacattctatttgaccagcttttaaaaaaaatcatgatttttcgtagtacatataatttttctccagtgataagagcaatatatgctaatcacacaaacttcagaaaatatagagaagagggctggcagttctgccctgttttgattgagagattggcagcaaagggcagaagatctgtcattaataagatttgccaaaaaccagccagcgcacacaccttagcttctgcaatactcaaaatatctattcagtcctaaatgagactgaacctggtatagatttttttttttttttttacctcacacagactatgttacaattt

SEQ ID NO: 48969 - DNA, 1905 bp, Bovine  19866880827222
  misc_feature (1)..(1): n is a, c, g, or t
naactgcacaaactttgacatttttaatacagggcgtttcatatttgatatatctttgctcatttgttcaaacaatgggaatcctttttaatagacataactctgaaaatatttagatttgaagacatataattttattagaatacttttttttttaacagcaatcctgatgagtttaatttaaccacaatttttacttcatttagcactcaggaaattggaaattatttcatgctatggtaattttcttccttttttttcctccaaacactaactgggatgtgaatgaaataatagtgcttggaaatacaattttcaaaatgttttctcagataaattagtgaagaggtggttagtttgatgatggtgaccaagcaaactagatcagtgggagacccacctttttttctctctctctctttggatccctagcccaggacaggtgctgagcaaatgtttggggcaggaatataaggatgaatgggaaaaggaaaataagttcttcattttatgacctaggtattatagcattttaaactactggaaatgtgtatatggggattcctctgggtaccttgcctccactccgcctccatcaaaatggtactattttgatagtaccattaataatgcttgggatttagatttgacatgactggatatttacccagcatacagtcagatcaaattgggcctggatgcacagagcagatcactgaagcgtcatctgataatctgtgtgacttcctagccctggaactctacttaccgtctgtgggtctcattttttttttatacagtggggatatgtagtctgtctggcattcctccaagaagtctaggaatgactgatctagaataggaaaattaatgtatgacttgctgcacaaatgagagattttattgttgtttctgatgttatttgggctgttttctaccataaattgatctttgtagcatctgcaagaggtgacctctgatccaaagtgaagtcaagagagatttggtttttcttttgaagactttgatctggtagccttagggtaggctttaaactgactctaagaaatggatactgcaatttactgtgtaaggactgtggtcccacgggttctcccagactcgcctctcaactttgttgcagatactcaagtcctttatataaaatggcagagtattttcttataacccaagcacatcctcctgtctactttacatcaactctatatcatttataatacctaattcaatgtcaatgttatgtaaattgctgtaaatacaatgtaaatactatgtgaatagttgctgacctgcagcaaattaaatttcacattttagagttttctggaattaaaaaaaaaaacaaacccatctgtgtggttgaatctgcggatgcagaacccgccaatgcagagtgtcaactggactcattttcaagtggaggctatgaggaatagtccatccttgtccattgttttccaagtttgaatgtgcatttctacatttctctggtggttggaagaaaaggtttatttacatgtcattagcaatactaacggagaaggcgatggcaccccactccagtactcttgcctggaaaatcccatggacagaggagcctggtaggctgcagtccatggggtcgcaaagagtcggacacgactgagcgacttcactttcacttttcactttcatgcattggagaaggaaatggcaacccactccaatgttcttgtctggagaatcccagggacgggggagcctggtgggtttccgtctatggggtcgcacagagtcagacatgactgaagcaacttagcagcagcagcagcagcagcaatactaaagagagaatagcgtcttcttttaaaatagtaaactataaaataaacacaattctcctct

SEQ ID NO: 48970 - DNA, 1301 bp, Bovine  19866880833896
  misc_feature (1)..(1): n is a, c, g, or t
ntctgtgggtgtgacgtgaatggggcgctgctgtcctgcaacgcagaagcctacatcctgaacgccggcctgagcaccggggcgctgatcgccatccttgcctgcatcgtcattctcctgggtaagggatctccccgggcacccgtgggaagggcctttcaaccagatgcccatccttggcacacgtatatttcccaagttatatgtgctatatactgtgggtgcaagttgggacaaaaagagaagtggtatctgcctgctcctctatttcagggtatggcgggggggagcaggtgactaaacaagcattagagcagagttgggggaactttgtattgagcaaactgctggcatcaccagactgctagcagaatacatctgggggcatcaacagaggcccaggtagaacatcagaatatttttcaggagagcaatttaggcagagatatagcatatgaacaaccatttgccttacaagaagaatgagaagagttagaggtagaaagagtaattgtgacgtcaaagacggtctatggaggactcaaggaactggatgaacattggcccggctgaagctggatcttggctccccgccaccccccaccccagatgtcatatgtaatatctgggtatatgccccagctcggagggacctgggagaagctttccctgcacttgcccgctgagtttggtgcccctcttccgcacgtcgtcccatctatagtttactctgtaatagcaggaaagcctcaggaagattgcatcagtagttccaaagtctcagaactcatgcatgacaaaaaagtcaggattcaaatctaagtatgtcagacatcaatatatacttattccatcatggttagttgtctactgaatgaattaatggatcctcgatgcatagggaagagccaacaagttgaattcagcaaatagttaatgagtattttcaggataccaggccctggttcagcccagagggataaagagaagaattatacaagatttcagtgatcaaaaagtttatcatctattgaggaaaataggcatgagcagataaatacagaggcacatggtgagcaccatgttggggatatgaacataacaggcagtgggggcacaagagtagaaagtgcctgacattgagtgggaaggtagagacatcttcctggaggatgtaacacacctatcagatgctgagtgttccatctgaggaaaggggctgggatggatggatagtccaagcagaggggacagaaaacagaaatgttctgaaaagttcatcatcaaggggagaggcagat

SEQ ID NO: 48971 - DNA, 1202 bp, Bovine  19866880868090
  misc_feature (1)..(1): n is a, c, g, or t
nttcctctatcagattccatccctctgtgctcctacaaacccatggagctacctccaaaaaactctacaccatggttattgtctgctggcctgtctccatcagaagaaggggtgctctttaaagacatggctttgatacaactgttgtgtagatacatgtgcatcgggttcatttgttgtggctgcatttagtccacggcctaaaacaggaatgctttccaagagatgatttatgaatgaacacacttgggattcttttttcctctccccatgggttatctctcacgcagtacacacattcagcagcacactgctgtattagccagaagcacttggcccacatggagatttaagacatgaccaccaaaagaactgtaatataaccccaccctccaacttggttaagatcagaaagcatgataccaaagaatcagaagagacacactgggggcactacggcgtggaggccccgactctacagagttcactgtatggccctcgacaagctcattaacctctccaaacctcagcatcctcatcataaaagaagcaggatgacggcacataccaaagcactggtgatgtcacacaagacaatgaacgtaaatcatgtagcccagtgtttgcatacgggcatctcattaaatcaggagggtctctgcattgtgttcatccgtcctaaaataaagcaagatcagagaaccacaacttcggttgaagtttgtcctttcagtactgattctggcaaaggtaggacatttccactgcctggcacacgggagcttcctagctcttggtcgatcacgttagtgacagtcacacggtacacactgaagatctgcaaaggagtcagcaagtgaactgactgtctgtttatgattctcatggcaccggctacagacagaaacttggcctctttctccacagtggcctacatcccaaaataggaaatgccttcacagacagacccagcaggcagagggggttaggaggcaggctgccaacatttcaaactgtcagggacagggcagagcctggaggatgctccagcacaggtgagttgcccaggccccaggaagcttttcaggattgatttttatgcgaatgaaagagaatcagtgacctgtgaggagcagcccctgctgagtaatcagtcgggagggtctcagtgtgtgtacacttttcatgagtctaagagcaaa

SEQ ID NO: 48972 - DNA, 1203 bp, Bovine  19866880920292
  misc_feature (1)..(1): n is a, c, g, or t
ntaggaattaaaaaaaaaaaaaaaaagctggaaggatgaatgaataggatgtggtggattttagtgatgatcagaccactgctaccttccctcccagatttttgttttgccaggacccctgtccggagagggtggggagtgagaagtgagcatgcagttagagcagccttaccctgcccacgagcacagggtcgggtcccgtgtattcctctatcacgaagaactggttccagacccaacccctcttggagcgctgcagcacctggccctccttgcccttctcgtggtgcccatggaacgagggtcgcaggtggctcctccggtccgtggcgaaggcctggctgtggcacagcatgcccaggcacaccagggcggcttgtaaacagtagttctccttcatttttggttacgtggtaggcacaggagaatgcggctgtcaccccgtccgccgaccgtgcggctgcctggcggatggcggcctccccagacgcgtcacgcagacctcactcgggctggaaggtctctcctcgccgagcacatcacgtcagggctgcccacgtccccggtcggcctctgcagggagcaggaaaggtcagattagtcacaggttccatccccacttccattctattctgtaaacactgacccacgctggacgccgtgagggctttgcgctgggtactgaggaggcagatgccagtgagaaatagtctccaggctctagccagttcaccacgcagaataagataaaggtacaggaagaaacccctcaaagtctatatgaggataaaacgtgtgtgctgtggagtccagctgcccaagtctgagagtcagttttaccagttacttagctctgggtttagggtaagccaacactgagcccagtgtgctcatttatgaaatgggccggggaatcctactcagtaaaaggtacagatctgagtcatagccctaagtctcttagcccagacctcctatgtggtcagcacttcatatttatctgttattattatattaatgatcgtgggacttcccctggtggctcagatggtaaagcgtctgcctacaatgtgggagccccgggttcaaaccctgggttgggaagatcccctgcagaaggaaatggcaacccactctagtattcttgccggaaaatcccaggacggaggagcctgggggcgacagtccatggggtcgcagagt

SEQ ID NO: 48973 - DNA, 1220 bp, Bovine  19866880958376
  misc_feature (1)..(1): n is a, c, g, or t
ngggtgaatgcactgtaattagatacgctctgtctgtcccagccttcatccgtgcttgttcttcctgagaatccatggccaggatgttgctctgaactccccactcctcccaccggtggagcctaatgacggctgagaagagatctctgtgtgtcttaaactaaatccagggcagggcttccactgctccagtttccgagtcaggtggtcatcgtggtggagaagacgctgcatccgaagacattttcttcagggaaaagtgaacatggagaagtaatcttaatttgtgaaatcatgccagcacagaggaccgtgtcaggaggatttctggcaaataaagaagttcatggaggaagtgagggtttttcttcaactggaacaaccaggggaaaggcaggaaaaggcagtgcttattcacaggatcctttgacaagtattcagtgccagaaggcaagagaataaggctctggccactgtttaccgtggcctgtggggctgtttatgccagctttctggattcggcacctcgcatggtctaaatgagtgaaaaaaaagaggaaagaagagagagacaccagagcctgacctgccatgagaaagggcatccgtagtctctcccacactctcttctcccccctcctctttcttcctttcttctctcttaaactcccatctcatttaacatcctgcgtactagcttctcgcctgagcaaaaaccttgaccatagaaactctgagaacaatgctttatctcaataagcatctcagaactctgcaacagtcagacgactaattaaaccaaataacagtgaaattttgcctccagttctaacaaacgtgcattattcacaagcacttagaatgtaaaagtgccttcctgtttaaagttaaataaactgtccgggcggtaagtgagctttggtttacaaaacactttgtcttactttcaactgagttacttaatactccctcccatgatccatttccattgattcctccttcatcaactgctcatgcattccaacatactcagagctgcaaagaactccactgctgattcaccagggaggcgactatattcagttttaaagaaaaaaagaaagatacaaataagaatccacttaagccagtaatttttttaaaatagagctttcctcttaattataatatagcatcagggggtttttttttttggctcatttcttcttctaaaattcata

SEQ ID NO: 48974 - DNA, 1471 bp, Bovine  19866880975320
  misc_feature (1)..(1): n is a, c, g, or t
ntccttatgcaaacaattccagtcccaacactttgtcctaaagtaacccaatagggaagggagttggctcttgaactgtctcactccagtatatgtttcatatatagacatagctgtagtataagatgtagttttcattttcattattattctcgggaacttaagaagcactatataaatgaagtgtcactattagtattattatcttagagtggaaattgcaatttagcagttagaactgggcacactcgccttcgaagtaatgcattggcgattcttgtgttttattcatcaccgttcctccttgcaaacctcagagaatcttcagcttcagcaaatctccacggtgcgtttgggagcattagtcaggagactaatacagcctgagagaacatgtctttgaagtgagggatggagcctgccgaataatctcagctgccctcatcccagcaaccccctcctgccgtgcccgcatcgcaagcccgggagggacctggctttcacttagagagaggcataccttgtgtgcttttcttattggcgcttagcttctgtctcatttctcatgaatggagaaagatctccattcctgcctccattccgcaggcaagcctgcggccaattgccgacagatttttccctaataggctgtccctgtggttccctccttccaggcagaccagcctggtgaaaccctggcattctgataaatagctgtgtggccttgggcaagccacttaacctcagtttcctcatctgtaaagtggcctgttgggtactttccagctctaaaatggtctggctctcaaaccttcttccacaaatcacctggccgtggtgccttctgaccattgaatctcagcattctggaaaaggtgccctccatgtggacaaaaatgccagggtggaaatgcacagatgatttgtgtaagcagagtgcacacgcagggtggtgagtttgggactctgtgaagtatgttgcgtatcaaatttaggactttgaacttcattccccaggtcctaaggagcctttgccagtttagagtggtggtggtggggaggctgtgttcaatactttattaaatgatatctggaccaacattgagaagaactgatagtagcaaggggcagagactctaaacaggaagactggcaggaagctgggactaggcggcagcatttttattagtagaatcgcagatatgtactgagtctttactggctgcacacacagtgctcagcctttcctacaaattatctcaatccatcctccctacaaccttaatgagttggaagctataattatccccatttataaaacatggacaccaagactcagggtagtcgaacaactttccccagcgttatacatctggtaagggggcaactggggattcaaacaggaagattttgcattcttcactgctctgttatcacaggaccgatttaagaggcttccaggataggttca

SEQ ID NO: 48975 - DNA, 1271 bp, Bovine  19866881069763
  misc_feature (1)..(1): n is a, c, g, or t
ntgcatgatgtactctgcatataagttaaataagcaaggtgacagcatacagtcttgacgtactcctttcccagtttgggttagggtacaaattgccaaattgattactgatttatacttctgtcatcaaaacaccagtgtgtttgtttctatgaattcttgccaggacaagcactataattttagttgtttttgcttgtttttatgttggtttcattgaaatacagtggtttaaacgctactttagtttagtatgtttgtttgtttacttgtcaatgatgctatatacatgatttttttggtttattgctggtcggtgaagttactcttttgtggtttgctcataatctttactcatttatctattagtactttactgatgatttgagttatctgtatgttaaagatgggatccctttacctgctgtatttcatggaaatattttccctctctctctttgcctttctagttcggttatctttgcgctagctgttccgactgcttgaaatgctcttacaccacatgtctgcgtgattagctatgcctccccttcacggctgtactcaaataacagcttctcactgagaacttctctggtcacaccatttaaaatttgaatagcttctcttccactcgacaattcttttccattttcactggcttatttttttcctccttaccactttttactatacagctatatataactttaattatagctataaatatttatatatagtattatgtgttactcatgtgtcatgcttactgcctgccctctcccattgctaaaatgaaatagtagtatacttttgctaaatattaatcaaacctgagtcttcttatagtctccatcccactctattaaaaagaaaaaaaaaaaaaagctgacaaaaggttttgtgccaagaatactggagcgggtagcctatcccttctccaggggatcttcccaatccaggaattgaactggggtcctctgcatttcaggcagattctttaccagctgaactaccagggaagcccattaaaagaaaaaaagttgccagaatgttttgtacctctagcctcaaggatatttgccctggagaaagcagacatagcctgaagtcaaatagcttttcaaactgttttatgaaagattaaacccaatgaggaaataataacagtgggaggggagacatttaagcttccacctctggtctcaacgaagacaaaaaggtgtgatactcatctgatgggactgacccacaaaacccagaggtacctg

SEQ ID NO: 48976 - DNA, 1740 bp, Bovine  19866881084824
  misc_feature (1)..(1): n is a, c, g, or t
ntgcattcaagggaggcagacgtcttcctagccccacgatcccctcactacaaggctttcttctctacagctctcaccattcattccttcacttattcaataataacgtgtcgagtagttctatgtgccagtctttttgcagacataaacactagtattgaggaccaagttaaggtgggacagaaaggaacggggagggagggggaagaaggaaaggaggaagcaaatgtggatggtatggtagctgcagggtgagtgggggtcctgacatctcctgcctccctctcgtccccagcacacagacacccatggcttatccaaagcaaacaccgagttacaggggaggcgggagggcgagaagggagagagctcccaaaataagataggacgaaaagaaaggagaaatggcagcttacttggatctactagactgtctatttttagtggcctaaagacaatcccctccacgaccccgctggattacaatgcaaacagaattagcctcccgaccttctcttccaggtcagctcatcaccaggtcacttctgcagccacatcccctcaaaccccatagcctcctacaaggacgacttctaacacatttgaactgaacgtgagtggatggatttatttcagccattttctgcctttctaattgtttctcctgaagaagtttgaagaccaagttggctttcttaagtactcagctttcactgtttattgctttggttgttttggctgccagttaaaatgctacccattttcagaaatgaggaaaatgcttctggcaattaggaaggatgcttgcttctaatggcattttaacattctaaattattaaaaatagagaaaaggaccaaaaaattctgatattggccagttctcggcttctctgtgaatgtttcaagtgttccttttttcattaaggaaacagagcacttgagcttttaacaagctggctgatatggaataactgacttgaagtacaggaccttctaggtatggcaaatcttttctaatcctattctatttcacccagattctcaataataactatatctttctgctcacctaaagccaaaattgccttgttgtaataggacgattttaaagtaagacacagtacacaccctgcatgaaattgcagtccttccccaaactgaaattatgcgaattgtaaagcaatgtggaagaacatgttggaatttttcaacacggttcattatgaaacaaaatcttcactccaattacgatgatgtaaaaatattcttgagtactggaaaggaggagaaaaataaggacaatttatgagtcagagtggaggaaccgtgggtggtttttcccctctcttcttcctcacttcttatataatgtaaaaaaaaaagatattatctgtcttagacataaatttgcaattgtataaagtctcattaggcaactggcagcatctctcttgcacagaagataacatgaggtggccacacccaaagggaaccaggagcctgatactgaaatccctccatcaatttcccgtagaaccaaaaaaaaaaaaaaaaaaaaaattctgccgagagataccaaaagaaccagccaatttattccaaaatagaaacaggaaaatagtttatgatgctaaatgactgaatcatcaaagtgtccaattaaatattgatatcatcaatttggttctaaagtaccctttggtggggaggatgcaagaagggagttcaacaagtccaa

SEQ ID NO: 48977 - DNA, 984 bp, Bovine  19866881174266
  misc_feature (1)..(1): n is a, c, g, or t
ntttcttggctagcttgctttttctaacatacgtgaagagggattataagtggggtgcatccaattgtctcaggaaaggatgatactattttctcttagggagggaactcaatgaagctttgtgtttcctgccagaagaaactccaacatatgggcaatatatcactgctacaaattttcttcaagcacagacatgcaaggggaagaagggatgaacattttttctggactaaatttaacattatggttcctgcaaaattgaccataagtaagacacatggaaagtactccaggatgtaaaattgagggagaatttgctgaggcatggctgtagatactgcttatgcaactggcatcttcttgaaaaattggataaagataaaagctacagaaaattgcagagtctgatgtttatgatggcaaggattgaatacattgccaacatcagagtcccactcctagaagattaaaaagatctaggaaagcatcatctctttgaaatcaccaatggctgagaaaatagtaaaaatgaaagacaatcaaagcaaattttagttcttacacttaaaaagtttcatacatgcatgtacacctacatgtaaacctcatgaatactgtgttattttttaagatcatatgttttcctgtttgtgtattatcccatgtaactctattccttagaaggagctagcaaggtcacaaagcatccccaggaaaatttgtttataatctcaagaaagagtttggcagtcacagtttttatttaggagagtaaatataaatatcccactaatatgtttgtcatttaaaaactagtttagaatgtcagtccaagtggatttcagtttaaagaattctgatgatcagaaaataggttgcttaaagaaattagcaattacaatgaaaagtaaacacacgctttcatataaaatttaaccctttataaaaagagaattcaaaaaaattataaagccaaagaattga

SEQ ID NO: 48978 - DNA, 1769 bp, Bovine  19866881184925
  misc_feature (1)..(1): n is a, c, g, or t
naatgaatggtactttagaattttacatcattaaaattattaatgacatacatgtttttcttgcttattggactacaagttcccttctgaataactctcaccatttctccatagatctatcacagtgctcagcgcctgaatctacacataaaacatgtctgcacacacgcacacacacacacacacacacacacacatacacacaataatggcccctgaatgactgaatccatgactgtaagctctttaagagcaagggggtcctgttgcagagtgcccagcacaaggtctgaatcttgatacctagcatccatttagccttgtaactacttcaccttattcctttgaggtgaaagcgggaattcagcctcggttcactccagcgtctttatgtggagttccctcaatccgcgtgccatgttgcatagctacagtgattatgtaattggttcaggaatgaccagtcacttagctaatgccggtgattcttagaataaaatatgctcacaccttaccaggggatgtgatggtaattctcttgtaactgctagggaagatcatcttcttgagtggattcaacaacagagaaccagagctgaaacacctaggaagagacatcctatcctgcttctatgatttgtgcccagttagatccaagcttgaacctagaagctctccctctaatgcttaatttacttgaaaacatagagttcttctctctgattaaaccagtttgagactagttttctgtcacttgccaccaatgagtcatgtattgagtaggtatcagttaatttcttgaagagattcttcaggcagtaaacaaagctgccattgatggcctgtggaagagctcttaacaaggagcctttgatattggagagaaggtctgaatattaattccagttctctagtgaggcagtgaatcttcatctgaccttcagtaaaagctaaacaaacaagactctatcaactcttcatgagttcttgtcaaaaatccttaaactcacaacactgctcagtaattgatgtgaagatattttgcagtgtagaactacttattgatgatatagttaaaatactgggggaggaacacaaggttagagggtcaggttacttaaatggcatatggtgatggttgatgaggacttatgtggacctatgacaatgaaatattgttttctccctggttttctgttttaagtcagttgggctctatgattcaaaaacttttaaatcttgtctatactattgtatttcagccacagtatccccatctgtataatgagactaataattattatatgtaaacatttatcctagttcaatgactctcaaacattttttggaccacagcccatggtaaaaaagtacatttgtcatctcaacccaagacacacccactcacacttatacctgaaacagaagtttcagaagacagtccttattcttacaatgcaagatatcttctcatatattttttttagcatggccatgatctactaaactagtttcatgcccatcatgaagggtttgatctgcagattgaaaagcattaccataaatcaacaggtggtgcaaaatgcgtttcaggtaaatgcccgttacatctaagtagagcttcggccctaaatccctggagagtctctcaccttaaagaacaagatagcaccacactgactttcagttcttttatagccccagacttgtacctggagtcggtggaagcagctttccatatcctctatccccggacacagctcgatttc

SEQ ID NO: 48979 - DNA, 1912 bp, Bovine  19866881185948
  misc_feature (1)..(1): n is a, c, g, or t
ncataaaaccaaaacacacagtattcaaaaatgcatgatgttgtttagacatcattgaggggttatatctaatcctgggaaacatacacacaaaacaccaaatccaactgtgagattttattaaggaaataatggtccatcaataggatgggatgttatgtagtcattaaaaatgattatgtatattatataacagcatgtaagacatttatgatgtgctattaagttaacacatctgattactcaatgactgcaactgtgttaaatgttacacatccacatctatatatatgtggacagagaacataaagaaataatcaggcatgcatgagtgcatgctaagtcgcttcagttgtgtctgactctgtgaccccatggactgtagactaccagattcctttgtccaggggattctccaggcaagaatactggagagggtttccattcctcctccaggggatcttccaaacccaggattgaacccacgtctcctgtggcttctgcattgtaggcactctgtttttttttttaaccactgagccactggggaagccataatcaggcataaaagtggctttattaaaattgttattttaaaaatatttaaaatgccttctaatgctgctctctcactgctttacaaggagtttatttgtttgaaagcgaatacctcagagaccatgaagagatctctcagtgataactgggaatcccattcagtcaaagctgttgcagcatcggatttttctaagtccaccaagccacctacaggtctcatttttactttgcactggttcttcttcagctagtcacacagagatcatctcaatatgctgaaggcagctcctccgtttctctctctcttttataagcctgacacttactctgtctcacacagggtattcaagaaatatttattattttctaagctattcagtacaagaaagtgaaagtgttagtcactcaggtccaactctttgtgaccccataggctagagcccttcaggcttcttttctgtccatgaaattctccaggcaagaatactggagtgggtagcctttcccttctctagtggaacttcccaacctaggcattgaacccggggtctcctgcactgcaggcagattctttaccgtctaagccaccagggaagcccattcaatacatgagtaactcctaagtaactcttgaattctttacgtttatctcttctgccttcttccagtctttgtaatttctctcttgaattctagcaagattttttcaactggtcccactgtatccatctcaaaaccctcaagactgaactcactcaagtttcttaaatgtgtcctgttttcatcaagaccagtccttcaggcactagtgttctctgacccttctctccttatccacttgataaattcctactcacctatgaagacgtagctctagaactgctccctgtaagtggtcatccatgacccatattcatagacactatcacgcgttatcacagttgcttctcaaccaggaagtgattttgccgtacctcaccccagggaatattaggctttgtctggagctatattttatcatcacagctggtggggctgggtgtgtgctttctgacatcaagtaaggagagatcaggatgttgctaaacaccatacaatgcacagaactgccccctacatcaaagaagtctctgtcctgttaaaaatctcaagggtcagaaacaccctctctattttaattgtcttttttgcttaactgtcctgttaaattctgatctccctgtgaccagaactctgtttcttcaattttagatgtccagcctctcacaaagggcctgcctgacaaataataaaaactcaatcactcttggtagaaaaataagttgaatgaattaagaaacaagtgaaaaaaaaa

SEQ ID NO: 48980 - DNA, 1607 bp, Bovine  19866881196188
  misc_feature (1)..(1): n is a, c, g, or t
ntataagacgaataagtattagggatataattaatactgctgaatgttatacatgaaagttgttcagtgagtaaatccttaagagttttcatcaaaaagaaatttttgctttttcttttatatctatatgagatgatgaatgttcactaaacttactgtggtaatgatttcatgatgtatgaaagtcagattttatactgtatatcttaagcttatacagtactgtatgtcaattatatctcagtaaaactggaagaaagagagggggtgataatacttgccttgagattactgattagttcttgtatgccttggcacagtttcctcagggaaagaaagatgtttagataaatctagattttggagcagccctcagcatgcatgaagtttcctcgttggatctgccaagctgagtctattaatatagattctccagaacttttcccatctcaaacatccaaggtctgttacattattaggccttctatgaaacgtgaaccaaaccctctgctcaattttctctcagaactgagcctgagaaacaaaaataatggatcttccctcatagtcagctaaattgttgctaaaaatgtgttcctgggattaattcactacaaagatgagcttattgtttattcttattttgtttttttaatttattcaattctaaatattggccagagacagcctgtgactcatactaacctttgtttggtatatgatgaaaatcatataaaatagatggtagtatccctgtgggcaatgataccttagtttaattaggaggaggctggggctcagacaggttaaataatttaatcctgttgtaatcacacagctagcaatttaaagacatggaattcaaaattaatgtattctaaaacatctttccacttaaggcattttggaaatagctggaccaaaaaggttttataaaagagagccagattggttttgctttcagtgtatattctagtaaaacgattaccaccccccccacaccgatttaccacttgagaaatcaatatctctccatcattaaagtataaggagtatcaaatctgaattggatgatggaattaccttggttttaatcaaacattcattttcaacttgattttgtagcctgaagattaagctccttggtatgatgggaaagattggacttgaacactgatgaaaaaattaatttcaagaaccaataaagagtttagctgctggagaggaggcaagggtgggatgggagggagattcctgggaggaatcttttagtaaagggagcagggagagatgtgttctcagaagcccacttttcacaacatatgaaagcaacgttgttgggtttgggagaaatatgaggggacccaaagacaaagaaagtaggagtgactctgtcgtgaaagagtttggaagttgggtaaactttggatatatggaaaaatcaacattagtgatgatgaatggtatagtttccgaagcctaatcaccagccacaaggggctgggataatcactccctctggtttctcctctggaaaagtagctgtgtgaattggcctgtagcataaagctgtcaacttgctttgttaattaatatgactatccctc

SEQ ID NO: 48981 - DNA, 1334 bp, Bovine  19866881196494
  misc_feature (1)..(1): n is a, c, g, or t
ncatacacatttgacgggaggtagaaattgttgttggttttttcctaaagaaaggtctaagactgagcccattttggattgccacctgaatactctgctaattcctggaatagagtgttttcaatggcctcatcttgaaaatggggttgtcaatgcaataggagtctcggtgtggattaactgctgatttgaatccttgtgaactaaacatttttgctctatgtagctttctaagaaaagaatactacaggagaagcaactgccattagctcagcctgccctgggagaatttaatgaagaaaagcaacctggggagaaaatagcactttttagatacaacccggatacatcattttcaccggcttccccatcctaacttgtctaagcaggatccctttttctcctgagcctggcaaggttttccaatccgccatcctttctttaagtggccgcctacaatttaacatatttattggcatcctcaagtgagccttcaacagaactgagccatttaagggtttgccctcatcttattataaattaggtttgaatatctctcagtatgcacaacattcctcagctacccaagttagaactccttattagactaggaagaatttgcgttttaattagttttacctctggtgtacgaagcccactgagattactacacttagtaaaatttaattaacttgacaaaagatcctaattgttttcgtgccactggtcctttgcagggctaaaattaatgccctccaaattaagcggccaccacaaagcttcattctgactgccctatattgaaaaaaaaattcaaattataattcacgggaagtttttgtttgtcagacaccaggatttgggtgcagaggcagagatttacagcccccctaggaagagctatctaggggcagggatgggaagagggcagcaggaatgagccccccccaccccccgaccacacacgcgcacacacactcactctctctctctctctctctctctctcaacttcattcttgtagaaagctttgtggaaatgagatgaggaacatattgatttgttcaactcctcaaagactgaagcagatataatatatcatgtgaattaataatgaaggcttataagtaaaaaatgctgaatgaataaatattcattcattcatttaggcctccaatatgcatttcccaagtgcctttggggtcaggtgctcacaatggaatatctgactgtaagaacctgggcctttgcagtgtcattctcaatgtgtagctttcctttttgtctgctcactccagctaatatcctatcgccttcaagaccagcaacatttt

SEQ ID NO: 48982 - DNA, 848 bp, Bovine  19866881265762
  misc_feature (1)..(1): n is a, c, g, or t
naataataaaggaattcatgaactgcaaaagggtgggttgatcctgttcctgttccaaaaatatatttaacctggttccccaagcaggttcattagctatatccaggaagctgcaaaaaaacaagtatttagtacatagagagaaaggattcaaaaaaattgctctcaaatgtagacgagcctgtagttatgaaaacatgtaggtcaacaagaggcttgctgctaagtgccttttaaaatcaagatacaagcactgggcctttgtctgggggcatgcctatcttcacatggggaattaagctggatttttcagtgaccttatatactgtggcagcttttgtaaatatcacaatggatggagatcactttgatgaggcttcggtaagtggactctattttggatgatcatttttctcccttagaaaaataattaggtgtcaacagtgagctgagtctatcaacattgtgtaaacgtaattaaactgaatgagggaggtggtaaacagaagagattctacagaaagttgacagcgtggagtggaaggcagttcaccttgggagctgagttcggcatttaagttctgggtttagcatgactgcttatggaacccagatcatgttactcaactgctctggaatttagcttctcgttttttaatagtaggaggttatgccagctagtgccttagagtttctgaaaaatggtgattatgatcttataagttgggggagtctctgaagtggaaaagaagtaaaatcactatgatgacgcagtggtagactgagctttatttttattaccaactaggctaggggccttctcaggaatataaaaatgtactaaggca

SEQ ID NO: 48983 - DNA, 1243 bp, Bovine  19866881302511
  misc_feature (1)..(1): n is a, c, g, or t
natctttgctctactgcactctaagttctgtgaatattaatggaaatttctttgttggatggttggctgcttaaattcatctgccattctgcggttggagttattcaggcaattaatgttgagcatgtactcactctaataggggccaggtgtagggcatggatatgcaggcagcattatgtgtctaaaggtcagactcatgaaacccagcacaggaaagatggcaaggcaccaccaaggtcggtcattttgaatacattttaggtgcaaatgatatagaggcagctgactttttatacttatttgataatctctgataagtcccaggtctaaaaccacttgcctatggggttttacccattgcttttatgctttcaatgcattccaggaggttcttgcagattccacctctgggtcaacagtgggatgtaaggtgttgccaggaatacctctgaagcagaacataatcatgaagatctggagagaagctcaattataccattcaatcactgcacagccacaggccaatttctcaacctttgtgggcctcctcctcctcactgtaagatgagaagaatgatggtaactaccttgaggggatgtttgaggtttaaatgacttcttagaagtaacgttcttggaaaaatgccttggaagagcagaaacactgagttaccaccagtcattattttcagagagagagagttggacaagctcaaccacttcaaaacaatgttgagatcagaaagattaaaaatatttacttatgaagtccaactatccaaattagtttgcctggtgccaaagtacattttgagacaaagaagataaccatggatgtcaggctggtttgaatccagggtaagcggttaactagttgatttttctgggggtggggggtgggggggaatggaacttctctgaacttctttgaacttattttctcacctaatatgagagtaataatagcctgtgtcacaagacttcaataagaatttaaaaagtaaaatacattgtgctgagtaaaaagcaatttaaataaatgactcagatccaccttttcagccactttcactttttgaggtgcaaaatgttttttcacatatttaactaattcctagaaacttcttgtcttttatccagctgtactttgacacagaaggtcagttttctgcagtgcctcctcttgctttgtgtccagcgcagcctactcactcttttatgccgtagtttgcttttatag

SEQ ID NO: 48984 - DNA, 2270 bp, Bovine  19866881340823
  misc_feature (1)..(1): n is a, c, g, or t
nttatttgtctctgagctagaaaagtggtgtggagcctgaaaagtgtctagaaattaaagccaggtaaatacgtttcataaattagttacaatagttgttactacctcttggggattgtgtaggtaacaatcagcaaatggctgatgttctaagacagaaatcaaacatacctctctgaagggatcatggtgtcctgaagctccctgaacgccgcgacttgacagtaacggttgatgtgctcagtcgcttcagtcatggcccacactgcgaccccatggaccgcagcccaccaggctcctctgtccatggattttcccaggcaagaatactgaagtgggttgccatgccctcctccaggggatcttcctaacccagggatggaacccgagtctctggcgagtttcctgccttgcaggcgaactctttacctctgagtcagtggggaagccccagtaatgattgataacttatccagagtcagaacaagtccatccagaaggtgggaggaagtggtctgccgtggacatctagtaaaggatagtcacagaaacacatgctggcaacgtgtagaagtgtctgtgtaaagatgtccaggaggtgagtctcaatgaagtgaggaggaatcttaatcagagattgctttgcttgaaataggggaggggggtagaacagcaattctagaattcagtgaccttcttcagatacattcagataacatctttcaaggaaataacaatgtccctaaatccctaaattattttttcccccttaagtccaacctgtatatttcaaagcagctactttgaaactaaaatatctaattatgaataaaagtctacagctcacctcttgaagaactgccctgactgggttgttctagcagcaagaacaaattcttttcatcaataatcctgtctaaaagccaacattttatgctgaggagggcaggagcagtttgaatcccacgagaaacttttttgactttaatttttaattaaatcgtttcttgcctgcaataaaatagtttagggaaaggtcatccacaaaaaaaaaaaaaaaacatgattttaaaaggagctgagagaatgagaataggagatgcttaaaatcttctctaatttcccacaatacttttagagagtgattcaatgtttaattaaaggcaatcagcatttattaaatgcatacatgttgaaaattctgagctgggggtttaatttgctaccatctcaaaatacccacaaggtctgatcctagctttatgttgattttttttcaagtgaggaaactaaatgtgggtggcatgaagtaatgtacccctggttgtagatctgaaaatgggaacatctaagactaaaacctcaggtttagtaattcaatattatctttctcagccataatctttctcagtgaaggaaaacacaaaagaaacttgaaaaaacacaacgcaaacacttagtaatatgtgcagccagaatctgatagaaattcaaattttctgaacattttcctctgaaatataacaatcagtcctgccacttttcttaaattggaaactgtaatgcactgggttaacagtattcttcttttactgatacttgatacatctttttctcagtaaatgtattgtgtttgagcatatatgcatatgtgggtgtataatgtttgcttctaaaacaagaggacttctggtattattctcctcagatgcccgttcaaattagccataggggaaaaattataaagtgatgaaatcacgcattcatgcatacattcttttattgtcaacagtactgtgatcagttaacaaggtaacactggtaaaaaaaaaatcattttgattttaagtagaattacatctcactattcttcagaaatgcagagaaacttcacattactatggatggcatttttagatttttaagaacatagcagccaatcattcatttctcacccccgccccccgccccgcctctgggggagaactttgttgcacactagaaacttataaatcaaattccaaagaaattaaaatacttatggaacatagggaaaagaactacataattaagtggttgtagtggtttggagcacttagtaacctgataaacacttaatatattaataagatcgtcattgtctctactccaatggggtgctctgtgtgaattgctcttataagccaatcaaaatcacacttatccttaggaaataaaaaatagtagcaatgcctgagacgccctatagtgtattcatatttttaagagtt

SEQ ID NO: 48985 - DNA, 1189 bp, Bovine  19866881345951
  misc_feature (1)..(1): n is a, c, g, or t
nctgataatgaagggaggcaagtggagacatctggggctgtgtgcctgtgtacaaaacatagcctggcaagaacaagagaaactttttgatgaagaggtgccttttaaaaatcgactgcagatattatacattaaaaaaaaaggatgcctgtccattcaagagtaccgagaatattcagtaaagtagaaagaaaagttgagaacaatccatacagaatccagctgggaacattttagagcttttcctttcccccactctacttatttgcttctagcctgtttcagatgcaagttttgcatgatcatgatcatatcccatgcacatttctgcaccttacatctttctcctaaagtatttcacatgtattttttgttaccaatttttcattagcactattttaatggctgcataacagtccatcatatagatgggttatcatttaatactttcttttattatctatttaggttttttattatatcaacaggatgggaaactatggtgtgataaatatatttctgcaaatatatttaggcatgtttattttcccctatgtcttaggttatttcatttggatggatttctgaaagtggaattgctggctcataataaccctctgtgaacatttttaagactcccaatccattaacgccaaattgctttgcgagacttccaaatcaatttacatttccatgcagtgtatgggagttcttagaaagataaatattacgacacagagaaagtatgccagagtctctaggtaagaattgatggaaagagctgttgggtatcaggcttgtagtgtcaggtgaaaggaaacatcaccatatcagtgatatacaaatagagaatattcctggcatctacctgaataataagtgggtgcttgttcttggataatcacctttattctagagccaactcttatgctactacctccatgacatcccctcacatactccagttaaaacaggctactcttctccttgaagatattcagaacctttcctctgacctctcttcttaaaattagtcctaaccaccgtgctcactcaagctcagtttcatcacagatactcacacaatgtttgctgaatttaatctctatctccaaagtccatgatgatatgaaaagaatggaatcaagaagaaagatgagctgcatattactggggagagacaggatga

SEQ ID NO: 48986 - DNA, 2566 bp, Bovine  19866880550325
  misc_feature (1)..(1): n is a, c, g, or t
ncacagatgctacaagtggcggggcgacgacaaaccgaaacctgccaataagcaaggtcaacagggggtcaaactgcaaacaactgccttaaaattttttttatgctaacagtgttacttattccaaaagcaaagggtaggggtacctggatttctgttttcacagccagaagcacaatttctgtgtccctcaccctgcaggctaccagggctgcctgcttgccacctcactgagaaggcagaggggcaccatttcagggcccacatccatgaacagctaggatgccaacatggctccctggccagcctccgtcaggccctgaatgccacttctgctctctgacatttctcctgaacactaggcaaagacctagcatcttcaacatgcaaagcgagaaaacagagcagcccagaaagcacagacccagccgtgtgaccgaatcaccaaggactcccacccagaagcgggaaggaagcctggtctctccctctgcaagagaggcgaacatgctctgcctcacccagtgatgctcaagcagaacagaagctgagccagtcaggagactggaagcccagtttcagaaagggactgaatatgagataaaagagagtagattctccaggacagccaatcccctgctgctgtgggcagccaggcccttcgcttcagccctgccctgaggaggaagcaggtaatccaacctctgcgcctgccttgcccccgaggccagccctgcccacatgcacagagtcaaaccccagagcagcagagggtctcgggaccccaggccagaagcccctctgtaacagtaactccaggcggactgaggggctgctgccaggtgccagcagcaggaaggtaggggccatgagctctggctgagcccggtgcccagcatgggggttactactcacagccatggtaggaagccggcgaccccccggccttgccgtactcctgctccgagtagctggtggacaggttgggctggctggagccccggccaaaggtgatctggttgctgcccatgccggtggccacctgggccatgcgctccttggtcttgagggcctgggcccgctcggccttaagccgctcctcgtccttcagcagggccaccaactgcttggccttctcacgtacgttgaccccctggtccttgccgtcacggtcaacgtactggaagtccttcagggtctggatagcaaagatgttctcgcggcactgctgggccacgcgctcggagcccgtcttgatgaggtagtcaagcagcgtcagcgccttgtacacgtgccgccagttcttgccgtggtcgttgagccgcttccacaccatgctcatgatctccgagaaggccaccacgttgtaggtcaggtctgcaatctccgtcatcagggagctggacgggccccatgggtcattggaggtggcttcccgcacttttatctcagcttccgagtagttgttgacaatgtttttcatctgccgtctgatggatgaggtcgtcatctttacgttctgtgacaagtgcagatcctttcagagagagaagcttccccgtctccggcaggttcgtgctccacagaggttcagtctccgtaacaggtctggagcagggtccctgacggtcatttcctctattggagcctcaggtctgagaagctggaagccatgacctagagaaagaagtaacaaacgttactgtgtgtgagttcccgagacagcaggctctctgcaaatggcaggcaggggtcggccagccggggtggtgagaggacatcctccagcccccgaggacaaaaaggatgccatcttcccttcaaaactaagttaagaacaatactacacattaataaccaatacagtttaaactcaagtttaagcctctggaaggaaagcggtaacactgtaactcctggtctattttcaaaccacttctgctggatctgctctgccacacctggcagacgcccgctagaagaatctcacaccatctacactggcttcagagactctctctgaccctcttctcctgacttcttacagagactcccaaccccttcgagaccagggctgaggccccactgggctttcagagcctccagcatctggcacaagctatgtagcactgatacaaccttacatataaactgcttctggcccagtttcctcatctcagagaaaagagaactgaggactccacagtaacaggtccacccagtcctttgccacaaacacctctctccagggaaggaacacctgcggagctggagtgaaggctacgcctctggccacaggcctggtccagagtgtggaggactccacctggtttggttgccagtgggcacccagcactgcgatataaatgctgctgccacaagttaaaagcagcgccccttcccccaggaaggcatctggcaggggacagaggtgagtgcagggacctgaggatgcaagtggagggcaactcgactgtggcggtgggccaccgaaagaggcgaggaaagcactcccttcagagccctcaggggggttcttcagaggaggtgacagggcgggcggaga

SEQ ID NO: 48987 - DNA, 2871 bp, Bovine  19866880848473
  misc_feature (1)..(1): n is a, c, g, or t
ngaagtgagacggaaaggggcagggcctaacctttaaaagaatgacatagctgctgaggatacaacataaactggctagaactgattaggcctaaggtggcagatgattcttcaactttcaatagaacttgatcctcattatatgctcactgtaatatattagcatatgctaaatgacacatggactgcaaggagatccaactggtccatcctaaaggagatcagtcctgggtgttcactggaaggactgatgttgaagctgaaactccaatactttggccacctgatgcgaagagctgactcattggaaaagaccctgatgctgggagggactgggggcaggaggagaagggaacgacagaggatgaaatggacatgggtttgggtggactccaggagttggtgatggacagggaggcctggcgtgctgtggttcatgggatcacagagttggacacgactgagcgactgaactgaactgaaatgacacacccacaggtgccatgacagttccaaggctgaccataaaaggccaaaacatgggcagtgacccaattcctggaaatccttgcccctttcccaaaatagttgaaataatcctccctcttattagcccaagaagttacccagcccatcaaaaccaaccaccccatactttaggaccactctaaccttcagagatggaccacattctatctatggaatatgtatctctcagtaaacctgctttcactttactgtggctcactcttgaattcttttctgtgcaaagccgaggactctccctttgaggccctgttccaggaacttgcctgagatctgggacttgaccatcctctcacactccattttcctgcaacatctttacaaaggaggaagaaggtggtcttctctccctcccaactcttcctttgattatgaaaatgtagcccacgtagttctcagggtagagccctctgcctgcccactggtatccttcacaagcattaataaacctacttcttacctttcagtttgcctcttgcttgaattccttctgcactgacacataaagaacctaagtttccttaagtcctgagatgagttgtgtggtttcagttggaagattgtgggtctgagtcccacctgatgtcctatttcacaaggacttactaataaagtgacatttgaataataaattgaaggaagtgaaggagtaaaactttggggatttttacgagaaggaagttccaggcagaggggacaataaatgaaagaccccaagttggaggcatacttcacatgttaaaagaactacaggggtgacgcgtgagtggagtgagtacatgagagagagagtatctacagtgaagtcaaaagggtaatggccaggtgtgtgtatttgtgtgtgtgtgtgtgtgtgtttgtggtgtgtgtcctggggggaaggcatgtaggattttgccaaaaacttggcttctactctgtgcaggataagcatccactggatgattatgagcaggggaataacaacaccaaacaagtctcatcggtttcattctggctgctatctcaggaacagactgaaaggtcaacaaatgcagatggtaaggttgctgcaaaaatccacaggaaagctgatgacagcctgcatcagggaagcagcaaggtgggtgatgctaagaggctggattcctgaacatctttcgaagatagaatgaatagaaatgggacatggatatgggacatgggagaaacagagtaatcaaagatgagtccaggtttgggggctgagcaactataacaacagagttgctatcaacgaaaagtggaaaaactgaaggacaaccaagcttggatgggaacgggtgatcagggttcagtttgaacaaattaagcttgagttttcctttaaatcaaattgaagatggcagatctatgaattggaagtttagagggtaagtacaggttgaaggcactagtggtaaagaatccacctgccaatgcaggagatacaagagacatgtgtcaggatccctgggtcaggaagataccctggaggagggcatggcaacccactccagtattcttgcctggaaaattccatggacagagaggcctggtgggctacagtccatgggggttgcaaagagtcagacacatctgagtgtctgagcacagctccacagaggttaaagttataaagttgggattaacagcaaagagtatttaacaccatggaattggatgagaccaccaaggcacaaaataagctgcaaggactagaccctgaggacctgcccactgaaagctcagggacgaaagggggaataagcaaaacaaactaagagggagtcacagagaggtcacagaagaaccgagagaacatggttgccacggagcaagagacaaaaagacggagggggtgattaatcaatttgcagatgagtcaagaaggattaggactgagggtagatcaatgatttagcaaaatgtcatctttggccaccttgttatatagtttggggagacctgaatcaataacaaccactctggagtaagtcaagtaagaatggaatacagaagttagtgatgatgagtatagacaattctttagaggtgtgagaggaagaacaaaaatggaacatgagcaagaggcagaatggggtcaagagagtttgggttttcattttgtttgaactaggagaaataatagtgcattgatagccacttaagtgtgagtcaatgggaaatttttatgctggacagagagaggaataattgctagagcaacacccttcagtagataagcaaggatgacccctagtacacaagtggtgggactgctctcgagtaagtgaactcggtctctgcagaagaccaagcatgtga

SEQ ID NO: 48988 - DNA, 1518 bp, Bovine  19866881202932
  misc_feature (1)..(1): n is a, c, g, or t
ntatcagagtttctagtgacacatttagtagaatatgtgctatgcagcaacagatccctcatggttaggatctctgaatgtatatctggaaggacaagggttctttattctgccttcataaaaatggactgcaagagctgtcctttatatttgctcttaatggggccattaagtatactgtgtattgtgaattcatgtaatgctactggatgtattataaagccatggtatttatatctttccctgaagcacaggatttctttttacttactccggatatctgtaaaatccatctatttattctttttatctctctctgttttttttctctctctttttacttttttccccctttccttccttttgctctttttctttcttccttcttcccatcactaatttaggtaatagtagccaaaaaaagtaaatttgatgtaatatacattttttcactttgaaaaacatatgctttctaaaagaaccaaattcaagaactcagctcccggatcttctgactataaagaaattttaaattagtgttattcttgataatgccttaaattgattgaactattaccttgactgcatccttttaatcaactgaccccacattatgaccttatttgaaataagaaagcagtgaagttgggtcacaaaagacttcattgactgaagtgagcctcttttcaacagtgagcttattttgatctgctttcatataggtttgcctcagtgaaatgagggcacacacaagaacatgccagaagtacatagataagtacgggccactgcaagagcttggagagacgacaacgaggtttgcttctatacactttggtttaatgctaaatttgacatgcttgtaaagaatttaacgggctggaaagcgtaacacttttattatgaaaatatgtatatggttgttttggctcctaatcataatacctcttattagtaatcatttgttttcaatgactaatagcagtaattgcaaaagaatttttgctctgtctgctttaaaaactttggggagaaccaactggacactggagagattggggaagcttcctcagacaagtttatatggaggaagatccagaaatagaaagcagaactgttcagtttctgctaggctctgtgttgtgactaagagtcctgaagcagatgatggttatgagattattgtctttagttttccatcaccactactcagtctccaagctcgttccctctcattttcctgcttactctttagaagggacaaagtgacatctcagtatatattctaacatgaaagaacacgcgtggggcaggcattctgaatcctacaacctgtttgctgggtaatcttatatggggctggaggaaggatggagacagcgagtaggtgtaatggaggatattgatattttttcttaaaaaaaaaaaagaaggaaacaaatctaggtcattaaaactccaggagatagtggaggatgggggagcctggcgtgctgcagttcagagggttacaaagag

SEQ ID NO: 48989 - DNA, 1390 bp, Bovine  19866880501676
  misc_feature (1)..(1): n is a, c, g, or t
natttaatcctttaataataatcagaacttttaagccctgttttcaggagctcacactctgcgaagcaagagcggacagggagagattcattgatgccgaattccagaggcaagataaagagggggtgggagccagaggcatttccttcagcagcttgctttttttctcactccctcgttgagttcgagtcaccggccgtgctgagagctggtgtggtgcccgggggtccctggccctctcggtggaagagggtctgtcttagaggcaggctccccccagggggtgggcctaggtgtgccccccacccctaccccatcctcctggaggacgcagcagtgtgctcctgaactttcaggtggtgagacagaaaggcaaccggggagagcccgacatggaatctgacgtggctccttttgcccacgttgcttcaggacttatttatattggagttatttataggttccgaatacatatcatcaaagacactgtggctgtcatcatttttatgggagcctgaacgtcacacataatactattttcataagaaaaaaatccccaagcaaatgcagttaaaaaccaggctacggaatataaagaagcaaatgaaaatgttatcatctgtaatttcttttaaaaagtttttctgatgctctggactccctctgagttgggggtgataccatggacggaaacgtgactctctttgctcaggcaaaggctaatttttcagcaatggcaaaaatgaggaaaactccgcattttcttcttgtgaagccaatggaaatgtaaatgggctttgtgcctctgtgtggcaatcctcaccaggctttatcacccctctcccaccctcgcccccagaatcccattaggtcctgaggccccgtgcatgcccagggctgcaggggaagaggggaccatggggtagctttcctccccttcctcatcttgcaaagagagttgctagctttaaaatggatcttatgtcctttagaagctagtgtgtgtgtgatggggaggcaaagatgggatcctaagagcaaattcaagctcctccactgctgtttcttagcaacctggtcgtcttggagagctctgacttcggtgggaggcacctgcccactcccccccaaccatccttttgcctagacttctgtccctcgcggggaccttcctcaccttgactccggtggtacccagccttccgagccaccaggccgcgcaggggtgctggcctgcgggaggcagcggctccatctggcggctgcacaccctggggactccccgacttgcctccagcgtggagtgtttacagatctttatcacttgtagctattgtggcagaaccatcaattagctctggacttgcaaaataacacctgggaaaaggtt

SEQ ID NO: 48990 - DNA, 1957 bp, Bovine  19866880505218
  misc_feature (1)..(1): n is a, c, g, or t
ntcctcatcctcccagaggggtcagcggtttcatgcatcgctgctcctgatgttaccaggttgggaactttgagacaaacaggttaaactggcctcttaatggatggcttccttaatgctttccaacttcaacgcctgtgaggatctccacaggacgtaggacacagcagaccccgatccatcagggacacagagccctttgtcccaggaaagcccaggggatggaaaaccttcacctttccaaggacttcgtcctaccccagcccacctcactcaccgcaaacccccatctgatccgacctccaggcaccacgaccccatctgatccgacctccaaggcaccacgaccctgtttacagcttgcggccggcatcagcctgggtgacgctctctgctctttaaacctcggcttgagcagacgtggagggtcagtgcggtccaggtgggaaagcgcagtgtcagccctgggacgggggccagtggagggcctggcccagcagggctcccacgtgccctgccaccctgcagtttcccgggcgctcccagcccgccccaagctgcccgcactggccggcacccttcccgagtgggatggccgccatgtagtgacctcctgccagctggactgcaatttggcccgacgtcgcacccccccccttgtttcagtttccattcatcccccggctggacaccagccagaccctctgagagaccagacgggaagggtgggccgctcagactgcatgctggggacagagagccagcctccgagcctcctcttctcagctgcgtggcccagcgggtccctgcagtctttgcagagactggacctcacacacgtgcagtggccccgacaagcgtgcccttccctggccctggggcgcagtgctgccagccttgtgtccctgagggtctcagggccagcagcacacagggccaccccttccgagggacccagctcctgcacacccgcatctgggcctaaagtgttgctccctgtgctgatctgacgggtagctcagcgcccctcagggtcgcgcctgctgtccaggggcctgactttagacctggccgtccattcgaaacttacacccgtgaggcagggcatcctgggtgtcctccacgtcctgtaacctgctgccccacccagcagattgtttaccgtccggtgggggctctgcatctgcgccccacaggagggagtgctcactgctccttgtctgtatggctgcattatacgctgtgaacctactctcggcagtcagttagaaaaggataaatcgacagagacctctgctttgaaatctcactttactttggataaagctaaaacttcctaaaacccaacagcgtgccatgtggagtccaagttaagacagaaaatctctgcgtcttcccatttccaaaagccttgctatcgttgaccttgagggctgacagtctggaggcagagccatgtccccgccggctcaccccgcgagcgggcgaggccaccttccccacagagacgcgagagcacagggaacccgtcccggccagtgctcgccaaggggacagcaggctgcccaggcgcctcccgggagagtgaactggctggagacgtggctccgagcacccgcagcgcccaggccgcctcctcccgggcgccggccgttcccagggccagtgagtcttgattaatggctggctgcgagaggcccccccgccgcctgtgcccgcctcctggggcctccggagcctctgtgccccgttgcctccttccctgcccgggagcttcccggctcaggtcagagcaaaagcaggcttggccgtgccgggcagagtgagggctgaccgctgggagaaccatcaaccgcgccgtgagacgatcaactgagcagtaaattaattaatcatcattttatgcctcatcaagcactttgctgaagctctcagcaggggcctcttgaggagccaa

SEQ ID NO: 48991 - DNA, 1679 bp, Bovine  19866880571074
  misc_feature (1)..(1): n is a, c, g, or t
nctgtaggctcccctgtcctggggttctccaggcaagaatcctggcgtgggcacacaggctccaccacactattctgcacccatgcgtgtattcacgtgtacaaaatcgcccagtgtgggctgtgccaagcatgtagatcaaggcgggagcagctcccacccagggcacaggcggcacttgacaccgggtctgttaacagttaccacctctgagtggcagaagtatgggcgctacccaccattttagaaatatgcgccttgattttcttaatctgttgggttgagcacacactacttttataatcagaaaagtacaaattcaatttctctttttaaaaaaataagggaaccaaacacacgagataaaactatgatttcttctgcagtttgtactgggcctgtgaaattctagtcggatggcatcaccgatttgatggacatgagtttgagcaagctccaggagttggtgatgggcagggaggcctggtgtgctgcaggccatggggttgcaaagagtcagacacaactgagcgactgaactgaactgtaaaattctgaactatattcatacagggcaagcatcatgaaactcacaagaattattatgattttttaaaagcacctgtgctctcacttttaaaaaatacagtgggtctgtgtgtttacatgtgaatttccgggggtgaccaaactttgtattttacttaacatcaaagatgatgcagctcatttggaagagtgggtcagtgccaatgctttcatttccccctttgcagaatgttgacccctgctactgtgacagaaagacaaccagctaaactaatagcccctttctctgctcatcaagcctctcattaacaattaattggactagaagttcataggccattattgctgtgtcaatgagatgcccatgaggccgggaggctgaaacggaatgacccactcgggtgataaataatttccagcggagactcgccttacctcacagaggtcatggtcctggccgcagaaggcgccaccggctgccccttggacaggagcagacgagtctctcttatcagacaagctaatttaagctccgaaacctaaaacgtgtgaaacaccatctcggggcaaacaagagatgcggtcgttgtgtctagagactgacacgtgctcccgagtgtctcacgacaaaaaaggagtccagggtctggctgggttcaggccacccctggtggtgagcgggtatttcgggctccccaagcctccctgcgtgtcacccccaaggacacgggaccctctgacagcgtgactgaaatggattgggacgccttcctagtttaactcgtttattcacgtcacttctgcaggaaggaagcaaatctcacttaggactggagtctgagacgtccgagcgtctcagacactgtcatttcacaccaagctcgttacagactctaatgggccgtgctgctctcagccacccgggaggtgtcccagctataaactaagacagaaccaacaacatgtcaagttaactgaagcaggggaagatctgactaccaaaaagtactgaaaaagaacatgaaatgcaggtgatggttggtgctgggcactgtgcctgtcttctttttcagaagcttcccagaaagtgggaagtaggttctttcaactttattacattctccagcaga

SEQ ID NO: 48992 - DNA, 2184 bp, Bovine  19866880579909
  misc_feature (1)..(1): n is a, c, g, or t
ntatatgctaagttgtgtctgaatctttgtgacccagagactgtagcccaccaggctcagactctatctgtggcatttcccagacaagaatactggagtgtgtatatacataaacatatatctgtatgtatatatatattcttatatgtgtatatgtgtgtgtgttagtagctcagttgtataggactctttctgaccccatggactgtagctcgccaggctcttctgtccatggaattctccaggcaagaacactggagtgggttgccattcccttctccaatattatatatattgatgatggacagggagtcctggcatgctgctgtctatggggtcgcaaagagtcggacatgactgaccgactgaactgaactgatgcttttatttcagaaatcctttctcgttcctcctgctcctttcgtggacttacctgtccaggtgtagtgactgttgctggcaggggttcccttctggaaatggattctccatggcagttaatacccctgtggccacctctggcttcaaaagcaagttgctggggctaaatcttcgtcccaccctctgtttcaaactgagctcctgagtcaggccctacacagagcctcaagctgctgcggctgcagaccccatcaaagctgaaattccacatctgaaaaggaatattccctctcagatgttgaataaaatgctcgctgtatatttgggtgcttagattaaaagatttattatgccaaggagagaaatgaagttttggttaaacagatccaaaggctatgaagacggcgaagctttcaagaaataaattgcaattttactgtgaaggcaaatgttcttttcagtcttgatttacactgaacacaaaatgcgagtcaaatggaaatagaatagaggagcgtctcagagaggaacccacagacaaggacacacagtcgcatacatgattaaagcctcctctgtcaaaaaggttgcactggctcttctgaaaaagagtgaagcgtcacatcttctgactcattgtcataactcataatgtgggtaattgttttcaagttttaactgtcagctttgtaagtctcatctgcattgcaaatgagaaatattaattaagtagtgaacatgtttcaaagtgacgctcctccgtgtcttaggggttacaggttcaaagctgcgtttggagacctgttctgaacctgaaaacagacactttgggattaacgcatatttacaacaaattttattttctctttaattcagaaaaatatattttagaataaacttaaactcaggacagatttgtattctcatgtattgttagttggaggctagtaaaaatcttcaagtaagtgaatagagaagctaaattttaaatatttaattttggttttgtatctcctctatttgagaacagcctagcttattagctaaaaaggagaggattttactgatggaagccttgaacttaagctgcaatttaacataaaatgtgatatttcaggttgattaaaatcagaataccaaaacgttcagaacgtggagcagttctcaacaatcaggtgcattcaagagtttcattttcagacagttctggggacctaggttatattgaagtgaaataaattcatgtatatgaaaacttagagatgtgaataagcaacagcctgtgggcttcccagggaatccacgagccccttctgagaaatagaagtaagcgactggagggcagccgcatttccttctgactgcatcctcgtgatgggcatccctcagggggctgggggccggctgtaactgctcgggcagcggggcaggcggggctccgtgagcagccgcgtggggagcagccactgcctctcagtgaggggctgctttgctgggagtggagatctcaggcacttgagtggatcttcttggatgtgggagggagattcaggaaacatcccaggggaaatatgcaccagtgaggcagtggctgctctgccctgttctcagggctgggactccggctctctgactattagacatcaagcctgggtcaaggagtttgcagtcccaggcaagcggccatcaggacccaagtctccagcgtgcccttcctctggctaatggtcaacaaagatggtgaggctgcatgtggagcctctgaggagcagtgttcgaccccagacaccagagcttcctgcc

SEQ ID NO: 48993 - DNA, 1331 bp, Bovine  19866880638205
  misc_feature (1)..(1): n is a, c, g, or t
ntcgcagaagtggtagcagtctgtctgttttggtcatcggcttgtttgtgtgcatatttgtgtttgagtgggagcgttaccttgagaagctatgagggaatggaaggcaagggtcgttttattcatcaccttccacgaaggaggaggccaccaaaagtttgttaaaaacacaaaggaaggacgcttcagagacacctgcacacaaagcccccgacacaggtgctgggcgggaaagagcatggcgctcactcaggtgccgggtgcccttcctgggcttctgtgcagcagacgggccgctggcgcagtgtccacgggggcctgtctgtctgccgaccacggggatgtcattagcacatgcacagcactcccctggcccggctactcctgaggacaccgctataatgagcctccctgtgtgattttgcaagggctattctttgagaagcttcgagctcattaccagcattatctcgcaaactctccaaccacccaaagaagtgttttcatatatttattccttttttccggagtcccggccccagagcagggctttgcggaagagaggtcatctttgcaacgagtggataattatactcccagttaatttaatacaaatgacccacatgagtgatctatgcccaaaacatggtttttctaggtgttatattttgatctgaattttcaagatttcacaatccccactgaaattttaaaatttgtagatagcacatcaatcattcctttccgaatggtactgctttgctgcttgttaagcagtgtaaatgccagtattctttacattgagttaattctggagtattttactgaagacattcgtcccggttgcgtcatctcctccgtctttcgtctctgcccccgcatcttctttttctccggcaccatcttgcccagctctgcacggtcacgctcatgttccttccatcaagctggtccttcagtctgaattgttctcccaccctgtgtcagccacagagacagcaagagtcctactcagcaaggatcccggtcggcaggcaggaaggaggctacgactgcaagtccatgtccacagtctatgtgatctcacagccacagctaacagataagagcccctcatgtgtcaggaaactttgtaagctcctcacggagactcactgaaccccacgccacataattaggtaggtgctcttaccatccatgccttctggaggaaaaggtgcgagtggctagttcccccagggagaatacctcgaagctgatgcacaggtgcgaagcactaagtgagccaagggatgacgtaaggacctttgccgactccaggaatcagcagg

SEQ ID NO: 48994 - DNA, 1400 bp, Bovine  19866880656299
  misc_feature (1)..(1): n is a, c, g, or t
ntgatcactgaggaaggcctatgtataacgtgcacaccaatgcatagatgtatatatgaatacatgtgtgcatatacactcgtgtatatataaacatacacacgcacagttttctcctgtgctgttccacatcctacacaagaccttgattttgcaaactgttggatttattctgggggccacggtcaccatggcccaggaggggctgttctgagtctgtggcctcgtgcagtgtagcagggccactgcagctgtgtggagcacggacccccaggcaggccgagctgggctcgttttgtgccctgggatggggctcattagagttcttccaaaccgctttttttttaaccatctcccaggaaccagccacccaccacctgtcaaatcagccatcagaggggcaagggcgccggcttgtctgaagacactgggtcatgagggcggattccttcaatcccgtgttctgttgtccccggatccgcctctccccctggaaacggctcaggtacagtgtctgcaaaggaaacacccagaaaactcaatgcagtcatggttttacagtcatcattctatttacacgtgaagcagtgtgaacacacacacatgcccgtgccgtccacgtaggtatgctctggggattctgagctttgcttctgtttagctcacgtttatgctctccacttcgggagcgtctactggacatcagagcctggccagcctgcagctgcgagtgtggggtctggaagtcagaggggacaatgatgctgcgtggcgggacccgaagcctgaggaccatgtcatctgtgcacagtgcgcccgagacaccccagcagaggcacccaccacgcctgaggctctgccagagagtggagctgctcatgtttggatttattttgtgtccaagattcattttattagaactgttttattcttccatggatccatcaagtggaagttaattggcaaaaatatgcttatgatgggttcttccccgttgttattctgcataataagaatttggtgaattgagaagccgcacaagaggcactgttattaatgaggaaacacttaatagtaaaatatggccagtctgactcgcagtacacaccacctctccgtgttatccacaaatactcattaaggcctcaaaagaacacacttgccttcgaataatgcataaaaaatgcactgttctccaaacaaaggtgaaatcgagagacataggaatttcccatgagcactcaggggagcgagagctttgggtttaatgatggagaattagaagcaagtctgtctggaggagaaaaagtgcaagcataaaaattgcgttgtgttgggaagaaatttgttattgccctgacgagattaaccgcggtaattggcactggcttttttttttt

SEQ ID NO: 48995 - DNA, 3016 bp, Bovine  19866880755724
  misc_feature (1)..(1): n is a, c, g, or t
ncccctgctggtaaacgtggctatgcctgctgtcaccacattggcagaacccccaggcatgacaggcacacacgcagacacacttactcatgcacacacatgcacacacacacacatgcatacatgcacacacgcaggcacacttactcatgtgcacacacgcacacatgcacacacgcaggcacactcattcacacacacatgcacacacatgaaggcacactcattcacgcacacacatgcacatatgcaggcacatgcattcgtgcacacacattcacacacaggcaaacagtcctcatgctgtttatttattcgaaagtaaatggtgctctgctaatgtgtgagcattctttttttgtttgtttcttttctctcttttttgggggagcatgaaggatatccattcatttaaaaaccagtaaattgaagagaaagaaaggtcatcacaccctctaatgcagcagctgaactgggacaattcaaaacagtggcatttcaaaacaatgttaagttaaaaaaaatacgggttccgtgggttataaaacttattttttgtttggggaaaatggtagaggcaacatgtgtccgtcacattggtgtgagaccttcagacaagacttctgaaaagatttctgcaaacaggagactcctgctttcccagttttctgtctggaaaaaatcagaaagaaagcagagaagcaggatgaaagcggctttcaccaccctaaccttcagcatccctgctcacctggagagcccctctacccagagtgcactaaggggatgattaaaaagaaatgggggtttaaccgcgggtaagcgcggggtccccagagctttgcagagcattgaaccgtgcgtctacagctgtctccacacaagcccgacattctttatttatttgttatgaaatatttatgggtgttatgaaaggtttaaaataatgtgtctgtcgctctctgcccgctctttccctcttgcccgcgcgcggcttctaatgcataaatcattcggggctctggacagcggggctgcacattaggtgggtggagctgctgtatcacattttttctgcctgagagaaaatatcattcctagtaattttctacacttatacaatcggcgttgacagtaaataattgatgtatgaatttaggactaaactccaacacaatatgactttatgtcaagggtgactcccagcagattttgagctaaatcatcttgcaaaatgggttctttcagtgggagaaaaaaagctttttgaaattattttaatggaaaacgggacctcggtgcagctcttcttttgatgaggtcttgctttgcatggctggtaataaaactgagcaatccacccattatgagattggaaatgtttcatttgtgatcacaaatggattttttttaaagactgacacagctgtttttattctgttcatccttttttcttttccctttttttttggggtgtgtgtgtgtgtgtgtgtgtgcgtgtgtgtgagattgcatttatatgtggtaggctgccctctgcttttcatctcagtatcttccatagaaagtacaattatgatttaagttacaagctggatatgtttgtgacttaaagatatacaactaccagaaaggcttcgcataaaggacttctacgtcccagccctgcaattaaaatccttttcggcaggagtgggggcaagcgggcaaatagagaaagctttcatcagatcgtccggagagaaaggcttcgtagctctacagcttccactggagtcctgacaagaagatcaaagcaagcaaatcaggtgaggagcccggagtgagagtctctgtttgctttattctgctccggggccatgacgattcaaaactactgaaaatctttcttcacatgatgtcatttctgctgaaaccatgatccaaagactagagttcaaagtaagcccccctcgtctttggaaaaaaagaaattatttcttctagtagtcacatctgtataaagtttcatttatttaattttagacccatcgtttcttttaaaatattgagatgctcatgtactaaatttaattacatctattatatagatgagatacgataaaattcaaaacctggaaaaaaaaaccatcctctgacagagtgagatgccctgagagtcagaagctgggggtcttttcctcccagaggtaccccagacttccactttcctctctcttcctctgtttctcccctagattctccctcaaggaccacatgctcccccttctttctatagatggcactcacgtatctgtgcacgacactctgaagaaattccaggccaaaaacggtttgtaaaatattcttgctcttagggaagtggagtgatttctgcaaaatataacagatttttaaaacaaattttagagaagcatttttcgctaggtttatttgatctatacctaagtcaaatcacccttcagtcacaaatgatttgaaaattgctaacaaatgggttttatgtaacagatacggaggtccagcagtaacgaatctgcctgtggtgcaggagacctgggtttgatccctggcaacccactccagtatccctgcttggagaatcccatggacggaggggcctggtgggcgacagtctagggagtcacaaagaggcggacaagaccgagcgactgacacgaacgggtgtgtttctgtgacggccgctctgggccgagctctcaggaccctgcgtgtgcaggcctgtgcgcgtgttggacctgtgtgtgcacacgcctgtctgcggattttccagcatttgggaagcagcagcctggccgggctggccggcgggcatggctcccggtgtgggctggcctcaggcagagtgcggcctcctgctcctccgtgtgtgtgtgcgtccgtgtgtgtctgctcatgtgcccagcactccgtcttggcacacctgcttatgtggacacatgccttgggtgcggtggggggcatgggaggactatcagagctgaggggggcactc

SEQ ID NO: 48996 - DNA, 2004 bp, Bovine  19866880830015
  misc_feature (1)..(1): n is a, c, g, or t
ngaaacgaccgcctgtgcgtttcttgggcgaacgagtacaggctgttcccaggcgcggagggccggctgcactctggctgcatttctggggggagacctggttttcagaagaatattgtaaggattgcgtcgcccagagagacagccaatggcttgttattttgacaaaaagatcaaaaattaaatgtctatttctttcatgtgatttactagtgttttggtaggggaagtttttttttttccccataaaatataaaacataagagtctttcttttaaattcaataatgcaagaagtgacagtgtgtgtgtgtgtatgtgcacgcgtgttcagtctcttcagtcctgtctgactctttgtgacccttggactgtagccccccaggctcctcgtccaggggattctccaggtaagaattctggagtaggttgccaagcccttttccaggggatcttcctgatctgggatcaaacctgggtctcctgagctgcaggcagattccttacatctgagccaccagggaatcctgagagacaatatctcatcttaaaaacacaagtgaggtctgcatggtaggaacaacgaaaccatgaatgggtacagacttatggggatctcagagtcctgaccttgtttaatcctcctggtttgttgaatcacaggccacaggagtatctgtggtcttgttctacagaccctgagagacctggggagctactgctctggatctggggccagaaggtgctcgagttcactgtgctgactgacgggacaggggctcacagaggaaggcggggccagcgatcagcagtgaccctcaagcgctgaccacccctggggttggttgaggagcggagcgggtgcttgagggacccccagctctggggatccaccagcatcctgggcgacacctctgacggagcccaggcttaactggctttgccatccactggctcctacgttcctcctccatgttcagggtttctgcttctgctgagatactcgctgtaacagagacggagtgacagaaagggaggaagtttgtatgcaggactgctcctggctctaataaagatgcaacacctcacgttaggcagagatttacttgtattgatgcagatttactgctccaggaaaaaaaaagagccttattgtatgatcaaagctaataaaaatagaagacaaatgacgccgtaccctgaatagaagcagtgcactagttaatgaacacttattgaccggcaacctgcagctaatgtagccatggatttttactttgtctcttcgtggttttaagaagcaattggctgggtctccccggaccagaggatgaggtgatagttaacaaagccgcgttttatttagtgctaaacaaagcagtcaatttaaatctgagttggatgggaaaaccatctctttggtttatgtaagctgggatcacttgagcgaggctgtttttagatggttctgtcatgggatactgattgtttattatgtacggccgcatcctgtccatttacaaaaagtgatgggagaatcagtcaatgtcccacagccccggatgggaatttaaaaccaacatccccgtgtgtagtgatttttaaagccaagtccacctaacactgggttgagtcacctatacctaaacttcacagcccttattgaaactccctgcacgtcgagatacaattgaatgagtgcgttgcaacatcacgcacagaacttaaaaagcgcgttgtccgaatcaagttaatgggacttccgaagcctttgggagagcaatacccacattccgagtggtgcccgagggacagtgcatctcaaccgccacagaacctctgaaggaaagctacccgtttccttgcctgtcaccgtgagctcacaagtttaccggggcgccctcttcaaagcatggacagggtcacttgtaggaatgtctgccgtctggcgtggcccttcagtgcagccctgggcgtgaggcaaagcctgtctgctgcagcccgg

SEQ ID NO: 48997 - DNA, 1496 bp, Bovine  19866880879478
  misc_feature (1)..(1): n is a, c, g, or t
ntatgtgtatttataaattaaaaaaaaaaaccaagtctttggggaagtgctacttagtagacggtacaatggtgaactggctactccaagtgagatgggaaagtccagtagcatttcaagggaacgagatggaggaagacgtgcgttcactcagtactcgcatctaagcagacacttaatagctgtaatccagtctgatcctaaagactgctctgtggagaaagactgcgtggtgcagagatgagcatgtgagaggcagagctggtctcccctctgccaaggtcacagggaggcagagacttgaacccaggctggctccgtccacagcctgctgtttgaacaacgctgcttagaagtctggctgcccagagaggagaccatatgcccagggcagcatctccgctccgggtgtgggcttggggatggaagtgggtcgtgcgtgaggctgggggagctcgcacagaactcggggctggggccggacggatctgagtgcaatcgaaccacatggaccctcaaggaaggaagatatgaactccatataacttctctcataagcgaaattactccccaacaacaacttaaccaataaaactcaataaaacaaaattgaacccctaataaaacatccaggagacagactgaactacaggaggcttggcttatggagctccagcttccctgagagtcattactctgatgttttaaggtgtaaagtgctgtaggattgtatgtgaacccagagctccaccgcttacataataaccctagtggggttgacacccggaggtgacacccaggtgtcccttcaggataggtggatgcagagctggtctccccagctggggaagaggtcagcaggtgggtctcagcggctggccgtctgcaggatcccctcagagcaggacactgtcctccgaagtcacacaccctcccaggagcagcggtcaccaccccaagcatctattttcagagctgaccataggctcagccacgacctttgtggagagaatctgaccacgtgttctcctccaactcccacagctgccatcccaagggcacccccaacaacagcctgaaccccagtctctgctttagcctgaaacccttaggggaacccaacccacgatgagtaggaactgagacacccaaagtctcttgctctaaagttgtcgtgcgacctactgaccttgcatcgcaaggatgttgctagaagtgaagtccatgttgtcatgtgggtgaaaggacaagtcacttctcaccaacatgcacccactttgggtggagatgacccacaagtagatgggaaatccaagtggatctgtccaccccacagcacttgggtccttcccagtggcgcgtaccaggaatttcagaagctgttttatttaatccgggttatttctgcttctgttcagttacctgtttctgtacatctattgtctttgaaagatctttgacaatttgacaactcggctaaaataaaggagcaaaac

SEQ ID NO: 48998 - DNA, 1278 bp, Bovine  19866880887101
  misc_feature (1)..(1): n is a, c, g, or t
nagactttattttcttgggctccaaaatcactgcagatggtgactgcagccatgaaattaaaagatgcttgctccttggaagaaaagttatgaccaacctagacagcatattaaaaagcagagacattactttgacgacaaaggtccatctagtcaaagctatagtttttccagtagtcatgtgtggatgcgagagttggaccataaagaaagctgagcactgaagaactgatgctttcaaactgcggtgttggagaagactcttgagaatcccttggactgcaaggatatctaaccagtccatcctaaaggaaatcaaccctgaatattcattggaaggactgatgctgaagctgaagctccaatactttggccacctgatgcgaagaactgactcattagaaaagaccctgatgctgggcaagattgaaggcaggaggaaaaggggatgaaagaagatgagatggctggatggcatcattgacttgatgggcatgagtttgagcaagctctgggtattggtaaaggacagggaggcctggcgtgctgcagtccacgggggagccaaaagtcagatacgactgagagactgaaccgagctgaactgaagaagcccaacccacctgctgaagatccatgctgaattatattgctgtcatgatcctgcatccaagctctgtaattgtgtattcaaagcaaatgcattatttaaacaataatacactgtctgttagttcctggctgggttaatggttggctaaagcaattacagggccccggggagggacttgcaggggaagcactgagatgcacagccagctgacacgtgcctcttctgtatggtgggaatcagaggtttttataccctgtgctgggcttccctggtggctcagatggtggagaatctgccttcagagcaggagagttgggttcgatccctgggtagggaagatcccctggagaaggggatggctactcactccaatattcttgcctggagaattccattgtcggaggagcctggtgggctgcagagtgtggggttgcaaagagtcggacacgactgaagcgatctaccacgcacgcgcacaagctggttggctctatgcgtgcctgactctcacagtctcaacactgtgtgatgcgccaatcgcgtctcagattacaattccaggaacgccgcccgccatccgtcagtgccttctgcctcctaaattatttgctgagcgctgttttcatctcatctcctcaaagctttaataaagaagtgtaattatt

SEQ ID NO: 48999 - DNA, 2174 bp, Bovine  19866881085934
  misc_feature (1)..(1): n is a, c, g, or t
nagttttctttgtgctaatacaagcagaaatccaccatttaaaaacagaaaaagctatgggtcctggttcttgcccgcaggaggtgatccaagagggtgcttatctcctgagaggccgaggtctcctcagggcagggctgaatagtcttcaccgtaagtcattgacaaggcattgcaaatgctgagcaaggcacgtttcagggcttcagctgatgttttatagaaaatgacctctcctggagggacacagcagcttgtgagggtctgactggctgcagtgaaggcagcctgacctcagcgtctgcctgcacacacaggggtggagtgggcagaggccaagcgggactgccgcaggccgcaccggactcttaaaggttttctttccacagttagaaactgactttcacactcctaggctccttccagaaaaccaagccttcaaacacgcgacgttgggtcatgaacaaagactcagagcatttgtgctttgtaaaaccaacctggcgtggcacttagagtgttaaaagaagtgggaggttttaattagatttctgtatttccaaccccagcatgcaatataggcattatgagtagagagatgagtaatcatttcgacattaagtttggggtggaaagaatggattcaatcacttcctccatcagacatcttcagagttcaaaccacactcagagtggccaggagatgttatcctgcatcccggcagaaaacctgaaatggtgggcaggaaattggactgttcctacacaggaaataacagcactctgtcaaaatctacaggagaaacacgtgttcaaatttgctgtcagggcctcgcatatctgatcggagagcgagaggggacaaaattacaggagtcgtgtaatctctgcgcaggacagcatccatggctcccggggtcagcaggaagtgagcagtgactcaaggctctggctgaatgcagcgttttttgccaataaacatatatatgtccaataaaatgggcatgtgtacattatgcgtagtcgctcagacgtgtctgacttttgcaacctcatggactgcagcacgccaggctcctctgtccatggaatttcccaggagagaatactggagtgggttgccacttcctactccaggggatcttcccagccccagagaccgaactcccacctcttgtgtctcctgcaatggcaggctgattgtttatcaccagcgccatctgggaggcccgcatgaatacgctacacgtgtgttaaaattccacgttgattctgaataacaagatttctcgtggaccctatgttgtcaacattttttttacccgagaagtaacaaagatgtgcactttatgtaaaatctccaggtcagtacttggcttattttaaaaaaacaaaaaacaaaaaacaaaaagcttattttaaggagggttgtagaattacagaaaaattgcaaaaagtttccgtctaccgtgatctgcttccatggatcatccacatccagttcagtaaggtgcatctgtaacaattaacgaaccaactccagaacattgtatcactcgaagtccatactttacaaagactccctgattttgtgcctgtttgtcccagatcccactggataccatgtcatgttgttgctcagtagctaagtcacgtccaaccctttgtgaccccgtggactgcagcacgcctggctcccctgtccttcaccatctcccggagcttgctcaagctcacatccactgagttggtgatgccacgcaaccatcgcaccctctgttgcccacttctcctcttgccttcagcctttcccagcatcagggtctttcaaacgagtcagctctttgcatcaggtggccaaagtattggagcttcagcatcagtccttccaatgaatattcagcattgacttccacatcatatccggcatcaacaaacccaaggtcctctagtttgtctgctctgctttcttctagagcttttttaactattgcattttatgtttagctccacgatgagcttcgaattaatgtctgtgaaggatctaaggtgtcccggctcattctgtttgcaggtgaatgcccagctgttacatctttcagttaaccgtctcacccttctccaggagtgagttggaggcatctgtgtggatctctgcgtgggctctctttctg

SEQ ID NO: 49000 - DNA, 1984 bp, Bovine  19866881224392
  misc_feature (1)..(1): n is a, c, g, or t
nagatgaataatcccatttgcagtccttctctgccgttcgtcaaagccagggctccagagaagcccaagcacaattgccaacaggctgcactgaaatgaaaacatcatttttccttccgtccagctcagggaactctgaaactgcctctgataattaatccacagagagaaatcaatactacaactggttgaagatgaaacaacccatagcaaaataaacttttgcagggatgcctcagcggcttctgcggacgcagagtgcctgctgcaggtgtggcaatgtggactctaaataaatgctgctttctctccccagatcatcccaccccaaaggtcaattacccgaaccgttttaagttgtacaacacttttgtataaatacattctttgttctccaaatgttgacgggtcgggcttctttttcccattaggcccaacaaatgggtctacagtttggtagtcgcaaatagactgaaagaaatcgtttcggggtgaatgatttacgagtgaggaggaaaatccaggtttctcatatgggctgctcgtaagtccagtgtggtctggtggagggggcgtgtttcctttccttactctggttttgggttttggttgaggttttgttttttcagtttaacttacctttgggaagccaagctgagttggcagcatggactgaccctgtgttaccgttcagcctgctgttcgttacaaagcattacaacacagcgcgttaaagaaatgaaggaggtttaggtcttttgcttaccgggagccctggagtgttcagtgaaggaccacagctcctggagagatgaatccaacacagcacgtcattaggctccagtgagagaagcattcccacagcgaatgagcatcgcttggccgacttccggagcacctgttggattgaacaggctagccgggccccctgactggctggaaggacaggagcctgtgtttagcataccacacggttttcttaatccttataataacctcacactgatctaggtttgcttgggtctggagtcaggctctgcctcttgatagctgtgcatccctggggaggtcacttgccctctctgtgcctgtttcctcttccataaaaacagcacttctctcctggggctgtcatgaggattgacaaagtatgatgtgcgatagagcttagagcagtgctcagggcatgccacgagctacagaaactgccgttatctaattgctgtcctagaaaggtgaggtcccttgctcagacttacacagtgagtttcagagttagaggacatgaccatgtcatttagatgccaaattccgtactctgcccattgtttctggaagtaggaggaaggcaaacaagcacctgggcgtgagcttactgctaactcggctcgtggagcaggtgaggctgaattcttccgagaaccgaggctccctccgaggagtaaacagccacagggtctcatttttgtctttcagtccctgttccttcaaaagcaacaacgtgatactcattgactgtttaaatcaaatttcccctagcgatttgggaaaaaacaaacagagagaaagtgtgttgaaagcccaaagaaaaaggaaacactcccacttctggagaaagccaccaggaggtcccttttcagtccttcctgcatgatgctgggccagtggatggaattcttcataatagaactaaagtaagcatgggaaattctgaaagagatgggaatactagaccacctgacctgcctcttgagaaacctatatgcaggtcaggaagcaacagttagaactggacatggaacaacagactggttccaaataggaaaaggagtccgtcaaggctgtatattgtcactctgcttatttaacttatatgcagagtacatcatgagaaacgctgggctgggaagaagcacaagctggaatcaagattgccgggagaaatatcaataacctcagatatgcagatgacaccactcttatg

SEQ ID NO: 49001 - DNA, 1174 bp, Bovine  19866881241411
  misc_feature (1)..(1): n is a, c, g, or t
ncgcccgccctgggggctggtgctggtcgccctactcagggcgggtggcccagaaggacgaatccggcaccgcacacggctgccctcgtcctcgtccaaaggggaaggacaagcagcaactccacgggctgtttccgcggatgctgctctgtgataagggacttctgctcgctgccatctgctgcaggaaaccaggggcccttgaagaagaacgctcctgaattattgatcaatgattagcaaatgcaatcgaaattgtagacttgatgttgtgcagggatccataattcatgagtggacaaaataggaggtggtcgaggcagcagtaggtgatttcagccccgtattgattacgtaaaacaacaggaggggagtgtcgtgtgacagacggaacaaaggccatcggctccccggccgccgcccggagctgggggagcagggctgcagaagcaaacgcgtttccattgtgtctctttgatcaccgtgctgttcgaccaggaccagaggacgtatttgtttataatttatgtcttctctcgctgtaaaagattgatgttccctattaggtgctccagtatctaaatttccacttagtttatacggcggcgacactgtgacagccgtgctggaagctgcctcgccgtccacagcagagggactccgcccggctcggacacccactgagcgtcaggcccagagccgacctgccacgactctcatcggaaactcagcccggacgggggcgggagggcaaggcgatctgatcttgacccccggtcagttctctccaggacagggatcagttgtaggtggacactttctcttctcaggacgttgaggacatcttatatcctccacgtcgatgaccactgaagattgaaaagcacatcactttgttcatgcgtctgatgacatctggtctctcggagcagtgatggccaagggggcgggtggctcccccagggtcaggcgaggtctgcgggcccttggactgcaagatccaaccagtccatcctaaaggagatcagtcctgaaaattcattggaaagactgatgctgaagctgaaactacgatgctttggcctcctgatgcaaagaactgactcattggaaaagaccctgatactgagaaagattgaaggcaggaggagaaggggacgacagaggatgagat

SEQ ID NO: 49002 - DNA, 644 bp, Bovine  19866881269852
  misc_feature (1)..(1): n is a, c, g, or t
ncctctgcgggaaaaactggagtttgggtgcctgtgacttgctctcttctgaacttgaaatgactgctgatgagctcacagtaaatcaaccacagcaacgtgtgcgataattagtaaaataaatgtgtgcttaagtattaatgaaataaatatttagcagattatttgggatctttgttctagcctcaagtgcttaaaaaataatgagaggcttattaaaactttaaactatgactggttttcttttcacaatgtccccgtctccctaaattcagaaaagaaaggacctgtgttctaaagagcgtggcttgaccgacagaactgaatctgaagacggtgatcctggacaaggtgggggctgccttgatccgtaagaatcattatccagccagggtttggtcctggtggggaaagcactccagctaccaaaaagaagggcttggaacagggattctgggccccacaagatcactgggtcggaactgaatccagtcccagaaccacgcggcacgctgtgccctgaggggtggctgctgctgcatggctgggaactccaggatacccctctccagccctgcaggagggctcggggggcgcctggaaatgagaacagcagccgtgggccagtggctcccatgacctgg

SEQ ID NO: 49003 - DNA, 1608 bp, Bovine  19866881389036
  misc_feature (1)..(1): n is a, c, g, or t
ntcagacctttcaccatggcagacggctatgcaggacatgactttaagcccacccgcttggcacatctctgaccactgcctgctgtcccctctgcccgactctaatggctcatccccaccgtggggtcacagttcctggagagtttctggggggaccaggagcctctggtctgagccggcccatttccaatgcccgggacgagagaatgagctgccaagggtccctgcagagccacatgtgacaaggacctgcagttaacctctgtgatgccccctgcctgggctgcccaccaggctgtccgcttgcccaccatgtgccaaggccacacccaggacagaacttcacaaacgtgacaccggttttccttccctcttagccaaccccttctccagggtgatgccgtggtcagcttcactttcctggagtgggtcacctccacgtggccgaggactcctgcctttcacaccgtgaaaagtgtcccccacatctatacctcctaagcctccttcgatctcagcaggtcctttcaagagtcttgtgccataggaaatgtttctggtcccattattactgggtctgtcaaatatttgatagcttgctacctagcaagctgagtatttggtagcatacatttcagttcatacagatgaaaccccaaagctttcttactgctacttatttaactttaaaaagaacaaaatagacaagagacagaagagcacaaattaagataataaaattagcatttccagccacgcagagaggcagcgtttgccatcgttgcttggctttgataataacctaagagtctaattttattttagttttaagaaataggacattcatcttattaaaaataaatattttatacatgtttccataattacgtttccataattccctggtaacagattgctgttggaactgttcgcacccatctgtcttgctccgttcgggtctggtcacagagcttgattatttcttcattgaagttgtttcatcccaccgagcattacgactttgaatttgtgtcattaatttcatacctgaccctgagctatatttttattacattaaagagttctggaggagatggtgttcatttagaaataagcatcagacaaaaaaatacccagctgaggacacattgaagccttttctgtttcgtctgcgcctctgttcctcttgtgaatgcggtcatcggggtctgaaccaaacgcgtcctcggaggaagtgggaaggtcccctgggtcctaaggagcgaggtggccccagagacccacctgccactcctgcctgcaccccgaggccggactctgctgcccctctgacccggggagggggccttctcagcctcctggcagcccgctggtccttgtaagggcactgcccctggatcaccccctgctttccaggccccgaggttccccttcggccccagagctgcgcccagcccagcatggaggcggacggaggtccagccccaggaggaggcggatgactctctcccagcacctgctgtgcgcgaggcggggcctgagatgaacttttacttttggctttgggtgtttcgcttttttaaaaaattttctcttacacaggacatt

SEQ ID NO: 49004 - DNA, 1688 bp, Bovine  19866881406033
  misc_feature (1)..(1): n is a, c, g, or t
ngcctctgtcccccggcgcgcgatctaccttctgatccgaatcgcccaggaccgagctcacacacagcacacccagacctctgagagccgcctggggccaggccccggtctcctcaacagctctgccctaatcgcttatccagttcctggcttacagtcagcatacaattaaaacttgttgagtcaataaaggatttaacaagtaggtgcattttaaaatttaacatggtctggacaaaaataaattcctggggtgcaggagtcgggcctttaaaattccaccaaagtatttctgtgcttatgttgatagctttgccatattcaaatgatcgattccgtgtcaagatgtattttttaaaaaagctagtttaataactctccgttggaagtggttttgtgttttaggtgttgctgtggtgtgagacgcagaggacacgcattcttggctccagcaatttaactgcaatatgtcggtttccagcaggaaatccgatctgagtctgcagcccctcctgactctctgagagtcaataattcaccattttagggcagcgagcccattaacgatgaacagcttgagaatacactcttcattgatcagataaacaaatcatgagatattttattacagaatgatgggccaatttatccatgttttcccgaacagtggacttacattgaatgtgaaatggcaagaaatttgcttcctcagggagctatcataagaaatacaaagtgaaagctgatcgctaaaatggctcatctaagtggatttatattgaatttaacacaaatttaagccagacctctgatcaacaaaagttttacagaatggtgattgctttttctttgttagtcttactctaaatcacatgcaatattctgtttcacatttacatcatgattttagcttattctggttgtttccttttgaaatgcattcattatactggttacttatataagcattatttgtcatagttctgaattcatcttaggcacatgattgagacaactttaaatctattccatgaagatttaaaattgctttttaacttctaaaaatgcaacagttattggctagatgatgcaagtgggatgtgtagggagatacttgtgcatttacagaaaattcacagcatccgtgaaactgagcccaaaacagatgtggtcaaaccagggagtttgggcagctgcgggacttgcctttccggtgttatttcagactgaatattcagagaaattcccctcgtgaggaccgtctatgaacacggggtgaagttacactctctgggaaagcgtctgagaggggcagcggagagatgctggccgggtgtcatgtcagggccatgctcccatccggtgcctggagatagtcccctaggacggcgccacgaggacccacaaaaatgcctgtggccatctgctcctgcagggcaacgtggcccagagctggtgctttcctgacggtgtctgctgatgcctgatggtttagaacttggctgttaaaaggtctgacatggtggggatggtggggcaggagacgatgtctgggtagggggagaccatatcggaggctcccgccaagtcagtacttttgaggaacggtgtcccaaagggcagatgggagaaacatgccttctaaaacatgctgcccatctctaaatgttgacgactagtagagagga

SEQ ID NO: 49005 - DNA, 812 bp, Bovine  19866881925133
  misc_feature (1)..(1): n is a, c, g, or t
naggctgaagcgccttcgctgaggtcactggagtgtccccggggcgggagaggagccagtcaccctcaccctcaggcatggccctgaccacagcccagggggcccgcagagcccctggggattctgtgcaccctgaacggaatttctgcttcttttccttgagaacaatcccttttttcatagtgcagcgttttcacgatgtggttttgaaggagaaaatcagaagcgattagggtgatggcttgctgtctctaagacgcttgatcgcttggtgtcgcattggggaaaggagggcttcacgtcgacaggctatttccgctgcactcggaggtgataaactatactgaaagacatttaaaaatacctgtgcccgatggcgggacgctggcagctgggagaggaagagtttagtacacttcacgtgaaagttctttactggagaagctgacaggtgccccatttgtatgagaaaaaccagctattgttatccaaacctctcagattccttaacactctgcttgacacaggcagatggatcaggatgctgtctgatggcattgttcaccgattctattaataattcctcacaagcacttcactagtgactaaaatgaccttggattctacaaatgaaaaacattcccagccacatccaggggtgagcaggaggcagaaggcccggtgggtcccttcccttcggtcactcgtgtggccccttctcaagaagctttcgtttcaaagatgtgttttatcctcccctgggaatgccatctcagggggtgtgaatttagattaaacgaaactttctgttt

SEQ ID NO: 49006 - DNA, 1283 bp, Bovine  19866880241656
  misc_feature (1)..(1): n is a, c, g, or t
naaactgtcgcgatcgcattaaatcctgcagttgttgtaacacagtaagaccatagctatcatagaggcaccataagataggatgggcattgtaacaccacaaaggagcaaacattacattgagggcttaaacaagatgaaagcatacattgttcacaagtcactacgttaggtccacctgaataattcatgcctacattaagtttgttggagtcattagtaaaaaggaaaacattaggcaagggtggataagctaaaacagaataagtagaattattttctggttggagttcacgctgcagctgccctgtcagtctcgccgggatctcgatgtttatcttgtctcccctgctggccggcgccgcgctggtctggacggcactttgtgggtgcactgtcttctctggccctcactcgctgcacaaacttctttgctctaggtcgcggggtgcagcgaggagggtgcggggcgaggctggaggcgcagaggcgagagctgcctagtgggcggggcaagcgagtgcgcgccgcgaacctggcctgtctggaacccaaattagtgaatctgcgtcctgtggaaaaatacaagcacatcctcgactgctagttaataatgggtcaggacccttccattgtctggagaggaggtccttccatttaactaatggctttgcattcaattgctccgggcaccaatggcgaagcattgcagtagttctggctgaatcggcatttaaaatatttattacagctctctttgctgcatctactgcgagactgaagaccattctcagcaaccctaaccctaaccctaacttgaagggacggacagttattgtgaagggccccagaggcaccctgcggagggacttcaatcacatcaatgtagaactcagtctccttggaaagaaaaagaagaggctccgtgttgacaaatggtggggaaacagaaaggaactggccactgtttgcacaatctgtagtcacgtacagaacatgatcaagggtgttacactgggcttccgttacaagatgaggtcggtgtatgcccacttccccatcaatgttgttattcaggagaatggttctcttgtggaaatccgaaatttttggggtgaaaaatacatacacagtgtttgaataaggccaggggttgcctgttcagtatctcaagcccagaaaaatgagttgattcttgaaggaaatgacattgaacttgtgtcaaattcagctgctttgattcagcaagccaccacagttaaaaacaaggatatcataaaatt

SEQ ID NO: 49007 - DNA, 1078 bp, Bovine  19866880353038
  misc_feature (1)..(1): n is a, c, g, or t
ngacatgactgagtaattgaactgaactgaactgaactctttccttggttcccattacattctacatttctgattattctccttgctctttggcttcccttcatggagtcctttatgatctctcttatctctgcccattccttaaatgttcatgttcttcaggttcctcttctcatttcacatactctcctgattcagtctcatctcaaatatataaacaggtggattctttactagctgagccacaagggaagcccagacaaatgtatatttcaggtcagttctctcctgaaccccaagccccaatatccaacttactgctgaatttccccagttggacactcatcaagcacctcaattccagctttccaacacagaattcttaatttcctcctgacccttacatcccatccctccaatcttgcttctcctctgtgttccttctctggaaataaaactaccatccatctagttgactaagccagatatctggtcaaccttcttgattcctatttctctgtcacaactcccatgaaagcagtctctaagtccttcatcataaacatatcttgctattcccatgtcttcatagccattgtttctcccctgatttaaatcactattctctctcctttgatggcctctttgctggtcctccttcaaagtctgaacccttccaagatgtttactgaccacggaccagaataaatgtgcaaaaatgcaattttcatcatatcaaccatttgtttagaacactttgtggttccttcatcattcaggacagggttgaaagtccttaatgtggctcaagtgattggttcctgtgttttcatctttcctcaatcctctcttaaactccttgctccagtttttctgactattaataactttactttttgaatgtgtccatgctttttctttccaccagacctttgaaccctctagtcaagtgttccctctaagaaagtgtttttagaggatccttcaaagatgatctagtactgcatactattatggtgatctcatgtctaatgcttcaccagtggggggggggttagtcactaagtcatgtgcaact

SEQ ID NO: 49008 - DNA, 2291 bp, Bovine  19866880432296
  misc_feature (1)..(1): n is a, c, g, or t
ncttaattaaggagtgtttcatttgcagaattatcccaaaagaaaaaaagtcttgtggttgaggccctcttcttagctaagaaacaaattggcattttactactagatttgaaaacatctgagaaagtttttctctgtaatttagaagttattatttttatctaacaggcaaaattttattttgattatatgtatactaatatgtagcatttaaatatgcaatattcaaatattgcaaaaaaaaagacccttggttttgaaatcaggagaccaatttgaccctcttctgccaaaaaaaaaaaaaaaaaaatccctttaaagcttgtggttttcactagtacttttagtgtttagtcaactgtttcataagttttacatcccatatatgagaccatttaataaaagagcggtagatgctttttcagattagaaaaattaattttacattaagaaccacagagatgtcataaatttttatagaaagacaatggccttctacaaaatcttgctcccatacacctgtaagtaaaatatttgagcatgtaaatatacattcctttgtctatttatgtaccacattataaagcacacaaataaaataaggtgacagtatgaggtaaaaagggcttccctggtggctcagtggtaaagaatcctcctgccagtgcaggaaatgtgggtttgattccctaggtcaggaaggttcccttggagaaggaaatggcaacccactccagtatttttgcctggggaataccatggacagaggagtctggcaggctacagcccatggggttgcaagagttggatgcgactttagtaactaaacaacaatagcaacaatgaggtaaaaataaaatagcattttttcacacctaaaggagtgaatgcaatcactactgattggaaaaataaagaaaatgtaatatagcaatttctttctttcttcttttcttttttttttaacttttggaccataccgcacaacatgtgggattttagttccccaaccagggatcgaactcatgccccctgcagtggaagctcagagtcttaattgctagaccaccaggtaagtccctgtggcagtttctgccacagctctgcagagtccttctaaggcaggggacacatgcagaatggtttctgtggcctaacaggtgagacatgtcaggggagatataggcgctccacatacccacagggtgaccttcaacactcactcgaatcagagtcacttgtatctttttaaaaaacactgatacccctgctctaacttcagggatttggttttcattagtctggcagtggagggactaggcatggatttttaaaaaaatcttcttaggagagattagtgttcagctggggttgagaatcactacctcagaccctgggcagctcttcttctttgtgtgggccctgcagggagtttctagggggaagtggtactgaaccatagtgcctggtgggacagtgccatggttgagtggcacagtagaagcagtgatatgactgccatgtcatgggaatgtattcatttgaatcgggacaagcaacaaccatcctttgagatggtgcccagcaaaggttgtgcagctgagggtgaaggtctaattggtttaagagctctggtaagtcatcaggagaatgcttccagaggctgagaccccaagtcagcaggcaggaacaaggactatctattgcagcttaaattaatgtcattcctgtgtcattaagccttccacagcccaaggacacctagggaaactcaggttacagcattaatattgtaacaataagcaacttttacagagagcttcacagcttacaaagctcttttgtatatattatgttacttgatccacatttcagccctgggaggtagtagggtaaatgctattagttccagtctataaaggaaaataatgaagttcagtatttgtctgaagtcatacagtattaaagggcagagccagaatgtcaacttacttctcccagctctgcatcttttctccttttttaccaaatcttggactggtagaaagtgcttggtgatatacagatcaggattcctatgaatgtatgtagttattgatttgtttagaaatgggatacatctctcttaggacttaactgtttttattcttcatcacaaccagagctaataatattcagccataccagttgttaaaatgctgaaagaccttttgctcatttagtaagtagttaagccctctaccaccacaaccccttgtggcccagttcttcccctggactctgttagacct

SEQ ID NO: 49009 - DNA, 1567 bp, Bovine  19866880493429
  misc_feature (1)..(1): n is a, c, g, or t
ncagacaattatgtgctctgtgcacatgtttaactagaccagtgatcagaaatgacactttactgcgaaatgacaaagttggatagggtgagtgaacactcccttggtccctttaattctctctgggccaaacaaaataaccaaacacacatgcacacacagctgaaaagtgtttttaaatacctcaggtttttgtgtgtttttaaaaagtttcccaagacagcttgaacaaaccactgcattttaataatggtggtggtagtgacttaagtgctgaggtgcttgtgctcatcaaagttctctccaagcctccctctgtccctctcctgtctctgcctttcggtgttacattgcaggcctcatgtgtgcaggtcacaggtacaggttagaggagatcgccatggggaaataagagaaagataaagggaatcttaccatatctcagttcctatgcaaggaagcattttatatttcttcagtcaaaggggcatataggtcagtcttggccctcttctttgaacttgatgcttcaaagtgattcagacaagacaggaaatggaatttatttgagtagatgtatgtcattttttaatgcatacacgcaatactagtacagttttttaaaatgacagttaatttacaagtttgtgttaatttctggtgtaaagcaaagtgattcagttatacatacacatataaacagtcttttttatattcttctcaattatagtctaagatattgcctatagttccctgtgctatgcagtaggaccttgtttatatatttcacatacagtggtttgtatctgctaatcccaaactcctaatttatcccttaccctcttcccctttggtgaccataggtatgttttctatgtctgtgaatgtgtttctgtttttcaaacaagttcatttgtatcatattttagattccacatataagtggtatatttttctttctctgatttacctcttttagtatgacaatctctagattcatccattttgtttttttaatataaatttatttattttaattggaagctaattactttacaatattgtattggttttgccatacattgacatgagtgggagggggattcaggatggggaacatatgtacacctgtggtggattcatgtcggtgtaggttcatccattttgctccgcatggcattatttcattctattttatgattgagtaatattacatcgtatatatgtgccacatcttatttatctattcatctgtcattggacatttaggttgatttcatgtcttgactattgtaaatagttttgctatgaacactgggggccatgtatcttcaaattgattttcttcggatatatgcccaggagtgggattgttggatcatatgataactccattttcagttttttaaggaaccaccatactattttccatagtggctgtaccaatttacattcccactgacagtacaagagggttctcttttctccacaccctctccagcatttactatttgtagactttttgataatggccattctgagtggtggaggttacagctcatgtaga

SEQ ID NO: 49010 - DNA, 1395 bp, Bovine  19866880527721
  misc_feature (1)..(1): n is a, c, g, or t
ncccaccaggctcctcttctgtacggattctccaggcaagaatactaacacattcccttctccatggaatcttcccgacccagggattgaaccctgatctcctgcattgcaggcagattctttaccaactgagctaccaaggaagccccctcttagggtacagagtctcaaaaaaatctctggcaagatttctactagcttagaatttcttgagtcaccatagacgttttccactttttttttttttcccgttacaattaagggtaggggcaaaagaaaacatccagcaagggagtatattagaaactcagggacctgaaatgtcctataaaagtataaaactccccagccctagattctaatgtgtgtttgtttatctctcccattgttatacagtaaactctttccccatatggttattgtgggtttaagatttcattggtttctctcaaatatctgtaatatgatcttccagattgtctcacctacccatcagtttaacactgagaagtattatggaaaccatttcttaattgtatattcattcagtgttagcttgttatatagagcaagaacactaagatcttgtttacacataggtaggcatgcttataatttgtcaactaaatattttcttctttgtacattttttatagattgaccaacctcaacttggcctgccttccagagactactatgaatgcacctgcagcatataaagaggtaaaaacaaaaacaaaaaaccaacaaaactacagaatttaaacttaaccctctatcttcttcactcaggcagatactgaaaatcatacataatagtgagcttcctttgactgactgagtattctcaacagaacaaatgaagatcttttaagaaacaaagaaacttgaaattccttgtttgtgtcttgattcttagtatttaagtcatgtggcccatttttaaaagccaattttatttacttatttatttttaccttttaattttatattggagtacagcccattaacaatgttgtgatagtttcagatgaacaatgaaggggctcagcatacgtatgttgttgttcagtcactaagccctgtccttccctttgtgaccccatgaactgcaacacaccaggcttccctgtccctcattatctcccacaatttgcctaaactcatgtccattgagtcgatgatgccttccaactatctcatcctctgtcgcactcttctgtcctcaatcttttccagcatcagggtcttttctaatgagtcagctcttcacatcaggtagccagaatattggagcttcagcttcagaatcagtccttccaaggaatattcagggttgatttcccttaggattgacggatttgatcttgtgtccaagggactcctaagagtctt

SEQ ID NO: 49011 - DNA, 1391 bp, Bovine  19866880584372
  misc_feature (1)..(1): n is a, c, g, or t
ncaaaattaaaaacttttgttctgtgcaaatgcagattctgattcagtaggtctgtggtggtccgagattctatacttaaaaagatttctcagatgatgctgaggctgctggtccatgggccacactttaagcagcaaaggacatacactttatggttctcaaattatatgatttcacaagtgaacagattttgttattttctagtgttagcagttaagagaagtagaggagagaattcaatttcagttgacaggttaatagaaaggccccaagagccaatttatagctgaatgcgatgagaaacaaactcttatcttttcacatgcctttcatctattctaatattttattcaaatgacatctattataaatgagtaaccatctgatgaaaaatgatcatgtttcagcatgaatcttaattttacattgatcttatgaccaaaacataagcttctgaaatgaatatatctttgcatttaaactgctttattttttatttatggtaattattcttctcgtattttcagttcatactttgggactttatctgaacccatgagcacaatcatcacaggctataagaaattctgtgggtattctgaatttaactgtgttgtagctcttgggattgttggctaggttttccattctctggtctaatagaaactgaatctcttgttgtatctctaataatgacatttcggtttagacatggtgttgtggtccgttagcggaccggaacctggtggtctggagtcgacaataagaaaatgaaagagagagagagagagaaagaaaggaagaaagacacagggccccaagctctgatggagcaaaagtgctttaatgatctttctgtgagtatatataggctgttgtacaaggaatttcttttgacaatgataaagatcagaataccaaacatacagcaactgttaccaagggaacagggattaacaatggtcctaaggtcaggagacaatccatatctcaagaaagaggattgagactaagcagttttgtcataaggagaatgtttactgaaggagattcatacatgtctcatcctatgacctcagtcctgggagtggtgtgccgttccactcgcttctgttgccagaaactgataaggaacagaggatttatgagaaacagcacataggaatcctgttaaacattccgtgacaacatggtatgtatccaaatttatttccatgtgctaccaactctttctgttcttctaacaaatagagaatagactgtaatttgaaagaaaacatcatgattctaaaagaatcaacatgcattgattctatttagaatatacaattttatcaggaataatgaattataagaaatgaagtggtttttctcatctaaataataaaca

SEQ ID NO: 49012 - DNA, 1395 bp, Bovine  19866880765146
  misc_feature (1)..(1): n is a, c, g, or t
nttccatcgctgacactgtactgagaaggggaaggagaggcggttttccagcacaacttgtgcagacactcggcattcacaagcctggaaacaattctggcctgagggagccctgcctgtggccggcactttgaggatgcccatcaccacataccaaggaacatgtgcatctgattcactccccttagacctctcagatgcatttcctgtggacatctgtggccctggctctggggtaagagtggggagttgaatacaacacagcaacagccacaggaagaatccagactgtggacagctgtccagccttggcacagttcacctttaaatatctggtactttctgactctgactgtggagggggaagagggatgtttacaaatagtcaaaaccaggagaagcacgataaagaaaagaaatgtgtcttctaagcaatcctgaagaggaaagctggtatcttaccttgatatactcatattttaaatataattgattcccgacttcttgaatgcctaatgtttgcaggaaaagtgccaaatgaaatagaaatatcttgattttagactcatgttttctgctttagtttctaccaattcatttgcaaagataaagctgacctttaaccccatccatcttaatcctttccaccagacagtcattcttaccaatcagattattacatttacctacattctttaagttcaattgtaaagaaaactttaaaaacttcaatcggatctgtacaagcagatgtatgtacctagtggctttcagtgtatatttttaataatgttcaaaatttctgaatgccaattcctaaataaaaccaactgctcattgctacaagatactttttaatgtaaaaaatcttttcaagtatagtgattggggaatattacttaaaaagtttgttcaatgtacattaatgcattgtaactttcaaaactgggccaggaaaattaaagaaatttcactagggaaaaattgatgtaattgaaagcttcagacatattaaactgtgtggtctgccatgtttttacttctatcaaactaattttatttgtatagacaagttatttggagaaggaaatggcaacccactctagtattcttgcctagagaatcccatggtcagaggagcctggtgggctgctgtccatagggtcgcacggagccagacacgactgaagcgatttagcatgcatgcatgcattggagaaggaaatggcaacccactccagtattcttgcctggagaatcctggggacaggggagcctggtgggctgccgtctatggggtcacacagagtttgacacgactgaagtgacttagtggcagcagcagcagaccagttattgtcccttcccctagtccacctgtgatatctgttggtt

SEQ ID NO: 49013 - DNA, 1387 bp, Bovine  19866880833659
  misc_feature (1)..(1): n is a, c, g, or t
ntgtctgaggttattgatatttctcctggcaatcttgattccgcttgtgcttctccagcccagcatctctcatgatgtactctgcacagaagttaaacaagcagggagacaatatacagccttgacgtactccttttcctacttggaaccagtctgttgttccatgtccagttctaactgttgcttcctgaccttcatataggtttctcaagaggcaggtcaagtggtctggtattcccatctctttcagaattttccacagtttattgtgatacacacagtcaaaggctttggcatagtcaataaagcagaaatagatgtttttctggacttctcttgcttttttgatgatccaacagatgttggaaatttcacctattactatcagtaaatggaagcccaaattactagaaataaggattcaaagaataaacactaaagtttttttttttatagccaagggtattctgggtatacatctatatcatatttttttatggatttgtctcttttttgttgtttttctttatctaatatctgttctttatttctttctcttttcattcttaaatatttaaaaaaaaaaaaacctttccattctcatgaaaaatatattaccagaggatttcagagacatccacaaaatctctatgaagcccacatattcttttaatatatgcttcaattattaaatcaactaagtctcagttcattaaatgttctttgaaaatgtacatgttcacagctatatggataattggataaagaattaataatgtgtaagaagaattcagtttgacggaatgtagaactgtaaaataaaggcatcagacactggagaataagagacaataaaagaagcaaagctgtaaaggtcagaacagactgtgagatgaagtaaggataggttattgagcctgtgtaaatctgcagaggaaaagctctggctgtctagtgtgggaggcaatgttttctgcatctgtcactcaaaagtaatgtaaatgtttacatcacgacaaatgctgaactcatttatattactaacatgatcttcccctgtgtatttctattttgcacttacattctttacaaagaaaataaagaactgtgttctctctttgccatttaatgtcttctatatctccctttactcaaggtaggaatttggtttttccagcactttggggtgtatgtatatataatcctcatagggggagaccagggaactgcaggagtagtcaggtttttgcctttggcagataaaatggcagggagacactcagcagttacacttctgtctctgcggagctgcctcacattccaatccattctctctccctgtgttttgatttttaaattggagatttgagggcacagaataacaagg

SEQ ID NO: 49014 - DNA, 2007 bp, Bovine  19866880883009
  misc_feature (1)..(1): n is a, c, g, or t
nttctgtagtttctttgattctaacagctgactgaaaaatttcagctcttcaaggaaaaataaaatgctttcttctaattcatggagctattgtggggactctatatctcttttctgtgtgtaataatactatttcctcctaaaattcattctgtgttttagacttccatttgtaatatatggactgacacccagcttagaataattaccaaaatatagagcttaatacaccagaccaaatttatttttagctttgagtcatccatcatgtctataatagcaatatgctatgaaattcataacagtctctaaagagcctttgaaaatattataatacctatttagttcttgaacaatttattaataaaacttaaaacttaataaaacctttatctgagttaagtttctcttttaggcttacaaaaataaaacaaaacagaaccactaactctgaagcatgtagataagaatgagtcaaaattctatgacttttatgtttcaatacaagttgtgtgtaacatacctcaggatttgtgtcaaactccaggcttaaacagtggaaaccgttttatctatttacttggttcagaaaggctcagtgcctctaggcaatcaatctaactctttgcagcaagacataagttatttgagatttctacctcaaaacctattatgcccccaaagtgctatctctgattattgttaaacgaagtctcagttggcagaagagttcaccatactagaactcttgatagcttcagagaaatactttattaaattctaaagcactcaagccatacctccaaaatacaggcaaacctccagagtctccttgaaaaattactcatggcccaagcactattggagccataaaaggcaaagcctcagaaccacagagttaaggtagaaatcatgtctttgctctgctaactctataaggaatcttttttgttattgggatctctaaagccccacaaaataccatgttcttgtcaacaccaacttcagacaaatagtccaaacaagaaagtagttcccagctactgtaattcagttcttgctttgacatataagtggagcttgtcattctcaatgcaacatttatcacattgagtatgtctaagcaatccagaaggctcatgccacatatcaatttatcaatagttttgcccagttgtacatgacaagtctctcacataagagtgagacattaagctagtgagtaaatctagctgaacacacagcacctcaaactctacaacagttttattgttatctacttgcaatcataaaaacattgttctttattaaaaatctcctctgaaggatagtcaaatgctcacaatggtgattaaaatgcagagaaccaaagctccccatagttcctaaccagaaagaagttctttggaggaaattatatgctctggtaaattactgttatgtacatgctaaaatttttgaaatgcagcagttgcaagtgttaaatgtctgctttcccatgcaaaaggcaaatgatagtgaacactggtaactctttgttaaatcaactatacagtattaagagtaaacaagatcacaatgtaggtgaaattgcttagtaacctgtaaatcactttagaaagagaaaaaattaagagttacacagagacaaatactgagatgcatgatcatttaagatgctggagtgtaagaaaagatgagaccatttctgtaatctttctgagaaaacaaaaattcctagttgtattttgcctctatatttttcatacttccacaagttcctgaacggaaatcctgtgtttggaagagctacacgaaaaacaaaaagagagagagaaacagagagagagaatctaggattagaaattttatacattgcgtgtatttaacgatggacaagtggaactataaaaataacatcttatagttaatgtgtgtcatcgtctcaataaactaatgcgagttgcatgtttgctattggctatgttaacagtatggtaaaactcc

SEQ ID NO: 49015 - DNA, 1200 bp, Bovine  19866880918731
  misc_feature (1)..(1): n is a, c, g, or t
nacatacttcagttcttatttgagaaaatgcagtcttaacatcaaaggttcagggctaagcaaaccaccatccagaactcaaatcccactcaccgcttgtgtttcctcttttttattagacacaaactaaaattgaaataactctaatattttatgatgtgaaaattatataaaattcaattttcagtgtctataaacgtttattaagactgtagaaaatatcctaattaattgaaaatatgcattgtctctgtactgcacatccttttgagttatcagactctgggctttaattttctttgagctatttttcaactctttgtaagttgtagatgactgacagagatgcaaacctgtcttgttaaatacagttttcattgacttcttacacttcatgaaaaaaagttttgttttcatttgtaatttgattcatatactccatatacaatgctgtcctttgaactatttgtagtcccctgtatacgtagaataaaatctttaaatgtgttcattcttatatctttgttaagagtcatgagtttacctttttctggacattatctttttacagaacacagccacccattcatttctgtgttgtctctggtcgctttcatgctataatagcagatctgaatagttacagcagagaccatatggtctgtaaagctgaaaatatttactgtttgccccttttctttttctgcagaacaagttaccaactgctggtctacatcattccaaccatagtcaaactgcaggggttctggtgaggagtccattttgcagcagctgtctgatgttttactttgctgaagttacacacttagtttttgtcctcagcaatatcaagtaaagcaactagatggtaaaaatgcatattaaaatgactatgtctaggtacagaaattagcatttaaaaattcatttctttagatcatatcataaacttcttaaatggattttttaaagctgtaaactggttcctattgaatataagagtccattcagttgtctggccctgccttttccaggagcaaagagaataagttgaattggaaaacaccaagatcattccctatattaccatgtttttgaaatagtattaaattgagaaagacttttaaaaatgacttattaagtagttagaatttttatcttcttttcaatgaaagttcatctcttcacatgtatattttt

SEQ ID NO: 49016 - DNA, 1187 bp, Bovine  19866880995445
  misc_feature (1)..(1): n is a, c, g, or t
ngacttaggttgaatgatgaatagtacgtgtgtatacttcttcttcctttactgtagttggttggttttattcttgagaggtctgggtcctcctatcctgcatcttatctctttctttaaataaccaagtgtttcgctagtttctacctcagatgaaagagaaaatgcaggcctgccttagccgtcctgggcctggagtcactctgcactctgataactttggctgttgactttgttcttcaaggtgctgtgacctttgaacatctaggaggctctacggtatgtgggattgttaagggattttattgtttcagtaaagatctgaagctacagttaatacttcttggactctgcttacaatatttctgcaattcataccggatatccaatttgcatttgtttatgtagagtctgtcattataaaattagctgtaagcttgttagtttttctttcatccatgattttatctttgagaattatgatgaaaaaacaaatcaactaatgttgagtatttacaatgtgcaaaacactgactgtactaggtgtctcaattaatagaaagatgtataaagagaagatctatgaagagaaaaatactatattatgtacaggactcctgtgctcacaatttctacacctggaacagtgagaaaactctaccattgccctccccacattctttctcatacaagttgaactgttttgcaaggaaaacaaaagagcaattgagaattcatctgcatcaagagagtataagttctcaagtgagcttttgaaaatactttgccttctgaataaattaattaaacacttttaaagaactgctgagctgtgtggatttttccagcttggaatggtaaatctgtcttcccgctgagcctcgagcccccacttctgaccacttttggacatgtttgcctgactgtcatctcagtctccaactctttaagactaaactctgagggtcacctccaaaccagtcctctcctggatgtttgtactttggcatgtggtacaattgttatcacagcctcccaggtttgaaatcttgagtagaattctgtatttcatgctctctcttgggctatcagtaactcttctgcctctttcaatctatactctagataatcaatgtcaacctagtttacatattcctcccttttgactagacgtcacccaactactc

SEQ ID NO: 49017 - DNA, 1360 bp, Bovine  19866880997918
  misc_feature (1)..(1): n is a, c, g, or t
naatataattttccaccaattataaagaaaggagaataaatagtaaaatgatcatcctaatgttataggtttaaaactataaaaagtagcaatatattcttactaaaagtctattactaagagaatgtgcaattttattccttgtaaaacaaactcaaatggtttcaggataacttactttggcacataaaatataaaatgtgtgtggtatggacatttatataactgcatagttgaacaaaaccactgcctattcagctttatagaggaaattttttttgcttgtttcataagaaatttaaaagagttgctgcctcaagagatgaaaaatagcctcttgaaggaatactaaggactgcttgctttattatactatatttctatggaaatatgagcacatcccatcagcatttcatgaatctgtgtggacatatgagagctttcagttgtttcccagggaagtttcatattacaaaaaagccactgcctaagtcagtgaactgccaattatggttaactgccctctatcttcctcctcagagacaggcagcaggcatttaaattcttatccaatgaccttctcattttaactcattctaaactaatgacttttaagatttaattttaataccataatgagaggaaaaaatataagaaaaaatttgcaactgaatacataatcgcagccctagttggaatatggaataggaaattccattcctaatataattgcccattatttattgattgataagcattcatactcaagtcactgaagacatcacattcataagttctcaatcattatcactttaatttttaatagataagacttcagggttcctatcctacctgtgtgaattattttaatgcaaagctacaacttcaaacaacatgatgctatataaatgacgcatacaacatggacagaaagcaagtcagctgtaaggtaagaagacatccaatttacaagtcccctccagtaactgtcctaggctctatgtatgtacatgaagatagacactagctttgttacagattggtctgcttaaaagtattccagaaggttctgcagtgtaacacctccctcgttttatgacttctgatctcaaattattttttcctgtgcaaactcctgatacaatatgaattgtcatcagacaatattttttcatgttgccgtttaaaaatttaagcccattatgctactacatttgagttcacttgttgaaatgtaattgatttcagtggaaaaatgtgaacaaagagtacatggatcatgaccacagatacactggttagatcatttatatattaatatcatcttgtgttattctagataaagcactaaaagagaaaa

SEQ ID NO: 49018 - DNA, 1542 bp, Bovine  19866881080446
  misc_feature (1)..(1): n is a, c, g, or t
nactctgggaacaatcagtcattgttttctgtgtcttttaattccgataagtcattctaaaataagccagtcacaagtatagtggattcttcaatacacttaatgcaatttaacaatagttttactatgacaagtgctaatatacatttcaaatattttgactaaaaagttttagaaggacttctttcatttttcctacaattcccctaaagactcactggtttaatgaccaacaatgcagaaactgttacttcagtgtcatataaaaaggaaatattttgctttcaactaggaagcactttataactcagtcagatgtgggtgtgtatgcataaggaagcatgagtaaagaggagagagccagattatagagaattttagattccttgtcaaattaatatcattaagtccacttctgtgaataaaatagagagtacctgaaggtgttatgctcagctggtcacaggagagtgctagagcaccattaaattacctgcttcaaaatagctggaagaaatcacacactagagaatgacaatgtgcttgaagaagctttaccttgcatggttgattgaaagaaataatagcacttgctggtagaaattatagtagaataccaaatctgcctcataatatctccagatgttaaaaacagaatgatgaagtgtgacagaactatcttgtggtataattattttaatcgttgcagtgctattataaaagatttcaattttgttaaattaccctgtgcattttaaaattccctttcagccagctcttaacacttctactaaattgttatacatctgatgcaggcagcatcctcttgagccagtgagaatggagaatgtggacaaaatcacatttaacaacctagttcttccttgaaataaagctaaacaactgaggtgggattctgagtccttgagtgctttgtagtcaaatacttctctcacaggatttaaataactttatgtatcacaattcatttttatgacttaaagagatgaaaaaaatctatgattcctaatttctagacaaaaacactaaatcacctcagaatccaaaagaattcatgtcggtaactataagaactgcaagtcagattttcaggcatctaggttctgctaggaaaaagaattcttcttcatccaatttgatcatcagttttataagcatcaccttatgatactaaattcatttaaacttaacattccaagagtgctgagtaacatttactaagtacaagggcccctctgaaagatattataattatatagaacttccacagaaattgtgaggtattcagtgaacctatagacacatttcccagagaaatgcaaaataaatatagatacatacaatttgaggagtgtaaggttcaggctctatcacaagatcttcagctgtaagtgtactgtccctttaatacatggattgggggtgggcagggtgcagtttctaccaggctaagtcacatctacttttctctgaggcccatggttagggtacttcaactcaatatcacattattaaactata

SEQ ID NO: 49019 - DNA, 2665 bp, Bovine  19866881086471
  misc_feature (1)..(1): n is a, c, g, or t
nttatattgcccctacccttttccctctccctgttaaccactagtttgtgagtctgtgagtctgctgctattttgttctagttcttatattttttagattttacatataggtgatattatacagtatttgtcttctctatttaaaaaatatttatttaatcatgaagtcattctttgtctcttgtttcttaagtagaagtgggaatgacaaaaagagggaaaaaatggatgtctgtgcttatattatttgaatccttataagaatgaatgaaaaataattattgttgatactgtatttattaaatgagcctaccgaatgatttcttggtgaaaccatcaatgtgtttagaaagaataaaagacagaaaccttttctttcccatttctgtccacacctcccaactgtctctcattattttgtatctaagctgactccttttgcttttaggatatccctctctcatgtgtcttctctttgatgcctcctttatcacatttttatcacattacctccactgtgtcacttagcacccaaacatctacaacacctgcttatgacctaaaggatagacatgtaaacatcttagacattttagattcacagctaacttctcagtattatctgtcatgatcatccttctcaaattctccaacccatagctgtttgcccaactagctgtttgcccaactccatagctgttgctggttcacatgatattactcagagactcatctcacctggaatgcctcctctatgttcacctcatcttagctacaccttatccttctttttcaggctgaccagattctctcctcttctacaaagtgttcctttcacagttcaatccagagtgatttttcaacagtgaaatcttagcactaccagtctattttcctcttaaagcaatcaactgtattctgtactgtgatatttaatagagtgggggattttattcacctgaatttgagaaaagctgttttttaatgataagcagctagagcagggaactgaaagaacgtccctagggctctccagtgggaaacgtcatgtgctgtgagtgtgagaagaggagcaaagaactcaagtggagaaggagaaaaggatggaggaaaatacggtagtgaggagactttgtgggtagtgatagaagagctgccatgcagtgaaatcctagagtgaatctgaaatatcggaataagatacttaggaaattttataatgtactgtattatctaatcatctgtgctatttctacaagcaaattcctgaaagaacagcactacttttcaaggctatcaaaatgagatgtgtttctaatgcactgagacaaggtacaaggagatacaggtttctaaggcttataaagtttgtaaataattcttgcattttttacttgcatggatgtttaattcttttcagggattatgatgtcttctttatacttatgagaagaggtaatgcattttgctgctttataaaattaattctgtaaaacaggactaatcacatgataaatgctactagaaattctttttaataaaatatttttcaaagtcaaagttacttaagaaatacagttacaatgtgcaaaattgtagacatatttaatgaggcaaggagatggtcaacctaccagttttaactagggattgttttgttttttctggatttggaatcttaagggacatcttagctagaatacacagacaaatttttaattcatggcaagaaaaagtaaagagtgcttaatctgctacttcagaataaaagtaagaagaaagataggcagtagttgatagctgacttcaattctttctagtttttatggcatttttagtctagttctttcattcaaatatcaatgctattggaatctattctgggcttatttgtgcctaggatgaaagaacattcccccaaagtacaactagagcatcaagacccattttacttctaaaagccagacagtgcaaaacagtggatagtttcttatggtgggtaattttatgtaagaaaatttaaaatctttccatcttctcttgttaatggaacagtgaatcatggtctgagcgtctgaggaatagaaaggagtgggaggcaccagaatctattcctagatctaccccaattcatgcagtgtatttggacaaatttctaaatgcctctggtgttttggcatcatcagagcattgatttttaaattcgttcattcaatcttgcaacattagtgagtaaccataggtgcccacatataaggatctaaaggcatattttctagaaatccatagacttgaaagagataaatatataaataaatcattgcaattgattgtgactaggaatgtatcacagatgctccagttgcagaggtggaacaaaggaatatgtggggtaggaaggatcagggaagtgttccaagaggaggaaacccttgaatgtgcttgaattctatgtgggagtttactaggaagggttgagagagcaggactttaagtacaaggaacagtatgttcaaactcatggaaacatgaaaggatatttttgagagggagtgctgtaaataacgtgatagagtacattgcgggacagtgggcaatggaggacaagattggagaggaaaatagccaaatactggaggatcttacatcctatgcaaagagctta

SEQ ID NO: 49020 - DNA, 1062 bp, Bovine  19866881231045
  misc_feature (1)..(1): n is a, c, g, or t
ntgaatagttaaataaataaggtaggacatacatcagatagtgataagtgctatgggggaaaaaaaaagagagaaaatgaagaagccaagaaggtgataaggactttagtgggggctttatgattttaaataggatagacaggaaaacaaccacttactaatgtgccatctgagcaaacacctgactacgtagaagcatattgtagatacctaggggaagggagaccttagaggattataggaatggcaaggagcccagtgtagctagagctgagagagtgatgagaagagccaagccataggcataaagtcagaaggacaaacaggagcctgaatggttaggactctttacaagtgattatgaagatttgggggcttatccattagttttataagttatagataatttacttctccaatcacataaactgggattctttatttgatgggaataaatggtctagccttctaaccaacttgtgaagtacaattgtgccgtttgttgaggcagctttacgatcataattccaggctggccctggagagcggaataccaagagagtaggctatacaatcttagccactgtaatagggcgaatcaaaaaaataaatctctcttctggttctccagagataaattctgtgcagcattttgaacaaagtgactttatctgaggtgaaaatgatcccacagagaaatcaattctctttagaaaagaatttatcattgggttagaaggataaacaagttacttctgaaaccttttgttaccaagtacatggaaagttaaagttatatgaaaacattcagcttgacacaagtataagacctaaatccattagaatagacatgcatggagacagaagtgattgtggagaacacatctcttgattgtacaccatcccagacacactgagtggagagtgatatgcatgtctgcaataggtgccacagaccaaagtccttgccaggtggagatcctcttacaggttagggatgcagacaacaatacctaaacaataaataagctgattgcagatagttataagtaggtatgaaag

SEQ ID NO: 49021 - DNA, 764 bp, Bovine  19866881247694
  misc_feature (1)..(1): n is a, c, g, or t
ngagaggtatgaacacatacaagttttttttttttctaaaccaaacttgcattgaaaatgttatttagagctgcaaatgaacaattatattgaatgcattttaccaacactccatttcagatgtccttcaggaacccaaaactgaagatataatagcagtgcagaaagcaaaaatgttatatagatcttgtataaatgaaagtaagtgctctttattttattttactaagagtatgccaaaatatgtatagacttcataatatatttatattcattatttttaaaagctgctattgagagcagaggcggggaacctctacttagactgttgccagatatatatgattggccagtggcgctagaaaactgggagcaaaaatatggtaagacagtcttccctttaaaaaaattatttctgtataaaatctgttattattatacttcagtatcatattaatgcattaagcatctaatgatatacttcacctttcatttctttaggttcttcttggacagctgagaaatctattgcacaactgaattctaaatatggaaaaaaagtcattattaatttttttgttggcactgatgataaaaactctacgaatcatataattcatgtaagtttatatggccatcagccagagttatctttaatgtgataaaacattcacatgcattggtggtgttgatatttagaaaaaataaggcttattcttatttgacttgtaggaacaaagtggtaataaattcaaggacagata

SEQ ID NO: 49022 - DNA, 996 bp, Bovine  19866881310105
  misc_feature (1)..(1): n is a, c, g, or t
nccgactttgcactttctgagcttctctcttggaaccttctaggaaaaaacaatgatacagagcaggatcatctctaccaatgcctgcatacagaaatccaaaaaaattggatttctgaaactttggttcttgaaacttaaaccacttaagatgctgatgcttagaaagtcctaaagttagtataactttatggagatataagggaatttttttaaaaagcagtttgaaataaaagtacttaacaataagataaaccacttagctataaatgagaatgttataaaagaaacaaaaccacttaatgtgacttatactgatttaaattttgctattatagtgaaaagaggtacatggatacatttatttccaaggaggatattcaataaatcagtaactcagcctcaacattgcttttatagggaatataataaattggtcatgcaaagcactaaagcgtgggaccaacagagaaatattatacagttatttaagaacagacccttacctatctgatttctgcctgacgagtaaaatgcattgactacagctgctccgcttatccacctatagaaaacataagaacttgttacaaaagatactaaattatctgattcaatctgttcacaaccataaaagcattaccactattccaagatgaattttaattttctgtttgaaatatgatcaacaaattaaaattaattcactagatgagagcattcatttaaaaatatttccacttcttgaaaaatgagtgtacacaggtcttcaatctgttatttaatttgcatacatttttaatgatggcatctcacagtgcaaaacccattctaacacatctctttggaaactgcaatggattaaaattatattgaaatttatttagttctgtgttcctgatactaggtgactatgccaacaattctggaacagttgacaaaatatagaaataatgctaaaatttcaattcagcagatttcaggtgctaaaaagta

SEQ ID NO: 49023 - DNA, 1032 bp, Bovine  19866881325589
  misc_feature (1)..(1): n is a, c, g, or t
ncctgcctgcagcgcaggaaatgtgatttcaatccctgggttgaaaagatcccctggagaagagaatgactatccgttccagtattcttgcctggagaatcccatagacaggggagcctggagagatgtagtcaatggggtcacatagagtcagacattcctactctttacattctctttcatcaacccaaatttcaaatgctattttgcgaagaatttctcttccctactaactttacatgtattctctgatgagcaaactcatttataaattgcctcttcctactgtaaacatcatcatctttttgttaatattatattaggtgaaactaaatgaacagttccctttttaaaacaaaagcatagcatctaataaattatcactactcctttgtcaattgtcaataggtggataggtttttcaggaaagggaattggagaaaacctagcaaacctccttgatgggagactctctaagagacttgttgggatttgtccgggtaatgaagctagtctatcagcatcattatgctatttcagagatgcagtgatgatagatgtaaatggggtagttgcagagactctctataattaattaccatcttcaagttaacttcagacatttattaacaacatttagatttcgtttgaacagtctatcacaatccttttaagtaggaggcttctaaagcctagcagttgttttcattagctgccaaataaatatgaccgtgaactctgcaagtcagagaagctagcagcacttctgcttccccaaatgttccctcaacttcaggaaaagcaacaaaattcaaaatggactacttttaattcagatctttatttcaaagagcattttaaatatcatctttacatttttcaataacatctaatcggtgcaatcagattgtgatttttacagtgtatgtataatgaacttcctacaagaatcctatgaggtcagtgtttgctttatctccagttaaccactaaagggccagaagctgcaaatgttccctttacacatctaca

SEQ ID NO: 49024 - DNA, 1312 bp, Bovine  19866881404179
  misc_feature (1)..(1): n is a, c, g, or t
naatgctaaaactatattgcatgtcatggattacatgagtttatgtaggttgtatgttttcgttttcctccctgtgttatgtagcctctaaaatgtgccccagtgatccctatctccaggcattcacacctttgtgtaatcctttcctcctgagtgtgggttagactcagtgattcccctctaatgaataaactaagcaaatgtggtgggatgatactcctgagattcagttcagttgctcagttgtgtctgactctttgcaactgcatggactgcagcacaccaggcttaggttacacaaaggctctaacttcatcttttctctctctctctctctctctctctgtctctctctctcttgctttgagtgaaaccagctgccctatggagtgagcttaccccacaagacaagatactgagggttccctgccaacagacagcaagaaactgaggccctcagttcaacaactgataacaaacgtaatcttgaaacaaccacacagataagcttgtaaagatatccccctccaggcgagcagagatctgcacagctcaaatgatgtgacaataccttgatcataccctcatggaggccttgagtcggaggtccagctaggttgcagccagattcctaacccacagaaactaagagatgacaaatactagctcttttaaactattaattgtggagcaatagatatcaaatgcacttcctctcaaaaatgaggaaactttgaattggatcttgaaagaaataaaaagtctgcttttgcaggaccatgagcaagtggggatgactgatcttgtcataatcttcctcgtgtctctgtttttcctcctgtatacttcagtagcccctctcctcagtccctccttccctggggcacagaaggttagagggagctgcagaggttcctcagaggaaaggttcagcatgtgaggtaaggttggggatgaggcatgagcaaaaccttctgctcacttctttcagagacattccatttttacgtaaatcacaaattgagattccacctaaaatttcatgtgaagaaagcatctcattgaaaaagcaagtctgaactctcataaagcacttatttagcacttgttctttctagaacaaagggctgggtgtttgaaaggatgagccttattcctgggcctgctacacagttcctggagtcccagtttcctcctgtctctgagatgaaattacctgtcccacctccatcacaagatcattgagagtcttatctgtggggaccctgcatgccatctgtttctgggccggaacactccagccagatatcat

SEQ ID NO: 49025 - DNA, 2224 bp, Bovine  19866881416953
  misc_feature (1)..(1): n is a, c, g, or t
ntgtatctcaatgttggtatgtcatgaacttattttgattgacttctgtccttgagaactctttatccctcttttcttattacaaagccaccaacgtccagatcaaatggtacctcctctggaaagtctgcatgtcctatctcttctctctccccaccctcagccaatcaagtcatccttcttgcttcctggttctttgtatagatctctcttaataacattcaccctatcccatcagttataattcatacattctttgcttccactcaatcagtttctgaaaatcatgcaacatgtcttattaatatttaaagacttaatatttaaaaggtgcttaccacctgctaggcactcaatatgtatttatgttaataaaatgaataaaaataaattaattcacatagaatttaatgccatgattatgatagtactagccgttaacctacttctcatccatctttaaatgaattgaagatttttacagaatttaggagttttcatgatttttcactgagacaacaatcttaacaaaaatatagaagctatcttcatacatacatatatatattcaatacatatatatacatacatatatatgtacatacaattattctgctgaagatcataaacaatcaaacattataacaagcctccactaaagatttaaacagtactctggaatcatttatatacttcactgcattgtgtagatttttcatgttgtgtgcctttaagatatccttgaattggtatgtccatggtaaccagaaccatgtagagtctaagaaaatgttactgattctctctttgaatttcaagaagcacttctctgtgatgcttaaagcctaaattactagattttccttctttgaaagtctcttttaaagggacttttctaatatggaaattttttcttataaaacagcaaaaattacacaatggagatcttacatttatagtggaaaatctattagctgcaatcccaagcttcatatcttatttgttaaaaaatacctctcctagacttagcaaaattaccacatttaattacattgtattgtaaaaacaaatatgaagggaccttgatttaaaaaagggctatgggattcttttcacagcctatcatatagtctttcaagctcaaatatgccagccagagcagcaaagcctgaaagaataaaggtatgatttggaaggctctataaataaaaagttgagcatagtaaaactgagacattcattctttttactgattttacagagggaaatggacactatttcaaaagatttttatgcatccatagatgagagcattgaagtttgtcaccaaagaaaggatactcagaaccaaactggactgttgtgtatgatatttacacttgatattagtgaacacttaataaatgtcaagaactacttttcaccagggttaggtcaatccatcctcacaataaatattggtggtaaacagtattattatctccatctacagaagaagaaatggaagcacagagaggttagtaattctcccaaggtcacatttctagcagttagcagaactaggattaaaacttaggaagttgcatttccttttttaggagatcttctggaccaagggatcaagcccttgtctcctgcactggcaagcagattctttaccataacacagggagcccagcctggagctctgtgatgacctagggagtgggatgggggagagaggagggagccttacaagggaggggatgtatatataattatggtagattgcactgctataagcagaaaccaacacaacattgtaaagcaattttcctccaattaaaaaaaattttttttaattaaaaaaaaaaaacaaaactatgaagcctgctcctgatctcacattttatacttaggactgcacttccagggaatattcctgaaggagtttgatgccatgctagacagaacataggtctgaaacttaaggtaaatcttattattcatagatatgaggctctcatttcagaaggaaaaaaatgtcaaactttatttgaaaattgatagtaaggccaagttgtttgcaatggaggatacactttatagacagaaacaataattttattgatttcttgatcacagctactaagagaactgaataaaattttttggccactaggggcctggtgggctacagtccatggcaaagagtcagacacgggaaaatgcacgcagcaacaca

SEQ ID NO: 49026 - DNA, 1485 bp, Bovine  19866881513212
  misc_feature (1)..(1): n is a, c, g, or t
nactgctgactgacactggaatttgatgccaaggaaattgatcaaatctccatccataaatattctatactactaataatgagttagcaggtattgattaattgttatgtaataagcactatgattaaatatcttaggtgcaaccaggtaaggatcagtattatccccacttttacaaatgaataagctcaggcacagagacattagtatatggttattcagtaagtagtaaagttgtatataaggagttctataggccaaagaaggaagagaagacgacttggtggaggcctgagtggactgggctaggggagttttaactctggcattcatgtttcacacacttaacaagtaataaataaatgaccactcatttccttttccatcagtatgcacagttaaactactgtgcattttgctcatgtgtatttccatttgcttttctgccatgcccccctttaaaatattaaacagacgaacaaaaattatgttttacttttaaacagctcttttctttcttccagctgtttgtgtcagtgctagctctcattaataaagctagatggattagttaaatgctaatgtcaaatggtaagtgctaggcactttttcccttgtgagatactgaaatgtgaagtctgggccagtagcaatgacggatattgttcttggaggaattaagacctctgaaaattgtgggaatgattaatggttacttcatcttctgtttatacggcagagtttgcacttcattattcttggctttttagatataggctatatttaaccaggctctttcaatttttaaaatgatactgttatgatatgtacattattctctcactaacttatgttgcctattgtgtgcaaggtgctacacaaggatctgggcataaagattaaataagttgatacaatccttatattttcatatgaatgtgagtctggaagctatatttaatcagaccctttcaatttttaaaataatactgacatcattttacaaatatctatttgattataataatgataactgtcaagggatgatgcagatttatgatatatcagggacactgattatatgaagatttgggaagggaagtgagtgccagattatgacaagtttggtagactttcagtcaatcttatgttgagagcaatgaaaagtcataaagtagtcatttaaaaataaaaacctataactacagaccaccggaatagtgaaatcatcagattgtagggccttgtcttagtgtggtagtctttgaaactacaaattagaaagttcagtatgtgtcagaacagcttggtcattgataaattactgcaatctaggaattcgaaaggaaaatacatttgatagaaggaacaaattttgaattgatgtgtcaaatcaataaccttagagtattcataagaaccccttacaggtaatccaggcctggtatcctagctagaaatgtagaatgggagccattcaaagga

SEQ ID NO: 49027 - DNA, 1243 bp, Bovine  19866881608016
  misc_feature (1)..(1): n is a, c, g, or t
nggataaagacacaggagtaacacccttgcagtagtcagtgaaatggaggagagtactcttgctagtgttttctcacctcattaacaaaaaagcatcccatagtgtataaaaaaatcttagagattgatattggaaaattcaaattaccatttctttgcagtcaagtagcaattccctgctgaatgcagatgaatttatatgatttgaaatacagttaattcaaaacactgcatgcttgtactttggaatcgttggtcccattaggtatgaactcagacatgtttattttcttcaaagtgaaacaagaattctgattactttttaataggaaaagaatggagttggcaggactatacataaaaacatccttttatccctgttaccttagtgattaagtgtttaatacagaaacagatgaaatttttattgaacagcagatccaggatagagatgctagttagacagcctcctaattgcagggtatccttggaagagagagccctctccccaggaaattgtttacttagcatttaataatggtcatggaataccagtatctaaatgttacttaaagatgtcctcttgaatttcaaattaataacagcttacattttgcttaggttcttgtttgataaaatattttcatttccctacaaattttttgtgtgatcctcttgagtcactgtgaatttaaatgtgccttttcactcagcttgacaggaaggatgcccctttcactgataatcagtagggttataaaaccccctggaaactgtgaaagggttaagtactcttcagctcttcttcatatttatcctgtgtggacatatatttgaagctcagaactacccattgatcccaaatgtgtggtatggccttcctaattgtagttgtctagttgctgttgtgtccaattttttttgctacctcatggactatagcccatcaggctcttccatccatgggatttcccaggcaagaatattagagtggattgccatttcctcctctaggggatcttcctgacccagggattgaaccctagtctcctgcattggcaagtggattctttaccactgagccaccaggaagcccttaccaaattgatgctgggacttgaaattttgagtaaattttgatgtgggacttgaaattttgaataaattttaagttgtttaaactgctgatagataataactaaatagcagtgggctgagatttatgaaagtgttattcaatttc

SEQ ID NO: 49028 - DNA, 990 bp, Bovine  19866881653065
  misc_feature (1)..(1): n is a, c, g, or t
nataataaagataatatctggaggagaattttaatatagagctctgtgaagcactgagtggattgagaatgatcgaattttatccaatagaataaaaacataaaataatatacagttattctaaacataattatatgggcttcccaggtggcacagttggtaaagaatctgcctgccaatgaatgagacacaaaagatgtgggtttgatccctgaattggagagatcccctggaagagaaaatggcaactcactctaatatccttgcctggaaaattccatggacagaggagcctggtgggctacagtccataggttcacaaagagtaggatacaactgagtgcagacacagtcattccaaatataactatacagtgtaaactatcattcattcattcattcaacatctgtttggatgtctaaggttcagacaatgtacattaatggtaaacagaacgttagagttcctgcctttaagaagcttatggtccagtcatttttcaaattatcttcttccttaaattcctctcaaaaacctctcatcccaagggattccatacagtaaatatttaatgcttaggatgagaatgtccttatgcacaacaaattgaccaagtcttaaattagtaatgaggtaatgcaggaggagccctgcatcttattttccctagacccatttgggctgttcatgcctgctcagttgtgtctgactttttgtgaccccgtggactataccctgccagactcctctgtccatgggattctccaggcaggaatactggagcaagttgtcatttccttcttcaagggatcttcccaacccaggtatcaaacccacaactcttgcgtctcctgcattggcaggcagattctttaccagctgagccaccaggtctccaaggtttcaatgacattatttcaatatctcagtatcttgaggatagaattctttaccgtctgagccagtaaagattctgcctgcaatgcagg

SEQ ID NO: 49029 - DNA, 1144 bp, Bovine  19866881734600
  misc_feature (1)..(1): n is a, c, g, or t
ngagtatatagatagattgcctttaggacttttgggcagcctattatggactgatttatctgtgatctgctattttccagttatattaaagaagggaacggtttcatagcatctcatgccttttcacaattaattccaaattgatgaattatactttatttggggcaatcaactcaagtcagcttgattagtgacaaaagacattcaaagaagaaatgttaaatcagaactttcattccagagaacaaacaaaaaatgggaagattttcaggaaaaaaatagctgtatattttaatataaagttcccatcaattcttatagctttctttatttctcttcctccattcttctcttcctttcttctcatcacagaggctttgcacaggtctttttaactgatttttttagttgatgggggggagtaaaatatgaacaattcaaagggcaatcacatgccattttgaaaatggtgagcctgtccacaattggaaagggtttttataaatgttagaatgttcatgggcaaacagtgcctaaatgctcattttagtatatcaacaaaaataagactggttttaaaaaatttatagcaattaatggtaagcgtggaagtccagagtggcttcctatgacattatttctaattgtcactctccaacttttccagcagtaacactggaccatcacacagttaccttctatgacaccaaaatttaaagagggaaaagtgagcagaaagttttcgaaaggtaacatccttaaacttgtgagagttcactggaatcactttcagacaccaaaaagtgaattaatctttagaaaactccactgaccaagacaaagtgaaatttcctgagtttttgcttatcacctgaaattcaacaaacacaatattaatccattgttttttctcccaataataagttaatgaaatgagccagtacctgccaactgaacaagaaaactcggaggtttccagattaatcccttcctctcattcctcccatttctattggttccatagatttcctgttcattttgctttctcagcaccattaagatctgctccatctttttcattcccattgttttggtgtaagttttcattatctgcctgaattattgtaattttcttctaagttac

SEQ ID NO: 49030 - DNA, 785 bp, Bovine  19866881798274
  misc_feature (1)..(1): n is a, c, g, or t
nctatccaagtttttatgatttctgataagaaaagactttcaaaaagactagagagaccacaggacactactgcttacagatactactatttctaaaaggcaattgaatgaaaacttctaaatcactagagtcagatgttgccacagcttctatatcaaataaataagatatctgaaaaaattttatttcaacttctagacacacttttttgcttctttaacaaaagctaatttccttttcctttactcattcccactgggcaaatcctcattctgttcctaaaacccatcagtttcctgcctcagggcaaagcaccatttgacattactgggagctccaaacctggcccagagatgtggggacaggacacagggataagactgttaaccaggccatgaaatttaatattcataacctcagatttacttcccatgatattcaagcaaaggaatgaaaatagatcagcattcagtaaactctcgctattcttgctagctttatcattaatttatttagaaagatggttaacagaaatggtttggggatgggggaaaactatagaaacttgaactagagttacagatggaatcctgtttttctctaaagattagtctaacattttcaacatgtttttgcagatttttcattccttcctcatcaggtttaagcgctttgtaaactgtagttttgccaacccaaaacgttgtgacactgaaaatcagcttttctgaatcaaagcaaaattgtcacagactagtaatgaaactagtaagttacatcaatt

SEQ ID NO: 49031 - DNA, 925 bp, Bovine  19866880707184
  misc_feature (1)..(1): n is a, c, g, or t
nttgtttttttaaattatttactccctttggattccccttttcctggcttgattgcttggctcttttcatgtttcttactgtctaatacatgtgtataagatttcatgattattcaactcactaattagcactctttgggttttttgttcagagtcactaatgtacctaattgttcttgcttcctgcccatctctctccatccggcctgtggagacattaggagagatctgacagctgccttgtcaaaatccaggcgcatctcctccggtgttgccctggtgcattcatcttaataatccaggcaaagggagaacagagggtggtctgaattgtctttagtcttcataatcaccggcttatcttctaagcattcacaagttatccttttagcatttacttatatatacacaggcgatgagaaatctgccctctttctttctcagacaccaacaacaaccacttgtgattttatttgcaaaatccttcctctaagcacagatgcagtgggttccaaccagcgcagggataaagttttctgcactcccttcccaccagctctgctcccctttttagtctgaaatttataatccttgacagaaaagaccaaaatcaaatggaattttgagaacttctgatgtctatatgtccttccctttcattctgctggcaattgagctaaggccgcaggtgtgtttggccttgaacccctctgaggagccgcctatcatttcagtcttcagtgtttctgctgctcttcttgcaggctgctgacacctcttacttttaacaggtgcatttacagctgcatcttgctcaaggtctcccagtgatactgaacttctcaatctctctgctcctagtctctttatttctaaaatgatagagttggacctggggtctctaaggttctgtaaaaactggctg

SEQ ID NO: 49032 - DNA, 992 bp, Bovine  19866880869964
  misc_feature (1)..(1): n is a, c, g, or t
nccagaatactagagtgggtagccattcccttctccaggggatcttcccaacccagggatagaacccaggtctctcacattgcaggcggattctttaccatctgagccacaagggaagcccaagaatgctggagtgggtagcctatcccttctccagcggatcttcccaacccagaaattgaaccggggtctcctgcattgcaggtggattctttgccaactgagctaccaggaagccccctaatcaaatatactccaatataaaataaaaaattttaatttaattgtaattggaggataactgttttacaatgtggtttaagctgtacaacaatgtgaatcagccataatcatgcatatatctcctccctcttgaccctccctcccaccaccccctaaaataaaacttttttaaaaagcaattattttttaatgcttcaggactgttctattgttttgctattggatgctctactttcttgactgaatttccagtttgtaaaatgtttaagaggaaatgatgaacttagtctgcatgtgcatattttcatcttatcagtactcagcataaagcattataaaaagccaagtaaggagttggtgggcatacatctgatttattgaagtgaggagttctgtactgctattcaacttttagaatttgcccatttttcaagggaaatgagcatatttgacagaatctggtaatccaggaaatgctgaatatgatctattggtagttcaatccactattatgaaaaaatggtggtcaacagctttttattcttaatatttaaagcgcttcaataaaaactctgaaaccagaggttacagaaatatgtaagcatacttgggctagagttcataaaatcactaatcaatggagtctataaaccctctgaaaaccttaatttctcaagtcgttccaactgtcttacaattcagttgaataggcattaaggtctttgtttaaaagacacacacacacacac

SEQ ID NO: 49033 - DNA, 1821 bp, Bovine  19866880900981
  misc_feature (1)..(1): n is a, c, g, or t
ntgttcactgtcagaccttgtattattagttggaaagtattcatttatgaatgagagatctgagagatgctgaactggaaatgacttaagccatgagaaatacttattttctcactcaacaagaaatccaaaagtctcggggtctgggatgggtttattcagcacagcataagcatagcttccactgttctgctctgtcatcctcagcatggtggcttttaccctcaggctcaattcctcttgaactccaggtgattgccatggctcagacgtcacatcctctctcataaccatgtagaaaaaaatacatcccttcttctgcaggaaaacctgcccatgaacccccttatatctcactggccagacgtatatcacaccagtcacaggcaaggagatagaagtactgtttaagtattcacgtcttgaaatcagagttctttcagcaagaaagaggaagcaagtgtgagtgtgtgtgggtgggtgtgtttggagtggccgctttcggtgtctgctagggtttatactcagcagtttactctgtctataagcctcaggcccctggtcactggaattattactgttctcaaaacagcatgtcattttttcatgcattctcctgccttaccaatgtgcctgcaacgccttcctgtgcttcaagaacacacgactcttcacagcctgttaggttccaagctgcttccaagacagcactactcagcctcagtccttcagcaggttttgtgtttatagtgcatttctcactttggtttctttctaccttcatttctacatttgacttctattccggtagactatagggccctatctccatcagttgtgtccttgccatggcctttgtgtgtcttaaatctagtgatacatattgaatgtaaattaatatcacacctgtttggtttgcagggctgtgctaccagcatagtctcccaagatggtgagcagaacggtcttatggggagagtggatgaaggtgtagatgaatttttcaccaagaaggtgaccaaaatggattccaagtgagttcagagtcatttcactaatcacaccatttaattcacatttaaattactaacagtgataattttaaacttagtatgtactaaggctcttatttcataagtatataagatagacatttgacagagggtttacttttctggtggtttgcaagaccaccatcaactgggaacttgttagaaacgtgaattctcaaacctgtagcccagacctactgaatgagaaactagaggtgggggctgacaacctgtgttttaataagccctccagggtatactgagacacactcaagttgaagaaccactgtaatatctaaatcagaccacaaaatgtatctccccaagagtttttttttttttttttcccctttagggctttattacattcatctggatgtatctcagacaatgagatacgtttggcaggctgaaattactaacagtggacccttgaacaatgcaggtttgaatggcttgggtccacttatttgtggatttgtttcaatagtagatacttcgatactacacgggccctggctggttgcatctgtggatgtggacaaactcggatactgaggactgactgtgaattaactccctcattattcagaggtcaactgtatttttaaattccccgtgtttataatttgatatgtctgggagcacacatcattcattgctaagtagcacagctttaccagagtcagaacgacaacagaattagtaaagaggcttcagatttagcctctaaaagttctgtctaattttctataccaagacagagttt

SEQ ID NO: 49034 - DNA, 925 bp, Bovine  19866880962898
  misc_feature (1)..(1): n is a, c, g, or t
ntttgatctttcccaacccttggcattggatttctatgcattccttcatctgccttcaacaaatgccagcattatcccatgggccctacttgaatttctctgaggcagctacaggttgccccgtcagatgagtgtggggaggtaaacgaggtaactggacacatactcatgagtaacaccatccagctgactgtggggtactgctgcatgtacctgtgtcaaacctgcacttgactcatagagcaatttattcttgatgtatgcgattgcacactgtaattaacagagcacactaataatttgtataaattatatatatcagatcttgggtatggtttttacattctcccatggggaacttcttccttcccgacgtggaattgtacatttaaatttggtacggtgacctttgtgataccaccaccaagtgagttaagaaccgagtgaaaggcccatggctgattctaccatgctcccagattaatgtatatagttgattggaatgaggttttatgaatattcatgttttttgaaggcctttaatttctgttcttcatattagcttttaatgtgtgattaagagagaatactttgacacctgtaaaaaatcaaaatactactttttaagacatttcacaaatattcacttacattacaggctgaggtattttattcatatgtatatttataccaataaaatgattttacaagtggaaaaaaaatgaacatttttttgaatattttttatgaatattttttcatttttttatgaatatttcatttgttttctgatctgtaagtgtagaggaagcctgagtttccattctggtttatatagtctacctattagattttataacaatttttcttttaattaaacatgttacttaacatgtatagtttactttttagaaaataattatat

SEQ ID NO: 49035 - DNA, 1635 bp, Bovine  19866881087316
  misc_feature (1)..(1): n is a, c, g, or t
ntgcatgaccaccatgaggaccatagggcaaggcatacccagtcctgagttgctttcattttctaggaacggtctggttgccatgacacagaaagaggcaggagtagatagagatctctttgtccttcactctaaggatgatccaagttagaagggcggtattttcttgattcaggtggctgggaggcaagcaggtagggccattcctgccataagcgcctgttgaatcctaggaccagaaacagggcctgtggtgtggagtatcttgttgagacaaggcagagctctcgataaagaaaacaaatacttgggcagaatttttaagccataaaaatagcatttttttccagttctaaaaattatgtctttaatcattgttttaacaaggctaatgaattggtaagtagccaaaaaccagagctaagtttggtgttgtttaatgaaaaagaacatttttgtgtagaaagtgcaagtcaatggattttgtgctgtaaagatttcctttctactctcagcctaacctttgggtctaagccacccaaagatactcccgttttcacagtggcaattaaccccaggtgcaaggatcggtattctaaagaaaatcaacttgctaagctctggaattcttaccctgaacctgtgagtggtacaaactcacagctgattggaaaagagtagagcattagatttacctttttaaattgtatgtacttccacctttcataatcaaagaaacaaatcatttttgtttatcattgacatctaccaccaaatatttcaagttgtgatccttgtgtagtgccactgggggaaaaaaaatatgaagtatgtactgtaaaggcagagaccttgaattggtgatgcttttctaaatgagcctgtacattttctttggcagcatttagatagatcttaagtgatccaggaagttgggacacaagaaaaactgttggatagaaaattctcagaagcatctaagtgcaagcctacaacctttccaccatggaattatacgttcctggcaggtagaaattgtgccacacatggagctagagcactgctgaatgtgactgctctgggagatgctgtaactttattacctacaatgtttgtttgtagcccccagccctgagatattccccccaggacattccaaagtaactgcctcatcaccagccttctgcttatagttaagagactgttaacagatcctggcattttctgtttgtgatgttcatgatatctactatatctatttttgaacatttctttaacagacatagtggagattctgggcatctctcactcttttttttttcccccctcttcctgggtatctttatgttgtcttccatttctccctggtccaaaagtcaattccatttcagtgtgtaagtctctttaaagaaccaatagttatcatcacactagggaaggttcagagctgtaaattaaacgttgaaatgcatattatagtttaaggattgtcttcatggagatggaagcaatgattgatctcttagaaggaatttcttcacttagtcaacacctattaaacttacactttgagggctgaaatagagattgaatgacttgatgaggcctgttgtctgtggggaggatgactgagag

SEQ ID NO: 49036 - DNA, 1528 bp, Bovine  19866881225522
  misc_feature (1)..(1): n is a, c, g, or t
ntattaccatccatcatttggagatttggttgctacctagcccagtggtctggtgaaagaagagttaataattcatactgttcctcaagggctctttcttgctatttccctggctctctggtataagtcagagcctgtaccttctgtctaaattgaaggcaaaagccccaaactgcagcagtttctttgaaggccagtgtgtatgtgaggaaggtcattgaggttaggaagagaaagcaattaaaggctgtgagtctgggagcattcagacaaataaaaagccatctcatgtgtcaggtgaattgacaaagcctaaaatacttctgaagtattcacattctgaaaggagagtaatacttttcttccaaaatagattttgtgtttaaaaagtaaacaacctccttagagtacccgaggttctgccagcagagtgaacttggttgctgggactgttggtcacaccacatcagggcagtgatgaaacatcagaaaataccagatggtctttctagctgtttacaatagaaaaaaaatctcagtatctgaaattctctatgctggacatgagactgtgtagcctcttacataaatagcttcagcctcagacttcagtactaggatggtatttggagaatatgttggggagaatatcaggaagtcaggatttagggttttctggctggtgttaggcattaggtgatataatggtaagttaatgtgtgtgctcttgcttttaagtttttttttttttttttttgccatcctccttgagcagagaatggctttggaatctaatactgggggaaatgctcatccttgctttgttttaaacaacgctgaatgttattccttgtgctaaactacctagacagtgttgcctatgagagatgtatctgtagtgggagaatcatttcctccattcctaactatctgatcatctttgtgatttggtttccaaacaggactgttatatgggacaagaacaacattactgcacaaggctttcaagatatagctgttgctatggaaaagtaagttttacgtaggacttccttctagaaaagtagaaaagaaccagtggtgtttgtgttatcaacggggtaatacgagtgatgatagattaactcagacccggactgtccgagtctcagtctactgctcaccagccgtgacacctgggaatacggagactttgttctggtatgagtttcttcatccataaaatgagggcatagatgctcattctgccaaagtcgcagatatcatggtggaggcccactcagtgctcgccttgcttctttctccttgtggttttaaacctatttccacagggtcttgctttcttgcccagatgacaactctgaatccagtggtgagaaaaaagctgggctccagaaaataaagtcaaagtgaaagtcactcagttgtgtctgactctttgtgaccccatggactctacagtctgtggaattctccagaatactggagtgggtagccgttcccttctccaggggatcttcccaaccca

SEQ ID NO: 49037 - DNA, 829 bp, Bovine  19866881382939
  misc_feature (1)..(1): n is a, c, g, or t
ncacatgccctttccatacttaatagccatattatccatctcaagcaaatcgtttcatttcccttagctcacattcttcagctataaaatggtgatcacatgaatagcttctctgcccatcttcacagatgttggaaggataaaatgtgcagaaacattttaaaaactctgaagtggtatttaagtaggtttttaagtgtaataattactaatgtttataaagtgttcatgaatatttttattattattcattttttgatgttatagcaattataattttacctaacactgaagcttttcttttaaaagaggaaaactagcagtatttagagtggtttgctactactgctcttttgatagagatattaaatgattcaccctgatttgaggtttctgatttgtgaaattgcacaggaattcaaacttgatatattttccggggacatctgtaactttgttagctaatacccaggaggtcagtctggtgtggcgtaaattggtgtgtacgtgtctttctatatcttaattgtgaatgcctctgctttaagtaaagccagcacactatcacacttcagatgccagcatgaagcctgggcagatctgccaagtgtctgatttaaagtgattgcctgagatcagtgatcacccagcagtcacaagtcatcccgggacagctctgaatccccagtctcaccctgggactctgttgtgtccctgccgtccgagagctcggagtcatatatagccacctttcagttttacggcgggcgcctccgggtctgcgtcctcatctctctctctctctccgctttatgctgcattgcaggcg

SEQ ID NO: 49038 - DNA, 1269 bp, Bovine  19866881476622
  misc_feature (1)..(1): n is a, c, g, or t
ncgaacagtgaatttgtaactattcaagtacagtggcaagtcagagcatttcaataaggtaccatttgattggttaaaaaattgtttaaaaggcgagggatatacatataaaagaaataaccaaagcttcacaaccagactatattttcttaatttactccagcccaagtttgttttcatttatgtcaatggatgaattgttctcgctacatggtacatatggtttccattaagtttgtctttatccagatgtttttcattcctaccattaaatctcgaattttgaaactgcagaggcaggttgacattggtaaagaaagtctattacctgtgtgtttatggcagtgtttaaggctgatttttggaaatccttagccctgttcgcacattcttatatgctattttcaaagataaaaacagaatcacacttgaccttatcaacatagcatcaagggtggtgactttttccctcttgcacaaattaaaatgccactctgtgcttttgattttcacatagtgaggtgaagttgacagtagcctccttcctgtctgatcgaatcgtggatgaaattctggatgcactttcacactgccatcacaaattggtgagtgctgtggtcatttgtacgggacagcctggttcattctgtggtgatgcagggcagcctccagcgtgggaatgtggttgattttctacattttatttctttgtagctttatgggttaaaatcctagttttccttcttcttcttcattgtttccagctgttctagagcatgttagaatttctccagagggaatggcagggcaaagcagaagtgataatatccagaattgttgttcatgtataataaacacaggtcaaaaatttgatgggagatgatgttgggactgaagtctaaaactgagagcttcattttaaagattatagttgacccttgaacaacactgggagctaggggcagagaccctccttgtagtcaaaaatccatgtataacttatagttgactctccacatctgaggagtccaccaacccggattgtatagtattacactatttcttactgaaaaaaattctcacgtaagtaggcccgcatgtgtcaaaaccatgttgttcagggctcacctatgtatttatctgtgcttgttgttttctgatattatttgataacagaatattcttaaaaacatggcagaaatgaattgtccaaagagtgaaagaattaaatggacatattctagtgaatgataaccatcgagtgtctag

SEQ ID NO: 49039 - DNA, 1848 bp, Bovine  19866881508788
  misc_feature (1)..(1): n is a, c, g, or t
ngcttatgttaaattttctcactttctccacatttcttaacttttcttacatattctctattttgttagtcaatgtgtactcccttcagacaacttgaatgagcacaccctgcatttgaaatgcagccataagattttattttgccagtatcttcccaagggtctatatttcttaactgtgaaaacaattaatggtatttagaaatcctctagaatatctgtaaaataaactgggttaatatcctttacatggcagttacactcaatattcttgcagtgagcaaaggactagctgtcattcgttacaagcaaatacaacttccacactgaagtgctctagaatctgtttcttttgcattggaaaatataaaatgtaggaaaagaagaaaactcagagaactctcccagcaaactgagttagtacttgccaaaatgcaacctacgcccctcaggcctcatttcctcagtaaacctgatatttaccagggaagtatttcacagttgaaaccctgggggaaatgaagaattttcaaggccaaaacaagcattctaaaagttaagtccagaagggaaaaataagtttccttatgttaaaacgttcagatcctatttattcacctaagattactctgggaataaatgttaggatcaaaaacaaggggtggggggcaggaggagagctgtcatttaaaaatacctaaaagagaccagttcagagaaaataccacctcttttcaaaggaggactttctccccacttcctgccttttttctcctccaggaagtttgctaagaaagttggctcttccggtagtttctttggcttttctgaactactatttttttctgaaagatggctcaaagagctatttgaaattattctcattcagaattcagaatgtgtaccactggccacaatacagggcttccctgctggctcagatggtaaagaatctgctgcaatgtgggagacccagcttggatccctgggttgggaagccttggagaagacacaggatgagcgaatattaaggataaaatctccctaattatgttgacaccaaaacagtcttgcacaaggaagctcggtgccaacgagcttagagcaaacagctagtagcaaacccaggccacaaatccaggcctgctagtccctttttttttttaattcactatagtaaaaacatacttttacaaaataatccattcactttagcttttgacagtataacattttactcaatttcagaaacagaggaaggattctttttttaagcaagtaaaatattgtactactagtgaaataaataagaatatagttatttaagaaactgaacattgattgtagtaaaaatgcatttttccctacatagttttaagaaaatcaaggtgctagaaagctttatcaatagacaaatggggattatttatttgtaacatgatgctcacttgtcaggtaaactgaaagaaaaaaaaagaaaatccctgcctacagtctgctgaaagtatcaaaaattgaatgtgaactcagtgaagaggaaattaatgagtaacatttaattaagatgctgtgatgaggatttgcttccattcatgcccgaagtccctgaagggaagggaacttgcaactcaaaacgactgaaagtaaagaaaacaagggagtggggaatagaaaaagcagggcatttgggagcctggacctcagggatagttgagaatgagaaaagcaggcaatgccacatgcaaataaggaagctgtgacgagcggagagcactggtgaccatgacaaggggtcagaaaggtcagcctcaagaaatgtgggggaatgtctatttacagaaaaatatt

SEQ ID NO: 49040 - DNA, 702 bp, Bovine  19866881786100
  misc_feature (1)..(1): n is a, c, g, or t
nttcgcaaaacaggcagtgaatttaaaaatattctcagggatgtgcctgaaagcaagcagagtgttgatgaagagggtatgaacattgaaaaggagaaaagtgcttattccattcatgtttttaaaaaaagtacttagacttctagggtttaaatttctaattcttgtcatattacttgttttccagattagtagaaaattggcatcataataccttcttgtaacagaaaaattttactgatctactttacaacttaaaaaatttttctttttaacctcaaggtaaagagaagtaatttaggattcttgagcttggagtaagagttttttttaaaattattctttgcacaaacttggtaaaataaacacagaaactactccatcttatttttgtggtgatagagacaatttaactctcattaaaaaaaattggtatgtctaagaattatgtgttaaatatgagtttaacaggaaaaatatgtgatggtgtttataaggttctaacagtaatccttaacttatagtaaaagtgggtattgaattccatggagaataggtataaatccattataaaaattgaatcaaatgagtaagatttccaagcagtataggtattgtgctgctttttttagatgctttgagaatagagccattcatttcattcactgcctgccaccatggggatttattgatatttacgat

SEQ ID NO: 49041 - DNA, 1003 bp, Bovine  19866880788823
  misc_feature (1)..(1): n is a, c, g, or t
nttctcattgtatgccaggtccagtctgagcgctaaacctgtgttcactctttgaagctttacaactacttgggaggtagatacgatcatagccattggatatttgaggtatggtgcactatcttattagattctcaaccttaaattagtcagttatgttcagttcctgtgctcctttcataaaagtgtttatgagaatgaaaaagtatatgacagtcttcacaaactgcaaagtgatattcaaacatgaagtcattgttttttcaacccagatcttataagcatgcacaggtgagatggtgcaggataagaaggcttgacccttggcgtgtattgacccaattgtgaacaaattggaaaacactagggcaaattgtgggggtctgtagagattattactgatgctcaccattgtcatctctggtacctagaacattgcctaacccataaagcaggcactacataaatatcagctgaagggagaaatgatggtacaaccaaacagaggaaaaaaggaaagaaaaattcacctgcaccagaccaggaaggacactctatccataagatattctgggtgttaataggttctccctgagcatgggatatagatcacagtataaaatgaggggaaatgcctgacctatttactattgcctcgaaagctggaacattttcatagtgcatcagaaaggcattttttaggacaacttggtaattcatctttattttcttgtatacacaatgcattctgtttaaaaagagatactaatgtatttacgttaaagcatatggatttacagcctgggataaaatatattcatagatagtgtaccttaatcctgtttagggaaaaggaagagtcaactggaatcagattagtattgatgaactgtcacttggattgacaaaagcagtacacaatacacttagcaaatacccaaatcgagctataaagctccacagattttggggttttgacacctgctttttttttttctttctt

SEQ ID NO: 49042 - DNA, 1763 bp, Bovine  19866880854910
  misc_feature (1)..(1): n is a, c, g, or t
natgttttgaaatattcttattcctatgagtttttaaaaattctattatcaagggaattattttctaaaatatcttaagctttaagtgtttttccttttgaaggttgatcttttctgcttgtaaattccattttagtcaataatcaaatttcatatatgtatttaatttcctgagcagttacttgaatacttgatacctaaaacattttctgatatagtatttggaatggacccaggatcaggctccataaacccatttacctccctccaaataagctaagcccagacaatcttactgtgttccttagtagaacaggaagccccttaagaagattaaattacttatggttatttgtcacctaaaatctcccatatcatttttgtcatagtctctcccttgaaggatctttttttttttttttagaagttatcctttgctgtgattttctagattctcactaccccaatatccaactcagttctgcccatccttgttatttccctgctgaagactttttcttcctttgctgtatcactcggtgcacaatagactctacaaaccagggaaatcatccatggttagccatggcttaagatggctttcaactaaagctgagatcctcatgagttggcactgtatttaattgcatccctctagttcctctgtttttctggagtaaaaacagtaaaaaaacagtcctattcatttcacaaacttttatgtagcatataatgcgggagactcgggttcatccctgggttgggaagatcccctggagaagggaatggcaacccactccagtattcttgctgggataattccacagacagaggaggccagcgggcatacagtccatggtcacaaagagtcaaacatgattgaacaactaacacttttactttttcaagaaccaatgtgaagtcaaattatatacattttacaatgtatattgtaaacctttcttaaacattttcttttttgatagacaactacataaattttaggacatgatatgaatatctttgcagacttagaggaaatagccacttttttgtaacccgtggttacaggttatataccaaagagtcatatttacacatatagagctacgtgttttactgcatgataatttctattgtttacagacataatgtcacttaattaagagaacattgtgagtgataatggggtctttggtgtttccatggttagttgccaattccttccccactttcagtatctttttctgctgtggaggatgagtgcttttcattttccatttttgtctagtggatactctatctgacaaaatcaaccatggatttcaaattcccatctgcagaatatttctatcttctaaatattttcctaggaagttatcagttggttgatcattttcagcctgcaaccacacagttacatctgcagctgaggaggatgttgaagactccatagcaacaccatctgttgttcacagaatgtttttctttctgataaagatgggaggtgttagttgtaattaggcaagttgcatgctggaatcagaagcttttttgatttaccaggatttctgcaccaataagtgcctctgaccctgtgggtattcataaatccagggagagttagaactaacattgttattgtcagttataatttttcacactagaacaggagtccgcaaagttcagaccccgggtcacatccagctggtggtttgtttttataaataaagttttattgagacacagccacacccattcat

SEQ ID NO: 49043 - DNA, 1568 bp, Bovine  19866880881988
  misc_feature (1)..(1): n is a, c, g, or t
ncagtgcatcagagatgccatccctcccaataaaacaagcctaatcaattgctccagtgataggtcaggtcaactgaagagaaaaacaaagaagagcttcattcattcctattagtcaggaaaggctttatggcaagatgatagcttcatctgtccattgaagaatgggaaaataattggtagaaattatgaggaaaagtaaaatgtaagaatgcatggaatggaaaagcaaggaaatggtgaattctggatcaaagggtataacaacaaacaatgatggagacagtcctagactagggtgtctaagaactgggtgtcactgtgacttggtgaaccaaagaaacatggaaaaggagaaatgcatatcgtttctttctttcttcctttctcttcctctcttcatcctttccctgttctccttcattctttccatttcatgcttccatacattcaataactatcaaattttcaccatgggtcaagcattaaagataaaaaatacaaaacagaaaattctctgtccacttcccatggacaaacactttcaagagaaggagccaaaaaggacagacttgacagtgacattccgagagcaaaagtctaggacatcagagaagatccaggtgtgtgggtccatgtacagaggtacagagtagagtaagacagaggaaaggaaataagacgtcttgaactgatcagtgctaagaaaagaaatacaattctaaagtgttgggaatggtgaattttccaaaggaatgacactctgacatcatgagaactggggcagagatctggagagagagagaggatgagatggatatctcagctaaaaaacctcccaggcagcaagaatagtaagtgcaaaggacacttgtattactggggttgggggagggtactgcagaggttttggtgactatggtcaaggtcagaaaagatttgagggcatgaccctgttcaggtatggaaaataaggataatagctgaggctagaagggatactggaaggccaaaatggtaatgccatgaggaacatgtgtactcagtgagatgcccctccgtgacaactgtctctttctatctctgagttatttacttaattgaagcaaaggaaatgatgcaatgagaaagaaaaagtgaaatgttaagtgctacctttgtagagcatgataatccctgaatcccttcactaccacatgctgattcatgtcaatgtatggcaaaacccaccacaatactgtaaagtaattagcctccagttaaaataaagtaacttaaaaaaaaaaaaagcactgtgctcagttcttaaatttctatttgctaatacaggaccatctttagcccacaggggaaaagttctccagcaggtcctggtttgacccttagcttagagggaacggcaagccaagagaggaggctgagggagaggagatctaataatgatgttttatttcaaacgactcctccacaactgaagccacttgtctgcacaagcgaaccaataaaattgagtcataaacctccctccactgactctgggagcgggaatgcgtggtgatgtatctgtg

SEQ ID NO: 49044 - DNA, 1178 bp, Bovine  19866880946325
  misc_feature (1)..(1): n is a, c, g, or t
nctcagcagggatttctgttttagagaaagatattttatgggactacaagaaggtttgttggaacttcccaatatccttgaactgcaagcagcagcaattttagacactgttaattcagtgaacttaagaaaagaaaagaaaggaaacccacacaattgtcagtactaaatgaactgagaagtagtatgaaaaagtatgttggactcaattctttctatattctgtttttactgctaaggaatacttcagacttcagtgttgttaaatgccattgagtagaatggaaccaacagaatatagcatttgtttagatatgtatatgtttttgtgttatattgtggtggaagagtacattgaacaaagcaagtgagacttttaagatgctattgaacagcaaggttatttcccagatgcagtgtaaccctttagaacccacttgaaacctgtaggtttagaacccacttaaaacccagttaaaacccacttaaaacctgaccttggatggatgtaagacaggctgcctggctttgctggtcagtcagatagagtcatctggacaaatcaagtcacaaaaccaatcccatttcagtaattcaagggagaagaggaaaagatggagaagggtcttccttgaccagtgctgttgttggtgcaagtgttctctgaacttgacttttgtcatggggactttatttcaggaggattttgtagggatctctcactaactcttgccttgatactgacaattgcctcttcctggctggtggccatggttgtctacatatgtgtatttagatttttgtatttgtctctttggcatccatttatcacagaactaataatatagtaactatagttctttttttttttttctgttcttgacggtctgacatttaggggccttgcagacacaggaaaagactgttcccccagggctatttatggacccttgaacaacacagaggctaagggtgccaacccctctccagatgaacatctgcatataactttagtcggccctccctacctatggctctgcatctgcagattcaacaattgtgaatcatatagtactatggtatgtatttattgaaaaaagagccatgtatacgtgggcatgtgcagttacagttcaaagtcatgttgttcaaggatcagctgtaatttacagtggtaa

SEQ ID NO: 49045 - DNA, 645 bp, Bovine  19866881236525
  misc_feature (1)..(1): n is a, c, g, or t
ncaaaagactctagatagctgactgttctatatgagatatggttactagtcttttagccagactattcagagtctttggagagtgcccaaggtgtgcccattgtcctgaaaactgaataggtgggtgtggttatccatggaagaacataagcaattgtcctgagcccctggttaagctactgtatctaagggacattattttcttagtattattattatcttctactgcttattcttactcaactattcaactaaaataactgatttatttacataagtttcttactatattcattcattcttatttccattttttattctgttcctctttctttgctttacacatgtagaaactaaagcttaaagagaaaaataaacctggatagggtcactcagatcctgaatatcagtgaagattcacaacccaggtatgttagattctactatgaaatatgcatccagactccaatctcccaagagcttgtgcagtctgatgactcaaaaagacaaacttctcattaagctgaaaatgaaattgcctaaacttctcgttccacaccatatggttgaatcccagatgacaggaagctcatttctgcaacacactaggctcatttcactgagtaggatgtgagacttgtgggg

SEQ ID NO: 49046 - DNA, 890 bp, Bovine  19866881810155
  misc_feature (1)..(1): n is a, c, g, or t
nttcttctgtattaatgtgtctctcatactgcagcttgtattgttacttaaatttttgtgtgtttaagtcttgtctcctcaattagcctgaaagttccctgaggtcagggactatgacttattcttctctgcagccccaagagtaccatttctgtgtgtgtgtcccaaagtcatgtccaactctttgtgaccccacgggatttccaaggcaagaatactggattgggttgccattcccttctctagggggtcttcctgacccagggattgaacccacatctcctgtatttcctgccttggcaggcagattctttatcattgagctacctgggaaaccctcacagtaccatttagtacattgttgatgaaatctattgaaggaactctctcatgtgctgagttctccttcataatgtaatgacttcataatcttcataaacttgaagttctgtgtcttttcaaggcacagtgatagattccccaaggggacttagtaagaagtggtggatcagggtcagactgctttggcttatataacagctccgttactcattagctatctgacttcagcaacgtatttaaacctctccaaagctagtttccttcagatactacagtgctaataattgtgcctgtgtcccaaatttggtttatgaattgagtaagttaacacatgtaaattggttggaagaggccctcgtgtttggtaaatgatcaataaatggttgctgctataattgttactattctcaatgcccttcagccaaagaccaccaagaacacacttgtagttggtcaggttgggtttattactcattgcaattagggagaacacacaccatgaggaacagggatcatctcaggagacagcatagaaagaattgtaggaa

SEQ ID NO: 49047 - DNA, 2678 bp, Bovine  19866880568506
  misc_feature (1)..(1): n is a, c, g, or t
ntgcattgtgtattgttttgtttatttttatgtggtcttaccccaaagttgatttgctgtgaagatgatatttttaagctcctggcaccaacttcttctgaggtcttagatgccccaatcttggagaacttggttgttgtgtactcaaaaatcaattaagagtagtgtctgcatgagaaaacgacattcttaccacttagttaagaaaagaaacttgatatttacccatattttatgttaccaatagtgagtgttatacacacttgggtgtttaatacagagagagatttcctttgggaagcttatctttaaatcaatatgatatgaattttctcaaagccctgggagaccctaaatcaaagtaaagaagccactttttagagcagttaaacccaccacacagtcccatgaaggcagaaagatactgaacatttaagaatgttagaacacatgtgtagagtgcctcactcagaacttgtatacagaagaactaataggttttgtctataataagcattaataacattaaaatacacatatacatgaaaatatctaagatttacagtgttgactttgttgctattactgaccagggttcttgccttccttaatgaataaaaactgataagaggtcagacaagaaggttccagcctgtctcattgctaggcactattcttggtgtctcttgtgcattatcatattttatccctacttacagataagaaaactaagagaaaacttcagtcctttttcagagattgaaaaagcagaaattatcaggaacctaagtccagaatgcagactcctaaacatatagggtcctactgctatgtagcttattttgtatagttggaaaaacagatatgtaaataattaaatctcagattagtaattcactaccttggtcctctctgaggcccagtgttattatacatagaacagacttcaaaatatacattgggggatttccctggtggtctggtggctaagactcctccttcccgtctaggtgatgcaggtttgatcccagatctgggaactaagatcccacatgccatgagaaaagtccatgctaagaacccaggcagctaaataaatattaaatatatatataggtagcaactgctggtgaagattaaattacactctacattatgcctcacctcaaatattcaatagatgctataatggaaagaatgaataaccaagcactgtgaaagcactgaaatcttgactcatttttttttcaacttgttttaaattgttggaacacgaacatttaatactgaatattttcaggaattccctggtagtacagtggtttaagactgtttctactgcaaggggcacgggttcaacccctagtcagggaattaggatcccacatatcaggcagcacagccagaaaacaaacaaacaaaattattggcctagagaagagtgatgactccatgctagcaatgtttaaagtattctatttttctattaaacagtactaaggaatgagtgaccattttagcttttttcatcttcttgctacatatcttattgaaagctcaaaaatattttattaaaaccaccatatatatatggtgtgtttcagtggttcgcttttcgtaacacaatccaccaaagataaaaggtatgttatgttctgcattaacagaccctctttgatcaacatatacttttcaattactgaacctgtttaatgccttcatataacttaattcaatttgtaaatacatttgtttcttctttcctgttttatcttctgccttcccctcaataatataagcaaggcccttacttttggtaattagtgatgactgtgaataactataatgccaatagatgactgagtgaacatgattccaagggaacagaagaatgaaagtcatgcacagtatgtcatttccaaatatatactgaataattaccttgagccagaaatttacaattaccttcattggcatgtttactcacaaaagcaagccattgatttgcttgcttcaaaatcaagctctgaatttggtttgattataaagctttgcatctcctacccacagaaggcaactagtattttgtgaaaatacattcagcaacaaaaaaagaacaaatatttcattcagtgactgtaaaatagatgatttatcttaatgtatttaggatcgcgtgctacgtgctaagttgcttcagtcgtgtctgactcgtggcgaccctatggactgtagcctgccaagctctcctgtccatggaattctcaagcaagaatactggagtgagttgccatgccctcctccaggtcaaagacaacatttggaaacaaacaacaaatagcctagtgaataacacatccattaaatcacttcaaatttttgtttggtgtttctaatttcttttttaataaaaaattggtaaggaagttgggagtggggtaccttctttaaatagattttttcccatttgcttctaaaatcaattacacgcaccacttataagtgaaaacagctgattacttaaacgccaactgagtaagcttttacttaaatgccaagtgaagaatgcaaatttaaaaacagtatttgcaactattcaaataccaaaatggaatcaatttaaaccacaaaaaggagatgtgttttggagttgaatgtcatatcagcaatgtgatcat

SEQ ID NO: 49048 - DNA, 1630 bp, Bovine  19866880606129
  misc_feature (1)..(1): n is a, c, g, or t
ntcaatcctgtggctccaactgggcatcttccttcaaactataaacttccttcagcttaaatttaaattaacttcatcaggaaagtaggtgaagaaaaatattacgtttcaactgtaagtttggaagggattctgttgttgtgcccctttgcgaattctgtaatggcaaaactgccttgatgcaaacaacccttcttgtaacacaggtgcatgatacacatggtttaggaaaaggaaaccagttatactctgagacccatgtgtaatgaagtaatgtctctaaaattaccattgacattctaccttctttggtggcaagtcttgcaaaagcaacagctaaatgaataaacttgttacttcaatttgtgaaggattataactggtacatctactcatgagggcctcagtgtttcataaattgagagttgccttctaaattaattaaagaagaccaagtaggagaaacacagatctagtcaacttgattgtagagccttgggatgtagcaagtctctagaagttaaatgtcatagaacggactcttttaaaaaaatgcaaaccgatcttctagagagtcaattaatttggttatctatcatggtttgggtgagtgaggcactgaaaaacagcttattcttactaagaaagaattttataaatatgtcatacttaacttgacaattgtatgcaagaacttttagtataataaaatataattcatttttaaaaattatatgatatggatttgtgcttctaggaaaggtagatcaagccttccactgaagacaactaggaaatctagaccaaaaatttatgaaacttatacattccatatgtaaaatagatatccaataggaatttgctgtatgactagggagctcagacctggtgttctgtgacaacctagaggggtgggatggcatgggagtggggaaggaggttcaagagggaagggacatatgtatacctatggctgattcatggtgatgtatggcagaaatcaaccacaatattataaaataattatcttcaaattaaaaataatttttttaatttccattaccataataaaaatgtgggttctgcagtcagagagtttacaaatgagtacagaaatcactctaagtcactagcaataataaagtgtgaacaagctgtaacagaataacaggagtcctaaaccttgtctgagatggggagaagatgtcaggaaagacctctcctggaggaacgcgtgtttaagctgaagccaaatgagagtctaatctgctgtgaaggagaacctgggaataattcaggagacccacattcaaccacacctgctagatgcatgagagtaggatacgaaaagaggaagttaggaaaaaacacattattttttactggctagggatgtgaccctgaacaagtatgtggaaaccctgatcctggtgaactcatgtgagcagaaagtaatattttcttcttggaggataaacagtttaagccatctagacgtacatttatcaaactgtattccaaggacaactagtctcatagattaacctacatcaaaaaggtatgtggtcaactgcctttgaaagactctgaacattattaccacctcttcaagaatcacaaatcatgctat

SEQ ID NO: 49049 - DNA, 1366 bp, Bovine  19866880636464
  misc_feature (1)..(1): n is a, c, g, or t
nttgagtaaactccaggagtcggtgatggacagggaggcccggcgtgctgcagtccgtggggtcgcagagtcagacacgactgggtgactgaacaacaacttgcctgtggtctcgtgacagatgaatataacagatgaaagggctgagtcctcttaggtctatcatttattagcagtatgatgttggataatttacctaacctctttgagctcataatagagatactcatcgtgcagacttcatagttattatgaaacaaaataatgtatgtgagatgcttcacacaatggttggtacttgttaagtaccaattaaagacttattgaggtaagtctttcagaatctgtttgctgttaacgacctttagtcctttgatccatatattaccatcttatcaacttttccccatcttcatttctttcgcaacccaataacattcagtatgtgagcagttactgcttttcctcaaagctgcttaatgggacgtgtatcagataggtgaatatttactttacaacctgagtggtagttttgattctccaagtcttgaaaaataatacaaaaaaagcattaaaaatagtggtatagcatttaagattaagcattgtgcttttaatatgatagtgtttcaacttgatttttgaaaagagggcttgagataatttaagtgctacttttagtagtgcataaaattattcctttgagttccagagctattgggcataaatttaagtagattatgacttaagaagaaaaacttgcttttatccatatcatgtaactagttgggctttcagattgtttttgtgggtctgttacttcacataaacaatgctagatcaaaaaataatcataaaaagtctgtttcatgttatttttgagttctatcttcttgtgagtctccattttcctatttctcattatcatgactttaagttgtgggcatttcaggtcagggctcagggaatgttaccagtgcttttcatcctttttcaaaaggatgtcatttggaagagaaaaggattggctacatcaaacaaaaagctggcctggcagtgactctatttgcaggattccacaccacagagggtgacttagactgtggtttcatgttttgtggtttggtagaaccaaaacagggtgttcagccattttagaaaaaaaagttctcagttggactgctgctaagtcacttcagtcgtgtccgactctgtgagaccccatggacggcagcccaccaggctccaccatccctgggattctccaggcaagaacactggagtgggttgccatttccttctccagtgcatgaaagtgaaaagtgaaaagtgaaagtgaaatcgctcaatcgtgtccgacccctca

SEQ ID NO: 49050 - DNA, 3398 bp, Bovine  19866880819975
  misc_feature (1)..(1): n is a, c, g, or t
naaacatactcttttttgttaccttgggaaaaagggtaaaaaaaaaaaaaaaatagtagtgtgctctctgttcctctacttagcatacttaacctttagaaattcagaatcttctttggaaagaaaaaaatcttgacttttagagacaccacagacctttttttttttttaggaaggagagattgatgatatagcagtttgaatttatgggagaaaatcaagacaaaaaagttggatcttgggctacagaaagcaaataattttccagaaaatttaatgatggcatctgtggaagttatagtctttgaaaatgttttaaaagagtgtgctcagtatgaaagataaaacctagagcttgttatacagagtgaagtaagtcagaaagagaaaaacaaaattcatacactaacgcctatatggaatctagagaaatggtgctgatgaacctgtctgcggggaagcagtagagacacagacatagagaacaagcttatggacacagtggggaaggacaaggtgcgataaactgagagaatagccctgaagcatatatactgctaagtcgcgtcagttgtgtccgactctgtgcgaccccatagacggcagcccaccaggctcccccatccctgggattctccacgcaagaacactggagtgggttgccgtttccttctccaatgcatgaaagtgaaaagtgaaagtgaagtcgctcagtcgtgtccgactctgtgcgaccccatggactgcagcaccaggctcctctgtccatgggattttccaggcaacagtactggagtggggtgccattgccttctccaacatatatactaccatatgtaaaatagatagctaacagcaaattgctgtataacagaaggagctcaacgtggtattctgtgacaacctccaggggtgggatgcagtagccggtgggagcaagtttcaagagggaggggacatatgtgtacttatggctgattcacactgttgtacggcagaaaccaacacagcactgtaaagcaattatcctccaattaaaaataaattaaaaaaagacccaattagaagatcctgtgtttgaaaagcaagatatactaaatgaataggtcagtctttaaagacactaatggattcttacggaatatggataaatttaatctatatacctttgttacagtgacatcaggtatttgaatttactttgcatatttttgatttaacctgatttgattttttcccccctaaatctcaacatatgtattacattctttggtatgtctttaatcttaaatttacaagcacgtggttattaactggcctttggtgtttggggaggaaatatttaaatggatttcattttttaagtggtttaatagttcatctccaaaatgtgtagcctatattttaggttcgttataaactttgcctttgtaaagaggaaaaaaaaatgctctgggttattcatcttttcttttcttttttttctaattttattttatttttaaactttacataattgtattagttttgccaaatatcaaaatgaatccgccacaggtatacatgtgttccccatcctgatattcatcttttcaattgagttcttttttagaaaaaaaaggaggaagcagtagctacttaaggacaagaagtatattcaaacatacacacacatacacagcatccatgacatttagaactggttaacttacattttacttgtgcatgatgtctgacttcagcctcctagttctaaacagtaaacattgacatttaagatgttagctcctccaagaacagcgctttccctcccttcctctttaattccaccttaacgcatctgcaaagacgaaaggaaaccagcccacattttagcccctcctaccaaggataagacttgaacttctctgtggtcccgggctaagaaaggatcccgacagaaaactagaggcgtaaaggagcccgaaggatctaactgtaactctgggaactgtaagcaatctatttactcttcccccacccccacccccgctagctccaggtctctctcccactctcgctaacttttagtttctaccttgcttggaaggaaggagggacggagggaagactaggagtcatcgctctctcgaaagtctgcatgtcctctgccttttgcaatgagacacagatcgggggaccttaatttccttctaacaaatgccagtttgctttccgggggctagatgcactgtggagtccgagataaggcgtttccttcttttacagcccggaaagaaagctaacgttcagaaccgcggcgaggtgactcgagctagagctccacgtgaggtggtggccaatacccatactcaagcaacctgctgtttgacagtcctgaggatctttagtgaaggaatttatcgattcatttaaggtttaattgataaacggtcatttcggttacttatgcaaagcgtacctgggtatttaatgtgtagcagtgttgtgcgaaaagacagacaacattgaaaaactgattgtacaatgactggccttctgattcgtccttctaagttattggacatgccaagagggcagagcttggaactagatgtggaaaagatttgctcaaataagaaagttaagttttgagtgtgaaactattttagtaatttcgtattgaaagcattccttaaaaaaagaataaaaaagccacttggatttgaaatgatagtggtttaacttatttaagtctcctatattgtactcattttagtcttagaaatgacctcaaaaagtaaaacaagaaatggtcttcaggttggttgatgacgtaagcacgtattcatctaagggaggtggagcacgctggaggcagaccatttgggtgtatgtcaatttcaagctatgatatttgcatgtataaccttttggattcaaagggaatttctgttttgttttatttctgtttgttgcacaaatttgaaactgtggcctaagagatgtttgcagggaagagtaatgaaacaaatcttgcttaagagttttaaaattatattccagatatctctaaaccttgccgatcaagttgaatattgggattaaacaacaggtatttggttctttcattgtgcaaaggaagagttaaattttcatttaagcaataattgtgaaatgcacagagaagtgtttaatctgcatttgctcaaaactgcttcacaaacttcctgtaggggaagcacatttcatgggacaagaaactaagaaatctatttaataattttccttttctcaattaaacatgaatgaaaaatatcttgaaagtgacttgcaatgttaatttctttttttttttttttttttacattttacatttatcagcttcttgctaacagtacctgataaagctcatccca

SEQ ID NO: 49051 - DNA, 1717 bp, Bovine  19866880846971
  misc_feature (1)..(1): n is a, c, g, or t
ncgtatgttacagaaaagtattccccttgctcaatacagtacatcctagtattatacaaataaacacaaactcatacagacacactgaaaaagctataactcagaatgacccatggggcttatttcctgttagattctgtccctggttctgctctctaattctctttgaatacatttcagcaatgattcattttgtcagtctgccagtagtctttcctcctgagcgagtagcatgtacttcacgtacgttagcagaaacacaattgagaagttttgcccaggattaccttatttgcttcttaaaagtgtcagatttttttttcatattggtaatatgcctctctaagactacgtatcatatgacaaacagagccagttgtttagaacaccaaaggaatgtttctctagaaatgacttagccctgcatctggtcttgccctaatgtatttatgagattctaatcaaatcttttatttcattatttttttctcacctactccttgccacccctatctcctcctcaaagctcaagtctgaagtccatgaagagctgagctaacaatattagctaatatttcttgagtcacgtgtcagagattaaagtgctttgtacagattacttcattttatcctcacaactgccaaatcagacaagcagggaaagttattctttttacaaataaggaaattggacgcatacagggggtgaagctagaatctgaactcttggtattaactatcatgctataactctttggtgtcagttactcactcgtgtctgactctttgcgaccccatggactgcagcacgccaggcttccctgtccttcaccattttccggagattgctcaaactcatgtccattgagtaagtgatgccatcctgcaatctcatcctttgtcatccccttatccttctatcttcatctttaccagcatcagggtcttttctttctttttttaaaattaatttattttaattggaggctaattactttacaatattgtagtggtttttgccatatattaatatgaatcagccatgggttacatgtgttccccatcatgaaccccctacccacctccctccccatcccatccctcagggtcaccccagtgcaccagcccatcagggtcttttctaatgagttggctcttagcatcaggtggccaatatattggaggttcagcttcagcatcaatccttccaaagaatattcaggactgatttcctctaggattgactggtttgatctccttgctgtccaagagactctcaagagtcttctccaacaccacagttcaaaagcatcaattcttcggcgctcagcttttttatagtccaactctcacatccatacatgactattggaaaaaccatagctttgaatagacagaacttctttggcaaaggtctttaatatgctttttaatatgctgtctaggtttgtcatagctttccttgcaaacagcaaatgtcttttaatttcatggctacagtcaccatctgcaatgattttggagcccaagaaaataactgtttccattgtttccctatctacttgccatgaagtgatgggaccagatgccataatgttagttttttgaatcttgagttttaagccacctttttcactctcttctttcactttcatcaagaagctctttagattctctttgctttctgccataagggtggtgtcatctgcatatctga

SEQ ID NO: 49052 - DNA, 2195 bp, Bovine  19866880945202
  misc_feature (1)..(1): n is a, c, g, or t
ncaatggctttgcacaaagaggggtgctcttcctgggggagggctggcagctacaattctactaatgctgccatttcccgagcatctctgcgctggtcactgagtcatacgttatctctaacgcttatgaaatgttgccaggggagtttcagtagtctcttttttagagataagaaagctgaaactcagaaattttaggaacttgctcaagggcacccagttagttaatagttccagcatatatgtattacaagtcagcgaacacctatcaatcattcatatcgacctctttcactcttagaaatatcctgatttgtataacaaattgtatggtcatcctaagtaaacagcccacctagaatttgaaccctcatatatctgaatccaaaacccaaactttccccacccaatcccatcgcctctcattcctgatgatgcatttacagcaagctggctatgccagcacgaatgttcctatactcctgctcctttcactggtggggataactggggtctataaatgtggggagaagtcagaggccttcaaccactgctaaagagagtacaaaataggtaattcttgaaaagcatctgagcatgaatataaaaatcatgaacagaattattttagataaaataaaagcataattatccttacatatatatattttttaaatcatttggaaacaccatgaaaacctccctgagaaataaccacagaaatgtaacaactgaatccatccatggaatagagactggcaggtgcaatgttctgaatccacagagggatgttgaagcactgaaaaaatctcaaaataatgaatccaggaaaattaaagtcttactatgcaagtaaaacagtgaacattaggacaactttcagaactttttacatacatatgtgtacaatgcatacaaaaatgcatatcatatatagtgtatgtatataaatacatatattatatatacagaaaaaagaacgggaagagattgagaaggcaagaaaagcagacaagacaacatcaaaaggttattcttttacaactagcagatttctgaaataggaagtcaattatttttataggaaatactcatttccatagatttaatgaatgccctagtttaattgatattgattttaacaactagttttaaattcatttaattaaaggagtaaaatttgtgacccaccaatagtattatgaaggagaagtgacttaggaaatgcacccgtgttatgaaccttgtaatattattctgagagagcagaagagcttggagacaccagagtactcatcattcctgattaaatatttatatttgctctcatgagtttttccaccttacctaagcgattctgaaactatgtccatgcaggcaggtatctcacatgctcagtttatttaatcattttactgaaagtgtctaccttataagagtaattttgccataacagttatataccttgatttttcttctctcatattttgcttatcaaaggaaaaaaagggaaacaaaaatccaaagcttggtgtgattgttaagtaatctattttatgatgctagagaattctgttaaggtgattacactgcacgtaccttaacattttctaaaaatgaataataagaactgttcttacaggactatttttggagggccgtgaatggttcaatgttgtaaaatgacatccaacacctgtgtaaattcctatctgaatagtccttgaaagaaggcacattttcaagattactaaaatgccctttgaaacataaatattcactgtagtgtatttatatcaacatgatgccaacataagctattgataatttatttgatataaaagattagttgaatttctttgtaaatgtaggaaaaaatcatatgctgtttaaatattgttcatttcagttaatctgatgatatatcattccaacataattttattgtgtgtcttgtgttttttaaacctttgggagacccatagaaacaataagtacaaaaactactctattgaaaagctcaaaacttctacaaagatttcataatacaaaatgcttataaatatgctacatagtctttacctacttttaaggttttactatacattaaactcagacaaatatcatttttagaaagttatttcttttgttgacctaaaagtcagaacgaacaattagcaatctcgtcaaataaa

SEQ ID NO: 49053 - DNA, 1317 bp, Bovine  19866880989905
  misc_feature (1)..(1): n is a, c, g, or t
naaatagtaagtatataaagaaacttatctttaagggtattcataaataaatctataaaacaactttaatgtccaagagtaagctattagttacataggttagggctttccatactactgggtattaaccagctaatcaaaatgatgatgcactgtttaacacaaaattatccagaaggaaagcatattaaagtattaacagtggttaactgaagggtaagaattttgaaattttttcttcatatattttctagtctaacaggtgctatcttgttgacttgatacaatcaaatcaacatacaagttctttaccactggtaatcaaaaataaaaatcaagtctaaagtaaaacaaagatttaaaaattctttttggtagatggttaacatagaatacttatttaaaataacacaacctaatcaattacaagaaactagcactttttgatacatatcattttaatcagttaaatgagttctttaatgagttacaagaaaatagttttgaaaaggaacaatatttgaaattgggaaactacataaaaatgcctagaagtaactactatttctttatgaatttatagttcattttaggacatactaagagctaatcttaaactaaataaagtattgcatatatgattaaaaaccaataactaaatattatgaataaggtttttgtaagactcatccaaatatgcaaatccatgtatctaaatatatacaaaactgtgtataaattgtgtagaccaaaactgtgtatatcaaaaaattatatatataaagaatatataaaaagaaaaccacttcaaaaataccttatcttgttgtgctttaagttcttcatattgagtcttgtacctacgtccaattttcttgacttgagtaatagttttaaccttttcttgaatatcaattattttggcatctaactccttctggatattttccttttctgttcttactttatttaaatcttcctttagactctggattaagttctggttgttagtcaaagatgcatttgatctaagcaaaagagatgggataaaagagaaagactaaatacttgagacttttccaattttaaaaccttttaagttatatttttattgtgttgctttagtgtgtgttttatttagaaaactctaagaaaagcacacacacacacatccttcaaaagagaaatccttaacttgtgaacctgtggtactttagaaaaatgtgactgacttattacatgccatatatacccattttagagatgagaaaaactgagctataagttgttaagtaacatgcacacttttactctgca

SEQ ID NO: 49054 - DNA, 1556 bp, Bovine  19866881048872
  misc_feature (1)..(1): n is a, c, g, or t
ncttgttttctttgctcttcaattcaacttctatctcactcatttaaaaacatattcatggttatctgctcaagctctgtatcacaggtggattctaggatggtatctgagaacttggcagaggtaaggaacatgaagcagtctttatgaattgactagtaccaacctctgggtggaaaaccaggagtgagtcctacttctgatactagctttgtggctttaggcaaatttataaagctgtatgagtcttagcttcctcagttgtaaaatgcagataatacatgagattagaagacttttctcatgaggcttattgtgataatgagagaataatgtgaaatgccacatgaatataaggtggtattattatatgggtttgtaaatcttgatatatatgtatatatatatatacatacatatacacacacatatatatatacaccacgtctttagtttgagtattaaggactcaagcactaccattaagataaatgcaaatgaatatgactctacacttcacttattcaggcattattctagcacataaaaaaagtgactgagtgtgtgtgtgtgtgtgggtgtgtattttaattagctgttaggtgattttacattttaaaattctctcaccagtaagcattttgtaggactttagaaataggctggtgaaatgagcatttaggaacacttttacgaatcatcatgtcattcatcttcagagggttaaatgtcaactcaggtatggatgtccagggtcttccttaaatttgaaaatgataaaattattgttatgaactaaaacaaatgctccctagtggctcagagggtaaagcatctgcctccaatgcaggagacccgggttcgatccctgggtcaggaagatcccctggagaaggaaatggcaacccactccagtgttcttgcctggagaatcccagggacggggaagcctggtgggctgctgtctctggggtcgcagagtcggacacgactgaagcgacttagcagcagcagcagcagtgcagtaaaccagtggaattttccctcaattgtggttgttctcaagacaaaatttatacaaaatataatttaacagaaatgataaagcagaaaggaaaaagctgataaaaggaatcaaagaaaatgtcttacatatttgtttctttagtggctaagtgtatactaaaatacttagtaggtcattactgaagaataaatcataataacaaatagttaagatgagtatggatattttcccaattgggcttaattttacattaaaaaagattatgatagactataaaataatttagtttctcagctttaccacataatatttatcaaatgctcactaatctaacttcttagagttttcaacttgtaagaaaatacttttatcttccttaaatttcttagatgttaataagaaagctaattttaaaaataatatttttcattgtatgtgaactttggagtgagttttattgtggcatttgttagccatggagcagggagacactggacttctcctatagacataataaaaacttccattt

SEQ ID NO: 49055 - DNA, 1738 bp, Bovine  19866881050347
  misc_feature (1)..(1): n is a, c, g, or t
naaaaaattttagaaaattcaaataccccctgaaagataaaaaaaccacctttcacaaatttttttaaaaagaaaaaacagaaacctcgttattaaaatgagagatacttttgaaaatagtagttgaaaacagtttaatttacttattgtttcttactactgatattaatggttagtctatcattagtcttaaaatatacattaataactaaaatatttcaatgctgatttttagatattttattagttgtctgaatacaaaggaaaaacaggtgttttttttttttttatattacaaaaatatacctgtaaatgttttgctactttaatgaatcaaatagatctccacttctcactgggttcacattacagttattaggtaggtcatatgctggttagttttgggccaagaggacttgcaatttgaaaagtaaagcagaagagcaacaaaacaaatgaactcctcacaagtcaacttatagatcccaatagtcaccatataagggtattggcaacagatgaactatcctggctttattaataaaatcactctcacacaggtatgtgcacaaataaacagagcctaccaaaagcatatctgaaggacaagcgtacctacacaccacatgcacacaccacactccactctagtttgctgtttttcgttgtttttatttccatcatattttcccctggtggtctcttctctctgccatggtaaagcagtaaactgaaaataacttatgctaaacaacctaccatggacggtgagcttggtgctcgtgctgcttgatcctgccacgttagctgccatgcacgtgtactgaccccgcgtcaccaggctgagcaaatgctatctgcagagcaccggagctgaggatgcgctggcggactgactccacaattacatgcccatctttatgccacatgatgtcaggtggtgggaggccatctgccttacagggtagcatgatgggcttatccacaacagtgatgtattccttaggatgagggctaatgactggaggaactaaaagttacaaagtttaaacatcattttaaaagcctgaatgtactatttatgcaatgtggtcttattctagcaaaatgaagtcacgttgttaagaaacaaagccctgattttaccatatcatcaccaaagggttgctacagtttgtttttgctggaaaagaagattcattgaatctactgcagaaaattattctctacatagttaacaaatataaacgacaatcaaccttgagatttaaacatgtactcatgagggattgcatgtccagaaaactaagaatgtgttgataggggtattttctttaacatacatgtattatgtgattcattcatcagctccttaaactttaaaaatagatctcttcaaggtttggaaattattcacctgctcagacccttttattcatgcttttcccgcagtgcttatgatctcatatactgggaccatatttaacaatgtattattttaatgaataaagaagtgggatgttgaaaagaattacaattaatctttgaacagcacagggggtagggatgatgactctctgcactacagaaaatccaaatttaacttataatcggccttcagtatccttggcccctctgtatatgtggttttatgtctttagatttaaccaactttggcttgtgcagtaatgtagtatttactactgaataagtggacctgcatggtttgaatcgtatt

SEQ ID NO: 49056 - DNA, 1251 bp, Bovine  19866881088244
  misc_feature (1)..(1): n is a, c, g, or t
nctgcctgggttaaatcccgtttccgacctgttacactaatcttgggtgaattacttaactccaagtaagaaaatgcttttttaaaaactagatacaagtaatcaacaacaaaaaaatataatcatgaatgaaacacagcagaaaattctcctaattttttatatactactcaagttttgaaaacctatgagtactcggaaatcctagtctagtaacctgagaataaagtatttttattttgttagcaaacacaaatttaactatataaagagacaaacatgatgacctggtgggcgtgttctgtggcccactcttcatccaagttatccaatttggctttggaatgtgtggggctctcattctgttcttctttgggtggtgttcttgtggcaagaatcacataatccttttgtgaggaacacttgaaaacaaattagaaaagcttactagagggaaatgtcaccgaggaatgcaaagccttcatgatatgcaaaaactgagcaatattcatagcagcttaaattgtcaatacctgtattataatggaatgaatctacagggaaaccaatgttgatggacagccctacaatatttccctcacgtgttatctttcaatctatttaataccagctccttattcatttggcatcatgaatatgcatcatgcagtgggcctttaaaatggtttactagatgaccgaaagaactgcatcttaaaaacgtatttatatatttctggctgcgttgggtcttctctgctgcgcgtgggctttctctagctacatgcacaggcttctctcactgtgtagcacgagctccagagcagaggctcagcagtcatggcacacaggtttagttgctctgtgacatgtgcgatcttccgggaccagggatcaaacccctgccccttgcattggcaggcggattcttaaccactggaccaccaaggcaggcccataaacagcacatacactaaaagatgacatgcttggtcaattttctagttattttatttattttctaagtaatctcaacagatgagataattcaacaaatataaaatccctggaaaataaagcaagaaatgaccttgtgcatcttactttcactgaaacaatggtagtggggaacttgctcatagggtccacagaaaaaccaagtgggtgtaggacagataaccgaagtgttatattagatggatgttcctcagttttaacagcaattaaatgctaaccaaaaggggaaaccta

SEQ ID NO: 49057 - DNA, 1659 bp, Bovine  19866881099115
  misc_feature (1)..(1): n is a, c, g, or t
ngacctttgttggcaaaataatgtctctgcttttcaatatgctatctaatttggtcctaacttttcttccaaggagtaagcgtcttttaatgtcatggctgcagtcaccactctgcagtgattttggagcccaaaaaaataaagtctgacactgtttccacagtttccccatctatttcccatgaagtgatgggaccagatgccatgatctttgttttctgaatgttgagttttaagccaactttttcactctccttatatatagtaatgttgtgtcatacaacattactgtatataaaatagataaccagcaagaatttactgtatagcacagggagctatactcagtattttgtaataattatatattacaatatataatatacaatatatattacaatattaaaatacacattacattaatatattataatatattagcaataattacataaatatatcaatatattacaatatgtaatatacaatatatatatacaatatacaatatacaatataattgcagtatataattatatttcctataaaggaaaataatctgaaaaaaagagcatatatatatatatattttgtggaggggactgcaatgggtctttgtttgtgctctaattgacgtgtatgggcttagttgccctggtggatatgagatcttagttccccaatcagggctcaaacccacagtccctgcattgcaaagcagattcttaaccactggtcaacggggaagtccccaaaagtatatatttcttgatgcaaatactttcaggaatggtaatcatggcttagtagtaaagaatccacctgcaatgcaggagatacaggagatatgggtacaatctctgggttgggaggttccctgaaggagaaaatggactgaaaaatcccatggaaagaggagcctggtggctacaatccaaagagtctcaaagagtcagacacgactgagcgactgagcacacgcaatccttcaaatacacttttatgtgactctataaatcagatagtatcctcatggagttgtttggccactagatagtaaaagaaaaaagtgtctactcgggtggtcaggaagccagatcagagaaagaggcaccgtgaatgaggaaaagtgcagaggggatcaggcgactggagacaggcttcccagtaatcttgcctgaaaccaaggctttacttttcttatacagattataaagaaagctgggcgccgaagaactgatgcttttgaactgtggtgttggagaagactcttgagagtcccttggactgcaaggacatccaaccagtccatcctaaaggaaatcagtcctgaatattcattggaaggactgatactgaagctgaaactccaatactcttatgtgtgtccaatgtggatattgtttaaaatacaacaaccaggggctagggagagtaggtaatcaagaggcaatggtatgaataaccttgtatgcccttcagaaaatgactgcgtaataacccgtgtccagccttgaaacagcatagttgattatgtttctgaatgctctattcaatcatttcaaaacttgtccatggttaaagagtaacaacattattatttcctttttcccaagggaattaccaaattgcaaaatcctgttatgaggacctaggcct

SEQ ID NO: 49058 - DNA, 888 bp, Bovine  19866881206067
  misc_feature (1)..(1): n is a, c, g, or t
natcttctcataataaatctaagaaaactgtcggttcaatcagatgttattattttacttaccttcctgtgactccacttgtgtagtgggcatcactgtggctgttggggtagtagtaggatttgtaacagttgcaggtgtaaccattgggcggatactagctctgggtgttgacttattcccagccatagccgcagctgtcactttacttggcgtagatacaacaggggttggcttgatattggctgttggtgggtctgacatgctggcacttatggaaagaaaaatgtgaaaataataattcacaaaaagtactacaaacattccttataaagtacaaatactccaaagaaagtaaagcacatacgcttactgaagtgaatgtccagtaattattaccttaatacacattcaaactgttttcctaacactgctttgagtagatttttggcagattaggaaaaaattaaagacagtaaatactattgttcagtcgctcagtcgtgtcagactgtttgcgaccccatggactgtagaacgtcaggcttacttagacagtaagtacaatttaatatttttttgttcactaaatattacgaaactcttattgaagaagttctgaatttaagcattagaaactgtgcaggaaatactctacagtggtgcatcctgacaaggcagaacgtattaactgttgattactgaacctcagtctcaccttagcctcttgctcttcaattatataattttataacgtaaactttatttctccccaaagatcactaggtcctccctgtattttaaaagaaaagcaggaaacagactgtaaacagactgcaaaagaacaaaactcacattcctctttcaccagagctggggagttgtttt

SEQ ID NO: 49059 - DNA, 719 bp, Bovine  19866881268784
  misc_feature (1)..(1): n is a, c, g, or t
ncaaagtcactcgagaatcaagtggagaacctgcagaaggtatgagtggaagagaagtgaaaggtgtatgttcataattgtttccttgttgaaaagctagaaaaatacaatggaatataattcagtcataaaggaattttgaaaaaagaaaaatgggttaaacactgatactttctctttttatatggaaatatataattttttttgaatgacttatgtatgcagataatacctaatcatcttgcaagtgtccttaacttgattaccattttatatttatactttcatttaatctaaacaaattaataagttttatgctttaagtctgtcggggatgtagttatattgatttggctgaattacatggttaatactttgtcttcctttaaaaaagactttatctgagaaagagatagaagcaagaagtctccaggaacagactctggagcttcaatctgaacttgcacgacttcgtcaggaccttcaagatagaaccacacaggaagagcaactccgacagcagataactgaaaaggaagaaaaaacaagaaaggccattgtagcagcaaaatcaaaaattgcacatttagctggtaagtttctgtatgctttatgattcgaatttgatggtgaaagttggttatttgatacagggttagaattaaatgggaaaggaaaagtaaataatactaaatgaccttctgtctatgtgtttgcat

SEQ ID NO: 49060 - DNA, 873 bp, Bovine  19866881284640
  misc_feature (1)..(1): n is a, c, g, or t
ncgtgttctttccttatattttgttactttgttctgttccatattctatagtctgtgtattctcttatccacaaccccaccacctccaaactctttcccatatttattttcattgggtttatttccattttccatactccagtgactatagtaaattttgagatttgtaaggtaaccaaaaatgagaaggttgggaaatgctctattgcgtggtatccaggttaaagtagggcctaaacagcttgaccttacccatagcagtcatcttgtctgccctcagcttccccaagtgtaaaataacttcacaacttgcaagcttgaagagtaacaatatgtgtgaacaaacgggggtagccaacatttctgaaacagaggtctttgattaggggcagtgattgggacagacgaaaacaagccctactgtttggcatacggggattgacagataaactgcctcctcatttggaacatcctcatttctcatatcaacaatctctctcttgttgtttttggctcgcacttcaaggtttcttcaaacccaacatctgaagcaaccgccaacagaagagaggaactgcagaagcagcggttccaaagagcctgccaggcagacagtcaggttcagcctgtaggtctggtagttgtttctggtgcatatcaaaggatgcctatttttcatctctctaccatgttgccaaagaggtaataataacgaagtgtgaggctgtaaggaacagccctacatcaaatgcgtgtccttctttgatccaactgagccagatgatagtgatttttgctgtcaagagagccatggcagaaggccagccagtgcagcaacatttgagctgggccgtgtgtcaattaaggacagat

SEQ ID NO: 49061 - DNA, 961 bp, Bovine  19866881294291
  misc_feature (1)..(1): n is a, c, g, or t
nctagtgatgatttagttgcaggcgctaataaaaagttttactgtaatttaaaagggagactgaaaataacttggcaagtactgaatattcacctatattatttcaaacagtacgagtaaaacctaggctgttatataaatttaagtgttcttgctatagattacagggaatctggaaagagttagtattgctgaggtttttgtgcatggtgccagatgttaaaagctgcatagtattgaagttttaccactcctataaagcatttccccatagttttagtccacactgatggctcctcttcttgactgcctgaggcacacattgttactaacatttattccttgtggggcctctgaaatagctggacctttaaaatcttccagtttatctcctcatcaaatgcacttaaagttatattatgtgacatttgaatatatgctttttcttaaagcttcttgtttttgagtgcgttattagttcttaagaagctaattggaaatatggaaagtatgatgagatctagataactgcactttaaaatctacctataatcagagcagagatacacaaaaggttccttttagtggctgaaagacccagggggtcagataaacttgcctataactgtgttaaaatctctacgtaatatgtcaatcagaatgggatgggtacagatcaacgtagaaacagggagacagctaagtcattatgggaaatgtttgcagtgcccatccaagttctgtctaaaagtgagggagcctccgctatctgagttagggttcacgtggtcctatatggttctgactagtgatgaaagagctgtagtctctagactctgagattttcccatctcattggtaagaacacatcgattgtgagattaacttaatcaaccaaatgctattcctgtttaatgcatctgaattactttctctatcttattcccaaactcagcaacca

SEQ ID NO: 49062 - DNA, 855 bp, Bovine  19866881302551
  misc_feature (1)..(1): n is a, c, g, or t
nagattatggagtgtaaaatttttaaaaaaaagtacattatgaggcccttatttttcagagtgtgaataatgaaagtagatatacataaagaaatataataaggaagacacataaacactaacgtgggaggctggcagaaggaagagtaataattccagacggggaatttgcaagcatttctcaaaggagacaggatttaagctcagtctagaagactgagtgggatttaaagagttgtgacaaagggtgtcaggcagaggaaacaactttagcaaaagtaggaagatggagaaaatagagcatgttttgaaacaagtgtggctccatacctgtggcaagtcagaaagtgtaaagggggtgaaattcaagaaaaagccatgaaccaatatgagtttcgaaagccagactaggaaattatgaaatgcaatcactgaagttttctagccaggtagtaacatgatctttgagaagttaactcttggctttgtttaaaactacctcagttgaagttggaaagacctaaaatgttcaattcatttaaaaaaatgggtgcgtaaatggaagcattaggcaaaggggtgaattaaagagagttaaggaaagaaacttagaggatgtctgcatttaacatcaaaggggaaaacagagtcaaaagtgggagactgctttttataggtgcgaagtttagccttaagtaagcattagtcacttagtcatgtcctactctctttgatcccatagactatagctccccaagctcttctgtccatggaattctctaggcaagaatactggagtgggttgccatttccttttccaggggaccttcccaacccaaggattaaacctaggtt

SEQ ID NO: 49063 - DNA, 1948 bp, Bovine  19866881334022
  misc_feature (1)..(1): n is a, c, g, or t
ntagtgtctaagccaaagcagatctgctttcttttccactgggttattaaatgtcttataaaataacgaattcattttaacatctttaagtgaaaaatgatgagcataaaatgttaccaagcgtcgtaacattcgtatgtcattgtgatataccaccaaaaactctatccactaacatctgtcagaattatgcatatgttggaaagggaaagaaatagaaacaacatttattccctgtttctgtaattttggttatcatgcagaacccaaatttgactcttagtattggcttaatttgttctttttcaagaagacttgattaccatttgcaagccatttgacacttttattttgaatcaagcatcactcaaactgagagaatgatctcaacacccactctattcagatacaaatattagaagtcaatgcatgatacaggaactacatgacagaagggtgacgacagtttgttaataatcattacctctaactctgtaccatttatgtattttgttcaatcacagggtactttagtgttcaaacagtatcatcctatgtcataagggcatttattattgagtgaggtgcactaatttttctcgggtttttatgcaaatgtgatcatttttacatcttatttcatggactcaattcacttttaattggcacgtcaacaggagagtaagtctaaatattctggaaaacagaaggaaaaatgctctgaactagatgaaaatttattgccatagatagatgtttacagaataattccttagacctgtgaaaatttttcaaattccttcataatcacaagttatgccttgaaaaacaatgagaaaaaattgatccacattgtaaaatagttcactgtaaaagaatgtttgaagataataataaagattaaaatataaaatgaaataaaataaaataaaatataaaatgaaacaattttatgagaatattaacattttattatgtcctgcaaaggatataaaatatttaaatgctatgaaaacaaacttcatccttgcttcattttttacatattctggaattttctagtaacactgagtttaatgcaaaatcataaaaattacaccattgaccatttctccatcatattaattccaaaatcatataaactgcataaacatgttaatactgaaaaaacatttattttttaaatgtttgcatatttattttattgaaatttcagtggttgaaacacactgcctcttactcaagaaaattaggaataggaaagcatggatttaaaatgctcttaccatggctgaattcttaatccaccgacgttctggaataggatttccagccagtagagcacaaggcaaagtaagctgctgtccttcaattacactggtcactggggggctgattccaatgagtggagcgactaaatcagagagaacacacagccgccatcagccctatttcactcaaaagaaaggcccattcttttatagaccgagatgactactaatgaagccattagaaaaccgagttttcaagaacaagatatttaaatgcacaaattagaagatagagatacaggacccttctaagcaaaagagactggcaagaggacaagtaatagtatagaagtaaagaaagctacatagaataggtctacagcttaaaggccagaaaagtcaagccaagaaatttgcaaaatattcaacagacagatggagagtgagtgaaagcaccgataaatagaaaagtagaatcatcagcaaatattcatctgggaacttattggacaagggacaattagaagggatgagattaggaggaggctgtcctaacagctcaggcaaacagaatgatagaaggcacagaggctttgtaaacgtatccctttctagaaattgatgaataaactcaacatgagtcaaagtaaaagccctagtaaagtaaaaaccaaagt

SEQ ID NO: 49064 - DNA, 829 bp, Bovine  19866881334251
  misc_feature (1)..(1): n is a, c, g, or t
ngccccattctggatgctcttgtttagccatcacacactctgttgtgttcccgtagccaaatggtggcatacatcatcagaccaggcaccagaccaaagacttcctggcccacagcaaacttcaagtgttcaggaacatgaggcgggtagatcatttcgacctgagtatctttgactgtgggaggatacatctctccattaatcatctaaaaaagtatcagtaagaagaagtaagaaacaaattttcatcattagagatttggaacataggtgggtggttagtggtaatgaattcttaatatttaaatggaacaaacctgatatttcatttttccatccttgaaaaggcgcagcttatgctgtctctctaaagattcaccataaatgtgacttaagtccacctagaagattatggaaaatttttgatttgctactgaagttgttcttatgtaaaatgcctaggatgtatttattactagataatgtgatgatgtagtttgctttaaaattttcagtaacacattttttttcacagccacaaaataataaattaacttgcttatccactaaaaataaccccatagcttataaatctaaatgtctcctattagtgtctcatatggaacctgtataagaaattttcactctaattatatgatatttcttttaaaaagcagcagaaaatgttttgatataaaatacttattcattgaagctatgtcactgaaccccaagagataataatgctgcaaaaatctcaccttataatatttaaggcagcataatcaaggtaacaaattttttgaagacaacttttttgcagatccaa

SEQ ID NO: 49065 - DNA, 1291 bp, Bovine  19866881437834
  misc_feature (1)..(1): n is a, c, g, or t
ncatcgtgataaaccacccgtatagattactaactctaatctcttcacatgttaaagtcagatgttaacattttgttttcaaaaaattacagaatcttctgtatcaccttgaacgttcttcattcttccagaatcatattcacaaaaaattatgaccttcataaagtgagttcacacaccaactccttgaactctgtttacagtaatgaagccagatgatgtgagactgggggaaatcccatatcctttctgtggctgatgacttctttaatagtgccatttttttttttcttaccttagtcaatgtatgatataatgctcaactatagtacaccttcctaatctggctatgaagatgggtagcttactcagaaaaatggaaaagttgttttcagtctataattcttaaaatttagtcacaaaaacatggatcaaatattactattcagaagagaaattgcctgatactggagagcaaggattatctttgtgttcgtgcttgcaactactaccttttctactttaattaaagtggatgctacaggaacatttgtcaagttgaagatgagaggaatccaaatataaggaaacagtttcagagctttaactgaaaagttgagataaaattgagataaaaattaatctggcaagaaactatgctaaatacagaaatgacatgatactgctagtctccttaaaggaaaatgcttaataaacctttgaaaaataatttcagttcctctcgttaaaatgagagaagcaataccttccagctctagctgttaaaggactaaatgaggtagtggatataaagcacccagtgccgttctggcacctctgaggacttgactcaggttaattcctttctttcccttctttgtgaacctcctccataaggattttggagtaccctttttttttttttcctatgccacgtggcatgcaggattgaaactgtgccctctgcagtggaaacagagagttttaaccactggattcccagggaagtccaaaatacactcttcttgattgactaggacaaaatactaagcataatcatgttattaatgaatctaaccattttcaattttattttctctatgtttttaaaaacaggagttttgtagcagcatctctttgtccagtttgtatttattgggcacctactacatgccaggtcctaccagatcctgaagagatggctctgaacatgtccacaaaacctctgaacctcacgggggaagacaaaaatccatcaaataattatgcaaataattaattacaattatcc

SEQ ID NO: 49066 - DNA, 887 bp, Bovine  19866881480380
  misc_feature (1)..(1): n is a, c, g, or t
nctagaagtcataaataattgtagtaagttatttagtaggttctttgtttcataatttctataatcttgtgatttaatttaaataagtcagcctgttgacttctgataatgatgtattttgtgaagaggtgtcacatcattctttttacatttctgaagcttcaagcttagatgatatttctcttgtgtcaactccaaaacgctcaagtacatcacagacagcttccactcctgctccagtgattgagccagcagaggctatagaggctaaggctgcacttaaacaggtaaaatacccctaacttgacacctttatcttgagtcacgtttttgagaacatgtaataatttcatctaataatttctctaatatgtagctgcaggaaatttttgagaactacaaaaaagaaaaggcagataatgaaaaaatgcagaatgagcagcttgagaaacttcaggagcaagtcacagatttgcgatcacaaaataccaaaatctctacccagctagattttgcttctaaacggtaaattttcttttcaaaagttaagtctaaacataatacttggtattcagtggaatcaaattcaagagttaatttgtgacaatattactttttttggtggatacaggttgaaaagttacaaagggttcatttttcacttttgattaatgattcttgtgaatgttattaggggatccaggtaagttcatataaggagtgtttgtatttttccttccagaggttaaaggacatactgattccataggacttaattattttaattaaggaggataagagaagtatgagaaatttcattcagccttttctagtctaggtagaagagaagcaggcactagagttaatttgggaaaatgactttttgg

SEQ ID NO: 49067 - DNA, 849 bp, Bovine  19866881496286
  misc_feature (1)..(1): n is a, c, g, or t
natacacatgtctggcatccagtcctgcaggagatgatgataaagagtatttagtgagagtgcatggtaacgctggaaaatgtcctgcagtccatcatacacttatacctaattaaaaggcataatttatggaacatagggcagctatccaacacatcataaaactatgtttatatattaggaaatatgtattttgcaaatttgatttttatatttgactgatcatgtgctcatgggactagtttaatggatttttgagttatatgtctgttcctgcacaagtaattcatataaatttattttaaatcatagaatataaattggaataaaaatgaaaataaaaagtattcataatctcatctcacagaataagacctttttacatataaatattgtcacagaagtgtgatcatgtggcatacagtatttaactctttatctcagtggcatgttgaacatgttttcatgtcaaaaaaatatatatttttataacattacttttaagcgattgcatgatttccaattttatgaacatgccattacttacttaatacattccttatttttggctgtttctatattttcaccaacttaataagcagcactattatagacattcttgtataagtctgttggcctatttttaattattttgttttaataaatttctataagtccactttcttgattatatgcaagtatatgcatatgcatgtacatacacacacacacacacattcaagaccaaattaccttctagaaaagttgggccaattagactatggctggtcctactttgacatagagctggaaattactgttcaaagagaggaacatttaaagaactta

SEQ ID NO: 49068 - DNA, 1699 bp, Bovine  19866881515255
  misc_feature (1)..(1): n is a, c, g, or t
ncaaaaccaataccaaaacccaataagaccagtagtactatcaatattgtcttgtcttttgttgaagatctgtgcttgcatcatcttagttgagtcaagatcctctgaactaggcaccatttttaaggacacagtgattcaaaaagatagtaaagagcagaggcagaatgtgaatccagaaaagcacaactgcagagcccatgctctaggctagactgcttaagggatttaacatttttaacgtttactaaataaaacattctgtcaatggcaattacaacctacattgtatcaaaaaaaaaatcagtgtaatttttttctaaataatgttattatataatatgactcacaatgtaataaatataattccacaaaaactaagaaacatatgcttttctccacaggtcctcctattatcactcttgaaccagtagaaactattattaatgctggcagcaaagtcatcttgaattgtcaagcaactggagagcctcgtccaaccattacatggtcccgtcaagggcactctatcctctgggatgagagaattaatgtgttgtccaataactcattacatattgctgctgctcagaaagaagatacgtctgagtatgaatgcgttgctcgaaacttgatgggttctgtccttgtgagagtgcctgtcatagtccagggtgagtgtgatattcgtttaccctgatatattcttattaaacagtacctggggcaatctaaacaataaaaatcattaagcatcttagaccacagctcttgtacccttaagatacttctagattatagggataggacaaaaatcacattacaaactgatgagattaaaaacagtacagatgagagctgcagaataccaagttaataattcaaaatcccaaatggaattttgtttttaaaacttggttaaaattattctcaaaaatcagtgcatagttttgcttcaaagaatgatttatttccaaaaggtaaacagcatataaatgtcttcatcgctcactctttcaacagccatgcccaaatgagtcaggactggaaccaggaagaaactctagttaaccgctcagttcttcttggatgcttcggttttaattttacacggaagaagagcttccataaacaatgtctcagcctttctaggttcagcgctagacccagtgcatatcttccatgagatctgacttacagtgttggtgtttacaataacggagaccaagtacggtgttttatttgcagtgcccggtggcttttcccagtggtcggcctggagaccctgcagtgccacctgtggaaaggggatccagaagaggagtcgtctgtgcaacaacccctctccagccaacggggggaagccttgccagggatcagattcagaaatgcaaaactgtcaccagaagccatgtccaggtacacctctttattcaacagacaggcacgtggttcagtaggtaccctcttctgtcgcccaagtctggcttgtctcagtataagttctttctactgaaatgtctctgatcgtgttaacgtgtcgcctttggatagtggacgggaactggtcagaatggagtccctgggaagaatgcacgaggagctgtggacgcggcaaccgaaccaggaccagaacttgcaataatccatcagctcaacacggtgggcggccatgtgaagggactgccgtggaaatcat

SEQ ID NO: 49069 - DNA, 601 bp, Bovine  19866881551277
  misc_feature (1)..(1): n is a, c, g, or t
nggctactaagagacgttgattttgctgttgaagctcttcaatgtttctataagatactagatgctgtgatattacttcagatgaactacttatatcagcagagcttacttcctcatcacggattacatggttacccctcgcttcttcaagttccatcagaagcactctaatctaaaaaaaaaagttttcatatgttatcaaatagtattggttttgactttggaaatgtttagaagtgaaaattttcaaatgacaaggttactttacaaacacctttgatggagtattaaattatcttgaaaaaactaattttcaagcttatcattttagatattaagaactaaataaagaaaatcttaatcagaaacttatttctcatttctatgaaaagtatgtaatgaaaactgttattttttaaaaagaagtcaaattataattccagaggcatggttccttttttgtagaacaatgaccatataaaacacttggaaatacatacgcattgtgtctgtatgcttgcacctgcatgcttagatatgtattacgtagctgggcagaaggggagcagggaaatagatgctacttcattcatagaaattt

SEQ ID NO: 49070 - DNA, 993 bp, Bovine  19866881626134
  misc_feature (1)..(1): n is a, c, g, or t
nacgaaacgtagggaaatgacatagcattctcgcacaggtcagcagggggtgtcacttcaccagccttcttgtcgtcctgtaagctcctatagttggagaagagatctttgaatgaacaaagcattccagtgaaattcacccaggacagctgtgactcttctcattttattcccttctaaaatgacaacccactccagtattcttgcctagagaatcctgtggacagagaagcttggtgggctgccatctatggggtcacacagagtcggacacaactgaagcgacttagcagcattaatctcatgtttccttatagttttcagaactatctttctagacttctgtagaaaattaatatattgctacataaataaattttgttcctggactcagttcctatctgtgtgtgggcagggtcgggggtggggggcgttcccaaaccaatgagcaattctcagatgccagcaaggtgtccaagaagtcaattcatttctggccctatacctaactggagattgaatcagattccactggaaaagagctcagttccaccataccctcctccacttcagatgtcagtcttgggtccaactggttacctgtgcttctgaccaattggtgataaatcaaaggttcctatcaccccatccttgggtttcattagcttgttagaatggctcacaggattcaagaaagtccattcactctctcaatcactgatttattacaaaggatattaaaggatatgagccagccagacaaagggaaacatagagtggtaaggaggtggggaaggggtcccacacaaagaggcgttgtccttgtggagcatggggcctgacactgtggtgcatggaaatgttcttataagaacttgttatgaccggataaggaatgggtgaggaacagatggatttcagagattttttaattttaattgttaaaaaaaaattttaaatgcttatttggagcctgttgcgaatagcaagaca

SEQ ID NO: 49071 - DNA, 1042 bp, Bovine  19866881855659
  misc_feature (1)..(1): n is a, c, g, or t
natgtgtgaatagtagatgttcctcatctctgctctatcaggactgtttaaaatgtgaatgatgaaatgtcatttgtgtttgcataatcttcactttctgttccttactcttcctttattatcaccccaaatctctgcctatttctagtctatttaactaaaatagctttttccctcattaataccgtgaactcactcaagaaaatgtttttcttattatcatctgactgtcttgataaaaacaactttgatcaaattctacactggaatccttagatcttttaaaaccagtcaggaaatagagagatgacataccataatctctgcaaaattccatatcttgaaagtacctaaggatacatagtataatgatgagaaattttatttttcctcaagatagttgatatttaatagtgatttctaagtttgttgtaaaatatcacaaagctttaatttctttcttaggtacccccaaaccaaccatcaaatggttgcggaatggtagagagctgacaggccaagagcctggtatttctatattagaagacggcacattgttggttattgcttctgttacaccatatgacaacggggagtatatttgtgtggcagtcaatgaagctggaaccacagaaagaagatataatctcaaagtccatggtaaatacagataaagtcatataactgaatatgtaacatgttcaaattcctttatatgtttttctttcagtgtagtatcatttaatatttacataaaaagacatgttatcaatttaaaaactagtagtctaacttcatgtattcatttgacttaaaatttcatataattttttattgtgattttacatcactgaaaattcaaacggtagaaaaagatacaaagtcaaaagtctcctggccctgagctaagcaatctactttatcctccctatgggcaaggaaagttgttagaggtgtgtgtgtgtttgtgtgtatcttcccagagatattttctgcaaaaatgaagaaatacgaatatatatttcatcctcttttttttttt

SEQ ID NO: 49072 - DNA, 1443 bp, Bovine  19866881909583
  misc_feature (1)..(1): n is a, c, g, or t
nctatgaagaacacctaaagcaataaaagtaaaccatcttgtgtatttggaattgaaggaaaatctaagataatttctaagagattgaatataaactcagtgtattatatgactgacataaaattccccttaagagaaatctattatgtcaatgatcgtcttttaaggtgtgtgtgtgtgtttatattactttggtaacttgaaaatgagtttaagtttttgcctctcattaatgtttatatttggaaaataacttacatcaaaatagagttacttcctaagaaaagagattccctaagctacctattcttgtttatatgttttcttctaacactaatctgacatctattccataatgatatgcctgtttcttcttgctttgactacatggaaagaatacttggttacatacagaggaactttgaaccagatgcttctctgtgcaaatggaaattgacaaaaggagaggttttcttcattaaagtttgtttttcactggcataaattattttaagggttttcaaaataccgttccaatttctagaacagagaaagtaaatggctggaagaataggattttgcctgtggttatgcctggcagtcacattgatttgtatccttttttgttatcaaagaataattaattttcttttgattcatgtaaactacttaggcagaaaatctgcttccattggctgcttgccaacaatctctgtactatgattcatttagttcttgcttgagaaacaggaacatttttccattctgcttgttttcacctattgcatttgctgtgtcatgtgctctactttggcacatcttcccagggaagatggttctggaaagaaataaggtgccaaagttctaacaagtcagttaatattgcttttgtctctatggtaggagaacgcagtaatcagtgtccccctgggtttgccttagacttggttggacccttttgtgctggtaagtacaacaataagtgatgcatttttgtttttcataatctgttcatgctatcattaacggacagttactgtcattttgatcgatatttattaatcacaatagtcctctaactgtctctttttacaggtgaggaaattgagatgtgaagaagttgagtgcctaagttcactcagctatcagatggcagagctagatttgaatttgagatagatgcaaagcccatgctgtttcagttagttccacaatcaagtgtgccaggaatcatgatcaagtccagggatagactgaacacaggaaccaaacactggactgtgtttggccacctgattgcacaaatgtgaaacagcagtaattcaagtctaagtcacctaaccctagaattgcccagctgtagcagagggctggattgtgggtggaggactgatgactaaacctgccctgtgccatccatgtgccagcgcagggagagtcaca

SEQ ID NO: 49073 - DNA, 708 bp, Bovine  19866882149256
  misc_feature (1)..(1): n is a, c, g, or t
nacagaatacacaccctctgcagtagaagcgcagaaccctaaccactgaatcaccagggagttccaaaatctccttctggtactacaaggcagaaacaatgccttatgaactaaatccttcctaaggatgtttactgtaatggaaaaaatgagtaagtcatggtataattaaaaatgtaactcaaactgacatgcttacttcaagaaaaacaacacttacaaagaacatctgcttcactgtcagaaaattagaaaaatgaactgttacatattcacacactgagtagacagtgctagaaggcagaatgcaaagtccaatggcacttctgagtcacagacaattttgtcaatctcaaaagtaaatgctttgtacaaaatattttagtataatttaaccaagtctggcaataacaccgaaatttacatcttatttcaaaattgttatgatcttcaggtataaccctctccgaaagatacatgaaactgatgccatttagaatattacctattcatcttggaggtttaattttctgttcgtagtcaaggaaatctgaaaaaattaccttagaaaattaatgcatctacgaaaccagtatgtacctgcaatctgtggttacttgtgattagcctgaaacagtttctttattttatacagataaaataattttagaataaagtgatcctaaaactttacccagagaagaaagt

SEQ ID NO: 49074 - DNA, 607 bp, Bovine  19866882194102
  misc_feature (1)..(1): n is a, c, g, or t
ntacaacttatcctaaacaaaataaaatgaaggaaaaccattttggtcaaccagagggaaaaaatggcaggtaccagtttaaaacacccatgaggctataaacttccttattctttgaattttaaaaaaaggctgaaatggagttcattctatgtttctgtaactgtttttaaaatggaaattggaaattcaataaaacatatgaaaagaatatacaacagtattggcaacgttacataatagtaccagggctgtcagtggaagcgttgctactaacagcagtattttctggattttgaccccccaaacctccattcacttaataatgctgtaactgaaagagtatcttgtttctattggtagaagtaaaaataaacagaaagacctttacatacctcagttcctacaggtataacacttttcagcttctttggaagaggcatttccactgtatcctcagaaatctggtctgatgcttccatggtgctatcttcttcctcttcacgtgtacgctttggcaaagacgaacttggggtagctgaaactgtgaaattatgtaacttaaatcttgaattacagcatgataacagctcaatttagagttaat

SEQ ID NO: 49075 - DNA, 708 bp, Bovine  19866882198893
  misc_feature (1)..(1): n is a, c, g, or t
nctgctttggtttctgccgttattgttccctgatagttccctaggttgtttaggaaaaaattaagctaagaatttttttttaatctatttgtatggttaaatatatgtaagttttcctatttctattaaaataccttttcataaacacaattgcataaacaagctcatggtgaaaaaaactgatttttcactgctcagtaggctcctatttttataaaacactgcttatttccatagaatgaagatgctggtgattatacatgtgtagctaccaacgaagctggggtggtggaacgcagcatgagtctgactttgcagagtaagctgcttaattacttaaacacttgactgaagaaatgtccatataattgttcatttaactttctagcaaatacaataatggtagctttcagagtctaatttagtttgctgctgctgatacagcaattgttatcaaccagaagactgatacaactttgcacaggtatttttgtctattttacctaacatatgcagttcaaatttgcagtggtttggtatcagagcttttgttgttgttcgcaatatattcagtcaaataccctttttatagctccctaccagtcttgtaaggagcttacaaagatgtcattttatggcactttaaaactaggtgttaaagactaatgtaaatgaactcaagagttctctggatcaattgctgtcaat

SEQ ID NO: 49076 - DNA, 2413 bp, Bovine  19866880365908
  misc_feature (1)..(1): n is a, c, g, or t
ncaggactgatttcctttaggatggactggttggatctccttgcagtccaagggactctcaagactcttctccaacaccacagttcaaaagcatcaattcttcggcgctcagctttcttcacagtccaactctcacattcatacataactactggaaaagccatagccttgaccagacggacctttgttggcaaagtaatgtctccgctttttaatatactatctaggttggtcataacttttcttccaaggagtaagcatcttttaatttcatggctgcagtcaccatctgcagtgattttggagtcccacccccccaaaataactcatgttaacaatcatatattgaattttacattgtaattatgttaccatttcataagtgcatatctgatcctgtcaactagaattttattcattgtaatagatatagttcattgagctcctactttgttccgttatctcaaatcctcataaaaacctcctgaaggtgggtgtagaagctgtcatcacctcacccaatctgccttgtcacttacttctagtgcatggccatggaatctccctggtgactctctttagaagttttactttctctcccctgtgaacatgggacatctaagaagtgcagtgagttaaagaatctaggagcagccttcaccaaaggtggaagggagttgcagatgtaagtaccctcagctcctcactcctcatggaggataactctgaggtgagtttaagatagtttctcacagttccccccggggatcaagcccctctcccttgcccacggtgattccctatctgatgacacaccctttatttgcttccttcccttccctgtctcacttccctctgtcatggagcctcttgggatcacctcccaaataacttataattcaattctagtcttagagtctgattctgggggaagctaacttagcaacagatattgctatccacacatgtaacagatgacaaaacggagattcagagaggttaagtaacttgaccgaagttctagagttaacagaggcagaggaaggatttaaatacagtctttctgtcccagcaactcaggtttggagctgatttactgtctgtattatcatactgtaatgctctgtgaacactcgacaaagaatctagtcaagtgactgtaaaaaccataaagatttcaagtcagtttagcttttctttccctaatatgatttatcacaatgttaaatgctgcatttatttatgtggctagatgattaaacgtttacctctctctctaaattgtatgatctatgagagcaaagatcgtacctattttggcttactgttgtttccctcagttcagttcagtttagtcgctcagtcgtgtccaactctttgtgaccacatgaattgcagcacgccaggcctccctgttcatcaccaattcctggagttaactcaaactaacgtccatcgagtcagtgatgccatccagccatctcatcctctgtcgtccccttctcctcctgcccccaatccctcccagcatcagagtcttttccaatgagtcaactcttcacatgaggtggccaaagtactggagtttcagcatcattccttccaaagaacacccaggactgatctcctttagaatggactggttggatctccttgcagtccaagggactctcaagagtcttctccaacaccatagatcaaaagcatcaattcttcagcgctcagctttctttatagtccaactctcacatccatacatgactattggaaaaaccatagccttgactagacggacctttgttggcaaagtaacaaaggtctctgctttttaatatgctgtctaggttggtcatagcttttcttccaaggagcaagtgtcttttaatttcatggctgcaatcaccatctgcagtgattttggagcctcccaaaataaagtctgccactgtttccactgtttccccatctattggccatgaagtggccatgatcttagttttttaatgttcttagttttagttcttagttctgaatgatcttagttttctgaatgttcttcttcgctttctgccataagcttggtttcatttatttatctgaggttttctgaatgttcttagttttagttcttagttctgaatgatcttagttttctgaatgttcttcttcactttctgccataagcttggtttcatttatttatctgaggttattgatatttctccctacaatcttgattccagcttgtgcctcatccagtccagcgtttctcatgatgtactctgaatagaagttaaataagcagggtgacaatatacagccttgacatactcctttccagatttggaaccagcctgttccacgtccagttactaagtgttgcttctgacctgcatacagctcgtcaggaggg

SEQ ID NO: 49077 - DNA, 680 bp, Bovine  19866880413920
  misc_feature (1)..(1): n is a, c, g, or t
natcagagccaaggcatctggaactcaatgcggggccctggccgggatggagacaagactgaacatgaacgtgtaactcaacgtgtgtcacgtcaggcagtgggccaggggttttccccgcattctcttacaggggtgggaggccaggcggctggaactcctcttgaggcagcctttgttctttgcatccgggccagtggcctcctcgtcctgcagtgtcctctcaacaggccatagctaggtacagctgaggctgcaggccctcagtgattccccggggcagacatattgctagggtcacccctgcagcaagggaaggaagctgactgccgtcttaacaggaagacctgttgagatggcagtcagcctccttctttttgggcctgctgagaggaggccctccctcagctctctctgttgtaacttaagtccaattcacctccttcccctcagaggcccccagattcacaggggaccccgtgaccctttctcaccatccctctggcgtcctgactttccctcgttttgtgagcacgacaggggaggggagggctggggagggcccagcctgcaccacccttgtgctgggccctcactcccaggccggtgggctctcaccggtttttcagcaactccgacgaccacctgcttaaaaacatcgagctgttcgacaagctctc

SEQ ID NO: 49078 - DNA, 3746 bp, Bovine  19866880419940
  misc_feature (1)..(1): n is a, c, g, or t
nggcacatgtggtgagtaagtgggtgtgggggcagcttaggtccacgacactgcaggtcagaaagtgagagctcatagcatgcagttcactctggacccagtgaagtcctgaggtggagctgtatctgccattcatcgttgtgtgagtcttgcctgatttatgactttcccagttctccgtgattttgtggaatttgtgtgtgtgtgtgtgtgtgctcagttgctcagtcatgtctaattgcaattccatggactatagcccgacaggctcctctgtccatggaattttccgggcaagaatactggagatttctttctccaggggattttccttagtcagggattgaactgtgtctattgcatctcctgcattggcaggtggattctttaccactgtgccatctggggaggcccctgtgggatgaggacttaggtcaaagcggtctggtgactttttgctacagagctgccaatgagttggttttttcccttggtgtttaattctgtatcctgaaagcatagttgggtggcctatccaggggtgcatcgaagggctgaattcaggacaacttcatttcttcttttcatgaagggccaggatgggctcttgggtccctggcagtgttatcctggcatgagccaggcagaagagcccaggcctgcattattctgcctcagttgtggtgctgagggcacagggctctccagacctctaaaccagtttctctctgactcccaggggcactttccgcttcgagaggcctgatggttcccactttgacgtccggatccctcccttctccctggaaagcaataaagatgagaagacaccgccctcaggccttcattggtaggccagcagaggccctgagcacccaggctccgccccgaacaacagcccacatcccatgagagttgctgcagaactctgtcacggccacagtgggtctcttaatcgtttgtgccatttgacttcggtgttcttactttggcgggtggagtatgacttctccagaagacccacgtgggcctcctccaaggctggccttccccgtatgccctgcctacgctgtgttccagtaaacctttccatcaggaactgtgttcagcggccataggtgtgggggttccctagcctgtcacacagttgttagaatgcgaggtttgggcaataaaccagtgcgcgcttggccaccctcgccgtttctgcccccccgacgtctcaggctccctttctgacccggcgggggcccttggttactgtccttaactgcccttcaggaagctgccccttcagctagggtgtctgtctccatcgtggggcaggggtttgcctgatgtctcccaggtcactcagccagtgaagtgggggatgggctggactctgttttctttaccctctgccaagtgcagagctggagggcggcagcaaggtcaaaggagtaaggcaagcctgttgggtttcctggagcagtgggcctgccagccacgggcacaagtctgtcaggcctccagttcagaaatgcagaaactcagccagggagcgttaggtatggacagtgactaagccaagctactttctgagcttcttgaagatctccaagagccagagataaaaatgtgctgcatttttgccccgattcttaggattcttgcttgctccctgactaccattttcttaatattaaatttcagttccagccctttatagtgttgtccttaatcccccaccttagctcagctggcaaagaatccgcctgcaatgcaggagaccccggtacgattcctgggtcgggaagatctgctggagaagggataggctacccactccagtattgttgggcctccctggtggctcagctggtaaagaatccacctgctatatgggagacctgggttcgatccctgggttgggaagatcccctgtagaagggaaaggctacccactccagtattctggcctggagaattccatggactgtatagtctgtggggtcgtaaaaagtcagacatgactgaccaattttcactaatcctccaccagggggagcctgggttgcagggcaactgagtgcaatggggcataggccccagtgagaaggtcaggtcaggtggtaaacagaaatacatgaattatggccacacagcagtgagtgaccaagctctactccctgtaagcacggctctgaagcactgcagtgtaacacaggtttattagaaattagtgtttgcttccatcacctatgctgagcaacagagaattgtagttacatgataaagaagttctttcatgccaggacctgtgccatccttcagcagaccctggtcaggtaatagatcagaacctaatgctggcccgtgtggttaacagcaggcttccagttttcttagaaactgacaaggtttaaccttgatccacactttttgtgtacattccccagggctgctcagaattgaaaaatttacacagccaagagcattttctgaatggggctgggaaactcaaaattccccaaacccttacaacacagtctgactttaaaagctaagattacttcagtgagttcaatgttagtattttaaaaccaaagagagattttcaactggaagagataagtgcccagagtcccagactcttgtgctgtctcaggaagaaaagactgctcaccactgagacagctgaggatctcaaagtcccagcagtgaagagaggcccagggactggggaggttaagggacaagcattaaaatacctcagtggggagctgggactttgagtattaacgggctttgggaaggcagctgaggaaacagactggtggcctcaagcagaagcattccagtcactgtgggaaacccagagttggaatctggccaaagaaatggatttgtcttcatcttattactccagtgaaggcttgaagaaccgttcatagctgaccatcaaggtgcctcacctgaaagtctatacattcaagagtacgactagcgtaaaacgcctgattagagtcacctttctcctgccctagcacaggtcttcgtgtctactaatcctggcctggcatttgcccataggctcaactgtaagcagccacttagctatggtcagagtagtcaagagacatgaacttgatcagctatgtcctttcctgactgagtgggtactgctgagtgcagtgctggtttgttaggttggctgaacagctccttcctggtggcattcctttagaaaagaattcagataggcagctgcccgcgggccaagccaaacagaagggaatgaaaaccgaagccctgaagaggagcttggaacttgcacccttacccaagggtgcggcatctctagagccaaatttacccaacaagaaagaaatgaagaaccctttcaaggcttttaggctacacacattctcctgtgttcagggactcaccactgggcagaaccaccatccccaaaaccaacaacatggatgggggcggggggatggatggccaagcataaccacctcagtggggcccccgggaatgcagggctctgtgtttgctgtcctcggatgacgggcagttgggtggtgggggcccatgggctccagccttcctgctgcagctcctgccccctgccaccacaacggccctctgagcttacagtaagtgagaacagcttgcttcagagccaagggcgagagaatcaaagagaacagtcatgtaagaccctaaaagtcagtgcatatgtgactctgaagatg

SEQ ID NO: 49079 - DNA, 1562 bp, Bovine  19866880529466
  misc_feature (1)..(1): n is a, c, g, or t
ncctggctgtagtccatagggttgcacagagtcagaaacgactgataatagtagagatcgtgtatataaaactcgtagtagcaggtatcccagacatatttggtttgtcacttttaaagagcacagagtatgtcttccttttctctcatggcccccagagggtctggggcagagctgtgcacggtcctggcgtgatgttgaggccacctcgttgccccctgcaggtatacaacgtggacccgaaagcctacaacggctcgcagctgccggtgagagtcgaggtggacatgatgcgggttatggaggtgttcctggctcagttgcggtgaggccctggggatccgcttgggggcgtggctgctgagtctgactcttgcctcttgggctgcctggagtgaactcttatctggcagggataccttggctgtacctggagccccaaggaaaccaagaaaggtttccaagaatcccttcatccttctcctaagaaagactagttgctgacaaaaactgttttaggaaaaatagccttatgaatccgtggtggctcagtggtaaagaatccgcctgccaatacaggagacgtgagttcaatccctggatcgggaagatcccctagaggaggaaatggcaacccactccagtattcttgcttgggaaatcccatggacagaggagcctgacgggctacagtccatggggtcacaagagtcggacacgacttagcaactaaacttcaacaacaagaacaaaaagtgaaatcattggttaaagcggagcttggggctcggaactgcttagggttgcgtctcaccccctaagaccctgaggtgcttcctacaacccctgtggttctgggtgagatggaaaatcttgatagttactctaggaatctcgaccatcttctcccaccttgtggtctctgctcctttgatcttctgcgctgttcctacaggctgctctttgggattgctcagccccagctgcctccaaaatgcctgttttttgggcctaagagtgaagggataatgacctgggagttagaccgtttgctctgggcccggtccgtggagaacctggccacagccaccaccactctcacctccctggcccagcttctgggcaagatcagcaatattgtcatcaaggacgatgtggcatctgaggtaagcaggcaggggatgcattctgtggcttaggactggagtggccagcaacagccagggagtggtgaaggcagagagccatttgagattcagagagtgtgtgggcatgccatcctcagtgcccaggcttcctctagagggcagtgccagctccccaggaggagtgcagtgtgggtgtgaagtgttaaatgggcactaagaagataacccctggcccttttatgctatactatgctatgctaagtcacttcagtcgtgtctgactctgtgtgaccccatagacagcagccaccaggctcccctgtccctgggattctccaggcaagaacactggagtgggttgccatttccttctccaatgcatgaaagtgaaaagtgaaagtgaagtcgctcagt

SEQ ID NO: 49080 - DNA, 1647 bp, Bovine  19866880532195
  misc_feature (1)..(1): n is a, c, g, or t
ngtggtgggaggacttgaggaggtcctagacccctcaagtaggcatgaaatcggcattctgtgccaagtggacattttctgggtagagggatcttatttctcactagagccaaaaagtgtggggaacaggaccaaaactgttacctatgggaaaggatgaggttggagaatgggatgtggcctgctgagaagcaataaattagtaacggactcaggcaatgcaccccactccagtactcttgcctggaaaatcccatggatggaggagcctggtaggctgcagtccttggggtcgagaagagtcaggcacaactgagcgacttcactttcacttttcactttcatgcattggagaaggaaatggcaacccactccagtgttcttgcctggagaatcccagggacagcggagcctggtgggctgccttctatgcggtcgcacagagtcggacacgactgaagcaacttagcagcagtaggaatcttatccactccaaagagttaatattcactcagcagactgtgctgagaagactggcctggggaaatcaatgtaccctagagatgaacccagaaatgaaaactttgttcttttatgataaaaagaaaaaaattccccagctcctaccccctcttccactgccctaaatacacaaagggtgagtgaactacccagccggggatgtgcctcatcaaacagatcacagatcaataaccactgcagtagaacgaagttggggctgctccaggagttggacttcttgtcggctttagctcccaacaccctgtgaggcacatataattagtctcatttgcctaaaaagagaactaaggcagataaagcagtttgcttgaggtcacatggccagtggatcgacagagtgggacttctttctgcgcttcaggctccctgcgctagtcctcttcagagaggtccctgagcttggcaaggatcctgttcgtagctgtcccagacccacagttctaggaacatgaccctttgctgcaatagcctctggggtcggggcacttgggggctgggctggaggtggagcaaacagagcagtagaaaaggcagctcctcttctctggttcccccgcctccactccccatctctccgcttcctccttttctcaggcatcaaagcagagaccacgggaacctagttaaccaggctcgaggctggaggccccgccatgacatccctaaggccccttctgatgctggccctgctggcgtgggttgttgtggctgaccaaggtgcggaagggtgttgttggccactggggtcaaggtggggtgggaaagggtagcctgggcttggccgtgccagctgacacgggctcctcacagagtcctgcaagggccgctgcaccgagggcttcaacgccaccaggaagtgtcagtgtgacgagctctgttcttactaccagagctgctgtgccgacttcatggctgagtgcaagccccaaggtgcgtgcagagcggctgggcgggcctggggtccccggtgcagctggagagtcaccaccaccctctctgcccgcagtgactcgtggggatgtgttccatctgccagaagatgagtatgggttccatgactacagcgacgcgcagaccgtcaacagcaacgggaagcacagcccg

SEQ ID NO: 49081 - DNA, 1198 bp, Bovine  19866880556059
  misc_feature (1)..(1): n is a, c, g, or t
ntccttccggtagaaagcatgaaaggcacctagcggggcaaagtagatgggcagtcagccagagaggaaagatctgcaaggaagccctctgctagagggataaacagctccatgaaattcagcactgggaaccctggctcacccagggcacatgcttgtcctgccatgggggaacataatgctgcagaaaggataggggtttcttttgatcacttgagtcctcacatttctgggtcaagggaccactgctgaggacaggaggtggcggggggtccctacctaaccaacttttccctcacccctagctgacgttcttaccactggaccactaaagcctgaggtgctacctcaaaatgctgatttcgcatgaagcccagggcctctttaatcttctgaattgtgctgggcccttttcgactgaagctgctggttggctgccctcggtctaggtaatcacagctttcctacagttggaagaaaagagaaagagcaacaacaccattacttgctttgtcttgctttgtctcaccacatagaaaactgcttcttgtcacaggatgaccttctcagagtaagtctagaaaaatctcctcatatacccgtacacacatgctgttctgtgggagacccacagatgtttggggcaagggagaagcagctactcatcctgatgaggtgacttctggttcgtgtcaaaacataggctcttttttaggggggtacctgcagagaaatggttggtgtagcaaaggcattcctgtagatccagtccgcctcttcttccagttcatcatcttcagcccccttgacagggatggaacggagctgcaggggataacacaggcgcatgagactgattttatcttgtatctcgtgcagcaaaaacacgcacttctggataaaaatatgtgctccagaggcacatgttttcagtacctggaaaagtattgtctggcaagaagtaggcatgtcgtatatttgctaaacagagagagccattttcaagaaccctaagacacatcagagtctatgttgaggccagacttcctatacccctggtcagattgggggttcaaagccaagttcctatatatcatttttgttttttttggctgcgccaccctgactagggattgaactcgtgccccctgcagtggaagtatggagtcttcgccattggactgccaggaaagccccc

SEQ ID NO: 49082 - DNA, 1972 bp, Bovine  19866880579701
  misc_feature (1)..(1): n is a, c, g, or t
ntgactgatgctttgagcctggtgacttgatagtaagaataatatcagaaataggaaagccagaggctacacaggtttgtggagatgtaggattgttaagttcaaatttggacatgctgagtttgtcgtgcaagtagtacatctggataacgtctaaaaaacaggcggaaatgaggatctaaaagcttcggcttagagttagagattgggagtttcagcatagagctaagagttaatgcccaggagataatgcttaactgtgtggcaggtatcctgtaaaatactttatatactattccatttaattctctcaaaaaccatattagatagttactattattttacacacaaggaaacaggttaaagccaactgccaaagattaccatccaagtaattggcagagataggatcttgaacataggcacgctagtctaattctggagacagtgctcttaacctaccattgttggacaaactttagaagaaagcacagggaacaggccaaggagagacctcgagagatagacttatctctaaaacctgggagaaggtggacgacctaaaggcatgatcagagaaagcagtagagctagaacacagtgacactgatggcaagggaatgatttatgtggaaaggagtagtcaacaaatagcatttaaaacaatttgaagtcgagagggaggggacatatgtatacctgtggctgatttatgttgatgtttgacagaaaccagcacaattctgtaaagcagttatccttcaatttaaaacataaaataaaaattaaaaaaatacataaactgaaaaatagaaggaacacgatggaagggaaaaagatcctagagtaattcagaggtggatatgcctaagagaaagaaatgctagcgtttacatagtgtttctaagtttctcttgggaatctaactttttaaaattgaaggaaaatgaaatgacaactgttacccaaaaggggtggagtgggctgagctggagttgcaggttggggagaatatgttctagagaaattgaaagaaggtgagtttggccctggatgtgttctctttgctttgactctgtggctttccacctgccttcttattcctctgccaggtgcctacatgttgaagaagctgattgaagagacagataggttcgtagtgttcacagaagaggagtcaggtgtgagtgaccagttgtgtggcattgctgcctgccagactgatgacatatataaccgaaactgccttatcgaactggtcaactgccaggtaccttctctttactagagtaccccaaaatagggctagatgataatcatgtgtgtttacctgcccccctccacttctacataagaataggtgggtagagctccaaaacactatactttttattaataacagatatcatggataatcgcttccattagtagaagccagcagagctcactaagccagaattagacccacctgtagtcactggtacagtcctttgactaaccttccattttcttcccggcccctgtgctgtgactctgcttctgtttctggcatagatggttcttcgtggagcagagacggaaggctgtgtcattgtgtctgctgccaaagcccagctgctccagtgccaacaccatccagcctggtatggtgacacattgaagcaaaagacttcctggacttgcatcctagatggcatgcagtactttgccaccactgaaagcagccccactgagcaggatggcccacagctctggttagaggttagtcggcaggactgggaaggcctgatatctctccagttctccatagttggcacctttcaccaaaatggcttgcagggtccttgatagtaccttttgctagcaggttgtagaataatgaggctcgtaacacttgaatatagaaactccatgcagtctctggcctgtgatctgtgacaacatagtgctttttctttttttttagatctca

SEQ ID NO: 49083 - DNA, 1228 bp, Bovine  19866880592928
  misc_feature (1)..(1): n is a, c, g, or t
natacaaggttgatttctgagttcttcatagaactaaatgtactgttccttattctgatattctctctctcctatctttttggtgtgaaaagaatgatagttatttattattcttatttgttgttttatgatgattgttgtttattatccttatttggtaaaataagttagcaaaattatcttaataaattgtgctgctgctgctgctaagtcacttcagtcgtgtccaactctatgcgaccccatagacagcagcccaccaggctcccccaaccctgggattctccaggcaagaacattgcagtgggttgccatttccttctccaatgcatgaaagtgaaaagtgaaagtgaagtcactcagccgtgtccaactcttagcgaccccatggactgcagcccaccaggctcctccgtccatgggattttccaggcaagagtactggagtggggtgccattaccttctccaaatctattgcacaccaccaattaaaaacataagttactggtctgcctgagaaatagcagagtatattttccgggagaatatcagtatgcctagattgtatcatgataacagattatatatcaccatttttacttagggaaactatggactcgcttggagtcacttagaattccagcctctatcctctaaccaagagtgtccaccccagtggcaaaactgagaggggctggatgcagagggcctgtgatgctctactggattgaggtcagccttgcctgacctgaaaaaagtgtaactgtcaattttgtgtctctaaacaggtagatatactggataagttgaaaaaaaaaatgaagaaatgtcaagagaaagggcccagaatgacatgttgactatttggggggaacccagaattcatggggagcctgctgtagggcagagagaagaatcacgagtaagaagaagctcagccaacttggctgaggcttaaccttataagcctctgtttccatagctgctaagtggaaatgatcaccctgccttgtctctctggagtgtttgcttgtggattgaatgataatggataggagagtgctttgcaaactacaacgtcccagacaaatttaagaaatgactctctcttactttgttgacaattgaaaaggcaatatttctagacatatgagatagctccaagcaaacgctttactgagaagagatgaggaaatgtacgggcctgtaggctaaatactgtcagaa

SEQ ID NO: 49084 - DNA, 1203 bp, Bovine  19866880639701
  misc_feature (1)..(1): n is a, c, g, or t
ncagtgttaggacacccccaccaacaaatctgctccaaaagatgcctgaaaagaaggcacccatagcctacaaggcaagggagagaatgggttagggcccagatactacggttttcttggaagttagggggaatatccagggtatcagaaggagggataagaaatcctttaatagcttcactctgaaacaaagtttacagtggattcaacagtagtaaatcttgatctctggctggaaggccatgattgctggctttaagtagtgaaccaagggctcattctgcaagccctcagcactgtagcatgtgggacacggtggggatggggtttagaaaagatggtctttactttccaggttaggtactttcaggtataggcaccaggcctataccacatccccagcttctcacttaccatgacgtggtggacgaggtattcccaagaagctcttgactgatggctaatcacgatatccaccgtgtcgtggatgaaataccctagccgagggatgggggagaggttgtaaagggtaccgaattagaagtttatccctgtctccccacccatttaatgcctcccggcaagatctacctgcggagaagcaaacaagcaggtagccagaaagcgaccatgctttctcgatctccaccagcatctcaggggtctgccatatactgaaagagagtgaagaaggcaagctctcatcatttcagtatcccaaaggtcccacaaatcctattacggtagccagtccactattggctgacgagcgagaaggggcttggctgaaacccaggtgtgtcccgtttcccaggtgagaacaccctcccccgcccccacccctcaccccgcgccgcctggggctgccgccgctcctggttggacagcattccaagccgagaatcaggtgagactgcctgggccatagcccgccgatgagtgatggaaagcggaatccccagccaccttcactcccccagccctccactcaccacagcagcgcccagatccccgacacaatggaatgcgcgaaggagacgagcaggttacgccagcgccaggtccgcagggggtcggcccgcacgtgcgcaggcaggggcaggcgacagagcgcgtgccggactgcccggaaggtcagcgtggcgcccaggagaagcggcagggcggggaccagcactgggggcatgctggccctccctgcct

SEQ ID NO: 49085 - DNA, 3229 bp, Bovine  19866880641367
  misc_feature (1)..(1): n is a, c, g, or t
ntgtatcctgatactccttttttaaaaacaattacattttttcttttgcaattaatgttttttcttttgtggttaaaaaagtattttttggctgcatccggtcttagttgcagcatgtgggcttccttctggttgtggtggctaggctgcccagcagcatgtgggacctcagttccctgaccagggacagaacctgtgtcccctacattggaaggcagattcttaactactggaccaccagggaagccccctgattctcctttttttgctctttatgtttcaaccacacagaactggagtttccccaaacccggcatgttctttcttgcctctttgtacaagctattcctgctgctgaatgtctttacttcatcttctacctggctgacttctaactcagcaagattcagttcaggtgtcacctctgccaggggccttctggagtctctgctctcctgggctgtattcccacagcacctaggcttctgtctgtcactgcccccaccttgtcatcaccccttagatggtgagctccaaggacaaggcctgtgcctagcgcttgcagtgttttcaggaccaggcacacagtaggagcacaagcgtcagcacttctataactgacaagctcgtagcgtgcactccttcagcacctgcgagagggctgtgggtcattatggagtgggacctggcctgggcaccagaagatctggttttcagtcccagcactgacatgtctagctacggaccatgccccgaacctcagtttgcttatctaataaatgggataatactctccaatcattccctccactgggggaccaagggcatagacgggcctcgggagggagaggtttgctcactgagatggtgattatgtcctttcccaaaaggctacctgggtacccagctgggcgctcccaacgggtaagggctggcacctgggcatctcttcccctttctgccacttactcgaatcctaagaagaggatctgtagccacacccaggaaagcagcagtaagatgatcatggcagggaaggcaaagccgaaccaggaggcaaagttcaccacgttgccatttcgggggaagatcctgaaggggaataagggctgctgtgtggcattgcctggtgacaagccagctccctttgtcccccagtcagaatgcagaccctctccccctcaatcactcacgagttgacctggccttgcagcaccaggttgggagtggtgccggtcagggtggcgatgcccccgatgctggctgagtagcacacacacaggctcagtccctggctgaagcggagctgctccttgttctgctgtgtcttggactccgaaggagtcggtagagcagggcaatcctgcttgttgtctgggaacaagggagagctggggtcgggagtgggtgcagggccagattcggggagcatggcaggggctccatggcctctgaggtgccttgttacttagcagcctagacccaggctgggggggagggccgaggctgcccccaggtctggaaggacaggcactccctggggtctcaggatggagtgaccctcagataccacctggcccaacccctctcaagagagggaaactgagacacagagaaggggaagaagattatccaagctgcacaggaagagtggagcccggacccctgacagcccacccaggctcctgctctcggcctgccagggtctcctagcatctcggtttgcccaggactgagggaattcccagcctgtgggacttttcatttcaaaaccaggaaaaatctcagcccaccaggacaagctggtcactgaacttcttgcttccctcttctgtcccaaaagttgccaagatatggatttccctgatggtccagtggttaagactctgtcctccaaagcaggggtggggggtgtgtaggatcgatccccagtcagagaactaaggtcccacatgccgtgggagtgtggccaaaaattaaaaaaaaaatcggtgctcagatgactcctcctatcatgaacatcatctcagaccctccccaagaggggtttgggacagggcctggcctcacctttctcatcaagcttggtctcttccttctgttcctggagttcaaaggcagggttgtgcctgccctcctcaacatccctgtctgtgggcatcttgtgcagctgctccagaacggcgtgggctatgggcagcatcatggcagtggtggccgtgttgctgatccacatggacaagaaggccgtaaccaacatgaagcccagaatcagcctggcgatggacagacccacacactggtgttccagattcctgcaggggctggcggcccagaatgcccacaccccaggccctcccgtcttggtctgtggggactcacagggcgggccgcaccccgatgatgaggagcacgcggagggcgatgcgtttgtgcagattccaggtctccacggcgagggccaccatcatccccccaatgaataggatgttggtgtctttcaggtactcaaggctgacctgcgtggggacagggcttacagggtgctgacgctgctatttctgccaacagaaaaagattggttccctgggctcttggacccaaatggaaatggtctttggatcccccattgttgcatattaagcagtttcctctctttctgattaacccgttctcccgtcagcaatgactgagagatcgtccagcctgaatccttccatgcttaaaaccactgactgggagaatttaatgctgtttcagaatctaaagttgtggttctccgtggtccctgggtcagcatcatcactggcctggaacgtgctagaaatgaaatgcttagaccctgccccagatctatgaaatcagaaactctggggtggtgcccagcaaaatctttgtttaactggccctgcaggtgatcatggtgcatgctcaagtttcagaaccaccgaattagaaggagacagactctttggctggctatcaagccccctttccctccctagcctaggcctaattgctttcactttgaattaactcttgacaccaactgtgcccctggcatttctagaatgccttcttcctggtcttctagctgactcctccctctgtgctccccgacctaccaggcagaggcagggacccatcttccatgcgctctgcctctgatgaggtttcttccatcatcaccatcctagggcagacccctccatcctgggagcatgtcctc

SEQ ID NO: 49086 - DNA, 1238 bp, Bovine  19866880645152
  misc_feature (1)..(1): n is a, c, g, or t
ngttcatgggtggggttgggtattgagagagaacgggaggaccagtcacacacttccccccaatgccttacttggtcttcttaactcaatatcagtgatgcagaggagggggagttgggaatgtactgaaactaacgagtattggtgacattctttcatctcctcgcctgcccctgaccctctcctagtctttcctctcaccctctccgtgtcctcctctcatctgccctttgcccttacagatgggttgttgctgtcccagagccgccagcgcattgtctgcctcaactccctcaaggctaacgtgcaggtctgttgaccaagaatcatccctttttctgctctccccatacgtcattgagtcgtgagcatgtaaaataaaacctgaacccgcagttccggtgtgctcgtttccaggtgaccaccattgacctctcagcctccctggttctgaacacttgtattattcattaccggcaccaggagttctctcactggctacacatgctagcgctggaaacccaggagtctagttcatctgttcttaagcaaaggaaggacaggtcagtgtaatctttttcggccactatcttatcaggtgcattcttagattttttggtctagagtggcatcttgtgttaagtatgtatttagttgtttgatcttttttaaatctcagtttcaacagcccagtcttaacagcaaacatgctttatattttctgttagatgagactctggcagtagaatgaatgacagaattctttgtttttatgtcctcggtgcccagcacagttccttattatgtaaaatgaacatttcttgaactgaacttagataatcgatatctcatttgccttggattataaggtgcctgccatgtcatgagtgccctgtctgtgtgtatagtacttgcactgtgtcccatagaggtcagtggtttgtaagtgatgctacttggtggtattaagttgaatcataagatatactgatattcatcatatttgatatatactatttgatacatgaaaatagcaatttcatctggttcaacctcataagtctctatggattatcactgggagtaggaggaagctgatgagttcaatctttttctagttgcatcctttcctaagaatcacaacaaaactcaccgtgccttttgagagcttctgaaatctgtaacatgataggaagttgcagttctttccttgtcagacaatgaagtcttgtccccgt

SEQ ID NO: 49087 - DNA, 1672 bp, Bovine  19866880662866
  misc_feature (1)..(1): n is a, c, g, or t
ntttcttaaactaccccccctgccaaatgtacctgtggaacctccttctggttccaagttcctggactctaggaagtccatttgggctcttagggggccaggggagcaggccaagctctaaagcagagccgagggtgatctggtagtgacatctgctccctgtcctgctgagaagagggtggctccggctcctctgctgtccccatcgtcctccatatcctgtctagctttctcagccccatctcagtcgtgggatagaactccacccagtctcgcagctgaagccctgggagcacccatgcctttctggatggaaccatgggaggattttcataaagtacaggatttcagacatagactgccagagtttgaagtgtgaggatggggagatgaggccagcttctttggtgaagccccggaggagcagggttgcccacccatattcccacgaggccccttttcctccgggattccccacctcctggaggcggggccaggcctctgagcaggataaatccccacactcggaggggactagtgtgggcacagccttggcatggctgtctggctcctcactctgccggctccatgaccagcccagtggatgcatctccagcaggtgatctggtgggaaagggtgggcagggggaggatgtggggaaggtgatggggcagtctgaagaggggtggggagtaggggcttcagggtcgactgggggctttgagactggggtggaggctctcacagggagtcctggcttgacccccccactgtggcctgcaggccatgccagtgggttgggtccccaccggagaaagaggaccaccttcagcagagggcagctgctggagctggagcgagtgtttgcagcacggccctaccccgacatcggcacccgtgagcacctagcccgggtcacctctcttcctgaggccaagatacaggtgagctgtgatcacccccctcaggatgggggtgcacttgcacagtgagtttctaagcttgacccacagtccgttctctctgggtatcctgcctccagattctgcttcccctgtacctggggggaggggatgctggaaccagaagaggctccttctttccttaccaggtgtggttccagaaccgcagagccaagagaatcaagaatagaaagccaggaagcctaagccccaggcctgagcctccccagagatcctgttctcttccggacaccatccagcggtccccggagccctggacccttggccagcctccaccctccaacagcacagctcagtgtgcctctgtgtgtcgacatgcttcctgcccagctcctggcttgggtccaggccaggggtgggtgggggctaaagctgcagccccctgggcaccagctgggtcttccgggccccacctctcttctgagcgagctgctccccagacctcactgggcattctttctgacctcatctatgcctcagccatagtcaccaacctggaccattcctaacctaggtctaggacttgcaagacccctactctggttcccgtagcccactctgccccctaggattgaacacaccggaagtggatctcctgaaccctccttttacacaagggagttttcttacaggatgaaagtattagctcagggatccctgccttccactgtcctccagaccagcctag

SEQ ID NO: 49088 - DNA, 2973 bp, Bovine  19866880698004
  misc_feature (1)..(1): n is a, c, g, or t
naccttaaagcatttgctatgtttattaagttcctatttattccttaaggagtagacatttgcaaatcatatatcagaaaaggggttaatatccagaatagacaaaggactcctacaactcaacaacaaaaataatccaatttaaaaatgggtaaaggacttgaatagatatttctccaaagaaaatatatgaatgacaactaagcatatgaaagtgtgttagtcactcagtcgtgtcctactctttaagaccccatagactggcagcctgccaggctcctctgtccatgggattctccaggcaacaatactggaatgggttgccatttccttctccaagcatattaagagatgctcaaaaacttccagaaatgtccaggaccagatcatttcacaggttgaattttaccaatccttcaaagaaaacataatacccatttgtctcaagctcctccaaaaaatttaaaagaacacttcctaatccattttacaaggccaaaattacactgataccaaatctgaacaaggataacacaaaactcaacagatctggcagactgaaagatgggcaaggacagggtaattaactatctgcttatgaaataacagaatgtgacattctttgaatagtaaatatgctttttttttcatatgttcacggaacactcacaaaaaaattcaccctatacttggctaaaaagacaacagattacagtccgatcataatgtaagaaaataaatttaaaaggtgacacaaaatggtttttaagcacttggaaatcaagaatccctcctagatagccccaggattaaagataaaaatcaaaagacagttataaactagctaaaaagcatgacaaaggatgactataatataataagaacacttagaaaacaatgaaaaagagataacaacccaatagaaaaataagcaaataatataaataagcgtttgactacctctcggaacggatggatattggctcattcttgcagctgactgacttctccataagtgagcccttattaagaggagaccactaatcaaagtgatagtatttctgagacgtttggtaaagactgaaagggggaggaggtgataaaaactaacacctaaatagagatgtgggctctcagtggacttcctttaacgaccctagggcacctctctgttggcctgaatagatgtaagtggatgtcgtctaggcagaaaacttcattatcgttattaattacgttccagccctggccctctgttcctctgagctctcggcctcggcaaagagcccagtcgagagactggccaggcgaatctcacctgcagccccagtttgcatggtgatggggtcggcgagtgtgggggcccttttccagagttggtgggggcgtcgggctgcaaggcaagttctcgaagaggcgttctcatagctgcttttccctaagaaagaagagagcatgaaagtaagcctgggctctgccaaccggccctaagaagctctcctccctcaagctccggagcaataaacaagagtaggctccaaccccagtgctccgaacatcaggaccggaaaactccacacgccgcccgcctcaggctcgactcttgctttccaaaacgctcggcacagccacagacccccgaaaccccggtctaggtctctcgctccatgaggcccttcggctcaccggctggggcgaaggcgacaggctaagattgagttttttcatccgccacatcttcgacacagaacgcgggatgaacacctcccacacgtaagagacaacgccatgcccacccgccgcctttatttgaacctgcttcgcgcttcccgattggctgcgaagcctcagtgcgtcaggcgggcgcgtccgctccggactggggcccggcgggcaagggcggggcttggattggcccctcccggccatgcccaccgtgggcgcgcgcgcgcgcgtgtgccctgcggtctgatccccagcgtcaaccctcgatgcgggcggtgggagaggggcgctcaacgcccaaggccagtctttcggcctcacctccgagagcgtaatgggtagctggacggtcgaggaatccatccctctagtttcgagaaggccactctcactcccagtcaaaaaagttgtccccgtggcctggccttagaagtctctcgctcaggtttcccacagttactttagccgtgaccagcaggagccggccgaggggtctagaagggaaggtaagtggagtgggttttgttttttcacttagggttgcttggtccgcgaacaggtcttgcgtccgtgatgaactcaaacagcctgcgctgtcatttaacctctcccagaatttctggtgttttcttaggacttacctcagagcccgcaacaagtttacttaaacagtcatagctcacaagtatctggacatttattaaggcacctggcactcttccagatgccttttatatctcctttaatccttaaaagaactatgaaataggtgctgtaaatattcccgttttacagacataggaactgggtcacacgtaatgtcttttgttcaatgcccctcaggtagtggcagggtacagattgccacccacactaccaactatattctattgtctcttgagacccgtgtgtgaaactagctactggaagtgggattgattttggaaaacagcctaaaggtaagtatttggagttatagtttattacgaagtatgttcgtttcaacactcacaggcaccttattgacactctgaagtcataatgaatttggaaaaggcaataacccaaggaggaaaaatcataatgttacaaacttcagggctctcaggggatgggctcttctgtattatccagtagcagagccactagccatgtggctactgagcacttcatgtggctactgagcacttcaaatgtggcgagtccaaactgagactgtaggagtaaaacacaaacggattttgagga

SEQ ID NO: 49089 - DNA, 1128 bp, Bovine  19866880719261
  misc_feature (1)..(1): n is a, c, g, or t
nagcttgggaagaaatgagaggctgttcccaccgctggccctcaggatgctgtgggactgaggaatttgggcgggagctggccagccaatgtgacccaggatgctggggctgcagaactcattgccttcctgggagagattaggatctgcctctgtgggcggcaggctcagctgcagctctgccagaaagtggggtgtgggcttcacagtcttagagtgtcctagggagctggctgtttcacctgaccttcccacggacaggatctagtctctttcaaccatagaaggggcttctggggttccaccagactctttccctagaggcaaaacaaacacccttctctctccatttgctcaaggccaaacagcaggtgggatcacttgctgctggctcaggctttctggcttcccacttcccttgtctgcaggctccccaggccctccaacaaaaacccctccttctggggtgggtgcaggggaagtcagaacttgtgtataaggagtaccttctccaaggcgtacagcctgatggatacagtctcacttgctgcccgggcaaagggcgggagctgagacccaggtaatccagaactcagctccacccaccagtgggtgatttctgaccccaccatcttcccaattttgctgtctggagataatttgaggttgatattcaaacaaggggctttcctgatggttcagcggtatagaatccacctgccagtgcaggagatgcaggtttgattcctggctcgagaagattccttggaggagggtatggcaacccacttcagtattcttgcctgagaaatctcatggacagaggagcctgaccaggctacagtcctggggtcgcaaagagtgggacacaacttagcaactgaacaagaattccagcaagttcgtacttgctgagctgccaccgaatgacgaaatgggcaagatggccagagttctggccaagaacaaaaaagcatggtcatccatcagagcttctggacgggagaggagcaaggagagatggcactgggattcaagcagcagcaaagccggtatccagggctcgccctctagatcccagcatgtcagggggccaaagtctcattacctgtaaagcgtttagagtgt

SEQ ID NO: 49090 - DNA, 1423 bp, Bovine  19866880767104
  misc_feature (1)..(1): n is a, c, g, or t
ncgcggccggactcacctcccctagcaaagccggatagagcggagccagcggcggacacgcgcaaccagccgccgaggccccgcccccgcctcacactgaccggctgccctagccaatccacggcccacctgtccgcgtccgcctccaatcctgggccggcagcttcagacaggcgcactgttcggccagtggcgacaagatgtgggtctcctggggaaatcccgcccccgacccaggatgggcagatagaaaaaccaatcaaaaggcagagttgggcctgaccgacaaggccaaaagcgaattaaacaccaaagatctccgtgacattttctttcgcctctctcctcttttctttttcttcttttatttttttggtaggagcaggaagctgcgtgctaatcccgcctgcaaaagctggaagagagggttggaacgaaagaaccaatcgtgagccggggagcaaaaacagagcaaccaatcattggcttgaagaggaagtgggctgagactggaaccagatagacatttgatttgacaaatgaaaaaggaaattgatttcggtcccacccttccgatctcctataggtcaggattgtggagaatcgctgtcatatcagcgacgacctcctcaaggggcgggccaactgaaagggggtgtggtttcagggaagagggcgggacctagaggaagaaggcggagtccaaatcatccattgataggaaccatctactatcccttttagagacttcaggtgtggagaaataggtggcgccaagaggggatgtcgagcttcagaaactcaatcaaggttattcatcagggcgatcacaaaagaaactcaaagactgatggttcataacctacagctggtcttccatggctaatcctcttagtggcaaaaagacattatttccagttttcacaactaacacgctcatggaacaataggcctatagatataattaaaacaacaaaaataataaacctaaccacaaagactgtaattttatcccatactttctaataaattctatcccatactttctaataaattctagtcattgaaagtttactaaaataaagtttactttcacataacctcacttacctaaatctacttttctttaaaaatacgaaataataagcttacagaccttacccttactaaaactgtgcactcagaaccctggaaatcatcattgatttctctcctgcctgcccactccttcccttctaatcaatcatcaagtcttaaacacttctgaacacttaaacacatgggcttccctcatggcttagatggtgaagactgtgcccgcaatgtgggagactcaggttcgacccctggctcaggaagatcccctggagaaggcaatgacaacccactccagtattcttgccttgagaaatcagctctggcg

SEQ ID NO: 49091 - DNA, 1677 bp, Bovine  19866880834586
  misc_feature (1)..(1): n is a, c, g, or t
nagtctaacttataaatggaagtattaatagatatttgctgtagcattttctctttgagaaataaatatcctatgcactgtagtatcagcagacttcattgaaatgttccttatccatagatctgagccatttaaataattttatttatttttggctgtgctgggtcttcattgctgcatgggcttttttctagttgtggcgagcaggggcttctctttgcggtgactctcttgttgcagagcccaggctctagagcacagactcaacagttgtgcacacaaacttaggtgtttcaaggcatgtgggatcttcctgaatcagggataaaacctgtgtctcatgcattagcagctggattctttaccactgagccatcagggaagcctggatctgacccattttatacaactttctcaatatttcccgttgttttcatgaactgctcatttccttttgtgtttcttagaggtccaaacgtatggccaagtcacttttcccagaaagcttttgcacagagatgtttaattctgtgcaaaacaagccacttgagaaactccattatcctggagggcagtgatactgagggccaccccatgggttagttaagtgcaggaaatagtgctttgtatttgcaaatcccagaaccaggagaagtattctctaggtaagaattttccatcctgaacgtattagaatgagacgttattgctaattgggttagaataatcatagcacttacagaaaattgttaaggcagtttgctatctacaagggcatatttgtgagaagaccatttttttggtctcttattgggcccagctaactagacgtggccttacacagtgtcacagttttctgggcaccacagcttttcaccaatgtgaaagattatgtgtggtgtgaagacacacagcaggcacatgcagactcataaattactgtcaccttggaatgccttggtggccaaaaccgttttctttatttctatcatatagatcccaagtgaacatttttctgtcttgttttgtttttttatagtccagaaagtgaaaatagaggctcctaccagttaatctggaactttccttaagttttctgctcccctccatatttggtcctcgtctctcaggctgtgacataagagtaatgaaaggttgtttccatgagcttactaaccctctgtatttcctgtttgttcatagttggatttgatcacagatctcttgggcactccatcactggaagcaatgaggacggcttgtgaaggcgctaaggcacacatactcaggggtcctcataaacaggtgaggccctgtatttggtcaccatctggcagagtttccctcccacagaataacgagatgaaaatttttaaacaaaaacattacatgtaggttttattcattttttttatgtcatggccataggtaaaatgttaaaatatttgtcaaacccaataggatatagtaattcccagtgctgtaggagaaagtatttttgtagcacctttgctagtaaatgacctctggctttggtctcctggtttttgtgttgttggggacaagttacaggggggtggatccttgacctcagtaccataacctcgtatatgtgtatcaagctgtcattttcacatactgagccgaaatacccggtatctctcattccagccagga

SEQ ID NO: 49092 - DNA, 1934 bp, Bovine  19866880862295
  misc_feature (1)..(1): n is a, c, g, or t
natcctactgactttttttcccccctttaaattggaacttgtaacctctccaagccttggatttagaaagacccagagtcaataaaaacaatccctatttttaaaaaaatacttgcggacttttctgcagcaaatggaaggaatgggcaatcccacaaccaggagacttaggtgaggacgagctgtagggagacggccgggccgcagcctgtctgctcaccctacctgagggaggagcgagcagcgttcagagatcacatacactgtcagggagccctctgcttgctccgatggctcagctaacatggcttctgcctctggggacgagagcagggggtttaccaggagcagaaaacaccattccctctccctctggctcccccaggacgcctagtccatcactccacctcccactcacacccagctgacacgtggccaggtttggacctcaagtggcccacgctaggatacaaggtctctcacacccagctttcccagagaggttccctggtggcctagtggtcaggattctgggctttcccattgccatggcctgggttcaatccctggtcagggaagtgagatagccacaagctgcataatgcagccaaaaaaaaaagacaaagtatggaaactacacacttagagatcagaaggtaaaagagggcttcctgttaaaaatgatcaccccttctagtaccttgtatattgcccagtgacaaggccgcctcctcatgatccaaagccctccgataggccttctggaaacggcatttgattttcagtttatctgagagaaaacaaagaggcataacgagaagagcccacctttccagccctaacactgtccagcatcctggagagcaagatgatgatatgcagagaaagaccaagaagcttcagccatttctaatgatttatgcagactgtgtgtgcatgctcggtggtgtctgactctttctgaccccatggactgtagcccaccaggcccctctgtccatgggattttctaggcaagaatactggagtgggttgccatgccctcctccagaggatcttcctgatgtagggatcaaaatcacgtctcttgcatttcctgcactggcaggcaggttctttaccactagcgccacctgaaaaaccacggatgatataaatacacggcactccacctcgtccacctgccagctcttgcctctccctgtgaaccttcaacctgaagtatcctccccacagggaaatctactacaatattcattacaataaaaaggtataaggaggaaaaccatatgattatttcaataaatgcctcaaaagaattaaactcagtacacattcttgataaaaagaagatgctggaatggagagtcagacatagagaacggacacgtcaggacttccctggtggtccagtggctgagattccacactcccaatacagggggcctgggttgatccctggtcagggagctaagatcctgcatgtcagtcacacagggcaaccaaaagaaaaaaatattttgagttaaaaaaaaaaaacctgaacctaattttaaacaaaccactagatctatcagtttataggaaataacgataatgaatacgttaaaaaaaatctgccaaatccagaatgtgagatgtcctaacaaacaaaggacctggtttctccaacaaatcaatgaaaagaaatatactggaatggggtaaggaagagctgatatataataaaagaaaaaagagaaacttaacaaaatggaggtcataatgttaggattaaatgaggcaacacatgtaaataaagtgtttcacctagtttctggcacataatgaacaactaatattagttatgctagtgttatcccttcctcacctcctcatttaacctgaatttctatacttcctttaaaaatctggcttaaaaattacaacgctcg

SEQ ID NO: 49093 - DNA, 1076 bp, Bovine  19866880865960
  misc_feature (1)..(1): n is a, c, g, or t
ntcccaacttccacagccttggggctttccagtcttgctcatggccacccctccccaggcaaccactactgggaatatgtgttccagcagcagcccagtcaagaggattgtgaaggcagctccctgccggccgcatttaaacactttgccctgatgcagcgggacagctgggtggacatcttccgacttctcttctggggcggttcctatggtacggagggagggtggaagcgtgagtcttgcttcccggtccagggggctaggagcccccaggtagagggagggctgggccagcctgagaggctgcaattgtgcagcaatcaatcaaaagctgtttgctcaggttgctcaggccagactttgcttctgttgacgttggtggagggaggcttgcctccactcggaccccacactttggactttgcctagcacagccagcagaaggaggggctgtgactggggcaaccggggagggctacggtggagggaagccaggggaaaggccgggatggggggctctgccactagcctgatggctgtccttggacaaggcagacagcccatccttggccaccaaggatctgcattcaccccttcctcaccgcaggtggtgctggacagccccagctcatcagccgcaactggtttggtctgccgggacgactggatgcggccatggccggccacatctatgtctcaggctcagctcccagcttcccccgggccaagatgactaagtctgcacgccgccatcgcaaacgctaccgctcgctccgaagccgtggtcgaggccgaggccgaaaccagaacccctaccggcgatctcgatctgccttcctgtcctggctctccagcgaggagctgggcctgggagccaacaactatgatagcttcgagatggactggcttgtgcctgccacctgtgagcccatccagagtgtctacttcttctcagaaggtgggagcccctgcccgccctgtagctaggtctggctgggtcgttcctgctgtccctggtccctgggggctgaccacagcccttgagtggtgacaaggcaggccggagtcctcgggtg

SEQ ID NO: 49094 - DNA, 784 bp, Bovine  19866880944748
  misc_feature (1)..(1): n is a, c, g, or t
ntctagcacagaccgattgcaaactccaagtctccagaagctgagcagagtctccagaagtgcagggagctggagtgtcctggaacaagtgggcgcaggagcaaggggtgcagctgaggctcccttctctccagggtctgtcagccagagccctaagcccttcgattaaccctcctccctctaactaatcctggcagaagcctgggtaatacctcccaccccgaatctgtgtggaacctggccctatttagggattaggtaatggagataaacttcaaaagcaaacagcccccatcccaattcatttgcagcacagaacaatccagattaaggtacagagttggggttttatttgaagattagttggtattacagatgacagtgataccaaaacccaacgctgccaacgtgcacgctcctccccaccacatcctgagtctgtcaggttgtctttgcagccccaggtcagatggcagccaatctcatatttgtgaaaattaaatcaacataagccctgggttcctatttctactttatgactttaatatcactccctcttcagatccatggctctgattaatttgtccaggtggcaggaggacaggagaggggggccctgaactataaaacgactggtccctgcagtctaaaattaggatcagccctctcccagccttcttaacagtcaggtaatggcctaaagggccgttgggtacagggtgatggcccattgtcctttggaggggaggaggtattgtcagcttgggatgagaagaattgggaa

SEQ ID NO: 49095 - DNA, 850 bp, Bovine  19866880993249
  misc_feature (1)..(1): n is a, c, g, or t
ncaggtgttgcctgggctgtgatgagtctgagccagcatatgcagcagaaataagaggggacagatttgaggggttgtccagaggtagaatttgttaggattcagagaccagtggtgggcttccctggtggctcagtagtaaagaatcttcctgcaatgcgggagacctgggttcgatccctaggtcaagaagatcccctggagaagggaatggctacccacttcagtattcctgcctggagaattccagggacaggggagcctggctggctacagtccatagggtcacaaagagtcggacccgactaagcgactaacatgcacacacacacaggccggtggcgtgggggttgaggagaaggcaggctgtctctgtgacagctttgggaagtcaggggtatctctgatgaggcagggagccaaggtagaggctaaggtcaaattcaaagagcaggatataagaagtaagcgttcctagccacagggtttgactacaggtttagcaacggtgatatgaagttccttgtgccttaaataatagcaaacccatgctttaaattaaattaaagcatttttaaactcttctgagtggacccacacaggcattctctgctgttattacggagaatgactaagtattataattgagctgaaaataatctcccgcccatacttgctgggttggtttctaagtattgagtttttaagtaatgtaacaaagttgcattctctccaagtgttaattttaaaaactgcagatggtaaccatctgttacacgactagcattttacaatgtttgattagcactttatatagtttggggaagcctgcccaaggagtctgccctgc

SEQ ID NO: 49096 - DNA, 1546 bp, Bovine  19866881008939
  misc_feature (1)..(1): n is a, c, g, or t
ncaggggattttcctgacccagggatcgaaacccgcatctcctgcagctcctgctttgcaggcagattctttgcccactgagtcactgggcaagccctaatagataagtggcctgattcttccttctcatgacagagatggttttatcaatagcccatgatggaccaggtctgattgttgaggctcccttggtgatgggcactaccaatcctggcttcagcaactttctttcatctatgttttcttgacggacaatttctgtttcctctgcacaacctccccattcaatctgacacattctttaggactgggcttcccttatggctcagctggtaaagaatccgcctgaaatgcgggagacctaggttcgctccttgagttgggaagattccctggagaagggaaaggctaactgctctagtattctggcctagagaattccatggactgcatataccatggggtagcaaagagtttgacacgactgagcgaccttaacttcattcacttaggactgttaataccttcaactactcagtggagtcacccttctccttcaggtaactatgcatatgtctaatcccatcattgtcttatttaaggtccaagttgcgtgtgtgtgtgtgttaatgggcatctcatttatagacttcatgtagccacaatactcccaaagtagcccaaggggctgggtaattctcagttcaatggttctcaattagggctagaggtgagggtaccatgggataggaaagagtcaagaataaaaatcacctagggaatttttctgaactgtgcatggttgactccttactccactgccaactctgataaactagagggttggagtggctggagaggacaagtatgagcattttggataaactgcagaggatagtctgaaaatcttcatcctcctccaaaatacttgggagaactttcatacacctcaagtgagccactgactgtggctggaaacttgaaacacacagactcttgtgtcaaaggaactatgccttttgggaacctagtggtccagtggttaagaatctaccttgcaatgtaggggacgcagtgttaatccctggtcggaaaactgggattctacatgctgcaaagcatgctccacaactagagagtccatgtgccacaacaaaaatcgtgtgtgctgcaacaaagacccaatgcagccaaattaatattttttttttaaaaaaggaactgaggctttaatccacgaatctggagcccagctgcttttgaaaatacagggccatcccacaaaacttccttggatacttctccatcagccaggtctttgccactatttttgtttcagaaccacccacctagttgaggctttctttctcaggaaaggcatttacccagcagagttctcacccaccagaaagtggtaaagatgaggactggaggaagtgagagctgcaaggcaagaagaatatctgtcccctgatgactgatttcctcccaaccccctataattatttctttgcagcaggaaagacgactaaatgttttagaaagt

SEQ ID NO: 49097 - DNA, 1450 bp, Bovine  19866881061853
  misc_feature (1)..(1): n is a, c, g, or t
nttcttgcctggagaatcccatggacggagaagcctggtaggctgcagtccatggggtcacacagagtcggacacgactgaagcgacttggcagcagcattgtcgaaggtcaagggccaaagcaggccatatctgaccagaaactgtgtgtgtgtctatctttggtgctatttaaaggccttagctgtacccgggtgtctcagctttgaaggcctgtgtctctaatcacttttgttgctttggggtgggcaatgatgagtgtgttgcttccatatggggaaataataataataaaagccttgagttattttcagattctccttgaaaaaatgccgaattttaacatctgttgtgtttttcctccctaaagagaagaaattttctcctcgaactaaaaagcttgtagagatcacataatggttaggctgaaatttgcaaatatctttcttggtttgaaccagatcaactcttggggaaaaactctgaaacagtaagaattcagtttggattaggacacggagaggatggaagcattttgtgatatcatttgcatctgggtagcattgcttctattaaaataaggaaaaacaggtgagcatctaggcctgaaatcagccctgtgtgctcactctaagtttagaggagtgcaggaccgttcagtagcagctctggtctagaaatccatgtgcataggccaggtgaatattttaatggataacagtgctaagttgagtcaagtgtgagtcaggtataaatggaaacagttttattacctttttggggaataatcaatgactagttgcatgctgagattgtagtaagattaaactgaactccaagtccgtattaattatattcaagtaatcttagcatttactgtgtgctagccattgttctaggactctaagtattaactgattttatcttaccagcaatgaggtgggtactataattaggtaaccagcttagtgagatttaagtgctttgctcagcggcaggcactctgcccccaggtaccatgctcttcactctgcttggggtttaagggtgttgaccctccaaacagttgaaaatccacttataacttatagtcagcccttggtactcacgttcctccctatcctcagattcagccagccactgactgaccatgtagtatttaccgttgaaaaaaaatccgtgtatacgtggacctgcacaattcaaacccatgttgttcgagggtcaactgtattttaaattttgctattatcattctgaacctcttagaaattacaaatttcttgtacaaatcttcttggatttatgaaataagtggatctgagagcatgaataataattagaagggtgaagttcaaatgaatcagaatgccttttaaattttgttgtaaatcttttaaaataggtctgtccctccaattttttttttttaagtaaatctagaaagcaa

SEQ ID NO: 49098 - DNA, 1435 bp, Bovine  19866881088315
  misc_feature (1)..(1): n is a, c, g, or t
nattcctagcttggaagttgtcttataatatcaaggcgccatccaggaggttgaatgccacagaccttcagtagtcttatctggggagagccctaggcttctcttgggagcacagaaggggcaacctcagaccccttgcttcctccccctgcctccccaaccccccggcaacatggatctgcatctttcgttttgacagtgttatcacgaagctggggtccatgctagcactgagaccactcaaaaagctatacagtctgttcctctacaaatatcccactgatctcctaaaaaaaaaaacaacatttgaactaggggagttaagaatgaagaggaatttgagatttggagatgatttaaattgtctaaaattgcatcttcacagaagttagatttaccttctttccattcacccccctaccccgccaaaaaaaaacaaaaaaaattcatatctgtacttgaggaaatctggcccttggaggttggtgttgctgttgtgaaaagacaaacctcaggatggttttcatatcatttctttataaagaaggatactgttggccaatacacccgtttgtgtgttcagcaaactaagagcctgttaagtgccactcgttgttcttgacaggcaacacacctggatgtgtgttatcacagataaattctgggcagcacacaggggctggaagagctgagaaaagctgctaggtgaaggtaacatttgagttagagcttgtgtgtgtgtgctaagtcacttcgattgtgtccgactcccatggactgtagcccaccgggctcctctgtctatatcgaattccccaggcaagagtactggagtatgttgccatttctcactcgggatcttcctgacccagggagtgaacctgtcttacatctcctgcattggcaggtgggttctttaccactagtgccacctgggagagcttgtgagttttgattaaatgaccgtccaggctgcaccactaaagccagctgtgagtgcttttggcccaccagctgtgagtccgctgcccaggggctgcgtgatgagcggcacgtccgcagggttggagctgcggaagccagtcctgccagctggctgtactcaccgtgttcctcgtcttttcccagctgagaaacctgcagcagtggtatatcgaggagttcaaagaccctctgctccagacccccccagcgtggttcaagtccttcctgttctgcgagcttgtgtttcagctgcctttctttcccatcgcagcatatgccttcttcaaaggtgagtaagtgagaaatcccatttttgccctgagaccaggtctcagaaatctttggggaaagttccaccaaggaaggggagtggtccctgaaggatgtgtgagggtgatacaggagtgggaaggtcaggatcaatcttggaagggacatcagtgggctcagg

SEQ ID NO: 49099 - DNA, 1268 bp, Bovine  19866881146666
  misc_feature (1)..(1): n is a, c, g, or t
natttttcttgagggaaaacattaagaggcagtagtgggttaagagccttctttacccatcagaccagtcaacatggattcaaaccccttgatcaagttatctacctctctgagctatagtttcttcatctttaaaataagagtgaagtattgagaataattcctgacacactaaatttaaaaaaacaattcatctctataacctcccacagggattagtattaatacaatgttaaatatataacagtgctaaatgtttggccacatgaataaataaagctgaggagatactgactaaggtgggtaaagttaagaattttgctgctcttggactgttctacctaacttttcctctgttttgcctttctaagtgtttgtcttaggcttcggtgctaaggagccagaactggtgatggtgggtaaatcaaagtttttgtttaaaaacatcaaatgcttttcaagtaatcagcttggaaactaaaacgggaaagagtgaaaatcagatcctcagtgctctcaggatatgtagatttttttctatcactgtactttctaatctatattatttatatgattatatcatccactagattacaaacctgttaagtcagacactatcttattcaacaaatatctatttagcacctactatatgttaggtactgttctaagtgctgggaacacaacagtgagcaaaacagataaaaattcttggttctaggaacatagttgatgcttatgtttatggaataaatgaagaggaaattctaacaatatggaaatcttcaaaattcttaggatggagatttccggtcttcgctggtacttttgctgcagaaagagtgcacttatatctgcatttacacattttattttgcttgttcttagcttttcactggctcctaaggttccctgaggttagagagctctttcatagcactagggaattacatattgtgtatataaaatacagtctactcatactatcaattaaactgctgcatctgggagtagtttatttgatagtattacattactgcctaccaaagactttaactggctgaaatgtaggttccctcactgcctttatgacaagaaattcctgtttaaacactgcctgcacaagccaaacctattattcaaatagggacacttcagaaagtaaaaggagaaacttattaataccaggacatcaggtaaaatccaggagtcctggcaactgcagcacaccgtcatctagttagacttctcatttctactgattttag

SEQ ID NO: 49100 - DNA, 3528 bp, Bovine  19866881148114
  misc_feature (1)..(1): n is a, c, g, or t
nacccttgccgttccctggccttatgctccctgtggccccccgcccaacgccatcgccttctcattcggaggcctcagagtgacagacatggtgagtggcaggggtctcaaatgcctcagcacgcaccgccctgtctttccaccttgatgggccaccgagtagcttaaagcctctgagatcctcggagttgacagtggaccccgctggggtgggtgacgggggggaggggagggcatggtccccacttgagggtctccgggccctgccaggcctagaccactgagagggagagaaggagtgaggaatgtaggggcaccgagaagctaggcacccacacctgggagatggactcagggccctggcagcgccccttccccgtcagcactggagtagaggcagcggtggggacgtcgccttgtgccgcaggttagactccaaagaggacttcccagggagagttttgctagtgagagagctccaagcacccgtgaatacctaagggataggtgctggcccagctcagcgcccacacattcagactggctctcctcaccccaggcccgagcgggattcatgctcaacatcatcggggttctggtcatcacactggccatcaacagctggagcatccccatgttcgacctgcacagcttcccctcctgggcccagtccaacaccacaggcctctgtggggtcagccaggcaaatgtcacaacatctagcccctagtctgagggataatctggcccaagccagaaagacccacctcgttcctactcttgtgagctgggaggggacaccaggctccaagccaaactttgaaaggcacatgtatatctaacctcctgtgtgtctgcaaggaagaggcatgtgagctcagtcctgtgtgtctgaggaaagtgtgtgtatgtacacgcgtgtgtgtgtaaagatggtgtgtcatgtgaggatgtttggcaaggggggattgtgtgtgtgcacacgatccaaggtgtgtacacttgaccgtgtacccgtgagaggtcacaggcatgacagcttgctctgtctggcactccaggtctttatctccccagcttggtgggcgaccagacccctttgtcctctatttattgaaactcaggcttagagccgcctgggcagcaaagcctaccagcagttgtcatggcaacagtctctgggaccggcctaacatactgagttctccccagcctctcaggtttggggggagggttcaaatatctgccccattaaagttttgctgtagagtgtgtggttggtttttcatggcactttccaggactgggtccccacacgtggttcaggccccaggttggggaatacgctgggaggggacctggcatctatcctggatggcggcccccttggctcccttcccacccaggggagaaggtaatagccaggaacctctgccaaggccagtcggagtgggcgcagccacccaggaaagcagcactgacatcacctggcctggctaattgggagctgccagtccctgcgtgtcttagagaaaaccagcctcccggttcccagagcactccctgggcatttacataaaaccctctgcccctgccaactcctcacggacccctccaccagctggaaaaaccagtccctccagaccaggggaggcaggctgacccatgctaagggcccagaaagctggaccctcacccaaaatggcagcctgcagcaggacgcatacacgtgaggctcacaggaacaggttcagagccggccatggccttccgagtccaggaccggaccgcactctggatcattctgcttcccaacctaccttccccagctctgccttcatgaattccagagttttcattatctggcaaagtcaggtgggggtggggaaggatgttaccacgtccttcgtccatgctgggagctcaacaccccttcctggctggaaggtcacctagatggaaatttccaaacatcttgtccagttcccttgtgcagccagagggaaaaaaaaaaagattttttttttccctcatgcccagtaaaattgggagctgagttgtgaagagagaaaaccaaaaaggatttcattctggatttccccctgggctggggctggcgggggttcagggttgatgggaggcatagatgggaggaagctgctgtgtggggtaggggggggacatggctgtccccaggggacaggggatgctgacaggacatgccagacatccagcagagtgaagagtgtcaggagaggggcccagccccccaggctggcattcctcactcatgaagcacagtcataaatcacggctcccacccagacccacactaggaccccaccaaggccccaggcgacagcccccacccccactgggagcgggctggccccagaacggtgagactcctccgggggcttacccacaatgcagtgggctcctaagggggagaacactctgcaaactaggactttctttgccaccctggttgggtacccacagtccagccctggctggggaacagatgggcatgcttcctaggggacacatgccctccaactgttctcagctccccttcatacctgtctgattccccctcagtcctgctcagagagggccagatgtgcattgaggtcacacagcagccccagggggatgaggactgtcttctcagggaaggaggtggatgaaaagtggcctgaggggtgagggggcggcaatggtgggtgccctggcagagcacagggcaggcttccccgggtgcatagaaatcaccttccacagcaggcgggagggcagagacgggaggcaggcggcacctgtcagcctaatcaccatcattagctgggcaataaagtagcacagaggggcggagccgggctttgaaggaagggcctgtcaacccaggtcgggttcgagcaggtggcctagcagctcagccgctcctgggcacacacgctctgggccgcaggaagatggggctttgcagagacgggggtctatgccctcccaccctggaccccaccctctcccccatggcttccaggaaggcagcaaggggctttgggtgtctcctgccagctgaacttgtgcagtgctgggactcaagaacgtctatcgtagtgagttccccattgctaggggagatcgatgaggcccgaacaacttgaggacagtctgcctgacacgccgtgcccccagttcctagcaacagtctggtgactgttgtatgaatgataaacatattagaagaatgcgagtgtttcttgcttctggagagaagtctgacctcaaatcccctttccaggctgctgtgtgtggagtgctgtgtgatcttgagccaatgtcaccttttaggctcatcagatagacccagttttcccctgcccctgtcccctagggccctgggaatgtccctggtaacctcctccctcttcttgctggccaaccccagccccagaggcaactgtagcagcaagaaggcctagcaaagagctaccaagccaagtgttttttttttttttttta

SEQ ID NO: 49101 - DNA, 773 bp, Bovine  19866881268345
  misc_feature (1)..(1): n is a, c, g, or t
ntagtgggttaagaagtaaggtggacttcaggaccagcattcaaccctgggctcagccttgggctactatccctcccagtgcctgcctggccccagggccccaagatgggtccccagtgtcgtctcttctcttctttctctaggagatcgtgactgctttgagctgtggcaagaacatcgtgcctgtcattgacggcttcaagtggccagagccccaggccctgccggaggacatgcaggctgtgctcaccttcaacggcatcaagtgaggagggggcggggcgggttacacaggcccccggcccgcagtgccctctgcccagccctctgacccagccgcctgtgtacccacaggtggtcccacgagtaccaggaggccaccattgagaagatcatccgcttcctgcagggccgctcctcccgggactcatctgctggctccgacaccagtttggagagcgctgcaccccctgggccccatctaaccagcccctagctcccatttccatcatgactcccatttccctcatcctccccaccccagtggaacagcccctcaaactggcctccctgggctgaggcagcctaggctcttctcaggaaatagctaactcccctgccctcatggtccacctcaaacccaacatcctcagtatctgcaaagagaagggaagccaggcattgggggtgctaagacctcccccaggcccttgccctctgttcctgtcttgagtgtggaagggtcactgctcagctctgaggaggttctggag

SEQ ID NO: 49102 - DNA, 1103 bp, Bovine  19866881291916
  misc_feature (1)..(1): n is a, c, g, or t
nctctgtagcaggttgacaagaccagtgacctccagccgtgccaaaaccttctgtatgattcaattagccaaacttattcaaagcacaagatgtgaaacggtttaggtaaagatcaccaatcatctttaaaggcagacatcccctgtacagagtctctctattcacaccactacaattaactattaaatctgaactcactacagtttcctgagagttcatcttttcgaaatgtcagagtgccatatttttttctgaaaaagttctgagctaggtacctcagaactaccagctaggtctatgatggtttgtcacgtgcttattgacagtattacaactattgcctaaggcactctgtgtgttacccccaagcaacaaaaggatcaaactgacaagctattttagttagacaatcattgttgatctgcattagatgacccaatcaacaaataatgcacctgagtattacggaagcacagggaattgcaagtaaaacccaaatataatgtaaagaacttctactcaatgacttttttctgtttggttggatgacaaatggaaaagtttctttggccttgacaatctgcatcaaagaaatcaaatcagcatattatataaacagttgatgcttgaaatgctaggacagcaacaaatctaataagaaccaccaagaatagactcaattctacatatagaagtcagtgaaaccctaatgctccaagttgtgaagataataaaatattctagtattccattagaagacagccttttgtataaggaacaacaccactacaattgccgatgctttgagggttaaattccagaattcaaatattcagttaatgtattttgcaaatattctcctagcacaacatataaaagagaactatatataccactatttctttttcaggacatgcaccagtggtaacaactgatagctaaaagaagttgcaagtagttctgagggagactgttgttttagcttgtttgaaaaggcaattccttctgaaatgtattttttttaggaaaaaaattttttcttctaagctgatagtcaatagaacataaaaatttcccctaaggataagccaaatttcttttt

SEQ ID NO: 49103 - DNA, 1271 bp, Bovine  19866881310310
  misc_feature (1)..(1): n is a, c, g, or t
natggctgccatgctgtagtggctggagaagacaaaggtcaagacactgaaggtagggactgggccttctttgctggtaggccgcctagtgaagctgtccaatacatctgttaaatgaggaagtgaaaaggaagaagggtggctatgcagttacataaggagaaatagggttcacagaatgttttgtttgaaaatgttcatagcctgtaagaagaaaaacaaacatgaaagaggcagaagtgagcattctgtccaggacctggagttcagacgcttgggcaaggaggaaggagggacacttccccaggctagaagtcgatgggggtgggagcagccagggatgaagcccacgcaatgatgtgttgagagcagcagtcgcggggtacaaatttccggggaagcattcatagtttcattcatttgagcacttcctgtgccgtggaaaacagagagagctgaccagagacctgtagaaggatgaccaagtaccactgaaggcccagcagaagtcccaaagcaatcatctcctttccttaagcaggactcagtccggtaccctcaaaggacaaagccaattgtaggaaggaaaaggaagtgcagactttactctgtggttgctgatggagctgctgtcgtgttggagtttcgtttggggacaccctgggacagtcccttccctgaaactgtcccttcttacctagactctggctcactcctcttcttctctccagatcctactcctattatgcttcttccaagaagccccgtgcccccaatttcagtgagtgtccttgctcccacaggccttcctcccaaccctgtccctccctatcagggtctgcctcacaccatcctgaactgttacagactgtgtctcctctcctcatcccctcccccagcccctgtggagagcagggactattgtcttttaaaggctgcatctcctgggggctgtccctggagcttctccggagccgttttctgagtgaatggagtggggaggggctgctgctacctctgtgtactctctcagatataaacaggttgcccagctgggggagaggacacctgctggctagtgtggagtccagcacagatgcttctactttatcctctgaaggtgggtcctccttcaagtgggggcggggtgtgtggaaatctctggccccaggggttaggcaggagggagggaggtgtttggtcctgaaagggtcacctagctgccctaccccagctccttctcgtgccccgcagagagtgccacccctttc

SEQ ID NO: 49104 - DNA, 739 bp, Bovine  19866881325285
  misc_feature (1)..(1): n is a, c, g, or t
nccaccaccaccatcaccaccaccttcccacctccctcctcctcaccttcaccaccaccaccaccctcagcaccatcttcatcccgggtcggctgctgcggtccaccccgtgcagcagcatacttcttcggcagctgcggcagccgccgccgcagccgcagctgcagccatgttaaaccctgggcaacagcagccttacttcccatcaccggcaccgggtcaggctccgggaccagctgcagcagccccagctcaggtacaggctgccgcagctgccacagttaaggcgcaccatcatcagcactcgcatcatccacaacagcagctggatattgagccggatagacctattggatatggagcctttggtgtcgtctggtgagtatccaaggaagaatcacgacttctggtttcttctcaaggttgctgggcaaggccttttctcatggtttttctccatgtcgacccaagtggaacaagctgctcaactataggaagtcacccttcattacctggtaaaaggggccttgatggcattggctgtctaggcttaagctttgaagtcctggccagttttggtggagcaccctctgttgaactcacagaagtttgttgtctaccagacttacagcgtaggacctaaggaagccactgaatggagaatcagtaaataggtgaatgcatgggaacgcttattcctctacagaccttggccgtccctcatgtttgattgagtttg

SEQ ID NO: 49105 - DNA, 1073 bp, Bovine  19866881359765
  misc_feature (1)..(1): n is a, c, g, or t
naaggggcccgggccagggcctgctggacagtggacttgctcagggcctggtgacgcgatgctggggctgtgggggggcagtgaggactcccggctccggagggccatcaggcacaaaagacgagcagctgaagccggcgtgcttctggggtggacagagggtagacagcctgtgagcggaggctggatccagacccgactctgtgcgagggtagagggtctgtggctgagctctggggagcccccggtggaggagggagacctcacccgcccttggaagccttgatctgatgaggacgcactgcttcgaacctcaagatcacccccaataggacggatgcacagccctgccctgggaaagtcccagacccaggggacaagcagaggcccagatctctacacttcgggatctgggagtccctgggtacttgtttgctgggagaaaggacaagacagaagcagggaggtcccaggggggtgggggtgatggcccacctgctgtcgtgcagccctctggtcttggcctcagcccaggccaaggtgccaggtacttacgttctgcggggcgggggagcctgggaggcccggtgcctgcatgaagtccccttggggctcgccctccagcctggcagggcccggcagcgtgacgtcagactgtggcgggagtagcgacaccatcacccagtcctggcctcgaagaaagccggctgtgatgagagcgaggaccagcgtcgggggctgaccaagcccgagtccacccctcccaccccctccctgggctgggaccctgcctccagccagacgtctgatgagagagagagacagacaggcagagacagacagacagacaagctgagagaaacatcagaaacagaaggaagcagataaacagtgtgagagacagacggggaaagacacacagggagaagctggggaacctgcagggacgtggattctggtggccccgtgagcctggcatgacactgaggagtgtgtggcctctagggttctctcctgtgtctgccacactccaaagtacctgtgactctgtgcaggcctctgccctttctgag

SEQ ID NO: 49106 - DNA, 929 bp, Bovine  19866881372951
  misc_feature (1)..(1): n is a, c, g, or t
nggtgatggcatcgcagcatgtcatcgattatgtctatttttttttctttcttttttcacctttagcatgtgacttcatactctcttgcctattgcctcgtagtcacaaaatgacaatagcttgtccacaaatcatgtccatattcaaagcaagaaaatggagcaaagagggaacactagcaggatctgttccttttctcaggaaagcaaacattttcccagaagcctgcctagcaaacctctgcttatgtgttactgtccagaactgtatggcatgtggcctccctgaaggcaagaaaggctttttttttttttaagtgtcttttctatcccagttaataacgatagagataaaggataaaaggattgggagggtgtgttaggttagccagccattgactgttcccaacctgttttaattatgtacatcatcctggcaccagaggtggtgctcagaagacatcatttgatcggccaagccctctgctcatttttgcagttgggagactgaaattaagccccactgaatcacttgatctgagagtgagaaagggagttgggtcctttaaggtcaggaaataacggacagacaagaacactggtattttctatgtattgtctcttttctacagctcattacatgagtttgagtaggctctgggagttggtgatggacagggaaggctggcatgctgcagtccatggggtcgcaaagagtcagatgtgactgaacgacaactcaagatcttggatgaagggaatcttagctgccacggcccaggaatctattaaggcagatacttgttgaggctctgccatgttgataggattgagaagtcttctaccagcctagtccctttgttcatctcataaggtttagagcttcatttttcctcagactgttctcagctaattgtgtcagaaataag

SEQ ID NO: 49107 - DNA, 1444 bp, Bovine  19866881381411
  misc_feature (1)..(1): n is a, c, g, or t
ncggagaaggagacctttagggggttgtgtgatggcacacctgacatggatgcctggacttcaactcctgttgggacctcgtctctctacctctgaggttcctaaggatttgagggattgctttctttgtttccaacttaaacggcggtgcttagttcatctgatttcatttgggtggaggggacactcgggctagggtcttgatcagcgtgactgaatgtatatggctgagtggtgttttgggagacaggagtattgccccagaagatccacctccagttcatgatcctttgccaggctttctaagacctgcagggggtgagggtggccaccctttaggagagggtcttgtgaactcaaaaggatttttctgcaggtggcttgtggtccggttggccaccaagtggtgtcagcagaagctgcaggcggaactaaagattggctcctttttttggattcagaatgtcagtcttaagtttcagcagcaccagcaaacagtggtgagtcctgggaaactcctggggaatgtatgtgggttgatctagctgaatttcaacttctaatgtcctttttaaaaaatcctggtggctttcctagttaacccagccttgccacccctttgccaagatgattttagagcctatttgagaatactggaactgatgcaagttctttcaaaaatgcttttgaggcacagggtttccagggcatgtaaaaaaatagggaagtaaagtacagaacaaaaatacagaagtaacacagagaccaaagataacgaagattaccattctaatataaaaggggaaatggcaaaaatccatgagagagaaatattaaagtctaaccaatgtcactgagaggaacaagatatagtgctgaggagaaaggctgggggaaatggaatggagaatagtggaagggctctcgtacttcctcctcttataacctttcttgtcctgtcaaactgctctgggcttacctaacagccagtgtacaaagcttcctctcacactgttttaggaaatcgatagcctgtggatttccagcaaactccttagccatgatctgccgtgagtactctatctcttcactctcctcttggggaatgttttgggattgtggtttgcatattgagattcatttccagaggccccacagcccaaggagggaagcaggttcttgatggtgtctctgggttagcctggaagctgttgttttgtgagacagatattgataagtactctgagactgtcttccatgatttgagctgtttttagggaggatgggaaaatgagtatgagggaggggaaaagactggtatggaagggggtttggacctggtggcagtgagatttctctcctgtacagacactatgtggccttgtgctttggagaagtacgtatcagaactgacctacagaagggttctagcctgtttgccccg

SEQ ID NO: 49108 - DNA, 680 bp, Bovine  19866881400530
  misc_feature (1)..(1): n is a, c, g, or t
ntggggggtgggaggaggaagtgacttcagagcatggcctaagcctggcagatctggaatctagattcacttttcttcttcatgtagtacaggactccttcacctggagttcttatgcagcttcagaattctctgaaactgtacatggaatgttgtgtgtgtacatatttttcagggagaagagctgtactttttaaaaagttcacacgggactagattcttataagaaccatcaccagagtgcctgagcagtgggcagaaagcaggcagggctgggtgggagtgttgccaggaggtgggcctggaggagctgtgtcttcttggtttcagggaggaggggtggagagcagccatggacctcagagccggaggttcctcctgttaccctgtgccatgggctctgtgctccttatcacctgccaccaggctcgtcaggtggtttttgcctgctgtctgccctgaggtacctggagacaaacaataaccctcaggggcctgtctgaatccctaggctggatcctcatagaccgatgcggaaagcactttggcaccatcctgaattacctccgagatgacacgatcgtcctccctcaaaaccggcaagagatcaaggaactgatggctgaagcgaaatattacctcattcagggtctggtgaacatgtgccagtctgccctgca

SEQ ID NO: 49109 - DNA, 740 bp, Bovine  19866881414782
  misc_feature (1)..(1): n is a, c, g, or t
ngcccttcttttctctccgattctttgttcctccacaaaccttcgttgtgcacccactatgcgcccaccttgtccagagtgctggacaagacgcatacgatgtcgattccttcgggcgctcatgatgtcacgagagagagttcatttctccacccatatttgttgtgatcctctctgggtcaggcatcaggctgggcattgaaactagagacagatggggtccctgtcctcctaggggactcagtctaagtggaggagggatcatagaggatatatctccagcatgatagaggatagacagctgcagggctcccccgaaggtccagaggtgtgggaacccaaggaatggcaagaggctccacttggagaagacagatttggtatctgaacagggccttaaaggaggaataggattttgacccacagaggggccaaggatgggcatttcagcctgggaaacagccttcattcatgctgtcacctcctctccatgtgtcctctttatcctagtatcatcagtcctaaagctcagacaagcccagtcctggtttctccttataggtcggctgggactaggcaccagggagtcccacagctgcccccagcaggtacccatgcccccaggacaggaagcccagagggttatatgtggcattgactcctctgtgatcctcacagtgcctggccaagccctggcctgtgggagcaacaggtaagtgggagcagcaggtaattaggtg

SEQ ID NO: 49110 - DNA, 1187 bp, Bovine  19866881588562
  misc_feature (1)..(1): n is a, c, g, or t
ntgctgattagtctaaacaataaaggcccaccccatggtaactgtagatggggccacacccaccccaaccgcctgggggacaagagaatttaggaagagaataagagatagacagcctactccagtgttcttgggcttccctggtggctcagatgggaaagaatctgcctacaatgtgggagaccctggaggaggacatggcaacccactcctgtattcttgcctggagattccctatggacagaggagcctggcaggttatagtccatgggctcgcaaagagtcagacacgaccgagcgactaaggacagcacagcactgagatgctgttggtagaggaagggtgaacgaatgctagacaagcaggcagcggacagtcatgactacatcctctcactgttccagctactcggaaactccggagtggttaagagcacagcctggagttccactacctgggtttgaatccaagtaccacgactgtgaacagattgatcttgagaccattacttaacctcactgtgcctccatttcctataaagtgaagataatgatagcatctgcctcataggattgggatgaggattaactgagtttgtgttcgtaaagcagttagaacaaagattagcacttagcaagcatttgttaaaataaatgtgttcagaactagtggggggatgatgcacagagcagaggagcaaataaatgcttgtagacgggatggaatgagtgacaaatctgggagcaagtccccaaactgttcagactttcctgcccagccactctatttctcagggctggtcctcctgctctggagttccgttgttttgaggctgttttccgaggaagctggcagatggatggagataagtcccccttgcccccacaaccatgattaagatggcacttccctagaagacatcattagagcaataccctgtcttacaaactgacaagaattctgtagtctggatcctgggggctcatcaggcacttctagaataaatgatctacctgtgtcacgatcatctgtatgaagatttagggctggtttatcttcagcctgtgacttttcacgcttctcaagctgttcaaaaacgaactgtaatcaagctgatctatagatagacagttcctgtttctgtgcatgctgaatgatgatgggtgtgtttatgtatttgcataaa

SEQ ID NO: 49111 - DNA, 832 bp, Bovine  19866881647194
  misc_feature (1)..(1): n is a, c, g, or t
naattatagcagaactacagtcccacccctaatctaatcacaatctcctaacttctattgtgaagcaaaatgctgaagcagctacaatatatagatgtgcttcaggtttttaattagttggccttttaaaaataaccaaaccccaaaatactgcaaatacaaaacaggaggcaagattcccagctgtggcaaactgaagaaatcagcaaatcttcttacaaaactactacaaaactggacaagtgtgccagaaacaaccattaccaggctccagaaaataactaaagtcaagtgacaaatttaagtgtttatgaaaaacgtggagctttgggtaagaacagagggagtcagaggtgttactgtttggggttattccttatccaccctccaccccaagacactctatgcagcagttgtacctgagcagggctggccacagaaaccagtggcttcactgtctgagattgctgaagtaatctaaaatggaaggcaaaacctcacacccagtggcactgacagtaaaactattaaacccaactcgaagagaacagataaagtttactgctctgctagcctgagcctgctgtctcagttgggaagaggtacagactaacagaaatccagaaatttaataaggagattctagaaatgagagccacagagggcttggtaaactctgcaggtggactgcagaggtcctaaactacctattgagggctgactaggaggcttcctacatataaaggggaaaatgggaagcttagcaaaaagtaaaaactgaggcatacatgaaaacctgatgaacaccctaagacactcacagatgctcagc

SEQ ID NO: 49112 - DNA, 730 bp, Bovine  19866881769519
  misc_feature (1)..(1): n is a, c, g, or t
nccccttgttctggcctctaagcccacttgtatctcttcctagaactctaggctccaggtttgtagatgtggaatgcccagaaaagcctggggtttggcttctgacctgagagtgtagacaggtcagctcttccctccatactctatctcattccacagaaggaagtaatgccaaccttggttggggggtccctgtgttcatctggtatcagcgtggagtagactaaaacatttggagacttcttggtctaggaagtctagacctagacagggaatggcagggaatatccatctcaaaaaaagggtgctgaggccaacgatgatgcactcttttgtgaatgaggtcagctatgtcatcttccatacttcccactctgagcctcagtttccttatctattaacaaaggaataatatgattcgcccaaagagttgttgtggaataaagagattatgtttaaagttctcaacacaatccctggtatacagcagatgctcagtagacacgtgccccctttctatttatcaagcccagtggtgctggtaggaaatgaggatgtgctggcttgcccacttgggtacagaaaattatgttctggggctagaactagagccctgactcaattcacctttctctgggactccaattagtagtaaaagctctgctcccttaacctgataaccagtgaagtttcacagtgaaagggcagctgtcaggaccttctcatgggg

SEQ ID NO: 49113 - DNA, 941 bp, Bovine  19866881848958
  misc_feature (1)..(1): n is a, c, g, or t
naacacaaaattgcaatcactttgttaaaaagtttggtgtttattataaagctaaacatacacttattatctgacccagtactttctcttaagcattttctgaagagaaatgaaagcatacatccacacaaagatttgcctacaaatgttcactgcagtttcatttataatagacaagaactggaaacccgaacgtccattaacatgagaatggattaaaaaattgtgctatataaatacagtgcaatattattcaacagaaaaaaggaacaaactattgacccatgcaacataaatcttaaggactgaaatgtgcgcactggatttggtacctagctgctagttaatatttaatagctcactggtcatttacttgtcagagcagtttgagctgtgttaagtgtaagaaagatacatatagtggactgggagtaaatgagaagtgaagaagcagagaaaataactgaagaccaatctttcaaggagcttggctgtgaagagaaacaagattatgtttgtaacctagaaagacggtaaggattgaatttcggggtgagttttgaacaagtttataggctatggggaaacgtaagacaaagagacaatgactgaaaatctgagagaagataatacatggaacaaagcccctggaaaaactggaagagaataggatccagggacagaaaagtagaagaaagctgaataatgttgacacacgtttgtctgtgggtagagcaggaagtcatccatcctttggttttatgttccctgtgaaacacagaatgatgtcatctgtggaaagtgaggaagaggtggagtagaaacttaagagatttgaaatagcagttgtgggaagtggaggaaaaaactgacctgtgtaagacttgagaacactgaaaggccaacaaaagttataaaccatgtactatgttaaactgcca

SEQ ID NO: 49114 - DNA, 1275 bp, Bovine  19866881061112
  misc_feature (1)..(1): n is a, c, g, or t
ncccaccccagagccctaagtgctcagcatcgtaaataaaacccacctaataaatctcccctgtaaattttctgcgtagaatttcattactcgttctcgtttccagtcattaggttttagtccaatttggagttgtcccgatggctgtgtaaatcacgcctgcactctggggagtgcgaactccagggaaaaatcgtgcctgggcctgtgggggtgacagctcgagcctgaagacctggactctgagttgtcgcctgtggcgtgtcagctgttggtggcaagcgcctgttcttccccttgccctggaaaagggaaaggtgctaacatgaattgagcactttatgtatgccaggatctttatatatatccccccttttttttattatttatttatttgactgcgttggctcttagtggcatgtaggatctttccttgcatggcatgggctctttagttgaggcacgtgggcttagtagttgtggtgtgtgggcttagttgcttcgaggcaggtgggatctcagttctctgaccagagattgaacctgcatcccttgcattgcaaggtggattcttaaccactagaccatcagagaagcccctatacacatcatgttaaatcctcatataagccctgcaaagtacgaattactgtctctatcttaaagaatgggatggaagcttggagagggtaagttgcttgtacgaggtacacagctcagctggtgtgtaccttgatagtctggttagggcccaggtttatccgactcctgggatttctttggagggaatgatgctgaagctgaaactccagtactttggccacctcatgtgaagggttaactcattggaaaagactctgatgctgggagggattgggggcaggaggagaagggaacgacagaggatgagatggctggatggcatcactgactcgatggacgtgagtctgagtgaactccgggagttggtgatggacagggaggcctggcgtgctgtgattcgtggggtcgcaaggagtcagacatgactgagtgaccgaactgaactgagagccattgcacctgctgcctcccagcttcatggatggaggggcttatgaagagtttagcacaatgccaccacttccaggaagcgttcctccgttactagcaggagtctgtctttccgtcatctgtttcccccgtatgaactctgaaccactttgggagcttttgtcacctccagtggctttccatgacccttcatctgctgtgctgtcacacggctccctgggc

SEQ ID NO: 49115 - DNA, 1799 bp, Bovine  19866880351699
  misc_feature (1)..(1): n is a, c, g, or t
ntcccccttctgggtgactgttatctctgtctaagctgagattcgtgtagtgtgtattgaaacatgattaaggtgtaaattagaatcagttctacaggtatgtgtgactactctttgtctcttaattggaatattcctactgatttgtttaaaaaataattccaaagtaatgcctgatcttcatattgtcagaagcttctacaagctttaaacttgcagtttaaacattgtacttccatgaagaaactagcttgacgaggactacagactcactagaggtcaaggtgaatcctggtgagaaagatgactttggatggtgacactctgtgctgttttgggcaacatattattgtctgttgagaacatggggcttccccagtggctcagaggtaaagaactcacctgccagtacaggagacacagaagatacgggtttgatccctgggtcggaaagatcccctggaaaagaaaagggcaactcactccagtattcttgcctggagaatcccatggagagaggaacctggtgggtaacaatccatagggttgccaagagtcagatatgactgaatgactgagcacacacacacacacacacacacacactgagaacacattatatttaatatgcctgatatggggagtgagaggaacttctctatggtgtagaggtttctgagaataaagctaagcattgcagaggctgggtatgtatcaagtgatatcgaatggccgtggacttggccagacctgggtgtgagcctcaagtctactgctcaatagttgtttaacttcagatgagttactgagcctctcacactcagcttgtctataaaaataaggctaaaaataagtcccttgcatggaggttgtaaggattaaatacaataatgtatgtaaaatagttagtacagggactgacataagaaatgctccataaattgctacttctaatcgtcatgattcataattaaatcttacattgtaactgatatttaactaatagctaatgatctatggcagttcagatttaataattaataagttatgcgagggattgggggcaggaggagaaggggacgacagaggatgagatggctggatggcatcactgactcgatggacatgagtttgggtgaactccaggagttggtgatggacagggaggacctggcgtgctgcaattcatggggtcgcaaagagtcggacacaactgagcgactgaactgaactgatgctagttttggagccatgaggattaccaccacttctataaccaccgtcacctttagatgtcacgtgtgagaagacgcatcagctgagggactcagccaggttgaccttgtcccaggacccaagaagagctatctggtcctgaatcagaacatcgtaacttcatcctgctccaggatggagaagacctggctccaagagctggtctttggttggtcaactcttgtaaaggaacaatagtgaaagacttagcgaataccttcagcccccatctggtccttgtcaaaaagaagagctgtggttgggttgaagctgattagtacatcaaatcaggctcctgaaacgccgtagcggccacctccacttccccttgccctgtcggctcaccgccacacgtatgaatgaagaaaggctcttgcttatggcaggtcacacctccaagctgcctgttctcagacttgcatgaatcctccgtcatcgccccatatagctggtgtcaagtgctgagtgtggaagccgagtagagaggtgacacggttttaattatattttaaagaaagttcctt

SEQ ID NO: 49116 - DNA, 1401 bp, Bovine  19866880355410
  misc_feature (1)..(1): n is a, c, g, or t
natgagacctatttgacattcatgagatattgaaaaagcctgatccccttgatatcacatcaccagggggcggggctgggaagaaaagactgaaagggaaggagagggagggaggaagagagggagagaggggaagatgggaaggagggaatgaggtgggaagagggagggagaggaaaaggaaacacacttttaaaacaaatacctcttcctttgttccctgcaaagactaccaattaggggttcagaatagaggagatgagaacatgctccaccaaaatatgcctcttgccagattaattattttcactgaaagcagttaaaaaataacacatgcaggaaggtctctctgattgcctccttttacagagcatacattttctttgagaaagctatcctccgtgtaccaggaaggagaaaacattcttatcaccaggagttgatgctgaattcaatctattcaaataaacctactaaaatcatgatcatctttcattggtttcctccatatatttcctggtcatcttcccacaatttatttcccctagaacaaaccccattttcctttgtcatatcatgtctccacacttttgtttttattaaaatgctctataagctctcaagcctatctgcttcttgagtcatacatctatatctatatatatatatacacacacacatatatgcctctgtacatctaaaaatatttccattgagtgaaatgtaatgttttcctcctgtttatctgtcttttttcagctaaatttcaggcctcgacacagaatttaggaaggtggaagaaaagcctttctccccctaccacactttatgactacccaccacaaaactgtatcaagctaagcttcttgtaaaaagtcagacacactctgtcttgacagaattaaagaaagaaaaatgaaaaatgcccacattcttaagataactgagcacttctcagcatgaagaaattgcccaaataaaactcagtaacattctacttttagaaggatggacaagactagatacacaaaaaaatgtttaaaagtcccaagaccatattctcccaaactgttctcatttttttctcgtactctccaaagaaccattcctttgctttatcaccccgctggctgtgactgggtctccctcagagcccaagggactgtgggtaggagaaagcagtataatacgtatttttttttttcctgaaactctgtagaagttttcctcacaccagctacttttcgtggtgacctagatcatcattcacctggtataaatgagcttggctgtgaacaaggttaagaattagacctgaggatgatctattagttcatcttgcttgtctcatggggcaaagcagaatgtttctcggagagttttctgaatgcttttcccaag

SEQ ID NO: 49117 - DNA, 4566 bp, Bovine  19866880369694
  misc_feature (1)..(1): n is a, c, g, or t
ntgcccatggtgggggccactctgatagcacatctttggcattcgcctccccccattccctgtctccacctccccagcccctcactcctgccccagatacccatttgccaaagaaaccgcctgcatacaaagtttgtctcaagacgtcttttaaggaaacctgtcctaagatacatttctattcgtaggcctctcccgccttctgcagaagtgtaccattttagactaaattcagtgtgactgctgtcgggacattattagtgaatatgaaagagcccctcacttttccatttctaatatggtttaagcaccaggggccagtggactgaaatgatcccattaaaatggccagtgacctatttttcccttttgatagaggagaggttcttttaacgtgtgtttctagttcactgtattgctcctctgtgagcctcgttagaaagccttgaccttatgaaagaaattaaagtatagggccatttcttgatattcccctccattatctgtatgcttttgatctttgtaaagtgtaaacagtctggggagagtgctgatgaggacagcactgtagccttgatcccacatgagctgatcagacttgcatggcagaaaaccaccacacagtctgaagctgcattctgaattccggtggaccatggtctaagcgtttgttcttggtctcttggtaaccctgggtggcagatgacaacacgcatttcactctccctcctgaacgctgcatgcaatgcccgtgattcggacgtgtagtgttgcctgtcatgaggacacatttatgtaatggggcatgttcaattgagggcttcccaggcagcacagtggtaaagaatcttcctgcaacgcaggagacacaagagacatgggttcgatccctgggtcgggaggataccttgaagaatgaaatggcaacccactccagaattcttgcctggaaaattccatggacagaggagcctagcaggctacagtccatggggtcacaaagagtcagagatgactgagcacacacacgtttagctggctgagcagggcccagaagagactcctgtaggcgaagatggttaggtgcccacgagtggcagggattaagctctccacactgcctgatgcctctgctgcatcagtagggttggttccctgctaagatggcacagccacctagacacccatgtttgtgtgtgtgtgtgtgtgtgtgtgtaagggcatggggactcagctgagagaactgcagagtgctctaaaacccacgagctcagggtgcgttgactgtggcgcttttctccctcactccagatgagctgacgctgctgccatatttctagtggcaacgactcacttggcaactcaggaagctaccgttgtccatgaatttcggagaatgcccagcggccccacaggatgtctgcagcttggcagagaccttgttaaacgtagaatcgattctatagggcaaagtatgtttgtttttaatcttgcggtccagaatgtggggtgttctttcttggaggagagatttgtacaacataaagtcaactgttttaaggtgtacaagcagtggcacgtggtacacccccagtgatgtaggaccaccatctctgtctagttcaggatactttcatctcccaaatgagaccacacaggggagtggtaatgtggttttaatgtctgacaacctcgataatcgcctttttgtgaggagggaaaaaaaaatccaagaacaaatcttatgctttttaattttattctattttaaaataacatatgcttttgggctccttcaaatttataaaggcaatacattttcagtgcaaaaaactaaaaaaaaaaaaaattactaaaatcagaagtaccaccagacacatagcaaagtacatacaaggccggtttggaaaaaataatctcaaaatcttctgtgtctgggtagaggtgtggacctgtgaaggactttgcacaatgactttttgtcaagccactgtgtgattttcctaagtcttttctagtgtatgtgaaggtgggttaggatcaggtcagacccgaggcaaaaatccgagccctgcaactttctagctgtgtgacctcaaaaaagacgggtaaactttttctgaggcttggctttcttgcctgtaaaatggggttaataacctgcttcatgaggctatcttgaaaaggaaatgccttgcacacagtgtgagtgatgaataaatgacagtttttaaaggagaagcaagaaggacaaaaccaggcagagaggcagatgtttgggggctcactcggcccaaccccaggctagtgcccttcccagtcgtttcatcttcacagcaggtttgatttaagctcatgcctccacaaacagactcccacatactgaagctggaatgccagacatctactgctgggcactgtcatctactgccagagcccgttacccagcttaaagcaccatgaccctggctagcgagtgatgccatggcgcgccagccccaggggggacgatcagaaggtgccgggtggcgcagctgggttgtgtgctctgtgcccagctgactccgtcagttgcagggaaggctttggaaccagcaccttccctggcttcctgggggtggcggctgtctaattcatgtagctgagaggaggctcacatcctaggttcccaagagctggttttgtgcagggcctgagtgccccatcttctgtggtccagttatgaaatgaaatttagaatcccactacttctgcctgggtgatgtgtcccgtcccttcaatttgtaatgcatttagcaaattgtcaaacacctgtgtgttagatacctttcaaggtgttgacatctggaagtcaaaagacatggtcctgggcttctcgggagtccctgtctagaatagtcatgcccagagtaccctatagatttttcctcttgcaaggtgttgtccttggccagacaggtctgagtaactgtgtacaggacatgactcttgaagagtcctagcacacattagcatttgaaacttctaagatgtcccacagtaaaagcaaaaaggacaattaagtctaacttgatgtttgccactcttgtctaaacgtgaaatctttttgccacttaacacttattaacatctctgggaactggtgttccctgctagtctggaagaaatctgtcacaagctaacaaagttttacagagactgatacacagaactctccaaagattattcttcatatagtcgaagctctatgaagtaccttcagaacctttgagatctgattccatttcagaaagttctgaagagagaaagattgcaaactgcagtgtttctcttgcaaatccggttctgtatgtcagagaggctagcagtgtgtgtgtgtgtgtgtgtgcatgtgtgtgtgtgtacacccactgacaagttgttggtgccatggggacctggatgctcacatccctcagctccagtcagtcagttgtttgatgggaatttggtcagaacactgagagcttaaagtttctcaggagaacatagaaatctgtaatgtttaaatatgaagtttcacagcattaatttgtcttccaatttattaaacattgtgctgcccaagcacaaagaaaatgacaccaaaattctacagctgagtcctgtagatgagctgccaggttgtgaccttgtgctggggagatgggggttgtgaccttgcgctggggagatgggggttgtgacctatttgcaaagtagtgagaggcatagaaccaaagggtctgcgaggcagactccacgctgacataattacattggtagccagaccctccacgcactgctggttttccacatcggtctgctttgccttgtcagtcagtggccttgatattaactcaaatgacatttcttccttcctgatgcagtgtctgcaactagcttccaggatagcacagcctcctccattcttgctattctttctttcctctccaatgttggaaagcaccaggctttcatgtttgaccctgattccttctttatttgcactcacttccttagagatctcacatggccttgtggcattcaatgccatctctatgccaagaacatgcatatttatctttccagcccagttctcctttctgaactccagacttgtagatctgagtctcttgacatctccagtctagtagctcttgaacctggcagagcccaagtggatatcctggtctcctcagccccctaaatctcctccacacacagcctccccaccttgatcaggggcttggcactagttgcaatgggaccatgcagttaactctctcacttccttcaaatctaattaaatgttcccttctccctgagttagacgccatatcccatccttggtacctctgatttctcccatcctgatttatcctcttccaatggcaccccacttcagtactcttgcttggaaaatcccatggacggaggagcctgttaggctgcaatccatggggtcgctgggagttggacacgactgaacgacttcactttcacttttcactctcatgcattggagaaggaaatggcaacccactc

SEQ ID NO: 49118 - DNA, 1717 bp, Bovine  19866880481996
  misc_feature (1)..(1): n is a, c, g, or t
ncttcttcagcatactggttggggcataggcttgaattactgtgatattgaatggtttgccttggaaatgaacagagatcattctgtcatttttgagattgcatccaagtactgcatttcggactctcttgttgaccgtgatggctactccatttcttctgagggattcctgcccgcagtagtagatataatagtaacataagtttgttttcttgttttctacatctgtgactctatttgtaccatttttttagattccacatataagcaacatcgtatttgtctttgtctttcttcatgtagttccacaatccctaggtccatccacactgccgcacgttggtatcatgttgttctttttttatgactgaacaacattccgttgtcaatatctaccacatccttcgtctaaccgcgtgatatatctataccccacacttgctctcctacactaatccgtccatcaccctgaatcatatggtccccaccccttcacttcttattacatcattttaggcatctctatgcattcctaaagaacaactaaatatacatacttttaagtttataaaaaagtatcatactgcatcttatctttggggaattacctctgttccttatgaagctcagtccctatgggctagttgtctccatcaagcagttattttggtcactgagcaatattccatcatatgagtatatcgaattttactcccatactttctgaatggcagtggtcatgtccaggctttcactattttaatcagagctacttggaagattcttatgcatgtggataagaatttctctcaagtacacacctgggtacatagtattgccggattttggggaatcatggatgtcaacttttggagacaaaaacaaatggctttccaaagacgttgctctgatctgttctctcactgttaatactggagccctcctgaaggcttatatcctctcccgtccaccatattgccagatttaggtatagctcaaagttgtcagtacttagaagtagtatctttacggtaacttgatcttgtgtggtgaaaagctgaagttaggacccatgagtagaagttgctcaggctgagaaagagtggtctcctagtacaccttgtcaaccggagtcagactgtctaaggagcattagacagactatctaagctgtccatccctggaacattcagcccagggcattcctgaccctgggacgcaatgtggctgaagggatacaggtgtcacgtgggcgttcagactggagagctttaaaatgtgtttcagaccctgattctagcatcaaactgttttcaaatatttgtttctggacctttaaatagatacctgaaattataagatgctattttaaagcattttgatcttttatcgtttaaaaccaaccaaataaattcctttaaacccttgagcagtactgaggtgagattaattaaaagattaggactctcgaaagatttttatgttttttttaatacataaagttataactcccaacaacaatattttcagctttaatgggaacatcaaagatactaatattttaaaatcaggtcgtatgtgtgtgtgtatgccaagcccaggatttttgtatctatatgtgcacgtgtatagtgcctattgattatctcagtaataaataattgcgggatacacaagaagaacctgaaaaggtgaagatatctcttttttactctga

SEQ ID NO: 49119 - DNA, 1990 bp, Bovine  19866880506953
  misc_feature (1)..(1): n is a, c, g, or t
nagagacccccaccccagcaacttgcagcaaatggagaaatgtccccagtgtttcagagccaactttgatacagaaggaaaaacagtggggggacctagacactggtggggtgagtgtgagcctaaatgaggttcattagcatgtaccccagccacgaatgtttatgagggtcatggatcttctgctccatatctggctgccagcacgctggttttacactttgccacatagatttaatttcccttagtggaagaaaaccacattaagaagtcatttccttcctctgcagaggcagagatgacgcaatggctacaggcgagtcaaacgggattgctatttttctcctcaagaactaattttcattttgatactagctttaggtctgttataaatccatcttgtaactatttcagtaggatgacagagaacaatgcaaagcccggaaaatatggcctccccacttctggtactgccgtcggaagacggagaaatcaagcattaagtggcctcatcaaggcagatcgcaccagatgaatccaaataatttagagcctgcaaacggtaatgcctccttggttatcaggctaccgtctgttatagtcatatgcctcccagatggcagcatcatgccaatgcttagaaagttgtttatgggaaataggaaataagtaaaacaaaaacgaatggtatttgcagagctctatggtatatggtttttaaaacctaggggtttctagtcctaaaagtccccaatggaagcatgtggctttcttcagaacagccatgctcaaccctggctgcccacaggaatcacagagagaactttaaaaactacagatggtggctccgccccaggggttcaggtttaattggtccaggggggcagcctggcgggtggggactgttttcaaacctctcaggcaattctcaggtgcacttgcagtcaagaaacagtgtgtttgggagaagtttgtgtgcacagatagaacccacatatattacagaaagaatattatacattggcctttaagcccattgtttgcgactcaacagtatggcggctttccttggcaacctctgctctggaactgccctttttctctatccaaggatcgtctgagccacaaggctcttttcccagctacatcaggatgctggtctggtgcgggagcttttgaattcatgtggagtctgcaggaatagggagtctgcaggaatatgagcaagcctcatgtcctggaagagctgcctgggtgacttagaaatgaattgtgctgtgggtcagagtaaggttctgtttccccaagcagcccaagaacctgctggctggaaaccactgcctagctaactaacagataagccctaatcatgactctaaacagcgccttatccaaaggcactatttgcctcaagtgaccttcaatggtggaggaggggatggcaacccattcaagtattcttgactggaggagcccagcgggttatagtccatggggttgcaaagagtcagacatgactgagcacgcatgtacccatgagctttaatggaggggtttcacttagaagaactttccagattaccttagaccatccatagggaaaggcagtgactacttattcatccaccagatacttatggtgtccttgcaatgccagggcacagccctcacacgaatgcacctaccagactgactcctctactgccctcatgcaccacccaggtggggaaggtaacaccaaacagttgcttacagatgagatgggccttaccacacgagaacagtgctgggcggggctcacctagcctgaaaggcttctgagaagtgacttcgtttcacaaggaaagaaagagactgttagaataaagagcgatggtggcagtggggagtggcgattaccctaaggaacttccagcaagggctctccaagaagatgagaagtgcaagctctctaccctctctctgccttagcttccccctccgtaaaagg

SEQ ID NO: 49120 - DNA, 1291 bp, Bovine  19866880513996
  misc_feature (1)..(1): n is a, c, g, or t
nattgagggcaggaggacagggtgcgacagaggatgagatggttaaatagcattaccaattcagtggacatgaatttgaacgaactctggaagatagtggaggacagaggagcctggtgtgctactgtccatggaaccacaaagagtaagaaacaacttaatgactgaacaacagcagtgataacgattgagaggcatcagagaagtgggggaggaattccgtagctttggtggtggtgatgttctctatcagctctccatccacagagcagagcatggacccatcctcactgaatgcattattgtaactacacgtgactgtaactacatgtactgtattcttggtgcttcatctgcctgcctcctgccacaggagaggaccctggaggtcattcacaaatctgagtctccagcagttacctcactttgtctaagataggttagtctgattatttaaatgatagtcaacacactggtactgatcttcagtgcatataccaaagccacacatgattagaatgacatcagatggaaggtagaggttgctattttgagtcctgaggttgaagactgagccagacttgactttacactggaggagcaagttgggattctcaggagattctgacttgttcttctcaactgtacgagcaagagtaaggaaagagcagaaaagaggagagggtcatagaaagttaacactggaaaggacttagagacgtttgattcaggagagcaaatataaaccaggcgcctgctcctctccatttgacacccgtggtagatatcctcattcctcacagctgacttttcctctcaagtttggacttcttgatataaccctctaggtagcaccagttcatgctacgtggttgacacttggcttccaaacctctctgctactcctgatcttgtttatctctctttatttatatatgagatacatagttatattagttcactttattttttcttcttcagtagaaaatcagtctgtaagaggagagctttcttcataagagaaatcacccacctttcccccacagcctaaactagtgtccgtcagttctcactgtggagggatcaccttggtgattctttacagttctttgaaagggatcatgtgttttatttgtaagatctagttaaagaatcggtgtatgtgctgtttcttactgtgagccagtaccttgctgtattagacacgtatggagctctggtgcaagggactaccatacaagagaggtcttggtcaaaaactgtgccaagtcttacaattttgttatatttt

SEQ ID NO: 49121 - DNA, 1771 bp, Bovine  19866880530027
  misc_feature (1)..(1): n is a, c, g, or t
nggcttccctagcagttcagacagtaaagagtctgcctgtagtgtgggagacccgggttcaaaccctgggttgggaagatcccctggagaaggaaatggtaacccactccagtatccttgcctggaaaattccctggatgaggagccgggcgtgctatagttcatggagttgcaaagagtcggacatgactgagcgacttcactgtcacttttctggtattcttgcctggagaattccatggatagaggagccttctgggctatagtccacagggtccaaagagttggacataactgagcaattgaaacaaaagaggctttgttgtccaccaccgatgcgtgttcagagtaagcagggaatgttccaggtccatggaccagctttcaatccagtctctgtctccaaaggagcaatttggcatcagggaacaaaagtcagaaacttacaataggaattcatgccgctaagatcccagggaacatggggtccgatactaaaaaatatgaggaaagcaaggcgttttaaaaatgctttttagagcaggtaagagacacaaagagcccctcactgctttacacttgtaaggagacccctgctggactcccaattctaatctgcagtaaaaagccacagggcttcttgttcccttgacttgctttcttgtttcaccagagcctctggcaggaaaactcaaaccagagaggcgccttagaattggcttcagcagggacttctctgtcaatcagctgctgagacgaaacataaaggtggggacatgacacagtttgtttttgatttctctgtcttctgatgcgatcgtcctagagcaccatggccatcagctgtgtactcacagctcccttcggtacagagctctggaaaattaaaccgtagaatcagattgaaataatgctaatggtggtgatgagaacacagaggcctggggggactggggtcctggctgagctcacagaggcagggtaaatggggtgggtcatctcgtttaacaatggaaaaatggtgtcatgcgcacggatctatttgttccttcctcttctatcacctgtcttgtagttgtttaagtgcatttattaagctcacatagtttaaaagtccaggggtcttttggtttcaggtagggctagatccaggaaattcaaactacgccattagagtttagtctgtgtgtgtctgtttcctccccactccccacctttctacctgtatctctcgcttacttattcatgaagaagttaaaaattaaaaggtctcaatgacaataacatcccacactgaggtacagagctaggtgggggttagtcaaagaagatatgccgaaggaggaagtatctgagtttgcgattgtaacccccagggaggagagtgatctaaagaggtattgttcaacctgtggtctctgaacacccacccacaacacccatctgatgtgcttgttggtcatgctgcagtttcctgggcctcgtcccagaccagcagaatgagattcctggaggggcgaggccctgctatgcgttccttcagcatgttccatctggatgttgtgtgtgttccagtttaaagcaaccttcctgagtcgtgtacacagaccaccctgacttggcactgagttgtgctgaaggcagacagcctcctgaggccctaaattatggcctcctctttttcatgcagcagtgcagaaagcatggatatcttgtgaagagcccactctaggtaggcatagtagatatgaaatgcacaggaagtttccat

SEQ ID NO: 49122 - DNA, 1367 bp, Bovine  19866880569320
  misc_feature (1)..(1): n is a, c, g, or t
naatttctcctgcattcttatgtcgtatttcccaaacagcatgttgtgagacactagttctgtggcatgttagatgttctccagaagcaacaatttccatgataaataatttcagggaaaattgcataatgtattaaaagttctaaaagatcttgcaaaaagagaacctttccacttttctttcagctaacattttccttaatcatttcaatacaacctatatagttatttttttctcaaatatcaatcaacaaatttggggaatctaccattctgtagaaaactttggcaatgctgctttgccagtagtaacatgcaatttccatccctgtctcttcagtttaaaaatgtgtaattgatctttgtcttattttaagttaattgattcaacaagcattttgtggtctgttactatgtgccacatctgaactagaggattcgagagcttctctaggctttgttttccagctcagcacttcagtcgtgtccaactcttgtgaccccatggactggtgcccatcaggcttacctgtccatgggattctccaggcaagaatattgcagtgggttgctataccctcctccaggggatcttcctgactcagggatcaaacccatgtctcttaatctcctgcattggcaggtgagttctttatcactagtgctacctgggaagtcccagatcttctattaccctggggcaaaattgctgcctttagcttattgctgctctccatgagttccctcactcaactttaggctccatgctttaactagggtatacatgaaatagggcacaaaagccttctctttcaaagcattgtcacctgtttgtcagctcactgtcaaactggctccagggagaaagatagaaatagtttggttccatcaatgagtgctagaagcatatattaaaagttcccagtattaatttctttgtaaaatatttttttcaagaatttgtatattgcaaaatacaatataacattcatatcaagtgatatagggattgctttaagcaaaacttgttctctgtataatgaatactgccataaaaatacatattcatttcctgatcacaaatcatagcaatttaagccatcttccctctagctcaactatgaggagaggaaaatgtgtgtgagccccctcctctttggacagagatgcgttcttctctggaaggaagcttctctgcatgccaggttgcacggagaaaagcctttctctccagggcttctcatgagggctctgggggtgctggcgaggccatcatttgaaataccaccaaggaggtactgaaagatcaccacacagcagggaagtagcctatttttcaaacacaggtcagcataattctctcaaaa

SEQ ID NO: 49123 - DNA, 1717 bp, Bovine  19866880644256
  misc_feature (1)..(1): n is a, c, g, or t
nacatttgtgttgtctgccaacacgtttccctcactttccttttgagtatttggcgcttcctcatcagcattctgggtgatttgaatagcagtccgtctttgtccccaagggtagaataggggacccaggtcaaggtcaggttgaagatctcatactcctggtcacagtgattggggtttaggagtggcagcctaagctagtaaaataagcgggaacctaaaaacttatacaggagctactgaaattgaaaaaaaaaaaaagcctattctgcttgatcccattgaactagaacctggaaaaataagaaattcgagttggtagctattttgctaccctcagagagacagtcattggggtcaacacagatatcagatgaagaaaaactgagttctttttatgtcgtttcagccacaaatacagccacagctcagttaagaccttccctggacatttcaactatgtgagctaaaaaaaagagtgccttttcccccataatctagattgaattgagtttttttgtatccacgtcataatgaatacaggcagactccactttgcatgatagcgcaggacaataaaaatgaccttgcaagctgaaaccatgcagtgatcttaatagtcaataagaagaattacagttggtctgtggccttaaaagagctttcctactggctcagatggagaaggcaatggcaccccactccagtactcttgcctggaaaatcccatggaaggagaagcctggtaggttgcagtccatggggtcgctaagagtcggacacgactgagtgacttcactttcacgtttcactttcatgcactggagaaggaaatggcaacccactccagtgttcttgcctggagaatcccagggacgggggagcctggtgagctgccatctatggggtcgcacagagtcggacatgactgaatcgacttggcagcagcagcagtggctcagatggtaaagaatctacctgcaatgtcggcgacctgggtttgatccttggtttggggagattcccctagaggagggcatggtaacccattccagtattcttacctggagaattccatggacagaggatcctggcaggctacagtctatggagtcacaagagttgtacataactgagctactatgtacacaaacacacaaaacatattttaatcaaaacattaaaaatatttgggggaaataaaagaattagttatataatatttagtacacagaaatttaaaacattagaaacattaagaattgaagtgttttatttttttatgcaaaacttatcaaaaggagtttaaatagtctttgctttattattataacttaagatacagagtgagtatcctttctatgccttggcgagtatcatactctttactaagtttggattagcttctaacatttcagcttttgcactttcagtgctgtgaaatatctccataacttcttttggactgaagcatttttgtttgtttttgccaacatcacttcctctgggacatcattctttttgtcatagccactttcctcatttatgttaatgtgctccctttatgaaatttctgtggctgcatgtctagagtctctggaactttgacagtgtcaacagtgactctgtttaccttcagcttgaattctgcaaaatcatgccattttctgaaacaatgaaatcagcctttactgtcagtaaaaggttctttttcagt

SEQ ID NO: 49124 - DNA, 3115 bp, Bovine  19866880667941
  misc_feature (1)..(1): n is a, c, g, or t
nctgctgacttctggctgtgtcttcacttgtggaaggagctaagagtaactctgttgggcctcttttataagggctttaatctcattaatctcatttctgagagctctgcccttaagacctagtacatgtgtgctcagtcatgtctgagtctttgtaaccccatggactgtaggctcctctgtccatgggatcctccaggcaagaatacttgagtgggttgccatttcctcctccaggggatcttctcaacccagggattgaacctgggtctcctacattgtaggtgggttctttaccactgtgccacgtgggaagcctctttaagacttaactatctcccaaaggcccacctcgtaataggatcacactgggcactagaatttcaacatatgaatttggaggcaacacaaacattctgaccatacaatagtatagactggcctctgatgatgaagaaagagagaaataagaatcagtagattctggtcatcgcctgcttgactggatgattattgagacctgattctacatctagcttcccttcttcatgcagcacctaaagccctagtaagggccaagccagcatccctatggtagccatcaacatgacatcaatcaccaggtatcatctgtctggatcataaaggtgtcttaccttgggaccaagactgagggatgagagatgggattggggtctctgccatcttctttgcctctgaaatgaacccacatagatatcctggcccccattctttaaaggagctgagtatacaacttgacccgagtagatggatcagagaagactagaatgaaccatttcccttacttctttccttttctgggtaacttgagtcccctctatgtttctgtttctgagcctggtttgattctgatcctgaccttgggcatggactccgcattgaatagtattctgaaaggtcagtggatctacttatgctctcttaggcacactgagtctgccccagagacatagagttcttctattttttaacagctcttttcctattaagaagtgcttccttgtatgtaacctcatgcttctgtactgctgtttgtggaggcaaaaaacagctggatgttatcggtgattgagtctccagtatgatcaaaagattcttggtctaaacttttctaggttgaaaactccagtcttaacctatttttttgtaagtcttattttcctccttttccaccatattgtaagcattccaagaaaaagcttccttaaatttgttaatcactagaatcatcttgagacctttctaaatatgccaaattgcacatcattctccagacttccggtacaagaattacagggcctggggtggtttgggggagaaggcaatggcaccccactccagtactcttgcctggaaaatcccatggacagaggaagcctggtaggctgaggtccacggggtcgctaatagtcggacacgactgagcgacttcactttcacttttcactttcatgcattggagaaggaaatggcaacccactccagtgttcttgcctggagaatcccagggacgggggagcctggtgggctgccgtctgtggggtctcacagagtcggacacaactgaagcgatttagcagcagcaacagatactctctaaagcaccttcaagatttaagatcctctgtgcttgttagtttcaggtaaagacagcagctaaagtaagaagtggtacttatagtacagaaattaagcatgcctctggggtctcagcttccctggtggctcagctggtaaagaatctgcctgcaatgcgggagacctgggttcgattcctggattggaaagatcccctggagaaggggaaggctacccactccagtattctggcctggagaattccatggactgtatagagtccgcaaagtgccagacacaactgaacgactttcactttcactttcgggggtctcaaccctagttcattacttacagttggatgactttgggcaagtttctcaagctcccattttcatttgcttcctatgtccttggaaaccatgtagaagatttgttgcaaaaatcacatgctcacaaattcccatcattagttcagcacctgactaggtaggatttattggtctccagctaggcagaagtgactcattttaggcaactcaatgaaaaataaaatgtattgagaggatgcaggtaagtgttggaatcaatggaagtctgaactgtcaagtttccagagcagtggcctaattttaacacgcataaaaataacctggggtcttgttgaatgcataagctaaatctagactgtagcctgaaagattctgcatttctaccaaaatcccagctgaggaaatcctgctggtccgcttcgaaagacagaagataaaggagctccagggacctgagaatgaacaagtgataggatattattccctttcagacaagggcatcgccgtctgctcggattctctttcgtcaccaagctcagtattaactcgtctgggagaatccactggcctcagattggctcaccatgctgccacatactctgagttactagaggatagggggtagaccgacagttccactaagctggtctgcaccaggggaggtcagagtccctaaagcaatagttctcaaaatgtggtccccaggccagcagtaaatacaaattctaaaaagccatcacaactctgttatcaaaagaagaaggaacaaatgttggaagatactatgaatcgaattgtgtgctcctaaaattcatatatcaaaaccgtaacctccaatgtgactgtatttggagacagggcctgtgaggcggtgataagagttaaatgaggtcatcagggtagggttctaattagatagggtctgtgtgctctaatcagagggcacatcagagatttttccaccatgtgaagacccagcaagaaagtggctgacggcaagccaggaggtaaaccagcaggaaacgaatgggccagaacgttgagcttgggattttcagcctccagaaccacgagaggtaaatctgtttattaagtcacgcaacatgtgattttggttgtagcagccgatcagactaatacagaagtaatatattcaggaagat

SEQ ID NO: 49125 - DNA, 847 bp, Bovine  19866880671169
  misc_feature (1)..(1): n is a, c, g, or t
ntaatgtaatttggggaaaaaatttatgcacacaccccacatatatatgtgtattgatagttcccagaaaacctactattttacaagtattgttgattagcagtgagatgtgagtaaaaaatatgtgtaaacaaattagtaaataatcggtacatgtggtactgagaaatggcacaagctacgtgagaggtgcatgactatattggaagggaatgtgaagaggggatgtatgtatgtgtacagctgattcattttgctgtacggtggaaataacccattgtaaagcaactatattaaaaaaaaattcttctgtttgtccaaaacaaggcaaaaaagatttagaaaacggacctgtctattgatggtaacatacactgagttagtggatgagaaaggaagagaggtgggtggagtggttactcaaaaatacacttacaaaatattttactttccatttatcatttgggaccagttgaattcacagttatattattctcgggagctgtgagggtgcattaagaataataaggacattggctaaatgctttaggcattatggagccataatacaccacatgtcttattgttaattcatgttgctagcccactcttttaatagcagccaggagccataatgacacacgctgtgaatatatattaaaaccatccacacaagttgctctagtggtatcggttatttggatgttattttgggatccagaaaggtttggaggcagctagacagaaatggcatctattgggggtttttcttttctcataatgctgtgaagaaagtgccaactctaaatgcttaatctgtgcttcttccatctgtgctctggcccgg

SEQ ID NO: 49126 - DNA, 860 bp, Bovine  19866880671193
  misc_feature (1)..(1): n is a, c, g, or t
ntggaggaaagttaatttttccttttgttaatctaatggccacaggcagcgccagtgctattgcagcaaaagtctggaacgactgtcaagctccctggtgatccaataaatgcagtggcaaataaaacaacttccctggaaggcacagggatttaaataatttccgcagatggtctctgcttctctcagtgaagagagaaaaaggctaattgcaacctaatcagaccacactgacatccaggcaaatccattcttttgatcctttcacttttcttctctgaaaactagaaggaaaaataaacagtatcttccagctgcagggaagtactacaggtttggggtttcagaaagtgatgatgtgttttcctctccctgggaagctattctattccctggcctcctttccttatcctttcttatagaactgctttgtaggctgggactcttaactagaacaaagactactatatgtaaaatgaatgaaagctataggctacctggttctactgaaggaaactcagaatctgtcatatctgtaactcaagtaatttaaggaatgtgaaacagagaagcttgcgtgcagccaagatgttccaagtgcactggggtgataagcccagatgaagctcttataaccatgtctcttgctccaaagccctttatgaaggtttgagatgttccagagagagccaccaggtactggtcaaaagcctgtccaggaacctgcactttagactccaagaaacgtgatgagaaagcagcagaggcagctggaatatgacactgactccagagttaacgagtgttagtttacttgagtgttacatccatcttttaaaaatattcttcttactgcttaa

SEQ ID NO: 49127 - DNA, 2224 bp, Bovine  19866880677510
  misc_feature (1)..(1): n is a, c, g, or t
ntggagacttcagggctcctggccttgcctccatcctgcagtgtggcctggagcaagtcgcacagcctttctgggcgacatttttctgcgtctccggggacactggctcactgggttctctctactctaacaagacaacacgtacaagggtatgatcctcaggaagtattcaaaattgccctttaggaatctttcagttccaaaattcctcattctctgtttattatctatgtgattggcaaagtgaaaataatgggagaatggtacttagagttaagaaggcagcaggcaggccatgtgggtactagaagaaatgcactgcatttgacattacagaagcgagttctaatgtctttagttatgtctgactctttgcgaccccatgaactgtagcctaccaggctcctctgtccatggccattctccaggcaagaatactagagtgggttgccatgccctcctccaggggatcttcccaacccagggatcaaacccaggtctcccgcattgcaggtggattctttaccatctgagtcaccagggaagcccatgtaccctgggtttctagctgactgatactgaacaatctggtgttcctccctgggcctctgacgtcttgttaatgcaacagaaggactgggtgataggatgttggagttacgtccaagatcaagaagtccatgcttcctttgtgccgttggctcagacctgaattgtgtataacagtcagtctttccctgaattgtgtataacagtcagtctttccctgaattgtgtataacagtcagtctttccctgttacctgacaagctgagatgtcacttgtggtcacataggtgaaagcaccgtaacatgtaggcatgccctctatttcatggagttataatgccatcgtgatgtagtattactaaaaaaaaagaaacagaatttttagtcctcatatattccaccatctcttgaaatacagagactaggacttctgtacatctggtaggcatcatgatcgcatgaagatgtataattagaacaagacactgagaccacagtatttctgtggttgcttcctgaacaagcatgtttctaaaaacatccatgggaaattctgatgtggaatcagtgttgagaagccctgatgggtaccttttatatataggaagtccttggattctagcaatttctctccagacttcggggttcttctgtgactcactagttctataatcatgagtaagttattgaatctctcagtgcttgattcctcatctcaaaagcggggataggaacctctccttcaacttgctggacagattagatgagatactggctgtcttttgaaagctgggtaccatgtagcaaatgctagggtaactattatatttggtcgggaaagtcccgatcctacagaagtaattgggccaggcatgtttggggtatgttttggggtatcccagattcaacagataacaagttaaaagacctttaatattcctaattctcactgaaatttgttactctgccatcattctggccatatcattagatttagtgtataattgaacatgtttgatttaataaattagttgaatgggtgatcattatgatttgggtttcatttgagtccttgaggcaatatttgctgatataaaaatattaggtaatttggaagaattattagaaagattaaaatattaatatgtccccttatttcaaatttataatctcactaattataaatatccatctttccttgtatgtcacttgtaatttttgatttattgcacacaatttatagaaatgtgtgtgtgtttatttgattgggtgtttttatttcagttcaataacttaatcatttttttaagatttacataaatgcctgaaattgatacaaggaagagaattgccacctaattcaaatgtaacagtcaggatatacagtctttctcccataatagttattggacaaggcgtaacacaagaatttaaatcaaagtaaaaagcattatttttactgtgcacctgttaagatgcttctttattggagactatttgtgatatgtttaaaagtacagaagaaaatttatctctagttcgccactttttgtcacttgctattgcttcatttgcgtttacttgcggcactcaaattttatcttgaggttttgtcctgaaagtactttctcagccaccattcgctcgcagtgatatttccaccatctccccgcca

SEQ ID NO: 49128 - DNA, 1140 bp, Bovine  19866880713273
  misc_feature (1)..(1): n is a, c, g, or t
ngagacagctggatttcgatctggctaccctctagaagtagatactgaacgtgagctctccttattcccaaactgggtagaatataaatgtgtacatggtaaagtgctattaaattatttatgttgtttgtggttttccagcagctctcccatgaattgcagatctttagcattactttctgatctatactagacgaaaaagcttttcacagactttttgaagtgattctcacagcagagtgtatatgtgggttggttttgttttttttttttttttaaatctctcattgggaatgatccttaaatatttctttcagccgctgagtgtacttcattcctcttctactgaaattcttctgcaactcttaacacctaagagcatttttatggcattgtcattatgctgtattcttatgcctacgctggcacattatggatagatacttctgcgtggcaataagtttctttgtcagtactctcctcaccatacttatttaaagttcacttgcttctgtatatttctgggaccataccaagaatactgaattttcataacaattacttagagatgttgtaagagttagaaatgattccatattgttaaggaagaggaaaaagagtcttggaaatagtctccttttgccctaattagagaatggcagatcgtttgtttgtaggctgatattcttccttccctcgtggcagctgttgtcgctcattgttgttcagttgctaaatcctgtctttgtgaccctatgaactgcagcacatcagttttctctgtccatcactgaactagtaaatctccccattcttccctccttatccctaccaaggcctcagagtcttcaacagactgctctaagcagctgcacaggttacttggagttagcagaagagaggaaacccatttcctaaacttggtgttgtgctaggagaacaggcgatgagcagagcccccaccccgctggctggctggtcctcgtcctagttccaaagacacagtgacgttgctggttggcttggagaagggggaagagctttgatggctcacactggcagttaaatgctctagtttataagtgacataatcacttttgctcacgactccctggcggaattccttccactttacccaac

SEQ ID NO: 49129 - DNA, 2357 bp, Bovine  19866880791110
  misc_feature (1)..(1): n is a, c, g, or t
naccccatccctctggcaatggttcttggttcagcaatgggcctgtgattcaagttgggcctgtgattcaagttaggccagagttctctgagcatatctgagaaaagcagtctttccactgtaagttagtgagatgggttcaatccctgggccagaagatcccttggaggaggaaatggcaacccactccagtattcttgcctggaacattccatggacagaggagcctggcaggctacagcccatgaggtcacagagtgtgggacatgactgagcaatataagcctcaagctgctggcatttataacaccttccttggggagaggccccctgaaagatgcagaggcacaaagcccaggtgacattctgtgcccctagatccagccatgctctatcaactcttccattagactttctgctacatgagctaatccattctttctcttgcccttttaacagcctgagctggttttggtcacgtgtaatcgaaggagctcttcatttcctaaggctgtagtctgctgaccatggcttcttgagagctggcctggctctttcccgtagcaccagaagcctggtacatgccctgccctcgtgaaagcctgctcaatgaacacacttccagaccacacccttccagggcaaggacatttccatgcagtcaggctgggggggtggaggggtgggttatcaaacaggagctgcctgggagtggggctttataatattttggatcaaacgctcatataataaggaagcgatcacatggacactcagcattggaagtgtccaggtcaaccggaagagaaggagaagggcattgagccagacaaggaggatcttagaggagcttagaataagacagtaggagctgggcagccaccaggtggatttcgcatttctgcattcctacagtgactaagtcttaatcattatgacagtatttctgcggcaaatggaattaacaaccccgcgtgctttggaaatgttaaattgttaataaatcccttagagcttggcttcttctttgaactccagtactggttcagggccaaacataggtgtgttaaaccatctcactttgaactggtaactcagggcttctcgatgatgcctaggagagagtcccttccactgtggggagacacagatggtactgatatttgattcttgtttttaaatctaaagcctggccatatctggcaaaagaagtcaagaaaacatgactttccaacctgtttggaaggtgagggtgctaggtattccttcaccgtgatccaaaaaatctacactatagcaaagcttcgcccagatttgggtttcaatcctggatttggggcctgaaaggccttaaacagataacttaatgcccatgtgccccggtggtctcatgtgtaaaacaggactgcagcacttccttgcagatattttacaaagactacatgagactgctgatgttaaatgctcagtaagacagtaagtccacaataagagctctaagtacagcagcaatgactgtgatgacaatgatcaacatcatttcgaaactttaagccagactttgcagtgctgaacgcactagtgatggctgaacaccctgtgtgttttccacctgccaccgtttctccaggcacggcccacaccagcaccatgaacgtcagagtccctttccttttgttcttatcctctgttgaaggtcatgaactctcgagcttctgacggaggctgagagaggagctccctctctcaagctccaaaagcaccttgcttgctccacctgaacccaccacacctctcaactactgccccatgatgccgatttacttgcttctagcatccgaagaacggatgcttttgaactgtggtgttggagaagactcttgagagtcccttggactgcaaggagatccaaccagcccattctgaaggagatcagccctggggtttctttggaaggaatgatgctaaactgaaactccagtactttggccacctcatgcgaagagttgactcactggaaaagattctgatgctgggagggattgggggcaggaggagaaggggacggcagaggacgagatggctggatggcatcactgactcgatggacgtgagtctgggtgaactccgggagttggtgatggacagggaggcctggcatgctgcgattcatggggtcgcaacgagtcgacatgactgagcgactgaactgaactgaactgagcattttcctgattaaatggaggttttggggacttccctgttggcacagtgcataagaatccacctgccaatgcaggggacatgggttcaatccctgattcgggaagacgccacatgacgtggagcaacgaagc

SEQ ID NO: 49130 - DNA, 1730 bp, Bovine  19866880792873
  misc_feature (1)..(1): n is a, c, g, or t
naactatcgtttatgagatggagtccatcatgtggggaggacagacggcagctggctacttaattccaaatgtttccacaaaaagtgattttggatatggggaattatttcaagctaccttcacataaagagccatcatcagtggtccaaataaacacaagtaattaatctttgtcaccttcacagtacacttcatttctttagagcacttttcaaagtttatagtaattttttaaaatctgctcactattccttctttttttttggcaggggtaggaggagggtggtggtggattgtgtccccaacacacaacaaactctgggtaggaagaaactctgactctttggtccagttttgcatgtccactgtctgtcagagttccggctcaataagtgttgaatgaatacatgtgcagatggcatcctgaatgggtggcagagtggaaggaggaaaggatggaagccaggaagccaggaagctagcaagaagggccttctgggtaacagatcccaataatgaaagcaagtctcgaggatgacaaaatctcagtctcattacactacaggagaagtaaagactcgcccacctacagatgcaggaaaacaacaaaaatgggtttatttaaacaagtgggatagcaatagaaaaaaccaatactaatagcagtcagcaattacgcagcacatgctgtgtgccgggtgctattctaaatgctttatatacgtaaactcttaattcttaatgaggaaaaagtgagtattctttcttgatccagaggcaaaattatatcaatcaggggaatctgcccatggccatgcatggcccacataactaacacacacacacacacccatccacccacacacacacacacacacccacccacccacccacccaatggtccatgatcacctggcagcatttaattctacaagcaaatttaacccctcactaagtgtctagccaagaagactacctagttttcaggtctggaaatctgaagaatcaatctgcaatttgtttcctgcaaaaatgtcattgccttcttcatacccatcactggagaaattacttttcagacccttctacggcttgggaataagtaagccctaatgagttcaaaagttggtaatgacactgctaatttggaggcttgtctggcagccagtcaggctcccttcttcactggaaaaaacaggattatcaagtgcgctagaagaactgtctccccatgattgatgggaagaaaaagtaatcacctttgaagtgccacaacatataatacctctgcagtgttctctttcttcttctgacacccatgagtaattgaagggaagggagcttcttagaatgaccaatgaagtgaagatgacaaccctctctctgccatctaccaagaaactgacacgctaaagtcttagacagtggagagctgatatgatgtacagtgtctttgatgggctcctctgatgcttggctcagcgtgtacctgctaccaatcagactgcctaggctttgggtaaaacatagatccaaagatataagagttactgcttctttggaggtcaaaggcctgggacctgttgtgagaatagcagcttgagggtgaaggggaaagtcctcagggtacaagtgaatgaaatccatgaggaaagcaagatggaacaggtaagaaatgctgcatgctacttcaaaatgttatctcagcatactcacatactcagctatt

SEQ ID NO: 49131 - DNA, 1937 bp, Bovine  19866880819228
  misc_feature (1)..(1): n is a, c, g, or t
naaaaaggactgcagcatgattactactgctcattctgatccctagtaggcatacacaccctcccctgagtccccttcctgaatgctcctccctccgttatttctaggctctggtcacaactgttgtttccctttcttgcttccttccagcctgggctctgtttctcattttttcaatgtcttcttacctgtagctacagagcataaccgcctggagaaggaaatggcaacccactctagtattcttgcctgggaaatcccatggatagaggagcctggcgggttactgtccttgggtctcaaaagagttgaacatgactgaacacatacacacacacacacacacacacacacgctttatgaaacattttgtaaaaggaaaaattgtacatttttataatatttgtatgagtaaatataatgttctgaaaataaaagctaaaaaaaaaaaaaaaaagctactaagcttaccatgttgttttgccagccatgcaagcatcacgataaaaggcgacaaagcacaggtatagaactggactttgatttttatatttatttattgaccatcctgagtggcattgtgagatcctagttcaccgaccagttggaacccacacccccttggaagcatggagtcttaaccactggaacacaaaggtatttgagagtgaggagaggagatttgggggcaggcagttcagctgtggagctgtggagaggtctgccttcctccaagggctgctgaggtggcaagaaaccagaggtctttcctaggtcctgagatccaaaggttcagtcatttctcagagaattcccagtggtgctaagaaagtgatgtgtacctctgtctcggttggagacttagcagggggctttggaagaagcccttggcagccagtaattatgaaaataaaagtctaatagtataaaagacagtgattagattagtgacacttaaaatcattgaatagtgaaaagagggctgagtttgtagagtcacaataagcttgttgcttagaagtcatgaagggaagtcagctgtgtgtttagcttttacattagtaaatgaaaactctcccattagtacctcaggaaagatgtgtttctattatgaaacaaagcacggattgattatgcactgcatagatgctgtataatacagagctcagagagcagattccggtgcctgacacacctgactgaaccctgcttctgctgtttcctagctatgtgactgtcttagcttgggctgctataataaaatactatgggttggtgacttaagcgacagacatttatttctcacaactctggaggccggacatcctgagatcagtgtggtgacttctggtgaggcccgtcttcctggtttgcagatggacaccttcttgctatgtcctcacatggcagagagtgagcactctgctcttctcttcttgtgatgagaacgcagatcccatcgtgagggcaccatgacctaatctgattatggcctcttggccccatttctaaataccatcccattgggggttatggcttcaacatatggatttaggagggggtgcagacattctatccataacaatgaccttgagcaaatacttaagctctttatacctaatcttctgcaaaacaggtaagtacctcctcaaatggggcgtttcaataaagtgcttgcccagggcctgccacagagctagtgcttagtgaacatcagctctccccaaggaactctgctgggttatgtctgcctgaagggaacttgaatcccaggaggagggtctcgcttcttttgtaatgaactgtttcctcaaggaaaagatccttttggatgaaaaactaactatgtgaacatgaatgtgtgtgtgtcttaatagccaaaggttaactgtaatgtaatttggggaaaaaatttatgtacacacacacatatatat

SEQ ID NO: 49132 - DNA, 766 bp, Bovine  19866880868805
  misc_feature (1)..(1): n is a, c, g, or t
ntagcttgtgacatcttcatatgtttcaatactggttataattcagtctctctttgttgtctccccctccgcccccccaacccccacccccgcaaaactgggtggacagaaagaaggtctcacatctgcagatctgagtcagacttcaggctggtggcgatgagtcactttttgcatctttacactgacgctgtgaagacgggcacatgatcatccccatttgataggtgagacaactgaagtgaggaaacttgcccagcgtttgagtgctagtgagtgtcagagccaggagaggatgcaggtgagctgagtcatggggacggcggaagcccagccagggtcaggttcaaggtcagcacttggaagtggggtggggcgaagactggctcttctgtggcctgcagatcctagatctctgctctcatcaccctttacttgccaagcccagctaggaacagcttggactatgacagccagagcagtaaattacgtggactgctcctctgtttgacaagaattacccaggaatcaaggagaaggaaccctcagataggcagaaattctcgaacggtccccctgagaaatagcaacgccttgccggtgagctcgctgtgcacatttgctgctctctggatgggtcccagttgggccaacttctgttcctggctgtttgtctgtatcctggcagctcagaggtgtgatttctccaaatgccacattcctgctgagcccacgggatgaattgtgcaatttcaggtgagcgcat

SEQ ID NO: 49133 - DNA, 929 bp, Bovine  19866880884238
  misc_feature (1)..(1): n is a, c, g, or t
ntatcattttagacagccttatgtgcattttataagaatggatgtttcctataagcttatggggttgctcttgagcattaaataagaatctaagtttcacagggcctggcaaagggtactcagtcagagttagatcctagcattgggttgtccaaaaagttcatctgggtttttccgtaagatgttacagaaaaccccaagcaaactttttagccagtccaatagttagcagtgaactacaaattagtaggtacaattgtatgattctagagataagttccatacagcacttggtagaagtctaatatgcaagttggaccctagacttcaaggtctcctcttcatccccagttggcaaagagtcagcacctgttcgtggtgaactggggatggagagaggaccttgactcatgatgtagctctggcatttctgaacggcgtgctgcgagatgagtccctctgagcctctcttttcccttctgcaagacgtgaatggttctaccagcctcccaggatccttgggaatttcatgagcacatgccaggagagttctggggacagaggaagtcagcaaatgttgttctctcatctccccacctctctccccactccgttttctctcccaggacctctccactcctctcctgtttgggcttacccctcagctactggagtattcagaccacactcacacagtcctcccagttatattttagaccccacctcttttcctgagtaccactccgatcctgatcctggagttgatgagtattgatggtgacgtttgtgttcatctgtggcccaagaacgggtgcacgtgttgcctgcctcaggttaacagctctgttgaagacaggaagcaaattacctgtttgaaggtggtcctttgcacctgaaattcattatagatttaaagccattttgaaaat

SEQ ID NO: 49134 - DNA, 1040 bp, Bovine  19866880936155
  misc_feature (1)..(1): n is a, c, g, or t
ncggctgtagtccatggagtcacatagagttaaacccaacttagcaactgaacaacagcaaatgtggctactaatcatttttaattgtgtacgtaactcatagtctatctatacggggcagtcttgctttagaatgcaacgtgcaaatttcagactgggggcactgaagatagatgtaacccgatagtaacaaaagcacacattgtggtcacccaagctgcaattacaaatgccaggctatgtttccagggttctatgtgccattctctgaagctggcaactcagaggcctattgttcatctctgctcgtgtacaagacacgatagttttaaagactgagccctgctccaagctaaggggtaatgggatttataaaggttatttgaataagttcatctttcttcgtttaatgaatgacagatgagaactgaaaaacagcaaaggccttttcaaatgctttggggctttaaaatggtgcttttatcttcctttccaccctaattcttgcttattttgcttttcttctttaaaagagagatcaatcaaaatatttaggggctttcctctttgaggccgttgtaatttatattgatagaaatgtgtcagcgtttaatccatatctttcttctttttgctgtatttatccatttctgctcagcacttattcctcctataattttttcctatccccattccccacactctcaactctccaagtaaaatggatttgaaaaaatttcttatgggtgatgtttatttaaaaaaatatttaaaattaaaaaaaaaaacttctttattaaaaatatgtatttatatatttatttggctgtcccaagtcttggttgtggcatgtggcaaccagttccctgatcagggactgaaaccagattccctgcattgggagtaaggaaccccagtgttggttcagcccttgaaccaacagggagtccccttatgggagatcttgatagttggctttagtgggtcataagctccaaagttatcaaaactttttcagacactcctcgtaagagactgtt

SEQ ID NO: 49135 - DNA, 2921 bp, Bovine  19866880988788
  misc_feature (1)..(1): n is a, c, g, or t
nctcctttgtccatgggattgtccaggcaagaacactagagtgggttgccatttcctactccagaggatctgcccgacctagggatcaaactcgtgtctcttacatcccctgcatcggcaggcaggttctttatcactaatgccacgtggtaagtccagttcaaaaccccttctgcagttctaagcagaagcaggtcatctctgcagagacaatccagccacattatacttactgtgtcagagctgacctatatgaaaaaagtggcacccagcaaaggttaactaaaatatatataatgactcatttctgcaagatgtgactttacatggaaagaagaaagtctaagaaacagtgtccaatgggccttctagactgccggtagttgcattcaccacccttctatataacgatccctggtgtgtaatagaaaaagatgtggtccagtggctaatgaaaccagaacagtacaaagaacacatacactttaatttattgtccctctggtgcatctggattcttatccaaaaaacctctttaattagagtgctctcaggtgggaatgtgtctgtctcttcagtagcacatggataataagaaaaaggcaaacaacctctttgtttcttaccagcactctattctctaatcatctttcctaaattcagctcaggcttccgcctgagttcatttcatcttcatcagcattgccattttctatctcatatttcaaagagtgattggaaagcagatatttaatcagaaaagcttgagattcattttttggacacccaatctgtcttcagaggctttgagacagacaaaattgccgttgactacaaaagcaacccaagtctgtgtccttgagaaacactgaaacctgaaggctttagagatagccagatctggttcaaattccaacttaatcatttattagctgtttgatcttgggtgacttgcccaactctgcagagcttcagttttctcttctgcaagatggaggtaactccctaaaatgtatatttgttcaggctgcttcatgcatttgtccttatatatgcattggcccttacgtatataagagaaaccagcttgagctaacttgggcaaaagggggttctcttacaaggagaaaattaaggcctcagagaaatagggttaactgtggactgtctgaacgatggaagggagctccagaatatgctgtcaccctccatggagaccaaggccaggagggtatccaggcctcaggaaaggttgacactgggcatgggatgctgccaggaactcaaccagtgctctttccccatctcttgactgtttctctctgtgaatctacatcatctttccccacttttttggcttctcatttagctccaggctgctagcagaagtcggcattaccagagtttctgaatgtagctgctccctgtccagccacatgaagaagattccccactgatttctgttgatctcaattcccaatcacaaggaaggaattctgattggtccagctggggtaatatggtacccaagtttgctctgatctgatgaggttgggacagagggtcattctgtacaggatggctcctgtggaggagatctactgcttttgatagcaaggttagtttaagggcaaccagtgaccttgaaggacacccctaaaatgtattcactaccttttgtaagaatatatgagctgacacagtacctggaaaggaataggcattgaataaagataactagaatgtcctagtcaataagagtttttatgagatgaatttaaattgaccttccagttttcatccacataagtttcttgttttctgagtgggataatgcaattggtaatttgaatcccaaaatttaccactgagatcttgacattcaaaaaaaaaaaaaaaaaaaaaattctattcagcagcccaaccctggagacttacagtgaggacttctgctctgccctccagaccaggtacagtgggggctgctctgccagtcctggagggtggaccgtggctgctcaccatcaccctagtgagaatggggactctgtggcctttcctgggaccacagtgtacgtaccccagaaggcatcttactacagacacaagatgactctgctttgtccagatgctttctgattagaaggccccaaatatcatgcacatgaaagagaaaagcaaaaattgggaagtaaaactacaaatgctttccaattgcagagttgagcatcaggcctgatattaagccttttggtcttcagtgaggttatttatgtgtgtatgtctcttcagtcgcatctgactctttgcaaccttagggatcttaacccttcaggctcctctctttatgggattcttcaggcaagaatactggagtgggttgccataccttcctccaggggattttcctgacccggagatggaacccatgtctcttatgtctcctgcattgtcaggagatttctttaccattagcgccacctgggaaggtttataatgtaatatagagtcctttggggatggaggaagctaatggtctgtctgactgctgaggaatcctaagtgagactttttcttacaaacccaaaggctcttttataagctatgtgttctcaggaatccctgggatgcttccctaaaactaaaacaacactctaggctacagactaaggctccaactaagcctatctatttgatcagttatgacttctagccagagaaatgactcgtctcctgaaagagtgtttctcaaaagatccattgaaagtgcattttgctatgatttcttccttctctgtttcattcgtctccctccttcaagctcttcctaacttctgccagtgaatctctctctgtcccatacccatttttcataagcaaggagcatgagaaacaccactttccttttgcccagtccttcc

SEQ ID NO: 49136 - DNA, 692 bp, Bovine  19866881052221
  misc_feature (1)..(1): n is a, c, g, or t
ngtatctgaacacaagtgttggtataaatcccagtgctagggaactgggaatgctgttaaccaaaccagcaagactgggaaatgctgaatattctacctctttctttgaaaagtcaaaaaacaaagagacccttgaagctccatttaaaccaatcttccagattgacctgagcaatgacaaagagcccttcaccaccatcgttttccttccctccagaatacctatttacactctgtagaacataagtgaaggattaacctatgaccgtgacttatctgtagtttatctatttagtataatatactatattgtagatttaatgtcagtctgtttgcctgtctttacctcattttatttttctcttctcttcttgatctcttttccttcttccacctccacacttgcattattaattacttgtccaaggccaaaataagtcaggagtacaaattcaatgaacaaacaacccaaagctcttaacttcctgatggcaaatttatatgaaattagtgacatctacttcaatatgcattaacctccttctcacaagctgctgcttttatctcaggttctcaatatgctttaggatgtctttcatttcttccttatctccgctcctacttcccccaaagacttttaaaaaaacatgtttggggttgataggatcggtgcacttcctcgaaatcaaagt

SEQ ID NO: 49137 - DNA, 768 bp, Bovine  19866881087728
  misc_feature (1)..(1): n is a, c, g, or t
nacctgaggtggtttagcccctgggccaaaggagaggggttagactataccatcagagcaatggaggaaaacgtgagaggaggtatcatcagagaggaaactgactcaggctgaggaacagaaagggaaccaaatggacacagtggaacagaaatggataaagatgagagcgacaaagtagctcaacagctgcatttttttcctccctgaaggcatggcatgagcggggaatagatgttaataatcacaacactcctgaagctcacacaggcagacagagtgtgggggagcccctaaggggatggagtgatggccaagtagctcactgggtgattctcctcccaatcattccaggaatcccctggtatgaaaatgcaactatttcagggagaaccacgtttaataatacacgactttagacaaccaaattctatacctctaagccaaccttccactccctccacctctaacacaaccaggaatttactctccagaaacaaacaaacaaacacagagatattatcacaatggactcagagaaacatttgtaccccctcccctcatctgaaaacttgccttggctgacttcatgtctgctcccagacgtcacttaacaaaagactttagaaacttcaggaacaatttatttaaagaaaactccatttccaggatcctatgactgtattccaaggtaataaaatataaatgagaataaagaacaagctaataaactgaattgaaggctgcatttcaataataaggtttggg

SEQ ID NO: 49138 - DNA, 1414 bp, Bovine  19866881089078
  misc_feature (1)..(1): n is a, c, g, or t
ntactatggcacctgatgcaaagggttgactcattggaaaagatcctgatgctagaaaagattgagggcagggagaaaagggggcaacagaggatgagatgttggatggcatcactgattcaatggacatgagtttgagcaaactcgaggagatagtgagggacaaggaagcctggcgtgctgcagtccatggggtcacaaagaattgaacacaacttagcaattgaacaagaagcaaagagacaatgaaataatgaaagtacaaggaaaagattttaagaatgctaactataaccacagcaatgactttacaagtctccaaatacggttcagcaatgaggaccagtatagaatgaaaaaaaaaaaattgggtgttttccttttttaatttttgtttctgtgaaaaacatcattaaaatagttaatattcacaggcagtatctgaggcaagagtaagtgtgtcaccctttgcagaaacatggagcatgtacaagtataatgttgcttttttttttagaatcgtgtgatatatttgaacatatagcagctataagaaaaaaatgctgccagtatgttggtaatggttgggaggatggttagatggctgcatattgaattaagcagaatcaaggtccagaagaacaaggctgaactgccacacacatccttactacctcctgcgtaccctgactccaagtattattgctccagtaacaccccaaaacttacagtgttctgaacttgatagtgtcttggggtatctgtatctttttttgacactgtaattcttgattgaccattagaattttctgcagtgtctcatatggtagctgctaaccatatgtggccaccgagcacctgaaacgtggcttacgcagcctgggaactgaacgtttcattttattgatttattatgtaatttaaatttaaatagccatatgtggcaaggggctgctggtggttgcataacacaggcctagatggctccctttcttccttccctaactgggccagcaaactcctgctcatccctcaagacccaattcaaatgccccttcctccagactgcccttcctgttccctctatagcagctgtatggacctccagaatatatacttagcatactgtattagttattttatgacattgatcctcccactaggtgagaatctcttgagggaggggaatctgtctggctcatctctaaatacttagttgagtgcttggaacacgagaattttttgacaaatatttgctagatgctcaagcgagacagtgaaaccatctttagatatgaacaaatatgagcagagattcccaagaaagttcttccccagagaaggttttgctgccttcacacaagaagttgcaaaccagttatgaccttcagagttggcagtattttgtcatgtg

SEQ ID NO: 49139 - DNA, 1162 bp, Bovine  19866881116639
  misc_feature (1)..(1): n is a, c, g, or t
nttttccttttggcaaagcaccttcatagattcaaacatggttcactatgccttaaacaaggacttagagttgtgctgtccagcagggtagccactgacctcatgtcattatcgtacacatgatatgtggccagtctacatcacgtgctgttaatctaaaatacacactcaatttcaaagactgatcacagaaaaagaatacaaaatatcacattaatttttaaaaactaattacacattgaagtatttgagataccaggttgaataaactatattaaaattaaattcacttacacctttttactttttaaatgtgatgattagaaaatgtaaaaattacatttgtggtttgccttttatttctactgggtatgggtatagagggtaaggagaaaaaataagatgatgagctcccatttctggctaatatatatatttttttaatttgtcatattaccagttatattttttttcagattaaacatgcacattttcacacagaacatattctgacagaagacatgagaagtgtgcacttgctatcataatgattattttgtagataacaacagctgtttgcctatacaagcaggagactgtttttccacataccaccaagtactagcgttcaatcatgaaagaaacataattctccctggactttccccacatggtatacataagtagcaagctgtgcatgcgtatgtagtctaaaaatatgaaccaagttggggccactctctggctgatgactttgccccttctctcttaatatggcaaatacagagtgctcacatcaggctgacagagaagcaagtgaatcattaaggcccatacaaaatccacacaggataggtgagcaccatttctgttcttccttgcagaggagattagaagacatttattccctgatggagtatgaaaacactgagtaaaagtcaactattaaagaacatagtttgttttatgacacttaaagagtcgcttgaaagtctcacaattctcacaattccatcaatcatactgtgtaattaaaaatgcattgtggggctatcattaaaaaagtctacaaataataaatgctggagagggtgtggagaaaagggaaccctcttccctgctggtgggaacataaattgatacaggcactgggagatcagta

SEQ ID NO: 49140 - DNA, 2046 bp, Bovine  19866881154054
  misc_feature (1)..(1): n is a, c, g, or t
nctgcggatggagtgagggtggaagggaaatgtcatcaggactacactcctgatgaagagggaggactctgcagccagatggcctggtttccttcccagagctaacacctatcatttctatgactctttcaaaagtcaacctttttagcctcatctatttataaggttataaaatgggggtcttaatagtatcctgcctcataggggtgttgtgaagatcaaacagatgataatacatgtaaatgtctttgacatagcacttgacacacaggaaagtctcaataaatatctgctattagtttataattttcacttaatcctcatgaatctaaaaatagggcattgatattttatacttagactaaggtttatggaggcagtcacttaacaacaacgataagaacaaaacacaagttacagataggagagttgggattcaaacccaggcttgtctgaaagcctgattttccattttatcatctgagctgatcctcagaacaccttgtactcagttgctgttgttcagttcctcagttgtgtccgactctttgcgaccccatggactgtagcccgccagtcttccctgtccttcactgtctcccagagttggctcaaactcatgtccattgaattgatgatgtcatccaaccagttcatcttctgttgcccccttgtcctcttgccctcaatctttcccaaatggcatttgacccaaactgcatcagggtcttttcaaatgagttggttcttcgcatcaggtagccagagtattggagcttcagcttcagcatcagtccttccaatgaattttcagggttgatttcctttaggattgactgctttgcactctgtaagcatagccaaagatacataagggagatgttttttaaatattttgtctccctcaacatagattcatctgcattgtttttctctgcttagaataatgtgacttccatctaaaactacccaggggactctctctgtaattttattatacaggtgaaggttaactaacttaaatgctactttattgctggatgtcaatttacagcagaattatatgttttagatgtttaatttttcattagtgctaccaaacaaattcctttagtaattggaggtcctgacatatagcaaagtgggtattggctgttaaatttatttgggggtctgtgacacaaaaatgtggcaaatattttgatgcttttttaatgtcagtgttttacaggtttcggtggactatcttttccacctgatgctcagagtttggggggttattttagtcactgtcaaatcaaatatactgtgaaaggcaaagtgctttatagaccttaaagtgctatgtaaatgtaaggcattattattcagactcaccttcttccctctgttgatgcagttggggcatttattctctgtcattttgctgtgaaatactaggtgctaagtactagtaatcgctgaagatattattctctcactattttgctgtatatgtttcaggacaatgtgcataaaattctctaactccatgtaaccacttcattttaagtttaaagttttaaacctgtgacatctaaataactggcttgggtaaaatgtttattttgttaaaaaaaaaaaaaagtagttaaacttgttccgatgaatcctgtgacaaggattgaatagtttggactaaatatgagtggtcagtccagtcttctcagatgattaatttgttacaggccacattacacaccttgaatacagaacagggagtgaaaggccctaaaataatgggtgctttggttgaaactggacatttcagctcaaacagatccagacagaactgaaaacatttgtttcagtactcagtaaaaagaataaaatataaaaggagacatctgtttgagtgtaaagtgtgtggatctacgtattgcttagtgaaagaggcagccctggtttgagatgcccctggtttcagggccaggtggaggggcaccctggattgcccagggtgcagggacctttcaccgcctacctaatatggtcctggttttccgt

SEQ ID NO: 49141 - DNA, 1856 bp, Bovine  19866881170337
  misc_feature (1)..(1): n is a, c, g, or t
ntttcttacttatagcttatgaattaatgaaccactgagattaagggtatttactaaagatgataaggttttgatactgataacttcttaagaattgaaagaagaagtcaaattttctaataaaacataattagggagacctggccattataaaagttacagtctgaaagtttatactagaaaagcatatgatcattgtccataaaaatctttcactgagataactaaactcattttttctgaagagaagagagctgacactcgcctttactaagccatgcaaaatagccctcgtcagtcccaaagacacttcactctgcaaattcattacattttccaaagatcctatggaactattttatatcatccttaaaattattccctgtatcaaccaaaattggatactccacacacacagtcacaaacacacggacattcagaagaggaattagacaatctaaataggtgggtgatcaaatttaaaggaccacttctaacctagatctggctgtgtatttgtgtagtactctcctcacaatacctaagtgatttgaagctattttattcaccaatacagaatccttatgaagttagtggtctctcatccatcatttaaacagttcctaaaaaatccccttcctctacaaaatctcctaaggagaagagggtggttttttccctctggcttcatctttcctggacctgaaacaaatctgtggctaattgtttatctctatattcctaaatatgcactggccttcaatgtgaaatgctgcattgtggctctccatatttctgggcggggttcatctacatcttttctggaggatgcaaaagccatcgcgacagggactaaatcaacaacatgcagatgatggggaaatatgggattctggtaaacctgtaaagcagcgaaagttaccacctctgcttttaaatcgaatataaagaaactaaggtagtacaagccatggacacacagggtctcacaaacaaatacaaaggagagttttaaattcattgaggcatttcagaacagaaaaccagttcagttttcaatccctgtattttcgaggggaaagtttcttcagaacctgagtgttctaatgaatacttgccaatctctaattttcaggggcctgtttttgcttgcctttttactctatgcagtcctggccagcttcaaagattgatgagatctgagagtggtattagatttaacaccatttcaagatgggctttaagctcagtgtgaatgagttggataggaaaagaaataggaaggaagaggaaggttctatggttgaaactcctggccttacagcaaattgaaatattattattgcaatctcctccagaaatctctggggtggtccatgatgctctcagatcatgctgtttctcatggtggcatctgaatgaagatattatagggtagaataaattgtaaatttatatgccacccaaccagggtgagaaatttcttgaaaccagtgccattttctgagactgctccttgcttactccacatgggatgtttggcctgtgctaagcagagaaccagttacacggggtcagcgtctcagcagttcttttcctcaagcttagttcccttgtacaagggatgggttatagaatactgatcactgtttaaagatttctcactttgccttcaggggcatcatcaaaatcttcttgttctgattctatcagaaaccaagattttaagcaagtagttaaacaaaatcttcatgaaatgaaacatgcaaaataagattgatagtgataaaatgtttagaagctgtcgttgacaattctcaaagcacagaataagagttaaaaaatagacgtttcaa

SEQ ID NO: 49142 - DNA, 983 bp, Bovine  19866881174011
  misc_feature (1)..(1): n is a, c, g, or t
naaatgtcactacccccccccctttttttttaaatgtttctacacaattgaagacaacattactctttccagagtgggaggctgaagacaactgtgggtgggggcttctttagaagaaggattgagtgtttacttttaaagcagtctcagaacatttaaaaatagggattccctttgccaagcctcctggggctcccactcccccaacagctgctctctctcctggccttttctgctttttgccccttcctcacctccttctccttcctttttgcttctaatcactcatttgccacccactccaggaaaaaaaaaacctgtcttctcccctcttattttttgtttgcttttgttttgaaaaataataattccaaatgaacaaaaaagatgcgtgggaaggagatgatttgtgagctcttagttattccaccaactgccaagttttaagttcttcctgcagctcacactaacctcttgagcaaccagaaattgcaattcctcactaaagcctagatgattctaagcataaagcagaacatgaataaggggcaggggatgcattctgattattcatgagctctgaaaaatgccccaagaatgtctaatggttttatgttaactattaaaaacttgtgggcttcttaggtggctcagccataaagaatccatatgtcagtgcaggagatgtaggttaggaagatcccctggagaaggaaatggcaacccactccagtattcctgcctgggagatcccacggacaggggagcctggtaggctacagtccatggggttgcaaaagagtccggcatgacttagttactgaaacaacaactaacaaattaacaagttataccaaaaatgtactaattatagatttttccattttaatgtgttttcaacattgaaacctcccatttactgtcattattttaatgatggagaatgtctagaacccaatctgggttaatctacaaatgtagaa

SEQ ID NO: 49143 - DNA, 708 bp, Bovine  19866881202877
  misc_feature (1)..(1): n is a, c, g, or t
ntggttatatagagcgaagcctggtgggctgcagtccatggggtcacaaagaattggacaggactgagcaactgaaatgaccttataagggagggttttgttcttgaatttcatgtgaaactatcagagttttagaaagtgtgtagtgcgtgatatttggtcctgaattttggactaattttgaattacacagtagtttttcttcagctgaggagcagctgaaaaaggtgatgggaatagatttccctctggttctagataaaaggattaaagcaatcacaaagcagaaacgggaggggcgtaagataaggtaatcacgaaataaaacaaatagcaggaaagcaaagaagtccccatttcagcggtagatagaggatcagaaggagaatgtccttgttgccatttctcagtgtgcagacaatgagcagtcttaaaaggggaggcagtttctgtcttgagatttcatttataacttaattatgtgttctacaataaattccttttacggtaatgttaattgagaatgaatgcggttattacttacattttgatcttgtattacttcagtaacttcttataaatcagcctttttagatgcaaatagaaagtgcttccagattttaacctggaaagggcaaactccatagcaaaaagagagaaggtgagcaatcttcataaattgccatatatgactcattctcttatgag

SEQ ID NO: 49144 - DNA, 1388 bp, Bovine  19866881214366
  misc_feature (1)..(1): n is a, c, g, or t
nattcgatgttaaaagccccgtggtagctgtgttaagcattacagccacatgcagatgagcatcaaaggcacattaagtttatctggcatcgcttggaaccaagcattgccttacttgctcacagccagtctcaaagccataaaaccttatttcacaaaaatgtaacattaacaccccagttaaacttgcttctgatttctaacatggaggtggggaaaaaaaaaagaacttttctatgattttggcttaggaactaactgcataggaatttgcatttgtatgaaggagactgaaactcagcttcagaatcatccaggatttcattctcttattttattttattaagaaagcagagactctcccaataaatcctcctcccctcttctggcacacttaaaacccatttctgagctccactgaccacatcacgttgacctttggtattgagtaccaagggagggaaagagtaggtgtgtgggtggagagaaagagaacagaggggaacacgggtcgaggagtgaggggacaacccaaatgtggggccaccgcatgagcaagccctctgctccacattagcaaagcaacaaaagacggcatagaacagaaccagaaggcggtcagaggcgccccggcctcaccggagacacagcaatccaaacccggcatctgcgctgcttcccagacaccacttcccacgagctccctggactcaggcttgcatttcaggactccatgatttagtttctgtttgagcatttggacaataatcattttactacaaaaggtaaatgtcttgtaaactaatgggaaacatattgcttggcaaagtttataatgtcaggatttatggctctaatgcctagggtctctctgacctcgaagataacatagtgaaacagtaatgtgctctaaatgactcagtgtgattttttattagttctcgtaatcaccccctattaatttgtatgcacataataagcactcaccttcacagtctgtccagcttcggggccatcctggaaacaggaaaacaaagaaaaaaaaaaagaggtgagaacagatagatggtatctcctgcttattcagaaatagcgcccattaataatttagatccaatttcattgtgtgttaatttatagtttcctcaaggggaccatgagcttcaaatgtgtagaacctgacggttctccatttctgtctgagagtaagtgagaagttatgtacaaaaatgatacaaattatccagtgagccaacccccttcctacttttcatgctctttgcttttggctacggttttaattccattaatggaagactggaaatgtttggggaggtgaagcatcataccttttggttatctttaaaccagatgtagtttaaagtctg

SEQ ID NO: 49145 - DNA, 692 bp, Bovine  19866881242736
  misc_feature (1)..(1): n is a, c, g, or t
ncacagtggtaaagaatcctctgactagcagatccaaggagtttgacccttggatctggaagatccgttgtaggagaaaatggcaacccactccagtattcttgcctgaaaaatcccatggacagaggagcctggcgggctatagtccatgggaccacaaagactcagacacgagttagcgattaaacagcaacagcaaaattttaaattagttagacctgcatcactttctacagtagaatctctctctttcccctctttacactctaattcactatagatgggactgtccacagcagtagaaaaacttcccttttctgtttgaaagacccccttttaaagtcctggatcctgttaatttctgatggaaaataacttctaacattggtggacagctagaatgtcagtgagcctgctttgggtggcgtgtttataaaatcgtgtatcgcttcctcctgtgacctgtcataaaacgtgacataacgcaacgtgacagctccagttttcaggatggcatcttgtgttctgctttcaaactccaccgtttcagttacccaacagaagttggctgacctcagtagagcagacggggaactgttaacaggttgccaactctaaatgagtgtggagcagcttagcgtatctctagaataattcctttaaaacacagttaatcatcatttcacatacgt

SEQ ID NO: 49146 - DNA, 1683 bp, Bovine  19866881259766
  misc_feature (1)..(1): n is a, c, g, or t
ngagagccaaagagagggagagatagataggagaaatggtaatggaagagaagcattgactatccgtcagtccgctggctaatggatgcccatctctttgtccaaacatgacaccaggctatacaacaggctctcgtgccaggcagcagcagaagcattctgctgttttctttgtaaccctttgccttgccaaatgcctgtgaaggaagctctcccctagcccgtcaacaaccaagactaacagggtaattctggcaagggttgttggcagaaatctctgccatctcaagcgccgggctctaaggagggacccagtcccctcgttacataaacaaaatgttggcaggccagagagtggaaaaagaagcatggcaaaaatgtatacttttggaggaaaaaaaatctcaacttaagccatattgtttttattgtctctggaaaaacctttctactgtgtgtttccaattggaaaccatttgaggcgcttttctttctactggaaaaacacggatagcaagatctgcttcctgcatgagggagaacaggctgagagccagggagaggaaaggtcaatgtgctcagacctgatctccatctgtagggagcagaaagtgggccgggcgtggagagccctccacgtccttctctccaggcggtgtgtcagctgcgcgtgcccctagccctggggaagcggtgttcacttagtaaggttggtggctgccctgcactatgaagagcactgatccctgtagctgtgtcgagaattggccatggggcagcccaggactgggggtggtggaccaggctccagagctgaactgccggggcttgcctggctccactggccccttgcacagggacttggggcaagttacctaactctcagtgccttgatttccttctggcatgacagttagccaggtagttaatagtgaaggctcagagccaggctgcctgggtttgaatcctccacttgctggctgtgtgactatgggcaaaatttacctccttgtcctgggtggcattttttcatctggaagaaggtgactgtgatagggtgtctgggagcctgggatgagctaatacgggggagtgctgagaatgaatggctgctgatgggcagggctaggcccctcctcccagcctagtcccgccctctctctcgacctttctcccttctctctggctactcctgcctcctttcagtcttggacagcctgggctttctcctacctgagggttttccccagactgtcccttctgcctacagcaactgtctgccgacttgtgacttcacttctgcctccagctctcagctcctacatcaccagggaggtttttcataaactcctggacaagatcaggcacaccaccccacccctcatttcatatatttccctttatcccatttatcacagttttcatgttttaacttgtcaagggattgtcccagagtccttgttagaatgccaacttgcttcttcaccattatatcctcagcattttagtatatggcctttgctgggtgtttgtggaatgaatggagagtgagtgagtgaatatatgaagaatgtacccttcccttgagccagcctctctccttcttatctaagaatgagaattgggttgtcatggagccaagcttaaatccactctgattttttgcaaggatgagtgttaaca

SEQ ID NO: 49147 - DNA, 838 bp, Bovine  19866881279702
  misc_feature (1)..(1): n is a, c, g, or t
ntcaggctgagattcttcttgctgttgtcatcagtgtggcctttatccattctcagcagagacacagcatccactcgtgccgatttaaggtgaccgtgtccaccgtgtgcctacatggtgagatctgagaggaggcaggtgccatggagcctgcacgatgcacgctggcttttcccaggtgatccctctgtgtgtgtctccatatgctgactgtgactttcagccctgtcttcttttcatttaatagaaacagaggcgcacagctgcttgcttatttctgcctcttcagttggttctggcacaattcctccccgcctcccccaatagaggtccctcctgagttacctatcttgaaactccacacgcagtgcaccttctgttcctggcaaacttcctctccccaaagcaggcccctttgtttccattccgggaggaaccatgcccttggatgtgtcttctttcctgttgactaaaccgcttcaactcttttagaagggggacccagctcaggcctcattagtggacttggcatttgtgaattgcattattaataattgtgcatacgaaatgcctgtggaatcctaagccccaggcacaactcaagccctgtcctggtcacagtcatggaaactaaacatgtattcaggagtcgaaacatgaccgtggcaggcgtttttgcttttgcaaagctctgtaacaaagactgagccggtgttcgtcccgctgacggccacagacatttcagccataaggacgacgcagttggcaatgctgtagacccgccacctttttcaggcctgataattcagaagagggcaggataaaaatagaggaggcg

SEQ ID NO: 49148 - DNA, 1000 bp, Bovine  19866881300414
  misc_feature (1)..(1): n is a, c, g, or t
ntgtactggaaaggtggatactgtttagaaaagagcttgaaatcgggaaaccagtaccatgtccttaataagagatgttcaagacaatgggggctggatttggggccaatggagtgaagtggacagatttgtctgctgcccagaagtacaacctagatgtgattgggcaggtgaatgagtaaaggaaatgtatgtctacatcgtggggattattcagcactcagaagaatgaactattaagctacacaaaaacttgcatgtatcacctgagagttatgctgagtgaagaaggccagtttctaaaggttacatgttgtatgattccatatattcacatacagtattattaaaatgatagaagtagagaaatggagaacagatgagtggttgcaagtgtttagtgatgggcggggaactgcagtggaagggaaatggctttggtcacaaaaggcaatatgagggatcttcgagaatgggaatgttctgtctttcgagaaaaacatacaaaatgaatgatttaactgaggctgcaggtttatttttgtgattgttattttagacacagcatgtgattatagtcattgcttctgcacttatgccaattggtgtttagaaattaaaagtgtgatgtaatgaaactagttcattattctggtccaacttctattgctaactaagttgtgaccttggtcatgttcttcaaatttactggaacttaggctcctcttgagggttttggaataattactgtcagaggtcccttccagctgtagaatttgatggtttcatgtttgaatgcatcaattgcatttcagcatctcaaaagtacactcagacatgcaacagtgagtctgttatgttatttattttatttcatcaagaatgtttttgcatgggttattttaatgtgtggaacttaattagcatttctttccatcatcccaaaggtcaagatcccccaattcccctctgcagttagagttctctaagtacagcagat

SEQ ID NO: 49149 - DNA, 1244 bp, Bovine  19866881333462
  misc_feature (1)..(1): n is a, c, g, or t
ncagagatttgagatgggaaatcaattaaaaaggctgagtaacatgaagaagaacatgataaagggtcatgataaaaaccgaagaattacaggtaaggaaaatactcttattaaaagtggggaaatgtaaggaactcagagaaacatttttaactgctatatttgctttagtttcaaatacaaggtcactgcaactataaagcactgtgcagtcaaagagctctatctgaatctctcataatctttcaggagtgtagggcagagaacgatagcaggctgtaactcaacaacttttcaaaactttctagtactttctcacccttagtgattttctctcacccattctcgattttgccttcagtagaaagatttttcacattcagatggtttgtagacacggcttgcttttgctcatagcatcagggcagtaagatgaactaaagcagttctgatgcggtttcttctccaaatttatttccagctgtacaaagaagccaggtgaagggtggggagaaagtgagtaaccggagttagcttctttcttgtcatcctctacattaactcagattccccaaaatcttcctggggtcggggtggggttgagtcacatcacccatggccaatgacttaattattcagggcgacagaatgaaacctctatagagattccaaagtaacaggcttggaaagcctctcaattagtgaacacagaaaggtgctaggaaggtgtcacaccggagcgctcatggaagctctgtatcccttccccctgctcctgagttgtatcctttataataaactggtcatagtaactaaagcactttactgagttctatgagttgtttatagaaaattactgaagctgaggagagggtggtgggaacccctgaatatatagcccatcagaaacttgtgactttcaaccggcattgaagtaaaggcgggtttgtaaggctgagcccttaacttgtgggatagtgctaaccctaggtagacaatgtcagaactgaattgaggtggcggacactcagctggcattggagaactggttgttggtgtcagaaaacaccacaaccttctgcttagacaaaagatactgactgtagccctaacaaaatgagattgaaaaaatgagactaaaaaaacaaagagcttaacaagtgaaaaagttttattaacatctgcactgtacacacacatgggagtatccagtgacaataattcaaagatgcggttagaacacg

SEQ ID NO: 49150 - DNA, 817 bp, Bovine  19866881361694
  misc_feature (1)..(1): n is a, c, g, or t
nacttcatgaaccaaaaagaaaaaaaaaaaaactgcaacggtctgctcgagttgaaaacaaaatgagatgctgtaaaactgagaaccatcccaactacagcaaatgatcgttattgttgctgcatttctgtttaaaaaaattttgataagtttggaatttgctcatcaaggataataattgatgatttaaaaataatcttatgagcatttccatgacgaatatgaactatttaaatatagagtcgtgacagagaaatggaaatgtactgattctgatgattaattaagacaagcagaatattattctcaaagctgctcaggcttgctcccatttatttttccatatctgatctattctagggattcagaatagaaaagtcactaaaataaatcaaaccatcaaaatattactgattctgatgaagctgattagcatgtgcatgtatgaatatggagtaagtcagcatcaaataatatgatgaagaattaaaaagaaaagaatcagtcattcttctgaactaattttaaaaaatctgtattcatctctacgaagatcagtatgtcatttaatgacaaacaaggaacattccagcttgtactgcagacttccgcagaccctataaaatgaagtatttgctctaacaaataatcctagtccttgcaaatatttaaaataattcttaattcacttcaaaaaacaacaccaggatgaccatgaagtatttttaagaaagattcaattaatttgagttaagtagcacagttgagaagcacagttgcagagtttgaatcaaagtaggggcatctcaaaagtcat

SEQ ID NO: 49151 - DNA, 1405 bp, Bovine  19866881487262
  misc_feature (1)..(1): n is a, c, g, or t
ncatggaacaggcctcagaactgcccatcaaggggcaaggaggctggaagacatatccttccactcttgcttgtcattggcagagggtcactcttggggagccatcagctccccagaacttcatgcccgctccctagagtggtgacagaaagaagccctgaagtggggaggacaagaaacgtgtcagaggacggcctcaacatgaacatgaagggtgaggcacgggggatatggccaaggcacacggctttggctcccaccagaaatacacatgtatgaaaacatggcatcattgattcaacatctacttagcaagctcttattatgtgcggacactcttgtaggtactgggaatacactgaggggcaaaacagagattatagtcttaattaatacccagcacaactgggctgggcagaggcagattctgtgggctacatatcacaatctagttcacagcattgactttaagaggagtagcagggtcatcattattggactttcccatcaccgtccaggtatgctgtggcctgtgatctagttatgatcttgaatcaagaactggagcaagagggcttccctggtgctcagtgataaagagtccacctgccaatgcaggagacacgggtccaatccccactccaggaagatcccacatgccgtggggggagctaagctcatgcaccacaactctgctttccagaccagaagccaaaactagagaaaagcccatgcagcaatgaagacccagcactgcaatgaataaagaaataaaagaaaaaatgaactagaacaagcagataggtactggaaggaagtagagttttccattaaaggacagtgaagtgtattttgctttcgaactctttggggacatctttcctgtaatggcttatgcccagaagcaccgcagaccttcctgctatagttatgacagctgagcagggtgtgtagcctctagacatagaaaggactcatgttagtttgaccacctggggattatactggcattggcaacttcacatatgccctgcagaaactaagtgatctccatttcaaacaaaaaaatactctgccttccaaatgatacagaattctattttatcgacaccggccaggtagaaccaagtatttgccagaactctagatgtgggtagttgtttataaaaccttagaatatcgtcaagtgttgttttaaataaaccattacacttacaaagaaagcaataaattgtgagattcaggtgaaagacataatatacctatctgaaaaaaaaaagtataaacaaataaacatctattgtatcctcctatgtacatactttagaatatggtaaaagtcaatttttacctattctggtggtctttcccatttggcatttcccatctcatggaaataaggtca

SEQ ID NO: 49152 - DNA, 1337 bp, Bovine  19866881512047
  misc_feature (1)..(1): n is a, c, g, or t
ngtcaggagaagtgaggcatgactgctaataggtgcagtgttatttttttaggctgatagaagctacctaaaatggtggtgatggttgcatacatctgtgaacatactaaagaccactgaattgtatcctctaaatgggtgaattggagggaacatgagttttatctcaataagactgtcataagaagaaaggtaagactggaaaggtggagggaagaggtggccaggttctgctgggttttgcaggcttcatgggaaggttggctttacttcaggtaaatgggagaaggctggaggtttcagagcaggggagtgatgtaatatgatttatatatttttaaaaaatgtcttcttactccttgctcatattaacaatattattaccaatgttactgtcctcttgactttctggtttggatgaagtgagttcattgaatgcctgttctgtggcttccaggacaccagtggccactaagcacccagcagctgagagtccagtgccaagtatggctacagaagatcctgaataagtatttagtatcagccagggcctcatctggcttgctagatggtggatccaaatcgaatgcaccatctgctcagccttaatgcagttttaggggcaaagcagagaaaattgtgtagtaggagcatccctctaggaccctttctagcctgacttttgccatcagcatctctgtctgacgctgatcagggaagaaaaaacttctcgccccacctgagccactccccaagtcaaatcactccacagttgaagagcatgctgggtgagctcccatgagagtgtcctcaaaggctcctggaccctcaagaatgtgagcagtaattctcaaaatgaataaatagttctaaaggaacatctcctctgagtgtgtgcgagagagagacagagagagagagaacagagtctcaaacagctctttacatgtgaggctggcagctctgagcaaggaaggaagtaaatatctcattttgctgttgtctcattacatcatttgttggcagcctcggatgatgttagttctgggaactggccataggtttttgataagataaggactctttctccagatatattgatggcaatgagatcatgacttgagaaggtggggttgtaatggtaaaaccgagaatcaaaaatttagaccagaagtcagctacccagtcagagccagaatgttaacaatgtgtagccacttttcatcaatacaacagtgaacctctggttacctgataggctgtggctcaaatacattcaaaatttttttaaaatcctttaataattaaatctaaacccaactgttgaacccattggc

SEQ ID NO: 49153 - DNA, 1159 bp, Bovine  19866881781891
  misc_feature (1)..(1): n is a, c, g, or t
nattttaattctaagtaagggtatctcaggcactcgcaggttacctggcacgatatacctggtatgtgttaagagaatattttatgagaaatttatttcaattactatggagtgtggccagatactgatcaatatctgatattgatatggtccaaacttcaagtaaggaaccaaaggcaatttcctcaaagcttgtaagtcctgaatactaagataaagaaagcagcatgctatccagggtttcttagctccgggcctctcactgtgttccggagggtcattaagtcctctgaaattacgagcaatgttgggtgtgtatattcatgtgcgctgggggtgtggtactggaggaagctcatggtttccatcagatgtgccacagagcctgcgccttcagaaggttaagaaacattattcaggtcacacagcagacacaaagagaagctttggtggcggtggcatttgagtagcacggtgaagcttggataacacaaaaggcactgcctccttccaggtgtaggagtttctaagaacatttatatccacccctccatttcaaccagctgttcaaatgcttgacattaataaactgtcttttgatatttttcaatgagttgaaaaatgtccattcgtgaccatgaactccctttggcaggaggtgatagcaggtagggttgtaatgagaagagtgcctcaggccagagagggtttacataaaaataagacctgcaccttaatatgatcataaacgtctctacaccattccacaatcagttaaacacacacacaacacaaagtcctctttgcgcttatgcacaactggtatgaatgatctctataataaaacatggctctgagaacccatgaataacccttcaacgcctcagaggatattagtaagaacaattctagagcgcaatacccaagccaaagagaagtctggtgaatggagctcattatttctgaaacttgtcatgccccacaataggaaaaaaaatcgtcattttctctgacttaaattagaactggtttcccactgaggagtttgttgaatctttggcagaataacagatgatgccttagacaattacacatccatcttaggatgagaatgaactcagaaggatttcgacacatctcaatttcaaaattatggaag

SEQ ID NO: 49154 - DNA, 1483 bp, Bovine  19866881864226
  misc_feature (1)..(1): n is a, c, g, or t
naagagtcccagaaacaccatgacacaaatggctgaagcactctcaatgctgtttgcagttcagctctgggtagcttgtactctctgattattagttcaagtctatggttctttcctggaatcacagtcatcttctcccttgagtgtgggctttttggatgttactctttaagggataagctaagctctggaatatagacttgaagggctagaagagaaattgttattgttgtttagttgcttggtcatgtctgactcttatgcaaccccgtggactgtagcccaccaggctcctctgtccataggatttctcaggcaagaatacttggattattatttccttctccagaggatcttcccaatctggggatccaaccccagtctcctgcactggcaggtgggttctttataactgagccagcagagaagccgtggaggagtaattaccactgataataacctcactgatcttatctgaagagcagcaaagctaagggccgcacaagctgtcaaggtagcacacaggagtattgtgtaaacactggaacaggtgcaaaggaagcctgagcaaggggagaaggcccagcgtccagaacaacactggctccctggagcatggtgtgtactctccagagtcagcagtcaggagttcagagtgggaggctggggggagaggagctagagttaaaggcagagtggaggggccattatgcaaacatgctgcttacctgaaccaggaagccatttacatgtgaccataataatcataagctagttattttaacagtggttttctgttgataggctctttcaccaccaattggaagaactcaaggctgttgtcctattaatgtagttcatgatgttatcttcaaagaaggtaggttagatcagactagagggtcagagttggtgcatccacattgggtaaaagtccttaacatcaacaataattatgagtgcaaaaccacctttaattcatttgaatactatttattcattcatctatcacttcatttattccaccagtattgttggacagaaccccataagaccggaatcattttggccctatagtctaaagacagaaacagctaaagtgcaccaagtatgcaaatagtggatgctttatgcagtttaaacttgctgctcactgacttgggaagtgaaaaaagtaaaaaacacagggaagagtgcaaaaaacacaggcgagctggcagatgcaacccatgtctcttttatctatgctgccaggcctaaaaactctttcctgagctgcagaaggtcaatagatggccaacaaaccaaccagaagagcaagttcagcttgaattcagctcattaggattctaggtcagcctttaggcaggaagcatgagcccacaggtcactggaaacagaggctgatgtgactgccctcaacattaagaccccaatggctcctgcttcagactggcaacgggcaaggaaaagcaatggtgca

SEQ ID NO: 49155 - DNA, 3205 bp, Bovine  19866880767469
  misc_feature (1)..(1): n is a, c, g, or t
ngggcagatttgaccaaatagtatctgttgcgcctctcatcagcctcagaattacctagcctctactctgccatttaagcactagccctcagtaataatttggactatttcaccaaaggccttcaggtgacaaacttgctgactgtgagaaagactctgctttagacaaactcagagtcaggctcaccccttggctgggcttccctgataaacacagttggtaaagaatttgcctgcaatggaggagaccctagtttgactcctggaagatccactggagaagggataggctaaccactagagtcttctcgggtttcctttgtggctcagctggtaaagaatctgcttgcagtttgggagacctgggttcgatctctgggttggcaagagcccctggagaagagaaaggttacccactccagtattctgacctagagaattccatggactgtataggccatagggttgcagagagtaggacctgactttcactttcaccccgggctctgtccttggtccatttaattcagttttagcaagaatctgaactaaatctgttggtcagtttatagaaaatccttacccttttaataacactttgcatgatggtttaacataattcttaaaataattcttaaaataatcgtgtatgagaacacaattatgaccacctaccttgattgaaatggactgaataggatgtatttggcatagaatagaacgctggacaaaagtgaaaatggtgtctgctaatgttagcacactgatacaaattaattgccagtgaaaattaattttgaaatagacctttaaaaatgactctactctgactcaggcttaactaataaatgttaaagatcgaaattaaaattctttaaattcattttaattcccaagtgtgtgttaatcctcttattacattttataatagttcataaaatatatttccatgccacaaagctctaagtaaagggaagttaatataattaaatgatattgtagataaggttgaaaacaaaaagaaaataataaatatacattcataattaaaaaaaaaaacctcacgggtccatccagatttactgaagacagacacctaacatggaatatacagttacaaatttaaatgctggaattttttttctgaggggcgagggggcataggagacttgaatacaaaaataagagatacaatatctacctgaaactgatataaagatatcttgcagtaatcttaaatgtattgttagatacaatcaccacaactgtttttcatgggaagatatatggcaacatatttccagattaaaatgtgtgaatacatgagtttatatgtatgtgtgcaactgtgcatcatatgcgatacatccacacgtctaaatatgttagatgtttataaataaaacagagatttgtatatatatatatatatcagaatcaatttaaaaaatcagacatattttagattttttaaacaaaactgtagtattctaagtgaaattattgtaaactgattccagcactgtaaattagctgctgcagctgctatgtcgcttcagtcgtgtccaactctgtgcgaccacatagatggcagcccgccaggctcccctgtccctgggattctccaggcaagaacactggagtgggttgccatgctcttctccaatgcatgaaagtgaaaagtgaaagcgaggccgcttagtcgtgtctgactcgcagcgaccccagggactgcagcctaccaggctcctctgtccatgggatttgccaggcaagagtactggagtggggtgccattgccttctccgactgtaaattagagcttgttttaatatatagcctttggctagttatgttagccatagttgcatatacatgagtatatattttactttataatattaatataattttcaatacttcatacaaaataacaaaattaaatattttaaatggaaatgtatgcaatgagtgtgaggaaaatatagaagtatgactgagtttatgaagtgaatgctagaagaatttgtcaatgttcatatacatcttagactgacatttccacttattgttggtttttcagaactgcacaaaatgattgtatgaactcacttttaagattttttagttaatactttttacatttccttagtatttcctttcataataatattacatagatattgctggaaaaaacctattatggaatttactgaaacacacaccttataacccattagcattctcataggttctcttaatgatacaagacaataccaaaagcatggaaaacagaataaaaaaattaaaaaaataaatgttggcatcacttactttcataatgaatcttgaaaccattattagaacgactattgtctgttgtaaatagaaggtatataaaattactgctgctaaatagaaactggggcacctgtgtgccattgtaagatccaagcaagggtgacagaagatttggcccatcgtgaacttccagaacatcgtaattcaattcagtctgaaatctaagattaagagagagatgtgaaaatatatttattaggaaaaagcactttaggctgctatttaaattactatttataatttttactaattttatatataattttctttagctttgctaatatcttatacatcattttaggatccataatttaagaataccaaagttataagctcttattcctgtggacaattttcatgtaaatagtatgtatatatacttattgttcacaagaaagatttattcaaacgttacagactgtcttgaataaataaatggtcttttcgttaaccaaacatgttttatggagtagtcctttttttttttttttttgctttcttcatttctatggaaaactacatgactatataaaatttaccctcaatcagatcatcataatttcatctttagtatatgtatatatatttcaaatctgacctctgcttcatactgacctcttcttcatatctctgttttgttttttgacaaatctgtttggccattaaatttttgtatagtttttatttagatttttggctgttcttcctgattttactttcaattttttaaaagatataatttattataatctgtagccaaaacagagcttattttaacatgcataatacattattaataaaataaaatttgaattccttcttgcatgtcaggatattccacatt

SEQ ID NO: 49156 - DNA, 1730 bp, Bovine  19866880903761
  misc_feature (1)..(1): n is a, c, g, or t
ntagcatctaggtttcctttagttttaatgctgataaaattatctggtctattgtaaccactggtgttagaaggcattgttaactgtgatttagtctacagtaaataaacattgaatcaaaatttaatttctgttacttcagttcataaatatttatttttattatcttggagtatttactaaaaactaactatcctctcagaaaactctttttattccttatgtttcctagagaaatgcacaagttcagaaacagctttctaaatttcagtttactccactatgtcaaaaggaattctgtgaagaatgacacctatccctttaggaatctaaaatataaataattttgtataattaacaaattgttttcttaaagcttagtaaaagagcaactgctaaacaattaattactcatgtttaatttataactgatttatgcaaatgttgcttgtaattagaaatatataagtatgtactttaaatgcaaatatgaaaggttgagctaaattcttttggggctggtattaattctcagatacaattatatacctttttcttctctagtgtttcaaaggatgaagtgaatttctagtattggaagaggtctttacacactcctattatttccaggaagtaacttaagcaaagataatcagactcctatttcaagagagatttgttcagcctttgcctctcttaacagtgatcatatgactatatttctttgtattttcagcattatgtggaggagatgttagagggcctagtggaacaatcttatcacctggttacccagaattttatccaaattctctgaattgtacatggactgttgatgtaacccatggaaaaggtaatttgtctcatgcaatgataatgggctatcttcttaattttcattgcatatatttttatttcattgtcctttacaatgtcattttgcatgagcaaaaacagatcagtactaaaatatgctaatacaaaattcaatttgaataactgcagcagaggattatatttacttttctgtagtattataacatacatgctcatatgattttttttcagaatggtaatatatatatatattaaactaatgtaatttgaaattttcataacaataaaatctcaaataggatgtcttttgtctctggcagagtgttaagaagttgatttcaaaaattcaaagggaaatagatattctgaagtactgaactgattgtaaagtaaacagtacatgtttatatacacttgttttaaaatggtttatttattataaataaatataatataaagaaatataaataaaatggttatttattataaccatataccctatataaatgtataattgtcctagaaatatttgtctcaaattttctgtcagaactgcagttggatctcacgcagttgagtgaaagtaaaaaattgcgctgtgcttatagtagagcttaataaatgtcctttgaacaaataaagaaagcccttgtagtactaaatgtgatttattcatgcaatacaaccaaaatattcaatgaatattagcaatataaatggtttaagataatagcttgacagtgggaaaatgggcattctaaatatcaaaacaaaaatggatgaaaattatttacctgaaagtatctatatgctattattttaaaaaataatttattcatgttaaaaactgcttattcttattggtttttactattacattgtacatgggcttc

SEQ ID NO: 49157 - DNA, 2090 bp, Bovine  19866880905887
  misc_feature (1)..(1): n is a, c, g, or t
ntaatgctgtcttttgagaaactccccagtccagtggaagagatcaaccacaagcagcacattgtcttttatcattttaaaaatgatatacaacatattttaatatctgtatgataaaataaatttgacatgcttatagctgaaatacacctgtagaaaaagttaggttaattttattagataaatgtgatgattagcagcacttattcttgatatcatggcaatatttaatacatataccttgtaaaatgtaataagtgtatcttttatggcatatatttgaaaattaacatctcactgatttatgatttagagcatatcttacaattggtacttgcagtatttgtcctttcagtttattaatattcaagaaaagatatgtgatatgctcttggtgttgaaattataaaattatctaaattatgagtttactgtttaacatatttaaaaattttggttaatttaaactttatattatatttctattcactcctttttatctcttaaaacgggtattctcctggcttttcatcttctgcatctgtgttacaactattattttactttttacttttcttcaataaaaattgataaatagatgcttttaaaaaataaggccaggtcccttcagaaccaggaagctatttaaaacttcttggtttgagatggcattttcttagctaggtattgtccctgacagccaaataatcaagtttaaatgtaagaacattacataaacctcatttctacacacatatacatgcacatacactcacacagagtagttttcataattcactatttctagtaactgagctctttgagcctctggacttttctttttcaactttcttctttgagtttacaatcttttcatgttttctttattctttaagaatttcagatatgtgctaaaaatactgtgaaattttgcaacccctctgtaatattaatttcataatgtagagaaaagtagaggtagaatttctgcttataattcatgtttagatcaggagaatctagaattatgcctcaaaatacaaaatgcaaattttgttaaaaataattttcagatagcaggaaaatttacaagcagcagaactaaatttaaagcaaccagccaaatacaacagtaggactaaacttcagcttaccttgggggttggggtgtgtaagaggattacaacaaaaaacataacctgagaaagatagagccattcttttactctaaataaagggcctcggataaagaatctcaaaattgtaaaacactcatctagtcatctagtcctaactacttattttaagagaaaagactgagataaaaaggcagattcttgtccaaaatcaatagctactaaagaatcagatcttttaaatcctacttcaaggatcattttcatcttttttttttttttaatattatgtatcagtagctcataactatatatttcagtaagccattgaattctgtctctacctttgtacttttaaagttagtgaccaggaaaaaaaaggaaaaaaccttcaaaatcaataaaatacccttcatttgaactaattgggtaaaatggcaagtaggaattagtgtaatgatcactttaaaccttcaaagagcaatcagttttactgttttcaaattcatggaatgaacaaaacctaattgccaaaatgtttcaggctatcatttctatctgtagtccccataaaaagcaatatgtaaagcaactcaaattataattgaggaagctaaatatatcccttgcattcttgttcctgtgtttttaaacacaataattgttatttaaatgtatcatttgatcagtttacataacatttttttaattagtgaggttttaattaaaatttctttgactttttttcacttggtgtcattaaaacttaaataaagtagaaagtagtcttctgaactagtttatcacttttataggagctgtagttaacaaaataatttacatttaaaggataatattttcatctaaaatactaaaatacttgaaaaaatgtttctaaaatgttccaagttactttgttgagtttatgtgtttctttaggcaaatccagtcata

SEQ ID NO: 49158 - DNA, 1882 bp, Bovine  19866881030597
  misc_feature (1)..(1): n is a, c, g, or t
ntggaaaatcccatggatggaggagcctggtaggttacagtccatggggtcccaaagagtcagacatgactgagctttcacttttcatggcagaaaccaaccataaaattgtaaacactaactttcctccaattagctaactaaataaacaaattaaaataagccaataaatcattattatgtgactaaatactttgaaatgaactgtctaatgctttccaaacaggtaacccaatttgaggatttcctacttatatttcctatgtttggtttcatattctcaaatctaacaaaatgtgaaaatcatatattaaaattagaacactttaaaatatttgataccaacaagctccaagtttgcttttgataattgctgtaattgctcaattatgtcacttactgtttcaaataaaactcaaatatgggggtagaatctttatctgatatagtaagtgattgttttataaatagttttaaattcatttcatcagatcatttggaattgaataaaaataaataatgctaaaatacatatattcgctaaaaaagaataacatgtatttataagaattaatcttatttattatcaataaggcattttagaaatcagatgtggtgtcataaatgacttctttcaaaatttattatatgtatctataaactactattgattagtattgacaaatgcatagctctcttaaatgttttactgtatgtgtcatttatattcatataacaatgaatattctagtttgatgattcttaatctgacgcttatggatgaacttcagatgatctataaatccctgaatattaagcaaaactgtgtattggggcacacataaatatatgtaattcagttcatttcatgagatttttctaaaaaaaaaaattagttcatttacaaagttcttgacttaaaggatttctttaaattaactcaaactaaaatatcttttttcccgtaaatgaaaaattgctattaaaaattttcccttacaaaaataattatgttgaaatgtagatatgttcaaacagaaattcctacaagaaatcatcaatttaatggtttttactcattttttaatctcacatactagaattagaaaactagaatgttatcaacacgctagatcaaagagtttttgttttttacattttgaaacaatctgagctccaaagtttaccacattaacctaaaattcaatatgcatttaaatataagaaaatattgaataataaccatgcatgttatatagatattaatgcagttaatttgctaaatacacaaacgtttttataaaacacacaaacaacatagacaaccacaaacttcactcttgcactagagaaagaaacaaaaaaaggagtacactcacagatagaaaacttgttgctgttgtctttccctggaaacaatttaaatcctctagatttaaaatctatggcctttttcactagttaagaaaacaaacaaaaacatgtatcaggatacacaattccaaaatgaaattcaagttaacaaattttgttagcatggtattatgcaagttaagaaactgctttcttaagcctgatatagggtacccggaagaaagtaaaggaaaaaaatagcaatttgattactaagtagtaaaaataccaagcagtataaaaattttaaaggttccatagggagaatcctgcatacatatataggtacttttaaacactaatgagcttttgtagaagaggaaaaaaaaaaagaaaaattaactatcataagtcatttgaattcatctaattttatgaaaaattaaactagaaaaataaaaatactgatataaaagtgggaagaatttaacgaacctgcttttttaaataaactaatgtatttttaaag

SEQ ID NO: 49159 - DNA, 1971 bp, Bovine  19866881090361
  misc_feature (1)..(1): n is a, c, g, or t
nttggcaattggtggattattcaggtatgaacatgttcctgattctttcactgtgaattatgtccacaatacagtgcaagactctggtgttcatattgccaaaaaacaacgattacattacttcagacaaaagataaatattaaacacatggccatcagtattatcaatccatactgaaaacagaattgtacagaattgactaaaattgcagaatacaggtttaagaaaaatatgcattctttaaaatcaggaacgtgatgtaaattttgcttaaaagccttgaaagacaaaatgtactttagctggacatattattaacacacttccagagaaatatacttcaattaacaacaaaaaaaatttacagcagagaaacattcaaaaattatctgacctattttcatgcttttctaatatattacaaagtatttcctatatgacttttatttcccctctagtacctaggaaaagaatagtaggtgtgaatgtgtacttatgacttaaagggttaatgtggctctgtaaggtgaataaatggcctgaacaaatcgcctatagcattttcctaacatcaccagggcaacattctgcttcagtggtttaaatgtaccctagtggtttaaaacataattgcacttctctgaacacctaattgactacaagggactgacttaggtactttgaatacaattttattactttaattattgttcagtgaggtgttccaaagttttaaaacaaactgaaattttgttcctaagtaaagagaaaaacaatgctatctaagtttgcttttttaaaaataaaattccaactttacattagaacaagtggaaaattttaagtgaatttcagtgaactaatctttattgattggagaaggaaaaggcaacccactccagtgttcttgcctggagaatcccagggatgggggagcctggtgggctgccatctatggggtcacacagagtcggacacaactgaagtgacttagcagcaatctttatttaccaggcttatttagtgaatacaattctcattgtcaaaacaacaaatgtgagtatttggaaaactaaaaataatagtaacagctaaaatatactgagcgaaagtaggcccatgttgagctctcctgggcataatttcatattcccatcaggtgggcattcacattaagtttattttagagacaatgaaaatatagaaaatttaagtatgttgtctgaggccagacagctggaaagtggaggcaggattcgagccacgctgtttggatatagtgaaattgaccatcatattgtaaacagaatcaagactaagttatcaacactgcaatggcaacagcactttctgcttatcatgtgtgacatactctgataaatgttttatacagtagctaatccacattataaactatcctctctccacatttttacttaacttacattagagggatccccttctcctgatactttgaattagagtttgctagggtaccctcacaacataccacacactgaatgacttaaatgacataaattaattctcttacagttctgtaggatagaaatctaagatcaagacgtcatcagtattggttccttctgtgaaatgtcaaaaagaatctatcccatgcctctcccctatattctggtgatttcctagaaatttttagtgttccttggcatgtaaaggcatcaccacaatctttgccttcaggttcacagggcattctgcctgtgaatatctcttcccaaatttccactttttatataactttaacttgatcatctgtaaagatactattttcatccaaataaattcatattcacaggctctaggggttaggatttcaacaaataactttcaatgggatacaaatcaacccataacgcagatcttgtattccctaccatttattttcaggtctccagaaaaagaaaagtgctaataatatgagtggtaagact

SEQ ID NO: 49160 - DNA, 1500 bp, Bovine  19866881327376
  misc_feature (1)..(1): n is a, c, g, or t
ntgtaagactgctattttctgatatgccgtgatacatcgccaaatcatcacttctgagaaaatggagctgccttccggatatatttataagtgtgtaatacatgtgagatgagcacactttttaaaaacacacaaaaaagtacttgtcgatttttaaatgcacaatttttacagtgtcatagtagtatactggtagtcacattttgtcactaatagtttatttcccattaaaattcatgagagaaataaaacatcagtgacattcttcccatcaaaatgcattaactgaccagcatttttaccatctgtttaaattgctattatctaagataagactagagttctttgaatggttttagaggcaatgataatgtttttattataagtctctggcacacagagttgagaaaaaaaaaaaaaaaaaaaggatactcaggattaaacacacaatactgcaggaggctcctgaattcaagatggtgttcaatttcctgaaatttatacacggtaactttttgagatctatgtcctctttaaactttcatcatttttcacttttcaaaaaagcatatactgaaacattaaaaattcagcttatgtgatctgcatagatgctcaatagtaatgtctgagttatgtatcgtattttctcatctgttaatagatgtgttaatttttggaggaaggctgtggaaagaaggaggttagaaaagttacagtatataagaaggactcagttactgcatttcgcctcaggatttccaaaaactaaggatgctacattatttttattattattgatttagactatttatatcatttataggaagattcatttacagttaaattgttgtttaaaggcacactcatgtatgtatgtcatgaacctcagtccatagttcatcaggcactctatctatcagatctagtcccttaaatctatttctcacttccactgtataatcataagggatttgatttaggtcatacctgaatggtctagtggttttccctactttcttcaatttcagtctgaatttggcaataaggagttcatggtctgagccacagtcagcttccagtcttgtttttgtggactgtatagagcttctccatctttgactgaaaagaatataatcaatctgattttggtgttgaccacctggtgatgtccatgtgtagagtcttctcttgtgtagttggaagagggtgttcgctgtgacaagtgcgttttcctggcaaaactctattagtctttgccctgcttcattccatattccaaggccaaattttccttggaaccccaggtgttccttgacttcctacttttgcattccagtcccctataatgaaaaggacatctttttggggtgttagttctaaaaggtcttgtaggtcttcatagaaccattcaacttcagcttcttcagcgttactggttggggcatagacttggattactgtgatatgaaggtttgcctggaaagaacggagatcatt

SEQ ID NO: 49161 - DNA, 1073 bp, Bovine  19866881419425
  misc_feature (1)..(1): n is a, c, g, or t
ntcactcagttgtctccgactctttccgaccccatagactatacagtccatggaattctctaggccagaatactggagtgggtagcctttcccttctccaggggatcttccccaacccagggatctaacagaggtctcccacaatataggcagattctttaccagctaagccacaagggaaccccaaggaagcccataaattactcatccatagaaatttaagcaggacataaaattgggctaatgttaccaaaacatgtttgacaatattgttattaaattacttaaatcgttggaaattattcactaaatgtaactgatcatgaagaaatactttagtaaataaattaaaaaatgtggcctcagaattgttttctttcttttctaaagttctacataagtattgctaaagtaatttcttgatacagagattttaatttttaactttttccattgacctatagtattaactccacagctattaaattgcctttaataataaaaggtccttttcatgacattgttattttgtaaataaaagactcaatattttaagtcttcctgtgcattacattgttcagtaattcttctgttttctctcatgctttctctttggctgtagatgcccctgcaatactcttatcttcctgtgagaattctttctgtataatttgtgatgtattttcatgctagatttcgttgcttcttttgctacaggactgatttaatagcttagcataatgcattcccatttaattaaatgataagtaggactgtaggccaaaatcagtctgaatctgaatgggaccaatttgtttcatactctacaagaaaatttcattccttagggttttgttggtacttagagaataacacattttaaagtcatacaagttctattcttttaatagaaacttcacaaaaatgtctgtactcaagggcctctttaacccagatgatgtcaaacaaccaaaaagaaaaaaaaaaaaaaaaagtgatatccctttcaaaataagttatattgtgacagtgtattgctgtcattggtttttacggcttttgcaggggaatag

SEQ ID NO: 49162 - DNA, 649 bp, Bovine  19866881436136
  misc_feature (1)..(1): n is a, c, g, or t
natttttgtgaataatttcttttttgctactgttttaaggtcccctttaatatattactatcgtcaatcttcaaggcatttcaaactttccttaaaatttgttggcagatagcttttttgctttcacccttttttgtctcattttctctctctgtttgatcatgcataagctattttcacttttaaaactctggttttaaaacatattttcttaccagagaatgtaatattgaatccttcatatgatattgagaaatcagaaatgaagcgcaactgagccctgaaatttccatagagaccagcattgattgttgaaggaagttctgaaccagtcaagcgtgccagtggttgggtaaaactgccattctctgtgatcagtaagtagtcatgatggtcttccaaatgaaaggtgtggaagttgaactgtacacctaataaggaaaagaggaaaattagactcataaagtatattagtaaaacacacagagttaccaaactaacaaaaatcaggactcttataacagatttttgtgaaaatgaaaggcactggtataaaatattctgaatatatagtataactattatatctttcttttgagtttttctgtttgcttgtttcctttcgcttctctataaggtttataagagt

SEQ ID NO: 49163 - DNA, 1646 bp, Bovine  19866880443668
  misc_feature (1)..(1): n is a, c, g, or t
natgctataaaatatgtattatacatttgtacacatcatgtatattatatgtgtgcatttatgggtatataaaaatggcttttatatcatgccttgtctgagttgaaataaaagttctcccattcactgagctgatatctgtatacaaacatgagagaaaatggggattttcctctcttgggagatagtcagcatagtgttaaaaatgagaaaggaagaaatacttcttttttgggttatggtttgcattttaaatttcattgctgttcctctcaacttccatctgtgttggcatttgggaatcttgtcgttgctctttctcaagtggagtggaaaagcttagaacagaatttacacgtttaaatacaaccgaggctcgatcacatcatgattcattccaggtctgaatactttttcttaggcttaaaaaaaatccaacattttattgaataaaatatttctcaaacttgtaaagctactattattcattattagcagtcgattttgcactaatggaaagttcaggctgaaaatacaatgatagtattaaaattttaggcacttaatattttatgacatcaaaatgatgttttcatatagatatattgttaggtaattgcaatttattattgccattgtggttttattttactttactgtttgattaaggttcagttatgacctagtaacaatgagaataagccataaatagccatattgggttgctgtatgacttttgttgactctgtgctctatttttttttaactttctgaatcccagtctcttagcattttcttgtgtgtgtttgtgtgtgtgcatgtgtctgtgtgtgagaataattggctgaataattagtggcctggacctctattcagtgactagtcaggtttggctgataaattgctgccttggtcaatgtggactgctataacagagtactatagattgggtggcttaaacaggagaaatttatttctcacagttctggaggctggaaaggccaagatcaagtcactcttgctggtttggagctgtctgtcttctccttgtatcctcacctggcagtgagagaaggaaagaggaagcaagctctttttaatctcttcttataaggacagtaatcccattcatgagagctccactgtcttgatctaatcacatccctaaaactctacctcctgatactatcacattgggattagggttttaacatgtgaatttgaggggcacacaaacattgtctttaatgattctctaagattttttctagctctgtttgtgatggattcttttagaaaaaaaatagtttttagattttaaacaaattgtgtgtgtgtgtggatgtcttttccaacacttttaggcaatgtaatagaagttcattgtgatttcccaatgaagccatcagacttgtgatcgtttaatagtgaactcactttcaatgatgaggactgtatgattaaaattaggaagtagtagatttgggggggtgtcattaaatttaagtactgggaaaggtaaaatataaatagcacaggtttccccaaatttgttatcttcaaattggaaagacttgaaccattgaatgttccagggttcttgggaattaaggcagaggcctggttatagacatatgtaagtcatt

SEQ ID NO: 49164 - DNA, 1594 bp, Bovine  19866880456986
  misc_feature (1)..(1): n is a, c, g, or t
nactgctttttacaattactatatgtaaaacacccaattattctaaaggaagttagggaggagtacgttcagcaacctcttaaggatgtcacactcacacacacacacacacacacacacacacagacacacaaaggtttttggtcactgaactagaaaagaaagattccaggaataaacgaatggatctaatttaagatctcaggaatccttacattctctcagcatatgaattcttcctggtggacacaagctcttgctttttgactctggatctctaccgcagaataaacagaaaagaaatgaagcttggctcaaaacagatgtgtatttaagtccaaggtccaaatctaacccatttattatcagttctttgcatgaacaaatctattagctgaacatttaaataatatttaaacaggtgaaaataaaagcctaagtcagcaatacatttatgtaaccaaaagaaaaagtagaaaatgttagtgaccattatataaccactacatatccaacagcatgcataagaggtatttccaattccattcagaaaaataactatttaaggattcaggaggttaaatatttttgtccaatttggaatattagcttttgataattgtctaagatataagaactcatgcaactcctgagtacctactatatattctcataactgtcttccctagatctttaaagatggattcatttaggcttccacttacagggttggtttctgactcattactctttctgaaatacttactccttagtataagctactatttactgaacgttaggtctgtgccaggtggtttacataaagcttcccattatttgtcagagcagcaaacagcactgccattttttatatctgggaaaattgagacctagaaattttcaggtatttgatttactgggcctagctattaaatgttgaaagctagttacagattaggtcttcttgagctcaaatccaaggtctacagtccttaaccaaaagttcttacgttttagcatgctttggaagtcttgttaaaatgcatattgatgaggcccacccctaaagtctctaattcaaagcttttgcatttctaacaagttctcagatgaaattgatgctgttgatcctggactacacattaaaagcattaccgtacactaaattctcctgaaatccctcttacacacggacacatgcacacacacacaccattgtagaacaattgttctcaataccaactatactttgaatcacctgcagaagattaccaaaacaagaacaaatacccatacttggacaccataccagacatataagctattttttatagcttatagacataagctatttttatttaggagattctaatggacatctcctattcgtggatcacaaccttgtggcaaagggacttgtgtaactcagtgaagctatgaatgatggtgcagggccagtcaagatggaaaggtcaaagtgaaattttgacaaaatgtggtccactggaggaggaaatggcaacccattccagtattcttgcctgaaagccctggagagctccagtattcttgcttggagaaaaggaaaaatata

SEQ ID NO: 49165 - DNA, 1180 bp, Bovine  19866880462168
  misc_feature (1)..(1): n is a, c, g, or t
nataatgatattccacatcactgtttatcatttatcataatcatcctttcccctctttaagttagtgatttattacacattagtttttttcactgtcttgtaactattaaagagaatgaacatcatttaatgaccaaagaaagtattaattttagaagaaggtgccagattccacctaggaagaaaatgcacacattccagcagtgttgttagctagaaaatcaatagacctctcatctcatgtcattgtgggaccttggctatgtatgtgactgcatgtggtttccgtagactgaatacttcgctgaagcctgagtgccacatatttaagatgacagtcctgtatttaccctgtcataaatttcaggttcaatatctggctcacttagtaacttcatattaccactcctatgatatgatagaaaactcaaaatggcatatggtagaacagttatgctttcttgaaggtatctggaaaataagatatatcaaaggagatgatatacaatagattgttttctgtgaaatgagttaccctaatgaaattttgacgactgtcatttgttaatactttccgataactgagtttatcaatgaaagcaaaatatatcagattaactagtgaaaaaaataaaattgaattttttaaagcagttttttctgtagcttcaaaattatattcctgcaaaacaataggggcagtaaatgcctctttctcctccaactttcagagctgaattcttcaatatatagttttaatttttttccagtgttttatggttgaataggaattttccatagacaagaaaaaaggaacatctttatttttttccctcccttgcaagactcttaaactgaaaattagaattaaattttagaagcaatccattaattgttaatcagcatatagattctaattccattgctaatcttccagggagatttctaatgattttacaagatcattaaaggtttatataagctttttttttttttaagttagcatttaaaactccacaatcatatcattaacatttagcccacctaaagagaacattttttaaaatcctatatatgacaagagattagagtaagagaatttacaaatcaaaagagtcagaaaatcttaaatagagactacttatagcatattaaactgggtccttaacaaagacttact

SEQ ID NO: 49166 - DNA, 2758 bp, Bovine  19866880480548
  misc_feature (1)..(1): n is a, c, g, or t
naccctgttattgagtctgtgatgcctccaacctctcatcctctgtcatccccttctcctcctgccttcaatctttcccagcatcaggatcttttcaaatgagttagctcttcacatcaggtagccaaagtattggagtttcagcttcaagatcagtccttccaatgaaaacccaggactgatctcctttaggatggactggttggatctccttgcagtccaaaggactctcaagagtcttttccaacaccacagtttaaaagcatcaattcttcggtgctcagctttctttatagtccaactctcacatccatacatgaccactggaaaaaccatagccttgaccagacggacctttgttgacaaagtaatgtctctactttttaatatgctgtgatagattattatgcagtcattaataggtccagttaggcaaaatagacatctagaaacacagaaaatatttacaaagtgattcaactttgacaaaagcaatatatagatttgtatgcatacaatggttgaaattttaggaaaaactatgtatattcaaagaaaaagtgtgctaaaagtaggtgaaataaaaatgtgctaaagtaatgaattaatggagatttcagtccacttttctattattaaaatttctgtaatattacagtcttcttagtaagaaaagtcattaaaaaatgatcacagtatttaatttttccatgccaggaaactagcattcaggttaacttccaataagtattcaaaaaatgcattcttctagaatccgatttttgtaacttatgcaataatcaatattaaggaaatatgcctatagttatttctaacttgtattaactttcctacttctaacataatgtacagaatttaaagtaaaagaaagaactaagtacttaaataaatagatctcccagttaagctgatactctccagtgtttacaaagttttctcaagttaacatcaaaatggaaaatggaagtattcatatgtttcattgtggtacatggaagtttcattagacagggttgccccaggtcccacctctgtcctaatgctaaagagataaatagctctgcacactcaaaaactagtgatgagcttgcctttgcaacatgtcagaaaataagtagaagaaaatcatgagaacaaatttggtgggaaaatgtgtgggtgtttgtgtttggggtgtgtgtgtgtttgtgacagcaagagaaagtgtgcctttgcagttaagggggtgaatgggtggtggggatcacagaaattcacctttctgctgtgaccttccattactatcaaagtttgctttcagtgagtagttgtctcaagaatcttcccttccccaccagtcctgcccactggcaagatctctaaaagtccactgatggagttgaaatcaaagaaatgggcagcccctagttactcaggtaacacacatttacaaggttataatctctgtattttatttttctattcattccttaataaagttgtttgcagttaagaaatcactgttgagactcatatcttatatagtcataaatgagtttatgaccctttatttattggtgaacagagatttatttgcagaaaatgtatactagggattctccaaatgtagaaaatgataattaaaaagaaaaacaagcaatcttacttgtagcaatataaggagaaaaaaggcagcagaccagtggtttttaaatgtatagaaatatcagagcaaacatgtattttatctttttaccataataattatagatgtctgagagtatcagatttaattttagatgttttaagaatatgcctagacccctctctcatgctctctgtctttatttggttgctaaattaaaaacaatacttaaaagatctgatgcagcctaagagaagctgagaaatttattgacaacttattttatcaatttcttttggaatgtaaattactaattcagaaatattcaagcctttttaatacttgcaaattagaaaagctattgctatgaaacttactataacagagtaataattttcaaacttttctctgaagctgtgagcttcagagattctgtatatttttaatatgattttcatatatatatacttcctggctcagggatcgagcccaggcctcctgcattgaaggttgattctttacgtctgagctaccagggaagcccatatggctcagatagtaaataatccatatatatacatatatgtaggtgctcagatggtaaagaatccatatatatgtatgtatgtatgtatatatatgtatagatggtatatatataccatggtatatatatatgaagcccatatggctcagatagtaaataatccatatatatacatatatgtaggtgctcagatggtaaagaatccatgtatatgtatgtatgtatgtatgtatgtatccggtgttagatgataaactatacgtggttggaggaagagatggactgaagactttgaatactgtagaatgctacaaccctaaaacaaaaacttggaatgtgatgcctcctatgtctacacataggcatggccttggcgtggctgtactggaaggtcctatgtatgcagtaggaggacatgatggctggagctatctgaatacagtggagagatgggaccctcaggctcaccagtggaactttgtatatatatatatacatacatacacgtatatgggaagaaccgggagaaggcaatggcatcccactccagtactcttgcctggaaa

SEQ ID NO: 49167 - DNA, 2842 bp, Bovine  19866880569710
  misc_feature (1)..(1): n is a, c, g, or t
nttaaagttgtaaaaatttgtttgataagttattgagaccttaaaatataaacaagaaaaagtttgttgtaaaattgcagaaagcaaaagaaaatttgcaaatttgggaaatatgtataaataaatatagtcctgttggaataatggcaaacaggaagagtgtggggaaaaaaaaaacagtttaacaaatagattaatcagggaagataacattcaactaacaaaataaagaaagaaaaaaattaaaaataagcaaataatgcacccaaatactgaaaggactttccaattttaccaggaccacctagttcctagtggagtaggtagtctttcccttctcactacccactccagtattctgtcctggagaattccatagtctgtatagtccataggtcgaaaagaactggacacaagtgagagactttcactcacaccagggtcttagagagtgaagtatcagaaaatcaaaagagaaccaagtctaacagcaacaacaacaaaaaaagaagactccaactggtatcagatatgtttgtagttcatgtacaagaaactaaaatgataaattataaacttattgttggaaatagcttttagtaacatctaaacaagttcaatagctttctaagcagttgtcattaatatactgcagctaaatacgtctctataacacttggccatatctctcttcacttttcctcaatctgccttgcctgtgtctggttcccaacctgaatgttgcctcttgttaatcatcaagctctgtccctctcgacttgacattcatatgtgtttactcagcaggttccaggttactctcaaggactctggatcaatttctcacactgaccttccccactgtgaatcacctctgagggccccagcctctcatatcctgccagcccaataagcaggcaggcaacccttactttggagaggatggaaaaatcttaggattttttttgaaatagccaaattcattttaatccatcaggtgcatgtgacaaatttttgacgaggagcaggttcttattcttcttgctttgattttagtgtttcccctcggttattgaaatgatatatattttttcttgtagtatttctgtcaattttctttcagtcatccagagcttgctcactataaagtatgttcttgagccatctgcagctacaattcgcagcccatttatgtccagatcagcagaatgtatttcagtagacataagttgaatgatgatagagtcagaaatgacactaatggaaacactcaaaatacaagatttgttgcctgtcgcatggccaaaaattacagccatattgaaaattaggtatgcatgtggctgctgctgctgctaagtcgcttcagtcgtgtccgactctgtgcaaccccatagatggcagcccaccaggctcccccgcccctgggattctccaggcaagaacactggagtgggttgccatttccttctccaatgcatgaaagtgagaagtgaaagtgaagtcactcagtcgtgtccgactcttcgcgaccccatgaactgcagcctaccaggctcctccgcccatgggattttccaggcaagagtactggagtggggtgccactgccttctccatgtggcacaggtccttaaaacctgaaaaagtttctcatccttaaatgggttctaagaaaatgctacatgatttaaaaatgcaatcattcatgaacccaggcaagaaagtggtgtgacaactatcgtgtgcaattttatgtgtaatcatagcagtcacttcttactgaaggaatgaggtgatagagaccttcccaagaagagattcagaagtctaaaattagtgcttacccatgttttaaatagcactttgatttcaatatcgattgagtttattgaaagtctccactggccactttaaatatcaagttaaattgaaagctcccagtggtgttactgaaacctaccactagcaggcacctttggtttttcagagggccaatgaccctgactatcactggctacttaaaacctttggcaagcagccagaggatttctgaaattagctgcttttcttttagcctgttttcattgaataaaaaaaaaaaaaaaaaagctttatagaaagtaattacaaagtctttacattaattctagtaattaaatgtgatgacacctattattattggcttctgttcttttctgcattactagaggcaaagggaattcgacataagagtttacgcctggctgggcatgaattatttaaatcaaataaatggacatattacaaatgtattctatttgaataacttggaaaagtgagaagtattttgagtgtaaaaacttattaatatcataatgaaagtaaagtggtgtgaccaggccaaagaacactaaaatgaccaaatcccatttcctggttcaaggatttttttaaagataaaactagtatcaagaatatcaggaaatcagagactggtagaaatggattctctttcctaaaccatctatcttaatttggaaaacggcattctggaggaaaaaagtatgtgtcttccctttgctcttttcatatggtgtttattgcattttgactaatgtccatgtacttaacatcttccaggtattagcataagacgaatgaccaaaaacaagattcagaagacctctttataaggtcattttatgatagctgtatattgaattaatacctagaaagtagttgtttctatgacattcattaagtccagtatggagaagcaaaagcaatttatttaatactttaataattatttatttatcatttatctcatcttgactttaaactatttaaaattagagcat

SEQ ID NO: 49168 - DNA, 2347 bp, Bovine  19866880595451
  misc_feature (1)..(1): n is a, c, g, or t
nctttgtgtagcatcttttttgtatatttatacttaaattgaatttattataggcagaattgagttgggtctttttgtttcatccaatgtgacaatctctttttaactgaaatatgtgaacctattatatttgatatgattagtggtatggttagttttaagtctatttattatctcttatttgtttccttcttgctccttcctttctttgttcagcttccctctttttccacccacttttgaactgagtatctttttagcaattccatttcatctccttgttggattattcattataccttcttgctttgttattttgctaattatattaaggtttttgaatacatctttaacttatcactttatgtcaagtcattttatatcatgatatgtgagttgcagatagttggcttctgcttttacttcttaatttttataccatttttaactccttttacttgcatatgttataaaacacataatacattgtgattattttgtttcaacaatgatcttttgaataaaatttaaactataagaaaatttatttttgcccatacagttgttttttctgatgctcttaatttctttagatgaattattttcatctggcatcatttttcatctgcctgacaaattttaaatttcttgtattgtatgtcttttcaaaatgaattctttcatcttttgtatgtctgaactatcttttattgctttcatttttgaacaacatgttcactgaatattaaaccctaggttgtcaatcttcctttcacatctttaaagatatttctctactttttgagtttttccaatgagaaatatgctgtcttccttatttttgtttgttcacaatatgtctctttttcttgtggcagctttgaagatttttccttttatgactggtttaaagcaatttcattataaagggtgttggtgtagttttcatcacatttttttgtgcttaaggctcatttagcttcttagaatgtgcagttacttttcataaaattctgaaaattttggtcactatttcttcaaatattttgtttgttcctcctcttttcattacttcagcaatctagttacatacataaaaggttgcttgaagttgttccacagctcactgatgttctttgcaatcttttttaaaattattttttctgttttaaatttcacataatttttattgctatttcttcaataccttaaattttcattttagacaatgcattttttatctctagaagtttgatgtgggtctttctcatatcttcaatttttctatgtaactttttagacatatctattctaggcataataactgtgtttatctccttgagcctgttaattctaacacctgtgtcagttttaagtcagttttgattgattgattattctcaatatggatcatgtcttcttgttgctttgtatgtctgcaaatctttgactggatgccagaacttgggaattttacttgtcgagaggatgttttcttattcctatatacattcttaagcttccctcatacatgcagttaagtgacttggaaacagatccttagggtcttatttttaagagttgttagctgcatccagaaaattacgcagcatagagccaattaacccccattactgagacaaggccttctgagtactctacacaatgctacatgaattatgagtttttctagtctgactgatgggaaccagtatttttttggccctgtgtgaatgttaagcactgttctctttaattcttttgaatggttatttcacagcctctagccatttcttcaaatgaaaaaactgatcagtactctgtggaatattcagcagggaccatgttcataactctaggttatttctctgtgcatttctctcctttatggttgtgtcctgtgaattctagcctgcttgttctctctggacctcagcttccacttccccaggccagattctgcatgtgttcctcttccctgaactgtggcttgcaaattctctggtgacactaacctaggacatttacaaggctcaccttatttgttttctgtctctcagggatcactttctttggttgcctgatgtgtagcacctttatttgatatttttgttgtcgttgtttcatgcaggatagtaaatcccatccttgttactccatctgacctggagtctcagctgatcttaacaatggagacaggtgacaggaagattatgaaactctagtatagtttcaaagaaaacttaactacacatatataagttcagttcagtcactcagtcatgtctgactctttgcgaccccatggactgcagcatgccaggcttccctgtccagcaccaactcc

SEQ ID NO: 49169 - DNA, 1005 bp, Bovine  19866880626266
  misc_feature (1)..(1): n is a, c, g, or t
nagagaaaagagaggaaaaaattatttattagaaacagtaggatagtaatatagaaatagaaacaggcaggaaaactcctgaaactagggggtaaagtggaaagaaaacatttaaccctcccccttccaagcttctgtatcactctctaacctttgacctctatgaggctgactcccaggcaacaggtattataccattgccttttgggatataggttaataactatccctactgcccagtccataaggggaggaaattcctcagttttattgatattggggtgatgattttctgttttgccaagctgaatctctgactttcattttttgttcctgaattcatttctgtcccaaaggaaacatcgtttttcaaggtgattcaattctacttgactgtacagattttgtagcattattggattaaattggccttatgggtttaccttgggaacccagccaccatttataacattttctatgggggaaatgcatttcaagctctaaactaccagatgtacaaaaagctcattagtaaaccagtaacgtcctttcttttctgtgccttgcctttgcctgtgagagaaacaaccacactggtatgaactaccttcttttaactaacttcttttctcagttggaatgcttttgtctgtaagtgatagaagacactgctaagtggggcttaaacaataagaacacttattatgacattcagcaagaagtccagagagaagcagatctaagaacaggctcagcagcctaacaatgccttaaagtacctaagctctttctaaccttcagctttgccatgctctacatgtcatcaatctccctcatccccagtccctaggcagcagcaactccatacattaaatcctcataactacatccaaagactggaaagcagaggggactgaggtgtttttctcctcatatatagttctttgatcaaaaagaaacctttcccagaagccttgcaatagactttctttcaggtcctattgg

SEQ ID NO: 49170 - DNA, 1759 bp, Bovine  19866880648152
  misc_feature (1)..(1): n is a, c, g, or t
nagaggaaaactgggttccatcctactcactccggaaagtaatctgacatacactgagctacagaaagacttgatattacccatgtctaaaataaaggtacaacacttaaatacacagaactaaaagtcaggggtcttctagaaattttcctaagaatacaatgtggaccacagtagacaggataattcttccaaaactgtgtcactgcttgcaacttttgaccaggtctgggtgtgagagaggatataccttctgtatgtttctctcccctaaatttgaaacatgcagtcatgaaaaccatgtgccattatggctctctttgactcacctctcttcttttggggcttcaagatgagtgaagaatggattcccataattatttattgaatttcaaaaatttgttctcccaaacttcagttgggaagtgaaaataaaaggattgtcaaaaaaagatagtcttttcactttgtctgatcctagtgtgtgcctgaaagtgaagaaagcaattcttaaagaacatataacataccgtttctttttggacaaaacaaaaggaagaggaaaagacaataaggagaaggatacacttaaatgcacacaacgacacactttaaatgggaattaaatatttttaaactacagtgaaaacggtcatagaaatttcagtcactggcagttaatgcaattttaaaattagaaataaaaaagatgaggtaaccaaaaactgtacatcatctaaattttaatccctaacagctatattatttgcaatgaacatgataacacttcagtgtcctgtcaaatttgaattatgatctttatcaacttatcaacaattatttattggcgcttcagcactaggcttggctctgagttaagaaatataaagagcatgtaaaaaacaaagtctgcttcaaagagtttataccatagtttgagggactgttatacttgaaataatacagcataatataggtactatataagttaaatgctaaatttacacgcaatctaaaatgtgacacatattcatacatttctaacattttatttctcgtctgcttttcccttttgtacattcagttcctttccattaccttggctattgatctttttaatgtgggtgaagcgccaggcctaatgtactgtagattctgtttgaagcttgtgtttgtgacattctctgtctgtctttaaaaataaaactaagctgaggtattcctaaactttttagaacatgaataacttctgattgcttagaaattatttggagttacttctcaggaaagaacagacgtttgtaaagctgaagaactaattgggctttgcacagttctgtcaaacatgggaaagcttctgtctatccagacacctggcagaaaataacaaaaggttttcactgacatgcaaagcaagagttcactgaatttttcaaaattctattttcaacactatgttcattagttgagcttatctttcttgtccctaattatgttgttttagatgttggaagcgttactttttaaaaacatgtgtaaccaattacaaaattaataaatatctatgcttaattggaggatggatagaggtaacaattgtgatcctgaaaaaaacctcaacaaagtaactatgatattcaaatactttttaaaaaactatatatgctttaaaaagtgaagtatctagttataaattatttctttttcctttcaagaattaaccaactaaatacagcttttattaactcagttctacatt

SEQ ID NO: 49171 - DNA, 1004 bp, Bovine  19866880699100
  misc_feature (1)..(1): n is a, c, g, or t
ncgtggaaaacagaagtctgaagctagaaggaaaacagtattccacagaaagaatctgaccgctcatgagggcagatactttcataaacaagaatgtttttagctactattacaaggatcactattaagtatgcaaagtgagtaggtacaaaatgagttaaaagtatgaaggctgaagaaactatcatctagaggaaatgaaagcaagctgtgaagaaaagtgcataaaacccaaaacatgtacgtgttcatgcacacaaacaccacaatgttgtcattactttgaaaagtgatcaaggagcaatccttccaaccctcttctcttctaagcagagaccaactcaggaataatgcaagtcataatgagtcactacacataagcaggattctcaggacaaggaaattaggaacagctgttacttgggctgagtcaaagtgaggctgcatatccccaaaggtctaggactattagagcacagaggagccacctgatctcagttacttcatcaagaagtaccagatttaccttggctgacccaggtttttgttctgtcttgtgtgtgtgtgtgtgtgtgtgtgttgtctgtcatgggacagaagtaatgcatataacatgtgaaaatatgatacaaataagcaatcacataaatgaaaagggcaaggtggacaagccatgccaaataatctgggggaaatatggctaaacaccctcagggtttagtattggcatatctccatgttaacatttaagccaccatccatttatcttttttcaagtattaaaaaaaaaaagttaccagtcaataatttctgactccgagtctcaggctaaatcaaaatctgtccgggtctacttgtttctgctaccatgaacacagggctgatcgcatctttctcccttcttaatcttccccttcagtgtctttatgggtcataccaactcttatcataaaaagctcctctttgaaataaacaacctaaggctgcattctataatatggcag

SEQ ID NO: 49172 - DNA, 852 bp, Bovine  19866880723095
  misc_feature (1)..(1): n is a, c, g, or t
nacacttttgtgataaagattttctgtttcagtgcaatcacatttcttaacatttgtctctaggtagacgtatttgacgaagaaggcgatggcaccccactccagtactcttgcctggaaaatcccatagatggaggagcctggtaggctgcagtccatggggtcacacagagtcggactgagcgactgagcgacttcactttcatttttcactttgattcattggagaaggaaatgacaacccactccagtgttcttgcctggagaattccagggacgggggagcctgatgggctgccatctatggggtcgcacagagtcggacacgactgaagcgtcttagcagcagcagacgtatttgatgtttttaagctaaaaaaatagcacattctgtatatcatattaattattaaattataaaaattttagctgcacttttacattagaaacaacatatattacagaaatttgaggtcatctttaaaattcaagaggcttttcagaatggtaaaatgaataaaaactttaaaggaaatgtttttattctaagcaatcacagtacagaatgaaatagttaaggattacatattttgaaaattgaaaaacagaaaatattgctcttttagtgtgacattgacattggtatcaacctacaaagtgtgtcacatgttgatttttttcttctttttttaaattaaaaaatccagaattttataacattcaaaacaggttacttcatctctaaatcttttgcttatcatggctgggcaagagataaatcattttcctcattgagacaaaatgtgagttggtattataaagtaaaaacaaggcagtctgagagtgaggaag

SEQ ID NO: 49173 - DNA, 2473 bp, Bovine  19866880750010
  misc_feature (1)..(1): n is a, c, g, or t
nctctgggagattgtgaaggacaggaaagcccgatatactgcagtccaaggggttgcaaagagttggacacaacttagtgactgaacaatgacaaaatgtctattttgatgagatgtgtttattctccagttttcttataatacctttgtcctatttttgtatcaggttaaattctggcctcatagagttaagttaggaagcattctatcctctgcaattttctgcaagagtctgtttagaattgttttatttaattctttcttagatgtttatctcacagcatttgacaaaggtaaccacttggtattaatttacatattctaacagaaatcatgcttgtttttcttgccattatatctttagagtctaaaagaatgctgacttcatataagcaacccaggaaatatttatggattgtataaaagattaaaacaaacaaacatgactctcttaccatgttctttgctgctgatttaggaaacagaattttcatcttaatatcaattcaaaattctgttaccattaattaatttcaaaaaagtacacctgaggtcttattttatacatttatttactttttatagctggcataattttaataatttaatggtaaaattacacactgaaagtaattagcagtttaaatacgtagacattcaagtaaaatacctataatcttttctgcctttttcaaataacagcattagtctgattattgtatttatatcttactaaaaaggatataatatgtttaaatgcttacatattttccattgcacatgccaaagaacaagtggtttaatagtgttttctcagctccatgtttgtagttcaacaacatccaatgtttctgttcaatttcactactaagtataaatttgcaacttcaacctggtatttcctaattatccagcaccctgacatctaattttttaaaataatttgaatttctaaatcacttcaaaacctaatggaactcaaatgctattacagctgaaaccacttaatagagccctgttaataaagacaatctagttaaattaggcactttcagtgaatatattgtatcttggccacttaatgtaatccaaaataataataatggctaataagtacaacttgataatagcacattttctccattaaccatttgcctgggctgttgggatttttctgcttcagagttaataggagtcattgatttgagtgattcctttataaattctaatttgtagtttacagaacacaagtactcataattcagggatatcagtataatttaggtatgtatacaaaagcctgttcaataatatataactgtcataccccttcccagaaaactaacatagattgttcttgaaataagtcattgctatttttattttaattctattaggcatcagaattgaaatatcacaaactgtcattaatattatttcacatgggtgaaacattttgcaaactgcaatattatagctattaactttaagctatataagacaaaacacaaggttatagcacagctaacagttccaaaagttaaaacactgaaaaacaatgtgtcatagtagcgcagtttttctatctcttccatgtaatttagtcaaagattaagctgcttttgtaaacagtgtgacacttcactaaagcacattttgtatatcctgttaaagaaggataaaggagttacttcattcaaacaaaagttttgctgaatatcacacagccttttagttttcttattctaaaagttcttgaatctttaaactaatttgtataactatttccttaccagaactaatttttttctttaatttcctcaatatttatcaagtaccaactacatgttaaatattatgctatctttcattagcataaatatgaatattgcaaaattttccattgtctagttggcattattctgcctataatttgttctctcccataggggagaagttgagaactagctttatctgaattattttacactattattctgggttagatctgctagtgagaggctttctactgatatctttaagagaatactaaatcatttttctacagttgtgctgtgttcaggcagttaagatcttctacaatgtcttctcctagctttcaaggatccttctggaaatcactgttgtgagaatctaactaacatctccagtgtagacttctctaggattccaaactgataaggtggttactctggaaaatcactcactatgggggtttaggtggctgacaccactagaagaaacacgccagcaatttttgcactgaaggatatcttggaaaacacttttctgatcttagattccaaacctctgaaagattttataatttctaattcctgttttaaattattttcataattaaacttttagttaaaatagagcaacatgaattcaccctctcatctgaaattttaaaatgaggtaaactataaagcatgtttttcaaggactg

SEQ ID NO: 49174 - DNA, 2843 bp, Bovine  19866880772451
  misc_feature (1)..(1): n is a, c, g, or t
naagaaaagcaaaaggcaaaggagaaaaggaaagatatacccatttgaatgcagagttccaaagaatagcaaggagagataagaaagctttcctcagtgatgaatgcaaagaaatagaggaaaccaatagaatgggaaagactacagctctcttcaggaaaattagagataccaagggaatatttcatacagagatgggtacaataaaagacagaaatgttatggacctaacagaagcagaatatattaagaagaggtggcaagaatacacagaagaactgtacaaaaaagatcttcctgacacagaataaccagaatggtgtcatcactcacccagagccagacatcctggtaggtgaagtcaagtgagccttaggaaacatcattatgaacaaagccagaggaagtgatagaactccagttgagctatttcaaatcctaaaagatgatgcagtgaaagtgctgcactcaatatgccagcaaatttgtaaaacagcagtggccacaggactggaaaaggtcagttttattccaatccccccaaaaaaggcaatgcaaaagaatgttcaaactcacaattgcactcatctcacaggctagtaaagctcaaaattctccaagccaggccattaacagaacattaaccatgaacttccagatgttcaagctggatttagaaaaggcagaggaaccagagatcaaattgctagtatctgttggatcatagaaaaagcaagagagttcaaaaaaaaaaaacccatctacttctgctttactgactacgccaaagcctttgactgtgtggatcataacaaactgtgggaaattctgaaagagatgggaataccagaccacctgatctgcctcctgagaaatctctatgcagctcaagaagcaatagttagaactggacatggaacaacagactggttccaaatcgggaaaggaatacatcaaggctgtatatttttaccctgcttagttaacttatgtgcagaatacatcataagaaatgctaggctagatgaagcacaatttggaagcaagattactgggagaaatatcagtaacctcagatatgcagatgataccacccctatggcagaaagcgaagaactaaagagcctctcgatgaaagtgaaagaggagagcaaaaaatttggtttaaaactcaacattcagaaaacgaagatcatggcatccagtccaatcactgcatggcaaatagatggagaaacaatggaaacagtcagagactttatattttcgggctccaaaatcactgcagatggtgactgcagccatgaaattaaaagacacttgctccttggaagaaaagttatgataaacctagacagcgtattgtaaagcagagacattattttgccagtaaaggtccatctagtcaaagctatggtttttccagtggtcatgtatggatgtgagagagttggactgtaaagaaagctgagcgctgaagaattgatgcttttgaactgtggtgttggagaagactcttgagagttccttggactgcaaagagatccaaccagttcatcctaaaggaaatcagtcctgtatattcattggaaggactgatgctgaagctgaaactccaatactttgaccactggatgtgaagaactggctcattagaaaagagcctaatgctgggaaagattgagggcaggaggagaaggggatgacagagggcaggaggagaaggggacgacagaggatgagatggttagatggcatctccgactcaatggacatgagtttgagtaagctccagagttgtgatggacagggaagcctggagtgctgcagtccatggagtcacaaagagtcggatgcgactgagagactgaagtgaacttagtaaatgatggtttgaaatatccttatctttcatgtgctgactttacaaaatagttcttagatcccagaaatattaaattatattttgcataataatttcaaactctgtcttttgaaagtattggaaagacagaatgaaaggagactctttatggatagatagatttttttagtgttttgtattataatacaatataaaataagatatagaaataataattactatcttctggaacataacaaactaataattatttttattattaaataaaagagttaatgttttctaaatatctactcactatgtgccaggcacaattattataaaatctttatatgtattcactaattgtaatctcaccacaatcctctggtgtggattttattattattaatagcaattgatggatgaaaaacattaagacagtctgaattccagacttttgcattgacattctttttagaatatggtctttagagaaaagaaactgagttcgaaatcttactttgcatttgttgaaagtggcagccatttacaacaaactattgaacctctgtaaatatcaattttttcatttgcaaaattcacaaacttttgaaggcaaaaagcataaacaggaatggaaattacttggcacatgtaggtccaagaaatatcatctaatatgatcatcatcattgtcatcatcatcatcagatataaaggaaagaattgtgcatattctcaggaatattatagatacttaataaatactagtttcctttcttgtatttcttcaaaaaccataatagtttgaaaagataaaagactcttccacacgtgaaatggactctaactgggatggaatcccacaggggtatgagaactgtgtctgtgaatgaccttgaaatgaaacccagagactatttttaatcctatttctaaatttaactgtgtcatagtctcatattagtcctctcat

SEQ ID NO: 49175 - DNA, 902 bp, Bovine  19866880777523
  misc_feature (1)..(1): n is a, c, g, or t
naagaatggcctgaaccaacagaagaaattgaatggataaagcaaagatccacacttagtctgaaaattcaaataaaaaaaaaaataaacctcagttgcaatgaaattaaaatcaatgaattaatgccattttaggtaaaatttattttgaggacctggataaccctaagatccaaccatacaagttaatataatctgtgattaccacaaatgaatttaggattcattgagggagattagtatagaacaagataaggctatactatgatcatcatgaataaatttgggatgcattcctaaaaatacagtgtatcatgtataaaataaacttcttgtcttctgtgtgtccagtttttatgacattttaagggaatggaatcataggaaagattacttagtatgttgagagaaaggtaccacatgaaacattccaatgaaatatatattgaagcatagttaattgttgtatggaagaagtggcaaatatcaaggcttgagagattcgtgaataggacacagtcagtgactcactggggcctacgtatataaatgatgctggaaggaaactcggtgtatttgaaatccatgcccatcaaatgacaactttgctcaagaaatgtcttttagttacagatgttatcagttgagactaggctgcccagagggaacaacataattaaagtgacaataggtgagttgctgcagggaagccaagaattatcaataacataccttaaatgtcagaaatgatttttctgacaatttctaactgtggtagattacatattgctcccaattatcagaaaaatcatctctgacatttaaggtacatctctcacaggtagacacagcagtcacacagcaaccagtaaagatgtatagttccctcccctggagagtca

SEQ ID NO: 49176 - DNA, 2489 bp, Bovine  19866880895562
  misc_feature (1)..(1): n is a, c, g, or t
natgcatgttactggacctaattttctagtaataagtgaagtgaaaagtcactcagtcgtgtccgactctttgtcaccccatgaactatacatttcttggaattgtccaggccagaatactggagtaggtagcccttcccttctgcaggggaatcttcccaacccagggatcgaacagaagtctcccacattgcaagtggattctttaccaactgagccatcagacccacagaaagccatataaaatttttttcacatcactattatgcacatcaaactgccttaaatgtctactgatgtgtatattgctttttaaataaagttacttgaactcataatcaagatatttttgcctttttaaaaggatgaaaatgaccatatcaagaattcaattttgtttcaattttttgaaaatttaaatatatttatttttcataaaatcatatttatatcaggataatatcatgtaacaatacatctatctcccttcagaatatttttgtattaaaagtgacctcaggattctctgagacacatcagcattgagaaaacacttcagaaatgtccttctctaaaggaggccttcagtttctttttaagaacaatgatatgttcatttcaggacatgaagaggcagagatggctcaaagagttatatatagaagttgctaagcaaccttggggctttacatgagttatgtttcaagcttgtaccaacaagaggtattattccaagcatcccagcagtattccccagagctgatgatgctcacttagttttgggcaccaaagtgctgttgtgcagctaggatacttggctatgccttgataacttcagtgagaggtggcaagggagatgaaggggtatcagtggggggtttctggtccagaaatgatgcccatggtgatattcaaaccaaccaaattattaaactgaagcacttcaatgggaaggatacttggtattcttcagcaaaaacataaaaacacaaactctgcttaattcctgagcaaaatgcccttcaaatcggaattctgcaaatgtcacatgtctcttcctttggtgcaatatgtgtaacatctaaaggaaacctacagatcttatagttatttgagaacaaatgaaagtcagagattagtaatctattacaaaaaacagaaaaaaaatcattaattatgtagtgagtgttagaaaatctttaaactaatagatgggaatttgaccaaggaattcccataacgataaactactttttataatgtgttatcaatccatacatgtcaattttctacacttaaatgtttagctgtaaataattttttaatcacctgacattgaataatcactgcataatgtaaagccaagtatctccaatttagttcttcatttgatgagaaactttaacagtttttaagttaaagtacaaaacagaatatgaatgtcaatataaaatgagactcctagcaaaaatgggggggggggggcagggaagcaggcagtatatttttaagcttcttttggaagataaattcatgctgaataaattgaagtgacatttggtttctcataaattccagcctgtcctgatggcctccaaagtaacagattcttaaatgtatcctttttcactaaaactgacacctagccaagaattgtcaaagcataagattatttttaaagatgcttacagaataaacaatcatattaactagtcatacagaattatcaattaactttcgcggttaacacaaagttaacttagtagttaataaaaattagtttcctggcagtatctattttatttgtgtattagctgttagatcacaaacattataatacattgcaaatgagccaaatgatacaatattacaaagggggaaaaggaatgctatcaaatatactgaatttaaaatgtctcactaaggcaagaatctgtctcatataaaatatagaagcaacgacatcagtaatcctgaagacagttaaatacattcaaagtaattcaaactttgggaaaaatataaaatttaatattttataaagtaaaaactctataggtaggggtgaggaagaactataacaatgcaaagaaactgacttattccaactaatacattcatatactttctaattaccttggccacagacctacctcaacatagacagttcacaggaaaagtacaaatttatctcctccaatttttcctctaaatagcagaaacaggcatgtattaaaagaaactaaaagtagtaaatctggctagcagtgaattccccagtctcaagccaacacctttaggttagccagacattgcaatagaatctataatagaaatacatcctaattaattcttaatcatcaaaaaaaaaaaattaaaaagaagggagggaggaaagggaaagaggaaggaaggaaactaatactccaaagaaaaatgaacaatatgaaaaaccaatattatgaaataaattttaaaacaaatcacta

SEQ ID NO: 49177 - DNA, 1185 bp, Bovine  19866881090448
  misc_feature (1)..(1): n is a, c, g, or t
ngagattctaccctgagaatgagactggagttatcattcagagagatttacacaagttttctccatattagactgattcctcatagaaatgagaaagcattttcttttctttgtccaactcatttgatcttacatatcttactttaaaaagcttcccaggaaatgtcttttattttttatttcttattatattttgttattttactataacaattgggtcatcttgaagatcatgaatgatttgaagaaacagttaaacactgagataaataatttttatccaacccttgtgtcccaggagtgggaggaaggacaacaaatcagaaaatagtttatattattattcagtgagaactaacgcaaattgagatccatttaatttaaaatactttcatgtgaaagataaactgagagatgaaagagtaattttacaaacactgatgacaaatggtgttgtaattagaaagaacatgtgtatcaaaaaatgtttcttctctaaatcattttgaatgtactaatgacattggaaccatgtattaaatactggaaaaaattggaaataattacatgaagagcaaaatgaggctgtatgtatacagggattcccccaccccccgccccccgccttttttttagttatttattttggtgacttaattttataagaatttaggagaggtaatgaaaagaaggagaactgagaatgttatttatatccattctaatgtatttaagttgataaattataaaaccatcacctgtttttaagtagcattctatccagacaaaaagaaaacaactgtgagtaatatgtaataagccatgtattacaagtatttgtccttatccacttgtgggaggtcgttaagccattccattcagggtcttgctcctcctcttgtgttgggcctgaagtcaacagagtcagcagtaggaaaaagaaagatggacatgcagacgaggaaaatgatgacaaactggaatttgcaagaatgaaatccaaaaggatgaactagaatctatatgcctctctcttacctcctgcaaccttgatgttatgggggatatgtagagtatgttattgccttttgtgaacagaattgtacatgtacctggcctaggatggatagaagaagggagaaaggaggaaaagaagaggaaatgcagcaggaactgccaaagctg

SEQ ID NO: 49178 - DNA, 2264 bp, Bovine  19866881204303
  misc_feature (1)..(1): n is a, c, g, or t
nttcataattttaataactttttcttcattgtactcttcttcaggcatgctgagtcttctttgggacattaaatttcacagattggtttatgttgtattattgcaaatatcattttgatttttcatgcattgcagacaggatatagaggtaaagtaagaaccatattgtatatttgatttccaatttacctgaacttattaaaagaactgttcagagtcaagtttttaaagtccttaaattgttttccaggtcatagatattctactcagcagtgaaattgtccttgctagtttctacaagatactgattacatttcttgtgagtattttaataggtttatgctcagaagtactaagcttcagattttttgaagtttttatagaaaaatgttttatatatttctagtattttttcaacaattcttaatatgaatcaatcaagaggaacatcagattttcttccattttctgttacttcctatattatctaattatatttatgtttattagattattcaaccaaagattagatctcttcaactttttattattcaaccattctagccctttgctcaattaaaagcaaagacacaacagttaatgagttttattaaagacaattacatcttaatggtacctgtcaaaccacacaaaattatactaaacagcacctgaattttgcataaaaatagtattaaaatgtggaatctgaaaaataatacaaatgactctatatacaaaataaaaacagacccacagacatagaaaacaaacttatggttaccagatgatacagggaaggggagaaggacaaatcaggagcatggggtaacagatacaaacgattaatattatatataaaatagatgaggaacaaagatttattgtatagcacagggaattgttggtttccttggtgactcaggtgctaaggaatctgcctgcaatgtgggagatccaggtttgatctctgggtcaggaagatattccctggaggaggaaatggcaacccactccagtattcttgcctggacaatccccacggcacagaggagccggtaggctgtattccctggggtcgcaaagagtcagacacgactgagagacttcacttctttcagatgtttcttgacttcttacttttgcattccagttccctataatgaaaagcacttcttttttaggtgttagttttaaaaagtcttgtaggtcttcataaaacttcaacttcagcttcttcagcgttattgatcagggcacagacttggattaccgtgatatggaatggtttgccttggaaacaaacagagatcattctgtcatttttgagatcgcatccaatccaacttggttgcttccaagttttgacaattataagtaaggcagacataaatatttaagtacaggttttccaaggttatttcctttgggtaagcaccaagaagcatggttgcttgtctgtaaggtaggaacatctttagttttgtaagaaactgccaaactgcattccaaaatgactgctcaattttgcattcccatcagcaatgtataagacttcttgttgtccgcatcttagccagcacttggtatcgtcagtgttccagactttgaccattctagtagatgcatttcattgttattttaaattgcatttccctgattatgcatgatgtggaacatcttttcatatgctgttttgccatctggatattttctttagtgaggtatctaagattatatgataatatttttctcctttcttggcatatcatttatactttttgatgttcttcctttctttatggtgatcttaagtttctgacacattttccttatcactagagaatttcatttaacatttctttcaaggcaggtctactggcaatacattcctctagttcttctgtgtctgagtctatatttacttcaattttaaaggataatatcacagaaaacagagaattctaggttgatagcgttgttctcacaataagtatttcacacctctctcttcttgcatgatttctgaggaatcaggtgtaattcttatctttgtttctctataagtaaagggttttttcccctcattctggcttattttgatttttttctttggctttgatttctacagttttaaagtaatattcctaggtgctgttattttttatgtttatcctgcttagtgttctctgagtttcctgaatctgtgaactggcatctgacattaatttggtgacattaaatttaattgggtcaattaaatt

SEQ ID NO: 49179 - DNA, 829 bp, Bovine  19866881294982
  misc_feature (1)..(1): n is a, c, g, or t
ngagtgggttgccatttccttctccatgcatgaaagtgaaaaaataaagtgaagtcgctgtcatgttcgactcctagcgaccccatagactgcagcccaccaggcccctcctccgtccatgggattttccaggcaagagtactggagtgggttgccattgccttctccatatgcaaaatcatgttttaaagcagagaactggttttgatatgaaatattgacaagaacctttctaatcttactagctagcatagtctgattataaaaaagagcagtaaacttttctgtttttaaatattctcttgaagaaatagctagaaatatatttccttttttttcattctaggatagactctaattattggtgaaatgtaattgtcataaatgaataataagaaattctcacgtctggtgttagaggtgagccccagttaaatctacctttaatactgaagaaagttcttatttctcatgaaatagctgtaagaaggaagggaaggaaaggagaggagaggaaagatgaagagagagaaggagtaataggggaagagaagggaggaggtgaaagaagggaggggaggaaagaggcaaggaagaggcagggagaggtgaagccaagaggaaataaaaccaagcgccaacgtataacttatacaggggtgtccctttcaagacataatgacagaatttagaaatggtatattctttacaagcataaaactagtttccaatatctagtaaattttatgttaaaaaaaaatagcccacagagtaattttttctatgtatgagatccaagaacttctactccatttattctcccattttg

SEQ ID NO: 49180 - DNA, 963 bp, Bovine  19866881473784
  misc_feature (1)..(1): n is a, c, g, or t
ntgtttgaaatcctgggattgaaaattgccttttatggaggatctatgcatggagtgtaaactcagcaagtttgatggtgagctgtgactgtcatacacatttgttctgatatacttgtccagatcacatcattttggcattctgattgctttagtttagcactttggttgctatgatactgttgcataatggaatgtgtcctttaatctatatttagtgcccagaatttttattaaaaaagacacagctacttatatgcataatagttaaatgtatagtgtgtcaaagaacaggaataatttaggaagaaaaaaaaaagagagagagaaagagatgctgttgttccataagaagcaaaaggtatttctgacaaatctatataccagaggacttgggaagctcagtgacttatatcccttgctaaatacagcagacaagcagttaaccataatatcaggagacaatagacaaaaggacaaagttttgacatttgtttttacacaaagttcttagtcttttttttttaaaggatagtttgattccctctgactcagagtgaatcatagggatagatactgttgagacattgtagctttcccctatagcatacttcatcaaaaaaaaaaaaaaaaacagaggaaggtatcacttaaaaacatttaaaacagaaactactggtaactattacgaaaataaataacaaactctcacaatttattcagaattttaacagtaaagtcatttcctacgaatatacttatgattgaaaatattcttatactaattaattttaactgaagaacaaacaataaaacttgtttggctctatcaccttattaagaggaatagctatagcaaaattctgaaaagcaccaactggccacataatctctcattttcatagaaaaggtaccattttaatgtcatatagtcagtttgaaacatgtaaattatcacatgtg

SEQ ID NO: 49181 - DNA, 1072 bp, Bovine  19866881480923
  misc_feature (1)..(1): n is a, c, g, or t
ncttattaaaagagatttgcttgctgttttattatattttcaaatactgtttccacactactgccataacataaaattcttctctttttaacagaattaaatgttgtcaaattttgttaaatgttgaatatttttaccttacttttataatgaagtgattttaataacttttacctggccaagtccacggtccttaggcagacaaattctacaattcacattttattaatgaggcatttgagacccggatcatcaaagcgacttcctgaggccagaaatgttgctcaagctaggcagaaattagagctccagaaccctggcagatttctgttcttatggtaggctttttctactgcaattaggctccctgtctcttattaggcctgtcttctaagcctgctcccagataacctttgaatcagacttacacatgatgtaggcatatttgtaatgcttattttcacaaagtttaaattaatttgaagcttagttgaaccacactatcaagtatatgttggaggagtcccctacatttcattcggaatttcatcttctgttaggaggagaactataatcactccacggagatgagagtgggcacagaccaaggaggtgggcaaccattaaactgggaggtgtgagtgggcagaagcggtatgtttgagaatctctgaagcacctaacagagacaggaggccagcaaaagggagaagggaagtggtgaggtctggcgtcaggctgacagcagatatgtgaggtgaatctgttcaagtcagtgcgcaggctgaaggcagctggacgatgacagggaagccacaagggtcactgctcacacagcacttgtgcgtgactgagagagctgtggggcccggaagagagaaagcagctgtgctgtgaggtggatccaagtgctgaggcaggaagcaggtggtcacaggaggaggaaaagaggaggccagtgctgtggagcatctgccccctcaggttggctcctgtggaaaggctatatgaagattaacatgtaggggaaagagcatttatttgactatcatcctcaaaaacaattttacac

SEQ ID NO: 49182 - DNA, 1819 bp, Bovine  19866881487035
  misc_feature (1)..(1): n is a, c, g, or t
natagctaccagaatattttgaacccaatatcttatatctgaaagaataatttacaaagtgatttatgtaggtgctacagaatttattgttatgtttattatttatcagaaaaatatgatggattttctttatctgtatccaatgatatggaagttttttacatatttctaacaaatatgattaatgaataatttacaacccagaacaataacatgcatattttgttagcttttgtaaaaaataaagtcctctaaacacattttccaagtatctttttgacttttatacatgcctagtcttctagaaaaataagaagaaatattaaatcttaaagtctaatataagtccattatcataatgtaaatacagtgctttatgtcatttctaattaaaactacattatccatgttgataaattcttttggaagtgaatctgccctatctaaataagagtcattagtcagttagactagtttccttgtcaaaataatgttaatatagttttcatccttaattctgacttatatccaccctcaacctccataggaagtgtctaagcacctaatagctagtcacactctataactatagaatgtgaacttgaaaatccacataatactccttgtagcaaaaaaaaaaagaagaaaaaaaatttagagattgtattctattgtatgtagaggaattaaattttttatttaaataacctaaattgtatctgttttgaagaatattcatccatgtgtcatatcagtagagtgaattaaaatttttctctcaatttttggtttctatttaggtattaatagtcctgattaaatatatgagggctttcttctgccttcagatcttactttgagactgaaaaagtgaaatgattatcacttcctatgcttggaagaaaaaaaaaatgtttctcatctttcttgaaatctttagagttaattttttaggtctgggttcatgatcttgattttgagaaagaatagaatgaaactgaattttaaagatattttcagaatgataagccaaatctctgggatgatatgttgactgcaaggctctaagataacccatgatactgtgtgcatagcgacctcttagtgggccatcactgacctaaagtgaagatgaatcttactcacatgatgccacatttccctgaagaaagagagcttggaaaattaaggcggtagcagcatggtatttcagttctccattgtgttttgttactttattattaaacgtgaacaatttttttctactctgtaattttaatgtctaatgaatatgttataaataactttattccttcctctccaggtgtttaattatcacatagcataggggtcttttatactgccattttccttttatactttataatggtattaacctgccaggacaattattttagatattttcccaaaaaaatatatgtaactcattttaacttaaaattaggcttcctcacaattacctacctccccaacacaatctgtctttaaaaatttagcgtaggtgaaatctactgacatttaaattgtgattaatgctattcacatcccaggttagggttttgtctttctgctcgtcaaagtacacccttactgttaaacttgactgggattccttaccctgattcactttacctaatataattttattataatacagtgtgtgaaagcagtctagatctctgatatcattcccacgtatcatttccaaagaatgtggaattgttctcactgttcttcttctacaataaacttgtaaaagtagaaaacaactgtagattttttcaaaaaatttttaatg

SEQ ID NO: 49183 - DNA, 1202 bp, Bovine  19866881697115
  misc_feature (1)..(1): n is a, c, g, or t
naggattgatctagagctgagaaaaatgactgacagatggatcagttttgactctgtcagtttctattcacactgtctagatcagaccttcatctttcaactggattttgacaatgccacattttccccttatgccccttacttcattgttgctctcctctcatggattatgttgatagattactttttaataaaaagctgttaacatttcccctttgtttaaaataaattgttcatctcccatttcctaaaggagtgtttctcaatggatttttttagcctcagcacaaaagatatatggcattcataggagggacaaacaagcttgggcatagttagcttcaatctcattagctatttgctctgttttcttctttttttgctactcgctcaaaaagtcatattgaaatgcaagggactgaaagggattgtagaaggataaacttcttttattaaatagaatgatttttaacctcagttcattgctattattaaccagttactgacacgataatgtatcaaaaccctacaattaaaaatctattgaactgtaggataaatccaaactgctcaatttggtatccatagcttgagcaaatattttctgcttctgcctcagtcatagctgtctcagacagggaaatgatacaagttacactgatggggagcattttccaggatgggggaacactactaaggacaggagaggctagagaaaaacagactttatgaacttcatggtttacctgacactagtcttggatccatgaattttcccatgcaattttaggactatcttaacaggcactgttatattattagcagtcaggtctttagtttacaatttggatgaaataatagaagttaaattacatatctaggacataataaatcactaaacttcttagttaatctggagattagagcttcataattaaaatttcataatcctacattttttataaacattatgtgaacttttagaatggcagaaagtcacaatcaaatagctacattgtcattattaatgttacgtttgattaccttatatatttttattaaaaatcctatacctttgagatttacaaaaataagattaattattgcatctgtaggtagggtaattcatcagatcagatagttggtgaattactgtctctaaaatcatttattttttatcattctgttctaattgaatgagt

SEQ ID NO: 49184 - DNA, 1399 bp, Bovine  19866881701656
  misc_feature (1)..(1): n is a, c, g, or t
nctgtgtgtcaattcacatttgacacactaaaatacttttaaaaatattctgaattggccttttaaaaacaattcaggcattcaactttatgtattcacctctgttcctacttaaatatgaacatggggaaaagaggttcaccaggggatagataatatgcagcaatctgaagcaaggaaacatgacttgacatcttgtctggttgacagaaaaccaaataatagacagctcacaatagcaaaaactgatgctagaactgtttcagaggattatgtcttgaaagcataagtaaccctttgaatcaatttctgagactagatgcagcaacttaagcttgtgcttcacatccatcagagactagaaggaaaaatcatcatttttatactctttcatgagccataacctccataatggatatatgggagtactggcctccaagagataaaacatcctctagacttgctttaagcattgtactgtctttagcccccaggatgcctcactaagaatgaggtatctgcagtggtctttcatgagtagtctgcatgtatttatttcctagccagctggatgctttatcctgcctacccacataaggtaatacaactagaaaccggtttgaggggaatctcacaattagcatgcatatattctaacagtacaaaaattttaactcagagaatacgtgaacataatagaattcattcactcattacatagatactattaaggagcatctatgtcccgggtcttgaatctttagaattaaagactccctttcttttcctgcagcaaagatttatacagtggcagtgttatctgaaaagatggctcagcacattccttgttagatggtttactctcagaaaatatatctttatcatttagcagtaatgtggtaatctccccaacttgtagtaatcttcctcctattatttttatctgaagagacaataagattcgacttgaaactctcaagaatttgaaaattactactgtgtcatgactatacattttgaaattttggttctgtcttttattttaaggctgaacctccccagtttgtagtgataactttggttttgaaatgctttgcagacactttactaccctgattgcacctccggattcttctgatttatcagcatccttctttagggttattcagaaataaaagcagtgttccggatgtgccccagtccaaccatagagccattatcctgaatttagtttccacagttactattttaatgtgacataatagaacattagctttttgaatggttttatggtatttggactcccactgtggcaatgactaatgaaaattcttgcaaacaagaacatggttaaatctcttgttgagaatatcagcataatggcagcaaaggaatttta

SEQ ID NO: 49185 - DNA, 971 bp, Bovine  19866882149016
  misc_feature (1)..(1): n is a, c, g, or t
nactttcacgttgtgcttccaaacttctaccaaggtcttgtcccctagtgtgtgaagctcaaaagcagcagtcaagtttctcttcaacatgagattaaatagaaaacatgattagcaataatgcattactctttcctgactcctcccaaacaacattatatctttcaggggtgtaatgccaggttcatgctgatgctaaaacagaatgtgttttgacattttaggtttaggtcaactaattccctctgaatatgagtggtggtaggaaaataattacatacctctgcagtagtagtgaggtacttgtttttatgactgataggcttggaatatgttttttctcacccaagtgtcaggatgtcactttgagactcatgtgcatactaaatcaactctgcatttcagcaagaatatatttcaaaaaattttttcccctagggaacaggaaagggatactttaaggtgaaaattcacagcacgatcttctggttatgcctaattttgtcaactactttcaatcatctaacaaaaaatttgtgaaagaaacaaaggaaccatataaaatggcatacaataacatatcagtagaatttgaaacaatcagacagaataagggatccccagaaagctagttggctgcttgactaattatgtgcattaatagatttccatcgggccctctggtttttaagagttcatttgattgcttgatcaaattaaagaggtatttctagactcttctcttctcatggccagggcatatgtgaaaaacataaaaatcaggaattgaaaaatttaaattcaaactcttacaatttctagtttcctctgaatactctgagcttcactactgaagctcatttcaacttcatttcacctataagatgaagatgataataatttaagtaaaaaaacttctaagaattatcataagaataatactaaaaatataaaattatataaatgcaaat

SEQ ID NO: 49186 - DNA, 1828 bp, Bovine  19866880462561
  misc_feature (1)..(1): n is a, c, g, or t
natattgcaaaaagggcttaggttcaggtaatagttgggattatggtttccaaacatatctgggaacatcacttgagattctcttttaaaaaaacacagatttccaaacccttcccctggggattcagtttcaatatgtatggaatgggaaccaagaatatatagagagagagaaagagagagagagaatttaaagtaatgtttatgtttgggcaattttggaaaaaaagttgtattaggcctttcaagacagacaaggctgatcacatgtcgacagaggagtggtatgaatgtgtacattaatctacatctgatttttcaaagagattttaaaacaccattagaaaaaactaaaaaaataacaaacttctgtttcttcaatagatggctttactaatatgcaaaatgagtttgtgtttagcaatgtcttattctttatacattaattctttctgtgctgtgctaagttgctttagtcttgtcttatcctccgtccatggggattctccaggcaagaatactggagagggttgtgtagggttgtgtaggcatagatggtattcacaggactttcatgaacatattctaacaatactattatcttcatacattttgtgccattctataccacccagtgaaaagaatcgggttcattatgtaccttatatgtttatgtgaaaatttccaacagaatcacagtaaaaaacacatctctgaaattcctggcatttgggcacccatgttggcaagatttggaagggctatacagtaagaatgattagttttcaattcatagacatccattatctatggaaaaagagccagaataaacccctcaaaccataggccttcttcatgtaagatcctcccagctgccagtttaggcactaatcacaagaacttcattagacagagtcaacccacgtctaatattttatagaaaattggtacagaaattaaatggtttgtcgcacaaaatgattagtgtatgtagtatttatgactcagagatactgagtttccaacaactacacactttctctttttgtaaaatctgccccacactgatagtgttggcctggacctctggaatgaatccaatcaatgcatttgatcttctaaagagtgaaaatttggtcttgtttccccaccagactttgcactttagaaagtatattgtgggattctcccacaatttcttctccctccactatagaagtttctttttcatcactctacttaaagggcctaatattattgcagtcttagcccttttggggggatgcagatttccaggttcagcaactatagattagatttgagagaggagattcaaatgcaatagtgctgcaagaagatagctcctatgctgatttagaatcagtaaaatgcaggacaggaaagactatgtgttggcaatagggcttgatacatgtttcaagagcaaaatggaaactgtcttcccatggtttgcaactatcaatcactaaaaagatcttataagcgaaaggctgcaggaggagaaggcctgcctcctccttcctcttctcccagggtggagacataggtttcaaaattagatgtgtcaaacctttcacaagtcattgctgaagtatgcctaaagctgtctcttatcgaaaaaatatattaattatatttctgcttttttgtcacgtaaatttagagttcataaaaggaaccagatggacagcgtttgggaagtgaatccttcttttgattagagacaggaataaagtttctacatgctctgtctgtgaaaagcttcctcctaaaacttttagcatcattaaaatggttggagattggg

SEQ ID NO: 49187 - DNA, 1704 bp, Bovine  19866880516973
  misc_feature (1)..(1): n is a, c, g, or t
nctttaagagtggacacagcaactgtgggttcggagtctgcaagacactgacatgtgttacgtttgcatttaggatttcttttaaatgaagggggaaaaaaacacaaggtcagcttcggaaatgatgaatgcctttttgctgaaagctgtactgaacgtccttgagtttaatcaaaactatttgtttttagtcagctttgctgttgtctcttttactcttgtccactgatagcttgacattaatgacatcataaatcatgtgaagtggcggcttgggtttggtagcatttcaagtgtttgttgagatgtcccggactatctgaggggctggcgcaaggttggctatcatcctgcactgaatctggagtttatggcatgattcagtcagtaaaagcacagagtgcagtattggtgtgatgggccttcattaaagaaggtctgactcctcattaaatgctgactttagaaagagattatggaggaagtggatttgcctttaattttatttcttcaaatttttaaaacctgattttcaaatctcctattaaaataaagatcgccttccgtgcttgtcaattcatgcggtcactcggtgcctgtaacataaagtgtgagagtccatttacactgttagcattcaccgtgtccagtcacttgagacttggacaggggtacagtttgagcgattctatcacctacacttcttaaaagattcttcttaagcataaatcaccatctgtctgttgaaaacctattctttgagacatgtctagcttttatcagttgttttttgtttcagaatgatttcactggatccttctatgttttatggcttgttatctgtgtgactgttcttagaacatgcttttcattatcactgtactctactgctaaggaaagaggagattacactttagctgttattttttaatggtattttgctatattgcaaatgtgaatataaatatgaataatttgtagatcatttacttccttcggtcaatatattaccaagtgaaagggagcaactttgttttcataaggctactgagaaaagagatgtcttttctttgtcatggaaaaggacatcttcttgcaatgtgcattacatattatgaaagagcgcttttcacagtgctgagacagttcagccaaaacatataaactctttttacagattttaacagaaaatgcagtttttcacctacatttcaaagtggaacaaaatcacatcactgctatataatagtaggccaaaaaactgaatagaatggcatcaaataaaaccaatcatttgacaactttgaccatttaattctttaaactgaacttgagaaggaaaaaaaatgctgggcatagacgtttagcctgaattctttaaacaatctccctaaatgcttattacctattttcatatgaatgctaagaggttatttcttcatgtagcaacaaagttttttaaaaaataattttgtgaaaagaacctaatgatatagaattaaaatactttttttccttttttgtcaacaagatacattgacaatttaaatgagcttgaacaacatttgactctctttaaatagaattggtgcctgttataaaaggatttctttaccccatgacaaatgatagcaaataattataacaataaagcaaatcatagggtgagttcaatataataagagtgatacaattcaattcatg

SEQ ID NO: 49188 - DNA, 2374 bp, Bovine  19866880672806
  misc_feature (1)..(1): n is a, c, g, or t
natccttggaatcgtcctaagagttaaccatgaggatcttagtcctcattaaatgatataaagtcaacaaaacgtaggagagagaattaaaaacagaggtgtctctgaaggcccagggctgctgccatacttagcatgttataaatgttctgaaaatagagcaagcaatgaaatcaggtaggtttagagaggatatttagctcctcagtgttctgacagaccaaactgatgagaacgagctctaccatagtgtgcctgacaagtggcagatgagattgccgggggccagtgtgagggtgaaaggaatcacaaatatcttcccacatagagctgagcctctggacttttggaaatgtccatttatggaaaatgaaatttctgtgatgggttatttcctgaatgcttcaactccacattggcttaacgtgaccttggaaataaaatgtggactagtctaaaaaataaaattagtaacaaaatagaaaataatactttggtcttttgtaaaacaacatgttgcttttatactaataaaactgtatcagctctacttaggcatttatttttgtatttgacaaatgctttatttactgcttattggtgcaaggactttctactaagtaaaagtatattttattgtgttatattatgcagttatataatataaatatgctcatgtactattgaataaattatgtattgtatttaattatattctattaattgtattatagttaattatatattatgttatttattatgtactattatttatataaaatatagtactacagaagttaagtactgctttaatcctcattttaaaaatgagggaaaagaagcaggaagaggttgaataaaacatgagatgaaatatccagaaaaatcataactaactatgatggtagaggagttttcaaatgcttatagattgaaatatatggtactccatgttaaaagggaaaacttagaaaaaatatggtaaaagaataatgacagactatgatgaaaattaaggctagtggtttccaaactattcttagtagggtgctaaggttttttggaggctcctagggagctgggagagcctagagcgagggtcattgttgtctgtctactttatatagtgggatctgctcagaaagaatgtactctgctgttaaaaggtttgaatgctgttggtatggatcagactcccctgtgtgtatttgatcatgctattaacatttttccaaaatgctgctatttagcgggggatgacactttgtgacataggactagaaaactaagtaatatgatgatgcatatttaccaaaatctctctttttttttggataaccaatataagctacaactgtaccccgagatatctagatactccaagaaataatgtatgctaagtatagaaataggttgtaagtggagcttccgttttttagataaatgcatagtcacgttagctgactgctaaagagcgctactgcaatgataaagctgtcatttatcatgtaatattaatgtaagtaatagtagtagctcactattcagaaaacaaagataaagctgggtgatagccaatagccaacgggcaatctttctctctatgtgaatatttaaagatgagatttaaagatttaaagatgagcttaaacagtctatttgtggatctattcagctccacatgtttaaaaaataaagcaaaaaccaaggacaaatgacagaaacctagtggaaaaaaaaggaatgccttcccctcatgctacccattttcaaatgctttctcagcttcagaatcaaaaaaaaaaaaatcataatatgataagcaatcatagttcgcagtggctccatttgataattaagtcatttaaaaataaacatttgaaaagaagctgaagtaggggcttttctctcataggcaataaggcagactcaccaatacagacaagcatttaattgaaaatacttttaattactgtgaattatctctttctttatgggcatacctccaggaaaggcagttgaaccaaattttcatcttatatttttgctgaggcaatctattcttgacttgttccacagttaaggaaggacccctagatgtagtaaaatgttttcctaaatgtatttttacaatatgaacaaaataacaccccccctcaaatcaaatgcctgtatttatttgtgaaaaacttgtgaagttatcatttcaccgaatatccagttgctaaaatcctatctcatataaaaagagttggatgaatttataattttctataatctgtagatttcaagtcatctttcatcttaatcttttggggtttcttagaaaaaataatttctctctttgactcagaaaggatgctggtaatttaca

SEQ ID NO: 49189 - DNA, 1507 bp, Bovine  19866880717765
  misc_feature (1)..(1): n is a, c, g, or t
nttttaaatctatagacccaataagaataaatcaacttaatgacttcaaaggagctaatgccattaacatgatggcctcttaaatttccatataatgctaatttatgcacttagtgatcttaattgtcaggaaatgtttcctcatttttaacctaaatcctgaatgctatagagaggttctcattcctcttgaactacccatggagattgttttccttagagtcttcattttctataaaattttctccatccttcccagaaggcccaaatttcattagatttttggaggacatggaatgtaagtttaacccttgcaatagcatcattttagtctattttgtcacctcaagtaaatacttcagaagaaaaccgaagttcttccccttcatttttcgtgactattttataatgggaggaaccatatggataataagcattgtggcaaaatcattctttggtaagggcagtttgaaaccatctatttagtgggatattttggaaaaaagaaaaagaaaagtcatgtcggcccaaattttgttttgggcatatttaggtgacaaagttattttataggaactggttttactttccttagtctttccttaatgtggttgcataattcatgttcatgttaagtgttattaaaataaatgtaactgttttaaatttgataagcacataaattcttttctttcagtggaagcatatatgccgtgaaaaatttcactgtcggacaattcatatcagtagagacagatctcataagatgtcttcttatttcagctacaaatcagaaaggctgcgtgctgtactcccgagaagacgtgtgcatgcattataaattctctttcacattctagaaattacaaccagggacttcaggtagtgttgaaagctctttcaaattattaaatgctggagaccagaacttttcaaattttaatgagtggaggagtcacccaggggatcttgttggaatgcagattctgatttagtagatttggggtggagcctggaagtcagcttttctaacaagtcgcaggtgatgctcacgctgctggtcctgggaaacatcaagattgtggacttaccttcctgtttgcgacttctacccatctcaggaactctacagggtattctgtacgccaaaagtagggggcaactgaagtcagtgagaagggatgataaaacaaataatcacataggtaaatacaagtctcacgataaatacttgagtcactatagtttgtggtctctcgggacagcaagtctgagtcagctcttctgcgttgtggttccattctcccaagattcattattcactattgtgattaccattactttgcctctgccatttctatgtttggtttctttcacaaagcctgggaagacaatgcaggctgcaagatccaaggaggttccgagctcagataaagatgtagccttcataggaaaaccagtatctgccctaaaatttggtggttttgtgtgtatgtgtcggggggag

SEQ ID NO: 49190 - DNA, 1472 bp, Bovine  19866880718248
  misc_feature (1)..(1): n is a, c, g, or t
nttttatgtgtcactttagagctaagagacccaacctcctggcagctttgctttgggtcttaattagccacttaactgcaaattggttggcaccctagtcctttcatcagttattatccaaatagcatcaccgactctagataaagaaaagaaaagatcccacatgtagcaggtctttccatcattattgccctttaatacaaagagggggttcccaactctaattaaggctacgcttttaataggcaattggcatcttatttaattcattctcagtgcggcgtcttaaaggaaaaacaatcacagtaatgtgtggatagtgctatagaatttacaaaatatttccatctactttactactcttacataatacatgttttagccatgtattaatcaatatgtttttactggttgtagtgatttaagatgtggatgttatttcagtatgtatccacttgcctgcatatccactaagctgtctaataaaattaattaagtcaatccccagtatataaagggagtcggcatctttattttttgttgcacttctgagaatgatgcacacactacatggagaggtacttctttgccgagcaaacctaagaggttagtaggcagaagaaacagttagctacaagcgaaaagagaagaatggagaaagagcaagaagacttggttctgtgaatataaaaagaagcacgggagggagaaagagccacagatatagggtggatccaaaaccttgccaaatgaacgtgataattcagagtgtgacttaattagtttagtgttttagcagaagaccctcagttgatgctttgcatgcaatatgatataacatcctttgtttctactagaaagaaaattaataattatggtgccttttttataagcaacacagtggtttttttaaacctatcttttcaaactggtttttattaatttctactacagcatctttttataaattctaaatgcaggtattctttatagtctattaagtcactagaaattatatatggtcattaaactcaaacttcctatctttctgaaaggcagtagctgagactctgcacaccccaaatttcctctgcccatcaagctcctggaaccgatagccaaacccacaggctgacccagagtgagagcctttcaggctatgtgtttttgaaaacttggaaatactgaattatgtttatgagattcatttcccaactgctccaaagcttataaaatattagtatttacaataccccggaacaacaaacacagcatgaaggcagctgcctcatcagagactgagccacaatgatctcagacatttgtctatttatcatgggttggatttccttggcaaagagttcaataaggatgatgagcaaacccatccaacactttgctcagccttgcaagtgaaaagttgtccctcacctcaccccaaacacttagaccttctgtttggtacggcccgt

SEQ ID NO: 49191 - DNA, 2064 bp, Bovine  19866880718684
  misc_feature (1)..(1): n is a, c, g, or t
ntataatctagagattggtaactcatatgtcttaaggtgccagaaaggtaaagaaaatgagtaaaatggaatttgcgtgcaatggtagagaggaatacagaaattttaattaaccagactgagtgcacctcttttaaagacattcaaattcttttttaaaaaattgaactccatgtctatatgatcatttagtcatttctaatacatggtgtcaacctgtatacagttggtgtttaccaaaattaaacaatcatcagactcactgggaaatttactaaaacattcaccatttctaggttctgtcttaagagtcttgtttttctatgatttgttgtagtttgctttgttgtagattgtttgtctctttggtcaagcaaattactgatttaggtgcatttattcagcaaatggtttatctaatgtttagtttgcgaatactgtagtagatactaggaatatagttataaataagcctgttttcctaatctccttactcttacattctaacataacataatatttctattatcagtggcactctaataaactaaattatatttacttattagtcaaggattaattaagatttaaattaatcacaaagaaaagacctactgattcagctgtgagtaaaacaaaaccataaaatcatagtattattccacccttttattacttctaatatttagaaatggtaattctatttgatagtctatttacacaaatcagttctataactccagtttcataaaattattagggtagaatagctcacttaaggtttattcaattaatattaaattcttcatggactttttggtattagtcaaaacaggatataaaaacaggatagttaaaaataactaagagattagagtcatctattttgtttaccctatgaacttgactttaatacatatcttcttcctacagcacgtcagtgctatcttctattctgtctcaacttttaaaaactgctcataggaggtaggtttataatctagagtacaaaataagattagttgtttaagacaagtatttcatggccttctgccagaatagaatcttccccaagaatcttacatttttttccttttgaatcacatcaaatagtttctctacttctacccaccctggtctcattcactgggtggtcagcatactctctgcttaacaacagcttggggggggaaaccaccctgaataacatgcattttgatataaaaattacaacccccaagagtcttaaagcattgcggtcctgacttgctgacctcggccaactgttgtggccactcacaatgaactcaccaataaggaaattagaaaacctctggtatgtgttttttggccagaataaactcaatctagagagaggaaagagacactccattttatttttcagggtaatgtctatcacacggaggacttaatgaactctcagacacaccaggattttttattttttattacatttttggctgtacattcatttcaggtggacactcttttatccagggttctttgtgggcaagcagttgcactgtggaattactttagtggttaaaacaaaaataaaatgttccttttgaagtggttaaaacacgattctttagatatcaaagaaggaaccatgtagcattagctagaaatagtctcttattagactagttctatcttctcatctatttcattcattcagacattttattcagtacttactaggtgaaaggcacaaagtgaagtgcttcatttgtttgtttgatatagaaaaataaaatcctttgctagctgagtaattcacagtgattgcattatcatcaagctgcttctggattactgaatttttatttagggaagagaacttgttggataaattcaaatgcataatatacttaaaaacaggatactgtataatcacatatgggaggaaaaaagcttaagtgttgccagagttaataactcatatatttcacaggaacaaagtttgtttttagatagctaaagcataataattcctaatgatttttctttcaaatctctcttgtaagcatacatctgctc

SEQ ID NO: 49192 - DNA, 1123 bp, Bovine  19866880789159
  misc_feature (1)..(1): n is a, c, g, or t
ntgacactacaggacgcttcagggatctaggatgctgtgattcttaagagtgcattctgctcactgaatttaagaatgttaaaaaacaaactccttcagtttatgaaattattcatgctggaggcaaacccctttgtatcttatgtcagagacctggtgggaatcttcaaatggaaatagtaagaagaaatgtctcctgattataacacattttttttttgaatgaaaacctaatgttttgtttacaaaaaggaatgtctcacatatcaagaagaaagtctgatcttaaacagagcccagtaatagctgtagcagatacaattagcaaaccatggaaaaaagccaggaaaaaacataaatttcttctctctctgtttgtgttacattcctgactctatctaaatccaaacaggcatgtttttccatcagtgttagtctatggagaatttagtagataaaagagaagcaacagccttgagacaatgaattttgacctcactaaacatctgctaaatagaaaactgtaacaataaatattaaattgaaaaagttgtcagactttaagacctggttccttttaggtttatttaaaacaaattgcttcttcccttttgtccttttcatgggaacttttttaacaactagatttttgcttatgattaaatgagaaggaagttagttataggtaaataaatatgtaaataaaactgaggtagtgtattaagtaaaccctaacacatgaaatgaaacagtttataatgaatagctaaatctatgaaatggttaggcaaaatatctttcaatgccccaaattcctaaatatgtcactaatcataggcacaaagcaaatttgaatttccatttgtctaggttctcaaaaattgattaataacataaaagaaacaagttttgagcatgtagaagaatgattaaaccaacgtagcagtttctgtgctagaggaaacttcctgaaagttctaattctttatggaacatggaagtatgtgttccattctgcttttatatgcataaagtaatctgattaaatgatctaaccaatcagaagaaatggttgatactctcacattttaaagaggggttgcttcatacccaaggagagcaa

SEQ ID NO: 49193 - DNA, 2457 bp, Bovine  19866880818151
  misc_feature (1)..(1): n is a, c, g, or t
ngatagaataatagaatgtatttctgtggtggtttgtaattagaggtaaaatttgggtaaaccaatataaaaggttcggagtaaatagtatatccagcacagaaatccaaactctactcgatttaaaggattttttgtccaggagtaggaagagtgatttatcttgcgggagcattgtgtaaaataccttaagaaacagccctcactttggcttgtccctttcatgccgtttgccttctgtcttgatatgtggtttctgttccctttctttttcttctgtgaaatgcggaacaaaaaaatacctgaaggatagcacttagaagtcaaagagaaaaattcttaaaacatatacaaaaataaaaatagttttcttttctttgactgtgatagggacaaatggtaaacatatttgtggtgctgagaaaatacagcttcacctctcactttggcagttttgcttgttaacacaaaatagcacccataggagaacctaattactaatgctgagttccattaattactgagcaggagccattctttgggtctaaggatgagattgttggtatttctgatttttcactgagaaggacatcttctgtagactgtaaaagatcccttagatcaaaaggaaacacacaagaaagtatgggacagtatgagtctagtcaaatagcagtctaaaaatttctgtcagcattcgagtttaaggcatatatgcagtcagaattagagctgtcagtcacatgtttattttaaaagagaataacctaaaatatttgtgtctacccagatgtaagctctgctctttgcattaccaaaaagcccagcagcatcctgtcaatggaatatctgaaaacacatgggactccttgcaacgtttatttgtgttgaaagctgaactgatactgctggtaatgttaatgatagcaaattgggtttgaaaaaggttgtatttcagtgacttttgtcctggctgaaatgccagaagaggtaaaaaaattttttcagcatgaaatgatgatgtaccctttacaaattaaggtttgtgtgtctatgtgtgttagaactggagtaatgtccccaccaatttaatagcatcttctggctctgacctcgtcccctgactttcagtatttggggaggacaaaagaaggatttggaaagaatggaaagaaaaggacaggaggggaaacagtaagttcgggtcgagggtagaagtaagggagtgcggttaagtctccccgtacctccacaacctcctgctcaccacccaccacatcaaatgataatggtctgaagagaagaggctggggaaagaaataaaaaacccagacccagaaaggtcacacagaatgctgagtggcttatcggtattaggaataacctgaattttggttcctgtacaagtcagaaaagcacctataacccacaattctttacataaaattgcttggcagttgccactgcaaatctcctggtcttttcctgtctctaagaaacaatatgataaatgcaactgctgtcaatcatggaaggctgcctcaaggttattccaggtcagatctggaaacccaaggatcagtgagtgaggtgttgatggcagggtgggtggcaaagatgaacggagggagcctgaaatttacaaactgctgtcacaggaagattagggctaaaagaaggcttaagtttggaagtcagagttgaaggaagatcaggaagtgcaagactaaaggaaaaatgtgttgtagttttattagagaaaggttcattaatttcaacacttggctaaaagaggtttaactttatagtaagcacaattgttccatataacagaccaaattaatattctaccttcctatagtacttctcctttatcttatgcaacttggctgtttcatgacatccttgtagtttctctgagttatgttttctagtccatctcaacagtttcatactttgctgtttagaattaaattccctgttcatcacaacagattggatgttatttaaaaggatggcagttcagtcaggtaaataggtacttttaacagagagaagtgaattaggctgaacatagaagtagaagaaagagaggtcagccacatcttttagctttctgttttcccacatcccttcctgctcagaatatttcagcatatcatcatcaagtattgaaatgcttgtctcatacccatcttaaagtttttcaacatattttgacaaattaataagtttatactgaactgtcttgatttacttttatcttaatacaaggatgattctttttttttttttttggcccacaacttacaaagtacactacctgttctttcaaagtagtgaattagtatttctagtgattaaaagaagaggtatttatcatctcttttcctcctccatgaaacagtcatcagggttattcaatgacagttatgaatgggcggtgtataattggat

SEQ ID NO: 49194 - DNA, 897 bp, Bovine  19866880877415
  misc_feature (1)..(1): n is a, c, g, or t
naattctccgatcatacttgatgcttgtaagtcatcaaagagtgcttgctttcaaaagaattattacacttccagcttgcttgccttagggaatgtcaattaaatccaaattattttatgacagagattttgccatttttagagacagggtaagtgaactagaaatgacaaaaatcaaatgagaaatggaaaaataaagtttgatatttacctgtaaattgcttatctttcaattaagcactggtttactcttgccaagtgtccccatttgcagatgtctattaaaaataagctgttttcatttcctgctagtatacaatttagcttcttttaatgcatgcttgtgctcagggttttctgaagagccttgtattatctttgcatctagtccttataaagaatcactttcagtgtgtgtggcctggttcctaacagtctatcgattcattgaatttcctgaatttcagaaagacaccaattgattctttatgctgcctggcagagcagttctcaatttttgtctgtttcttcccaacaacagtcttaagaagaaaaggttttccttacaatgccttgaagggtttactgaatcatacatcaccaagaacattttaaagcattattttgtctgttatttaaagtggaaaatgctgtcccttaagacactggcattctgccatttgcctccagaatatttcatggttcactgtcaggactgctgcttttcctagaagaacatatgggccattttggagaaattttctgaaacattcagatgctgaacatataactgtatatacttggtttccaacaaatacttttttcctgaaattttaatgcctaatggagtttttgaaacttacgaaaagtgcagaaagcatggtaacaccaaaggag

SEQ ID NO: 49195 - DNA, 1221 bp, Bovine  19866880917032
  misc_feature (1)..(1): n is a, c, g, or t
nttggaggtgcaaggacacagattaaccttgggaggtgtattagagcatttattttttcaagaaaggaaagatttggtatttaaattctcactttcatgtgaggagaaaaaaatataaatcttgggatgtctgaaaaatattaaaatgttcacagaattaactgtcagtgataatagcaaatgtcacatttctacttcatcacatattgagagaaactgaaatatataaccaaatggtggcatactaggctcttctcctatgcatcgtggtgtgttaactttataccaaaatttctgggtgtaaataagagtatacaattttgttttgaatcttagatgatgtggtttgtaatttccagttgggtttaaaataaacaccaaggaattgaaatgtttttgtaacaaaattttaatagtatttatctttcagtgacatttgtttaccctcctaattttccatttttaattgctttttggtttacaaattatacatgttgagagagcaactatttgaatatatgtttccctgagtattatatattaaaatcagcaatgcttctagagcattagaattctgaaagagcagttgcatatctcatggtcttctttttccccccacaatttatataagtaggatgtactgttcctggggggaaagtagcaattatgaagacagatagtgatcttatctctaccctggcaaaaaagtcagaatccagttatttacatatgctacatttcccataaattggcacagagtgaccacaatcgaaattgagcttttaatgtaactgtatccagtattacttctctatcatgcttgcctgattcttttgctttctaattggtcttggggacttgactgttgcttttgaaccttgtgctaagtactgagccctttactttctcttttcctgtctgacacataggacagcctctcttcttgtttcacccacatttctacatttctcggaaggcaaaatgactaaaccttgttttctgtaaaaacattaaaaatgtttttaatgtttagtgaagagagggaaaagaatactggacctagaatgagatacgattagatgttatcaggcaatggcaccccactccagtactcttgcttggaaaatcccatgggcggaggagcctagaaggctggagtccatgggatcgctaagagttggacacgactgagcgacttcattttcccttttcactttcatg

SEQ ID NO: 49196 - DNA, 2442 bp, Bovine  19866880926400
  misc_feature (1)..(1): n is a, c, g, or t
ngacctactatagcacaggaaaatctactcaatagtttgtaataacctgtatgggaatacagggcttctcaggtggtgtgcatggcaaagaacccacctgccagtgcaagagaccaaagagatgtaggttcaatccctgggatgggaagatcccctgtaggagggcatggtaactcattctggtattcttgcttggagaatcccatggacaggggagactggcagcctatggtccatggggttgcaaagagtcggacatgtttggagcaacttagcaggcagacaggcaagcatatgaaaaaagaatctgaaaaataatggatgtgtgtatgtgtatgtgtgtgtatggttatgtgtgtacatatgtgcgtgcttgcacgctaagttgcttcagtggtgtctgactctgtgatcctatggactgtagcctgtcaggttcctctgtccatgggattctccaagccagaatactgaagtgggttgtgggttaccatgccctgctccagtagacatgcccaaccgaaggactgaacccaaatctctaagtcagctgcattcgcaggcaggttctttatcattagcaccatctgggaagcttgtgtatataaatgtgtgtgtgtgtgtgtgtgtataggactgaatcacttagctgtacacatgaaacaaacacaacattgtaaatcaactgtccaatataaaataaaaattaaattgaaaaaaaagattgctaggcattatatgtaaaggtaagcatcttcaaactaaggagtactatgaagagggttaaaataagcctgtgtaaattaaaacttctttaatttctcatgttaaacttgtctttatttttcatctgaagcttagtgttaggccttgcatgtccaattctacttcaatgtaaatgaagaaagatttaactacttcaattaattgaaaaggaaatgatttctggtggcaatatttaaggacaaaaatgtacaggaggctgatagttttcaaatatatttcattataaaaatatagtattagaatgtaaaggaaatctcaaatatataattggatgcctttaaacaattgctcagctgattgaggaaaactgataagcattgttttctatacaggtgatttgcctttctgcaatgcaggtcaaattccgtaagaacatgttagtctaactgttgcacatgttagctttaatcttttttctccaggatttacttcactctttacatttttacaccatcttttgataaatctattttgcaatttcctcaagaatgcttgtttttactctttttgtatataccaaatatgtaacacagcaaaatatgttagtttttgatttacattttcctggctttatgtcatgtatagtatttgttgactattattcactttgaattatttagtttacaccagtgaatcaaatgagaaaaagtttatgcttgtgagtcatggatggatttaatatacaaacatgaagaagtatttgtttgaatttagaaatttagtattttatatatttcttaatcacttttaccatttgtaattattaatcactaaattttatatgcatattaatacctttatatttctgccaaatttccctaatttctgagcaaattactttaaatagtctttttaaaaatgactattatgtccttagcattgtggcagaccagtggtggaagcaatgacaattaatatgtgattattgccattaataagaattctcttttattattaaaacgggatttatacagacgaaataagagggatacaaaatatctgaaaaccatccaactgctggtttatttccacaaatgatgacatgtttagatacccagaagagaataatacaattgtgacatggacttgggcatcattatagatatactaccaagatagacagtggaatgtcaatgttatttggagggtaataagcagtagggaaggcaacacagagacagcatttgggcaccaaggtggagaaacccatggttatattgcgggatgtggaaggtgggacagtatagagccgagagtttgcactgggaaaaggtgagagtaaacgtgagtttggatgaaattgtcaaaggcgttaaagtcaagtttcagactatttcagaggcctgattagccctccaagggctctcccctccaattaatagcgagccattaatttatgccattcaagggcagctgaaagttccagttgggtcagtcctgctaatttaagagtgacagtctaactaagtccttcaagctcaccctgtaatatttacttccctgtgttctacaaattacccattaaataaattcacaggcatcttgatttaatctagaactagatggacctcaaataaagaattttccttccttcctaaatgttcatatctattttaaaagctttttcgaccattttgtttatttttcaaatgtttt

SEQ ID NO: 49197 - DNA, 985 bp, Bovine  19866881006114
  misc_feature (1)..(1): n is a, c, g, or t
naagtgatttgccccctttgggaatgtcatttggtgattttctaattaatgcactaccgtgagcgaaggtgacgggttaaccctagcaagaacgagaacaggctcagttttcactgaaactctcaaacgctgagtcacatgcagtttcatttattttgcatgtttggcaatctttcctccccaatggaacaataaacattaactcattactctgagagaagcttataaaaacatagttgacacaaagttactattaatttttttttccttttacaaagcctgtttccccttttgcaacatgataagagttgtgttttattttgaaaagagcatgttcaaacttccccacaaatatttcaaatttgtgatgggccactaaaatgccagatcttggatagttctgttaattcattttttttcccccaggatgatagatgagacatactggggagtgggatatattataatctggaatttattacttgaaaggagactttttaatggtactaagatgacttaagacaatcacagtgtgttttgttccaaatttgttttccgacaccaaactttctcagaaacacttaaattataaattcggtgtccttgtatttacaaccatgataattttaatatgggtagttcatgctacattttcccttttccagttgactgaaaatacagataagatcagtggacactctctgcaggctttttagaggcaaagctgacgtccgggaaggctttggtgggcgggttctgctgtcgagtcccccttgtgaaggaaccttctgtcctgcagtgggactgcagcttcttggaaaggggagccatttatcacagtcctaaatgaaagcattctttaaacacaaatgtctttttctccctttgtctaattactgagaggaaaagtgagaaggaaatgtcaaaacagagaaacagtggtgtatagagagagcagccactctggagctcaaccggcttttgt

SEQ ID NO: 49198 - DNA, 1809 bp, Bovine  19866881085537
  misc_feature (1)..(1): n is a, c, g, or t
ntgcaaatggagagatgtgtttgtcaagaagtccacatttaaagaaatgcttgatgtagatttttgtgtgtgggtgaaactcacttaaccctccagagggctcacatttcagctgagagagatcagtggttagctgaattctacagaaggaatgagaaggcttataaattagcctctaaaagccaaatttactcaagaatgcacagtggtaataaacatttataaatgccaaaaaataaagcatttagtgagaaggctgatgttagattgcgcctatttgtcataggatttcactggaagcctttacgtaaattcctcgggttccaagggataatttgtacgttgacacaagtgctgtgatgtgttgcagatgcccggaagtgctctaacgctgcgagtgtgagcaagaccagcagttcaacccttacacactttagctgtaagcagataactaagctccatggggcacagagtgtaaaggttaaacctgtgggatggaaagcgaggagaccgattcatgaataaagtgagaaattggtctcactgctctagtcaaagcctttgaaagtgtgtgtgtgtgtgtgtgtgtgtgtgtatactcagttgtgtctgactctttgtgactccatggactgtagcccgccaggctcctcggtccatgggatttcccaggcaagaatactggaaaggctgccatttccttctctaggggatcttcgagagccaggatcaaactcgtgtctctcgtatctcctgcactggcaggtggatccttcaccactgcgccacctgggaagcccgtgcacagttaaccccaaacatattttaataatgactactatgaaatcaaacttagcccaggaggccacagtcaattcacgatagtatgttttcagtttttcagggaaacgaagagatatcctctgacagatacacaacctacctgcttgaggtggttcccagtttcaattaggttgtgttagattcattttgatgatgtcgtgtctttgtgaaactgaggatccagtaattgctatgagcaagtaccacatgaaagtcaacacagaatgtgggaccagaactgaggctaataatgtctaatctaattccaaagtttaagaagttgcacagtccaatacacacacgtatctcgtgtgtatgttatattaggtaaaaatgaactgaaattatgctttttctcccaatttatgtgtggcttttaaagggccactatgttgttaggacataaatacttactaaattgtttggacccagccacttaatgcaacagttatattatttcttttggctggggaatactatgaggaaaaactgctgagatactaagagcactgtgaatggaaaagttttgaaacctctgatgtaaagttttcgcagctgtttctcctccatccctccctttctttctcatgcacataggcagtacctgtttaaaggaatttgtcctccttccatcaatagataattattaacagacattattgagcatcagatacatgctaggcactgagctgtttgtttagttgcttacccatgtctggctcttgtgtgacatcatggactgtagcccgctaggcttctctgtccgtgggattctccaggcaagaatactggagtggtttgccatttccttctttagggaagtcttcctgacccagatggaacccatgtctcctgcgttttgagccactggcaggcaggttcttttaccactgagccaccatggaagccctgagttagaggctaggtatacagtgtgaatagacccaatagtctctgctatcagga

SEQ ID NO: 49199 - DNA, 1906 bp, Bovine  19866881090548
  misc_feature (1)..(1): n is a, c, g, or t
ncactttcttctgctgatgacttgaatttctgtttgtctgctccaggctcctggagcatcttattaatccagagaactagaatctctgctcagcatctttcgagtacaatcatgatgctgattgctattcttagctcacaccacagtccgccttctgacacctactgtgctctagtgggcttgccctctgcgttcatggtctggtctgatctggaatcaagtgaagcctctgtagaagagattccaacaaacatacttgtcctgggaaggatggctccaggcctacagagaagtcaggaaagagagcaatcaggcacccagggacaggcctccaacagactgtttctaattcattacctttaaggtagtaagaggccatctcaaagggaggtctcatgtcccttctgagcatatgtacaattatcctaaaaggagtcaagcaaatttacctttagtgcaggccttaccttgtagaagcattcttgcctttcattttacagatgcttgaaattactttaatgggttacaatctttcattccataattagagacaaaaggcttaaaatacacaggcctgactatggttaggcatttacagaaactcattcacactcaagtgtcatcagtcaatcaatcagttagcatctataaatggcagacattagatctcttcctttttgatgagcatgtgtagggggaaagatagtagaaagacacttcgaaaaatcgatgcttctgcatatgtgggtggaattaccattgagacaaagaaagaggaacataaatggaaggttgagaacctcgaagacaacactgaagtcttcacatattcactcactttctcattgccagactgaaggcagaattcagtccagttcaattccacctttaggacataggtttcaaagaatataatctatagatgcttaatcagtgatgtgattacgtttgaagaacagagtgtcacactacagattttgtgtagaagagacaacagacatctttagcttactctttgacatctgaatgcacaggtgggaggcagcttttcatgtggtatggagtctgagggtgtcatgcactgaagaatggggttggacctatggttaccaggatctttgaatggctaccttcatacatcatttcctgctctcatctttacttttaatcttagggcaagcaaatttcgtagcaataaatgtaatcatagctaacattttttgttgttgttgtttgtttgtttgaacaaagtagtgggataaataagctacttggattgcagtactgaatcctcatagcaaccctaggagacaagtttgaggatcgaggttaggggattttactaagcttccaagagttatggaggctgatagtaccggggttctaatttcattccatcattgctcatggatattttcattgtccagtgctaagtaagagctccacttcatggtttcttctgtatgttttgtgttcatgtcactctgcctcaggactttgggttagaggaaatgttttgcaacagtaaagggatgactaaatgtcataatcacctatgatttaactgttcccaggataacatgtttccagctgatgtaaccgctcaataagtgaaataaaaataagtggcataaagctatccttaaagatggctaacaataaactaatatggtgagaaatggatttggctttctcatagtaatttaagtagggcaacatgcttgaaatgctactttgaaacatgcaaataagtttggtgtccatctgcttctcagaacttatctgcttacaggattttcttcttcctgaagtaaacaagctagaagtgctctgattaaagtagtttagacacatgctagaaggttgagagaagcagcatttttgctacaagatcctttactcctag

SEQ ID NO: 49200 - DNA, 1395 bp, Bovine  19866881125828
  misc_feature (1)..(1): n is a, c, g, or t
ntgatcatatgccaaatcccgccatggtgaaaaattacttgaagttgatcctggtcagttgtttacaaatgttcccttgattcctgtgttgtccctacaagtttactcttgaacagatctcttattctattgacctgatcttatgctatatcaaatccaaaagtcatatattttaccctaattcacttagtaataatacagttttgtatcagacggcatgaaattttcttcctttctggtccttcacctgaatgtgggtctaatgtacttcgtgtactttgggttttgtgtttttttttttttttgtaatgtgtacctcatttggcacacgtagagataattcattcatttctccatttggggactttaaaaatcaggattaggctttgtctccttgttccattgtttcctggaatgcttaagcacctctagaaaactgggtcgcttgttagattgagttgaagagccttagggatccatttttcaaggaagtctattgggtctgcctcctctacccctttaggcagtccagtaattctgacatgctagttcaaaacagtatcttaaaactattatacctcttctggtacggtatatctttcattttgaacagttgctttatcgttagattaagcttaagtgtctgggagcattatttgatgttctttattttttgctttagagtcaaggtttactgcttgttaatttcaaataaaaaaggaaataaataccaaaataaaaaaaaaaacagcctgttgccacagatctagtatgtagtagatttattcttttctagagaagcttccttgaaaatgttagacaaatgtttgtgtctgtctttgccatttatttttacctcctatatcaggaaattctttctgtatcagatctttttcttgatgtttggtgttctacagaatcaattgtacctgtgcattttgcttaagcctttcaaatgtcgtgattccatagaaatatttagggcagcattaatgggctatcactgatacatcttttagctggctccaacctgtcttctctctcacctccatttgcagtgtttaggtacatggtcatagagatcacagagaaggcggtggcaccccactccagtactcttgcctggaaaatcccatggatggaggaacctggtaggctccagtccatggggtcgtgaagagttggacaggactgagcgacttcactttcacttttcactttcctgcattggagaaggaaatggcaagccactccagagttcttgcctggagaatcccagggatgtcagagcctggtgggctgctgtctatgggttcacacagagtcagacacaactaaagcgacttagcagcaacatagaggtcaagttgaccaagcataaatatttgctctaat

SEQ ID NO: 49201 - DNA, 838 bp, Bovine  19866881209896
  misc_feature (1)..(1): n is a, c, g, or t
nccgtctatggggtcgcacagagtcggacatgactgacaccgacttagcagcagtagcagcagcagcaacatcctttgatacactttatttattctttgtatcccttcttctatatcgaaatggggagttttctctccccaacatctgctgtctagctgtagcagattccctcatcctttctcatagaagcaatcggactgaaaatgtggcccatttctgagcttaccctctgaaatgtgaattcaaacagccacctctaatcacttgcacaagtggtttgggaaactgctcttttctgtctggaatcttgctttccctgtgtccagataaaatgcaagccataaccataatggtatttgatatacagataccttctgcagaactaagccatggacctatcattaaaaacacatttttaatttgtatttgatttttcaaatactttattttcaggtaagcaaaatcctttgcgtagaagaaacaaaagtaatagagctcacagatgaatacagtgatgaggtggcaggctatgcttagaaaatatttgttttctaatgttagctcaaattaatccatgaaatattttgcgtattgccacccaaaagatggaataatataagaagctaacaatgacccgcaaccagcagtatttctgcatttccattcattaaggcctcttggttatcaactaatgagaagttttctctcatgcaactcagtatattcttatttatttatttcataagaaagtgttggttagtcactcagttgtgtttgactctttgcgacccccatgaaccaggctcctctgtccatggaattctccaggcaagaata

SEQ ID NO: 49202 - DNA, 920 bp, Bovine  19866881232005
  misc_feature (1)..(1): n is a, c, g, or t
natagttgggtttttttttaataaagagttataccaaaattatgttttaggttatgaataaccataataaaattgttaaattgatattgtaagttgattcactcttttgggaaaaagtttgcaatttctattaaaaatgtttagaactatcatttatcacatgctcattatatgttaggcactgttctgagcatgtatagtcattcttaaaacaattccataaggtattaatatatttcactaaatcctaaaaagctactaattatgaagggtacctttacattatgtatatccaagaaaaaaaaaaaaactgtgaattgtacatatacaatttttgtatatgtacaaaattgtacatatacaatatacatgtacaatacaacattttcttgccatctataatttttatttttacttactcaaagagttcttttacatttagatctgtactttatcacatatcactccttggcatgaataacatcgaatatataaattaaatcaattggttgagattctttacacttgtggtccaattcttcttaaatactttttgacttagagttaacaatgtctgcatttttctgcaaaatattatccaatatcccattaagattgttggtgatacaatatagctttataaaaattctctgctaacctctagagttttcttacaggcttttgacacccattgggcaacttttattactggtattgttttttacttaaatgtagatttaaaaagattttcagacaacaaccatgtctcatatccatactgtcaagtccttaaatgacttgtttgggggttagaggtgtagtcaaggaacaactaataacaatctaggtgcacatatgttagcaatgacatctatatcatgtgctatccagctgacagtgacaaaaggcatcaatgtggg

SEQ ID NO: 49203 - DNA, 1104 bp, Bovine  19866881261662
  misc_feature (1)..(1): n is a, c, g, or t
ntggtatttatatttgtcctggccttgaattcacgctgtgtgtctcataaagcaacctagcatgagacatgagacgaagggatactcctatcaaacaactggctcagagagaagtgcgtgtgatctcagtccagttcagagcagagagttgtccaccttgcaaaactctcccgctcagtggaaatgatcatcctatttgttgtcagtctcatccaagaagttcaatactgaatggacctatgaaccatattagtcctttaaaccttcaaagggcctcctgtgcatcaaagacaggcccttgtcacctgaccccaccagttcatgaatgatgatctttttaaggcccttaagtcagctttaaaagagagcgctaaagtaggatttcataaaacagaactgggaaaattggaaagaggaaaacattgagagggtctaacattgcagggcttgaaggcattattcttcttttgttgtattaagcaacccagttttaaatgaccaagtagagaccaaaacaatagcaacaaaataaggaatatttttaaggaatggtttactttagaagatattttaacatctttattaaaccaaaatagagtaattcaacaccaaaagaaatgtaatttgggttcttacagaatgtattatttatataaattgtagggacttgatatctgcttagtgataatgatgatactagtgatcatttttattatgaaataatataaaacaaaacactttaaaaggaagtttctcccttgagtataggagattaccctttttaattatcatttttaaaagttttaggattgttattaagaaatatatattaatttataacacaagaataaaattagctaaccatgtttatagaatcactgatataaagaaaaatgttggctgaggacttaaataattaccctaaatttagaagattaaagccaaagctaatttaatgtggtcatattatttcccatctgaatcttaaataaattatataacctattctaagacatattccatcctttgaaacaaattttgatgcaatcacttaaatagtaaaactccttttgccttctttgaaaaatgttgtgcatgtttctg

SEQ ID NO: 49204 - DNA, 1631 bp, Bovine  19866881270648
  misc_feature (1)..(1): n is a, c, g, or t
naatagtgcatgaagtgcactgttatccaaggggagaaatctcttaattcttgggtgtgttgtcacctgtctgtcatattgcctgagtgtgacacctagcccagaatggcaagatttttagaattattatatttcaacttgggacaatccagggttccatttaaatatagctgctctaatataagagcagaggcggggaagacagattctttctgggtgttagagagaaggtttgaagttgatgagaataagtggagagaactggagaagatgaaaatcattacatgaattatccatgtatcagggaatcatgatcgggggagagtagacaacttttaaaatcatagcactagcagcatctgagagtggggaagcccaggccatttataccttgctcttgtgatttatgatgtcaccattaaaccccttgatggcattatatccttgtcatttgcagttgctagcactttttctatatacaactcaataactcattgtgtagctattccacacacacataaacacacacattagtgtgaatatgtgtatgctgaatctgtcatcagtggaaaccatgatttttgatataataagttgggttaataaaaggcaagaaatcacagactgggtgtgtagtcaactgtaataccagctttattgtgaggcgccgcgaggaaacaccgctctgcacgttaggatacgcagatgtcgtttagatggtgtatatattctttttaagaattaaagaagcaaaactgtttgcagggtcagtcaaaagtcattatcaaaggaaacaggtgagatcgcacagagataaagaaggaaatgtattcaattcacctcaacattgtagtaataggattagaaaataacagggttagaaacattaagccttcagggctaaattctgctgcccccagagatgtagggttggatctcctttctgtccagggggagttgctgcttccttcccgagcgcctggttctggccagtgattgtgacaccatcagtctgggaaagagaaggttttggaaccttggctttaggaccataataccactagtcattagcatttctgcgggggtgagaggtagtgtttggacatctcttaaagttagcttttcagttgacttctgtaattattctccaacaaaaacatgaatgccagcgactttctggggagttatttttatttctatttgaatattttagctacaatgctggagatgcactgctggatctctgagaatgctgttctaaaatgctatatttataaaatgaccaaagagcgcatgctgcctggattaaatttatcccaagatgagaggttttatctctaatcatctgcttgttgactaatctgggcacatcttgtgcaggtttgatggttgaaatgtagcaggctaaagggatccagaccctaaaggggtatccctttgtctctgactttgttttcctgaaacctggagataatgaacactgctgcttcaaattatcatgccttagaggaaccactgaccgagactgctagtttgatatgagaaaaagtggggtgctctctttaaaggagtgtggtatatgagatcacaaaattattgcttcagaaaattattttttaaatataaaggat

SEQ ID NO: 49205 - DNA, 911 bp, Bovine  19866881293678
  misc_feature (1)..(1): n is a, c, g, or t
nagcactttgcaagcctttgagttcttcagaagaaagtccccaaaaggaaaataatggggttcctaaaatgtaaagtattactattatcattgtggaaagaaaacctgaagaatgagaatgtgttttctggttgaggttaggaaaatcattttactgttttaggaaaagggcataaatatgaaaattacaaatttaatagaaaaaaaaataacttggctgtgagaagtctccatttgtagggaaagagttggaacttctaagtctttctgaggagacattcagtaggtagaatatactaatttctcagtattgagacatctacaactgctcctcagtttgtattaactgaggctttatttacagttaattttcccctcctcctatacagattgacagtctatattgaacaaatatacacctagacaaatgataaattttcacattacgctgagcctttgtttagcctatttttagttaccttaattgattggttgagtcacacctcttgttgggggggggaggtcacacacacacacacacacatgaaataagagtctagcacaatggttgcatggagggaaaaacagattttttgggtttttttgctacagacataatataaacttaatggctattttctatgtatttatatttttagaattaaaaaatgaggtttacttaagaaaataacagaattaccttaaaagtgagggtaaaaaagaaagaaaaatacaaatagatgagatggaaatgtggtttaaaaattaattcaaagattatatatttgctacagatatagttccaagttaactctgcatttctgtagtggacccaagaaaactgaaaacataaatttagttgcataagtcccatctctttaagataaaacacaaattgctcaagaacaaag

SEQ ID NO: 49206 - DNA, 1402 bp, Bovine  19866881301401
  misc_feature (1)..(1): n is a, c, g, or t
ncagatcagtgtacacatcaaatgtgtgtctcaaaactctttgagcttattatgaatgctctttttcacatctccctttcacattttcaggattttattatccttgttatctttgtataaaaatatgataattagattttattttctttcagaagcaaagagctctgacataatttgctttgaacaagttcagatgataagtagtatctggtagtagagaaagcagtaagatctatagatctggaaaagaaatttagaacagtaatttcaataaaaagtgctacaaagtagaagtagaaataagtatgagatctagaaaggagaaaaaggaaaatggctatcagctcttgagttttctcaatatggttgataatcagttgaagcaaaaattagaatactatctaatgtgattctgagtgtgtacagaagatattgaggacaattatattacataggaaaataagagtggctaccttatatcagataaagtagacttcagaggaaataaatttactagagacaagagggatattacccagtgacaaaatgtcaatctaccaaaaagatgttacaattctaaatgtgtattcaccaaaaacagagctacagaaaatgtgaagcaaaaactggtggagctgaaagaagaaatggacaaatctacgaatatacctggatacttcaacacctctaatcacaatgggtacagaagaactcaacaatatcaacaaacaagatttaattgacatttgttgaacagtccacccaataacagctgaacacacgttcaaaaggctacagattatacacaaagatagaccatattctggcctataaaaaagacttccacaagttgaaaagtatggaagtcattttaaggtgtgttctttcactgtactggactcaaactagaaatcaaaacagaaacataacagaaaagtctgcaaacactttgaaactaaacaacacacttccaaataatgcatgagtcaagggaggcagtctcaagcgaaatcaaagtatacagtgaactgaatgatcatgaaaatacaatatatcaatatttgtgggacacagcttgaaaaaatagcactgagagggaaatttatagcattaaaattcatatatttgaaaagggtaaaagtctcaaataatcaaagctaccacatcaaaaacatagaaaaagaagagaaaaagtaaaatcgagcagaaaaaaggaaatggtaaagatatgaacagatggataaaattgaaaaggagaaaaagaaacaaaaccaatgaaataaagtcatttctttaaaagcatcaatgaagttgacaactctcaaaggaagacataaattaccaatatcagcaatggaacaggagatatcactacatattcaagacatcaaaaggggtagta

SEQ ID NO: 49207 - DNA, 1105 bp, Bovine  19866881391108
  misc_feature (1)..(1): n is a, c, g, or t
naatgtttaaattagattaattagtatgtatcgtgaaggctttcttactgtttagaattattgccttgctaacatagtaaatctagatgagctgagcattcaaatcattctaataacaacacttggcatttgtacagtgtgttatattttctaagtactttataattacagtattaattagttaagtgacagagtgatcttgtgaaaaagtctgcaccgttatcccttttcacaaatgaggaagcttaaaatgcaaaggacagtaattcacattgcaagcaaaatcaggttacaactaaaaaacattttaaatgacttgtgcatatctaatgctgcatgatttcttgttctttggatgaagaggtaaaagtttcatcccatatgcagattttcagaaagcccgcagactaaggaaagaatagaaaagagagttctttagttcccattgcattctgtctcctatactaaactttcattatatccttgaggctgagctgttgcacctagaaccatgaacttggtgaacttggtagcctcctggaggatccttagttgcctacagaggaagcattgtctgttctttaccgaagcatcagtagtgctccatgtagggcaaaggggaacaataatttcaaaggctaatgaggctgggaaattcacttgtctctttggtttataatctcaatgcaaattaagtaggatttccaaaatattatagaataatattagattatcttaagcaacttcaacaagcattaattaattgcttatttatgttctggcttctaaaggaataccctaaattagtagaacaaagtttctgtactaagtgacttatagtttagcagaaggatataaacatgtcaacaaattaaagcaatatgaaacaaatagttgttagccacttgccaaccattaggcataattttaaggccacaacagtgaataaaacaggtaaaaaccctggcctttatctagcagatattccagtgagttaataaaaaaactattaaaggtagtgtggtatcagagggatagagtgtgcatagatgagacatgcaagaaaaaggtagccagtactttacatatctgcaggacattgatg

SEQ ID NO: 49208 - DNA, 1051 bp, Bovine  19866881409721
  misc_feature (1)..(1): n is a, c, g, or t
naggttgtgtacgcatccctgagaatctgggacccagtcaagaaagccctcaactcgttgttgagctgagtgtaaaccaatccactcacagtagacgcaaatgtttcttgctcgtagaattagataatgttgagtgtagtaggaaccttcgagaaggatcgtggccaacccttcactttactaacgtgttttaaatgattgttttgacattctatgtacataacctttaaaattcaaatgacattggtccaggcatgagtttaattacaaaactcaaagcacatatggagtagagaatattttctagggaaacctagagaattgtttcatgggtttttttccttcacttattcttgagacccacaatatgaaaataggtttcctccttaaaatgtgttagaaagtgataagactaccgaggtacataaaatatacattttatatacaatttatgttgataaaaattctaaacctgcttcaacatatctctatgtgccaattttttctacaagccaacacttcataaatcatattcaaaacaaatactaaaaatacataacttacataattaaacacttatgtattaaatttatacacaggcataatctctccaatttaaagatatttatccatgccagggtctatgtattcagcaagaattggggaaagaaagaaaaatccttaaccagaagtccttcccttagtgagttcacaggttaaaagtttgaaaccaccaccctatgtccccttgggcaccctgcaagttagagacaggggctgaaggtggttctatttgttgatctttctcccttccagaagtctctgcttatcccacccatttataagccttagtctttgctccttgagtttcttctaactgctaaaatagaagatggcccatcaggtttggacagccattatcctgaccctccaacaaatattttcattttctatgtcactcattatcttctaagaagccaggttgatccttactgtaaaacaaggaagggaagtgcaaattcttggagatctctttcttcttttcctcaat

SEQ ID NO: 49209 - DNA, 1062 bp, Bovine  19866881642162
  misc_feature (1)..(1): n is a, c, g, or t
natcagaaaaaaaaatgcacatagaagattaaaagccaatacacgggaaaaaaagagacttagtaaatttatacacctttgaaatgaaaaaaacttaaattgttagactcagtaaaagaaaagaaccattctcctagcttacaaaatataatttggcatgatgttcctccaggacaaattggtgctatgtacaaaatgtctgaaaaacatgtacactttttgacacagtaagttaaattttaagaatgtgtttgaaagaaattttgaatgtgcacaaagacatattcaagtaagttcttcatagtagcgaaggagaagaaaatctgatgcccaactacagcggattaaattattcaatcttgatatttccatatagtaggataattaaaaacaggaaaatgtttataatatacaagttgtcaagcaagaacaccattgcagtcattttacttccttaaacagtcaattaatctattttcaaatattcttaattcagtttaatgaaaaacagacttttggcattatgtgtgtgtgtgtgtgcgtgcacgtgtgtgtgtgttaaattgttacttttaaaacactcctctgctggtgatgttgtaagagctcttcattctggataaagcattgcttctgttcatggacattttctcacagcaacaccgcacagtctgttctgcctaagccatgaggatacatgggaaccgtctttgccacccgcacagaactgcctgctttggtgggcacgttgcactgatttactttttcctcctgagagctgaggtttctactttctgagacattcagagtaggtgatttaaagcttgtgattatcacttcaggattgagtctgtttttaatgacaatttaaatcacagagaacaacactgctcaatctcctgatatcctttctataccagatgaccacttaaactctatcttcctgcagatctttgcaccttttcacatgtgttttcttttagttaaagctaagaatatgatttggattattcatttatttcagtgtgttaaaacttgagctccttcatcatatttcaggtt

SEQ ID NO: 49210 - DNA, 1163 bp, Bovine  19866881701984
  misc_feature (1)..(1): n is a, c, g, or t
ntgatctggtcttgaagagacataaaatggaaaggtattcaatatttgcagacatagtgtattaaagacaggtatctatgttgtattaatattctgattaaaagccaaccctatttcaacttgaataatcttgttcctttagtcaaacaatgaatatggcataggagatatgaattatattttgatagtgggtatctaaaattagaacctgaaaccaaaagaagcctagagccctaggggtccaatcatggggaaatggctcctgcacacatgtgccaaccactgaatcatttcattacactttctgattcacagtggaaatggggaccagagtgaacatacgaccgtagaatataagtagaaaatatatagctgtgacagggcaaggaagtcagaaggcgaaggtgtgaaaaggttaagtgtgtaggtgacttcctcggcatgtcactccagttcctcatccagatatactgtactgcggaggcaaactgcagcgccaagtgagaattaagaggaaatgacaatctacatggacaagatagacccgcagaccaggagatgagtctcgtgccaggttcgcaggttttctacagccaccgtgacagacaacataagccagacaaaaggccaaccaaacacccagatgctgctgctggaaaattacatactggagctcagcatctgggtctcacagctgccaagtttaccccatgggtgcctacagtgttggctcagatactgggccacatagaagggggtgggcaccatggaacaagaccatcaccagagtaaaggaggaggaggtagaaagccaagtgtgtaataaaatagcaggaagctgccaatatggtttcaaaagcatgaaaccatacttcaggcctccagacatcgtggggacagcagtttttccctcattagtgtgtgctactcgctcagtcgtgcccgactctttgcgatcacgtggactttagcctgccaggctcctctgtccatgagattctctagtcaggaaaactggagtggagcgtgtttcccttctccagaggatacgcccaacccagggatcaaacccgggcctcccacactgcgggcagattctttactgtctgagccaccagggaagacttccctctttagtgtagagatataatttaaggggcgtt

SEQ ID NO: 49211 - DNA, 1467 bp, Bovine  19866881947773
  misc_feature (1)..(1): n is a, c, g, or t
ntttccttgaaaactataaatatgccaataaatgaagttatctcaccccacctactgactctgttctaacaaatactgtctttttacaaaacaacgtactttcacaaatgaccactcgttggaaatggccacccctctacagctagaagcgagctaagaactggaagaaagagaatatacatcaggaaagtaaacctcaggaaaaaagaaactttgattgtattttcttctttgtctcttagttgccagacgcatcagggtaatttcaagtttctgaaccgccacaatgaaagaaaagcaagctctgtcacagtttcagtttacaaatgagatgtatttttgagattaaaaagcaatgtattggaaaatacggtacaaagggaaattactttttagtggaattaattgtagttcctaagtaatagaataaacatattgatataattctctttggaatattccataaccactgtgaaaataaaatattctgaaacaaatttacatttgtctttccctttccagcttctccctatacatttatcttctatctttttaacttaattacatgagtaagaacattaatttcaaatgcagttaaacactgaactcactgaatttcatttcaatattttatttactgttaaatacaaacatatatgatccttccaaatagcttcatgtcattcaaatgaccccttagacaaattttcagtgtgataaaaaacacatttagactacttgcattttttagcaacttgacatctccattgatggtcatataatttttataataaggggcatctgaggcagctaaggaagcatttatcatcaaatttaactactaagtttacacatattttaatagaaagcacaaattgcctttctacactaaaatacataattaaatattattagtttttctctatatatattttgtttctatggtgatggcctttgatgctatatagtaatatcttaatttacagatttcctatgagttgagcaattatataagaaatcaaaatgcaaaaaaaaaaaaaaaaagaaactgaaaaaaattattatgtcacgtaaatgttgctctttgtaattttacccatctgacaaaaacctctgagcacacattagttgagataaaaaagcaggttctaaggaagtcatgaggtctgataatttgtctccagtgcagagttctttacttgaagctttaactcacctattgatgacctttattttctcctgtgtttttaaaaattatattcccaattaaataaggagaaatttgattatttttcaagggttgtgttgattgggctcttaatgcaaagtgcttcttgtagaatgactaaattgatacccatcaggtacatgactcttcaacatcacagagggacctaggatcaggacttaacccacacagctttttcctgtcctatggtgatattctgagcattgttaagcaaaggg

SEQ ID NO: 49212 - DNA, 985 bp, Bovine  19866880398632
  misc_feature (1)..(1): n is a, c, g, or t
ncccagagtgtaatatgagcacataggaaaggaggatgagcattgagtctacaccaaaggcagagacgacaatgaccaagccatacatgctgttgatggtggtatctccacagggcaggcggatcaggtctgggtgcaagcagtaggagtgggtcagtatgttgtctttacagaaaggcaatctcttcagaaggaaaggcagtgggaagaccatgcagaagctgcggatgatgatggatatgccggtgtgagccacacgggtatcagtgagcactgtagaataatgcaaggggttacagatggccacatagcggtcaaaactcatggccagcaagattccagactctgtccaggagaaaaagtgaatgaagaacatctgaatcaggcaggcatcaaaggcagtctctggtgcgtgaaagcacaaggtagccagtatagtgggcaaggtagaaaaagacacacccaggtcattgacagacagcagagataggaagtagtacattggctggtgcaagctctgctcctcctttatgatgaagagaatgaggctgttgcccagaatggagacagcatacagcagcaagaggagggctgctaaccaatgctccagtccctccatctctgagaagcctgttaaggtgaagctggtcacgctcaagatgttagtttcaaaacttcccatggagtccctgagtatcttttggaaaaacacaatcagagtaaagtgaggtcagacaatggaaagaatggtcactgtccagaatggaagggacaaggctacttagattgaacaccaaagatcatgaaaaattagaaggaagcaagctaggtatcattgctcacatctcaggccttctgccatctgatcatttctatagttgggtcatgggctccaattccttccccacaaaaatcctttgagtctattttgaacactgtatcatattcttcctgtttctgtattctttgcagaaatattaaaatc

SEQ ID NO: 49213 - DNA, 1500 bp, Bovine  19866880458329
  misc_feature (1)..(1): n is a, c, g, or t
naactgctaggtttccgatggataccattaagaaagatctatattcttatgcagatttatagcctatatttcatattcttatttaatttcattaaatatttttattactaaaaccagataaactttattaacatagataatctatattttatttaatttgtatagtttatttaagtacacacagtcacctaattagtgatataactttaatctattttcaatcatggattgataaaagtaagccaggttttaactcagagtttcttagaatcagctcaagctaaatcttttcactttagaatcagatctgagcttggggcttgggcatacttcagaacgtcacatctcttgtagacttttgttagtctcaaaagatccctgcctttacttctctcagatggcaatatcttcgttgtcactgttaatttgtctactatattctcccacactactcctgtttacttctccttccattctatcctgtttttctctagattcaagtccatatttgaaattatatggtatcaaactctcttctagcagaggagccactattctgatttattccaggtttcaagatatggcctgaaatagaagcatcgcctcgcaaacaggacatttcttcaggagaaacatctcaaggaataataatgaaaaactccattaagttggacatcaagtgtggagaagctttggaatttgagggcaggacacaagagcaacagaaaaaaactctcaggcaaatggtagcctcacagaagcaaaccatcagtagaactggagaccagacaagtcttgaattagggaaaggtttatttataaatacagttcttattagacaacaaaatgttcctacagaaaagagtacccagtatatattatactttggggagagattttaaacagaattttgatctaatgagatgtttccagatttacccaggagaaaaacctcatatttacaatgcatgtgaaaaaagcttcaatcagagtcttcatcttattgaacgccagagaattcatactggtgagaaaccttacaaatgtagtgagtgtgggaaaaccttcagccacagatcatcacttcttgcccatcagagaattcatactggagagaaaccttacaaatgtaatcaatgtgagaaagcatttagtagcagttcaacccttatcaaacatttgagagtgcatactggagagaaaccctatcagtgtaaggactgtggtaaagcttttagccagtgttcaaccctcactgtacatcagagaattcacactggagaaaaactctataaatgtggagaatgtgagaaggccttcaattgtagagcaaagcttcacagacaccaacaaatccatacaggtgagaaaccctataaatgtagtgaatgtgggaaaagttacagccagtttacatccctggctgaacatcagaggcttcacactggagaacaactgtgtaaatgctggaatggggagaaatttcactcgcatctcaac

SEQ ID NO: 49214 - DNA, 717 bp, Bovine  19866880550045
  misc_feature (1)..(1): n is a, c, g, or t
naactgattgagtttcttgtctacagtaggattttctatcttgagcatgtttttgtctttgtcaccatctcactatctttaaccaatactaaaatggtttgaatataactccttccttgtctggtgcttagctgcactccatggaccattctgggtgagggagaatgggagagatgggtgccattgtggaggaaaacatgggaagagcagagggtaaaaatggggaatgagtggaaaatagtgttgaggatggaggaggaccttacaaaggaaggatgtctcaggaaccaacatgttatcacacactcaaaatacatcttctttgctgaccatcagctgacctgactccacccctgagggacacagcctaatcttggccaatgacttctaagacaagggggagcaaggaagcagaatttcagcagtaaagaataaaaggccacagcatccagcagcagcacagacttgcttctgatgcttctgtaatcacctgtaagttccaaaacttgacatcatggtgcattttactgccgagaagaaggctgctatcactagcctatagggcaaagtgaatgtggaagaggctggaggcgaggctctgagcaggtaaggaagtggacttcatggggggagggatggtgctcaacaccactgcttcttgggttctgctaactggcttcccaggtatggagaaggcacatcactggatctccattc

SEQ ID NO: 49215 - DNA, 2420 bp, Bovine  19866880571606
  misc_feature (1)..(1): n is a, c, g, or t
ncttttggactggactcctgctgattgtggtctcctatatgctgattctttacactgtgctgggcattgcttctggggagggacggtggaaggccctcaatacatgtgtgtcacacatctgtgcggtacttgtgtactatgtgcctatgattggtgtgtctgtgatgcatcgtactgccaagcatgcctcacctctggcccacacactcatgtccagcatctacctctttgtccctcctgtgctcaatcccatcatctacagtgtcaagaccaaaccaatccaacagggaattgtcaccgtgctttcctgcaagagagaattactttgagtcattccaaggggggagggactttgaatcagtccataaactctggtggtgtttcttctgtgggcaaagctccacaccaggatttctggggaagaataggagtgagaaattccaaacattgcctcgggcttgaatctggatcataggagttaccttgaccccttgccatctcacaagttatcaacagaggtgtgtctgtatgtgcccatgcatatgccatgtctgacagttatgatcaacttgagatcttgaatgccctttgcctatttttctcaaggctcacaccaaacagtctgacaaataggaagttacttgtagaggcttgagacttaatgatatttgaattgaaatataacaggttcttattttgatgggtcagacagatattaaaaatctgctcccaataaaagaccatcctagtaacatgactttgagcaagacaagtgtactttttgggttgtcccagatagtcgtgatttacacttatttttctcagcatcattattaatagcaatcccttttcctctcaaaagtatccttgtttaaacagtaaatttatggtaaaactacatataaaacaacttccttcgtgttatatacggaatcagactcttccccccagcttactatccagtggtgtctactctcagactattcagtctgtttagaatagcggctaccaaaattttatatgccaggagattctgaggatgaagaacagctgcgtaaatggcctcaacttaggtatcaagtaaaatatgaacaaccttacacaccaggtttcagatctgaaaaatcccaacagaaacaccaacagaattctgttttgatagagctttgggtcctgtttttctggtgtctggatatttacattcccttctcctcctatcctcaccatgccctgaagcaggtatgcttgtatctttccttctgctccacctcttctcttttactgtcagcagagttctagttggcacttcttgcttctgcctgtggttgtctatggtttcctggaaacctttggtgaaatgagagagtacatcttcacacctcctaaataatagaggtctgtgtatggtggattgataggcttgttctgcttgatcagtaactggcctcagatctcagcctctcaggcttcagggcttacaaatgcaagggaaatgtttttttttttttttttttttttaccgtatgctattcttcctgagctcgttcatgtcattagggtcacctttaaacagtgaactttttgaaatgcttggtctgtttaaaatagtggttaccaaatttttacattctctatgtaaaataattaataggaaaaaattaggtatccttttaggcattttcaggttaaaacctaaaattttatcatagatttacatagatgttgaacgcacattttggatatattgtaaatatactgaggcttccctcgtgactcagatgataaacaatctgcctgcatcccagagactcaggtttgatccctggattgggaagatcccctggagaagggaaaggcaacccactccaggattcttgactgaagaattccatgaacagaagagcctggcaggctgctacagtctatgggttcacaaagagttgggcataactgagagactaatgcttcactttcataaatatatcaagttaaaaataaattgttatatcacagtttaaaataacaaatgtaaactaaatgcatattttgatagcagacattatgaagttaaatatgcatgaagatattctttaacattccattcacatatttgtatgttagtcctttttctcctcaaactcgaatttttattttacctccaccatagagtttgtaatacatataatatatttttctctttggaaaaattttagtggtttctctttcacaatacttcccaatatatatatatatatatatttaaattttatgtttaaaatttagtcacacatagagtattgttctaaaaatgtattctttattgagtcatttttctgatattaatacataattgatcaaaacaacatgagcataatacaaatttttatatattaatactaaaatttgatttcaatccatct

SEQ ID NO: 49216 - DNA, 1322 bp, Bovine  19866880901244
  misc_feature (1)..(1): n is a, c, g, or t
ntggagctgcctaggagaatgtgtggtggaggcaccaacaaaaggttttcattcacatttacttaaccaggcccactggagagaaaaatattcggaaaaaatttaaacagacctttactcagtcaatgatgcttatttcattggcagataaatgtgctagaatcagatcaaattggaaccacaactcttttggatagaatgtttgctgctagtttctcccagaacaaaaatctaattaaatccaagatcatgtcatactcccttaaaaatatgatggaattttttttacactctccatttaaaaaatttgactatactctccctgtagacctatcgactgcaatttctgtgtaattatgtgcattcagtacttcaccttaaatgcctgcttctttgagaaatgaggtgaaaaattccctggcggatctgcttagtctttacactgtaaatgatggggttcatcactggaggcgccaacaggtaaatattggccatgataacatgaactagaggtggggcatgcttggcaaatcgatgagttatagacaccccaaccatgggcacatagaggaccagaacagccagcatgtgggacagacagttattgagcgcctgcagtcgctcagcccatgaggctgtgtgcaagatacttttcaggatgaggatgtaggagagcacaatgagcagagggtctatcacaataatgagcaaaaccacagcaaaagcataccagttgttgattcggatgtcagcacagaccaggcgaatcatgtcctggtggaggcagtaggagtgagagagaaggtgggagcggcagaagggcaggcgcttgagtaggaaaagggagggaagaacggccagaacacagcggcaaaggatggctaaccccatcttgccaacgacactgttggtgaggatggtggcataatggagggggcggcagatggccacatagcggtcaaaggacatggccagcaggactgaagattccataaaagagaacgcatggaggaagaagaactgggcaaaacagccctcaaaactgatcttctgattgttaaaccagaggagctgcatgactgtgggcagcgtgctgagggtgagacccaggtcagtgagggccagcatggagaggaacaggtacatgggctggaggagggatggctctgtgcggatgacagtgagaatggtggtgtttcccatgatggagatggtgtagaggcagcagcaggggatggagatccagatgtggtaggcctcaaacccagggatgcccgtgaggagaagtagaaggggtcttgggtggtgttcatcacctcgga

SEQ ID NO: 49217 - DNA, 887 bp, Bovine  19866880927186
  misc_feature (1)..(1): n is a, c, g, or t
nctgacatgtgtctgtgctttgctagtttctgttctggttgctttctagtttattgctccttttaagtttttattcagttttctttagttttagtttttgcacaaggctcaagagggtcttccttggggcaatttttgatgttgccaaaacatctaggtcttatatatacatagaagaccattataatttaagcaagagaaaagtcggcattgctaactcataattcaagagagaaattaatccatacttaatttagggaagtgagtaaaaatcttgggaaacttaattggtactaaatgctgtaaatctttggtctgatttgagaccttcttcagggcacccagtggaatttttaggctcatgactcaacattggcctttctaagacccaggaacttgctgatggcatggcggatctccttggttttaatactgtatatgattggattaagcatgggaggcacaaagaggtagacattagccataaaaaggtggacagcaagtggggcatgtttcccaaagcgatgtatgagggacagccccaccatgggcacaaagaataccagcacagcacagaggtgtgaggtgcatgtttggaaggctcggagccgctcctctttggaggccagtcttgccactgtgtgcaggatgaccccgtaggacagtgcaatgagcaccaggtccagcaccacagttgacatcaccagtatcagcccgtacaggttgttgaaggtggtgtctgtgcaggccaagtgtatcacctcctggtgcaggcagaaagagtgggagaggactctagacccacagtaagggaaaagtcttcaggagaaaaacaatggggtacagtggctatagggccccgcaggatgacaaccaggcctgccctg

SEQ ID NO: 49218 - DNA, 1302 bp, Bovine  19866881054858
  misc_feature (1)..(1): n is a, c, g, or t
nttgaggcccaaaaaaaaaaagaaagttgaggacctgtgtgtcaggcactgaactcattcagtaataagaaaccagtctctgatctcatggagcttatatttccagtgggaggattcagacaattaaagcgttgcttagtcatgtctgattctttgtgccctcatgaactataacccaccagactcctctgtccatgggatttccaggcaagaacactgaagggggttgccatttccttctccaggggatcttcctgacccaggaacttgcatctccttcattggcaggcaggttctttatcactgagccaccagggaagccccccaaaagaaatgtgttaggtggtgataaaaagaaaaataaagtcattgagtatatggaaagtgatggtgtgggtggctgtgccttagctaggtttggcagaggaaacccttctggtaaggaaacacgtagggagaaagttgaaggaagtcagagagtcatgtggataccagggtgaaggggctcccttgcagtaggaacacgcacagtacaaacatcctgagggacgcacgcatgttctggtgcttggaacattgaggatgtgtgtttgtgggctgagaaaaggttaaacagactcacccaaaagccacttctctccaggatctcattgtccctttatccagtgagtaaaaagaaattgttttattgctataatgagggtacaaattgatgtcgaatgtgaggcaggggcaaagaacatgtttgaagttagaatgagaagttcccattaccccagtgcttgacctctttatccagaacagtcagcctccctttgtctccctcatttcttaccccaaatccttttgtgtttgcccgtctacccaggattccaaacacaagaagcaccttagaagtcagggctgggcaggcagaggccaggaaagtggctacaatgacttcagcagtcctggtggacatccaagatgaagtgacctgccccatctgcctggagctcctgaccgaacccctgagcatagactgtggacacagcttctgccaagcctgcatcactgcagacaacaaggagtccatgcctggccaggaggggcagagcaggtgtcctgtgtgccagaccagctactggcttgggaacctgcggcccaatcggcacctggccaacatagccgagaggctcagggaggttggtggtgggctcagggaagcagctgaaggtgattctttgtgcgcaccatggagagaaactccagcttttctgtgaggaggatgggaagctcatttgctggctttgcgagcggtct

SEQ ID NO: 49219 - DNA, 960 bp, Bovine  19866881090748
  misc_feature (1)..(1): n is a, c, g, or t
nttaatcctctattaatgtctgctatctctatcctgaacttcaataattccagatttactctcactggttttcctggcttagaagttgactatctctggctctccatcccttttgcctccatttatgctatggttttcctggggaactgcatggtgctccacgtgatcaggactgagccgagcctgcaccagcccatgttctacttcctggccatgctggccctcactgacctgtgtgtggggctgtccaccgtgcacacagtgctgggaatcttatggggggtcattgaagagatcagcctggattcctgcattgcccagtcctatttcatccatggtctgtccttcatggagtcctctgtcctccttactatggcttttgaccgctacattgccatttgcaacccactacgctattcctccatcctaactaatgacaaaatcatgaagattggggtggcaatcttatgtaggagttctatgctcatacctccagtcattattcgcctaaagttcttaaattattgtcacccccacatcctttctcactctttctgcctgcaccaagacttaattcgaatggcctgttcagacattcgcttcaatagcatctacggtctggccctggtgatcagcaacttgttgttggatgcagtgctcatcattatctcctatatcatgatcttgcatgcagtcttagcaattgcatcacgagaagagagaatcaagtctttgcagacctgtgtatctcacatctgtgctgttttggttttctacatcccaatcattggtctgaccatggttcatcgttttggcagacacctctcaccctgggttcatgttctcatgggcaatgtctatatccttttcccgcccttgatgaaccccattatttatagtatcaagactcagcaaatacgaagaagagtccagagattgttttacttaaaaaatgtaagt

SEQ ID NO: 49220 - DNA, 1491 bp, Bovine  19866881154138
  misc_feature (1)..(1): n is a, c, g, or t
natacaactctatcttgacccccaagaccatcatcaagattgtggtgggaatctcctttcgtagtttctgcatcatcctgcctgatgtattcttgctcatacgactgcctttctgtaggacacgcatcataccgcacacatactgtgagcacataggtgttgcctggctcgcctgtgcggacatctccatcaacatctggtatgccttttgcattcccatcatgacagtcatctcagatgtgatcctcattgccgtttcttacacactcatcctctgtgctgtcttccgcctcccctcctatgaagcccgccagaaggccctgggcacctgtggttcccatgtctgtgtcatcctcatgttttatacgcctgcctttttctccatccttgcccaccgctttggacacaatgtctcccgcactttccacatcatgtttgctaacctctacattgttatcccacctgcactcaaccccattgtttatggaatgaagaccaagcagatcagagagaaggtcatcattttcttttctatcaagggtacattatggaaatgttaggagacattggaaaagttaggagaagtttttaacatatattaatgtgcaagaatttttttaaaaggcaaatgttatttaaagtaagaatagtctacaagtgattttgtgttttatgaatatgtcatgatttatatgtaagaaagatttttgtatattaaaatactccttgatgacctgattatttttggaatatgatactgcacaggatacagtctggaagaaggaggggaaaacagagtgctgagttagtctaaatagaaaatatcaatagcaattcagaaattgaaatttgcagttatggagagagaaaaatatgtgaaatcagacaaagacttgaaagaaaagagattaaaactgaaaatattaaattagattattagatggatttaggaaattttaaataatatatattctaattattgtctatgttatgcttatgtatttcactttaaatgtccaatctttagacaccaaaagccttctagtacaagtctgttataaataatgagttctatcagcattgctataataggaataagagaatatacttatcaatgccatggtttttgggaagggagagtagcttttaggctccaggatatactgataaagtgaacttcagagatagtgctcaggaaaaatgaccccctacaatagctagagatctgagaagagggctggacttcctacaaccttcctacaatacataggtgagaactcaagccaatatgaaagtaaaacaaaacaaaaaaacaacaacattggctgcaagacttgtggagttcttatctacagagtctatttccttcattaaaagactcaattgcaaaatacatttcttcggtgaggtttggggatgaaaatgggaaaactacagtaaagtaatacattcaaggtaagatgcacccaaatgtcataagcattagaatcg

SEQ ID NO: 49221 - DNA, 1307 bp, Bovine  19866881252677
  misc_feature (1)..(1): n is a, c, g, or t
ncctggactcagaggttctttgagtcctttggggacttgtcctctgccgatgccattttgggaaaccctaaaggtgaaggcccatggcaagaaggtgctggactccttctgtgagggcctgaagcaacttgatgacctcaagggtgcctttgcttcgctgagtgagctgcactgtgataagctgcacgtggatcctgagaacttcagggtgagtttgtggaatcctcaatattctctttttatggtcaagcttgtgtcatggggagagggctgactggcaggacgtagtttagaatggagaagatgtattctggttaaagtgctaaggactcctcagaaccatttagattcttttaacctctttgctcacaataatcatttcttctgattcattcttgttctctgttgtctgcaatgtcttctctttttaattatactctttgagtgttcaatttgaaaaaaagatttcttcatctactttaaacataatatctaatattttccccttatctgttcctttcaagggataaaatgttgtattgcttttcgaagtgattcaaaataataaaaatgataacaagttctggattaagatagaaagagagaaacatttctaaatataaattcagcctgctatgggtagcttcacatcagcagtagcatctatacttcagtcatctttgtgctaatatcctaggggcacagcttgggatgaatctaacctgggcacctgcactaaccctgcccttgcttaatgtcttttccacacagctcctgggcaacgtgctagtggttgtgctggctcgctgctttggcagtgaattctccccggagctgcaggctagctttcagaaggtggtgactggtgtggccaatgccctggcccacagatatcactaagctccccttcctgatttccaggaaaggccttttcatcctcagagcccaaaaactgaatatggaaaaattatgaagcattgtgtgcatctgcctaataaagacatttattttcattgcactggtgtatttaaattatttcactgtctcttactcagatgggcacacgggagggcaaagcactgaagacataaagaaatgaagggctaagttgagactttgagaaaatatatcagtatcttggaccccatgacaggagtggttgtaaacagctgatgttattggaaaacaggctctgttccttactcttactttcctttaaagaattcaagttgcagcttaatttgtgagttagatcattgctaagttttattaaaataaattatgttacttagctttttttttttttt

SEQ ID NO: 49222 - DNA, 1849 bp, Bovine  19866880296464
  misc_feature (1)..(1): n is a, c, g, or t
ncttttaatttatggctgaaagcaccatcttcagtgattttggagcccagaaaaataaagtcagccactgtttccagtgtttccccatctatttgccatgaagtgatgggaccggaggccatgatcttcgttttctgaatgttgagctttaagccaactttttcactctcctctttcactttcatcaagaggctttttagttcctcttcactttctgccataagggtggtgtcatctgcatatctgaggttattgatgtttctcccaggaatcttgattctagcttgtgcttcctccagcccagcgtttctcatgatgtactctgcatagaatttaaataagcagggtgacaatatacaaccttgaggtactccttttcctatttggaaccagtgtgttgtttcatgtccagttctaactgttgcttcctgacctgcatacaggtttctcaagaggtaagtcaggtggtctggtattcatggcctagcttatttctttggcatgccatctttttgtttgtgaatcaacactatgaatttcctttcagtttatgttaaatgataaacatcaaaattagatcagattgaacttatttgtggccgtgtatttatcttttagggtaattgagtgattggaccaggaacagagaccagagatttctaagaaccattttttcccctgtgattaatgaagtcaaaatatgagctgacacttaactgctgctcaactgaattcagggattcaaattcatgataaaaacagaaatagatatgcccaaggatttgctcttaagaatgttcatggcagtattcattataattgggaaaaattaaaaattatctaaagactcactagcagagattgtttaataaattttgtatatcataggatgaagtcattaaaaatcctgttgtaaaagaatgtttacaacaaagttaaatatgtatacatataaatgacagaaaccagaatattcataatggtttatctgggtattgggggtgttttcttctttggggggtccttttctgttatttttcaaatgtttaaaaatgattgtcattgattttacaacttaaaatttacttatagtaatcaaaacaaaaattatgcacatcatattcttctgagtacagaattgttcagattatcactgttgggcagatatttaaatttaggatttatgttcttgtgccagctagatcttggtttgatcatacctcttttattttcattacagctttattaagttaaaattcacacatcatatagatcacttatttaaatttcacatatttaaaaatgcaatggttttaatatagaattatatatcattactatgatcaattttagaacatttttataattgttaaataaaataaaaatagaaacctatggccattagccactctgctttccccaatccctagccctaggaaaccactaacttcctactcctgtctctaaaagattacttattctgaacatttcatataaatgtaatcatacaatatgtggtatttgtgattggcttcttttctttagcataatgtttttaagattcatttgtgttgtatatgtgtcagtaattaattttttatagtctaataatattccattcttccattctatggatatgccatgttttagtctctaattagctgatgaatatttgggttgtttccactttttttggctgttatgaacaacacttctgtgaacatttgtgtataagtttttgcatggaaaaatcttttcagtactcttgggtatataacaaggactggaattcttttattgtagggtaattctgtgtaacctttgaagaactgctagactattttccaaa

SEQ ID NO: 49223 - DNA, 1731 bp, Bovine  19866880440784
  misc_feature (1)..(1): n is a, c, g, or t
naaacacatgcacaaggaagatcctttgattttaaagaatgtgggcaaattttgaaccacagcatatcccataacgaacaacagagaaactccattggagagagtcagtataaatgtcataagacctcccagagttcatcccttgctcaaaacatgagaaatcattctgaagagaagccctttgaatgtaatcagtgtggaaaatccttcagttggagctctcatcttgttgcacatcagagaactcatacaggggagaaaccttatgaatgtaatgaatgtgggaaatcattcagccgcagctctcaccttgtttcccatcaaagaactcatacctggagagaaaccttacagatgtaatcagtgtggtaaatcctttagccagagctatgtccttgttgtgcatcagagaactcatactggagagaagccttacgagtgcaatcagtgtggaaagtcattcagacagagctacaaacttatcgcacatcaaagaactcatactggagagaagccctacgaatgtaatcaatgtgggaaatcatttatccagagctataaacttattgcccatcaaagaattcatactggagaaaagccctatgaatgcaatcaatgtggaaagtcttttagtcaaagttacaaacttgttgcccaccagagaactcacacaggagaaaaaccctttgaatgtaatcagtgtggaaaatccttcagctggagctctcaacttgttgcacaccaaagaactcacactggagagaaaccctacgaatgtaatgagtgtgggaaatctttcaaccgcagttctcaccttgttatgcatcagagaactcacactggagaaaaaccctatgaatgtaaccagtgtgggaagtccttcagccagagttatgtccttgttgtacatcagagaactcacactggcgaaaagccctatgagtgcagtgagtgtggaaaatccttcaggcagagttcatgccttactcaacatcagagaactcatactggagagaaaccctatgaatgtaatcagtgtggaaaaacattcagcttgagtgctcgacttattgtacatcaaagaactcatactggagagaaaccctttacgtgtaatcaatgtgggaaagctttcattaatagttctaaacttattagacatcaggcaactcatacagaagagaaaccctatggatgtaactagcctggaaatctttcagcagaggatatcccttcctccttgcctccctttctccctcactctttccctttctcccttcagcccctcattcccttgttccctccttccattcctccaggattacatgtattggaaagaacaagcatgaaaatagtgtgtgtggaaaaaaagctttccattagctctctgttcaactgtgtatctgaaaactctttctggagaagaaagaaaaagtatgagtcatgtattttacttggcaattccatgttttaaaaaatcaaacttgacccttgttaaacattcccatgagcatgataactcttggcacttttccttgaagaaagcacttcgacctgaatttgagagaattattaaatggtcaatatgctgtggagtgattgccagtgaggtagacctctttttcaataaagaataaatgagaggggacatatatacacctatgactgattcatggtggatatatggcaaaactaacacaatattgtaaagcaattatcctgcaatttaaa

SEQ ID NO: 49224 - DNA, 1159 bp, Bovine  19866880481635
  misc_feature (1)..(1): n is a, c, g, or t
natctgctttccctaaattactatgctttcaccaaccaagccatatatcttctaacattttattttaaaatatcttgtattattccctcatggccagttcagcttaagtgaacagtaaacttctataggtaagggactcagaaaaacttgggtactaactctagctctggatgtactggccatgtaccttttgtttcttcatcagtaaaatggaataatgccacctattatggcagatctggaagttaaattagagaataatacatataaaacagctagcacagtgattggcactgagcaaacatttagtaggcttttttctgtcacccctcctctttcacttcctattgaagccagaatttcagaaaagagaggaattatccaaaaggaattccttatgtctctgtttctctttccttgactatttagactgaaggaatacctcatttatctagttctaaaggtaaggcaatttctggcagatattcatctccttttggcttattgaagaagcacacttcaggaagcctggggaggctcccacagggacttgctaaaattttctgaacatgttcaggcattagatctctattactggaaccccaaggagcaccaatcatcttatccaaagatttaggaagctaatagttcattatgaacatggctctggagagctgagctttcaaaagaatccatatcttctgtttcactgcctgaagactactataagactagtgaaatcttggaaagagtgattcttagaggccccatagcgccctgctatttgaggtccctgcttggctagagcaatatacatttccattatcactgcaggaaatctaaggaccatgtagaggtatttatgtgaaacagcactagacaatgaacagcaaggaaaagaacgtcaggagaaaataggaacttgcaaagtcagggaattcaaacattcttctcaaagtgttcattccagaggataacagaaaatactaaccagctgactgtgatgtattataagtataggataggactgccatttagtaagcacttgcttatagacaccaatgaggcacaatacatgcatgacctcatttaatgcacattggggatcccatataataaacatgatttgcattttgcagctgaagccaaaataatgcat

SEQ ID NO: 49225 - DNA, 1627 bp, Bovine  19866880708200
  misc_feature (1)..(1): n is a, c, g, or t
nttatttaataccagctatatagaatgttttgttcagcaaccattttaaagatggggagacttgaggctcagagaggttaaatagcttgcaggtaggacttagaagcagaagcaggaggtagaaaattcaaaatcaggtctgtctgcacttcaaggctcacaccctgctgttaaatttagtgaactatttaaattaaggttctttttagtcctggacaaacaatggccttggtatattcagtgctgaaggtactaaccctaactatcagggtcagattttccaggtgaagataccaaggccttgaatgtggaacagtattaaggagccagatagaagctggcaccctgcacagaggcacccgacatccacacactcagtgaaccaatagcagcgtaagccacatccatgggacatgcactccataattcattctggagaatggataattataggaggttgtcagattcaataggcaaatgctggggaaataaaaacaacaaattatgtgagagctgatatttgttcaggcagacatctgtcttctgttagaggatttagggatgtttttcaacacaaggttttaaatatggcttagaaaaacctctcctcagcatggtctgcaggagagagccaaattcctgctttctgtgggtcttctcacactcacagagggctggttcctacagctcctggcagggaggagagcaagacgcatattgaggccaactgaggctcaatccgcctttgcgtatgccgagcctccttcctcatgacctttgccatgggcggagttcctcacgctggatcccggctggcagccgatagtccctctaccagacaaaccaagctctcagaattcactttctgctcctgtgagaccatgagccacaccacctccacttgtgcccagctcattcccacctccacagccttgcacactctgttcccatggatgtcctcctccctcctccttgcctctgcaagctcatctttaaactcccaggtttttcagaaaccttccccaaatgctccatcccacactgctccctggcccacccccaaccccacttggtgtctgagctgcgtgatctagaacatctactgcaccttttcagtaagagaaaagaatagcacattcagttggaggaatggattctcaaccacagctctgctacttcctggctgtggggacttgagcaagtcataaatatctctctgagcctccgttacctccttcataaaataaaaatactaatacgtactcagaagactattgtacaggctaaatgaggtaatgcacttaaagcagcacccagatacacttttcaggttgtgtctagagctgtctactgacctcacatctaagtgtgtcttatcttcttggaagcaggcattatacctttcttctcccttccttggaataacaatctgcttcgttgtattttctctatattcatgcacacaagataagccagtcagaagctcaagaccactgagggcttttactcggtgccatattaaatttggtcttgcctgttctgttcaatggaagctagggagggactgcacaaagatgagaaataacagaagacaggagctgtgctttccctaggaggaaccaggaat

SEQ ID NO: 49226 - DNA, 1017 bp, Bovine  19866880779490
  misc_feature (1)..(1): n is a, c, g, or t
ngtaatgtgtatattcttaaagctgaaccttgtaccaaaggatgcagggtcaaactcctgaatgtcccataatattctgtgactctgttgtctcatccaagtcacgtccatcacttcttccccacattccccttttcatctgtcctttttcgagcattaattgaacaagtataatataccaggcactgtgctatatgctgaggatggggacagaaaaaatttctattcttaaatgtgcatactcaatcgttcagttgtgtctgactctttgtgacgtcatggataatccaccagtctcctctgtccttggaattatccaggcaagaacactagagtgggttgccatttcctcctctggggtatcttcttgacctagggattgaactcatgtctcttatgattcctgcattaccaggctgattttttttttttttaaatcactgagccacctgggaaggactggggagactggtgtgctgcagtccttgggatcacaaagagtcagacacaacttagcaactgaacacaacaacaaaaatcttcagtggatctccccatcctgactttgaggcaagcagagagcagtgtgattgacgctatgatctagagaggtacagggacatttttttaagtctgtaggtagaatttaagtttctttctgccctgcatgatattaatatttattttttaaaccccatgtgagtaaaattttacactctttggcccaaatagcttcttggcatgtggccagatcagcatattgcttatctctaagatctccagggaatatttgaaatagggaacaggtgtacttacccccaagtctcacataaatctagttaacaaaaacagcattaatttggtgatttgtacataaaatttataccccctcctcccatccttgccaaatactcttcttctaaggacccagcctaggaaatgtgtgggaagcagctctaggtggcctttggttaatagcctttctgatgctcttgatgcaatccagaggattatctc

SEQ ID NO: 49227 - DNA, 1533 bp, Bovine  19866880897593
  misc_feature (1)..(1): n is a, c, g, or t
natcccttcctaagttataaatattttcctgaaaaatcccctcatgtaacacagtatttcagagaatgggctttgaagtcagacaggactaggtttaaattctgcctcagccatttagatatataactttaggtatcgtttttaaaatggatatagtacctattgtcaggtctaaagtaagtattaatttacattgtatatgtgtaaattttaatacaataacatacctattgaaggaactcaagagattccaatttttaattattttataaatattatttttcattttaacaatttttattataaatattgatcaagcatatatatcctcacttcaaataccctagactgatcttacatattattcctatctcttgactgttaaccatattttcaaattaccttaaatttacttaattttaactccccatgtgtcttatcatccttccaccttacaagttccaaccaaaatccatcttaaacagcatgcattttaattctcctacctcagtcttaaatatgttctatttccaatccctgtttcagtttaaataaccttcatcttaaataccatttgtagaggacatctgctgttttagtttgctagcgttctttcctcccttctcatcatggtatcttcttacctttgaagatagttctttgtttatgccttgtgattctgatgaggtcttaagttgtgatttcccatccttcccttcacagagactgaaatttgaccctggcctattacacgtcctcatccccttggccacagtgataagttcagagtgtgcaagggacgcatggtggaggggttggtaggtactttctgttctaaagctgagaggcagaagtccctctttctctttgaagtatatgccataaaggatagaaccctggagctgttggcagttctatgtcctttgtcatgaataagactgagagcctgagggtaatacagagatagcacatgagtagagacagaatctgaaagagctgagagagttctgagggcattgtttgtgtctctgatttagttcttcaacttgttcttcctaactttaagagccagtgaatattcttatcttgaaaactgggagtgggcttcagttatgtgcaaaagagacaggtctgaataatacgcatgtgttaatcttatagatattttctaaacttagatctcttatctgaggttttcttctggacctgaccttaagacattatgctaaatgataaagattatttaaaaccatgcttttagagcatatttaaaggaattcttagctgtgtcaattggaaacagagtagggattatttatgaatttcggacttctggtgtagtcatttttaggggcatagagatgcaggaatatctgatattacatcagttgtgaatataagccagaatgtcaggcagcttgcattccaggaccagctcaactccaatttgctctgggatttttagcaagtgctttccttccaggggtttcaaaataaagtgattgtactgattttctcttcagacctagtaga

SEQ ID NO: 49228 - DNA, 755 bp, Bovine  19866880975679
  misc_feature (1)..(1): n is a, c, g, or t
ntggaggggattgctctgtaggtgttttaaagatatagggaaaacaatgtctgaggactatagagttggctggctgttgctaaattatattgatgccactcaaaaggataatgagaatttgtggtgtattaatgagtagttcagggtgaagtataacagccatagggtcctgcagtagaagagtagattcagtggagaggcagactcagaacttgatggttagaatagcacatgttcagaaatgtttaaatgcccagccaaagtaggtctgttatattaaggtcagatacctggttggaaagcttgagatcctgacatatgggacatggatatatggatgaatttctttgagaattggcttgtcagatcccttcaaaccctcaatgttacaacttccttagttctggaagatactgctgaggctgcacccctgcaagacaataggtgccttctgaggagctccctgcatctcttgtcctgattgccaagctataactcagtttggatcccagcatgctaggatttgatagacctgattaggagggaaagcaattatacaccaaaggagctacaacagttaattagcttatctgccaggaggttagattttgaggatagttgattaaggaggctgaaaaaagagtggctatgcaagaattaatttacttgtatgtacattcttaggacaaaggatttaacacccagacaaccatgtcacaggaatgggataagtactgtgaagtagctcttaaaag

SEQ ID NO: 49229 - DNA, 879 bp, Bovine  19866881067221
  misc_feature (1)..(1): n is a, c, g, or t
natggaatacctttgacattgtaaataggtaggaaaggaaacattaaaaatgctacccaatatgaatactagggtaagatgttgggttttttgactcttaagtccagacctaacgtggagtctaatgtactatttggtcaaaagatcctatcatcttcagcaaaattaacaacatatttttcttgagtctttactgcatttgtgacattgaggttgctgctgacagtgttgatacacaagagactctaccttaacttagttcatctcccaaggacttacttctttattttttttggcagctgggtgcctattttccactttgataagccaaaggaactcaattcaattttgttgaaggttttatcctcctatctgcccactacaggcaactcacagggctatgaccctttcatgggaaagttgtaagagtattttaaaatttcagtgtcatagaccatcagaactactagaggccttagaaatcatttagacatactccaatcaatgggaatgaggttacacagaaaagtagtggttaaataaatgaagtcccccgactctttgggactttcttccagatcccacaaccacagtcaccaggttttatggggagataggtggagaccctgttaactgcacagagttacataaatatgactggttttagagtcagactgaaatttgaatgctggatccatctctgtaagctctgtgacctcagaaatgtgacttgatgtctctattttctcaactgtgtaatagatatgctgatgtttacatagttgttaggaatgatgctgatgagcatagaatgcttaacacttagtaggcattaactactgtgtattgcagtaggtggatgtttgattttttcaggta

SEQ ID NO: 49230 - DNA, 1624 bp, Bovine  19866881082085
  misc_feature (1)..(1): n is a, c, g, or t
ntagtgaaggggaattctcaagactgagggcaccttcaggccatatccctatgactactactatcgaagcactgtaaagaggctaagaactattgtaaataggaccctgtaaatatagatcaaaacatcctcattgactgtcaaaaataagatcgcagcagcattaaagcacccggatgaaacaccccagcacttatccacagtgaaatctataaagtgctttcaattgctcaggggatctttagctatagcataattttctctatcttatggatgacttggccacctccactatgaatttttcatgattcccctgacccagcagctcttgcctgtggagagaataatacagtattgatttcagagttaggtttctgcctttttcgccacaacaggatttttgtagcctagaaacctcaattccctattactcattagagaccagggcaacttttcttagatctggaattcagaaggcaagccatttagctgctagtgtcaaagacagtcattatagtggaattttaactgatctcagtaatgagagtagctgttattaaaaacttcctaactgaaccaacagaggtaggattatacagaatgccaagaagacaatagtctttgtctctctcacatttgggatattttcctaggcatagctttctgaatgaacctgttaaaaatataccagaggctaaaaacgaataaaaaagaaaggaaacataactaggaaatccagtccatcttttactattttttcttctgtgtaatttttggagtagatgtctaggtgattcttattttcagtggcccttgttcatataagagaaatgaaaagaggctatgctgttggtagtttttatttaaactgcttttaagaaatcaaaaaatccatatcttacatcctgtgaaaactcattcttggcattgccatggtaacaagacttttaaaagggagttaactgaaatttagctgcatatattatttctttgtgactcatacttcataaaaatgcaaatgtcacactaatacatgttttaccttaatgttttatatcaccatttagtcttaattgatctaatgttttccttaattaaattttgtgcttctttgaatggttttttactcacctcccccacagtcccctcttctgtggacccatcaaactatacattttcaactgggtgacatgcaatttaggaagctgtcacacaggagatcaatcatccagcctaagaactcaacaaaatatttgggggaaactgcttgtcctgcctagaaattcagccttatcctcctacttagaatttttgtatctccgtctctgtccttggccatcctctcactgagcctctccttgagattgagaagcagagtatgttggcaggaaaaatattttcagtatatctgagattaaggtgcagacttcggtattcctcgatagtgatagtgaaagtgaagtcgctcagtcgtgtccgactctttgcgacctcatggacagtagccaaccaggctcctccgtccatgggattttccaggcaagaatactggagtgggttgccatttccttccctatgcaagtcatatttctaacttttttgacccacaattttctaatagata

SEQ ID NO: 49231 - DNA, 1732 bp, Bovine  19866881092143
  misc_feature (1)..(1): n is a, c, g, or t
nctcctgcattgcagacagattctttactaattgaatcaccagggaagcccattgagtctgaatcctggaatataatggaatgattggaactggaaaagtatgcgacagtgggattggacagtttccctataggatgtccagggacaagaaaaagtcacattttggagctgcctagtctggcatctaatcaggtggcagtgccaggttctgttcaagtactcatgccttgtatccgctgtggtttctaaaattcagagcacagagtcgccccagcagcttcctcaccccctgtgctgtgagttctgcacagagccctaagaaagttgtcagccatgagattcttcccctccagtgcaaacacacatggctcaggcatatgattcccatctggatccacccccgacttccggccaggaggctgctgtgtaggcagaaccgtctgcctttgatttgccagcctaacctgatacctggagccagcccttccctagcagtaatgcacagacctggcaaaattcatgcttcttttccaggacctattcatctctacatttcccttgccctgtcagaagaggttgacctgcgccaggcactagtttgcacagaacaaacaaatgagtatttatttctggaagagaacaggtagtcttttctttaatccaaggaacagatgctggcccaggaggagaatgtgctcaaagtcccacctatcactctaaggccatagggccacaaattgttattcaaagcaacagaccccatactcccctccagttccctgatggcatcagtgcccagccactgcagaattattaccatcatcatctctgctggattctatgccccagtcaaattggcagtactccttctatttgcaaacagattgcaaaataagaaccccaggaaggatgcaggctggccaggttccaaagaccttcagcagtgatcatactaaatcagagttgcttcctactccctgaacagcagcaggtactggaactgcatcccaatggccctggatcactggaatgcccagcctcacctccctccctcttccttcctggaataaaagtatttttaaaaaagggaaagagagagagagtgtgtgtagaacttcctgggaaattataagaaaaaaactatcattggggtcccacactactcatgagtttcctgacagtagagctaggaacaaagcaccaatagaaactttccttgactcacttccctcaatattttaaacttatcacctctgctctgagttagtctgtcattcacggccctctacaatatagtcacttgtgtgcatatccagccttctcttgtaaactgatccctcctctcctgcccataacccttcattcagtcccttgttcactattatcaaacaaaagcaactggtaaaagagtaacagtggctcctgcaattgctatgtgcttattgtgttacagactccatggcaagtgctttacacatagttactagtttaattctaaaaaataaaactcaagaggtaagctctattattatctccatttcacatttgaataaactggagctcagagattgtaaacaccatgcctaagatcataaaactaatacggtaagatgtctggataaaaatagcactgctatctgaaataacttctctgaaatgttaatagatattactgattttgctgcaaaaaataaataaaataaaaaaataaaataatgtaaaaaaaatagat

SEQ ID NO: 49232 - DNA, 1776 bp, Bovine  19866881099312
  misc_feature (1)..(1): n is a, c, g, or t
ntttgagcaaattctgggagatagtgaaagacagggagagcctggtatgctgcacttcatggtgtcacaaagattcaaacacaacttagcaactgaagaacaacatatttagtctgttgctgctggacattgggtatttttcagcttgaggccataataaatagtgcagctatgagcatatcttttggtccacataaaaatacatttttgttgagtatattctgggaacgtaatttctgggtcacaaggtatgcacatattcagctttagaattcattgtcaaagagttttccaaagtaattgcatcaacatagaacttctttaattcatgaagtatgttaagcttatagaaaatctctatgtaaatacaaagttctgttattaactcaatgcctcatttgcacaagatcatcttgttccatggcaattaaaaataacatctttgattagatgaaatcaaatatctactgggatttgcatttataatctagatgtgtcacactcttttctctaatcaaaattagattctgacatgctttcaaatgtgtcagtgaaagacaaacattggtacgctgtttctaaaagtatatttggtcatacatgtttggtgtcatgtcaacactttctttagaaatggccacgtttgtcaagtgattgaaaatgacatgcaaattcaatattttctacatccccagtgtacatttttcagtattcaatttttaaaaaatatcttatccattaatcctttgaatttatgtccttatgagggtccatggagtaaatggttcacttctttggattaattattttaaactttaaatttgttattatactaataatatccagtgtataaaaaatgagtggaaaaagagaaaaagtatatagcatagagaagataaaaatcactggtattcctacatttcttaaaaattgctaaaacttcagtatatgttcctccagattgttcctatatgttcccatagatatgtatgtattaaaaaaatcatattatacatatatattacctggttttaatttttatattctataaatctctccatatcagtgtacataaattttaatggtcaaacaaaattgcatagcatattaacaagtatttatcacttcaatcaaaagatcaattctaattctttcacaaatattatgaaagcacaaaatgcccacagcatttggttaggtactggcagcatgtctttgggaagaatatcactttaaagacaagttgatctgaatttgaatcctggaccaaccattatgtagctgtgttatctggaaccagttacttgatatatctaagcttaagtttactcatcaataaatagaatgaaaaatgtccttcagatatttgtcaagagaattggatgggataacgtataagaaaatacttgacatggtgactgacacataagaagtattcactaaatttgcttgaatctgaatctgtgggaagcacaactattaaaagaactttccactatcattcagaactcataatctgacagcagactggggtagttacacaaataagtaagaggaagaaatccattttcattgataaaatgcctactatgtgtcccagccatgctgtatactttcatttctactgtagaaggcattacttcataggaagaatgaaattatccctggagcaagatactcccatccctgtatgagacacttcgaagaagctttttcttatagagaatcctggaaagattgttgagtcagtagttaaaagatcttgctcaggatctg

SEQ ID NO: 49233 - DNA, 900 bp, Bovine  19866881188300
  misc_feature (1)..(1): n is a, c, g, or t
ntttcctcatacaaatgagggaacttaccccacacaacataaaagatgatggatggtataacaatcatctcaatatagcaatgagttttgacacaattaaacttcctaaagtccaaacccattttgcttaatcagaaaagaaaaaaaacaatccagctgtgtctaacaaaagaaatgctgccttcttcctcctctgttaagggagttaggcaaacagtgtatttcttgtttgttattttggcatgattgggattcagactaggattcctgcaatgtggggactggtaagtatgcttctcatcaacacaggtgtgggattttaggtgaaagcatcttattttcatagaagagccattttggtgctatgtccctcattatagtaaactgttggcaatcactgatgtgattacagacaggttgctttctgtttaaggaaaatgttgggcagtttctggtagatttctgacacaccattacaaaattcttcctgttagcaggtagaagaaagagaagtggatgtgaacacattagtatcagaattgcgtgtcaaaaaatatacagcaaatttcaatttatttctacaataataagcaaggtagaaagtaacttgacaattatttctccttctattgcttgcttttttcagtgacaaacattccaatatgtagagtgatgacctatatgggaaaagaatctaaaaaagagtggatatatgtatatgtataactgattcactttgctatatagcagaaactaacacagcattgtaaatcaaatatagtataataaaattgtttttaaattaaaagaaaataaacttatttagatgccttttagtaaataacagcctgtgctcctcatgtcagttcagttgagttcagtcgtcttagtcgtgtccga

SEQ ID NO: 49234 - DNA, 1311 bp, Bovine  19866881212619
  misc_feature (1)..(1): n is a, c, g, or t
ntacacattacttgcttacagctgcctcatgatgccttaatcaacaaagaatcttgggctgacctaggggagcatttctgatctctcctgtggattaggagtctcaggcctgccatcctccttgttggagactgtcactgagaggggagagggaaagacaaggctctacttgaaattcaactagtattgcataaagaatgatgcacatgaaaaattgatcatgacactggacccaggcaaatattattaataatgcagtatttaaacacataatatatccccattaatgatgaaaagaaactcaaagtcacagcaaataaaagtcatttcaaggagaccaaaaggaagagaaataatttctctgtgtggatcactccacaatatcttcctttatgccaccatcttataccaccatctatcagagtgagtagattttctatcaagagatggagcggagcctttcttaataggaatatttcaaaccactgcctagtggaacccagcaatactaaccttctttctcccaatctcatctataaaatggagatgatttcagtcagttcagtaacttacttatgtccgactctttgcaaccccatgaactgcagcatgccaggcttccctgtccatcaccaactcccagagctgctcaactcatgtccatcgagttggtgatgccatccaaccattgcatcctctgtcatccccttctcctcctgccttcaatcttttccagcatcagggtcttttccaaggagtcacttcttcccatcaggtggccaaagtattggagcttcaccttcagcatcagtcagaactgatttcctttagaattgactgatttgatctccttgcagtccaagggactctcaggagtcttctccaactctcacatccatacatgacttctggaaaaaccatagctttgactattataaggacctttgttggcaaagtgatgtgtatgctttttaacatactgtctaggtttgtcatagcttttcttccaaggggaaagtgtcttttaatttcatggctgcagtcacttgtctgcagtgattttggagcccaagaaaataaaatctgccactgtttctactttttccctatatatttgtcatgaagtgatgggattcgatgccatgatcttagttttttgaatgttgagttttaagccatctttttcaatctccttttccaccaccatcaagaggctcttttaatctatctgacagaaaccgaagttacatatagaactattgcattttcaaagatttattatatttatatatatttatatatatatatata

SEQ ID NO: 49235 - DNA, 1459 bp, Bovine  19866881498742
  misc_feature (1)..(1): n is a, c, g, or t
ncaataatgattcactgggctgcctgaggtatttctcacaattacttttccttagtcccccagtgaaattactggtaatttttggtttcctttttatatatcaggacaaagcagagcactctggatctgcctgaggcatgaataatggaaatctaggatttatcattctttaagtgaagaatttggccttatttaactgttttactttttctcataaaaatagacacaaactcaaatatgaagtttatatttcatgaactgctaaattgttaggaacaggttgggtatatatcttatgtagatcttgtttctcccagaatctttaaaaatggcattgtttgggtcatatctacctataagcagagtccaagcatttcagtctgggattcaggccctttggcaggccaaagaacactgttggggctgtatttcatactggtaccccctagggtatagaatagataagaaaaaagacagagaaaagatcttgagatgcagactggccttagccattaccaatactttacatattgaaagttatttctcattgacatcaggaattttgccaatctaattattttatttattaatgagctagagaacttggctatgagttttaatattgaattatgtttgaaatgagtatataagttaccctgataagttagtgtgggtatcttttctactaatttgattcctaatgtgaaagttgttgatcttcacataattcatggatattctgttccctcatcttctcatggttagcacattgtctttcaaacagtaataatataggaccatttgtgctgtgacagaagtcaacgcaaggattatgggaagaatatggattcttaacttagtcttgtagaatgtggatagaggtgggaatcaagaatggcttcctagaggatgtgccacttgaactgacttttgaagactatttaagtcaggtgaagaagaggagggtgaggtttgaagtaggtgagaggacatgagcaaaaacaggaagacatgaaatagcaaggtgtatgattagaggacttacaactcaaaagacttatatccagatcttacattttgatgagaggcacaagacttttgatcatctctcgttctgaggttagtagcagttctggatcacatggatacatcctaattcaattgttctgataaaatattcattgcccaattttcaaaatcaaagaagtatttttttgaagctagttgaaagtcaagcagccagaatgacctagttaagaactttattcaaaaaaagaaaaagaacttagaaataaatttccctgaaatcacatcttcatttatttgtgaagacactgaaaccacacattttatcatgtattttaaggatgtatagagagggacaatttggagcctttttccctttgaatgaaattgacagcaacattttctattgttacatccagggatgttttttcct

SEQ ID NO: 49236 - DNA, 1780 bp, Bovine  19866880375691
  misc_feature (1)..(1): n is a, c, g, or t
ntgatatttcttatgcctgtttgccccatttgtcttgtttaatggcctcagaatttgagtagtatagagatatgatttttattcccacctccagcggcctcaatattgaatactgaacaattagtaaggataatacaagatctcagaacaaagaataatgactgtaaatcaaacaaatatttggagagtaggtagaacttaacctcagatttgaaagattaatgagacttagagttttagagctttaaacatttttcttatctctctttccctaagtaaaatcagcaacaacaacaaaaaattctgaaactatatcttcataatgaaataaagacaagagagatagggaaaagtcaatgagttaatacagagattctgacagtcttgaaatgttaagtcctgaaatgtaagtttccttgcttccctgtaatacaaaaccattatttttcttaatggcttaacaaggatgtgttgaatatatgccatatccatgcaaatacagacatattccattaaataatgtggccgttaagaggcctttaatgagatcctatatgccattatttgctggcaacatttttttttctaattttattttatttttaaactttacataattgtattagttttgccaaatatcaaaatgaatccgccacaggtatacatgtgttccccatcccgaaccctcctccctcctccctccccatacttaaaatgatgaaagaaaataacctacagcccagattattgtacccagcaaggatctcattcaagtatgaaggagaaatcaaaagcttttcagacaagcaaaagctgagagaattctgcaccaccaaaccagctctccaacaaatactaaacgatattctctagacaggaaacacaaaaacggtgtataaactcgaacccaaaacaataaagtaaatgctggcaacattttaagatactcaaatctgatccactgtaaggcttcttcttctgagtcctttttcttgtaagagcacaaatgaaactgaactttgtcagtttctttgaatgttatgttctgcattcactgtcacagcactcattccagtaggttttctacaaatcttcgtaaacgccaaggtaccatttttgaaaactattatcaggtaatcacctcactccatttggctgttgtgagtctataagtatgtcaagtttaatcataagtccaagcctacaagattccaaacttggtattctttacccttgtaagcattaaactgatgtttaccggggggaaatcaatgaatgaatgaatgaatctttttcttcaatgatagattctcatctaaacaagaagctgtaatttattgaaattccattaatgacattaaacttcaatatgtgtattatacaagagcaaattccttgaataaaggtttacacataatgatttccttcataataaaaataaataagttcaagaagcaaaataaattttgttgtataagcaggcactgtttagggtgatttttgtcctataagcaatttgtattaaggttaaatatatagaatatgtgctgctatttcataggactgattcaatattacataagaaaaaacaattacctcaggtctcaatgctgtgtctactttgcattattccccattccaatcttttgaatctatattaaaattattattatattcatttcttccatatgtattggtcaaaccgcaagtgacagaaagccaatttaaactagtataaataaaagaagagaaaaaagaaaaaggaagtcaggagactgga

SEQ ID NO: 49237 - DNA, 2867 bp, Bovine  19866880515831
  misc_feature (1)..(1): n is a, c, g, or t
ngcatatgtagatatttacatgtcataatttttttagttaaaagaaaaagactatttttcttagagaaattatacctaatctgaaaatattaatagcttccattcctattaatgagtgtggatttgtttttgtctttgagaacttgaaaactatcctattttaagaataattccattataaccaaatggcaataagaatcctaaaattataactagtaggaagaaactcacgaaacccgaagggactgcagaaatatatgtttgagtatagcagttgttaaaccactattatgaaaaactctcctaacccttgcctttgtgtataggcagttattatctggggaaaacagaaaccaaacacaacatacgcagggctactgttttaccagtagagacaagaatggccacaacgggctgtttaaaatggacatctgttctgattactaagcttcatgctccagcggttgtgaaccttctacgacgtaacctttgctcgtatttgggcttcccaggtggagcggtggtaaagaatccgcctgccaatgcaggagacacaagagacgcagactcaatcccggggtgggaagatcccctggaataggaaatggcaacccaatccagtgttcttgcctggaaaattccatggaggagcctggtggcctatacagtccatggatcacaaagagtcggacacgactgagcacttagacacacgtacacacacacctgctcatattatattcactgaattactaatatataacatttcaatacttctcacactctaaagtgcattttacatatgtaaccatatataacttaatcatcgtaacaacttcccagtacaaaagggaatcattagaactcttatttcatgctcaaattcaaagcttcttctactaataacagtgaccctgaataaattcacctgaaaatgaacagtcacacaggatagatattattattgaaacgaaatcatcataccatttggtgatgccatagcactctttaataatatcctggagtatggcacgatagaagagggactcagtaggcagctgaaaaaaaaagcagatacatatgagcacaagaaacaagtaaaaaacaaaaattaaatcaatgcttgagagttgggaccataagtgaatgttagaaacctgagtttgctgttaacatagaggataatattataactcttctattctaaataaaatgtacctgggggctaattctcactgagaaaataaaagaaactataaaagaagtagtagtgaatgaagcagaaaaggaataatcaaagaaaaatgagctaacatcccaaatggagtgcttatcatttaaaaacgtagaaataaacgttcacaactgcgtcagcactgtaaagagagaagtaggatgtgtgcaaaagagcagagaatgtgggtctttcctcacagacgtggattagagatttaacctaggacgctgagccagagagaaaaggcactacactacataaggacattccaaaataggttcacttcctagggagaaagaagtgggaagtgaccgtgaaggtccaaaggtagggaagaaggccttagtgatgcacgttagcttcaaagaagtagaaggtaataaagtactatacagagaggaaaaatgcttcactgtggcaatgtaagaggtactcttatactgctgctgctgctgctgctaagtcgcttcagtcatgtccgactctgtgcgaccctagagatgacagcccaccaggctcccccgtccctgggatttccaggcaagaacactggagtgggttgccatttccttctccaatgcaggaaagtgaaaagtgaaagtgaagtcactcagttgtgtccgactcttagcgaccccatggactgcagcctaccaggctcctccgtccatgggattttccaggcaagagtactggagtggggtgccattgccttctccaatagtggccaaagaccttttaatactgatagtacaggaaaattcaatatcaggaacaataaccctgtttccatgtcaagttactgttgaaaaaaagaaaaatgaacaaggaaggaggtcaacaataattgaatacctctgagtagtcaaataaggtaaaaactgttttaaagacagagttcaatgaaacgtgcatatctaataagttatccttttgtaactttaattctccttctgagcctcacattgttactatcatttgttttcaactacaacacactggattcaagtggagtttagcagaaaataaacattttgcctgtgtgctcaggcgggaaacctattctactgccccacttcgccacttaacatcaagttcctacactgcgtgtcccagatgctgagactaaaaaaacatctcaagttggcagttgagggtcaaccattatttcctgggtctttacccaatggcattgccttcttaagtcactggagaacatctgacttgtagggtcttgagacagtactttgaacacaagttatatcctcactggatggtgggagcagtgagaagggcgattctagtaagaaatggtattagaaataccagtttccaacacaactcctaaatgactcactgaaaagcagacatacatatacttgagtgcccacactaaaatttataaacttcaaaaggcacactccttatacaaaatctctttccaaatacaactccttaagacaaaatctctgatttataaactttcatttcctgaagagttttccaaaaatttcattaagaatttcccatctctggatatattttctatttgataatttttgatcttcagttcagttcagttcagtcactcagtcgtgtctgactctttgcgaccccccgaatcgcaaca

SEQ ID NO: 49238 - DNA, 1637 bp, Bovine  19866880613638
  misc_feature (1)..(1): n is a, c, g, or t
ntgtgacatgcattccgctttggaactacggtcagtgacccggatctcattgtatgtttctagcatccgtattttgatctctaatctacacacacatgtgcacatatgcacacaataaaggctctttgaaaggtagatgatgccaaattttagggcacaaaaaagaatctgtatgaacctgggccaatctatttgtactaattttataaataaggaaactgaactccaaaggatgttgctggacacaagcatgctttaaaaatgtcagcacaagtgctgaaataaagaaagggaaattaaagaggctcttactggccaagtttatttgcaaaggacagggaggcctggcgtgctgcaattcatggggtcgcaaagagtcagacatgactgagcgactgaactgaactgaactgaaaataagactaatgataatttttgtgactaaagttaactaaagaagttgactcttagaaagcctggaagttcctaataatactcaaacaagaaaagtttgtatgagatccccaaaaggtattacaatatagaagagtgtatctaatagaatatgcttcatattttattgatccaaatatataaggaattgctactatataaaaaaaattacctgaatatctatctataaagtttgggtatgtactttctttgatccagtgagtccataaggaagccaggttatcccagcaaaagtagattcagtagcaagagaaggaaagcctgatcagcacatgtaattgatcaaattcaaagggtgtctgcagctaatcagcttcactggtcacacacaataatcaagcaaaaggaggattcaacagagtgttctaaatgatgaattaaccaaatgtacaaaagagtaaagctgactatgcagacactatccctcatctcctaggagctgacaattcttgatggtccaactaattaaaataaaatactaataagaaatatatacgactttaatagtactgacaaaccacactaatatatcaatgtgacaaggcagtggataggataaaacttagaagaattccttacctctttgaaagctactgtgtctcaaaaaattaaaacttttatataaataaaacaaaaaagttaaaagcctcacaatgcaatgattagaattttactagaaaaagaaatttactactggttagcagcctagaaatcatcttagactgctcagtcagggccgtgtctcaactaagaattaaaacttttcatgaagtgaaagtattagtcactcagtcatgtccgacttgttatgacccatggactgtatgtagcccatcaggctcctctgtccatggaattctccaggcaagaatactggagtgggttgccattcctgtctccagagtatattcctgactcggggattgaacctgggtctcctgcattgtaggcagattctttaccgtctgagccactcaaaacctgctgctgctgctgctaagtcgcttcagtcatgtccgactctgtgtgaccccacagacggcagcccaccaggctcccctgtctctgggattctccaggcaagaacactggagtgggttgccatttccttctccaatgcatgaaagtgaaaagtgaaagtgaagtcactcagttgtgtctga

SEQ ID NO: 49239 - DNA, 2727 bp, Bovine  19866880679703
  misc_feature (1)..(1): n is a, c, g, or t
ntttttttaaaaatcaaaagagaaaaaaaggaaagagctaatgaatagggagcaaatcaattaactggaggttgtcacaaggtctagtatacaagtcaacatcatttttattcactaacaagtcccagctcctagaatagtgcctggcacagagtaagtgtaatactacttgtatttgttaaataaatgatcatggcagagcagatgatctgctagtaaggaagatagaataattggaggtcgtggtcagagttgatgtttgaaaaggtgatggaggaggtgaagcattatggataatgcctcgtatgtctgacatgcacatgcaataggaaactggtttggggccttttatgggaaataagtatttttcaaaaaatttaaatagttatttctctacaaatgggtgaattgacatttcccaaataattatcatttaaagccactgaaaccatcaggggttttaattctacttcatatgggcagaataaacgaacaaaatactagtaggaatgatcttcccttccaaattagcctagtctagttcttaaagccagaagctcagagtacctctcatgatttctattttattctgtttatcataggtgtggacaattttaggttcacaatactgtatcacctttctaaagtatattgatcttttggtaggctttgaaagacctctttttttttttttttttgcttttagtatacaactgaaacagtgtcagactttattttctgggggggctccaaaatcactgcagatggtgattgcagccatgaaattaaaagacgcttactccttggaaggaaagttatgaccaacctagatagcatattaaaaagcagagatattactttgccaacaaaggtccatttagtcaaggctatggtttttccagtggtcatgtatggatgtgagagttggactgtgaagaaagctgagcaccgaagaattgatgcttttgaacatggagaagactcttgaaagtcccttggactggaggagatccaaccagtccatcctaaaggagatcagtcctgggtgttcattggaaggactgatgttgaagctgaaactccaatattttggccacctgatggggaagaggtgactcatttgaaaagaccctgatgttaggaaagattgaaggcaggaggagaaggggacaacagaggatgagatggttggatggcatcaccgactcaatggacatgagtttgggtaaactccgggagttggtgatggtcagggaggcctggcatgctgcggttcatggggtcgcaaagagtcagacacaactgagcgactgaactgaagaccatactgtgataaaaaaagaaactatcacaaaatacactataagtgacaatgcatcaaatttcatttgatgtaacatttctaaaattgtaagaatatcagatcttatttcaaatgctaattcaaaatgacaatactgtcaacaacaaaaaagagggagagagataaagcagtcattttgctcgaataaataaaatcatgagacatgaagaactttgtacctttatgtaggttttcaaactcttcagataagaggtgatagcagcaacccacactgcaaactcctttgacttcagacttggaagtgaatattcgcagagtatttggagcaagatcaccacaagtatgtagacctaccatcaaacaatccttaaaagataagaagaagaaatgctggaaattaaaaggaagggtaaaacacatttcaggtgaagactgtatatgtttatcagaatgcagagctttaaaaaaatgataaagttctaactagaaagtatcgtatgtcccattttcataacataattatttcctttataggtaaaatgattgtgatcttttatcaaaactgacatgcttctgagttgattttctaatgcttttggttacttgtcctttttacttttctctggtctcttttacaattaatatttgcttaacaactagtcaaaataaaggttgatttgaccaatcaaatgtaggtggtgttactaggacaaacttgtgatttgagatacattaatatcttaatagtcaatttttaaattgcacttcaccattcaaaacttataaaacctgccatacgaaagaaattcaaaagaaattaagccttgctaaattggcatttatactccaacatcaaaaaaagtttacttagttcactcattacaccaaatataacaatattaattccaaataaaaaatgttgctcttaattttataacatgaattatgtaaaattcctttgaaatgtttctcctaattacttaaggcctaatttaaatgcatacacagagtggttacactggctcacactcaaaagaatttcgatcagtatgctatttaactcttcagttgcataatttcctcatctgtaaaatgaggccaataatagtatcttatctcaatgggttgttgcaagactttaataagttaatacttgtacgtaatttagtataacctctggcacataataaaattcagtaaatgttatatatttttatcatcaatatcaggttattataaatatggatattataaatatttaaaataacggacattaagttgtgaatcaaatatataactattttaagaacaaatacaactacttcagttgagttattttacaaaaaataatactttaagttcatataatctaaatatgtgtgtgcctagttgctgcaatcatg

SEQ ID NO: 49240 - DNA, 1807 bp, Bovine  19866880686145
  misc_feature (1)..(1): n is a, c, g, or t
ngcagctgctgtaggtaaaactgcaagttcatcctctgccaagggtcccatgacagggaccacaatgatgctgtccaacaggcatggcagaagagagactgtgtcctgaaaatcatttaaacagaaggaaaggaagcatagttaaaacaaaaccttcagaaatggtgctgtagggctgagacagagccaagctgagaaaactttgggatactttctttgctcttgagaacgattctaaggcttgaaaatcagccaggtggagaaaaagggagtaagttcacagcagacttcacagcagaaagagaaaagcacaaactcacaaatttggggaaagtgagcataacaatacagaaaagtattttaaaatccactcaaaaactgaccagagattctaagctatggctggatgtttgcaaacacaacagctgctgcattccacagtctagaagggaaataatggaaactttcttttctcttttccaacaagacacaacaaaagcagagctgatgtaattaatgaaaaaaagatggctatttaaaacagtgaaggcactgaacaacagaatggaatggaaatgaggcccacatttagggacagttcgttatttatctgctgttcttttaatgcacactgcgttctactaatattcccctctccagggagactaccaaaccaggttggttagcgatacaagcatgagaagttagatgctatgatataagcagcgggtggatggagttatttcttgaatattaattaaagtagtccatccaacttgaagactcttacaattgaatacttcaacttaatggatctgttttcaaattccctttaatggcccttctgtgaccataatatctacttttccagacatcctaagtagaaaccattatggacaatgtatgtaaaatcccccaaggatagcatatggaggagaaactgtggactgccaaattcagcagctctggagagagtgtttctgaattaaacttgagtctacagggattacagttcatttatgactggcaaaatatatcttcccaattccgaaagataaatcccactgatatatatgtggatttcacaagtgtttctcaagaaacacaagacaaaaaaatctttccacaaaatgtagaagttctatgatattttgacattatgataagtcacatgttacgttggctctcactgttaaatagagaattttgtaagtgctgtaccaactctgacctgaggaaacttggtttagaaatttcatgtgggagatgttacggtaaaatgactgttttgaaaaacttaaaaggactgacaaggcagtgactatagtctttggtgttttaaagataaatttaaaaacttcaaaagtttggagaggagggaaccagagtattgcaaactttttcttttgccaaataagaccagttttaattttattttttatgaaaaagataatagatattattgatagcacagacacagagtttaaagtgcagttctttaaattaatgtacttagcttcatgaaaaatcatcctggtttatcttcatgttctgatttcattgtggaccagggaaaatactgtggcaaaccagagctggtctgtgaagccacagctgaaaaccactagcttgattcacttcattagaatgagctggttctctaccctaagcaaccattaaaatctaattcaaaagctttcagcatccagcaaacttctgtaatttagcacaaagtgattaaatcttctagtgaatgtttacatttatggtgaatgatattttattctgtatccatgcaataaatttc

SEQ ID NO: 49241 - DNA, 873 bp, Bovine  19866881099369
  misc_feature (1)..(1): n is a, c, g, or t
nctctgtttgtgcctttacttatgtgactacatgtcatctcacttttctgagctgatccctttgtgtggtaacacatatacattttctagtacaggttctgacacagtaaacactcaataaatggtatgagaacaaatagataaattgcaattagagaaagaagttcacctttttatattgaaattttcactttatgctgagtatatttaatttggaactccttcatagattagatttatctagttttctctcttaacctcagaaagcatgatatctaatgctcaatgtaattatatgaaaatgacattcgtgtccaaatgagacagaacaatttagacgagcatttggtagcagtgttttccacagttcttaagaaatctgttgttgaaaaaatgtcagggcaaagtggaagtctaacaggagctgtgtaatcagcaattatttagatggattacttttcaaagaaacttactgtatacctgtggcggattcatttctatatttggcaaaaccaatacaatattgtaaagtttaaaaaaaaaaaaaaaagaaacttactgtaatggaacaaacagctgcctattaaaaataaagaccacagaaacagaatgacttgcctcttctgacttatttagccaaagtaggagtttgttcaaagtcagggttctacctgactttagatgagatttatatcatggaattccacatcaaaagctctcctgaactgttgacttcagttggcaaaggaagatgataattgtgcaattttgcagccagattcacattattaaatttttccactttctccaagttggtgagtctcggaaaccagatgtctctttcttatcagggaaactggattcctatcccaa

SEQ ID NO: 49242 - DNA, 946 bp, Bovine  19866881179835
  misc_feature (1)..(1): n is a, c, g, or t
naagaatctcaagtggtgactattatggaatgaatacccaaactcttccctcttcttctagattttataaatcatcctgttctttaataattttaagagaagaggaaatgtcttttggaaacagactaagttggaatttctactatctgggtaggcagctctgcttattgattccagttagttggaatagactaagagagaagcagatttcattcttaaccaagtaaaaaatcccagctatctatagcagctgtgaagcatccctgccatcttgaaaatttagtcactgtgtatgaagtcagaaaggaaagcttagttgacataaataatgacccatcctggaaaaagaaactctaagcgtgggtccttcaccctctgaatcaaaacagaagccacccaggtgaagtatagtctataactgaggcattcacctaggaagcagagcacagtgctacaaagaatatagagtttctttgaaagacaatttatcaggtagaaaagaatttatggacgtgatgtaagagaacacttgctgtagtacattttgaaacttttactctatttgtagtattcattatatgagagttaaattcaataggctttatatgaacaaattctttctgagtttttttttttttcaaagggcctattcaatgaagtattgctaatggccacttaatcattcaactaaggcatggatatagtactgtggaaagtaaaagggtttgctcaaggctactctattcatgaaaaaatggaaagcaagtgaaaatcttcagattctcagctctcatctttaccattattattgtggctctttgttttttctcccacaatttatactaacataagcacctttatcatttatggtcatttctgatgaagaggagaaacaaaattattctgcttaatgtacttatttctcccgttccggaatgttttcatc

SEQ ID NO: 49243 - DNA, 989 bp, Bovine  19866881259661
  misc_feature (1)..(1): n is a, c, g, or t
ncccggactctgagccacatattataacccactggtttactctcctctctacattgtctttggttagcattttaattgtctgtcagtctagtcgtaagatggcttctatactcagaacttgatatatagcaaccctggcatgtgctaggatacattggtcatatctcttagtgagacagcactgagaaagggacaggaaggggaaaggttgctggcattccctcccatttaggcctgtcagatttagcaagtgagaatacaggacacctagttacatttgcatttcagataaacaataaatacttttttagtctaagtatgttccaggcaatatttgaaattcaaattttatctgaaattcaaattaaactgagtatcctgtatttgacctggcagcctttcccatttaccccacacacagctgtgaatagtaactatagctcaaattccaaatgaggcttttgaaaatacattagcattaatttttttaaaccataataagagatatcaggattgaggaacccaaaaccttggtagaaaaatattgttaaatggaaaaagattgcacaaaaatccaaaaatatatatattttttcaaaaatatatttttaaaagtacaaaaatatatttaaaaaataaactaagaaaatagcaataggatgttaagtatcttaactttttaacagtacatattagaaagttgctttctactcatgtctgttcttgagatttttatgagagaaagagatcagatgctattataataatagttataagagacaagaattacataaattaaattcccaaagtcaacttttgtttttgtgtttttagtaagcttctaactattggattttcttaaattaatatatagtggttcaagttattcaggaaatatacccctatattccatgccatcactcattttgctttttttttttttttttttttgagaaaacataaaatttagctaggtaccttttctaaag

SEQ ID NO: 49244 - DNA, 908 bp, Bovine  19866881292344
  misc_feature (1)..(1): n is a, c, g, or t
ncttcgaagcacatgagcctgtgagatcccggagattatttagggccactcttttttaaagcacaatctgggcttggagtcaacaggattcaacacttattcatcccttaaaaaatgttcatactaaaacgcagccctaagcaggggttaatggatcttctaactggaatgtctttccaaacttacacagctgctctgagtgaaaacaccagactcccagatgccaagcttgtgtgacagagatctggcaccaactgagtttgctattcattattccattgtcttacaacacacccggaaaacaaagccctgtagatggttggtggttttcctggcttgtgaaaagagcaaagacccaaagaagaagaaatccacctgtgggtagggacttttaattgaaatctcaaatacactttaaagcttcagaatgccacttcttggagttatttctattcttccctactgggcatatctttgctctgacttcgtaaagatgggaagctgttccgtatatgctgcagcccagtaaatgtgactacagtgagacattaacaaatcctgcctttggaaaaagtgtttctgagcatggacacttgctccaagcccatctacttcagttagtgagatttcatttctcacttggtctatttttaacaagcagctaaaaaccatatataaatgaatatgaagaaagtttgcattctttgtagttggagtgtccattcaacaaatgtgatttcaaacaagtgagtatgtgtgtgtgtttgtacagaagatttcatcataaaggaatctgattctttagagtgtccttgacatttggggagagggatgttggaggttgagaggagagagaaagactacactggtcattgtgtctgtgatataagggagaaaggaaatttata

SEQ ID NO: 49245 - DNA, 1310 bp, Bovine  19866881384995
  misc_feature (1)..(1): n is a, c, g, or t
nacatgactgagcgacttaaaactttccagaggagcgccatcaggctcctctgtccatggggttgcaaagagttggacacgactgagcaactacaatttcagtttcctctttgctaataagtgagccatccgcaggagtcctgacaacttctttgtgcaccacaggctttagcaaggtagaatattgttcttgaaatcagaagccactaatctagtggaaaggagagaatagttgcctactcttgattgatatagtttaagaattttcagtaatctactgtcccaaaagtgcttcccaggtggcactatggcaactcactccattattcttgcctggagaattctgatggacagaggagtttggcaggctatagtacatacggctgcagagttggacaagactgaagtgacttgacacacagccccaataatggctgaagctgggaaacagtagtaatttatgtaaagtatgataggaacaaatacacttgaatgatcaacttgcatatttataatttgacaaagggtgaaatctatgtttatagttgtgactacaaaattataattgttgggaattccctggcagttcaatgattaggactctgtgctaccaccgtgtgaggaacagcttccatccctatcagggaaccaagatcccacaagactcatggtgagcccactccccccaaaatctttttttctgttttgccactttaaaagaagctattaaagaattggagaactagcttgaatgcttagtctcgtgacattctgcagatgacaatttcaagttggttgctaatactgtgaaaatgggataaactgcttcaggattacatattgaaagagtaataaatactacttttaggccttaccaaaaatggctcaattaactgtactcaagtatatttcatttagattttatagaaaagaattccaaaaataatttagaatttatatgtgtgaatatataaagtaaaatactgcttaattatttattcaaggtcatagaacagtttggtttctaagctagtaacagaaactcaattttctaacatctaccccaaactgctgtacagataactctagaaattctatctgtgaaatttcaatcaagacagatatttaagccctttgaaaactttgcttgctctgtatttcatcagtttcagactgattactatacagtaatccatggtgagtttggttttttttttttggagagtacatgctggcacagcattttacaccccttggggtaaccatgacacaggcacattcaaataaattaatgtccagtccaactaact

SEQ ID NO: 49246 - DNA, 1545 bp, Bovine  19866881442736
  misc_feature (1)..(1): n is a, c, g, or t
nataggcaatatgtgttttacttcagatcatcagacttaaccctttgtgtgattgatatcatactcttatttatcatatattttttgaagagatagatttcagtattttatatttaaaagaactgttgactatcctactaagagaaaatatttctgaatgaaaatttataaatatataacacaaatcgtatctttcatcagtatatccaaatattgtttcatgtttattcatgcatgtgctcaagcagttggcacaattttggcagttctggtcaaattacttcatcttttcagaaatgtttaaactaaactgacaggtttggattatctgacagcctttattcacaattgtctaattttttcacaatatgaatcaaatgattttctcgtctataagattaacaaaaatagggttgtgtcccacaatcgttacttagtaacttgagaatatatgggaaatcacaattgcactcaggaatatgtgtagctgatatgaaatgttcctggaaaactcatattaagaacttcaggaactttctcttttatattctactttctctgctaagagtaatttacgtttcattctgaattcaaacagtttgtttgcttgatttgaacagtttttaaagcttttccttctatttctctgagtatcattatacagtctaataatttgttctctggcttatatgaattttaatattttaaattttagatgagagttgattatcatttggtactttatcagtcatttaaaaatcttttatcattgtttctgttttgacaaaaaatctttaataaacttacaacttatttgcatcggagtccactaagattaatgggattcaatttttcaactttgtgaaaaatatccaaatttcttaataccactataattctttaatattgtgatacagtttccaaatcagaataattttctgtatcagtatgttgtctgcagggaaaataaagtaagctccaccaatgtgagaaactagtatattctgttggtctctacattgcattttacttgatagagcaatactatggaattaattagtgttattgtcttaattaatatctattgattgcaaacagaaacaaacttgcatgaattttggaaaaacgggaactttaatgatagatacagtggaactcaagagcagctatggctctcaattccctatagtcaagatcgagaaagccatcgggtctctcatctataatttgttatttttcactgttttgctctaatatctgcctcacctactttcttcattcatagaccagcttctcctacctctccatgatcataatggaaaaaatggttgcttagaggtaccaagttaatatcaacattgcttcatctactttaattggggtgtctctgaccttcagttccaagttcttgacaaaaagctccctttttaaatctgcctttgacattgtggtagacttgtatgccatttcccaagtatttatgggtccttttctactttgcaagaatgtgataggatggcacttcctaactccatgctagctggg

SEQ ID NO: 49247 - DNA, 4357 bp, Bovine  19866880349438
  misc_feature (1)..(1): n is a, c, g, or t
ngcacatatttggcagtctttattaatttccgcatatgttaggttttatatatacaggtattcttcatgtagctttcagggaatcagatattttcactgatgcatctgttttaatttgcctaaaataactggacatatctgtgattttaatatcaacatgaagtattctgggatttattaagcttcttgaaaaaccacaataatgttgtactgcattttggatatcttctaagaaaataaagaaatctgaaaggatttataatccatgaagattttataacatttgaactagaatatattgtaagaaatatcagaccatcctataaagaaaatagaaattttcagcacagatattacttgaaaagtgcatgaagaaagtatctctacatgcacaacttcttgataagagcctaaggtattacctatctcttttgcgaatcattttaagttaagcttcctttcagtgtaaggagatgaattagagaaattgaacatgacttctgtagtctgaaacattatccttctaatgtggtcctgaattcatggaaatactaaattcttaaaatagttccctggattcttgaaaatagccatttaagctagctgcacaatttactcatgttcaaagatagtaacatatatgttgccatgtatagcgaaaggaaaaccatgaaatgagtaactctgggagtttttatagataaaacatgtgtacccccccaaaaggctaaaattgccatcaaatgctttgtgttacaccatttgcacacagctctgatggtttgaggttgactttagggcaagcaactgctatgtttgtccttgagacactttgctatagtcagagacaaaactaggatttcaaagaatcactgaactgatgatccatgactttagatccattttatcctcaaacttaggtgaaataaaagttttaatttaatttatattgcatactttttagatatatcttataaaatgcaaaaaaaaggtagatttaagattcagtttcttcagttagcaagttttagaaaagattctattaatcatgttatctttattaatcatagttacttgaatatgtaattcaaaatgatagagaaagcaagggatttgtccttaatggtcaacagattctattgacttaattaataatcctgtcaatgataagggtttaaagtctacaattcttcatcttttcatacagggtttcgaaatgcagagcacacatctccttaaatgttaaatatcacttgtcaaatacttttctcttgtttcaattatacaaaaccaaatgtagcttcttgttgaaatctgcacaagaagatgaattgaattgggcacttccctcttgccaatccatgaactggacacagcagtaactatgtctcatcagccaaaaggtttataacaggagactggcatgtcaaaatctgttgcatgaaagtgatttttgtgtgtaataagtgacccacatgtaaccagtgcttgttacagtcttcaggttgtcaccaaaaagctctaaagcagagggaacatagtggcattgttgttcttcatggctgtcataataataccactgaaatatgcaggatacttagcattttaggttaggctttttatcaatgtctctccagtatatgacttaatgcatgaacgccttttaagaattcaacagtgagaactcaattagtgaggttaaataaaaatatcccactaaagaataggaactaaataagtaaggtgactatgttatgtatatatacatatacatagagagagagagaggaggagagaaagagagaaagaggagagaaaaagtttttcttctaaggctcaataaagcttttgctcatagtttaatttaaggaaacaatctagcttgctgttcatgaaaaacacagtcatctggtttaaaatgacaataattgaagtaaaaatgaggtaattatgttaatagcctattgaagatttcagtcaaaaagggaggacacaatttgggcaccttattaatcattttttcttggatttgtatgacttgtaagctgatctgttgggttaactcaattagaagtcgccaagatatcataaatctcttcattttaagtgcctcattaattttatgacaaaattaacccaacaccattagagcaacaggcaaatcttgacagctattttttttttttaactcttagactgttctagttgatatttgatgcagtccacaaataatgttatcagttcactagattctaactttgagcctgctacagctgatgggatcctcgggatccctggtgacctcattgtgggtgccctgtatgttcagtcactgaacaacatagctagctatgctacatgcaacctttccttaccactcagagccattcccgatatgttcactctaatagagcaagattactttcaactttctgcttgcagtattctgataaccttgtatacttaatcataattgagagtcaagtgacttccaaccaagtatgcattttaattagctatcaaataaatagggagactgtttgtctggattttctttctttgtgctaattaattgggaatcaagggtcaggatcttgtcttgcaaagtgcattgaagacattcatttcaaatatttatatacatccacttacaagcacgggattcagagttcattttacattctaatataggccaaaaagaagtatttaagtagatgtgcaggcatcatgctgaagtaataatgatggtaagataaatattcaacaagatttgtgttttctattgcagtttttaagctaaataaagtttgtcattttaacaatcattaagcaggcaggtgagaactctgtaggcatgattatatcttaatcaaatttgaacagaaattatatttttgaaaaaaaggcaaataattcaagctttgaggattctacagaaaacaaatggaatgtagaatggaggcagtgttttgactatctcatatacctttgtgttcaattatttaaaatgaaagcacttaggcaaagctatttaatttctaatttttgccttatacctagagttatagcattcccaagttgtgtataataacatcagccttgcaaataatttaattcctaaaactataaatagtttattattctatgaagtttttatttgctaaacatacagtgatcctccccatgccacggcaaaatgtgagatgaacatcaagtttcctgaacaagggtgaacgtagttctgagatcagtaatgaatgtatattgttcttcatgcataaaagacaaagtttgaaactttttctactgggaattgagaaaaaaaaaaaaaaaatgcatctaccagatcagcataggggcttctctggtgactcagcagtaaagaatgtgccggcaattcaagagacccagagaccttgaattcagtccctgggttgggaagattccctggaggaggaaatggcaacagactctagtatttttgctgggaaaatcccatggagagaggaacctagtgcgctgcagcccatagcttcgcaaagtcagaggtgactgagcacgaaagctccaggtcagtaggtgcacactcagtgccatagtctgcattaacatatccctgcaaagatatcgtatctggcaaaggatgtagttgggttgcaacttagttaagtttatagtagtccattgtcatctgccaaatagattcactcatttatttatttttgactaatggcttaagataggaaacagcaccaccatatcctttaaatcatgagtctccaacctccaggatctaatgcctgatgatctgggctggagcttatgtgacaataaaagaaataaagtgcacaataaatgtagtgctcttgaatcatccagaactaccccccctcccatccagtccctggaaaaattggttcctggtgccaaaaaatttagggaccactgctttagatctttaactggggccgtaatctttgaaattcttcagggaacacattactgcttctgttttactcttttgacttgaagataaagcagtttcaggagcttccacattcaatctttatcataactcactgttcctccacaaatcagcatgtgcatgtcagagtttggccaggtgctcagaaaatgcaccccagttgcatatagatgggccaggaaatggctcctggggacatccttgaatttactagatccattattagataaacctggaccagaactttactcattacttgacctccacaggctccctccaagtctccaaggggcatggtaatatttatggtacctcttattctcatcagtttggatactatattcaacaacattcaaaatttttgactattgc

SEQ ID NO: 49248 - DNA, 920 bp, Bovine  19866880506574
  misc_feature (1)..(1): n is a, c, g, or t
nacttattaaaaattaaaataacactagtatgatcattgtcaggataatgataatttatataggcaaatatatatatgtagggttgcttactaagtgccatgcactgtatttagtccttgaatttttataacagacctatgagagaatgagagtagggttctctctaattatgcatctggctgtgtaagtcaaatttactggttcatttggaccatatggtgagagcaacactaaactatttagtgtcagaaggcttgagtcggcttacttgtattcatggaaaagacaaaaatgtttcaatctcatttccacaatgctctctgagaatgaactttccagaagtataaatagattgtgacctacaatttgaaacatgtcagaatatattaagtagtaactgggagggagctcaataaagcccagttctttcttttccttgtcaggctttgctgcatagttctctgtaacctttgtgatacttaagacaacccgacagctatagtcaacttgctaaaattatgtataaatgggcactcactttcagtccaagaaaacattatattaagtggaaaatagaatgtcaaacctctttatcaaaaagactagtgattttttaaagcattcaaaacttttattacttgaatctaactggaagtgaagacagatttcacaaaggagagtagtcttggggattagaggtcaggagataggctttctgattacattgcagtaagtaactgaataatgctatggtgatttatctctcagcttattattttattctgtgggaagaaataagaatgtagcttttgcccaaatagtaaagactttgcgagtaaagaataggtaccttttacatagtactttcagagaagaacattgaatgtaaatatgtttcaatatgttctgcagcttaaat

SEQ ID NO: 49249 - DNA, 2700 bp, Bovine  19866880766432
  misc_feature (1)..(1): n is a, c, g, or t
ntacagatttctaagagtcggttaggtggtctggtattcccatctctttcgaattttccacagtttattgtgatccacacagtcaaaggctttggcatagtcaataaagcagaaatagatgtttttctggaactctcttgctttttcgatgatccagcagatgttggcaatttgatctctggttcctatgccttttctaaaaccagcttgaacatgtggagattcatggttcatgtattgctgaagcctggcttggagaattttgagcattactttactggcttttgacatgagtgcaattgtgtggtattttgagcattctttagcttcgtggtggctcagaggttaaagcgactgcctgcaatgcgggagaccaaggttcgatccctgggtcgggaagatcccctggagaaggaaatgacaaccaactccagtattcctgcctggagaatcccatggagagaggagactggtaggctacagtccatggggtcgcaaagagtcaaacaggactgagtgactgagcaactggttgtttaaaaaaaaaaaaaaattagtaaaaccagtaacctccagtcactgtttattgtaagtcaggagtgaaacttacttgatagctaattttttatttttataccatcaagaacacaaatgtataaattttacttgtatattatatttgcaaaattttaacctttatatattttacattttttataattttattaatgtggtacggagtctttcaccatcagtgcaaagttatttatttgcctttttctaaaaggatttgaagcagcttcattattattttattggtagtaattagatgtatcatgtaatctattcttgccatttgtttctctgttattagaactacccatgagtaacagtattcactaggaagaaaagtgaatagtagaatggtacattttctaaaatcccattatgactaactaaacgtcatgcttataaggttggaatatctgagccatgcgttttagcaccatgttccaaatcattaagcattccatataaattcttaccagtgcattatgtgtgtgtatatatatccttaaggctacactgataagggtaattattcaattttgattcctaaactaccttgtaaccctgatatctcaatattataaatatgaaataaatccattctcaccaccttaatttaatgatcagtgtgtgttctagaatgattagatggcttatctatggccatgcaacaaaaacatgacaaattttagacttaactttaaatacctgctacatctccattcatctgaaaactaagtagtgttttgaagtagaaaatttctaaagtcccttccaatagtaaatatgtgtggtttaaaataaaacatgtgacatagtttatgtttatccagctattacctagacaatttgtatgtatttctccgaaatccatgttgtatataaagaattgatttttacccccatgaatttccctgcaatgtatgatacttgctcttttaacagtcaccacatagtcatccattagtttaatgaagtgtaagtaagtgttagttgttcatcgtgtccaacccttagtgatcccatggattatagcccaccaggctcctatgtccatgaaattctccaggcaagaatactggagtgggttatgatttcctgcagtctatttcatcttctaagttttggcacaaatactacttacctgagaattccccactcctcagaaaatgaaacttaaagtttttccctgagctgaatatggtccattgatttctatctctgaatcaataggtgaaagaaagaatatgcaaatcaaactatggacactgtagttattactccattatcagtggcttcccatgtggattactagtaaagaatccacctgccaatacagaagatgcaggctgggaagatcccctggagtagaaaatggcaacccactccagtattcttgtctggaaaattcctttaacagagaaagcctggtgggctatagtctgtggggtcacaaagagccttacatgagagcacatgttcagtcgcaggagtgatccatgtgatgacaggatatcttgaaggtatattcaaagctacagaaaaaattggaatattttttatttcaggaaagggcagaaaatgtgttgtatcagaaatcagaaaaatattgctcaggcaactaaatgttaactgaagtccattctaaaggaaaataatttttaacatgatcttttttagaaatcatgaagggaattctcttctgtagtctgtgaaaatggttggaatagcaattaggattgcaaatttaaaattcagatgcagactaagttatttatagatagaaatgcctatgattttctaaccccctgagctatacaaaatggatagattttttttctttaagaaaattaaataatttaaaacttaaaagactgacatgattcaatctgtatgtaaagcataatgagatttctgaatttgaattttagtagtcagaagaggatacgatagcattattcaacaattgtacatactttctggcaatttattatttctagtatgaaatgcgagatacatgatagcaagcactataaagtaggtcagtgcttgaaaatgcaaataacttgaactctccacattagattttaccattaaagagctgtattcctgagcaaaacaaatggttca

SEQ ID NO: 49250 - DNA, 2552 bp, Bovine  19866880848424
  misc_feature (1)..(1): n is a, c, g, or t
ntggtacaggattcagaattcacacagtagtgatgacacacatctagaaagaatgaacagtatagaaataaaattgtgttacaaagtatttttctttattttttttccccacactgtggaatttctacaatcaggggttgaacccacattccttgcacgggaagcgtagagtctggaccaccatggaaatcctacaagatattttttcctgagtcacaataaatgttaccattttacttaatattttaaaatggtcattggataagtagattaatttacaagagcaacttgtaattgcatgtaaccagatttctttaagaataccattgattcctctttttgcctgagtttgccatcatttcatcttgctaagagttatattgatatactatatcaatataaattgtattgatatattatattgacataatagatgtaatattagttatattgatataatactaattgacaaactctattagtcctgaattttaaaatttaagttctcaagtttcctcagctttccttctaagaagcaatatttctgttattctggaatgaacataaatcctcaagatttctttagatgtcatctatctctgttcctccttacatctcttttcatctgaagaacagagtaagtatgggactcttaagtccttcgatagcctttggtggagtggaaatacgcctctctctacatgagccaggagacccagattcaataccagggtaaggaagatcccctggaggaggatgacaacccactccagtactcttgcctggagaatcctatggacagaggagcctggtgggctacagtccatggggtcagcaaaagtcagacacgacttagagactaaaccatcaccaccaccacatgagccagaacagccagtatttccaaacacctgagcaggtaagcagatagaagttgtgcctctcatggagccccagtagaaacgtggaccggaagactaacagatccacatgggtagaaagtgataacagaagtctaggccatttccttctcccaggtgagaacctggagtctcatcagtcagagggaaaacctccatgcagtctgaaccctttgctttgtaaaatgtttcctactgagcacttcagacaattttctcaactacaaaggaagacttcttcaaatatttccatatctcttgaacatcagtaataaaaagaccatttaataagaacaacattgactttgcaattagacgttttgcctcagtcttctgaaaaacaaacaagtctatatgtatattgacacatcattattttttaatttaccacattcacaatattgaaatttatagtattaatacaagtaatcttaagcagaagaacttactgaattgatcacagacatagtgtttgaagttgcaatttccttatagttatctaattgtgaagcaatattaagtgtgattagatgatgtaaaaatcacaatttataaactttaatctgctataagatgattgttgtgggtaaaaaaagttaaaaaataatttataacttttatgcttgtatatttatctagccttttattaaatcagacagaaattaaatttattgacaggcttgcttcatatttatggaaatttatttcaagcattcttatgcttgctgttgcattatgccaagtaccctcattgagattcaaagcttaagtttattactaagggtcttggctatgtttaagaaaagaagcactttcaaagggtgagagacttaaagatctaaaaattaagtcaatgttaatgtctgtccattatgatgtctatttgtagttgttctaggcttggcaggtagataatgcacacaacacaaattctgtttgttttttttttaatatttgtgaagaatgtattaacagtagcctatataatcatctaataccatctgctatgcagaaatctctaaagagcaattttccttagtcagtttgctagatacaacttatcgacagagaactcttttaatattgtctctaattgctttaatttcatccattggtcctggttcattttttctgatgggatatagaaaacagctgatgtatctttccaagatcttcatattatgaggtttttttcacaatggataattcatcagaatcatgtaggtgactgacttgcaaatgcagattccagtttcttttcctttcatccactacccccactcctgaattctaaattctagatcagatttgaggcctgggtgaaacccatcagatcagatgactaaacagaatttggaaactagggaatgtaagaaatctgaaaataattttactgagtagcaagttgtctaagttgtaaatagatttgatttgattgaaatagcttatttcttgactaactttgggagccctaattaaaatgtaattttaacctaaaattttgaaccacgttgtttttaaaatcacttcattgagaagacctaagaagctaggaaaagttgagttaacatcctgagggttgatgattgccttataccatactgtagcaagtaacagtctgcttacacttat

SEQ ID NO: 49251 - DNA, 1826 bp, Bovine  19866880914035
  misc_feature (1)..(1): n is a, c, g, or t
nccagttgtttccatgcatataaactattttacaaaaaaaaaaaagagaaaaacttgccaaattgctaccctgcattatttatctactatattgaagattatcacagttaccttgataggttatatgaacatattagaacagtaggctgttaaacagagtgcttgtaatgtaaaggactggaagccatctgtcatggggaaaagaaaaacgaaaggtcttttaatcttttttttctagcatgcataattaacagcatttctacctaataggaataaaagaaacctatgtagtacaagtaaaatctaagtatctaaataatttgcaattgcttggaggagagagtaactttatgtaccttaaaaccaatattggtattttaaacctacaaatttaccacaaattttagcagaaaaaaaaaaaaaaagataaagtgaggatatttataaagccatgattaattaagtcaatttatgaagaaaccaagctgctcattggtatttaaaatttgtgaacaaatgttaattactatccaaggtgccagattctctacttctattaaatactaataattgcacgtgcatatagttcattttccccagtccaagaaggtaataaaatatcaacctcactcaattatatagtgctggtagcaacataaaaaaagaaaagaaaatgagtattacatttcagaaactgactaaagaaagaaagccatatttttccttacatgaaagagagagttagttatttgattatttcagacaagctatttttgaagtttcaaattgaaagattatcttatatatgtcctttctttaataaagaatttttggtattttagtaactgatctcaaatgctgggaaagattgaaggcgggaggagaaagggatgacagaggatcagatgattggatggtatcgctaacttaatggacatgagtttgagtaaactccgggagttggtgatggacagggaggcttggcgtgctgcagtccatggggtcgcaaagagttggccacgattgagagactgaactgaactgaactgaagcagctgtttattgtgcttaatatcaccattaattttttatcatagtacatgtatatgcagaggacaattcatatatttaataactcttaatgttttattcctgaaccattcaagatcctcacattaaaatttaactagtttgggtattgctttgtttctcattttagacaatgattaagctcatttggcagtttcagtcagatgcttttcccaaataagcaaaggctttatcttatgggtactagatatttgtctgttggaaatgtgggtattgggtacttgatagagctatttaatactctcctgttattaggcaatgcttgcattctgttttcttcctgcctaagtgacatatgaccctaggtgtatcttactatggatcacatcagtggcaaagaggtattgtcttctttaggaaaaaaacaaaaaagattgcttttcttgccaaaaaaactaagacccactttctatgaccacttttgaaaatctattccatagaacttttactccatgttgaaaatgagtgatacaacctaagctcattcttataaatgtatgggaaaaaagggaaagtagacatttacaacataagccaagcccccagatacggtttgttgaaactgttctggaactacaatttgagaaagaatcctctttgttcccctactttgtagaatcaagctaaaagccgtatgtggtaggtcttcatgtctctatttttatgggtggagagcatgagcctcaaattttaaataacttttctaaggtttcaat

SEQ ID NO: 49252 - DNA, 680 bp, Bovine  19866880993466
  misc_feature (1)..(1): n is a, c, g, or t
nagtcagctgtttgcatcaagtgacaaaatactggagcttcagtttatatattgtagtatagtatataaactgaagctccagtatcttgtcacctaaacccctaatttatctttctccccatttcccctttggtaaccgtaagtttattttgtctgttggtcctgatttataaattctctatgaactattctttcaattaaatgaatatagaaatgcctagatatgatttggaaagcactttctaatgtctatgtaaatatttgtctttttggaacagtcagtgtttcagacctgaatactggccatgctagtctgaatattgctgtgtatagaaaacttacaggtgcagatatgtgcccatcctgatgcttaaccaattctgatcttttttccttgaaataatcatcagcatagtatatgcatggtagagctaacacatttaaaacccaatagaaatgagtctttttgcagtttttcaactcagaagtgcaggtctcaactgcataaaaatgtaaaatattgctttaaattacagccctattttattgttacacagcccaagtgctgttctgcacataaaagaaagtctataattattataactgcttgtcatcatcagatactttataatcattacttgctatatgaattataaacatgttgatgaacagaacagtca

SEQ ID NO: 49253 - DNA, 1079 bp, Bovine  19866881012735
  misc_feature (1)..(1): n is a, c, g, or t
ntattatacttagggcagactttatagattttttatgaaggtgggaatatttgaccatgaatacgaatcagacagaactagaggttgagagggtgatgtcctcatattaaccttggaacgatatgtgtcagatcattggtaaagagcagcaaaagtgtgaatagaagaaggttttagcgaagtatatgttgttttaacctgattccagaactcatttgatacaattcttacctttccagatcatactgaatgaaattaaatcctttttattcaccataagggataattattaatagaagtaaatcttaaacaatattttgaagggtgaactgatacataaactcagatcacttgaatttcagctacattttatttctttgctcttcaatatttttatggctgtgcttgagacatatctttcaagataccaatgtcaaatatttctctctttttaggagagaaagtagcagtaaaaatcataaacaatcagagaaaatataattcttgggaacaatatcctcagatacctttaaagatgaaatgttagatctataattgttacttggttatcagtgagtgaaaaggctaatgataaatttccttacttgcatggtttaactatagacatatcaggttttattaagaatttagaaagaaaaacatagtatgagagaaatttttataacaaatttattctaattccaagaaaacacaaccaaatcctgaaattttcatatctgttatagcggaaatagaaacttttgcattatttatatcttgcctttgataatttgaaaagtctggtgcaatcaaaattaaagtgacttaacttactggagttaagccacgaaaagagttttgaatttaaaaattctttattttgagaatcataagaaagtaactttgccaagatagaaaatagtataaaatattatacttacaatctagttgtttatagcgatgagaaatcaaaacaccttttgttttgtcaacatttagagctaggtactctactgaaccaggccaaatttttgtactcgaaacacaccatttttaggacctgctccatatatataatc

SEQ ID NO: 49254 - DNA, 840 bp, Bovine  19866881269262
  misc_feature (1)..(1): n is a, c, g, or t
natccactgagcaactcagaaaggaatgtatattgaatagctgagaatactaaacctcacattataataaatgacttgtcccaaagcccacagctcttaaactgcaaaaccaggtcttgaattcatataatctcattaatacttatactataaaccatactgaaataatcccttcaagaaaagttctctactgcttccttctttcgccactttataccaaaatcttagttttatggactaaatgactaaaattgcatacatgtcaaaagttgggctaaagtgaactcaaggaaaacacagttgcctttataaaaccctgtagctgtagaaggtctaacctcagagggaaaaatattatattcatgtaaggagtgtaatttatactcagagataaatatggataaaaaattcaaagtcttcagtgaaaggatttgttatttctgaactgtgtgaacttaaaaaaaataatttggcatacattctaatttgaggaaaacaatttggcttattaaaaaaaatatgggggtctgtctctctctctctctcagtgcagaatgtgtcccttacttgacttacagttcaaccaggtgctatgtatcagtaaatgatcatatcagcctttatctcatcattcctcattggctgcctagtcagcaaggtattgatttgttttttaagattctgcttacagtacatgattgtttacttggcttactcccaaatgtctttaaaaaccttaatagtgcacttccatgttagatggctttattcaccttttaataagcctgcttgccttctatattaatactgcatctgcttccagatacatatttctcagag

SEQ ID NO: 49255 - DNA, 769 bp, Bovine  19866882021105
  misc_feature (1)..(1): n is a, c, g, or t
ntcaccagttaattaaaggcacacatctgagaggcataattaaaattctgcatgtagaaatgagtttttcctcattccttaaggtttttgtaatgaagaaaactaaaactaaaaatatatgagttgtatccatataggaaggtactacaaaatgaaatagattgacattgactatatgaacaaaggtccatgtagttcatttctgtgacctgctcataggaagatacatttaagataaagtttgccttggcagagcaatggaaaatagagtaaagcattgacttattcagtcatttttttatggaaaatagagaataatttatgaaattatattttcaacactgctacaggagggtatttatattatgtgcacaattaatcttcatgtttatgaatattaattctctaagatatgttcacactatgtgatattttcttactgttacaggtctgttatttagattttgagtgtttatatcaaaatgaataaaggttttctacacagtcaatttagacgaatagagcaagaaattttgtaaatttggggcaatattctcaaatactcccactcataaaagtttagaattatgcctaaagggaggcaattctaatttggaaaatgtgaaaatgtataaaattggctagatgaagaggtaattgtgcaattttctatggtaagaaatacattggtattgagctatttaaatgaattcaacaagaagaatgcagaggccctctttgtggtgctctctgtcaccacatctatata

SEQ ID NO: 49256 - DNA, 1974 bp, Bovine  19866880663569
  misc_feature (1)..(1): n is a, c, g, or t
nggactgaggaatagatttggagagaactataggatttaaacataagattgaaagcagcattgggaaaaagcttatatattgcagagtgatagctagtgatgagagaaagccggagagaagcctcagggatttcttctgtttttttccttttctaaaatacatcattttccaaccacaaagtgtgtatgctgtgctcagtcactcagtcatgtccagctctttttgaccctttggattgtagccagccagcctccgtgtaagagtactggagtgggttgcaatttcctcctccaggggatccttctgacccagggattaaacctgcatgtcctgtatctcctgcgttgtaggtggattctttacctgatgagttatcggggaaggcccccaatcacaaagtagattttcttatcaccgtgatttgtaacttcattctgtgtttcagctgagaagtccgtttctcagaggttctgaggatgcttttatgagtattttttaatttacaaaacttcttcataaggacttccctggtggttcagtggtaaagaacctgcctaccaatgcaggggactcaggttcgatccctgtcgtaggaagactccacatggttcagagctgcaactactgggcctgtgcattctagggcctgtgctccataacaagagaagccaccacaatgagaagcctgcataccacagctagagagtagcccctgcttgccacagctagagcaatctgcccactcccagcaacaaagatctcaagtagaaaaaaaaaaaaaaaatacttcttcatagaaaaactagaaaataaagataagcgtaaaattaaaaccaaaaaaccatccatgatctagccggtattgttaatggtaaccagtgttaacacgtgaatgagtattcagcttttcaacctgtaagcatctcttccaaccccagcatgcacatggcttggattatgtattcaataaataataatggaaacagcattctccttggtattttctttgagtggctttaagtgctgtgctgaaatgtttaattctaattgtctaaactttcaataccaaagaataaatagcaattgccttctctgtagctctgtggcagcttgtcaaagccatgttgctgtgggtggtatgaaatgcagaactttcataggaaaatgatactgtttctcagaaaaactcatgacctgtgctatccttgtggtcatcgaggatgcggtgggtgtgtgactcatagatcaggccccagggtgggtttggcaaaggcccccttgccctctgccttgtgagtgacacttgcagagatctgtcctggtttttgtttggctgtagtatcgatacttcatttatcccgtctttagaggtgggaactcgaaattcctttcttcaagatacttcatgaaagaatgtctgcttcattgattctatacatgctgaggaaatgtgtgctctaactagaaattctgtttatctattgtttcctacttaggcagcaataaggaaagaactaaatgaatttaaaagcacagaaatggaagttcatgaagagagtcgacagtttaccaggtaggtgaacaagatgcagttgtgcaaattaaaaatgagtaagatggtaaattttatgttacatgtatttcatcacaatttaaattttttaaaaatatagtttagcacaacaccatctagtgaacatttctgaaattaagtccttttttgtttgtttgttttcttccaaagaagtctaagtcattctagagggctgtgttttggtttctttcttagttttatattctggtccaaaaaacaagcatcagcatcatttattctgctcttaaagagactcagttgaagttttatgcccagaacagatgctggtgaaagttagtgtgggcacagacatgtctactttggactcacagtagacatagcttagaaagggtagaagctcagtttttagaaggcatag

SEQ ID NO: 49257 - DNA, 2248 bp, Bovine  19866880691359
  misc_feature (1)..(1): n is a, c, g, or t
nctgatttcccaaacataacgctgcaactcaattgccttttgccaagtaacataacttgaagcacaagctggaatcaagattgctgggagaaatatcaacaacctcagatatgcagatgacaccacccttatggcagaaagtgaagaagaactgaagagcctcttgatgaaagtgaaaagaggaaagtgaaaaactaggcttaaaactcaacattcagaaaactaagattatggcatccggtcctatcacttcatggcaaatagatggggaaacaatggaaacagtgacagactttactttcttgggctccaaaatcactgcagatggtgactgtagccatagaattaaaagacgcttgctccttggaagaaaagttatgaccaacctagatagcatattcaaaagcagaggcattactttgccaacaaaggtctgtctagtcaaagctatggttttccagtagtcacgtattgatgtgagagttgggctataaagaaagctgagcgccaaagaattgatgcttttgaactgtggtgttggagaagactcttgagagtcccttggactgcaaggagatccaaccagtccatactaaaggaagtcagtcctcaatgttcattggaaggactgatgctgaagctgaaattccaatactttggccacctgatgtgaagaactgactcatttgaaaagaccctgatgctgggaaagattaaaggtgggagaaggggatgacagaggatgagatggttggatggcatcaccaatgcaatggacatgagtttgaataaactcggggagttggtgatggacagggaagcctggcatgctgcagttcatggtgtctcaaagagtcggacatgactgaactgaataaaagattggactagatgtagattaagcaacatctaactgtcatctgtgccctggttagccatgagtaagatggtgcccagaaaatagatatgaagtaactgtatgcagaagttcaaaacaatgagtggataacagtgatttatgatcttcctaggatttaagcaaccaattcagagaaaagttgtgccaataccagagatgaggacgttacctctggtttaggtaggaaaagactaattttgttttgaaatttgaagagtgggagttgtgagaccaggattgaatcctccaaacctcacttaactagtctcaggcagtcatgccatttaacctttcttagcttgtgtttgactaaaacatgctgacaactcatggagtcgataggattaagtgaagtgatatactagattaagttttgtgaagtattacagagaagttgcttttgacatgatggggatatacatgttcaaaattggtaactggagtataagtgagacaatgcagaatatggttgtgttagtagaactgccgtaacaaattaccacatattaccactgggtggcttaaaacaacggggatgtgttctgtcacaagaagtccgaaagcaagcttttggaaggttgttccttttcggggcctcaggaagaatctttttatgcctgtctcctaatttctggtagttgccagcaatccttagttttctgttgcctgtaggcatagcactccagtcttcctccatcttcatatgcctttctccctgtgtgtcttattgtctttgcgtggcctccttataaggacacaccatcatccagtatcatctcatgtcaactcattacatctatgaggaacctgtttccaaccaggtcactttctgaactggatggacgtgaattcggggggcacttcaactcttagtagttcaaaagtatttctaaataaatctaaccattgcataatttatttttcaagaccagtggaattaagttgccttcctcagtgtttgcatcagagtttgaggaagatgttggattgttaaataaagcagctcctgtttcaggtatgtataattttaacttcaggtggacagagctgtattttacaaaaagcaacatatagtaacgatacaaagtttttctgtacctgattaagtgttggaacaattgagatgtgtttgaattcagattagagatcattaaattaggaagggtaacagtgatcagtgtctctttattgtcatcaaattcttaatctttaaagttcctatttggagagaaaagtgggaagattatttttggtgatctagtaggggaattttagccttgacctaacctctcacaaaggaaacagggtaactcaggagccttacattcg

SEQ ID NO: 49258 - DNA, 1864 bp, Bovine  19866880697621
  misc_feature (1)..(1): n is a, c, g, or t
nctttaggtcctttgtttgttaacaaaccttacaatatagctggttaatggggaggaatgtgaacctctctaagtagctgtcctggcaatccacatgtgtggtccatccccagcccaacccgggcggggcttcagtgcgctggtctgtgctcctgttgccccgggggccaggcaccttccttacaataaggcccaatttcccgccacatgcttgctgctccttcccagtagcctagagcgatgcctcactgccctccctgcctgccgagcgaactgccccatccaggctgcctgggctttgtcccactcagctgcagagacacacagggcctaggctgttctccacctctgtcttcggcccatggactcaccacctaatacttggcagtcagattccaggatctagctggttatcatacagtctattgcaccatgaccagaagatataatggcaaggacctcacctccccgcccccgccccaccaactaatcagaactgcctttctcagttcccagtagatatgttagccacgttgggacggatttcaatttctcggccaataaatcaaaaattatttagtaagacaattctatttcaaacagaaccaaaataacctttagtaaaacaatattacattttcagttgaattcaaaatcctcttatgctcctttgtctactaatgtccatctaacagccctgtgagataggctagaaagacatctttatccccacttaataggtgcggaaactgaggtccagagactaaagttctttgtgcataggtactaagaaaaagatatgacagggaatgtactagaccaagcgaagtacccaatgcacagggttaacttcccttcacgtcatgactgctgacaacacggtgacaaaaggcctaacccgggtgttttgaactaagcggaacattccccacttccaccttgccgttgcccccggctaagctgtctacacagcctctgactctggcagtagcttttacagcagtatttcccaacaaagcctaggaagctggagctggagtccctagggcaacttgtacgtgactagcatctttcttaggcttatcagtcaacatcttccacagatgggaagcaacctttacacctcttcttagtgtacacaagtcgggagtagagatagggcagctttaaagcttttgaactgatgggttgacagcagaaaattccagagatttgcaggtattatcagggctgtgggtgggggacaacagaggatatgagaagttgctaattgcaggatctgattccctgaaacacagaggatcctaatgctttgtaaaaagaaaaggttaaaacaatgccattctaaggtacttcacagtttgagggggaaaggtatttagcctttttgaagtgccttgaacctcctgcacatccttgacttatttgactatgtgcttccaagcagttactaatacacagtctcagatagaaataatttttaaaagcaatcatggcttgcgtacctactcggtgacaggaaacgtcagctccaaggcagtcagggagtcctctcagaaggtttgaggcttcaaacctgtaagaagagatcttgcacaccttcagtgagtgaagcgagaaaaacaccccccacagccgccgccatgaggcaacttgagcgtgcttacttcaaaagcacacatgagtgcgcacacacaactgtgaatgtacagaggacattttccactgctttttaggtattttaatagatgatagatcaatttcaaattttaaaatcctagggtataatacttcaatagacccaccacccttaattttaaaatgtcgcagatacaccacatgggtaaaagtcttaaacattgag

SEQ ID NO: 49259 - DNA, 1820 bp, Bovine  19866880848087
  misc_feature (1)..(1): n is a, c, g, or t
nttgtttttagaaaaagtaaatgcttttctagctataattttaaatggataaaaaaagagacctttagtctctatgtttaatattcattaacagttctggtcataaatttttccacttctttttcttcctttaaaaggtgtccaaataaaggttaccaaaccagtgcagtggcccgtcccataatggtgatagcccaacactgagttttcagtgggacatgtaatttctctgccttttccaggaagataagagaggaggcagactttgatactgcaagtccaccttcaagcacaaaaatgttaaggatgtacattttttatttctaaaagccctaggcagaaaatgaatagcttcaaggctaacagaaaattaggggatacttaaaagttcattcacaaaatggagtgaaagtgaaagtcactcagttgtgtctgactctttgcaaccccatggtatagtccaaggaattctccaggccacaatactgcagtgggtagctgttcccttctccagggaatcttccaaacccaggaatcaaacccaggtctcccatattacaggcggattctttactgtccgagtccaaaatagagtgagagaggtataataagtaaaatgcctaaaattttgagggctcaagaaaaataccattatttattcaggacttccctgttttctttaaagcaggaataaaatagtaaagcatctcttagcttcttctagaatattcagatgttgaatatcatgtcatttggatttatgaatagtgaataccaaaagacattaagctctttgcaaggaacatattttaggaaaagaggagtactattgttttgattctaaattaatagcactttatttgtgcccacaaaagcacaataataatatttttacctcagtaagcattcaggggatgaggtgaggaaggcatgaggtaaaccaacatgttgcaacaaaaatttcatgagttttatagtagtgggagcaatgaagattattcactatttggagaaataaccaatcttggtatcttcttttgagggtctatctcagtttctatctaatccttgtctttttgagcaagattaccccttgggaggatagacggataaagggaagaagattagatgtaggggataaaatacttggaaataataattgttagtgacaaggtgagacagatttgaagaaatgaaaagagaacaaagctgggaaaattacttgagagatgcataaagcagactaacgtaatctgcccactcatgccttgttgaatgtacatgagtgtattatagagtataaaggacaagaggtccgtttatcgtgtcttttttcttttactggtagacttaagaaagaaaaaggcatgagttaaaacttagagctaaaactttgcatgtactcaaacaattgagttttcttgtagagacagactgaagttcaagaacagagcatgaatcaggtaaacatttgtatcttgtctgtatctcctgccacagagaagctctgttaggctttaggtttaggatgacatatggtgaaggactcaccaaaaaggtcattgaatttcttctttagaacaccttagatacccggcagcccacaaaggctgtctgaattaaagcaagattctcagattgtcataactttatctcccgaagaccatgatcatcttaaatttcaaaagaaaatgaaagaaagaaagatcaaagaatgaaggatcaaattactttaaatgtatgattaatttcctcaccttgatcaggcaattccttaagaactccccttcttatcagctcctctctactttgtcttgtag

SEQ ID NO: 49260 - DNA, 796 bp, Bovine  19866881017218
  misc_feature (1)..(1): n is a, c, g, or t
ncaagaccaaaaaagtatacaaaagaatgcatttttcaacatctacccatttcccattctcaataagtaacgattgctatgtgtatcttgtttatccttccagagattttaaaaatgaaagcacaaatatatatgatatacttatttaagtgcctacagatatatttgatatttaactccttataaaatttagatggtagtaaatgctcgctatagttctctgcttcgacttttttgtttactttttgttttattttcttagacatatcgtggtgatcatctcatatgaatacataaaaaacttcctcatccttttttatttttggtcttgttttaaacctgcataatatttcatcgtatgggtgtattatactctataaataagcatcctcttattgattatcaagtgtcttgtgtattcagagattatatttaagttttattactactgcagaaaaatacaaagttcaaattgaaattaactaaaatcacatctcctttggtgaaataattattttagatatcctttttctctaagcaaattttaaaatatcaaaaggattttctgtatgtccaggtgttgatatcatgtttcacactaggggtcgccaaaacagtattcaaagccaacaaacaagccagtagttcagttcagtcgatcagtgtgtctgactctttgcaaccccatggactgcagcacaccaggcctccctgcccatcaccaactcccggagcttgcccaaactcgtatccatcgagttggtgatgccatccaaccatcgtatcctctgtcgtc

SEQ ID NO: 49261 - DNA, 2099 bp, Bovine  19866881097604
  misc_feature (1)..(1): n is a, c, g, or t
ntatttatattataatccttgtcctacttgtaagtggattagaaaaacccctgatgtttctccctgctttttgcaagtagagaaaacacatgaaattgcttacataaaatattcaaaagagcactcagaggaaatggcattttttttaaaccaacagtattagaataccataaaacaggtatgcaaatccatgcaataacagagcctaaagcaaattatgaattgaaaagagcaacaaccaataggtactcattttcaacaaaagcttcatataaaaagcttcctatcttcatacagatttatcaaatgtgcagggtgaaaaggctgaagtctgcaatttgcatacatgattcagtggttaccaaacccgactacgttagaattaccggggcaatcttttagaaatacacactcccaggccacagcacaaactaaacacaggctcacagcacctctggggccccgggaacttaggcttccgtgaagtctccagaaaaagtctacagccagcttcacaccacggtccctggtgagcactgggaaacaggtatctctgttccccaattaattataaaagtcggcttcttccagccaagactattccagccagttgatactcttaggggcaaagctttttgggattttctttaccagtacaaaggtaaacctattacgtaacagccaattatatctcacctacgggatttattcactgggttgcctgttttcttaatttgatcaaaaaggcaatgtccatttattatgagcaacctccttataagttacaaatggaaaaatgagggccattttcagacaacaaaagtctaaaaataagccaccacaatttagggaaaaagctagaggcgagtaggttctctgaatcatccagagtatttgtttcaaatgtattccttgctttgcatgtataaacatgtcacaaatcatcttcatggtccatctctcatctcaaaatgctcagcatttattgtggtggtttaattgggtggtctccaaaggcctatattaattattttaaaagcttgaaaacaacatgaaagcaagagagcagaattcttctggatgattcctcctttgctcctacccatctcacccacggacaatgccaatttatgaattcagagaggcaggggctctctccggcttcactagaaagggcgcccatgacacgaagtacgcaaaccaggcagcggagtagcttagctgcattgtcaaaatattcaaattatcactaaaagaaagcgattcctttctgaattcaacaatgccccccggcctccgagggctcacacaggagcttattcttaagctgttcaatgtaagtagcaccagtgaaagcggagaactctggcagggaggagatcaagtccctcggcctttcccccctgccatctcagaccgggtctaatgcttaaatagttaacaatgcaacagagaacccgaaagcatgcgttgccccggggaaaaaccatgtgcagtctacaacaatttaataaagcgcagcagagacaggaaaaatatcacgtagacatttgacagtacaccacttgcaggctggttctcacgtctgaattttagatgtcaaaaatcagagaaaaagcttctaataggtgggttctatttaaaataaaagaatacagtttttttaatgaaccggtaacataaaatatttctaagtatactcatttctgagctccagagaagcaggaaaaatcacatttttctagaaaatgggatggatgcacagtaaacagatcatgtatggtgaattgtcttaaataaaggggagatattcagggggaagtgatttgtttattcagcaatgacaaaaactaaagtttcctgaatctagagcgttcggatttctagaatgcatttttggctgtcacagtctgtttttctaggcattagctgctgagggctgcgtttgagaaacacggcttcttctctgttaatgaactggtttagctgcctgctgagcattcactgaaacccgaattgaacaaagggatttccctccagtttcagctcattcacttcaagctactcccgatttcacttaagtaaattcttcaaacgac

SEQ ID NO: 49262 - DNA, 1150 bp, Bovine  19866881280037
  misc_feature (1)..(1): n is a, c, g, or t
nagcttattgagagggagaataaaaagggaggtgttgtctcagtttggaagggctgttaacagcacagctgaaatgtgtttctattttaaacataatcagctttaaaaaatgtgttatacccttaaccagaagagacccggatgggttctctgaaaatagctttctttgtttgcctggggatgagctgcatgccatcccctcgcagcaggccctgcccaagtgaggattctcacttggaggaacaggttatctttgtaccggagttgccatggaaatgtggagggatctgtggcaaggtaaaagggagggcacaaaggaactcccaaggaacctttcggtccttcttccgtgttaatatggctcttctgctaccgccactcagtagggtgggcagtggcgtggggatgttggagttccatgtttaaaacatttggtgcctgccagtgcctgtttttcttctctgtgcatgtatttaaaaacaaaatcatcttcgagtataatgaaaagcccaaatgttccataactatccttattgacattaagtgatttcttatgtctccacataactgatcgaacaggattaacacatcaccactcccccaaagggcttgattgtggaacaaaagccccaaaacccagacatggttttgagccccagcaggaaggacaggagccaggttactgaggtgcagggtgtgtgggtccccctcccctgggcgtcacaggtcctggacatgaccaccctgctgctggtgcatgggaggccacattacctcctgtatgcttcccgagctgacagagctcttccctttctccctcccccatcccccacctccccgctggtctccctctccctctgtctccttctccagggtagagctcaaatgagtccaaaaaaggaactgactgtaaccagtgctgtgggagctctgctacagaacagggccctggaggccagtgcagcgccaaccaggccaggtgagttggaatgagcatctcaactatcgaatgacggggtcagaggagaccactgttggcttcgggatttgctggcggtcagcaaaaactatgacatccaaagttgctttgggatataaagatatgtgagtttgtttgagatttagagcttattggcaggaaaggatattt

SEQ ID NO: 49263 - DNA, 885 bp, Bovine  19866881340447
  misc_feature (1)..(1): n is a, c, g, or t
ncatgttgcctgtggaacatttgtaaaggaaatgcctgggaggtgtttgaaaattcaggtatagaaagtacatttggagtccccagcaggaagtgaagagaagccaaagctaatagtgactacatgatggtgttttccattttgtaatgacaaatcaggtgtaaccaaatcctttatgaaacatctcactttgttcaatataggttagaacatgaccctcaagatagtgatgttttgtgtattgattgctctgtatctcagatgataaaaccagcatcttttgcagagctgtctctgttttcccacatgacatttataacgattttctgttaaagcagtaatttattaagagaacagtaattcagttggggatgctagagctgcctttgatcataaaaatgactgtaccatattcacgtcactgaatagagttgtgtttctctaccacatcacagagtttctgttttgtatttcaggtttcatcgtccataatgaagcatgagactcttgggaaacagactgatcatcttgaggggaagcctcgcttcctgaaaacctgatattgcactgggatttgaatgtgtgtgtttctgtttaacttgtggtgaaggaagcatgtggaaagtactccccacttgtacagcccgggtgggccagcaagcaaaggggatggttcagcatcccggctgttcagcgaccctgctgtccagcatgtggactgatggtaagggacaccatgtttatgccagttattcttcatcaggagttttaatcaaagaagatgagcagaagacaatcgctgttgccagaaagccacatttgagagtgtgggttaaagaatggggaatggaatttctgagcactggaaagggttgcgggggtggg

SEQ ID NO: 49264 - DNA, 1350 bp, Bovine  19866881573676
  misc_feature (1)..(1): n is a, c, g, or t
nacattcaaaaaaaaaaattctagcaaaatctaaagttgccagaatcgcttctatatgtcatttgtgtagcttcatgatatgtgtaagaccagttcatgctaggtccagttgtaattgttttctccagttaaacgtgacattgccgttaaaagcccagctaataataatatgctgcttaagaatttagaagtctttagactacatgacatacaaaactttgaagcaggagagaaataattagaaatttcttttacaagaacatgttagaaaagaattgtgtcatggtggtccaaatcaaagaaagattattgaactgaatcaaaaccttacattcttgctgtttagacgtattgtatcctgacacagattattaatatttcctaattgtgagcgtatccagtgtgtaaaagcactcgtgatgcttattaacagggcacatctactttgtacataaacttcagactctgccccagtcaccgtgcctctgtgtgtgcatctgtaacgcatcgtctcgtaacagctctgccaggtagagagatgtcagcataaagagaagttagggaacttgcctgaggttacatacctggcaagtagcagagccagagtttggacccagagccatctgattccatagccagtcttttctgcacccaccaatccatcgttcctagactgtctagaaatactatcatttggttcatgttttttaactaactgtaggaaccacaacctgtattaggtagagtatgcttttagtaaaagaataagggagaggaaaactcatcgtcatacaccacgtttaggtaaggaaagttgctgtctaagaaatagtattaactttttattttttttttttcactttcttgactccccaaaaagaaagtagtcaaggcctgaggggagctgagggcaggggcataatataggagagtattaaatattattgttaaaacgaataaataaagcacatttctctatcagtgtgtttaaaatagagctagcagttatgtgtgtttatactataacaaagtgtactttatttggggaataacttaattgatccattatgtggcattaccaaggtaattttttcctttttgtttgagcacaggaattaaaagtgattcataaaaacacacacacttacaaccagcatgtaaattagaaccacattagggtgatcatcatcttttgttgttttcctaaaatggttccagtttgccctgtatattcaacttaaagtacgcaaaagtgttgcaagttccgactcaggagagatttagagctccctgtgaacacccagttttacagagaagcttcagtgttcaattactgcagttagtcttttt

SEQ ID NO: 49265 - DNA, 804 bp, Bovine  19866882075622
  misc_feature (1)..(1): n is a, c, g, or t
nacagaaggggcgggggtgggaggtgctggagtaccgggggcggagggactgaggacttgggtttgcctgtggtctgctcctcggtcccagggacagtctgctcgggtgtgagactctccaccctggtctccgaaggctcccctttaaggtcagatgtgccagaagtggttgcctctgaggacagtcgagacattggctgcttgccagttttcttcttgccctttatgactcccactgtcccagttttgctagaaactgtctccttggaagctttgggacgagatgaggtggaggaagtagacggtgaagctgatgctttggagccagttgtttttcttgaatgagaggaaccagctgaagcagagagattttgcattaagagtccaagaagaaaacacattttaaaaacaaataaccaagttgcaattgccagtgacactgttccctttaaactctaaaactctgaataaatgcattaaggaaaataggtaaatgataatggtcttgttttctgccccctccctgccccaacctagaaggcagcaagtcatgcttgaggccaaaccctaaggtacaaggtcttctccctcctccagtctttagctgagccaaagagaatgcctcacctctttgccctatggtcacctgaaaaagtctctgtatgctccaaagaagggacattatagtgtggagaggacaagacaccagcagctacccgggtatagtacaagcttcctctcatcacaaactatacacattttatgatgcctttctgggaacagagcagcacacactcagaagag

SEQ ID NO: 49266 - DNA, 1260 bp, Bovine  19866880067208
  misc_feature (1)..(1): n is a, c, g, or t
ncattcagttcagttcagttcagttcagtcgctcagtcatgtctgactctttgtgaccccatgaatcacagcatgccaggcctccctgttcatcatcaacacccggagttcactgagactcatgtccatcaagtcagtgatgccatccagccatctcatcctctgtcgtccccttctcctcctgcccccaatccctcccagcatcagagtcttttccaacgagtcaactcttcgcatgaggtggccaaagtactggagtttcagctttagcaacattccctccaaagaaatcccagggctgatctccttcagaatggactggttggatctccttgcagtccaagggactctcaagagtctcctccaacaccacagttcaaaagcatcaattcttcggcgttcagccttcttcacagtccaactctcacatccatacatgaccacaggaaaaaccatagccttgactagacgaaactttgttggcaaagtaatgtctctgtttttgaatatgctatctagattggtcacaactttccttccaaggagtaagcatcttttaatttcatggcttcagtcaaaaaaaggtgtcgtttttgaactatattatttatcatatacacgtagaaaaggaaaacatacttctgttcagagctaaaaaaattccaatttcataaaaaaggaaacttacatatacattttatattaaatttacaaacattgtttcattatttattacattcttcccactaaattggcctgctaacttgtgaattccaaagaacaattattttaacattagcaaacatgcaaaactttattataaaggggaaaaaaaacaagaataaatgtagtaaatttatattagtgaattttttaatatgaacaatgtggcatctgtaaaattattttttaaaaatcaagtaagagatgttttttgggctgatgtacttcagcccaagtgtatctcaattttattactatccttacatactactatatatttcccaagagttgaaatcatttcagtatttaattgcctgacaattatttctgttacatcaattttgtggttaaactaattatttatattatcaaaacaaatcagcactcaaggctaattaaactggagaaaccaacctcccaatgtttcccagcctacatattaatcaggtttaggttaacactaactttagaagaaatgaacatatctttcaggtgataattttataggcagaacttagaaatttaaacaagatttaa

SEQ ID NO: 49267 - DNA, 1585 bp, Bovine  19866880728914
  misc_feature (1)..(1): n is a, c, g, or t
ntaggagaagattaaggtgtttaagaggcaaaaatgttattacggaataagtaataatatgaggaacacttttgaaaagaaatcaatatatcaccctcagcctgttggaaatgcaaagaacttcagaagggaatattaggaatctttttatcattgtgcactttctccatctcttcttaaaattagtaaaacctgtcacttagtaacattcacttgctacacaatttacaaaaattggataagataatatggagaaggaaaatgcaaaatgatacaagatgataacaactcagataaaaacatatgtatcagaaaggaggcaactaacatagggatacatgtagcacatgcctctttcacctacgttgccctgctctaagaattcttcctagggatttgtggcatggaaaatcgctagaatccccttgatgtcctctattaaaaaaaaaattaaaatcaaaaactttctgtcaatgaaatctaccatccaggtatcacatcaggtatattcatattgtatgtagttgttcaaaggaaaacaaagagataaacaatttaaaaactgtaatcactaccaaagcagtgcatttgtgattagagactataccactgaggaaagcatttatacacagcagaaaatacaattttaaatgtgtagactgttaattggctaagattttctccattgctgacaaatgatataaatagatttttggagaattaagtgttaggaaacaaatgctttaccttactcaagattgatcacctgtgaaaaagacagtcaatacctctgagttactcaactccactttgaagtacttaatggccaaaaaaaaaaaaaaaaaaatcattttgaagctgtggatcaggctttcaagttcatcctatcaaaacttttggactcccagttttagatttttgaaatttatggagtaggccaacataaatctccctgtaaaaaaattaacccccagatcatgcttttaagcagttgaggtttggttgattataaattgtcctgactgagacaacaatctcagttctttagattccattaatacatgtctgacactttctataaactcagttttgttcagacctgaattgactgaaggagacaagtcgaacaacagtaatgtcaagcactgacaaacaggactgggctggtggaagagagagaagtgtgacatagctgagaagtccctgctgtctccaagcacaaactgagcatctccaaactccgatgtctaattgtcccaattactggtttgcacatgcagaaatattctatgttaaagaagagtaaaaataaatctgaaaaacatgaacgtgtcacagcttgatggacaagtcattattcaaaagttttattaccctagaagaagtggagatgctattaaaataagacaacatcttctagtaaataacagctatttacacttttctgtgtcttcatctcataaatatcattccactctaagataacaatagtctactgctttctactgtgataatagacaatatttgaggacttacaagttttctgaattcttcatttggtagcatagaaaattctcagtcaatt

SEQ ID NO: 49268 - DNA, 1669 bp, Bovine  19866880763116
  misc_feature (1)..(1): n is a, c, g, or t
nagatatcatttagcagatgggaatcggagtaattgctaccagaatcatcatcagctatagcccctacagtctaagatctgtgaccagaattctttctggctgaataaattaacatgctattttcttttcctttaaagctaggatgacatttcaactaaactatactgaaaatgactttccaaatcaagcgatctccccacatatatatattctttttatcatgacctgaaagcagattgatagccataaatcagattgcttttctaccagggtttggtatggcttaactgaaataaatgtattcaaaagtaaaattgaccacttcatagagacaagcagaaaaatctattatttttaaatgatcattttaatcctgggctttatgtatttttcaaataggtcagtaggattgagtattaatttgcatttctcttccactacttagttatgtgctttgagaaagtaagtaatggaagttaaataatgaaaacaggtatgctaaaattgggcaagaaagtgttatagtactgtaagtagtatgccaattacgaaattgttttattttcttgagatgaaatgatggtctattagatttaataattcaagggaattttttttaattgaatctcttctaaaattataatcctgtcttagttttctattatatatatatatatatatatttaatatattctataattaacgactgtcatagtcacttaagttcactgaaataggggtttcccaatatattaatactatatatacctgagatgccaatacaatcaatctgcagtaggatctaggaatccaggaatctgagttttgaaaatgctctccagctgtttcttatgaaggtagctgaatgcctattaatagactgatagtggaaccactattttaccagactgtggtaaaagttctaacagacatttctgatagggcataaaataaagagctaagatactacaggattcttagaagattttgcattatgtaattttcagatgttcattttctgcttgatctacttaacttccctcaagtgtcattctagtatcctctacctgtgcaggtgaatttgcctgccccccaagttttcctcagtaaaaagattaaatagaagttggctgaagtagacatattctgagtcaaaattttaaaacaaattaaactctacctctgttttgtgaactttttatcaggattatattgcactatcaaaactcttaatatgtagaactcaattcattataaatcttagctattgttgaaacatgtcctttctggcagggtgctgaggaaaagaacaatgcctgactttaccaataaggataggaatgtacctgggtgtctgaaagatatatactattaattttagacttaaaaacaccattttaagttaatttaatatgtaaagttatcctctttttttttggcctgcaagcatggatatgtgactttacttgcatatttgcaatgttaagattatatggttttgtgattttatatggatgcatattcagtcctttcaaacgtaaaagtgggaactttttttttaattttttttaaattttattttatttttaaactttacataattgtattagttttgccaaatatcaaaatgaatccgccacaggtatacatgtgttccccatcctgaac

SEQ ID NO: 49269 - DNA, 1008 bp, Bovine  19866880767195
  misc_feature (1)..(1): n is a, c, g, or t
ntgacctatatcattttataaagagaaaatacaaattttatgtatcatttctaaatgggagttaccatgggcataacatttgatttaaaaatactacttcttggacacagaagttgctcattggtcagaatatttaggctctattgcactcttacaaccaaagctattgacatgtttgtgtttttatatgctacagcaatttttaagattgtcaagagttgaaaaatgatacttttccaaatgcatgactctttcagagatattgatgttcttttaactgatctgtgagtaagtctggaaaagaaattggtttcccttaaattccatttttaatggttaaggcagctacccagcgcttctcacagttccaaggttttgaacattagctatctatctgctgatagaattttgtacttcagttaactgtgtttaagccagcatgagagtaggacaaaggagcgatagggatagttgaaaagcagatttgagaagagtgtttaaatggtagaatatttattataaaatctgtctccatttatcatagttctgagagtccttgattgtcatcattctgccattacgtatccttctatctctgaaagaaattccaattctaagcctccattcaagaaaaaccatattttgtacctaacctttagtaaccttagtgtttttctctgcacgaatcttgtccatatactgttatttaagagtgattcttgtgaatgatttacagattaaaacatgatttctgtgcatactctgtatttacatgtttccttaaatctatgccagatacatctgacattatgggatgttatatgggatatgctgtatggggtttatatttttttctccttaattttaggtttggaaaaggcttcttgataaattctgaaatatgatttttggaataaaatctctctaaaggtcattcagaataaagttactacatgcagaagatagattttgagaaccaaggtaataagactaagtcgaattcaaaat

SEQ ID NO: 49270 - DNA, 1180 bp, Bovine  19866880776634
  misc_feature (1)..(1): n is a, c, g, or t
ngctgtgacctttcccttgttatttgtcactaacaagcttaacagcggtgaggatgttagtgacaaatgtaagaaaataggtcatctttgctcattttgaatatagtaggtgcctcttttcttatatggttgtcaaattaaccgtgggaatatttttcaggtgtcaagtttacattgttaaattttgatgtatgcttgtttggctttatttagatgccaacgaacttagtgtttcttaaatttatttgtctctcttccaccagctttcattcaattaaattttagtatagagacatttaacgaagaatatactatagtctttgctgtcttttgtgaaatgtatgttatgtgttttctaaaatagccatcttttctatctttatgcagattatctcttttactgcctcactctcatttttttttctcacacatgtgcatgtacacacaaacccacacttgtgttatgatagaaaattgcaaatactcttcaacattaggacttttgaaattgatcttgaggatgtacatacattttctttatccttcatctcttctgtgaggatggtattatcttcattgtactatggcaaaaagatattttgtgagagaaatgggtttgattcctttttcttgatgaataagttttggagccaggatttgaatcttagttcctctggatccgcaggccatactcatcctattttcctccctacagaggtaaagggataagaaaaaatataatgggattaattttaaagaaatcattactagagaggctggttgctgagtattattcaaaattcaaaattttgagttacacatggagaatttattttaaaatatattggacacatcccagtaaaaccattttttttcctaattttatcagtgcttcctttatgacttaaggttgttctcctatttcaaagacacagaaagcagttgaaagtatatttcaaagaacctctggagtggaccagtaaaaggagaaactaaaatttttgcatttactcttaaaatgaaaggcacaagctttcttcactacatattcctcttctgatggcccccgatcccagctccctcgctttccaaagctaacacccttgattaagaggacatctgtgccaaagactgcttggaacttttccaatcacaaaattcacaggctctggctgctttt

SEQ ID NO: 49271 - DNA, 2147 bp, Bovine  19866880787105
  misc_feature (1)..(1): n is a, c, g, or t
natgtgttctgtggtagttagattctgatttaaaatgctcttgggggaataaagtcctggagagttaggtattgtatttgcactccactggtaaggatattgttcagtcacagtgactgcagtgaccgcagttgaaggatctctgaaaataaaaacgatgtttttaactcccttttttcttcctttggccactgctggtgccaccactagcatcctgctctttgtgcttgttgccttgcttatttgatagtagtggaagggcaagttttcttttgtgtcagacaggattttagtgtattagatgaagatagaactacaatttattacctactaattagaaagaaaccagaactgctgatacagtctggaaacaatgctttggctcccctttgagtggggcattcttgaaacctggaaagttcccaaagtgaaaattctcggtagagaaactttttgtgaactcattctttcgaaaatctttgagcaatttaggtgattttaggcactaaaaaggattcaaacagctgtcctccttaatccttattattactatttgatttgatttgccatttttcaagccagcaatgcccatagtgtaaataaatgtatttcacatacatgcaaatttttctcgaaatgtatttatatgtgtgtcagtcctattaaatattttattaactcaaataccacatttttatgcctaaaaaaaatgtgagggtaactgtagagaggggctttactttttaaaaatattttgacacaagggcttttccacaacttttctctcaaacacacttgtttgtacttgtcataatttacgtagtataaatttgaaagcgtataattacatggcaggaaatgatacgattattttagagggtctgcatgcattatagtggtacaactttaaagtcaatctctagactttaatttgggcctgaatgtctacttgaaaaacactgtcattatctctttccaagtgtctttatgaattagttgactaaattaagaaatgaaagcagcaataatcagtactatcaaactttctaaatatgttttattttctaataatttgaatatatatcacaaatatttcttatcgttagtgagactatgtatatgttaaatgtatcttaaagaaagtgaaagtattagtcactcagtgtccgactctttgtgaccccatggactgtaaccctccaggctcctctgtccatggaattctccagataagaatactggagtgagtagccattccctcctccaggggatcttcccaacccaggcatcaaacccaggtctcccgcacagcatgcaggcggaattttactgtctgagctaccagagtagtctttaaaaatgtggtagtgatagttatcaaaaataagcttgtattttagtactgccgatgcattaaaaattatttcaaacaacaccctttgccaaaagaaaatccttactgctttttgaagggtatttcagtaccattatttttgaagtgtgtttgtttaatgctgtaaagatatataaaagattactttgggaaagttcatggtattataaaacaagttatgttttcggtatagtgatctttctgaatagcacccctgtagatcagagtcgttttgtatttgtatgtgtgttttaaataactcaagaattctgtcattggtacgccaaataaccgtacaacaaatctgggtacacccctgggagtttccctcccatgtctacttccgttgcctcaaattgactcttcaacatctacccgtacaactggcttttgttcatggaggtgagtatacaaacattttaatatgaccttttctatgcaaaattatgaaaaagtggaagcagacaatgaaagatggggaagcttaatagtattttaagttgctctgagaaagtggaatggtattgaagtaatcgaaggtgatgcttcattatgaacatgtgttttggtgaaagtggtagtagtctgtaacgactgtaataactatgttattaaagatttgtgtttttctaatccttaagaaacacttaaacccagaggtgacttgggatgtaaaactgtgggtatttccaactaagtaggtaaataagccacgtggtgtgttgaaagagaattaatgtatatttgttttctt

SEQ ID NO: 49272 - DNA, 1444 bp, Bovine  19866880857844
  misc_feature (1)..(1): n is a, c, g, or t
natgcgctattcagacaacttgtctttcctttggcattttcctatacctatatcagaggtgataacaaactttgccctaatatctacttgaaatccaaagtctccaaacattttgtaaaaaaattattagtagtaaataacacagctatattgttttataattgacatataatttgcattaaaatttgcttttaaatgaatgaaaacatatctaaccaaccaagttttctaaaaccaggtgcctcatattgctcccggaagctccgcatgccacaaatacttcatcagaaggaagaattaaagttttgtgctcatgatagaaattactggcaagccggatgttttctctttgtaattagaagtatggtaatttatgaattctgtaaaacaggaaactatcatgtgaactgttttgtctaacctccagtaaatatttgaaatgcccctgaaactgacttgagaaatgccagatatttgagtacgtacatcttttcagttcccaggtgttcctgaaagagatttcccctgatgatacctggtaacttaagtagttattacttggcagcagacagtgcattaggaacaatgattggaatgctctaaccctggcaaaaataccctgagagcagtggctgtggtgaaattgagccctaggttaaatcttgaattgttactcaaaaaactacaagccaacttagagcccagtacataagatgctttattatgcaccatatcaattcgtgaaacatgtaaagatgaaaatcttaaggattttttttaagtatttaaaagtttgtagctggttaacagttttatttatatggcctttttattagctagactgtataacttagaaagttttgatgttatttggttcgtatatatttgggtagatctctaagtaattcacaaaactatggctctcttctttttatttttaaaaatggaaaaaagttgaagtagtggtatgaatttacctcttccaggtaaatgtggatgccagtccttgataagaaatctcttagtaacatattggctttcttaaacaaggcaacatgccacctgcattgtgtacacatgaccggaaaacattcagcgtacttctgtgtaataatgttctttaatgtatacttgcctgggagttttaaaagatatccatttggcaaaacatgcataatgcatacaacattgatttctttatatctcttttttaaaaaaatggattctgattcaattattggggagactattgcaaggctacaccttctagagatatctgttgcatattgcatatctgcataaattgcatatctgttgattgtaatttgaagtaattactaatgcaaatggtcacccaacagcaaagtatttaataattacttgtgtgaagaaatagagtcttggggagatgtttagcattggcaggatcagtaaactatttcaa

SEQ ID NO: 49273 - DNA, 3766 bp, Bovine  19866880885593
  misc_feature (1)..(1): n is a, c, g, or t
nactgatgctgtagctgaagctccaatcctttggccacctgatgcgaagagctgactcactagaaaagaccctgatggtaagaaagactgagagcaataacagtggattagatggttggatggcatcaccgactcaatggacatgagtttgagcctactctgagaaatagtgaaggacagggaaggctggtgtgctacagtccatggggttgcaaagggtcagagacgactgagcaactgaaaaacaacagcattgtagacagaataaatatgtgtggaatgaaggaacaaatgaggtgaataaatgcttggcttgtctgtctcacttttcactgagttcttctgaactattattgtattggacacgtggtgggaattcaacaaattttgggtcaattaaaaattttgctaatttattgagactacttttccctgtcttaacttttcctttacattaaaaaaaattaaagttatagatatttagtgatttatacgtactgaaatagttttgcccctttatgtgatttctttctaaaattctgacctgaccctgacaaatttcacgtttctacttttttataagccttgaagcctccctgattaacacatagacagaaggctctgactgcaaacagatgtaagagaaattatcataaaatttgagatgtttccttattttgttcttctttattattttaaaagatatgttatccaatttataggattttagaaataaagtaatgggactaaaagtatgttgtttggccaggcataatattaagcactttataatgttccgaaataatttttaatcctccctttttataatacaggaaaataagtgtctgaaaatatcggtaatttgtctaaggtgaagtcatcagtatgttttacatctaagaaatttacttaagtctatttgattcctctaacagatgagttatttctttctgtgtaataactctagtgccttagaacagtcaacattcgatactttctacaattccatcatatgtgtcactgatggttctttcagtctaggctggattctagattctagctcatctctattgtcagttggtggcttgcctgactccgcacagcatagtataaacctcactcacaggcccagccgttggccatcgaccacagtgcgtcagttctttcttttttacatggactttccatcaggctggctcaggctgttcatgtgattatatcagaattccaagttcaaaaagagagcaagccccagtacatgcttttcaacttctgcctgcatcatgtttgagatctcattgacataaagaacacattaaactcggaatgattgtaattatgtcatatggcagagcctagaaaagaaaggagacactttctagtttttagaataaggtctgaattgtgtttttatccaaataatttcaattgcacatactcaagatacaattaaattcctggatgtataactgagaagacatccaatatactcatggaaggagactaaattttgataattatttgtttggagacatatataattactcaaaaatatgtttaatctattcatttacattttaataaaaatttacaaaacttatgctgacatactttcttagttaaatgatttggaccctaatttatttttctataatattgtatacttcattttcataaggattgtcatatgtttccaaaagtttatgaaaaatagtaattggggagtgaaaaccattctatagtcaaaacagttgttgattaaaatatatcccctatataaacgttttggttggtggtcagtcagtatgcttgagaacatagtataacatgaaaacctttcagtgctttatttctgatgtatacaatgtatttttgctataccaagtacagtaagagtagagttagaacaccatatattaaatagagcatcacttggccagtcaaatcaatgtttgaaagcagaacacaacttgatgtgaagaagacataaaagtcttagtacagcattatggagaaggaagacaaatgcttatttactgaaacttggaaacagattaccttattagtgaatagcatcacattatcagataactgttatattcacacaggtatattatctgtttctacttttactttttatattgttgatttatttggctttgctgggtcttagttgtcacatttgggctctttagtcacagcatgcaaaatcccctgacaagggatagaacccaggacccctaaattgggagcatagagtcttagccactggaccaccggggaagcacctgtttctacttttatattcaccatgcaactctttttgtatttaacaatgattgctttataattactgttaacttgtttcaactcattttaagcctgttaattttttctagtgagtctccaaaaattccagatctagaatgtgctttgaacttagaaagattaataaacatctttctatctggatctaaaaggataaattaggtaatgatcatttaatttacatatctctttgtcacaatattctttccaatagccatcctctgtcatattaaaatataaattggtttataaatgatgatttatacacttgcctaaagagtaatacaacttattgacatgaagactgaattgcaaacctcattaaatatcaatccatttttctcaaataggtgcagtgataattggataatatattatgatttttttctaaaatggtttatatgatatggtaactttgataatcaaggtagatgctatatcacaaaatatttatttcaactataacttggtctacagtacaatattgtttgaataattttacataaccacaggctgtgtcttttctaaataaagcacatatttgatagtacatcttcttgccagatcagatgacaagcaatattcaaatcacaaaatcctcttatataaacaggctgttactgtagtgccagattatgacttttcagttaccatatgtttctaaatgtttatttaggattttagaaacagtgtagccttttcctgaaagcaatcaaataaaataaacctttattttggtaatatttgaaagcacaaatgctagaaagtagatgaaaaatgatctttaaatctcagcttgatagaatagaattatagtattttgaccagagaaaaatgaaatgtacttgaaaaaacatttaggcacacaattaatataaaaaaataaaggtagtaagaacagtgtcaccagaagaacatttctgtttcttttatgaaagtgtcagtgtacagcaacgatactggaagcttcaaactgctttcattaaaaaaaacagttttcagagggctttcttttttctcaatgcataatataaaattgtcagagatatcttaagatctatgccatgttttctacaatgaaattaattaaaggaatagatcccagtgctcatgacagtgacctctttgaatcagggttatattcctattttgatcatatccgaagtacagaattctggaatagtataatctaactgtacttaagtttgaagcttgtttatgtacttggctttcttcttccatattgtatctagtactcagtagtttccatcattgttccttaaaaagaactccttacattttttttcttgcctaaattgtgaaacagttttatcaccattaatcactgtatcttaaagtggaaaagaaaaaatgtttaaatattcatatattatttcatatatctaatagccatagatatgggataaggaggggaatg

SEQ ID NO: 49274 - DNA, 1025 bp, Bovine  19866880894049
  misc_feature (1)..(1): n is a, c, g, or t
nttaacttctataagcaattatcagcttataatttgtaagaaagcacagtttcaaaaaagcacagtatgaccatgtagaagtattttcaagatgaccaattcaaaatattgtccttattaaagagaagaaggaatacttccattctcttacctccatctctgcctattcatgccctgacaagttcccatggggagagaagacgttaatcttattgatcagaatgtaaaatggtttaattgctccttgttaggatgaagggctccccaggtggttcagctgtaaagaagctgcctgccaatgcaggtagatgtgggttcaatacctgggtcaggaagatcccctgggaaaggaaatggaaacccactccagtatccttgctttggaaatcccatggacagaggagcctggtggattacagtccatgggttctcaaagagtcggacatgacttagtaactacacaagatggaagctccttgtgagggcagggatctttgtaggttgaatttactgatatgtgtttaaaccctagaactgtgcctggtatataacaggtgcttataaatatgtattgaacaaataaaaaggcactgacaatggcggctatgatgcatttttaactcgttctttacatccatcaggctgagcactttttgaaggtaggaactatttaattgacttttataaacatatagacgcattgtgaaatgtttaatattttgaaatgactggacatcagaaaaaaaaaattaatgagtagccccacaagctacatgaaaagggcaaatgtcttggcatttcaaatagaataaacgtaagtaaacaagctatcaaacatttaaagggagtcaaataagttttgaccttttcgatttcatccatcctttaacacaaaggcattattagacctaaactacaatgcttgtataaatgaatttcagttgaactagttatctttgggagaaaataaatatatccagccagttgatctaattatatagtagaaaataagaatttgtcacaaa

SEQ ID NO: 49275 - DNA, 3246 bp, Bovine  19866880920854
  misc_feature (1)..(1): n is a, c, g, or t
nttttccttggatctcctatctagtcctcccctggctttctctaattcaatctcatgaagcttatttctattttcctatctttccccctttatcacaagaggaaaaagtgttcttcacactcattaaaactgccttttcttcctaaattcttatttttatcatttctcattccagaactttgcttccaaatttattctcttcctgtctagcacacccttcctcttcaactatactccttttcctctgcctgcaaatattcacagggcttaaatattctgaaaaacaaaaccaaaggagcaaaagttattttaaattttatcctactatactgctttccaatctgtttcccccccccccccgtttgtacaatggacacacctcataccatcatgttaatcaattcccagaatcaaaagtgttttaactctttgttttctttaccatattgggcaagatgacaaattctcaaatttttacttataatatttctgttgggttagggaagctaaggaacaggtccagtatgggactgaaagcagaaccagaaagcccctctccaaccccaaaagatagaatatcttgactgcaaaaagtggcttcaggggactctgtgatggtctttataaggcagtgggaaatattttagtaaagtttcattatttttggtttatagttaactacatgttggtaacaagagttaatactttctattactcacttttctaaaggttaggattctttctcctttagtatcaatctgaacacactgattatcattttatagattggtggttcagttgctaaatagtgtctggctcttgtgatcccatggactgtagcccgccaggttcctctgtacacaggatatcccaggcaagaatactggagtggtttgccaattccttttccaggggatctttctgacccagggactgaacctgggtctcctgcactgccagcagattttttaccaactgagctaccagaggaagcccattattttacagataaccaatgcttatttgtaagaactcccttaacttactgcttccaagattgcaaatttacctgcatctgcttacattcttttcatttccttctttattacaatggaagatataattgtattttctcaagactaaggtcaatttttatacctggacttaaaatcgttatctccccctactcaaacagttcatcctgggcaggattttaataaactttagattgcacagtatttaatacaaacaaaaatatataatacaaacaaaaaaacaaacacagagacacctcttcccagataccacatttctatctatcatttcctttcatacaataaacttttatgaggttaatatatattcacatttcaacttagatcttttcctattcatgggttttctcattcatggcttcctttttccgatgtttcagagacttttcttcttcctatctaccaatagacagtattattgatggttctacaaggagcccacttctttcctctgacaacattccctggttaatcttgtctcttcttacatccagatgtagattctttcattcaacaaatgtatattaagtccagatacttctctaattactagtgatatgagtaaacaaactatagtaaatatagatggtgaaatgcataggaagaggggcagaaattgtcttctgtgaggaatatctgtactgaaggagcagctagggcaaaaaccctgagatgtataaacacttggtatgttcttaggcaaacaaacgaacaaaaaacacctggagtagtgtttgactctcaagaaagaaagaaggtatgagatgacgtaagagatctagacagaaggttagaccacagagaaggttttgcagaactccaggtaaggaaaaatgatgactttacttcctgaatatttctagctttatgcttgacttactttctggctcatattgccagctccttagtggctacctcatgtgagtagtgttcagataaagccacagagtcagaaactgagtacatcatcttaactcctaaatatactgctttccatcttccttacttagtacatgaaaccccaaagcattttgctgcttcagccacagacttgcaagtcttccatcatttgtttgtactccttccccacccatcttccccaacactaaatcaaccataaatactatcaaagacacttcctagatatcttggtccacttatcagtctcatttctactgcaacaacacctgagacaaaatctcttacttcaatcatttcaaaattgctcaactggtcttgctcacttcgaaccaactcaccacattgttagaatgatcctttaaaaacaaaatatgatcctataataacaaccttgtacaaaataccttaactatttgctatccatggtttaatcctgcttatgtattccttaatttcaacctaaatgtactacagttccatgaaaaagattataaataatttattaaaatattaaaaattatttaatatatattaaaataatagatatatatttcaccttttttcctagtttgaatattcttttaaaactcaatttccaaattggacagaaactcaaattagacagataattctgataacttttattctgtaccattttacaaaagtgtaacagtcaaggattaaaatattttcttgtaaagaagccagatgaagacaaacggaaattgtagatttccattttctccagaaaatatttcccaagtgaaaaaaagaaaggttaaatctacagtgaaaaacttgacagaagatagaacctcaatgaaatgaatagaaaagatatccatagggaggcaaagtaatactctatattttcaccattgacaaggtgacctgggcttttgaatacctcacaaaagctctgagttaccaatatgtaagagttatgatattaccttgtgaatatttaacaattgtaatgattgtgtcctggagtttattcctgtaaaaaagggtaagcaggggtgtatatagttaaatttctgatgcacaataatattgtaatttcaaagttgataggaaatatgtgtgtacatatatataaatgtacatacatacatatattgaatacataccaacctttatcaaaagaaactatttaaaatgaattttatctagaattttattctatctacttggttgatgttttatttaaactacatttgaatctatgaatattacttaagggggaaaattgtggaatcaatttagt

SEQ ID NO: 49276 - DNA, 1095 bp, Bovine  19866881103966
  misc_feature (1)..(1): n is a, c, g, or t
naatgagagaaaagaagatacccaaaaagtagttgatctatggcatttatggaatataactaggcagatattgtgaagtctcactttctggagaaaaaataaagattctcagttaggcaccattatagtcccttggaagaatgcctgtgttaagaagatcaaattccctgaaggttgtttcatcttatccttcgtggtcatatctgaagtagctattgaagaatatgtctttcttggctgcatataacatacaaaaaccccacctcacactcacggaaatatagatgtctaaaagtcattttaaggattgcagagtcaaagactttttaacatggacttgtggttgtttagccatatgactattttaaaaacttgcaaactatttactttcagtcagtttcaaacacaggaagcaagaactgccagactttgttcccaaatacctttcctttatttggtatcttgcttatcatcgctctctccatcttaacttaaattcggataatcttgaacctgtcaagcttgaattgtcagaacatgtccttcatttgatctttggcacaaatctgagtcactctgtgtggctgagaaatctcactgggtcttagttcttcaaagtcttttacataccatctcttctttttctaaactttccttttccctttcaattctactttaaacttgcaaattattttctcagcttacatctttcttataatactttgctaaaaccatccacaataatacatacataccgctaatatttattttccaaacacatctagaactacaagctcagtgagctttggactgtcttctaaactatcataggtgacagcttttaaatgccttttcactgtaatcaccaattaaccaacctgttttattctactattaaataaagatgcccactcctaagccagtgtcacatattctagtttttgtttatcagcatctcacttgaagggactttttttttttttatattagtcattgtaattagtactatctgctgcaataagtaatctcagtccctttgtgctattctctcttgcaaagcccagtgtgaatgttcctgattgcacagctttccta

SEQ ID NO: 49277 - DNA, 859 bp, Bovine  19866881119159
  misc_feature (1)..(1): n is a, c, g, or t
nccaagctcctctgcccatggagttttccagacaagaatactggagtgggttgccatttcctatgctaagggtatgtttcagcaattagggggtccaagagtgaatgggctggctagtaccagcaccatccagtccaggggaccagcttgagtataagatgctatgagacatcagggcaatgatgtcatccagctgtgttatggttgctccctgaagcaaagacagtgctgtttagtactatttcattctgtgaaaagtattggaaaagaaagttcaggctaaccagaaggattcaacattatctttttctctgaggggtgaatttgaactgcgtatggacaataagaaaattctcataaaatacattacatatttcatgttacccagggaaagctaaaccaaataaatctttcctcacagaaccaatttctccttcataacttgtttatatagttctaggttcatttttcctttgatttctctaagaggttttcaatgaaagtatcttcaatggaaatttaatatagggctttattttgcctggagttaagttaaatttgttgttttatttctaaaagctgaacataagatgtacacagagaaagaaaatggaacttacaaaatttattattacaaaatgcagttaaatatatttaaaaaaataatttggttgtggcatctagtagcagttatttgaaaatatagctgtaaaaaggcatgttaaactataaaatgtcagattgctatgtctcttacatatatgaaacactcctcaattatcttgttgaaaattcactcctgacaaggtggtttattccagtgttattcattagaaaagacatacatattttcagccaa

SEQ ID NO: 49278 - DNA, 1421 bp, Bovine  19866881148747
  misc_feature (1)..(1): n is a, c, g, or t
ncctaatgcacacatctcccctacactgttatcatcgaattgtatattaacatttctcaatcaaatgacactgtttagaaatattaccatggacaatcaaactaagtattggattactattttgagtaaaaatgtattttgagagatgcaaataaatgtgatatgcttataattgtgtaaaatgctggagctcattgtgaccaatttctactttcagatgtatattatttttaaaaagaaacaataacatttaaaaaataagacagctaattaaactatccttaaataattgttctattgtgggccttactgcttgaggtataataataattacacaacacacatcagcatttcttaaattatatcctcctagtgcagtaaattgaagagaaagtcatattgttttagtgatctgcagaatatataaatgttcacatataataaatttagctgcccaatataaaagttgctgatacagagtaaaactcagtgttgtagtattaaaaatcactattaagtgaggggtagcaggaagctcttctaagaaatatggggaatcctgtttaggttattctctccctggtactaagcgaccacagtgatcacaatttatcccagcctaaactggaagtctcccgcagaacattaatgcttgctttaatgtagattttggtagataacatttttctctgtgatagtttcatattcaaaattgtatatgcatggttctgtatgcatataattttatgattaagtttaaagtataatgaccataattttatacctggaaaagtcatcaatgatgctaataactttagcaaattgaatcattgctgttgctaagtcgcttcagtcatgtccgactctgtgcgaccccatggactgcagcctaccaggttcctccgtccatgggattttccaggcaagggtactggagtgggttgccattacagtaattgaatcattacaattgattattaaaagatatggtggaatacattgagtcagaacacctgggtttaaaattctatcagcttcactagagatgatctcattttcatttgctttatcactactaatctaagaagaaaatcaaataaatcctaaaaatatgatctgtagaatagatggagggtgaccattttttgcccagagctgaaaaattaaggtatgcccttagcaaacttaaaagatgtagagacaactgacagactccataaatcaaaatttcagtggatggtaaattttgtgttgcagatataagctctaactaagtgttctggttgaatatggatttgctatatgtaactacctcatgaaaacagtttattatgtctctgctgctgctgctactaagttgcttcagtcgtgtctgactactgtgcaaccccatagaggcagcccacgaggcttccctgtcc

SEQ ID NO: 49279 - DNA, 1449 bp, Bovine  19866881167419
  misc_feature (1)..(1): n is a, c, g, or t
nctttgatgctcctatgacactattctggagaaggaaatggcaagccactccagtgttcttgcctggagaatcccagggatgggggagcctggtgggctgccatctatggggtcgcacagagtcagacacgactgaggcgacttagcagcagcagcagcagcagcagcagcaagatgacaactattaatgtgtggaatagatttgtggtctcacaatactataattgccaatatttattagtaccatcatagttgctgttccattggacactaacctgaagtataataaagagagagtggtatttgaatattttcacctgtgatgtatacatatatatttacgcatttctatttactgtaatttctattttctttcttgctttgcttgtgtatgtgtgtgtttatgtgttagctttattgcttttgttaaatagaggatatgaagtatttggagctattcaattttgtgatatgaagttactaagttaataacagtgttaggctagagtaacagttagatcctaaaaggtaatggcttagcacagtagaaaattttctaactcatatgacataagtttaattacaatagctatttctttctacatttcagatcagtaaggcaagtgttccctcttggaaaatgagcctgctgaatgtctgcagtcttataaataacctgaacagccaagctgaggaaacaggagagtttcatgaggaggagctcattacaagaaggaaatttcctgctgccttagatggttttagcttggaagcaatgttgacgatataccagctccgaaaaatctgtcacagcagggcctttcaacactgggaggtaaaacaaaagaaaaatatgaatatgattatggttatactagttaactctcatttacactgattgttttaatcctgataattatcataacaggaagatttacaaatattaaggaagaataaaccatgtgttgaggttaacattccttcagatctttaaagtgttttgcaaatatttgaagtttagcaaaatatctttcctttggtctctaaagggggatctgtcttcaggcagatttgatccacaggcttttattgtggatggcgtgcttaggcaacttttggtgctggtggtggtagtggcatgctgaagaaatttaggaaactcaaaatgttttcttagaaacactaaatcctgtgtgtttgtttataaataaacacagaacacaaaaggcttcatttgtatttgaaaatatcaggtaaataaaactggaatgataagaatatatatatttccacttaccacttctacttctattttaattgagtgtgtggatggtggatttcaatcatccttagaagctgaattagattcagctaattttattggctaataaagccaaatatagaactatacagaactacaagaaggaaggatgtatattatacaccata

SEQ ID NO: 49280 - DNA, 792 bp, Bovine  19866881215162
  misc_feature (1)..(1): n is a, c, g, or t
ntagtttttacctataacccttttgtaatgttggaattaaaaaaatacatgtacctttaaaattgaaagttatagcttaatttaattcagtttaatatacgttaactgatatggacatgagtctaggccctagaaatatagtgaaagagcttcttttgaatcgtttgacctccagtaacacatgttctacttggagagacaaggagaaaatcttttaatcaatgaagaaagggaggagaactgagatcctgttattaaaacaaaataagggggaaagaagtacaggaccgtgttgtacatctggatctcccactgttttaactgcacctcacctgaagcatttatactttatttttttcactttgtaagagattaagtaacattttccccactgctttctacataagggtgttctaactattaataaaattatttttatggaaattcttgaacttcatttgagaaaggtctgaaataaatacaaataggtaataatattaatgtccattaaaaaatacttctatgaaacatgctcaaatgtggaaggaaggaaaagaaggagagagggaagaggaaaaggaaagaaaagggatataagccttcttatattaacttctttagacttttacctgctctctgaaatttctgtgtaatttggcattttatagcaaatgtagtcatgttccttccctcacaggcttccaagaaagcagttttcatgttttaaaggccggttttattgagacatacagaaagtgatgattttgggacaattaccttgcagtcattcca

SEQ ID NO: 49281 - DNA, 847 bp, Bovine  19866881249747
  misc_feature (1)..(1): n is a, c, g, or t
nccctctgtgtatgagggccatttcaaaccaacagttacattgatatagaagcatcattttggggaaaaattataagtaaagaaaactaaggatgtgaattgattttcccaaagtgataggcaactcaagattaatagacccaggcctttagccatgtcatgtagatgcttattgaagaatgactgtatgcctaacaccgtactttgcatgcacacttgagggaaactttccatcaagtatgaatcactctgctgagtcagcatgctgttgtggtttaagtatcattctaaatgcaaaataggtaccaatctgtgtctggtaaacagtagtgtaagcataagtcccagtttgtgctgacagttcttggataataagtcagaattcttgacaaatacatacatcagtccagagttcttggccgacaccagttgtcccctctacttaatgccctctccttctctcttcatattagtagcttgagttttgtctcccccaatttacttctagttcgttcctaaacccaagctaatttgcattcttccctcacttctccactaaatctgctattcccaaggtcaccaatgacctcctttttgctaaaactgatggacacttgtcagtttattattttcccctcacattaactagtactatactcacactattgcctcctcccacctgcatgaaatatttctttctcttaactccttttgtctaacttttctcttagatttttttttgtctcattctttgagctatttatttccttctgcctttcctaagtgttgatattttttaaggaccattccttaattcttttctgcttaaaaaaggctcctctcacat

SEQ ID NO: 49282 - DNA, 1106 bp, Bovine  19866881560054
  misc_feature (1)..(1): n is a, c, g, or t
nattgtatttagcatcagaactcattttttattttttctaacatacaagaaaacttacattaagcatgagaaataagaacttaaaatatcatgtattatagaccctcccactgataaatcatatcacagctatacttctattttcctttctataattgctcataaaataagaaggggggctcagcagtgcttgaggagagatataaaaattgaacattaattttattcagatgagatgatttgtatgcaagctgatcaggctacaagtttatctcattacaagctcaaggctgtaagcatttcatcatttcttgggtgccattaactttaataatatgactgcctgcattgtgtgttaaaatgtgtggctgttctgcgattctgtatgatgatgaagtgtttgtgaatatttattacttcagtctttagtgctctcaactttatactaaatagcaaagttaattgcctgtactgctctaattgcattgtttagagaataccatccttttcctcttcagttgcagagatattagtaatatgcagatttttgaagtgctataatttgcaccccaaaatgaagcacagtaggtccacttagtctccggcagagtcaattaactccttgcccttttctctggtaatgcaacttctgctgatttgaagcagttactgggatgctgatttgcatatacaatttgttttaagaaattttgataagagcacaaattttttagttccaaaaaaggtgtgtttgcaagaagcctttaaaaaacatactgtttaattagcattcactctatcattctcttccaaattggtagttcatatgaaatgcttcaaaatgcattttattgtcattatttactgttttttttttttttgccttggttcttcaaatgtttctcttccttttttgctctcactggaacccagtaactattctgtttagaaataaaactctgaaatccagagatatgagatttagcctttaattttgtttcttaagtcttgtcatacagacaccactttagttttctatttgtgcttctacatagtccaaataaagagtaccccacctatatgttacaatccatgcttctttctcc

SEQ ID NO: 49283 - DNA, 1282 bp, Bovine  19866881661497
  misc_feature (1)..(1): n is a, c, g, or t
nttcttgattctgaaacattaccagagacagtggctctccatttatattttggcatttttatgaaaaagaagacactttatggagccaaatgtattaatccatttagtaattcatccatgaatccaagcatccgtccatccattcagtatcattccaaaaatatgtgttgtaggcactggttaagcactagagaaacatttgcttttcacaatttggtcttaagggcagatatctcaggaattcatctattttcaaggataatgtataaatttgttgttcatatttcctttacatatttacttatttatactgtaagaacttttatctgttatattgtgaagcttggactccaatatcaaagtcccaaatgtaaaacataaattgcatgcgtagaagtatgtgaatattttctgacgttggaacttcatttctgtcaaatatctctttagttcttggaaatactttggttccacagaaataggaaatttcttcattctcccgatgtaaactgcttcatttgcatgaccatttgaatatgaatatatatatatatggttttctttgtacaatttagtaagtctggaccattttaaaagatggaatggcttcagtaggtggtgaagagcctgttaaaaatatttttattttatacaggtgtaacacaggtggtacaccctttcctctctgccccatagggtgtagctctaactaccctctagggaagagaaggttgggtgaacagccttactatttctccagctcagtaattacctacaggtacattctcttcattgcccaggaattcttaagggaaatgaaggctagtgcatacaaaatgcacttgcttcacggttcttctgtgagtcatttcagcccaaatcttatatgtatttatagctgattgtttcctgtcttttttattttaattgaaggattcatctcactctcatgaaattgttcattttttgatggagaagcctcagatgtgcagccttgacttaattactttgttcttaaagatgcaagttttcccatatagaatctcagagatttcctacaaagatacacagtcatccacatttacagattaacaactggctttgttatgctcagaaaatcctgtttcataataaagctacatcaaaatagttaaaaatacaagatgaagatgtctaaatcgcttctgattttttacctaattttaagaaattaggcagctgggcgggtaattcacacccagagggttacttcaatccattgtaccaccccatggagagggca

SEQ ID NO: 49284 - DNA, 735 bp, Bovine  19866881767162
  misc_feature (1)..(1): n is a, c, g, or t
nctgccaggttcctctgtccatggaattctccattcaagaatactgtagtgtgagccattcccttctccaggggatcttcctgacccagggatggaacctgggtctcttgcatagcaaggcagattctttaccgcctgaaccaccagggaagcccaaataatgcatgtgatattaaattaagctaagctaagatagatgaactgttgagtacagattagttttgattttcttgaacagaacaaccttatcaacttcttcaaacaactttagtaccatagaatccaagtgaccatacatctaaaagtctgtgagccccttgacatgttaaactacacttcagccaatctgcaatctcatgatccaagactttcctcttaagaggaatttttgaaattttgtagcagttcaattttctcacattcttctttacagagaatggtgttaactcttaggcagagattgattttcaagtccacttatatattctgccctgacatgtttggaggcaaacaactgaccccaatgttatttttcaccttaatataataaaatgactccagcaagtctgggtatataatatggatggaggatagctaagcattcttatgtaaatacaggttttgcttctcatttagtccctgaaaagtcacatttggaatataccatttgaaactctgccaaggaattcttacataattcaataaacttttttatgtcattatttggtgcaaaac

SEQ ID NO: 49285 - DNA, 1477 bp, Bovine  19866881906198
  misc_feature (1)..(1): n is a, c, g, or t
nagcctgtctttgaattttgattttgtcacttaccatctgaatgaatttttaaaatttcctgagtctgtctgtgcctcagtttccttatctatcatggggagagatgattaataaatgaatttagcacaaaaagttgtgtaagaatttggtaagtttacaaaaaagtaaagtaataacaattgtacctaagaatttacctaagtaaatgttaaagttatttctttaaaaagcacttagaaatgaaaatagtgcactagcgttttttctaacagtttgtggcaaaacaaaatttctgtatccaaatatgtgtttctgtgataagctgccaacttggtctggcaaatccgttagcgatgcatgcatgtgtgcatgctaagtcgcttcagttgtgtcgcactctatgcaactctgtggactgtatcctgccaggctcccctgtccatgagattctctaggcaagaatactggagtgagttgacatgccctcctccaggggatcttccctaatccagggattgaacctggtgtctcataggtctcctgcattggcaggtaggttctttaccactagcacctcctgggaagcccccctttagttgtatatgatcataaagttttaaagaagcctatttttgtgatcctgatgtaaaaaccaaaggaaacgtgtgtaactgaaatgggtttgttgagtgtcagtagaaactctcccacctattgcaagataaatgtaaagagtctcagtataaaatgttctttggaaattttgaaaagaagtctttgagaaaggtgtttttcctacatatttttcagttcaccctagggatacagtatatgatatccattggttccatagtaactgaatttaagtgatttttaaagtgaccagatatgacccatacaagacataagaatttcagctgttaaaactgaggtgaagcatggttttagctgaattggaaactgaattactgcttactgtcaggcaaaacagttatttttaatgcgttggggttaaagtcattgggaagacaagaatcacagggttatgtcatatcacagtgagctgtctcgattgtagcaagtgaacagttccattttttactatcttttatatttttaaagcaaaatacatacactaaaaagaataatcctgatatttaaaatattaagctgtatgcaggtatcaaatttgtaggcagcactgtaaattattctaatagcatgggagaacaaagggttccaatgatgaaccttgagaaaaagtggatggagtacatgcaaatccaggtccctgtacttacagacatgcatactatttaaaagcgcctcttcagtatgtttagcctgctggatttcattgcaggcatttaattaaaacataatttttttgtttaaatttcaaattatctccattacagcagtttttccccttgcttggggcaaatatacattagtacagtgcacaaaatacatttt

SEQ ID NO: 49286 - DNA, 2254 bp, Bovine  19866880654494
  misc_feature (1)..(1): n is a, c, g, or t
ngctttgtttgtagtgatgcttcctaaggacttcaagtaaaattaagagataccaaggaaacatttcatgcaaagatgggcacaataagggacagaaacggcatgaacctaacaggagaagatattaagaagaggtggcaacaatacacggaagaactgtacaaaaaagatcttcgtgacccagataaccacgatggtgtgatcactcacctagagccagacgtcctggagtccaaagccagcaggtggaccttaggaagcatcagcaccaggctgttcctaaaagctaagcccaccctgtgccccgggggcccgcgtgttagtttcctgtgtgcacagtcaccacagatgcaatgacttcaggcaacaaccatctcgatctctcagcttcctccagtcaggtgctggcctggctcagcttattctctgccagagggcttcccaggcggatcaaggtgccagccaggctggggtcctcctctgggttcaccactgctggctgctgtggacggaggccctggctcctttctggctgtccatgggggcctccctcatggccccactttctcacagcccaggaacacaccctcctgctgctgtgaccaggtctgatcagagaagtgattgccccaccacccctctgccatgtaatacaaccccatcaagggagcagcttccctgttgaaccacaggctctgcccattttcaagggaaggagatcacctgggctgtgtgcccctggggacagccgtcccgagacgtctcagaattctgcccgctgtagcctgcaggtgtctcggcattcctgagggcttccgatcaacagccctgaactcttcattaattatgaattttgcctagcaaccattgccaagcaacaactcttcagaaagaaatgttcaaagaatttgttggttgctgcgtggtggagatgaggaaatgagtgtcagcgggtgctgggctggccagcatgtgggcagccctctggccaggctgggcaagcttgagaaagtcccattaccccctctggatgtcaggttctcacctgtcaaactgggattacatctaaactctctgacttgaaagatgagcagatccaaggctgcaggtgggagagatcctgggggggggttccccaagtgcatcaggagaatgactgatcccagcagacatgttcttccttccacactcactcagcgcctgctttgtgcagggcccagggacccctcatcttctcattcaccccctccctcagggactcacaaccaagcacctgctgtgtgtccagcattgggacagtcgcattcaggagatgggaaagaatgaacaaaataaacgaggagttatacagcatgtcagctagtgatggttcagggacgataaataaacctggaagtgggcagagggcgtgatcagggggacgcgggctgtaattttaaacagagtgctaagggaaggtctcgctggaagaggaatctctgagtaaagaccagacaaaggtgagggagcaaagaaggtagtgtgagtgcctggggccagtgtcaggtggggctccagcaggtacagaggccctgaggcacagcggtcctgcctgagtggccggaggcaagctgggaggcagacccgtccggaacacgctgtgacaaggcgtctgaagcagcagccccggcaaaccccacaggagtgaggagggggcaggtgcacctcccctttggggcagcctcccctcccaccacaacaaccctgaggaggattctgccaaaggacggcaggccgggaaggaacgttgttccctgagagcagaagagcacccagaaacagccccacacgtccgcagcaactccgtttataaccaggcgatgctgcaggtcagcaggacaggacggtatttaagtgtagacacattgtacacacacgttgatgtcatatcacgtaagttcataacagaaagcaaacgagactgcagcgtgcatttgctatcatacagcttgagaatacacaggagaagaatgttgtgaggcttcctcatgttggtcactcactggtgacacccacccagccctctggtcctcctccagatgaagcccgcagctgccactggccactgagggtggcggcctaggacacgtcacgcctgcgggcacacttgctcccgcctcaccaggagggccagtgtgtgtgctcctacagcgccgccagcaccagcagcgggaagggagcccggacggcagggcgtcgcagagcaggaggcggg

SEQ ID NO: 49287 - DNA, 1425 bp, Bovine  19866880671932
  misc_feature (1)..(1): n is a, c, g, or t
ncctctcccggtggccccgcgtctgggggcttctccatcctgctgtacgggtgatggggggccgacgctcccccagtcactcagccacaggccggagcccctgcctgccttgctcctgcagcagcctgagtctgaccgcaaggcccgtgtgtcctcccgcggacgcttgttactttgttccgccccttcccggtaccccaggctgctttccttagattcaagtgtatcttgtctgtcctgtctctctctggacgcgttctctgtttctggtagaacttgcttctgagtctgaaacatctgtcttccttagtggccacttgttgggcttagggcctactattgcctaaggtgcttgtaagcattaaaatttagatgatgcttgtgtgctgtgcttaatcagtcatgtccgactctttgtagcccgccagactcctctgtccatggggattctccaggcaagaatgctggagtgggttgccctgcccttctccaggtgattttcccaactcagggactgaacccaggtctcccttactgcaggcagattctttaccatctgagcccccagggaagcccagataacacttacatgactaaacatttccacggactctgtcaagtcctatcacagtgcactccaagcacagagcgggaaaaagctcctgcagttccctctttctcgcatcattgaatatccgtctggaaaagagaatgtggaggccctttcacccgccttcctcacttttcagatgagactgaggtctgaagacttacagcaagttagtgatacttctgtagttagtatacatcataaaaccagcaaatagggctgcttcctgttcgtaatgaatggaagtgagagagacgggaaaaagaagatcccctttattttactgttttttgttttgtaaattaggatagagggtccagggttccagtctgggatgaatttgacctgtgaccacctcacttggtcttaaacaccctgtgttgctgaaacgcagatcgagttcttgatgcagtttgggaaagtgtgcggcctgggataggagcctggggagcagggtgtgtgcagggtccaggaaagcggggccccttctgacccgcagccttgggtgtcaggagtgtccgcgaagcccccgccctcgccctgggcccttgatcctcgcaggcaggtctccaccctgcgccctcttccccgtaacccccagctctcctgtctgcgcaggagcgtccctgggtgtgcgtgcagctgggtccgaggagcccggctcagagggcctcccctccacctccctgctggacctcctgctgcccacgggcctggagccgctggactcggaggagccgagcgaggccgtgggcctgggcgctggcctgggagcccccggctcaggcttccccagcgaggagagcgaagagtcc

SEQ ID NO: 49288 - DNA, 1006 bp, Bovine  19866880769117
  misc_feature (1)..(1): n is a, c, g, or t
ntctgtgaggtgaagccctttatccacctactgagagagacattacttcagtgttttagaagagcaatagactctcttaagaatccttggaattttaccctccacgaaaccaccagaggaccaaacgtgctgtgcctctccacaacctgagagctgcctctccgaggctaagggaggtgagggagaaggagtctcggccacacagtcctcagtcctgccaccaggaacctgtgtctgtcctgctgacttcttgcctctggggatgaatctttagcccgtgaagctctccatgcagagcgctgtggtctgaggaatctgctagggtctatcgtgaccattcccctgactgagggggccccattctcccagcctctcccctccatctgtcacctgcggagaaaccacagttcgtcctggtctatctttcccaacactctgataggaataaaaagtgtgtacgagactgccgctgcttcagtcgtgtcggactctacgcgaccccatggatggtagcctgccaggctcctctgtccatagaatttttcaggcaagagtgccatttccttctccaggggatctttccaacccagggactggatccacatctcctgcatttcctgccttgcagacaaattcttttaccactgagccactaagagattctgatcatgtttctgaaaagctgtgtttgaaaaggaggaatctggcttttgatttcttctgcagtaaacagtttctttttcttgaagctatttttctgcacaatggttatttttcctttataaagaccttgatattttcaaaagcttggcagtgggtaattacgagatgttacttattttcaaacttgcccaccaaaatactagctgagacctacccattccctgtataactacttttgcacttaataattaatctgcctaagactaccggattttaacttccagatacacactgatctttttttttcctctagcacctgcaatcttctgttacctccatcact

SEQ ID NO: 49289 - DNA, 1570 bp, Bovine  19866881014550
  misc_feature (1)..(1): n is a, c, g, or t
naacggtacggaggggaccacgatggaccgcgcacaggtctacccaccgggggtggcactggagacgcccggttaggatcccaccttcaccatctccggacgaccctggcgggctcctctgagctgtagtgatgcatgttcaaagtgggaacaaggggcttccctggggtccagtgggtaggacgccacgctcccgacacgggggcctgggtgccatccctggtcagggaaccagagcccacgggtcacaaccaagagtctgcacggagcagcgaagggcccgccctccgcaacggagccccggcagccacacgataaacgaaaggagcaacggagccccggcagccacatgataaacgaaaggaagtatttttacaagtgggaatgagagtgttatcataacggccacctcccagggctctgggaggacttgaggagaaagggaaaaagtgaaagtcgctcagttgtgtccgactctttacgaccccatggagtgtatagtctatggaattctccaggccagaacactggagtgggtagcctttcacttctccagaggatctccccaacccagggatcgaacccagggttcgagctgagccaccaggttaccagctgagccaccagggaagcccccccgtcagaggccagctcaacctggggagcaaagtgtgaaccgtctcagaaaggaacctcttgggacttgtgttagccatagagacacgttgccagccgtcactacacacacctgactggtgccgacccccccacctgcagcccgggcaacccctcggtggaggggacccacgaaaagccaaaagacctcctatggcctcacacaccaccgacagcggggtctttggggagctgggagccctggaccaatgcatgtgactgtcttcctggagcctggcagtttggggacctgcgggtcttgggagccctgctcctccgctcagagacccagcagggcaggtgagcgtggggccgggacccagacagccgaacccagggacagcgaagggggggtgtcctgcccagccgcgcaaggccgggttcccgcccccaggcagccgcccgccctgctcctctgggcactgggcacggggagctgacgccaccgctggtctcgcagcccctgcctcgcgcgagctgttcactgggcttccctgccctcagcctcctccgtgctcccctggggatcttgacggtagataaagtgacaagtctttgagcttaattaagatacattgtcccaccaattgggaagcgggaaatggctgggctgttttacaaatagaaacaattcttgttcattatcccttaattgaggcaacaaagggccctggaaaacatccatcagaagcacattcatgttcgtcatcacagaggattggtttaggaccacacaaaggcagcagcgagcgttccaatcaggagttacacagacaaagggaaacagaggccccgaacacaaacacggcagaattagcccaattacgcggttgatgctgcgggaacaagtttccggctgcgggccagctctcctctcagccccttcctgcccctc

SEQ ID NO: 49290 - DNA, 981 bp, Bovine  19866881119645
  misc_feature (1)..(1): n is a, c, g, or t
nttaaacaaacaaagaaaagacatgtaactgtaatagcaagaagaatgaaataagtatagtgatactaaacaaatgaacataaagtgataatatagagacatagaaactcaatataattctctatattagggtctattttacaaaagatttggcatttgagcagggcataaatagaatgttgtctgtgatatagtaatgaaattattttgtacctgggacagaattattattatttatttttatgtacaaagttttcatttttaatatctggttaaaatatgtattttgtaagcaaacccattacaggccaacaaaaaggaataaaagcaagaagaataaaaagcctacaattaccccttactgagcataaaggtcaggcctgcttctttccttaaaggcagtgtctttttgccctaaagtatcagcttaggtctctgctcctaagcaccagaattgcatatgaacagagaaaccagccctgaaatgtgtgtctttgcatagcccattggctcatggactccaagtgcaaagggactcctttgaagcaccgtctgcacaggcccaagcagactcgtggtgaaatgttttctcttcctcctcccaggaaatggtttacattactgacagtgccaatggacccaaggtcctgcttggttgcacaatttgtaataacaaaggcacagagaaatccaactggatggcaagttggttaaagggttgctttccaatgaaactggaagactgtgttgcatgtaggatagaccaggatggagaagcaaccccagggatctaagtttcagaccgcttttatcataatttgctccaggtcagtgtcacttcagagtatatgcagaagaggctatagaaacagattgactgggattttagattcccatactatattatcttgaataagggaaaggtcttccaccttagtttcacagtttcttacggtttttctaaatgagacccgctctttt

SEQ ID NO: 49291 - DNA, 2012 bp, Bovine  19866881250437
  misc_feature (1)..(1): n is a, c, g, or t
natacgctgatggaaggtaaagatattgcccaagataggaaaaaaaaaaaaaagctggaaagtggtggaagtgtatgttacaggctggaagactcaccaaaatatctatatactccactatgtttcactacctactttctgcatgcttgctaagtctcttggctaagttgctaggtcgcttgtgtcctactctttgcaaccctatggactgtagcccacagagcagggctcctctgtccatgggattctccaggcaagaatactggagtgggttgccatgccctcctccagcagatcttcccgactcagggattgaacacgcatctcttatgtctcctgctttgcaggaggattctttaccactagcaccacctaagaaacctgcctacaccgtagttaggttatataacgaattctggtctgtggcccttggaaggctgtgacgtatggtcacctcctgtctatgttactcacaatcagttgtgaattattttttctctatctttgtccatcttggagtccctggaagcctagtgttgaggtgcagccacaaatagaacctggaaaaatccatgatctattgctgggaagtgagctgccctggaaagtatctcaacttgcagagggtttgtgagaagggataataaattttatgtgtagagtgactgagattcttgtggttgatttttattgccaaactcataccgggtgggattcgaatctagccaatctattttactagaagtattacacttttctcaccacagtatgttggcataaaacaaagtggaaggctctgaggtagaatgagtctcagctttgtcatctcaaaaaatggggaaacatcttacaggagtgttataaaagctaaatgaagtaactgttttaaatgtaggttttatttttattcatatatggtagggccagcagatcaggagaggactgccgttggaaagatagtttgttacttacagttctaaagaaaatcaggggaaccacaccatgaaggctatagggagaagcaccaggttggtcaggcagcagagggagagagggaaaaatgtgggtgagagcctttactgttgtttcagtcatgaagacagggcaggggagagtaagcaggctttagactggctattcatcaggctctggggtatgggaactgtctttagttgtactctcctggggtgattagggcagtgcaatggcagactggcaaaggaggtggttgggtcaggggctctcagttgattgatttgcatatgaaagatgaatcatttatgatctctaggaatttgatagccctagaaggggcttcaggtgtcaaagtattgggatagaaaaacatgattaataaaatcacataagaaaatacctaagtgagtttctgggcattgggatagaaaaacatgattaataaaatcacataagaaaatacctaagtgagtttctggcccagagtagcagtgtgaagatgaattcaaaaggaggtcgaaggggagcaagtcagagatttaggagaacaggtagaaggcatttatataaattcttcaaaaatgtgttaatcatgtcacttctctttttttaataccataaattcatactcttcttgttttcggcacttgaagctccacatttgttagcgtcgatcctattttttaagtcttataagtgacatttcttctgagacaaattcccttagtcccacccatcccatcctcatcctgtgaccttttatccacagtaatacataaatgaggcagcttgggccataggtgattcatagagaggacctcgaggtgggcagtcagcagtcttcatgcccagaagctggggtgatgggagccagagggcaaagggactgccatagcactgactgcatacatagttcccagaacttaggcagttctaataagcatcttcaattctatctctaggatttgtaaatgttgccctgcagattgctcaaagaaacataattttttgatgcaagaagctagatgtgcctagga

SEQ ID NO: 49292 - DNA, 1615 bp, Bovine  19866881322368
  misc_feature (1)..(1): n is a, c, g, or t
nacaccccccagcggtagctgagcacgggctgcagtctgtgctctccacagaatggggtgcagcactgcagggtcaaagcagacacacacttagaacagagggcgggagacctgtgagatggaatatacattatttagcgagacacgaacccatgcaggcagggaacaaggatgtgccgggaaaagagaagcgcagaactcagggcagtggtttctgctgaggctggggcaggagggtgggggagagactgggggcttgtggtgaggcccgctgctttaaatcacacacacatgtacacatgcacgcacacgcacacgtgtgcacactcactcatgtgcgcgcacacgtgcacacacacacgtgcatgcacacactgcacacgtgcacacacacgagcacacacacatgtgtgcacacacggtagcacacaggcagaatgctgacaaagcgtgtgttatccaccagggttcatcattttactttcaatatgttttgtgtgcttgccacatttatgatctaaaacattaagtccactgtgagtgtgcatgggacccgggggctgaagtgtcaggacactgggatgagatatccgagagaggacgcctgcacctcgtgtgctggcaggtccaggactgagcgcgtcctgcctcccaagggcgctgcagtgtcactggacgaaaggcagctgggggccgtacgctgaagcagcccatcaacactgggcgttcctagctgcaggacttctcagagccttcaacaagccaacatagaagtgactctccaagaactggacccacttctgcagaacagtgtggaaaacaccagtccaccaacaaggtgtttgcacatctgctggacacgcagcctcccgtttgctggattcctgcatcaaagcccacggcggtcaggtttctgtctggccgcttcacatcactgacctcacccctgctgagacatgacctgcagactgggctccctgacagcatgaggcagtgtatccagacccacagccctacgtggaggcttcaggggatgagagtccttatgctggacgcctgccaggcctctggaggctgactgatgcccaggccccagaccccactcagagtgggctaaccccacccaggcaggcccacagagctcacctaactccatgtggggacacaacccccgtccaggtcagcccccagacccccagaatcaggtggtcagaagagcagcccgtgtgcgcctttcctggacacacccaggtctggacagatgtcactgagccggctgcgtggctgagggagagatttggtcttccctggcggactgacgtcctcggggaattaagtgcaagatgcgcttaataaagccattatcctgccacccagctgtgccagatgggaagatgacagtcagaggagggggattacaccgggaggcctccagagcagatagagacgcagccacttaattgccagactgcagactcgccaaagccccacacagaacggggcctgggcctgcagaaggggggctgcagagcataggactcatcaaatggggcggggatagaaaatgaggaacccggcaggtccccctgacactccctgcccaacacagatcgat

SEQ ID NO: 49293 - DNA, 761 bp, Bovine  19866881385777
  misc_feature (1)..(1): n is a, c, g, or t
nacgctgcctcggctgctggccacgcgcgccccacgaaggatgataaaatgatggctgttatcctgggacgcgagctgggggcgaggggcttgcgtgtggtcacacagcacaccacgctgggtggacaggcctgagggcgacgtggtgcagagtcgacaggtactcctgacgccacgggggtggcgtgggcaggacctgggtccccccagcctgacggtgtcaggaggcaggctggtggcaccatccatggggtcagagtgtagccctggccagtgggcaatgcccaaagagaggagaccctggctcacgccccccacccctgtgaggacacgcgctcccagcctccaggcccgtcagaggcacacacctgccctgcaagctgcccagtctgtggcatctctgtgacatcagggatggctcagggctcacaagtagaggaaaagcagctgggggcgcctggatccagccgtgcctgacgtctgatctgcacttctcagctttatgaaccagtcagctccttttcctcactaacgccagtctgtgtgagcttctactaagtgcaaccaaaaaaaaaaggaaagagcaattacacctgtaatgagatggaaaatcttttcatcccagaattcctcttggggacagcgctgtgtctgtttggaagaaatatgtttaacagcttgacgcctgaagcgaagagtccaggggacctgagtgtggggagacagagggagaggagctggtgtggactctccgggggtgt

SEQ ID NO: 49294 - DNA, 790 bp, Bovine  19866880286791
  misc_feature (1)..(1): n is a, c, g, or t
naaaaatggttttatattttaaatggttggaaaaaatcaaaagaagaatatttcatgacaagtccaaattgtacaaaatacaaatttcagggcctgcccatggagtttaattagaacatgggcaagctcatttgtttccatcttgtctggaaaagtttcgactgagcctggacagcccacagaacctcaacaattcactctctgtcccctttggcagcctctgagtctgaaagtaggaaaacagagaaaagtaaagcagcaagacggtcaatacactactgggtaacaccagtattacaagtcaccaacattatcaccatgataaccttgaagtctactttctgaaaaacttcacataaggtgaaaatgtccaacagacagttggcaatagaggactggagagaggaatgaggtcagagctcgccttccattggttcccttagggtccagctctgtcccctgccctgcctctgaaggtaccacggatcccagtggcctgggctgggccgaggccccgccccgccgcaggccccgcccctctgcaggccccgccccgccgcgggccggctctcagtcgatgagccccactcttcctcttcagcttcagggagccgtcttggttgcctcctgtgtccagatgctggtgggcttctcaggcctcattggcttcctcatgcgcttcatcggccccttgaccattgctcccacaatctccctgatggccctgcctctcttcgattccgcgggtgacaacgccgggatccactgggggattgctgccacgtaagta

SEQ ID NO: 49295 - DNA, 1246 bp, Bovine  19866880565031
  misc_feature (1)..(1): n is a, c, g, or t
ntgaatgttctgtcctttcctcactgataggcaatcccagacttgccctatcaggcttatataaaggatttgtttcattgtgtgtgtgtgatatggggtcagaggtgaaggtgagggggcacccaagaattctgtggaatcacccaggctattctcaacccctttccccccatgtagtttaattttgacttgaaaatgctacaaaaaagccatttggggattttgattcgaattgtgttgattctctaagatgtgttcagtgacaggatctttacagtgtagagtgtagggagggttcctttctcccacaccctctccagcatttatgatgtgtgctgctgctgctgctaagtcgcttcagtcgtgtcggactctgtgcgaccccatagacggcagcccaccaggctccccatccctgggattctccaggcaagaacactggagtaggttgccatttccttctccagtgcatgaaagtgaaaagtgaaagtaaagtcgctcagtcatatccgactcctagcaaccccatggactgcagcctaccaggcctctccatccatgggattttccaggcaagagtactggagtgaattgccattgccttctctgttatgatgtgtagtctttgtgataggagcatttcagactggcgtgaggtgattacctcgttgtggttttgatttgcgtttctctgataattagccacgttaagcaccttttcatgtacctgttggccacccgtatgtcttcttggaaacctctgtcttttacctgtgcaaccattgatgttaaaagtgattattgatgatatacctggattagtgcctaccacattcattactgttttctattgttgtccttgatctgccttcctgtttatcttctactctttttctaccttttgtggttttaattgaccatttattaaggttctattttctttcctttcttggcatatcagttatacttcttttttatttttttgagtggttggtttgtcttagatttgcagtatacatgtgtaactaatccattttgaaatataccataccattcatgaatattgtaggtatcttataataacaaaataaccctaattccttcctccctgtatctttgttgtcattaatttcacttatatataagcatacacaagcatatacatatatacacacatacacacacacacgcacacacacacacatacacacacatagggcaggagggaagcacacataactaagta

SEQ ID NO: 49296 - DNA, 1306 bp, Bovine  19866880579399
  misc_feature (1)..(1): n is a, c, g, or t
nagcacagcaaaggcggggaggtgccacaggctcccccaacgaacaagcacagatttctcattgtaatcttgttacactgctttgattgttgtgccatgtgaatatattaaccattcaagacaaaacaatatatatatatatgattttattaagatgcacacttatacacatacatacataatcccttgtacagcaatattcaaaacaaacaagtggtccagatgtgctacagagcaaaggctttggagctgagctgcttggagttgactacagcccttccacttagcaacaatgtggtcttgagtaaattccttaacctttccaaacctcattgtactaatctgtataaaagggattcaatctccacctctggattatgggacacattaataagatgattagtgtaaaggcctttgcccttcacaagcatccagtgaattattgggtcactacttcctcacctgtctctgtggtcctttgcttatttcaagtgtatcactacacatatcttttcctatctgtctctgtcaccctcattcccttcagttctttaaaataaaactgaagcatactttgtgtcatttattatgtgtagttaatagactgctctttttcctgctcttaattttaataagctaacaagaacgttctgatttctagaagcaaacaagctggctgcattaaattgctttttacttctttggatttccaattgatttcaggagcgcaggtcactgacttttaagagcaaaactgatcactactagctctggtgcagagaccaaggacacccacccactcacacacacacacacacacaagatgtgcactggtaagaatgggcctttcctattaagcactctgcaaactacaatggtggatgaagaggcccggagagattgaaatgtttctgttgagtttcatttctttgaatatttctgcagcaactcttaacagaagtcagtaaatctcagtttaaccgccactattgaaagggaaggacacaagcaaaggggcaaaagggttttggcggcttccgaagtgtccattatagacggcctgagagacatgacgaatttgttttctagtttgcagacgcacgcacaacttcatcaccctctctctctccatcatccagggctgctttctaaagatagacagacatttcctgcaggacactccttcttcactcattaacggtgatcagtaaaccctgtggcgttcattaaaatgtttctctcctgctcagaaacaacattttttttttctttaaaggcaagtttagctgctgcgaggtcaaagaaa

SEQ ID NO: 49297 - DNA, 1250 bp, Bovine  19866880619996
  misc_feature (1)..(1): n is a, c, g, or t
nctacttacggggccccagaacacttgtgatgagaagcagcagctcacaattgtatcaaaaataagccttgttctttggaatctcagcatcactcgaagcactgaagctttgtcgattccatgccttgagacctcttcttcccaaagaagacgaagccttgaaaagaagaaaatggaagcaaatgaaatctctttggttgtatcacccaactcctccagttcttgctggtctaggaacttggttacagaaattgtcaaagataacacaaagagagagaacagtacagggcatttagattgcatgcatgccccagctccaagaattaccaacatttgacatttttgtttaatctctcctccccttccattatttttctttttgcaagaatatttcaagcaaatcccaaagatattgtttcatctataaatgcttcagtatgcatctcttccagataaagccctaaaaagccacagagtaaccataaaaatggttatgaattaatgcctattcattattaactattaataataggcatatattaatagcatagtaagaatggcatttaattcaactttctctaattatttcaaaaatatgttcttacaagttagtttgcctaaatcaagatccaaacaggtcccactcattggagttaaagacaaatctgacagacctcttgcatctcattttatctgtaataatttccaatcctctgcattttctgccatttactttataaagaatctgaatgatttatcctgttgagttttccacattctggatttgactgattgcacccctgtggggctcatataagtttctatgccatgtatttcctattaagctgttagctagatctgctgctaagtcacttcagttgtgtccgactctgtgcgaccccatagacggcagcccaccaggctcccccgtccctgggattctccaggcaagaacaccggagagggctgccatttccttctccagtgcaagaaagtgaaaagtgaaagtgaagttgctcagtcgtgtccgactcttagcgaccccatgaactgcagcctaccaggctcctccatccatgggattttccaggcaagagtactggagtggggtgagaggcataataaaattcagaattcaagtcagctggcaaaaatacttaatagatgatatagtatatgttccttttatcacatcagaaagacgtacaaagtgtgctatcccacttttgggatatgttaagcctggatca

SEQ ID NO: 49298 - DNA, 1100 bp, Bovine  19866880649553
  misc_feature (1)..(1): n is a, c, g, or t
ncatagcatcatagcttctttctttatactttacttctccccactttaaatcaacagaaagttttaaatatgttaagattttataatgacattcaaggaatttttataacatcaccacagttacaccaccatcgtgcaaaaggcaaggggagctttatcaacagccccactgaatatcacagttaccgaaagtttgcctggagcttgatctgtcttaactccaggctataccctggaactctttttttttttttaagtcattcagtcagtgctcagattttaactaatcctgtgttctactaaaaacagtatttcagctactgattggttaacataatcagccatgttaaatttccagaatttgataattacactctgtaagagaatacgtatccttattcttaagaacaaggtcatgatgtctgcagtttattctgacatgtttagcaatatttgtgtgttgtgtgtgtgtgtgtagagttggggagagagaaagcagatgtggcaaagtgttaaccgatgatgaatttagggggagtttattaggggaaggagtttctttatactactgtaacttttctataaattttacttttttaaaataaaatcactgatttacaaacacttttataaacattattattacccacttttgagccatttttgcttttcattccaactgacattttaactatacttctcttttcctttgagtcctgtaaaaatgcctggaccctaataatcagtgattgttcggaagcaaggactttctttgtgacccaaacttaaacctgtatgacaatttgattttttaaaatcacaaataatgcccaattttattaaaaaggacttttttttctccctttgtagttggttgaaatgttggatatgtctgtccctgcagttgctaaattgagacgtcttttagatagtcttccaagggaagctttaccagacattctgacatcaattatccgaacaagcaacaaagagaagctccaggtcagtgttcccctccggaatgccacgctgctttgtcacttcttattcagatctaggtagtaagtttgactttcaggtaagagatacggagacccaca

SEQ ID NO: 49299 - DNA, 1019 bp, Bovine  19866880670054
  misc_feature (1)..(1): n is a, c, g, or t
nagatatttgtctttaactagcctgggagccatgggattcaataagcatcttctctcctttagggttcaaggtaataaagcatgcatctgcattgttaccatggctccacggcttggttggctttctatgagagcatttccaacatcacaccccttgttgtatttaaaagttgttctattatctactcaggagctggagaagagggcatggctgggcatggaaagtctcagtgaatggaaatgaacagattggggacactgatccgaggccaccatgcacagctcgtttggtttacactatttctgatcactgatttcttacggactgcccaatcaatacataggtctctttcataggtcaatacaagtgaggcccaaagctgaggttcatttcttgcagaaatggaggagcagggtctcagttaagacttttgattgaaagtaatgtaaaccactcaagccagcttaaacagaaaaaggaatttgctagaagggtagtagggcttctcatggaatcctagaaagacagaaaagtctcatctctagaaaaaggtggagcaggacatcttcgttgacactgaatgttgttggttttgactgttcaacattcatctctctttccaccatcactccaatttccttttgaaaaaacataatttctcttttgagtacagcctggtggaattataaattagggtcctacctgggcttcccaggtgatgctagtggtaaagaacccacctatcagtgcagagacttcatagacccgggttcaatccctgggttgggtagatccctcagagaagggcatggcaaccaactccagtaatcttgcctggagaatctcatgaacagaggaacctggcaggctacatgtccatagggttgcaaagagtcagaaacaacccgaagtggcttagcacatactgccttagcaaattgggaagccacagaatccaagacaggccaattagatgttcgctcccaggaatctgaatcttgataagaaatttaaagag

SEQ ID NO: 49300 - DNA, 989 bp, Bovine  19866880682384
  misc_feature (1)..(1): n is a, c, g, or t
naattagtgaattgttctcacagtgagtcaggcatatagaacctgcttttattaacccctccccacttccagtctgtttaccatgtatgatctcctccaggcccatctgattggttctgcctgtttgcaatgactgacaggccacttattactcctgcctgcccctgcctggcacctcaggaggcttttattagccctttacctgggtgagtttgggcttggaaaacacctctccttaaggcaatctcaagattatgttttctcacctgaaataaccagcacatttattgtttttgaaggaaagcaaaatctcataattgaagtaaaaagatgaatatgcttctggtttttcaaaagtgtatctcaaaacaggagagtgttcactcacctcggggactgtacactgagtaagagagaggagttctatagctgtaactcactcctggaggactctctcaccacagcccccatttgttaaaacatccacctaatggttatggacgatgcacttgcaaattgctaaccattgggttgaaaagcacttaaaattctggaccatcatcaaaatccctcacttataaggcaataacacttacctggaaaaaccatcatccatgagccccttcactacaatgaagaaagtcggatgaagatggttttcagcaaattgacaaactgagctaaactttatttaatttcagaaaggatggatctggaaataacattgctggtttcacgtgctggaaaaatcgatgctatgattttttatcttcttcctttctactcccttgccaggggctggtataataagtcatttggactggccaaacaaataaccagcccgagaccccagggactcatcttcgccaccctccagggctccagtgatggacaggccagaggactccagctcttccttcaggcactcctgttcgcatttggcagggctttcccccacaaaggaaatattaacagcatggtatctgctt

SEQ ID NO: 49301 - DNA, 895 bp, Bovine  19866880688896
  misc_feature (1)..(1): n is a, c, g, or t
natgctccaaatcctccctaagacccctacgctcaggtggcaaagggaacctgctggcttttggtgactcttaaaaccaggaacctttgctggggctgcagtaatttgatttatctcagaaacaagccaatgttacaaggctgggcttgcaatttcaatatgcagagattaatttacatgcagagctaattaagcaactgaaacacccactaattgattattacatgaaaaagaacacatcaatttggacaaatacactctataaggttgtacaatatttgcaaacttaattgccaagtggaaattccttttctagtggctgataaatttaaccaattaacctttgctgggatggtctttaattcttggagtccagaggcactcatcaggaaagcttcagtctctgctttttcaagctctcagtcagaaaagtcagtggctctgggctgtttctgtgcttgacacaggcctggttcatagtaagagctcatagtaagtgctgtgaataagggcccaaagagtctatagcaattatttcccttttattctttttttaacatttatttatttacttttgactgtactgggtcttcattgttgcacatggactttctctagttgtggcgagccagggctactctctagcctgtggtacatggcttctcattgaggtgacttctcttggaatgaacaggctctagagtgcatgggcttcacaggcttagctgttctgcagcacgtgggatcttcctggatcagggatggaacccatgttccctgcattggcaggtggattcttaaccactggatcaccagggaagtcccccacccccatttatttttttattatgagaattattctagatcatccttctggaaagcatattaatacaat

SEQ ID NO: 49302 - DNA, 1159 bp, Bovine  19866880699191
  misc_feature (1)..(1): n is a, c, g, or t
nttgcttctgtaaatgttcctcttctactggctgaccatgaacagtcactgacctgctgaaaggaaagtcttcaggtcactctaatctatgttctacacaatgatcaataacacaaggagagtcacaccctcacccagaaatgtgtaactcaatcaacactgtgaaggtgggagcagaatttgcccctgcaagcctgctgtgaacagcagaaagtgtgggtgatttcattatctgagattgctttgtcatatttctgctgaaccaaaggataactgaaatgaacattaataattcaggaccatggccagggttgcagaacttctgggccctgcccttcccagctttgggttcctcctgggtttggctctagaaacaacctggatcccatggctgtgaggagccccagaggccaggtctatgccatttctcaaggttagtcaaatctgagggctttcctggtcctcaaaggagacggagtccttatggaagagagatgagttgatccccagacccagcctgtggtcagttctcctgagcagtggaggtctcccacaggccagagttttcttctttcctctgatgctgtttccttcaaaggtagccatggttttgtgttttctgtttgtttgtttgctttttttgaccgaagggacatgttggcgtaaaccttgaatggaactttccttcctaggtgacctctctctccacttcactgttctcctcctccctcaccttctcctgtttcttctctctttcttcccctccctctgccctttttcttctctttcactccatttattttccctcttgctttaatagaattctagcatgacaaagccaaaatgctcccagaggagtcaggtccagaggtaacaaacccagatgtccttgggggccagcagttcacttaagcgtgtaaaacaagcattgagtactggggcaagcctctcctgtggacagctgggcagtgtgtgtgccctgcctaaagacatgcaagtttcatattttttgaaatccagtgctggccaaaaaaacacattcgggacctgaaggggtaatctagtctaggctggctcgcttctctgcagaggttgaaactaaggatcagagaaagggaagtgattggcccagggtcacagggagaaagggactctcagc

SEQ ID NO: 49303 - DNA, 1216 bp, Bovine  19866880757586
  misc_feature (1)..(1): n is a, c, g, or t
ngtgaccttgccagcttgtggggaagaggaaatgaggtcatgtgtacaaaactcctagcccaacgcctggaacacaacagacttgtctatagtcatcacaggctgagggaggaaacctcgtttcttttttccgttctttgggaagtgaatgaagctgttcggttttccttttgtttctctgcctgaaaactagttcgtttgaatgaaatcctgggcctagaagccaacaagcagggaaggagtgcttcaggagaatgagacactgctggggaaatggaaaatgataaaatctcaacctactacttggaaatgcaaatatgtttcatgtattcatggtcactgatgtctttattggagctggaacatctaacacatccaaacagcacatgattagtctccataataggaacaaaacaagctcctggtgaactaatcagctgatcacgttgcagcgggtgttcagtgcttttccacaacaaatgtggcactcggttggtcccctggtgcctccgctaatgcgcacgtggggcatcatctgtcccagcacctgctgacttcagatgcgtcagcatcctcagtcaccgcagcctgacacctccaggtactgggctcagctccaggcccttgggggatcagacctagttcctgacgaggagagatcgtggtgagactaaagagcattggctgcttgtttatttgattaaaggaagaaaaaactccactgttacagaacaaagagtgcaaagcaagtcccttggcctggacctgttcctggctccgttatttcacttacatatgttagaaagcttggccaatatggaaaattgcactattgcttagcaacccaaattatagagagaattagatctgaaagattcatgacaataagcagaattctaacgggaaatacagtaaagagaaaggtccaggaagactaagctcaaagttggctcccctctgagtctccacttggtgcctaataataatcatagttagtgtgaattaagcacgctgtgggcaaggctctatgcaaagtgttatacattcattgtctcatttattcctcacaacaggaataaatttctccattgaggtgagtataatgattatctcctctttctcacaaggaaacagagatatagagaaaaacgttttagtcagaaagaagaatccagaatttgaatatcagactcccggattttggcatcatgcatac

SEQ ID NO: 49304 - DNA, 1946 bp, Bovine  19866880759407
  misc_feature (1)..(1): n is a, c, g, or t
nattctgcacactcccatgcagggggaccaggtttgactcctggtcggtaactagatcccgcatgccacaactaagacccagtgcagccaaataaataaataaatacattttttaaggaacagtcatgacaagaatccaatgctaacaatcatgacaggaagccaatactcctcactttcaagacatgacttactcttaggacaaagaccaaaatcttaaaggacatggcccagcccacatctcaaacttcctctcataccctccagccacacttgcttccacctgacctggggactttgcacctgatgcttcattgtcctggatatcttctcctactctgtcttccttctaggttgacatccttctaggttctgattagactctcatcttaatcatcacctcctctgtaacgtttcccctagtgtctctaaccagtcagatttctcttcacattcaggaatttccctcagtggcatgtgtcatagtttataattatataattgtgcactatttccttaatgttcttctagcctgtgacagactggaatattggtcctaattactcaaccctccctgtgtatgcatgttttgttacataatttcacagtctcatttcctgacttcgggctcagccacatgatctatttaggcaaatggagtgaagtgatgatgactcagttttgaggctagaccttgaaatattttgtgcttctgccatcagcatgtgaagaacatgcccagtgagcccactagcacaaggagggtgggagtcatgaggattagaccgacttgacctgcaactgagaacttccctgaggagcccagctagatcagccaaacttgaaatcaacccatagacacagagcaaaataaatgcttattgctgcatgccactgaaatgccatggttgtttgttacactgcactagcagactgatataccctactatatgctaagctccatttaatcatagatcacatttttgctcaacactgcatcactatcacatgacacatagtggacccttaataagcatttgctaaatggatggatattagtggaccagtcctacattaccaggaggctttcacaaagcacagtgcagctccagccagtatggcccaagcttctgggagattagcaaagaaaaactgggtagactgagaccctatctgtgcctgctcttctccaagccctctgccgccagaacatcaaggattggagaaaaggcttacaacagaatgggttcatatacccttagaaaattaagacattcctgcagtcatcaaaatctacttatcaatcagcagcctgagtctgacatggtacctacaagtatctcccaagctgcttgtcattatttggatcaacttagagagaccatgaataaatggataatgatgatgactatctttagtaaaatactaataagtgtgggttagcccctgtgttcctttaattcgttgccataattaagtggggtttgtcctattttacagatgagaaatctgagcttcagagaggtttgttaacttaccccagagcacacagctaacaaaattctgggagaattccaaactgagtcatctatgtccctaaccacagagctatgctgcctgcgcaatgattcaggaatcccaaaatagttccaactccagcccatatcatccacaccatccatgtgggcttaggcaaggctcttcctttctctgagcatggattctttctcaattaagaagtctgaaggactttcccaatccagctgcccttggccatggtctgaacaactgttcttccaccctagctgccatctcccaaaagtatcctattaggaggaacaggactccaccttctcagacactgctgctggcaattggcacaacttttcctggagacaaatgaggcaatgtatatcaaaataccttaaaaattctactagtatttt

SEQ ID NO: 49305 - DNA, 2694 bp, Bovine  19866880799476
  misc_feature (1)..(1): n is a, c, g, or t
nactaaagtttaatgcaaatacatcagttctagtagatgatttgaccttgagcttcctggaacccacagtgaaaaaggaaaacccttagagttttctctaaggagacagggttttcattgtttatagctgaattacaatctggctgagcaccaaagaagcatactttcagactgtggtgctagagaagactcttgagagtcctttggacaataagattaacccaagcaatcctaaaagaaatcaatcctgaatattcattggaaggactgatgttgaagctgaagctgaagctccaatattttggccacctgatatgaagagccaactcattagaaaagaccctgatgctgagaaaaactgaaggccagaggataaggggacaacagaggatgagatggttgagggcattactgatttaacggacatgagtttgagcaagctccaggagatagtgaaggacagggaagcctggcatcctgcagcccatggggtcgcaaagagtcagacaggactgagtgactgaacaacacagcaaaaggattcttagataggaactatttagtaggagaaggtgcttagtcctagaaggtatgtgaaggcttctacctgtaaaggtagctgcctattataccaaccctttctaaaagccaaggcatctggttgagcacaagtcaggaaagtgatccagaaagtggttgagctaaggtggtccaggtttgaaggtctctgatggctcaaaaataatcccaacaatctgaggcaggggtgcacctcatggaacagttacaacctatggtttaagggcctggcagcctgcctgctcctctctggctgcccccatagcccgaagttttccatggagccacaaaatctctggagtgatttctgtcctgcctgaggacagacataggcctttggaagcctgactggcacttccctagcctggaggggcaccctgaactttagggtaggtgcccaccagcactgctccatcccaccctgtataccagagcccaggtcccaggtgggcaaaagtgggcactccctggtccctttgcctgtggtggggggagtggctgactgctcagctaggaaccatctgatttcattcttattagtttctcaacaggactttcactggcttttcttttaaacaatttcttgggtttctttcaaggtcgaggagaaggaggccactgagggaggggggagagccccaccctaatcaaatctgagcagagacaggataaaaattgaccttcatttaaatatgtaaacaaacactgccttggtaacttccaagacgtccttggcttgggtcgctgaggagcagcccaaagtgattcatctgccaggtctcttcaagggaggaaaaactttattcttaaaggctttttacacttgaataagtgctaaataataataataggccaagactgaaagaaactcttttccctggaagggtgtcatcagaggcaggatgaagaactgaagaactccagtttgggagggggtgacaaaatctgggttgatgaatgctgacattctgaataaaatcactccgtgccttcacctaggtcaagaaacgacattgttttcctgagctgcggcgacagcgaggtgacagagattaatagcttggtattgactgagcaacttctagttccttatctctgtcaagtcaaggctgtgtccaagggctgaaagtgttattagacttataattgcaaagacatttaaagggtttccccttaagggactatgaaatccaataaacctttcacaaaacctccagctccagagtacgaaacccgtctggaagagaggcgcgctcccagccgagcaccgggaaaccttgaagccgccagcattgaataatgtttgatttatgaagttggttttgaatttgtatcagttgttttattaaaaatatatgaaaggaagttttaaatatgagcaaggcctgtaggcactcctctgcaccgggagccgccgtctggcccagcctcttgttgcctcctggctgggtccctccatccaggagggctaatttgcggggttcatttggcctgctggggttgtctcaatttctcacctgggtttagaggctgacgacgggagaggccgcaggtgtggagtcagtgggtttcagatgctatctataaaggtggtcccgagacaccgctcagctgggttgcatttccttgtccatagcagcagcattgacctctttaagagctgtccctgcttcctttcaggaaggctgtggcatcaggggatgcaggcatggcgaaggtttgtaggaaacccgtttgggatgctggatgtagggacgggggactaaggggcaggttaggactctgggcctccgtttttccatctgtcaaatgacagagttgaacaagacccgcccccctccaccaatcccccatccctgcccatttaccgcccaagggtcaccactggtcctaatgtctcttggagctgtgagaggagcccactcaacagggtaggaccttcaagcccaacccctcgtcattccatgaccagaggagtaccccagagagaagagtgctcatgaggacaggggttagggcagcagcccagtgggcagggcaggctgctagtatcaggaatgaggtgtggattgtcgaaccatgttgtttaaaaaaaaaaaaaactgcttccagggc

SEQ ID NO: 49306 - DNA, 1647 bp, Bovine  19866880840042
  misc_feature (1)..(1): n is a, c, g, or t
nccatctttggagcacagagatcatcagtgactgccgcatgatgttctctagagcagggcacgcatgcttcatgctttcattctagttcatcacggttagagaaaagcctaccgcctgcagggtccagcacacaagacccatgtgcattacatgtcactgtgatgaagctcctccttgcaccctgtggcctggatgctcagctcccctgcagggctccctcctcagagcaggtccaaccatcctcctgcctccacgtggttcactgacctgggtggggccattccaggttgtggcaaagaaggctgcttgttcacatgatatatattctcccttcttccttagtaacagactccaagattattctggacttgacacgcccagccaagaggccactgtccctagcctcctgcagcatggtgtggcagggggctgtatgcagacatgtcaggtaggaagtcaagaggtatgcacttgagcaggtggcagatgatgtgtgccctttgatcatttcttccctcctgcttcctggctggtatgtggctatgactacgggagcccaaggcccttcaggaccaaggacagctgcaatgatggtggcatgaaatagtggagcagaaagaaaagagcctgggaccctgataatggtgtaactgccactccagctctagactgcccacatccaggcttcctgcactgcagggagaaactcccaccttgcttaagaactgtatttctggcctctgttactgttagcagttctcagcagttacacgtctcagaaaactccacgcagaccctagcttagtcagtaatgaagcgagacccatcttcatgtctatgatttgccctcatgtacacagctccctcttataggaacctcaaagagaagaagactaggctgggggataaaggcgcctccagctctccacctatctctaaagagcatagatatagtctagagaatcttgttcaccaggggaaatggaatgagaagacagtctcaaagaggagtcagatacacatacacagcctcactttcttttgtgatgttagttgctgttctaataatattttcaaatgttaatttggtgtaagtcttgctggcacattcagtaaaaataggcttgtccagctcacagctaccgaccaattaatctagacagacaggaggttgagtctttaagaggggactgtcagaccctatgaaagcaacaccacagcaaccaggatgcgccaagacacccccttcctcatctgcaaagtccatcgcagctgacagagctgcaattatcagccagtggcctttgtaaaactctggagctctgaacacagctaagagatggtttctgggagatcacagggccctgaaaacttgccactgaagcctgcctctctgagatcgtaataaataataattcccaggatcttcatgaaatttctattctcaaatatcccttctcactctattctttgcctaaaagaaaaataatctctgtttctcagtcttccttctcaagacccagctcaaatgctacctttgaaatcctttcctgactctcccaaacagaaagattgactcatctgccccaccacccactaaagagcactgacatcaatcatttcacatcaattatttcatcttgcct

SEQ ID NO: 49307 - DNA, 748 bp, Bovine  19866880873460
  misc_feature (1)..(1): n is a, c, g, or t
nctcaataaagctgggaaagtaaaagaaataaaaacatgctactttcataagaaaaataaataaaaaaccaactttatcatttcagttcagttcagtggctcagtcatgtcagactttttgcgagcccatggactgcaggcacgccaggcctccctgtccatcatcaactccctgagtttactcaaactcatgtccatcgagtcagtgataccatccaaccatctcatcctctgtcgtccccttctcctcttgcattcaatctttccaagcatcaaggtcttttcaagtgagtcatttcaaattttatcatttcaaacttcatttcaaattttttcattaaagcttcataattggttgcaactgtcactatttgtattaaagccctccttgagtcactattctgagttcagtccgatcacccacagagttttcccagaaaacgttactgttcacactgcatcccccagaactggaaactttttcctagccctagctgccctggagctccccagatatcaaggtaccagctcaccttctaaaaccagtatggctggctctgttgggagcctcatggctacgtcctactcatttttggagaatttgattatttcattgtggccatctagagcattcagcttcagctgggtcagaatattaaagactggtggctgagcttccagaatactagattttcctgtccattgaaagtttttcattagtaaggcttacattgggcatcatacccag

SEQ ID NO: 49308 - DNA, 1346 bp, Bovine  19866880885653
  misc_feature (1)..(1): n is a, c, g, or t
naccgcatgtatgtttgtgcgtgggacacagaactggcagggctcccgccaggaaagagccgtcaaaaggtttaactaggaaatccttcacatccatgatatgttcattttcctgctttattttattttatttttgagtctaccatccctgcttcagtgatctctaatagcttaatacgattagagatttcctctaatcgctgctcaatgtgtttcagctctattaaagatttatatgaaagctttatggaacacaccctttttagaattcagaaggattttgcaggttattattcataacatctgccacttactgaaaagagccttaaaacacccctttaatgtgtatttaatgcttctgatacaatataatatcaaataagacgtgctttattgtggcgcctgtgtttgtgtagccgcactgaagctccaccaccgttgtcggcctgaggtggagggtttataacagccataaaaacctgcacagagctcagcttggcatttaaggacacacagagagaaacggtgttttgttttttcttcttttacttgacttggtgcaacgtggagagaagcagtttgacaatttaaagagccactgaacataatctagacataaaacagtggtccttggagaagtattaaggtcaactattgtttgaaagtggatctcgccggcctgcacgcgtagatctgagtggtagctggtctggccaacaaaggttatgggcttctgctgattcatccactactttctctgatcaggagactgtaacacaccttctattatcctttatccgttaacccgacatttttactaagcagcatttattaacaactcattttcacattttaatttatgaaggatgtacatgtatgtatgtctttaactaaaaatgagtgatacgtagttatcaagatgccaacaggagttgtgttagggttgctggcttgattttttgtggagttggaggtcatgtagcagagaagaaagaatacaactctggactggaatcatagctcatttcctaaccagttggagggccttgggcaaggtattaacttctccaaaccctgctttgctcatctgtgatgtggggatgatgcctatgaatgaaggctgtttagttaaatgaagtaatacattcagagagcttagcaatgactggggcacattgcaggtgttcaatattgtgtcctatttttggaaagcatcaatagcatttatttatttatatttatttttggctgtgctgggactttgttgctgtgccctggcttctctagctacagtgagtgggggctgctctctagctgcagtgtgcgggcttctcaggcagaggctt

SEQ ID NO: 49309 - DNA, 1154 bp, Bovine  19866880905540
  misc_feature (1)..(1): n is a, c, g, or t
ntagaaggaaagcaaggggatcactacctatatcatactgtcaagatctaggtaccaaatagccaattagtacaaaagacccttccggagcaaggagagaatgagcaaggcctgcccgggcagaagcaggatagcttcattacagtgactccctaattaaaatgtaagggttgctgaccattgcataattaaataaggtggaaggcggtaggagtcagctctccagtagtttctgggctcatgttactaaagccaccttcatgggcacctccaaggacctcccacaggccgttctggagctgtccatggtcctgacaaatgtctgactttttacaggcctgttagaacgaaactgcttccaggagacttttctcctcactgccctgagacccctttagctgtcctgagaatcactccaattttctttgtaatccattttcaaactattcaggaaaaagaagttggaaggtaggagtggaaaagacatcaagcctaattaactcccagctactgctttctcgatgtaaagttgctgaagctcaggttgactcctgctgatgtaacctttatcctttgtctgttttacctgccaggaggaaacttccttaagagcttactgggagctaatctcaggtttgacacaaaaaccaaggctactgagcacaatagctattcaggaatatttgcaggtgtgagagggtaacgacctggtgcactagatatgcagtcacataccaggaaagaaccctctttcagtatcagaagttgagtgtgatgagttcctggcaaagtcatcctgggagagccttatcttcttgaacctttaggaataacaattcttccccctcagggtttttaatctactctttcccatctctttatcctcacctgtttcctctctcctcttgattctgtgtcctttcttccatgtcttctctctcatatttctatttcctcttctctttcttcctcccatctctcttctttctttgtgtctatttctcccttattccatgcccgtgtcccactatcacatcaccactaaactagtacaaatattaaatggttcatctactcactcttttatttttatcggtagtctccttggcttaactcgtttttattacatctgtagcctcctggcttaactcatt

SEQ ID NO: 49310 - DNA, 1801 bp, Bovine  19866880925321
  misc_feature (1)..(1): n is a, c, g, or t
ntctgtgatatgggaaaaatcttgatgtattaaaggaatagaatgaaggcctgtggggcttgaaggtagtggtggaaaaggcaatgagagagaaggtagccaggccagggcttatagggccttacatgttgcagtgaggagtttgggttttattctaaaggtgatgagaagtcatcagagggagtcacagagaggaatgaaaggatccaatttacattttaaaaagatcactctggctactctgaattcaatttcatcaggaagacaagactaactgacacggaaaattagagaataacctcaaagcaatatgattctgtgtctataaagggaatgcctcaagctctttaacatgagtgtctctcatattcattgaatactcattgaacaataataatagttgaacaactattacataccagatactgtacttggttcagagatacaaaaaataaacaatataaataatatcctgaacctcatggacatagtgaacaaacttgtattcatagtgaacaaacttgaataaagtgcttaattgggtgacacggagatcaagcaagtcactgggaatgccatataagggaagacttcatggagaagatgtgacttggattaggtggggaaatgagtagggagcacccaggacagatagaacaaactaatatgacagcagtggtgagcatgataacagtatcaacagttgccacctattgagtacttactatatgccaggcatcatgttaagaatttagcatcttttatttatttattggctgcagagtaaggcatgcagaatcttagttccctgcccaaggatggaacccatgtcccttgcattggaatcatggagtcttacccagtggaccaccaaggaaacctctagtcttttatattgtgtaaggaataccatatggagtaagccaatatctttctcctgttttacagatgatgaaactgagactcctggaaatgtttgttcaaggtcacatacttataaagaggccgatctgtatttcacttcatgtctgattaattctaaaactgaatgctatgctcttgagagaatcctaattgagcaaaagtgggcctctggttatacattttctggtgtatacctctggttagtaacaccacccttttcaggatgagttctgtggcaagacttgcttctcttctgttgtgtggatatagctcttgactcagtgtttccttttctgcctatgactctttccttacctcctattctgtctctcatttggcagagactgctaaatggtcacacatatctgttttcttctctttatggcacatggtttaatgtatttcccaacatctcttacagttataggtagtaatgtgactgaattctggccaatggagcatgaatggaagtgacgtgtggcactcccaggtctgccttccaaacctccctctcctacttcttacttgtttctctttctggatgtcttgggagccactcattgaagatatcaaagccactctcagcttgtgtctttgaataactgtgagtagaagagcctactccctgacctagattgcagtgttttatttatctgaaataaaataggccacttatttctattttatctagtagaaataaaattctattgtgttcaatcatggcatgattataacatatttgttactgccgccacacccacactaacacacacctgctttctgtcattgcttctgaggatctaaatttcctttcaaagatcattccagcctccccctgccctgcaagctttggctattctaaggtaatttgggccat

SEQ ID NO: 49311 - DNA, 1459 bp, Bovine  19866880999929
  misc_feature (1)..(1): n is a, c, g, or t
naaggaatcttcaagggcattacctttgtctccttatatttttaggagagagtaggctgaggctcagagaggaggactgactatacccaggacacacaacaaaacaggaatcctgcctctccatctccctgtgttgagggtccctttcttcctctgtccctttctttccctttttggacagatgccctttcttctctcctgaaaggtggacagagcctgagcttttctttggggctggcactttcggagactgtgaaaacctacaactgggtcacttctatagcattcaggacggcatgtggcctgtcttgcacttagggcagaaagttgtcacctaagggtgtgcagccacaccatttggaactgctgaaaacaaacagctccatcggaagatcaagaactcccccatgactgccccccaccacgccctcaggtgagccctgtgctcttagcagcccatgcctcaaacctttaaaaaccaatcaaaatctcgaagtgccacttttccctggctttgtggttgtttttcctcctcctcctcctctctctctctcttttcagctgccttcaaaacagagaggagaagcctctatttggctctgacaataagatctcctggtgcatttttcgccttgtgttttacttctgtcattgatcaatagacttaaatgccaggcctccatcacagccgcagactttgattgcccaaactgtcttggcccagcggagcttgtctgcttgagttctgatgctgagaaatgtcacagtagggaggggttaggagcctctgtcagtgtgcaagggaggggggccagtgacagctcattcagggcctctccaggcatcccacctgccccaagggttaccactggctggaattcattccagtatggggctgtttgcagccacaggtaaaatctgtcacagcataagcactgagtgggggaagcatcggctgtacccatggcaaccaagcctcattaatctgcttgttttgaaatctgcaaggaaaacagacaaccgagagaagaccctgaatcctggtctcggctgggacacacaccagcagtgtgacctttgtcctgtcactcagcttacctgtgcctcaatttccacagctcctatgcagctccccaccctccccacagtatgagaaataaagccaacagacatgaaagcgctctgggaagtgtagagtgctatagcaaggggaagcatatcattcttatccctgtcgaaatctagtgaaacaagtgcttttgtaaacctgcgtccactgaattgtgtctcgctgcagaagtcaatcaggggctgtgctgtttacagaacaattctcaagcactaatgagaaaattaaaattgtaggtaggtgtgggagaagggagaactaggcagttgctaaactatttgcaaacgctctagttcaacagttccgtttcaggatcctcacctccatctg

SEQ ID NO: 49312 - DNA, 1468 bp, Bovine  19866881029696
  misc_feature (1)..(1): n is a, c, g, or t
nctggccaatttgctgaacacttgactttcaacagccctcattacagacccacagccgtctactttctgacgggtttggagtaaatatgtaatcggggagtttttaagtcgtgttctgtaaagtgccgtctgcgtctgctgtttggttattttatatggtcatcaaagctgttctagaggtgggggcaggaatgcaatacaggatgagtgtggggtagacaacaatacaggatgctggcagcctgttctgcagagttcagtcaccaacgtggtcatgaacgtgcagaccctgatggtctgcagagcactcattcacattctaaaggttacatatcctttctatactcctggaggactcagaggcatcaaggtcacctggaaagtcaatggcagttctggaattttttctttttctaaaaatgttttagtgttcttttattgccaacattttattatgaaaatattcaaagatacagtaaagttaaaggaattttacagtgaaccaaggtatctagaatctatcattaacattttactatgcttgctttatcacttctctatctactcattaatccaccttatttggtacttcaaagtaaatggaagatatcatatattccctgcttgatagttcagcatggatttcattaattagagttcagtatttgtttacagtttctttgttttgatgtaaaatttacacataaatgaagtgcacagatctaaagtgcattccaggagttttaacacatgtacacctgtgcaacccagacccccctccatgacgttgccgtcactaccagaaattgccctctttcgtcttccaagtaaagtcttgcctccactccccaacaggcaaccactgttctgattttccccccctgtagattagttttgtctgctctataatttcatatgaataattctagtacccacacattcatgtaagacttgttgcactcagaataatatttttgagatccatccatgttgttgcatgtgtttggaaattacttcctttttattgctgagtaatatagcagtgaacgactggaccagtttgtttatccattctcctgctggtgggccaaccgggttctttccagttataacttttatgaatagagctgccgtgagcatcgtgtacacatctttttatggatttacttttttatttattgtgggacaatacttagaagtgaaatcactgggtcataggttatgtttagttgtgtaagaaacttgtcagcctgtttgaaaaataattgggtcattttatattcccaccaacaatatatgagggttcaagttgctccgcaacctttataatatttgacgttgtcattctttttaattttagctattctgataaatgtgaagaggtgcctcattatgggtttgatttgcatttccctgatgactaatgatggtggccattttttcatgcatttattggccattcatatat

SEQ ID NO: 49313 - DNA, 3499 bp, Bovine  19866881070501
  misc_feature (1)..(1): n is a, c, g, or t
nttggctggagaatccccatggacagaggagcctggcagactacagtccatgggttgcaaagagtcggatatgactgagcaactaagcacagtacaaagtagatgaggtgccaatcctcatgaagctgtaagtctagtgaatttgaaaaaaagatatgctagtgctcatgagccatggttgaaggacagcaaggttagtggattcagagggaaacagagaaagattatgttgctagaaggaaatttgtaagtgaatgggaatattagtcaaggctctctttggctgcaaattacagaaacacaactcaagtcaggttatgcaaaagaaggacatcactggctcatgtaactgaaagttcagggctgtaaaatgttactcaatatatttcatcagccacctagctcacgtctccaccccactttcctctgtgtgactatcttcagacttcatgcttacctcccaacagcaagagaacttgccaacctttccagaaaccacagggctgatcttcatgcccacatctctggacaaattccagaagcatggagatcatggtgggttgaacgaccagaccaggccatatgtcccctcctaggcccagaagttgcatgctgtgagtgctcagtcatgactgactctttgccaccccatggacttgagctgccaggctcctctatccatggaattttccaggcaagaacactggagtgggttgccatttcctactccaggggatcttccctacccggcgatcgaacctgagtcccttgcatcttatgcattggcgggtgaattcttgaccactgcactacctgaggagcccagacccagaagctagagtcatatatcaaccaaaatcaagattttgtacttgactgaaaaagaaatgactgacagcaggcaatgcaatggaaatagagttcttctagaatggagttaatatggaaggtaacctcagctcatttcagatccactaaaaatactccagaaagaccctaaatatctatttcagaaaccaccttgcacaggtgttcctattatggaaactttttactctcacatttatcccagactgtaactcacttcagagtttcaatctttactgttgggtctcagaacttcagagttgagatctttcatgggtgatgattggaaaggagggtcatggtccagagaaaatgctcatgaacttggagacagatgacttacacatgaatcctgagtatcctcacttccctgacactcagcccctcactatgaaaatgcaattcatatgagaattgaatgagataataggtgaaaaagcactttagtgtttcaagtaaaattctaatgggagacattattgttggtggcttcttataagttggtcttgcattactagctctattaaacactcctgaaggaaaaaggatgatatctcatcctgtttggtattccaaaaggccaaccacaagcctggaaaaatagtagtatcttcctaatttcttatcaagtagctcagtgagtaggtgaaggaaggaatgaatgactttgggcttagattccaatacaaattccttagaatgatttgtttaatcatgatcaaattttttaacatcaataggtaaagataaaagtctgattctctgatctctgaaaatattgtgtgcagttctgggcatacctttaaaagacataaagaagctggaggaagtgaggaggacatagaaaatgatcaaggaggtgggggcaggaatgccatccaaggatagatcaaaatgggctgctttgttctggaaatataaaggctgagaaggaaatgatcaaagtttttgaaatcctgggaggtggggagagggatgggttggagatttacccagcccccaatgtctttaatacctacatcacacacagagtggaggggtcaacccaatgtggtatttctcatgattttaagatggtctgtagattaaggctcacttttgaatgaatcattttcaaattcacatcaggaatgaagtcatttaagctacttgggttcccagaattcatggaagatgaacctgaagaggtgcttgttctaaaagcaattcatctaggaatgtggaacttctgcagacgagttgatggagagggccaatcaggaaataaaaactgatggcatcctaaaatcgtagattgtcagtgaacaaacacatctgaactttcacaaacagaattagggagctgcccttacagacttctctggctgaactgtaggccccatttctttagagagccttctaatgccataaagtttacctactctgtgctgaagagcaagtacagggctctgatatcagaacagagttgaactactggtttcatgactacattaagtaggtgtcattttgttgcaagtgatttatgatcaaattcaaattgccttcgacacagaaataatttggggttcaagttcattcaatcatagagactaagcagggatcaaccaatatcattaaattacagtacaactcttgggacttccctggtggttcagtagctaagactttgagctcccagtacaaaggacctgggtctgatccctggtcaggtaacaaacccccacataccacaactaagacccagcacatccaaataaaataaataaagataaagatttaaaaatacattaaaaaaatacaactctctctgccttactctctccctgcctctttttaactcccatcctgagctaagctctgagtgatggttgcttttatgtgtcaacttgactgggctaagggatgcccaaatagctaataaaacattatttctgggtatgtctgtgagggtatttccagaagataatagcatttgaattggtggactgagtaaagcagatgatccttcccaatatgagtggcatcatccagtccaccaggggaccaaacagaacaaaaaggtgaaagggcaaattcagtctcgcttaagagacattcatctactcccgccctcagaaatcagcactcctggtccccaggctttcagactcagttcaggacacacactggaaagcctccgatttccaggcctttggaccactgatttttctggccctccatcttgcagatggcagatcgtgagtcttcttggctgtgagccaccccttgggagagcaaagcagtaaattcccaaggaggttgcagctgaaggccaatgcagatgacatttagaggctccataatgatgtgagccagctcctattacaaatttcctctgatatgtctgtatctatatacatgtatgcttgctcagttacttcagttgtgtccaactctttgcgaccctatggactgtagcccacaagggtccgctgtccatgggattctcgaggcaaggatactggagtgggttcccacgccctcctccaggagatttttgcaacccagggattgaaccgatgtctcctgtatctcctgcattgcaggtggagtctttactgctgcaacactggggaagccccctatatctata

SEQ ID NO: 49314 - DNA, 818 bp, Bovine  19866881113106
  misc_feature (1)..(1): n is a, c, g, or t
nctttagtattcttgcctggagaattccatggacagaggagcctggcaggctacagtccacaggatcacaaagagttggacatgactgagagactaacaagcatccttcctggtatcactctggtaccccggtacttccagaaacccttcctgaagctgctgccctagaggcctgctgtggcaatgatgacgtttttcctttgggccttagagtgcctgccactttattttggggaaaacttgctcttttttaagtggaaaaaaaaaaaaggactagattcctggctacagcttgcctacaataattttacagaaaagaaaaatcagagctccagttattgtttttttttttttctttgtttcgggaggaaagctttcttgttcaaatttgggcacatgggtaacacagtttcatttcacaattcgcaataaagatacctgaactctgatggtatcagcaacctccggctacttccccaacacgcgccctgtaatataagctgtaattttcactgtgcagcaggggcaggctttatgggctgggggatggagcagagtctcatgtcaccgcatgcttgccacaggctaatcgtgtggaacagagctcaccctccaaatgtcacagagaatgaaggaacagctcccaccccccccccactccactggccctttggatgagagaagcaagtggtctctgggccctcctggccatgagctgtctaccaggctcatctcaggttcatttcaacttcctgctccagggcagtcagtggctcctccacagagccactgcaccccagctctgttccactgggtct

SEQ ID NO: 49315 - DNA, 2134 bp, Bovine  19866881120082
  misc_feature (1)..(1): n is a, c, g, or t
natagtgggaattagtcgtgagcatgggggcagctgtgttcattttcgaacccaagaggagggcactttatcccttctgatactgagaggacatccccaaagggagctgaagtggattttgattgcaaattcatttacccattctgtgtttattgagtgtcaactctgtgcttggtgctggtgatgtaatggcaaaaaaaggccagtttcctgctccagtggaatatgtgttcaagtggagagacagacagcatgctacccaacaaacacacagaatgagtagattgcaattatccccctgaagaaaacgcatgatgctgtgacagtgaatattggggtggtggatattttacatgtggagtctgggaggcctccccggggtgggaccatgaaaactataagaaagctgggacgaaacaggagaaaataatctcaggcagtgggaactgcaaggatagagcatgtggtgggattatgctcagggtgtcccagcagcagatagaaggtgttgggagcactggtatctcacactgccaggctatgacatgtaaagaagctttcaccagagtgtacagtaatgcgctgcttccttcatcgagagagtcttgttatgaagaaagtgtcagtggagcccagcagtgtgcttaatgatgtagttgaccaacgtcctggcccaagttcctcctcttatcacagacaggttgtattttgaggatggttagctggtcctgggaccacacactgagtagtcctgcagaagcagatgctgatggctttccaactagatccgtcactctatccatgcaggcacggtcctgtgttctcttacttaagagtgttcccagccctggagggacactctgccagagcactgggaattaatgtccctagaatgatgctcagcagtgagggatgggacagggaggattaactccccagcttccttactctatgttgggaccactctgagatatgtctacacagagggtccccaggagacccgagcccctgttgtccacagaggtgatccacttattaatgtatcctgttacacttttcccactccctcacaatgcttctgggatcatctagagatgatccccttgaactcgactccttgtctcaaggtctgcttctgggagaacttccacagagagtgtggccagactgggatgcacgcagggcgaatggtgcctgtggaggtcagatagctgtgagggccagatcacacagggccttgttgaccatggcaggaaacttggactttattctaagcgtggggaaccactgaagatcttaagcaggggaggagtattacatgatccagtttgtaatttaaaaatctctttaggttgtgatttgtggagtgggttggatgggagcaggaatagaagcgggggaccagttagaagttgttgacagcagttcagggaggagctgatggtggctagggggtgtggtacagatggagtggtttagtcacaagtcatgtctgactcttgtgacctcatggactgtagcctgccaggctcttctatccatgggattctccaggcaagactactggagtgggttgccatttccttctccaggggatctttcctgacccaggaatcaaacgcaggtctcctgcattgcaggcagattctttaccgactgagctatgagggaagatacagatggaagcacatgcatagatgtaagatacatttaggaagatgaatcaaaggacttgatggtgggtgggccatggcaggagagcgagggaggaggatcgagaatgatgccttgatttcctgattcccagtgtggacggagggagctgagtggtattctgccatagaaggcattcagaaagtcagtgatcagaacgagcttctctgctttgatagtgctccacatttaagccatgctagctgatctaggagtccactgcacacaatgaataaatatgtcctgtgtgtatctgggtagaatccctgagagaatattgaaaccactattacagccacaaggagaagctgttccctctatttcaccaagcacaggggcattaaacttaacaggctaaaaaatgaagtggaaggccagcccagtgaccgcgacagctgctgacgagctcacacagagagga

SEQ ID NO: 49316 - DNA, 1376 bp, Bovine  19866881148504
  misc_feature (1)..(1): n is a, c, g, or t
nggatgggaaactgtggttctttttattctcttttacttgcttatttacaattgcttatgcattgaagaaaaatcatttcaagattttcataaacaagccaataaggactgcagattaggtcaaggaatcgatcgggggttggtctttctggcaatttccaatcatgtttttgttgcctagattttcttattctctcatgtgccactagaggctgtagttcgcttttgtaaagaaattggcatcgtggacctatcctagagaagctagatctgtggcccgagtcttcagattgtacgtacagagctttagggaggtgttctccatgcaagagacttgattcctgcactctgaattgtcttcatttatttcttccttttatctgtggcacattattgtgtgagtatttgatgaaatttagagagtgagtttgtggagttactgttataagattaatgtcttgggcacatgacatgtaggtatttgtccttatttctttctacattcgtcttgattatttagtaaggcttggtgcccagcacacactgaacattcaataaaaattacctttcgttattttaattttcagttctcaggaggacatgtttagatttataagcttcagtatgactttttataaaattcaatctgattcttaaattgtacctaaaatatcctgtttggaacattatgtaatttgtgtggcagaattgtggaaaatgtatccttacgatgcctgttggtgcatatatgcatgctgagtcgcttcagttgtgtccaactctttgcaactctgtggactgtagcccgccaggctcctctgtccatgggctgctccaggcaagaatactgaagtgggttgccacgcccttcaggacccagggattgtggtcttcctgacacagggatcaaacctgcatgtcttacacatcttgcgcattggcaagcgggttctttaccactatcgccacctgggaaatctggttggtaggcaatatataaggtcataatcctcaccacttattatgagcattgttgggtttaaacagatccctgttttaaatctttactgaaactgatagaaagatttgttttcttttttcaagtgagtatacatttgtgtgtgtgactgttaagagaactgaacctaaagaaaatgaagtttttttttttttatggatcttttgtgaaagaatcttgtgtattgtgtataagcttttttatggtgcatgttgaggttatgatcactgacaaataaaaggtatgcgggtttgtctgtgaatcattctattaagcctgatttttccgtacaccttgctggtaacatgtacttcctagccatcactgtaccagctgttttgctaacactgcggccata

SEQ ID NO: 49317 - DNA, 898 bp, Bovine  19866881150075
  misc_feature (1)..(1): n is a, c, g, or t
ntctctgcagcaactaaggaaaaagtaaagatgagtggcggagaagtacagtccaggggttttaataaataccttcacgcttggcctctggagctaacagttctcaacagcatgtttaaaaagagggtagcaatttcatgattgcctgaaataaagtttggcaccaagtgcttttaaatatgcagcctaataaaaatactgaggtaaataaaatgattgtgtttgttccttgaaaattagggcatgtggtgcttaagcatcgaagtcattcatacatactttaaggtaaaactgtttctgataaatgccaaacctcctgatttggcagaaagcctgtgtgactccaaattgagggcagtaataagttctttgaggtgcagcgtacgctcaggtcctctgagggggagcctgcctttgtgattaggtcagcctgaaaagcatttggctcttgttgaccttactgttcattttccttccttctcccgaggtgtctgagcgtttgagtcaaccaggagtggcgatcggtttggcttggactcccttaggtggggaaatcatgttcgtggaggcaagtcggatggatggcgaaggccaattaactctgaccggccaactggggaatgtcatgaaggagtctgcccacctcgctatcagctggctccgcagcaatgccaagaaataccatctgaccaatggtgagtggcccgccccagggtgggggcaggggtggggggcatgctcaaagctgtgggtaaagaagagccttgggatcatgacccaggaggtatcccccagttctgaaacagagataaaggagagctttaagtgaccacttacaccttaaagcacagacctttgcttttgaactgcagtggaagttctagttcccagctgagga

SEQ ID NO: 49318 - DNA, 971 bp, Bovine  19866881250756
  misc_feature (1)..(1): n is a, c, g, or t
ntctgatttcgattgaattgtggatgcacagggccacggccccagagagggtaatgactcactgagagttgcacagcgagcaagtagaagttccttggctccctctctctgcagtggcctctctcttgggtggaacagggactctcctaaacaatgtgaaaagccctccctgacctcaggtggcacgaaaattctacaaaagttaagtcatggcctgaagagtcctgggaggagatgctatagggtctaaatcctcagcatgcgtggttgctgctgcctaactatttcagcaggcaggaataaagtcctggggagaatgaactgagatggttgagctttgatggggctggagggagagagaagagaggcaggatctgcccggttggagcatcaacccgtgtttcacagaaggtctttggttgaaggtgaggaaacaggagcagaggagctgaaaagcaccgaggcacactcacctacttcccaatttgcctgagcaggtcctggcatggggttaattgcccacttttcctaccctgtacctggaaaccttcccagtctgcacatctgtcagggctgggcagcgcccctcccctgcaggacacatccaagggagggcaggggacgaccagcagactccctctcaccgctctcccgccgcaacaaacacctgcccccgcccccgcccctgcttgtgaaccatctggcccaggaccatctgctggggcagtggggtgttctgaacagctccacagccctttgtcagtttggatgtttaactctccacttggctcagctaataggctcccaaagatccagggcttccccatcgaggcaggaggagctggctcaagtttcccaggatgaaggatttaggagaaaaacaagcttgttcaagctgggcccgctccactttctgcagcgatttcagtgttttcatacctttgtcttttcacctaactcctcaaatagcc

SEQ ID NO: 49319 - DNA, 958 bp, Bovine  19866881326962
  misc_feature (1)..(1): n is a, c, g, or t
natgcaggacttgaattcctgcaggcctttcagactcatctgtgtgtctcaaagcatgtgtgtgtatgcccaggatgcaggacttgaattcctacaggccatttcacctccccaagaggcagactccaccaaggtgacttggccaccagaatggcacccgagatggactgcctccctccatccagtgaccagagtagagggcttgtgacctgggtcaaggtggtcagcccgctggccagagggaggctgtggaaggaagctgcctcccccattcctgagacctggggcccgtgtccagcctggttcctgtgggaggtgctgggaacacattgttgttttttgttttttttttttaagttgaccagcactgtagaagcgctgtctggagtacgcctctgtgtgcgtcataccctcctttcttttcctttacggggacgcagagcagtagaatgacctttgatggtttttgaaactgaaagcagccttttttatagctcgggttccagtctcgtgtcatatgtggttccagggctggtgacagtcatcggggaaacagagcctgggcaggcagggggtttgcccataaactggtcatcagcgcgcagagtaagccctggagctgcagcacccgagccccagggcttctggaatcacccccctgccacctcctcccacaagactccgcgccgcagacggtggcctctggggctttccttctcactccttccactggtccccagcaagcccgacttggcctcgaagcctgaaacccagtctggggtcaggcctgggcaggccctgccctctcccctcgcggctctcagagagagggggagggggcctcccctgaaaagaatgcgcttgtctgcccgcctgtctggctccgggatcagtctagggtttcagccaccaaaaaaggctgcaggaaggagagggcctcctgcggcggccgggagaa

SEQ ID NO: 49320 - DNA, 1104 bp, Bovine  19866881408220
  misc_feature (1)..(1): n is a, c, g, or t
ncatctctccactataaaatcttcaaagatagttacttcatccttatacttatttattcactcacttgtttagagacagcatagtataatgtttaagagcatgagcgatggatttagagacagcatggatttaaaggctagcctgtgacaccttactggttatgtaatttacagtgagtgaccttatcctctttaaatcctatttcttatatgtaagaaagatacaacagtactattcatcttctagggttgttgaaaaaattaagtgcatatattatttcttgggtacttattacatgctgataatagtaattattatgattatttattcaacaaacatttattgtacaaatactgggtgcctgatattcttctaggtgccacttacaagatctaaccagatgtttagtacagagtttgggctcagctaatgttcactgaatgaataaagactgaacaagtcatctatatttagtttttaaatctgtgtattagtcgggcaggctggataatggtatgtaataaacaccaccatcatcccaaatcttagtagcttaattgaacaaattgttccttttatacattcagtgtgggctggctgagatgatctgttcatcaggggtcagaaaaccaggctgaccatggtcccatctcaacagatgcttctatgatctctgtagcagaaggaagagaacgatgggttctctctcagaggttccacttgaaagcagcacacgtcatctctgcttgcattgtcttggctagagcaagtaacaaggccctgcatgactttaaagggcagagagaattgcagttgcagtcctatcctttgccccaaaggagaagaatcagaatatttgtgaatatccttcaggactatcataggctggaagctgatggtacagtcttctcactaacacacagccatctttggcttacaaagaacccccagttcaaggtcagtatcagtagttacccccaagcttccagtttagaattaaattttcaaattaggtctttctttcttctcacttccccgttcaattatattttaagcagatgggtgatcctgtcagctttaaaacaacagagaaaaaaaaccca

SEQ ID NO: 49321 - DNA, 765 bp, Bovine  19866881472082
  misc_feature (1)..(1): n is a, c, g, or t
ntatgactgtgcataggaaatctgctgatgtggaggctgggggatcatgctaggatacacagtattttctgaatgtatttgacatttgtgtcttttttccaaggaccatcttgcagatttacgtctagcaaaacacattgaaaaactgtgccacacaacacagcccatgccaagagaccaggctggggttctggaaatacaaaccttaaagaagggaagtcgcagcataaaacaaatccaaaccaacaaatgctctttcgttcaccttatcttagttccagaactccgcatttaatgaaacatttcaggatggaagaggtgaggacaggaagcgtctgccctgctcctgagactctctgagccacacttcaacccagatcaaattaaagcacaggctccttagacagaagtcctgtgatgagagcagagagcaagctggagggttcggggctgagccctggccaactgcaataataaaacagtgcatggacatggaggctttggaacaaaaataccttgtagctattattttcctgagtctctacccaagcacacaccccctctcccattcttttaatctggagctactgagaagcggtatttttctcacctttgcaatatgagaaacaagttaattaaaaattgctcccaactccagtctcagagcgtccctgctttggctgcagatctatcaacagtgtgttttgatagcagtgcacgaagcggttattcggagacactataatgcattaatttaggaggcat

SEQ ID NO: 49322 - DNA, 1169 bp, Bovine  19866881648583
  misc_feature (1)..(1): n is a, c, g, or t
naggtgagacagaggagcaccgccctggccccacagttgccatgactacgctggatctttgggcactgagtatctcatgctccctgccagactagtccaactctgaataactcctactaccatggacagcacttatttcctgccctctgctctgcccttcagcctagcaattcctttaagctgtaaacacacaggacaaacctaggacagggacttgtggggtgctgttctgggaagaaagacaatgcccaagtacaggacagtttttctcccagtgttattcactccacccagtaggcctggctgagttgtctttaggctggaaggtttagtgctgagcaaaaaaaaaaagcaactcattattgtacattcaaatccagggggctcatttttactatcattacagaaatttaatcttaagaatgcttcttctctgtaaagcacagaacattctgattaacaaagtcacaggaaaggcccacagggtgtgaatcctctccagagctggcgtctcacaccagtgtggaccacctgccccggctgtccccaccttcatcgtctgcttaactgaatcatgaatctccacttgtgtaagacttgaggctgtaggtcttctattctggctgccctcattcagcaaaggagggtaaaaatagttctttgcatatggaaatcacttcacagcttacaaattgctttcacagccttaatttcatttgatcctcaaaacagccctgtgatgagaaaactgaggtccagacgggttatgtgacaagcctaagggcaagtggaaataggaaaagcaaggactaggacagggtcttcttactaagatcctgtgctctttgcacagcaccaaactgtatcttcttacctaccatcacccgccaggcgacaggtgaccactgccaacaacatcaccatgtcaccacccactccaaatccttaacaaccaggagaacacacttgtcagctccccatatgggtgctgacactttggttctcccacctccaccactcgtcaagcccctaaatcgcccaaacccaccaggagagtgagcctggctcagttcctttctgcacagggagtcagtgcaggagactggagtgagcatgtgctcacgagccaggcagacaagcacaaaccttggttctgccacttcctaatt

SEQ ID NO: 49323 - DNA, 1729 bp, Bovine  19866881726888
  misc_feature (1)..(1): n is a, c, g, or t
ngcaccctactccgtactcttgcctggaaaatccctggacggaggagcctggaaggctgcagtccatggggtcgctgagggtcggacatgactgagtgacttcactttcacttttcactttcatgcattggggaaggaaatggcaactcactccagtgcttttgcctggaggatcccagggatgggggagcctggtgggctgccatctatggggtcacacagagtcggacacgactgaagtgacttagcagcagctataagggaaaagaatctgaaagaaaatagatacatatgtataactgaatcactttgttgtacatctgaaactaacagaacattgtcaatcaactatatttcaataagaaaaagtctaaaccaattgatgtcactctcctgcttaacaactttcaatagctccctggtcacaatcaattaaatctcctaaagtgggcttacttaatcactctctgttaacctcttgggcttatctcagagcctgttcttcctcactctgaaaactccaagcacactccacactagatacttctgtttctgccagaccttgtccacctcagggcctttgctcttgtgctgtgctctgcctgcaacaatcccctgtctggctcccacatcactagccatctcattaatcgtgtctcagttcaaatgctcactctctaccttaggagggttcccctgagcaatctgtgctaattcatcacccctcctcaccacagccattctgttacctttctctattgtacacaataacagacacccctcactttctacaactatcctatttatactgttcttaaaaattaacttataaactaccttctcccattgaagattgaaactctccaaaaccagggatctcttgttcactgctatatcccagatgcctagaaaaataactggactcagagactttatcacacaaatgcacaaatggattgtttctactgctgtttagccccatgaagtggtgggtttctaacacttgagcatatcagagcagactgagtgagtttgtatcagagatggatttctgcattgcatggggagcacttcccagagctcccggatgcaaggaacctgtgatgtgcccacaacaagtaaatgacagcaaccttagatgtgattcctctgctttagccacttgctaaaaggaaatttcttctagtttcatacctttggttctgggtgttttttaattaaagacactctttgaagaaatgggctaatcccgccagtacctgactttctaattccctctttctcactgtgaaaggaaggcatattggccactctggccccaactgagttgttttcccagagaactttcaatccttctatgcacaataatgaaatatgataccaaacaggcctgtgtcaataaatctacaggagaaaggtcaggtttacatcactggatgggattggcaaatacatttgttcctgcaacgtctgtgttttaaatgccaccctccgatgaacctggtgctgaaacacactttggagtttgatgagatgtcagttttgctcagccctgatcaaataagatgaatgaaagtgaaacaagaacaaaaatattacttctgtcacttttataatgcattacaggaattggggtcagtcggggagatttctcttaaacaaataccaatccctgcacaatgtcacccatgggatctggtagcaagtggacaatgatcactttttgcat

SEQ ID NO: 49324 - DNA, 1509 bp, Bovine  19866880410031
  misc_feature (1)..(1): n is a, c, g, or t
ngagaacctcacgattacctcgttattgcttctcttactactgcagtggattttacactggagtctgcattgcaatttattgtgacctgtagacctagcagagcacatacactttttaactgtcatttacaaaatgaaaacaaattactttttacatactagattttaaaatgtatcttaaagaccatagaattattaggaattcacaaggtgtgctttattgcaaatatttaaaacacaaaaaaagagggatggagatagcagaagagagagagacagatttgaatgcttttcattgaacgataaatctaatctggtctcttccatatttcattctcaccagcgtaaggccagtcaatcactatctaatctgattagctaacccaagattttccttgccgcctgaatgccagctcatctcattcttatttcctgcaaatgtgggtattgatcatactataagctaggactcaatattagctgcttggattatcagagtttaattttggcagcaacaatataattgattcaagctgaatactgctttgcattataggtccgtatctacttcactatggaaggactgaaggtgtcttcaaccttgagttcactcttagacattgaatgactatgaaacatttacataagagggagtacatggaagatactaataatacagtgatggtcctgatgattagccacagagtttctcagcctcagtagtacagatattttagactgagaaatttgttcggggtgggaagctgtgcattttaagatgtttagcaacacctaaggcctttacccaggagaaggcaatggcacccaactccagtactcttgcctggaaaatcccatggacagaggagcctggtaggctgcagtccatggggtcgctaagagttggacacgactgagcaacttccctttttactttcatgcattggagaaggaaatggcaacccactccagtgttcttgcttggagaatcccagggacaggggagcctggtgggctgctatctatggggttgcacagagtcggacacgactgaagcaacttagcagcagcagcagcaaagcctttacccaatagccagtcctagccctcttctcccaagatgtaacaatacaaaaaatgtctcaagacattgtcaaatgtttttcggttggcaaaactgtttccagttgagaacaactgatcttatcttggctaccatgtatggtattcctggcacaacagtatgggcttatttgtgttttctttccttccttccttccttctttatttcttgccttcctgctttccttttcttttgagaaaggtagtatattttttctagtttaaaaaacacgtgattgtaattattgtatttccttgtggcatactcatatagagaaaattttattggacattggctggagaaaacaatgtgtccccatttaattccacctttaggagacagtcaggatgttatttttaaaacagcattctttattggatactatt

SEQ ID NO: 49325 - DNA, 1843 bp, Bovine  19866880475893
  misc_feature (1)..(1): n is a, c, g, or t
ntttatgccaaaaatcttacagtaaactattacaaaaattaattttaattatctatcagataataactgaattaactcctcttttcacctcttcaataaatgttctttaaaaccttgaagctgcaaatttagtttatttagtttacttaaatggcttgccatataatctaattggaaaggctaattttattgtcaaattcattagtcccatatgatatactttctgccagaaaatggctaacttgttatttctattcagataagcatatattttctcttgacaatgacccactgctgatgaactaattctaaaatagataaggcagaggccctcaccaagaatttgtcatttagattatttgggtcacatagcacggagcatttcttaccaaagttttctttgcgttccttttactgtgttctcaaccaggagcaatgcattttctgacagtagtcaaggaatggaacagaccgagctttgaatcaattcaaaatcatcactcttattgtctcaccctgtgctatcttaatccggaacatcctgataacagaccaaagtacacgatttctcatatcactcttcatccttgaaatctaggacatcctgctatgggtttggttgttttgtaaaacggaggttttgttgatatccaagtgtccatttgtttggagacctctagtttaacacatacatatatgtgtgtaatatatacatatatgtattatatacattatactgaaggtacattatatactattgcacatatacatgtatgtggctgtgccaggtcttaggtgaggcactcagggtcttcgatcttcgttgcagaatgctggttctttagttgaggcgtgcaggatcttttggtttcagcaggtgaactcttagttgcggcatgtgggatctagtcacctgactatgcaaacgagggactgaatcatggccccctgctttgggagctcagagtcttggctactggcccaccaaggaagtccctggagacccctagatctttttacataagtgcatgagtgctcagttgtgtctgactctttgcaacctcagggactgtagtccaccgggcacctctgtcctcagagttctctggggaagaatacaggagtgggttgtcactgcctcctccaggaaatcttcccaacccagtgatcaaacccacctgtcctgcgtctcctgcattggccggcagattctttaccactgagctaccagggaagcccctagatctttttatatccaggagcaaagcaccaaagtaagatttaggatgctttatctttgtaagtgtgggaaaaagcaatcatgaaaagagaggtaggaaagctattaatacaacatatcaacttcaggaaagtcctttgataagttttagtgaagaatatatatgaaagatgggatattagacattaatttccttaaaaacatttcatttcatgcctgcctcttagagttttcatgtgccctgtgtggtactcatctggggatctacatccagtttacagctcactgcaccagagaacagcaagagaccggagaactctactggagatcatgatagtatacaagcttacctttatcttggggagaaaagaaaggcaaaacaggtgaaaactgagtactcaaaaatgaactaagttattctgggagggatcaaattctaaaatgaatggcaagactttccctggtggtccagtggctaggactccatgctcccaatgcagggggtctggattccagccctggacaggggaactagatcctgcatgcttcaactaagacctgacacagccaattaataaataaaataaagtgaatgacaccgta

SEQ ID NO: 49326 - DNA, 1021 bp, Bovine  19866880520918
  misc_feature (1)..(1): n is a, c, g, or t
ngtaaaattactatgctccatcctccggctttatctaataattttaaaactaatcattccctctcccttgtactttttcttcataacagttaagatgctttgtgattatacatgcagattccatgtcatggtaaagtctgactttgccttccagttccttagctttcccctctgttctgagttcttcacttcttggttcagggtctatcatacaaagacatggactttgcttacataaaccccagtgaagcaattttgaaaaccaaaactttatttgttagccccagaaatgcgtatgtaactcattgttgcattgttctgaattgagtattatgtgcctatcatctctctcccagtctgcctgtgggggaaaatgccattttctgctccaatgatgtgctctctccacttgaaagtgtgaaagggattctaaaggccctctggtgggaacagtccattcctgcctggagactcaaggaggcacagattctccatttgggcaatagccatgatactttctgcatagcatcattaaaacttcccaaggcaacggtagctgggagactttctgtttaatcactttatacccaataaagtgtggattacataatattttcataatgccatggtaacctaatgagtcatcctccattataggcaagtgtacttgtgtctatgatcagggcagagtgtcatcaaagccaggagggaggcatactgacagattcttaacaactttctttttttaaacattatgataactgctcaaaacctttgccagagtccctgaagcagcaaacttaatccttgcaaaataccttcattatgtatttcatattttgaaattcatgtctctgatgatattgtgaaagttcttaatcttatcaataaaatatttccaatttctgctgaaaaatggtgacttctgggtaattttcctgcctgtggtgattggattagctgaaatcccagctaatgcccttttgtgacatgatttcctgttgacttcctgatctgtttg

SEQ ID NO: 49327 - DNA, 714 bp, Bovine  19866880664182
  misc_feature (1)..(1): n is a, c, g, or t
natttctatcattttctcctgactatgttgtcccccccacccatggcttacctgtagtgtcgggaaatctcttcttccacctgggtaatgaaatcacatttggtacatgagtgttctttgctttccttgacagccggctgcccgtctggtccttgcaggtgactgccttcttgcttgacatccgatgcctgggactcgtgcgcgctctcataatgaaagaggagcacatccacgtcgggggtggagaacgagcactggtggcactggtgtttgactctcgagctcccggccgccccaggagacaagtgcaaaagcaagagcgcacagtgggaacaattgctttttctacaagcgaatggataagtgatttctccaaggtgcttttctgggctgcaaaggcctctgggacagaatggacagtgtttaatggtacacttatgaatgttgtggagctgttgataatgacgaagaagcggccccaccacaatgacgtcggggccatggctcttggaatatcgaaagtcacagaactgacagttgtagctcgtgaccatgttatcctctgctcccttgctggagaagtccttcttcttcaccccactagagcccttgtctgccttggtcattggctccccttctgcgcttttggctagatcattctgattaatgacagagcccctggaaagcttatcattcaattcggattaaggccgc

SEQ ID NO: 49328 - DNA, 1930 bp, Bovine  19866880768713
  misc_feature (1)..(1): n is a, c, g, or t
nagtaatcccatgatattgatgatgcctggaagagactggtggctataactacagccaagagaggagttaggaattcactgttccaggtcacagggctccttacatgctgtacctctgactctgtgaaaaagagcaatggaagaaatcactccattgctagatctttacgcacactggggggatgtttggttcacatgcttgaagtttgggattctctgtcattgtcaggaacgcatgcatgactgaactatattggcattaaatccaagttcattatatgtttatattcaagttagctgaataccgacaacctctttctatgtttttcccacgtgaaatgatcaagtggcagaaatgttttttaaaagtatggtttttatttctacagaaattatttgaaggtacaaacatttagcatgaagattcttacagaattcattaaggaggtattaataatagtatgttagttgctgttgcactagaggaggtggctagctgagacaaatctgattagtcagaaccctgccctgtttggtaatgacagaaggatggcattgaacttaagtaacttaaggaataaatcccgcattttccgaaagcctttcatgtttaacccagtgtcacaaataacgccacatggtatcccacctccctatattcagcccaactgtatgaaaatatctttatactgcatagtcagttatgttgctcagacttagaaaacaaactcaataatttattttaatctgtgttcattaagttttgtttaacctacaagaataatgaagcagcatttcttctgcccccaggaaatagtatggaaacacttcagacagaccgactccattactaaagaaaactgtgtttcgggagacaccccctaacttatggttttgattaaaggttcttcttgcattcttattgcttttaacttttctgttgtttgttgtaaaacctgatctataaaagatctcaatttgaaaatcttagacttttaaaacctagaaaattttgcctacacaaaacagcaaatattctcttgagggtaaagagcacacaaacagaaaaatgaaggaaagaaaaagaaaagacaagaaacctagtattaaaacactggaaagctgctggccctggttaatcttatttttgtgtattattaataaaaccaaaaattattttggttttccaaagaagcaggacatattgattcatcagtagtacatacatgtcactagcatagagcaccttccatttgctggaaatttttgttctgctgctgctgctgctgctaagtcacttcagtcgtgtccgactctgtgcaaccccatagacggcagcccaccaggctcggccgcccaccaggctcccccgtccctgggattctccaggcaagaacactggagtaatcttcaaatgggcttccctggtggctcagaggttaaagtgtctgcctgcaatgtgggagacctgggttcaatccctgtgtcaggaatatcccttggagaaggaaatgacaacccaaagtgaccacaattttattgggagataaattgtaataaatttgagtcaattgccatttgttattgatcaacataatttcagagtttagggaataaccaagaagtgtgtcatctctgaacctgcataatacttatgccaaagtagatcttcatccattcctgaatttattcctctattaaataaaaatgggaataataataattatatcacagattctgcttgagacataagaatattgttaagtgcaaaaaaatatgtaatttctgagggctttgtcatttttggatataaaggtacttcattttccaaaaaacttgaatatcataataactaggctaaacggatgagtaaacatttctagtttatggtatttatcctgaggtctgccacactgccaggtggtaaata

SEQ ID NO: 49329 - DNA, 1670 bp, Bovine  19866880813492
  misc_feature (1)..(1): n is a, c, g, or t
nctacattttcttccagaggcctcatgcatggaagaagaaccggaaaagagggtagttttccatatgttgtccatttggctgtcagcgcttgttctgacgaaaaaggaacaaggtcttgagtgactgctagtctgtcttaaagtatggtaatgaggctaattaggagagatgagcgcccagctagatttgtgaaggcaattatccatctagcttttgtgccatgctttatctttatcagatccctcttctctaattttgtcatttctcaaacatcacaagaatagtgaaaatgtctaaagcaatatgatcagtatggttggtagaaaagaataaaatatactaatgaaattctgtgaacctgctttatatttggactcttccaaaataaagattgggaacatagctaagatagttcttgcttgtagtgttgttctttagtttacagaaatgaaaattaattggactttattattatgagtctatatatcttctttggtaagtgaacagtattttgcttggtccttttatgttagtcatcatggcaagttagtaatttagtgtagttaaaaggaaaagacatcagaggcttgcaaagcaagcataaaatgtattctcttttatgtgatttagaaagttgagacattttagtctctgttttcaaaggtttaatacattttaactttgacaacaattatgaaagtaaactaatggactcagatctctacatagcgatttcatagcagatgacattgaacatacgtttcatttgttctaagtatttaatcacagaagttaacagttaaaacacttgtttttacaaaaaaaaaacaaaaactgccaatttatttctgaatagcgctattgacatttcttctgagatatataaaatatggccttctaagagcatcacattagttctaaagtgtaactaattttagccccctcgcctcaaaagaagaaacctagagttattgaagattatgctaaatgtttaaaagtttacaaactcatagaaaaagagatgagacttgggtttaccagaggcgagaaagggagaattgcaggagggtggtccaaaggtacaaactgccagttttaagataagtaagaactagggatgcttggagaaggcaatggcaccccactccagtactgttgcttggaaaatcccatggacggaggagcctggtaggctgcagtccgtggggtcgctaagagtcagacacgactgagtgacttcactttcacctttcactttcatgcattggagaaggaaatggcaacccactctggtgttcttgcctggagaatcccagggagggctgagcctggcgggctgccgtctatggggtcgcacagagtcggactgaagcgacttagcagcggcagcagcagcagcagggatgcttacaacaggatgcttccagtgaacactgctgcctggtgaagggataggaaaattgttaagagagtcagtgagaattttcatcacaggagatcttttttttcttttttctgtttttgtttttattgaatctatatgaaatgatggatagttagaggaaccttttgtaggaatcatttcacaatatatgtaaaccaaaccatcatgctctgtgccttaaacttacacagtgatgtatgtcaattacttctcaatacagttggg

SEQ ID NO: 49330 - DNA, 2783 bp, Bovine  19866880851821
  misc_feature (1)..(1): n is a, c, g, or t
ntgggtgcttaaagggggtacgacaaaatagataaaatggggacattattcaaatgcagcaagattaatacctgctgctctttgggggtttagtagtagataagggattccgaattaagcatgacattctttttaccaattcacatcttcagatactctcattgttaaataaaattctctcaatatgaagttactgaatcgagagaggggttgtttttttctttttttcttttcgtgaacttctaaagatcaataatgcataacagaagaccaagacagaatttgaagtatagtaggtgctaaaaactaaagaaacatttcttagccatttgaacttcattttcttcagtggggtgactttggcgtgtttttcctctagtaaaagtcagtttaagctaattttgtgctacaagaaaaaacatctttccttctccaaactacaaaatgattaaaattagagttttagagaggtatggctcatgaatctgtgagctgaagatgaagtaatttcctccaaaatatttttcactaaatgattctcgcatcttctcagagaaaagatgagcatattttcaaaacatattattatcagaagtgaaaaaaccaatcattttttaaaagtatgtgctctttagaactttttctgtaaggtcttcatttctgcttaatacagctagtcagacagataacatgaatccattttgtaacacttttgttccacaattgtgtcccatacactctatgagtagataaacaacagcacttttgcagtagaaactagtcaggtaaaagagtcaaaacacagttctacaatgaagtaaacagtgtatccctagagtagtgagaagacaatgaatctcgtatgcatgggagctgttcatatgttatcatcaatttaaacggatttggaaaaagagttagatttatatatggtcttgcttgcaaggaaaattcatatcaaactcttcagtaaatctcatagtcacctactaatgaccacctgcatatttccacactagagtcatttaatactgtccaccaccaatttccactgtaaaaaatattcatatattaaatatagaattttattttcttttttaagccataaattagcttaccaacttttatggaaatatgcactggcacagtgagaagcatttttattcaggggaaaaaaaaaggatctgagtgaaacattctttagccgtgactaactaaaaatattagatagaataaattttgaaatatgtatctaaatagtaaaaccatttgtatttaaagggttaataccacctaaaactgctgaggctggtttggaactgataaaaagctgaggctatagcatcctaccagcaaagttaaatagtacaatccatcacaagtattagttcctaatctccttctgctccccaagacttaaatggtgttttaaaaggggacgtgatcttcctctctgtcaccctcaaatctaaggcaatcgtcaagagtgtaaatttactcatatgaaacaatcattgattaaattggttaaaaaataaaataaaattacatgcttttgcaagcacaaaacccttaagatggctggtgtttttccacctgtaataataaaatatttgaccattaagtgtaccccaaattatatattatataaaaagttaaagccgaaggtctgagggtgaattatgtcctttaattgaaaggataaagttacatttcaggtactaagccaacaaattcatggtcacttaaaaatgtaatgaatgaagtttcacggactcaattttgctggtttgcctgagaaatgaagaatctcttcatgttctttttagtatttcgagttggaatatacagcaaatcaaaatgctgtctgtatcaatccatttatattaaccacaaaagatctgtagagaacttaataaaagcacaaatattttttgtaaactttttcaagcaaattacttatttatttatgaaataatttatgaagaaaatttttacctcatggtttagatatattacatatgctcttgattgacacaatatgtttaagctcaaaggccctcgaagcattagcattttttaattctagtaggaatatttcaaaacaaccagctaatacatgaggtcataattgtttgacagttgtttttaatatataaaataagttatgtatattgttttccttcaaatgtttgttgatttgtttttatagtcctggcatttgcatggcacaaactgaattaaaggaaatattaaagatttatttacatttattatcttctgctgtcaaacatatgcaaagctcttaaaaccattctcttcttttacttttatatgcaatgcatttctaaacgatggagcctggatgttaaaatgacaaccttgctttttgaagggtgcaccagaaaataaagaagaaattaagagaaattttaaaaagcaaacaaaaggaataacttccaactaaaataacttttttatgatcttccttaattctttgaattctggaattttctctcaaggctggaccactgatgaaacaattccttgagttgtattaatgcttatttatttaccaaaatcacatagtacacttttttattttaaacattcctttcccaccttttcttgtagtttattcatcagagatgcaaacagggattagtagttaagcacaaacatacttgtcttacattttcaaccttttagcacataacttacttacagtccccgtgcctgtaatcacaagattttacctgaggaacacgtatttcagaaatgaa

SEQ ID NO: 49331 - DNA, 1407 bp, Bovine  19866880878005
  misc_feature (1)..(1): n is a, c, g, or t
ncttcgatctttcccagcatcagggtcttttcaaatgagtcagttcttaacatcaggtggccgaagtactggagtttcagcttcagtattcagtccttccaatgaatattcaggactcatttcctttaggatggactggttagatctccttgctgtccaagggattctcaagagtcttctccaacaccacaattcaaaagcatcaattcttcggcattcagctttctttatagtccaactctcacatccatacatgactactggaaaaatcatagctttaatgagatggaccttttttgaccaagtaatgtctctgctttttaatatgctgactagattggtcataacttttcttccaaggagcaagtgtcttttaatttcatggctgcaatcaccatctgcagtgattttggagccctaaaatgtgtctttcactgtttcccttgtttccctatctatttgccatatgtatatatatataaaaccacgtgtgctcagtcacttcagttatgtctgattctttgtgaccctatggactgttgcccactgggctcctctgtccgtgggattctccaggaaataataatggaatgggttgccatttccttctccaggggatcttcctgacccagggatcaaacccagggacccagggatccctgcatctcctgcattgaaggcagattagattactaataaggacctaccatataacacagaaaactctactcaatacactgtaatgacctatacaggaaaagaatctaaaaaggagtggatatatgtatatgtataattgacttactttgttgtatacctgaaaccaatacaacattataaatcaactgtagtccagtaaaaattttttgaaagaaaaaaatctatttttcatatagcaatgccattattctgaatactgagctggcttgcacacagggagctgacagtatctatatatgggtcagtattttctgtgaagcactatttggaactggtgaaaatgtgtgccatataggtaggaagaataaagagttaaccctaatgtcccttatgaaaatccctgtgtgagaaattgagcctacgttgctggggtaaaaccaacacgttttaggctggaatgtgtatgcacaagaggctttattgatatttcatggcaatttaacgcagcataacttgcaatctctagtacagtgctgcccccatacataattttcattgacttcttaacatttaaactagacacaatttaaatctttctaagcaggtcagcgtaaggaaaagccttattgcctacaaggtagtttcatggtggggataaactttaattgcctctctgtcggtgaataattagtagtattgcatgttatgtgcaaagaaaaattataaccaacagtaacctgttaaaaa

SEQ ID NO: 49332 - DNA, 830 bp, Bovine  19866881008569
  misc_feature (1)..(1): n is a, c, g, or t
ntgtttaaaataaaatgaaaattgtggaaagctaatacccttgggatatacctacctttttgtaatctttctttcataaatgaaatattccaaggagggcctgatgattatgaagagtcaagagtcttttaacttcaaaccagttctcactgggcttctaatatatgtatttaaatctttgaaaaaaaaatactgagaaataaatttttaaaattgggggaaggaggctggattagtcaggaattacttcagagactatggatcttaaagaaaatattgactttaggtagaaaaaaaggtggagggggcggcaagggaactcctaaaaagggactttgctaagcaaagaggtgagaatgctcatgaaatacatttgggaggtaatcgggacaataactagatacattttcacaagtaactagagagccatataaattagcaggaagagcccaagtttcattgctagaatatctaagcatcttgtgaggaataggaaccgctgaatttttgaggaaataattgtatttactgaatgccaagcaccaggcatcactaaatttatcatttttatttaatttaatccatgaatctctatgggggtaggtgctcttgccatcctattttatagatgaggaaactaagacttgaacaattaattgacccaaagtcacactgaagagtaagtggcagaaacatgattgggacctacatctttctgaaaagtaaatgaatcaaacagtattataaaggtgaaaaaaatggaacagaagtagttttgaggaaaggaggggtaagatataaaaaagggaagccggttaagaccacaagct

SEQ ID NO: 49333 - DNA, 1179 bp, Bovine  19866881121382
  misc_feature (1)..(1): n is a, c, g, or t
ntgatttgcctaaaccccacaggaagccccagtatacaggaatagaatcaaaagtttctgattcctttcctttgctgatgccactaaatgtgtcaaaacacttcaaggtccttctttcaaagtagacggaaaacgtttcatcaaagtctgtgtttctgaaattcaccttctaaaggaagaatattttgaaaagagttgctagaaaacaaatattgcagttatatgttttccaaagctactctttggaaatactagcttctatctctctttttctatccctttcgtttactgccttccgttggggcagggcttccatggtggcacagtggtaaagaacccgtctgccaatgcaggagatgcaggagacgtgggtacgattcctgagtcaggaagatcccgtggaaataggaatggcaagccactccagtatcacatggagaatcccatggacagaggagcctggcaggctacagtctaagaatcggacatgtacagagcacgcacacttggggcagggtcgagagggagccattccaaaggagagatctgtgggtccttctgggaaggtgctatgtctgcccacctgacccagtgccaggatataggaggcacttgagacatggtcatttaataaataagtgaataagaaaaaagatgcattaaaaagtattaatatggagagtgactgctttcacagggtacaagatttccctttgggctactgaaaaagttttacaaatagatgctggtgatgtttgctcaacattgcagtattcactgcgatagtcattgtgatacttaatgcttttaaattatatacattaaaatgattacaatggtaacttttatgttatgtgtattttattatgataaaaatgttaaaatatttttaaagttaaaaggttgccttgctgattaccccttagctgagaaattttatctgctaataggcatcctttttgagtatcagcgattagttcaggtgaatttgcaaatgaagacatctgaagtaaattgaagtaaattaaaataagcatctcattctcagttgtaaagctttatgaatacagttggtgcttcatattcataggttctgaatccacagattcaaccatttttttgtagattgaaaatatatatatatatatatatatatatatatatatataattccagaaa

SEQ ID NO: 49334 - DNA, 925 bp, Bovine  19866881196056
  misc_feature (1)..(1): n is a, c, g, or t
ngatcattattttccccttataacaggtgagaggcaaatgtattaaaatctctgatttgaataagatcacaatttcactaaacaaattaagaaacattactattcattgcccatacatatgtcattcttccttttgttttcctctccaagaaaaaaaaaaattaaaaagcatctacaatgacaactgttgattcaaacaggccaatctgactttgcatgtttgcctgagccaggctcaactttatcctttcttctttgttaaactgagactgtttcaactggtccaagggcaaagacccaaacatagcacttcagttcaaaaagaacagctcatggaaaagtatgcatgcatctctttatctagacggttatgagagaaattgacatttcatttgtatgtaaattggatttctactgataacaaaaataacgagtgctgtgctctgtaggaatgcctttgactttcttcctagcgtttgccaaaatacatctttgtatattaaaggtagtttacttttaatatacaatgttgctttgtctgttttccaatctgttattcaattgaaaagaaagtctcaattacctcaatccagctctgtaactggcgaacagctgtctcagtcctcccataagaaatctgtgtcagtcactacaaatccatttggtaaattaacatgcatgtacaatatggtgaatctaacggatgcatgccatgacaattcaataagaatgctcaccatcttcacataactgcttaaccaagtgtattaggcaaagttttggctcattttttaaaattcatttgtttttggctgtgctgggtcttcattgctatgcacggggttttctttagttgaggagagccagggctactcttcattgtattttcttcatttttttttttagagtacaaaaccagatacaa

SEQ ID NO: 49335 - DNA, 716 bp, Bovine  19866881378055
  misc_feature (1)..(1): n is a, c, g, or t
ntttaactgtgcctccaaaaagcccccctttttttcccttttcagtgtcagattttggcactggcatagaagaaagtccctgttgaaacactcttgaccattgttgtaactgaaggaaaggtgaaaatggatctgtggtggcagaaatagaagcagtaagaggcttgagcagttcttttgacaatagtgactttcacgtggaatgaaaagaccgtgtagatataaatcttcagctatattttcagctgtccaaatacatattgctgtaaaggcaggacattgttacagaaacagcatgggttagaactctaaagatctgagtttttctagttctagtctgttaagtaatttgtgtatgacatcacatgtttgctttgctcattttccaaatatggagtaagtctaagtatggagatgggggtccttcagacctatgtagtagattatatcatctgtatgataaatttctaaaatcagaagatttgaagaatccatacgcataatttaaaatgtgggatttccccggggaactctcattttctgcaatcccgtgccgcgagtcaccaattgcatctcagaagaaatggagctaatctgttttaacatgtcctgatatattgggcaactccagcgtggtgacgtgtcagtggaaaagtcttgggcacattcatacctgggtacaatgtatgattgctagaatatgaattgcctcatgt

SEQ ID NO: 49336 - DNA, 848 bp, Bovine  19866881383467
  misc_feature (1)..(1): n is a, c, g, or t
nacatacgcaataactttttatctggagaatgcataaatcaaaagtctgttcttcagtgagctattacaaaataaaaatacaccctgtataatgatctctcatgtcaaccaagagacactgctgatgccctccaggtccctcctgttctgttctcttcccttcaccagaagttcatcactcttcctgactgctcacactttagattgattttgtgtgttttgagacattgcatgcattaacgcccagcattcataatgcagtaaaagtatgcatctttttatgtctgacttctcatgctcaacattcccattagtgaaattcatccatgttgttgtatgcagtttatttatttttattgcagtataatatcttattgtatgaccatacattccactgtagttggaatttttgaaccagttcttttgatgtacacctgagctggttccagttttgacagttcagataaatgttgtcagttcagatgttgtgagtattcctgtgaatgtgtgtgtgtgtgcacatgtgtgcatcctcacatttttaaattgaacttctggttttatgtcattccagatgctttaagttgctaggagtctgatccagatgtttgagactttactgtattcttttatgttccaccttattcctttaaaagacaaacgtgtatctatttttatacactacgctattaatagagactattttagattttggaatattagaggatacgtggtaaaaatttgtgaataaaatatatatgtataaatgcatgtagttgtggtaaatattagtatattaatatatcataaatacattaagtaccatatgatattcacatataggacaa

SEQ ID NO: 49337 - DNA, 1226 bp, Bovine  19866881407216
  misc_feature (1)..(1): n is a, c, g, or t
ntggaaaaaggcttgattaatgctcgattagactggctatttagcagttgctagggctgagtcaactttattaaagttcctgcagagcagtcactggagtgcatctgcttcttcccactgtcagattctgtccttcttactgtcgtcccatataatattttcccctcccctttgtggtatttccctggcaacccaggattctatttgccaaactgtggatgcagcatctccactcacctttccttgttggcaggataaaccacttatttttttttggtaattaattccatggctgaaaattagcatgtttttttcctttcctttgaagccttcagaattcctgtctctttccacccccctcaatttttacaggaagcttttaatcttgaggagttctaaatgtatcttctgaatttcttggagatttctgggaacaccagaaatagaaagctcttgagtacagagcatcaacaagtcatatgactccaaaatacacctttacaaatgaaagcgcaaaatgacaattgcctttgtccctgtcaggtaaatggctcattgtacatcaagtcgtgataaaggcaaaacaaaaactcacagtgctgttgacataggagcctatctggggttgctctttgactatcagggactttgtacaggttcagtggcatttcaacacttgcctgttctttaaacaacatcatcttctagccagaatataaatgtgtgatgaaaatttctacatattttacacagtcagcctcttggtgtagtatttcctgataacagaaagttggttggcaaagaggaagttatctgaatcattgaagtagctctcctggttgagataaacccgtgttcagcaacttgttttcgatttgtaaaaacaagccagataagcctctcttgccggggttatctcggctctttcagaggattccagactaatcgtgcacccatgcagtctgttgccaaggcttatttagtgacaatcttctgccttgcaaatgaggcatgaaaatttaggcaaatatgcctggaaacctccagattaaaacaggaaaagataagacaactggtttgttgaactagataagatatgagaatgaagcctcaagggatcatatttcagaagattgatgaagaaaattctcaaaggtaatgagccaaaaattcaatagcttcttgagagagaaggaagagttttatttgtctcttccttaaacaca

SEQ ID NO: 49338 - DNA, 1093 bp, Bovine  19866881469239
  misc_feature (1)..(1): n is a, c, g, or t
nctcaattatgtttttaatgctatatacgatgttttagaaaatagatacaagtctattcaaaagcactttgaaaaaatattatgcgagtaatcatttcattcattttactggaagcatcataataatcaaaatctgctttgcttctttgaactctcaataccctgcatataaagcatgtgagttatccagctttgacgataaaggttttagcagcatacatttgtcacatttactttgcagagatggacatatttaatgtatatttaacatgaaccaaagcacatgtatgtgagcttttgctccagagaagcctagaagaaaagacaatatatatactaggtatagattttaaacttaatcacaacttgagcgaagctatgggtttttttctggaacaacccatattttccagcactggaattgtatgggaacttgaattgtgaagccatgaaaagtttttgttcctcttcttttgaaacttgccttagataggctcagtttttgcaaccccatcatggaatcatggaatccttgcatactttggaaaattaggacagataatttgttgaacattttttttttccttctgtaatctggttttgaaaacaaaaatatcttggattggtgaactagcctttttgcttccagtgttgtatctatgatatctatccttcatacttcagctggagggatgtacctgtctttttacaagtcttcagaattaaggctggagtccccttagcacagaggtcacctgtattttgtatccttaggattcagtcttgaggagactgtttgtgaaccctgaagttcatggagcatgtatcactgaaaaatcatcttagaatgaaattctctgtgtttctctctcctccagttgaggagcagggactgattcttgttaatgttttttgcattaacagtggttgaagcacagtacaagttggttaaacttagtctaggtgcaaaagagaccttcaggaatagttacagatttccaagaataccaagggctttagaaatcaagtagaacaacctcctccccagtgccaagaattccttacatgatgttctttaacagatccttactag

SEQ ID NO: 49339 - DNA, 1348 bp, Bovine  19866881940221
  misc_feature (1)..(1): n is a, c, g, or t
nttgaaatcctcatccataacattaaggccaaagctgaaatatatgtgttccttaaacttctgtaaaatactttataaaaagattgctattttaatttatagaaaggaaaatagctacatagaatatcagatttaaattttttttcaatatttaactcaaatataataaataagaacagtgttaaagtaaaactcagaaaataaaagaaattttcttaagaaaaacttgagattcaaagtaagcaaaacccactggcacttaatgaatgtatttttttttttaagatgtcagaaatttaaaatattatcaaatattagaattccattctgcccattattttatgacatttttattaacaatttcttttctgtgtaagataataaaattagagataggaaatttttgtaatattggaatcacataaagttgaaccaacagcttttccatttccaatttttagacaagtaataattgcacatggtagaaataaaattttgcagaggatttataatgcatcttatgcctcacaaacccagggctgctttccctgtagcaactactttcaactgtctctgtttttaatttcttttggtagttagctccttaactctaataatcaatatagattttaatggtctccctttgtcatttaattttttaagtttttattagcatatttttaatttttattggagtagagttgattttcaatgttgtgttagtttcaggtatacagcaaagtgaatcggttacacatatacatatatctaaccttatgttttacactttattggtttaacttttattttgtattggagtaaagctgattaacagtgttgtgacagtttcaggtgaacagcagaaggactcatctattcatatacacgtatccattcaccaaactgccctcccgtgcaggctgccacgtaacttgaacagatttccatgtgctgtacagtaggtccttgtcgattatccactttaaatgtaacactgtatacatgtccatcccaaatatccactcttttctagattcttttcccatgtaggatattatagagaacctactgtagagcacagggatctctacttgatgttatttttttttttttaaggatttaactcatacaatctcttctcccttcccaatgctggcattttaaattccagtgcttgtcctatcagttctacctaatcttttgtttagctgatttctgtgtttaattatgaaaattataatgctccgctcctttgacatattttacttttactatcccacttgtcatattttagttgaacctttacatttaaaatgctataattgacagataacatttacattctctt

SEQ ID NO: 49340 - DNA, 1561 bp, Bovine  19866880122732
  misc_feature (1)..(1): n is a, c, g, or t
ntttgggctccaaaatcactgtagatggtgactgcagccatgtaattaaaagacgcttactccttggaaggaaagttatgaccaacctggatagcatattcaaaagcagagacattactttgccaacaaaggtccgtctagtcaaggctatggtttttcctgtggtcatgtatggatgtgagagttggactgtgaagaaggctgagcgccgaagaactgatgcttttgaagtgtggtgttggagaagactcttgagagtcccttggactgcaaggagatccaaccagtccattctgaaggagatcagccctgggatttctttggaaggaatgatgctaaagctgaaactccagtactttggccacctcatgtgaagagttgactcattggaaaagactctgatgctgggagggattgggggcaggagaagaaggggacgacagaggatgagatggctggatggcatcactgactcaatggacgtgagtctgagtgaactccgggagttagtgatggacagggaggcctggcgtgctgcaattcatgggattgcaaagagtcggacacgactgagcgactgaactgaactgaactgaatgaaaaatttaattttgctagttcagcatggaaacgtgtgctaagtcacttcagtcatgtccaactctgcaatcctatggactgtagcccaccaggctcctctgtttatgagattctccaggcaaggatactggagtgggttgccatgctgtcctctaggagatcttcctgatccagggatagaatccgcatctcctgcattaggaggtgggttctttaccactagcaccacctgggaagcccattaattcagaataaacctcatcaaatcaggattttaaaaatgttacttcaaagtaaattcattcagtttagacttcccttaaatttcaattttgcttaagtggcatcttttagggaggtgctggggattattaactgcgggttgtatgcatgtttccttcatcagagaaaggaagcagcaaggtataaagttttagaacaatagtaatttacaaagtcaattactaatagttttactatcttacaggatgtaaaccagcttgtccggaaatgtgcattttcagttaggtgccaaaactgtatcgaattacctccaagaaagaccctgacacagtgccaacagaaggcattgtgaatttggcagtgactgctgtagctgtgaggcaaaggaggtctttgacactagatcaaaagagggactctaataagctgtaggttttgggtgctttccttataattaaagctattgtagaatcagaattttgcttagaagctcctctataccaatcaaaaaagatagtacatttgacattaggaaatcgattgcccatttgttctaagatggacaattttgaaaattttcaaaaattttttgagttcatctaaagtggccactgtgactccaaattattctgggtgaaatagtgccatttcacccacacatttgtgagatgtgtgtaagaatttgagtaacaatgatactatacataaaaaaatagat

SEQ ID NO: 49341 - DNA, 810 bp, Bovine  19866880395167
  misc_feature (1)..(1): n is a, c, g, or t
ngaatgtgttattctgtggtaagatcacccacctctttgattctggctggaaacagaagttgaaacttgccactggttgcataagcgattccttccatgcagtttgtctaattagaaatttttaagtatagtgatcattagcttctgggtggagaatttggtgtttaatttaaatagaatcctggtaatgttcactctcaagatatacctattctcctcccaaagagtgtgattaggtgcacccttggtttttgatgctcggtgcaagtagggggcatactgttatatgacagtatgacacatattatatgataagtgctggaatggaatttcctgcactttgctgtgaggctgtttgttgaggtgtgtcagtgtgctgactttgcatctgtgaacacatgaactgggggcatgtggaactggtgtggtgagagtcccatgcccggcccaggctggggttggtcttggcgggagctactgctacttgcaagctggaagggactatctctagattactcagagccactttctacactgcttggggtgttgagaagatttatttgcaaattcctgcttgagtttggacttatcactgaacaggcctccgctgatttttcgctggagaagccttttctgaatctaaatacctgtgcattatacttcacttgcccgtggctggatgtgagggcctgtggtgttcctaatgagtaaaatttcaaaataatgggtgactctccttcagaagtgccttttaacccaatttaaaatttgtttttgattaactttttaaaatgagggatcagtttagcc

SEQ ID NO: 49342 - DNA, 1597 bp, Bovine  19866880444212
  misc_feature (1)..(1): n is a, c, g, or t
nattattatcatttattgcttttcatcaactatttaattgagaagattctcccagtgatttatacccatcataaaatacttggtcttatttctattaattatgatttggaagatgtagtaaatataatgttaatgaatgtgttgaatgatgttggattaattggaatgacaaaaaccgccttaagcaaagaatgatagtttgagactgttggcaaattcaaagatagaactgtatttactttgtgtcctgccccatccttagaaatctgacttgttcggagcaagaaggtagtcaaatatacagattcagagcaagaagttacgttcaattttcagttgtcattcctggtatttggaaaaaatttgtttttcttaattgtggaaattagaaacagaacaataattccaagtgcaattcacccagctctgacaattgttaactcatgaccagtcttggtcgatatattccctttcctctcaacttgaatggcattggattattttaaagacaaccccagacatcatatcacttcatctctggttttaacaagtcttttcttgggggtgggtgttggttggcttgtggctttctatttagtactgtagtaggagtgtgtattagtcacttagtcctgtctaactctttgcagccccatggactgcaaagcccaccaggctcttctgtccatggaattctccaggcaagaatactagagtgggttgccattcccttctccagagaatcttcccaacccagggattgaagctgggtctcccacattgcagacagattctttactagctgagccaccagggaaggagcataaacacatgattcatgtttcccaagaatgcctgttattggtgtgccatggtgttgcaagttgtccctttctttcgggaagactcatgttaacccaggttttaatttgatatatgttttagaaagtcaaaccatccattcattatgagaagtttggcattaagaacctgaatagtgattccttctttccttgttgtgatcaagccttaaggaaagtaaagtattacttcattaaaaaatttttttgtagggcagaatctaaaacgtaggatttagagaaattggatcactagcagcatcagggtaagttagcccgaaacattcaagctataataggaataactttgtgaatgggaccagaagtagcctgtggccacacattttgcatccaactccaccgtaaggatggattttcagtgggactggaaatgctcacactcaaaatctgatggtggagaatacctgtcccagattgcttggatggactctgccactgtggcttctgtgcaacgaaccccttttcagacggactaaactttcctagagcaattctctcttttatttaggtgactgcataactctgccctcattcttcacttgttttttttcccataacttcaaaggtctagaaggcacttttctatagaaccccaggtgactctaaacctttcccctcaaccttctcttctgtagtgagagcaggacaggtcttataaagagggctgatgaccatctgatgtggtttaaggggttcctgaacatcctccagtgcaa

SEQ ID NO: 49343 - DNA, 1225 bp, Bovine  19866880494298
  misc_feature (1)..(1): n is a, c, g, or t
nctgagctttcttcacagtccaactctcacatccatacatgaccactggaaaaaccatagccttgactaggcagacctttgttggcaaagtaatgtctctgcttttcaatatgctatctaggttggtcataactttccttccaaggagtaggcgtcttttaatttcatggctgcagtcaccatctgcagtgattttggagccccccaaaataaagtctgacactgtttccactgtttccccatctatttcccatgaagtgatgggaccagatgccatgatcttcgttttctgaatgttgagctttaagccaactttttcactctcctctttcaccttcatcaatgtaatacattaattaacttaaaaagaaaaagcaaattggctttgagagacgacctgaggggctcatcaaaaagggaagtacatggatttttgacatttgttttggctgttaagaaactctttattctttttggctatattctggagagttactgtcttagataaataatgccatccgtttgaatgagttgtttaccatacaagcattttaattgtccttttagttaacaaatacagaaggactgaataaacctctctccgtttgtgtgtatgtttaagttcaatatttttggatgatcatagtgttattgcagttcacaaagttactttagtttctggctaagggagaacgaagtgaggagtggggatgacaatgaagaaatctactagtaatgaggaagaatgatagaatgaagataaatgatggtgaagataaatgatgataaaaaatggtgaactctttaacagctcgtgtgtgtgtgtgtgtgtgtgtgtgtttcaaaaagagacttgtaaaatcttttggtgcagagtgtagagatgaagatacttatgtaaacatccagacatgccagtaactttccacttgatagaatgctcttgtgatatgccaacacccagcaaaatgttctttcatactttcagaattgctgtgaaaatattaccttatgccctttttataaagaatctacatatttgaaggggaaaatgtctatgtaactttgaaatgttttactaaagcattcaaatgcctgtagcaaaaaatatatatatcatttcttaagggtaagctgatcccttacagaatacttacactccacttgcaaaattaaaaaaacatgctctgctggattcttctgtagtaaattcaattttcagctt

SEQ ID NO: 49344 - DNA, 2957 bp, Bovine  19866880567090
  misc_feature (1)..(1): n is a, c, g, or t
ntgaaaaagaaggtaaacaagccctcataaactctacttcatcaacagggataagatgcaaccagtgacctgagtggtttgtgggtctcagttttggagaccttctttaaaaaaagaagattaaaaaaaaagaatcatcttcagggcttcacaggtgcctatgcaagtgagaggccctgactcaagcttttttgatatgaggtaaatctgccttcaggggcagtctgacctactgccaggaggaactgttttgttgggtagggggctgtcactgcttctctgaaagaaataagtaagtgaaaaaaaatgaggaaaagaagaagaaatgagaatgaggtggcgtattgcccagcctcacttgagaggacgccacatctccacagtgggtcttctacacctcagggctggtgcatggacctcaggtgcaactcctttagtcagtttttgcgaggcctcactgaaactagtggtgctggctttgctgagcccttttctttcttccaagtggactattgtaagagtactggtgaggagaccatctacttcacgagttctctgaagtctgggagtggcttctcttcctgccacgggccctaatttgttgagagggagactgcatgtggaggatctataactggaaacaaaatccatgtcaagtgctttgctattgtgtgggacaggagaagaatgtagatcatggagaataaatgaatgaatgaatgaatgaatggatgcattcatcaggaataaatgagaatgtttcacaaactgaggggtggaattaagtcaacctctgctttatttgagaagaccattcccttaaaaaacctgtgcttaagaaccagttgaaagtttactttttatttctagtgtacttctgtttcattgaaaagccaaaaagaacttttaaattttcacaacttttaattatctctaatttgctgttccatctctcaaattatgcacataattgaaggtggagtgattccaactctgttctctttcttccttttgcttttattcctcagtttttctgtttctttctttcctttttaaaaactctgcctttgtgaagtctgattttgacttgcctggggtaaccagctatagtctataatgaggtacctgaaaagctaacaacctccttttctcagctctaaccagagcttaaatctttctggcaaaagggctaatcaatgaacttaccaattcagcatatttcttgaataaaaaatcaaacttttcctcaggagtttgcaacttgttcagattttgcattagcaggttggcttctttgccttaaaagaaaacaaaaaccataaagacattttaaaaattaagagttgaacttgaagtcagatgataagggctggaatctcaggtggtctacttgtgctaagttgctttggtcatgtccgactctttgtgaccctatggactatagacttccaaggctcctctatccatggggttcttaaggcaagaatagcagaatgagttgctatgcccttcttcatgggatcttcccaacccagggattgaacccacatctacttgttagctgcttgctatccagccttgggcaagtcacttaacctgtctgagatgcagatgtaaatttttttttttccctttgaaaaggaatgacacctactttgcaaaataagtgattaattgagaagtttataaaaatgtgtggtacagtgtcaggctcatggtagattttcaataaatgttgactataagagtagtccctaaatttccatcctaagaattcgttcttagttacttccccttatactctaaatattccagggaattgtgaacattctgaaaatattcagaagactaaaaaaccacagactttatggaagagtaaatcatccacttccccatgttaattgttaaaaaaaaaaaagaagaagaagaagcaaaccagcctatatctgactactataaagcagccggcattaatacctggagctgtaaaaaaattccagcccaaagcagagaaacttgatagtttagtctgcccatgtttttggttttgttcctttagtgcctctttcttttttggggacggaaaccaagtgtcttgtttctgtgtgtgagcccatttcatgcagtttttgtgggaatgactctgatcgtatttcctatcagagaataaagtcaatatatagagaaaatggacccaagacacttttccccaggcctttttgtgtctctttggttacaagtttagcctccccgggtcttcccttctcccacctagaccttaatctctgttggcagtttcattttctgttcccagttggagtttgtgttatgtttaaaaactcatcagtttatgattatttgatagtgagcctttgattctttcttttctttccccattgttcttcctttttgtcttttgagctcaacctcccagatagccttcctgagatgactggatctttggtatccacagggatacctgtagatctttcagtatccacagggttgagggttgcaggcaggagctggaccctgaggctcacacacatgtaccactgcactgtctttgccaacagttgggtcaaggtggggcagcttccccatcctcacctacctgttatacctgccctgtctatctgaatagagaggttaagccacccagtggagcctacatttcctgatataaatctgcttgagaatgttaacaattttgacaacctctcccacaagaacaggcgtttctcctttgctggaatttttattttcatcttggagaggcaaatatatcatggaattagggtttccaggtgaaatataggacatgggacactcttatactaaaaaacaatggtgtctctgaaatttaatgttccttgggtggcttgtattttcacacttgctaaatctggtaactctaatggcatcaaagaattttaggtttagaaggaacttcaaag

SEQ ID NO: 49345 - DNA, 576 bp, Bovine  19866880607079
  misc_feature (1)..(1): n is a, c, g, or t
ntattgattcttactaagcatttttttttttttttcgattcttactaagcattttatgcaaccagtaggtggtctgaggccagtgagaaattgagaagcattgatctagggaatagaaaccctctaaaagcagcaacagcaggtattttactcactgatgtcccttctattatctgctcttttaggggttcctctgtttaaagactggcttatgagcacaatattggaagattcccagcagaaaattagagaagcccttgaaaactgaccggcaagacctctggatgtttctcggcttcatcatcttgttcttcatttacatttgatgcagcaaatacttcaaattggctgaaatctgcaaaatttggttgttctggtatctgctgaggtgaggtactagtgtgagttattaggccatcggcatccactgggcgatgcacaacgggaccaggagcctacaggagggtttaggatacaggaaggagcaaatcattttactgatctagtgtcacagagtagctttccttttctttgaaaatttattataaggatgctctgatttattagctgaaaatt

SEQ ID NO: 49346 - DNA, 1064 bp, Bovine  19866880624730
  misc_feature (1)..(1): n is a, c, g, or t
ngaagagggatgttctgagaaaccctggaagggagaccccttcctgaagcaacttcatgaggtacagtatcccactgtgtgctgaggggtaaaggaagacacctctactttacatatttaccccacattcctggagctttgtgtcccgtcaccttatgcagatgtgtttcagttaagtaaattatatgatcattaaaaaatgccgaacaaagctaaggaaataggtcctcaagtccagtcttctttccttctgtgcctatcatgccagagttcctagcactatagaaagggcctttaaaaatagttactaatcattgcatagtatagggaaacaaagactggccagatgtttcaaacacagtgtttattttaatttagtcaaaataaatctgggcaccgttatcttctcttaactccaagtgcataatcaacacatgtggcaagatagtgcctgtattacaatgatcaaatggacaatttacactgttagtattcaattaacatccccaaatgtttattaaatgctgacatattgatggagctatgattagactctacataaaataaattaatcagacaggtaactgctcaggcaccatttactattcaaagtaaataacacagctaataagacacacgaaacaatgacattagtctgataagcatgcattttcagaaatgactgggctcattccattttaccaccaacttctgtggaaatagtaacttcatcaaagctatgttggctataactggattggatttttaacaatatttgtataaaatacatatataaataagtatttttctatatttgcatagagactgtaagcatttttaattcccatttttcagaaaagaataaaataattgttaaatcaagttttatgaatcctctaattctctttgtttctgtttttttttttttcagtaagagaggagtggaaccaggaaagcctttgagagggatataagttgagtgttaaaagaagagtatatgcttgctatgatgacatgaattatgaaggttttttttaaaaagtttattggcgtataggaatgaa

SEQ ID NO: 49347 - DNA, 1170 bp, Bovine  19866880670234
  misc_feature (1)..(1): n is a, c, g, or t
naaagccagctgctgcagaagagcagataaaaaagcagcagaccaaggagggaagttggggagtcagaggtgggtagaagtgggagtcaggaacccccttctaggaagagatggctcttaacccctttaccgagtcttgaagaagagaggagtatgtcaagtgccacattcctttcatcaaaaggagcaataacggcagagcctagggctctccacctgaggaaggagatgtgggtagaggcaaagaaggggatctttttcccttttgaatcttatctctacctccctccagtcttactgactctgaaggtgtggcctggatgtgggccttacccccaggggaatgtcctttgcctggacacgggagctacctgtcccagaggctgggacatgatggctcccatagctgtccaagtgctctggactccaaggcaaatgtatttcctggggccctttgcaaacaaacaaacaaattagagattagtggttttgatggatgtggaggcagggaagtaagtgcagaaggtatataatttaatttctatgtatacctcatgtaataggtatagttagttagtgttacttgctcaggcatgtctgactctttgcagtcccatggactgtagcccagtgggctcctctgtttatgggatttcccaggcaagaatactagagtggttgccatttcctcctccagaggatcttctcaacccagagattgaacccaggtcttcactgcaagcagtttgtcccagagaagccctgtaacaggtttaaacgggtttatttaatgagtttaacccaaaaatctgctgtaaaaaaattgtaaccccaacctcaagttcattccaatgagtcagcactttaaaactatatactggaaggaaaactggacttttgactcagataaggttgttttccttcaaccttcttccacacttctgtctttcttgggttgagttcaacagtggctcagaatcagccttcctgccttaatccaaaatggtctggatggtgttcgaaaacatgtctatgtcatgattcaacataacagctcttaatgccactctgtttgccacgttcagaagaaataggacaggattgcttaactgctccttcctgaaacgtggagggaagggatgcaggcactgggtagtcagaaaggcaaga

SEQ ID NO: 49348 - DNA, 1070 bp, Bovine  19866880696286
  misc_feature (1)..(1): n is a, c, g, or t
naattttttctaaatcacatatagtatgtgcctcaaaagtcaaaccaagataaaaaaaatgttataagactgagtggatttagtatttcctttaatagcattttgctataataatgtaaaagagaagaattcacctttttaactttggtcgctgtgaagttgactgggatgcaggatttgaaaaccccgtgcttttactaactggaatggcattttttttggtattaacaacctgagtagagtgggcactaaaggacttaggacttctcctcttcactttgcgctcctccattgttttaagttccttattgcacccaggccagcttcttatgacctaaggaaatacagcagatttatacacatatgctgtaagatgccaaaatgaaaggggttcaaagacccactttatgggttgaaagatgatcaagaatttcagaggtcattaaagaaagttagaacaaggatccttgagcttaatttactgtacgaaatacacagaagccctaaccaaaactgcctgttagacaagaaattttgttcatcattttactaattcatcccataaatatttactctcttccacatgtcagacactatgttgggcattggtgagacagttctgagcaacacaaagtccttgccctcaaaaaacctatatcgttatagaaagggtatgacacctaaacaccaaacaaatcattcagcctgactcaagccttaggtagtctttaggtttcccttctaaaatgtattctttgaaaaaagaactagatttaaacagatgtataactgacatcagttcagttcagtcgctcagtcgtgtccaactctttgcaaccccatgaatcacagcacgccaggcctccctgtccgtcaccaactcctggagttcacttaaactcatgtccatcgagtcagtgatgccatccagccatctcatcctctgtagtccccttctcctcctgcccacaatccctcccagctgacataggtacctggcattttaactagcaaccagaaaccttatttcaactatcacatagaaattcagtttctcccaagacataata

SEQ ID NO: 49349 - DNA, 1209 bp, Bovine  19866880698451
  misc_feature (1)..(1): n is a, c, g, or t
ngaattaatatgtgtgaagcccttagatatgtgtctaaccatagtaaacagtcaacagtgttataagctgttagtaaaaaaatagtaaaaagagacaagaaggagtggatttgaaagtatttatactatattgtatatgcttagtcgtgcccgactctttgcaaccccgtgaactgtagccagccaggctcttctgtccatggaattctccaggcaagaatactggaatgggttgccattcccttctccaggggatcttcctaatccaaggatcgtacccaggtctcctgcagtgcaggcagattctttaccgactgagccatcagggaagccaattctctattattatgtcatatttatgttggagttattttctgctatctgcctattatatataattctgtcatttagtaagcaaagcaagaaatcaaactgttgctatagcacttattatatattattttttgtgactgctttcttctagaatgtctcagactttgagataatatatgaggtcaccttttacatatgttagttttaaaaaggagcctgaaaatgttatagagctatttgaattatatggttggagtcaattataactgataatttatcatctatatctgtctatctacctatctatgtacctatcatctatccatctatgagacataaatgtatttacttaattatacttttttacattgcttctaaccaaatgagaagttaaagatcctcagatcctttgcagatataactatgtaacttcacaaccccttcaaggcagagaaaactatattaattaaagcttagaataataatcctaaccaatccctacactgcttccctcccaccccccattttgctctagttctactgttgaaatcataatcattgctgcagaaatagagggagttcctctcctggagatgttacccagaagcggtgacgggggctggagaaggccagctcccattgctctggaccctgcgttgggtcccctccttggagatattgggaaaaggcactgggcacagcaaggctggcacaagaagatgaagaggcagctctctttgtttaagaccaggaaaagagggaaataaggggtgataaacaattcgcctttactgtttcctgtgcagtctgtctcaagtggacttatctagggtctagaccacactggaaatctgaaggtcaagataacagagatat

SEQ ID NO: 49350 - DNA, 1005 bp, Bovine  19866880739302
  misc_feature (1)..(1): n is a, c, g, or t
nttgtaaataaatgtttaagaactctggaagtgtgtgctgctgctgctaagtcgcttcagtcgtgttcgactctgtgcgacccgatagacggcagcccaccaggctcccccgtccctgggattctccaggcaagaacactggagtgggttgccatttccttcccctatgcaggaaagtgaagagtgaaagtgaagtcgctcagtcgttcctgactcgcagcgaccccatggaccgcagcccaccaggctcctccgtccatgggattttccaggcaagcgtactggagtgggttgccattgccttctccgggaagtatgtgaacaaatgttaaatggtttgctctggtagtactttaaaaaaatccaactttaagtaaaaattttctacagtaaacatgtgtgttaagtcgcttcagttgtgtctgactctatgagaccctatggactgtagcccaccaggctcctcagtccaagggattctccaggcaaggatactgaagtgggttaccatttccttctccagccgccaagagattgaacctttgtctcttgcatctcctgcttctctaggaccgcctgcattggcagcccaggttctttaccactagcgccacctgggaaagtaaatactaacatctgtataataaattttattataattaggttttgttctaatccaagtacctcatgtttttttcctgttgtcttttaacatgtttaagttgtgtgaaaggatacaaattagataaactaaaaatctgtcacctgagacccacatggagttccttgacacaaaggaccaatgaaccaactgaacaaacaaggtcaatctactgctctgtcactaagccacaggaaacagctttttctttactctgtctcaggactcatccaagaaaaacatgtcaaatgacagagtttccttttgctctgtcagacctaggatgctcttgcccctggaatccctatccgctaatcccaacagaaaagtttgaaggtgcattt

SEQ ID NO: 49351 - DNA, 916 bp, Bovine  19866880759668
  misc_feature (1)..(1): n is a, c, g, or t
nagtcggacaaaacttggcaactgcgcaactgtggggaaaatagaccaaatgatgaccatctctggaaggagaaattcaggagtttttctttctttctttccttttttctttgtctattatcacaaatctttaagactttaaaaatgataaaaaaatttctttaatcagaaacaaacatgcaaatataatcttttacttccttacattttcacttgtgattttcattgcttcctctttattttccccaagtttaaacttcaggacacaattctttgaggcgaactgcctagatagtcccttgagaggacacagataacattcactatttcaaagttgagcaaagttagtggttgcagtgacggtgataatgacaagagagggcctgacacatccctgaggtttttggcaatttttgcccttctttctttacgtcccttgtatcgtttgctctaagtggtagtttgagaatgtatgtcactaaagttcactgaaatcgaaacacctccatgaaaaagggaaaaaaacatcacagagatacttctacttcaccaaaagagagacacattcatcagagtggcaaatgctaggtggagcttctttttgatggaaatttgaaatttcagtttgagagtttttcttggtaaggaaaaaaaaatccacccaatggagacaaaaattaagttggaaaagttacaggtatttggaaagccttagttgttggctttcgatgtgtaatatttactacctccctgggcctctagagtttccattaaaatgctttttccacatcttgtcaatgcataacctattgggcacaaagaaaatgttctcactgttagcaaatactgaagaaccttgaacaaactccatcgtttctttaattttattgctgcttgaattgcatgattatttatt

SEQ ID NO: 49352 - DNA, 1867 bp, Bovine  19866880815101
  misc_feature (1)..(1): n is a, c, g, or t
nagaaaagcaaacacttcaggaagaggaagttttcacagaatattgtagatctggtgtgagtggatgaaactaatattttccttcctttagcagattcatcgtggcaatcacagttacaactattatcatttagtgacactaagcttattcgttgccattgtgataagtttcctagttaatcctatgactccaagtctcccatttcttcaacacattctacaaactacagctatagtgatttttctgtcaaaaatcatatcatgttactccttgaaatgaaagaagtaaaagtgttagtgcctcagtcgtgtccaactctgcgaccctgtggactacagctcttcaggctcctctgtccatggaattctccaggcaggcatactggaatgggtaaccattcccttctccaggggatcttctgggcccagagatggaacctgcatctcctgcgttgccggcaggttctctatgtgactccttactctccacttaaaatccttcaaggacccacagaaggcaatgctacctttttagtttagcagagaaattcttcagtacctagcccctgccatcccgcccaaatgtactctcctacaatcagtatactttctttctttcttttagttgcggcatgtcaacacttagttggggaatgcgggatctagttccctgactagggatcaaacctgggccccctgcattggaagcgtggagtcttagccattgggccaccagggaagaatccagtatactttttaaaagcaatagagaactagcacctgtaaacagtaattattacgtaccaagcttggagctaaatgctttgtgtgtcctttgaccctcttaatgactccacaaattagatgttcctactttacagagaaactagagacttaggttaagtaactgggggaagtcatcagcttctgagtggtggagggcgggccccggggtctgttgtcacagtctgggtttagccagtgtcctgtactgtactccgtacactgtggagccagtgcaccatgttgtttctcctgctgaattgctggctgtttctttcccatgggctcagttgagactcctctggaagccttcccaggctccccagggcagagttgggaaatgatgcctctacaagtatggcaccaaggtagtgtgtgccgtggaaccctcattaaattgtattgggtttatttgcatctctgtttccctgactagaccgtgaacttttgggggacaagaaatttagtctttgtattgtcagtgtctacttcagtgcctgatgcatgactagctggtgtgcactgagttcttgtcaaatagaatggatctataggaattagggaatatgatgcttatcaggtttgcatattctcaatcaccctttgaaagtctattctctggcccacaagttccctgtcaaaaggtttctacatccctcagggtccttgaagattttaatgaacttcttgaggtattttcaatatttcaaaaatgctaacagaaatcattttgctaacctgagataaatccctgtgggctaaataaaatgtcaggtttctttgcttttggctaaaatcatatcaacttggtatgataacagagattttttttttcctaacgatcagaaactttgattggcaggaaagtcttatgtgtgatgaataaaacaataagaaaataagttttctgtgattaaaataatgcttgtttagtgaaagaagtttctcaaaaattaaagtcatattggggaaaactaataaaagtgactcttaatggggattctctgtgatcttttggaatccttcacaaatagtgggaaatctgccttaattaatggacacatatagcctgcaatcttcttat

SEQ ID NO: 49353 - DNA, 743 bp, Bovine  19866880853265
  misc_feature (1)..(1): n is a, c, g, or t
ntttcattataagactctaactcagaaaaatcaaccctaattcattcatgtaaaaatgcagctagtcagtcacataaaactaagctacaaactagaatctattttggaacataatagttttatgcagatcaaacaactttgacctgttagttgtgcaacactttattcactgatgcagtaacacatctagggagatacagggaggttaccctgagtcactaatagatccaggacacacatgacacttcctatccctcaatacactgatccttcttctaaactctcctttgccgagacactatcatttggttcacttctaacgtttctttcaaaaaacaacccaaatcattattggaattcttatcctctaagaaaagacctggcttctccgaattaaatatgcattaagaatgacagttaggcaattcccgattttcaaactaattctagaatagaatcaaagacctaacagataaactgaccaaggggactataataactgatgcttactaataaagacctaggagaattacctgtgagggctgtggtcttggaggcactgcaggaggttgggcaacaactccagcctgttgctgtcctgtgtgaatacacaagtcttcttttggtaaatatatataattactttgctagtacagcagataggctgaatgaatgtgatcaaatgataaagatttcaaacgccaatgtatagaactggaagccaagtccatctcgtcaaactg

SEQ ID NO: 49354 - DNA, 1740 bp, Bovine  19866880863979
  misc_feature (1)..(1): n is a, c, g, or t
ntgcatacaaatagaaattgttttaaaaatatttttattatgcagctattgtacttttctgtaatataaattttcaattatccatataccttgaatatttcttcatctcatgaaatattatataaaatgacttcactgtactcatatacatgaaccatcattaattacaaccattttgtataggagtgagcagtcaggtggtgtttggttttctttcttttttgctgctataaataacactgtaaagaacagcctggaatttgcatcattgtgtaaatctctggtaatttcctttagatagattttttaaagattatctggttgaaatatatgcatattttaaaggttcatgatttatattgctacagtttgtaccaatcatacttctaccaattaagatgttccatttcttcccattctagtttgagaaagctaaaagtggaacgagctccattagaaggaagagattgccatgtccctggaggcattttagtaggtgctggaatgtcctctggatgggatgttatcctgagaaatttagttgagcatttgaagtgtcagtggagttttaggattcctttccaatttaagaatgggagtagagagaaagaaagagggaggaatgttgaataatttggttgcctgtactctgttctatatatagatgtatcagttgattttggtgataattcacataaagcaattaaaagcacacacacacagcaaaagaaacagtgggggtacatgtaagcaattttctacaacttgttggaggttgaatttagcaaaggccaagtaggataacagaggttggagatatgctttagtttatgagcattcaatttaaaataaaatttatataatttaagaaaagtgaagtattcattgttcttagactttctcttgtacaaagcataacaacacataattcaaatattgtcacatctattattcatttaacagtttatgcactaatgaaaatattttccatataacacagggagcccagttcggtgctttgtgatgacctagaggagtaggatggggaggtgggagagagggtcaagagggagggggacatatgtatgcttatgactgattttcattgttgtgtggcagaaaccagcacaacattgtaaagcaattatcctccataaaaaaagaaaaatgtataaaacactaatcctaagttgtctgctgggctctggagttacaacaccaaatagaacatgattcctgcctttcgtagttttacagcttacaaggggagacaggtgagcaattccaataatttcagtttgatgaatgctaggaccaatacttcacaacacgcatagcattccatggcatacggtgcagaggtatcatcacaccaatgtatgtgggggcaagtatgcccagtttcaggagaaaaaatcactggactgaaatttaggtttgtgttctcttgtaggtattatctggctggatgaggttgggtaactcatttaaccacatctaaaatatttggggaaaataatgtttacctaatattggttttgtaaaaagtaaatagaacagcatgtgaaatcagctagcacgagaggcatgtactgtgagtaaatgttagtgaatcattcaatagatgcatcgtttgatagaatacaccttcccaaggaattttatgaacagcccaccagaaaagcacagtgagactagttattgcgattagagataggctttttttttttttgctatgca

SEQ ID NO: 49355 - DNA, 936 bp, Bovine  19866880866096
  misc_feature (1)..(1): n is a, c, g, or t
nccccttaaccttattccctggtttaaacctagaagcaatagtctttcatcattaaaatattgtccttaccatttaaaaataccctccatataaagtcttggcttcaaattagatcttatcactgacctgtccactccgaagagtcaaggccatgcataagtggctaaatgctaagcttggctcatactgatccacttaatcctcagtccagaggattgttcaggaagagtgatccttttatggagataaactcagtcaaggcattttattggtcaaatatatccattctaactcttgataaacagtgcgggttctgaagacagggaaacccacaaggactttcttgtgtgtccttatctttcactgagatgctgacctaacttttaaaagctatctccatggaaaattctgggctccactccaaaaccaaccagtaggaggtggctctcttaatcagtggctgtgttccgtctttatataaacaggttaagccagctaccagagcctcagcaaccaactccagctcacattaccctgagctggaaagatgggcctgaaccaaagctactttggggaagcagaacactctcgcctctcccaggttatagcaaagaacctggtgaccatatagggtaccagagccatcagcagtcttatttttgttccctgagattgttggggtgggacttgattgactgaagaggcatcctcccaccagctaatccacaaagggctctcattgcccaggatgaaactcagaatgtcagtctgtagaatcaacaggcatgactcatactgaaaagacaccactgacaaaatctgttactttctccagcatccacttctgtactttgagcctgaggatgttcctcaaaatgatgttaccccaaagtagcaacaagccacgtaaataaaacctaaataaccagaataac

SEQ ID NO: 49356 - DNA, 945 bp, Bovine  19866880873915
  misc_feature (1)..(1): n is a, c, g, or t
ntggcaagcagctcaattctaggtcagattgaacagtacatggatgaagaccactggtactggcctctgtccctcaaccttttcactgttcctagggctgaccaacgtccattactttccttctttacatgaaaaattttcatcatataacagataattctgcagtcattcaaacacttgaagaaagaggaattcattttttttttttcctaccccagcacacctgaaaggaatgacacattatcaccaaataactggctaaatgatagtggtgaatctaggcgggagtgacttaaaagacaagatgattctattatgatttctttgtggtcaggaaataagcccactactgctacccttttaagaattgctgtttaaggttaaggtatatatttctaacgtaattcattaaatatgtttagaagttcaattgtcaaagtcattttcttatattcaaattgtcatttccctctgttcatttttgcttccaaatcttgcctgcctgcaaaaacatgggaatcttggacttgagtttggaaatttattttcttccatcaaactggattacaaaatggttgggtgtgctagctttagaggcagaaatcagtcaactgatccatcgcaagagcttctgattatcttttccactaattgatttacacataaccatacaggtgtctgtgtgtgtatgcttttataactcacctattttgtggtcttgggaactacttcattttctcttgccctttttactagaagacagaccagccactatacttcctccagtttctaaccagagtttagagccatctaattctccatgttttctggaatttccatttatcacacttggcatttcttttccacttctcaactgaaagtcaagcatcagctttccctgaccttatacatttttaagagttactggtatctttcaaacattcg

SEQ ID NO: 49357 - DNA, 833 bp, Bovine  19866880894236
  misc_feature (1)..(1): n is a, c, g, or t
nacagggacacagctttactgaaatgatgggatccatgttttacatgggggaaagtatactgaaataaacactgaaataaaaaataagcctggtattaagagggtggcttaaagagtattcccccacaatgctgctatgaagaaaagtaagcatgccatttagatcatgactagaatattgaattgctaccactggcttttcacaatttggataaaatattaatatatgaccaaatcctaacactcattatgaaaacacatatggaaaatccttttcattcagagcagacaaccaggaagcactgtcttagccacaagaatgtgtccctattaaggcaccagaaccctagccttcagtgctgctgtaatttgccacacaagagctattattttgcttcacatttctcacaggactcgagtttgaagctctgaggcaacaagtgatgtgacaacagtattgtcttcataaagatttcaaatatgtggaggttcccactgtttgacctatttttgccactcatgcattatatactgagaaagtttcatgcatacagtgaactcattcatgcttaatggttcttatctctgtgcgcttttatgtgtaagtatatagacatacataaattttttgtgtccaaatcctagatgataggatgaataatctaaatattatcaattatttcagcattttgatataaaattatagtcagatgtcttaaataatttgcttttttttctagaattttttattggagtagagctgatttacaatgttgtattagttttcaggggtacaccacaatggaatcagttctacatatatccattctttt

SEQ ID NO: 49358 - DNA, 777 bp, Bovine  19866880981641
  misc_feature (1)..(1): n is a, c, g, or t
ngttgactctggacatgcattatcatgaaggccgccgcgaggattttgcacagccttgtgaacgttgttggcttcctctgcgtcagcctcttcattcacagaggtgtttggctcgtcatcagaggtgtgctgaccttgatcatccttttcaggcatttttgcttctctgatttttttatagagttcatttctctcttcttgtaaagctcgacagaggttctctaaccttccaattttcatcacgaagcactcatattctttagctctcaatgctttctgtgatttaaatacacacacacaaacaaaagggtaggaaaagtaaaactgccaggttttactggagtaaagtaaaatgctctctggagacaatcaaaatcattaatccaggaatttgtctgttaggctctgaccacagggtggtggctgaacagatccttggtcagggacatcacttctatttttgcattatgttggagactttgatagaattttaatccacttttttttttttttaaggaaagaaagatagcaaagcttctttctgcttcagtctaaggcttctaaaaatcttaaaatagatgcattttctgcttctaagacttagaaggaataagcagaggcttgcggcaaaatgactgagatggactgggatttggcggtcagcaacgccttatctgtcctatagataaactgctatatgctaatccagcaactggttgatttctgtttatgaataataagcacatctctttggaattggttgtagtttgggatgaa

SEQ ID NO: 49359 - DNA, 678 bp, Bovine  19866880990818
  misc_feature (1)..(1): n is a, c, g, or t
naccctggcaaagtaaggagggcccaagatctcactcacaggccgaaagttccaggcatttgggatacagtgatccttcagggaggctggcaggacacctggagacccaacagcatctcttagaggaggctgtccttggaacaactctcctctgcctaatttttctccacagttcaattccttctccatgtttattctttttattgccattcacatttattcttgatagcacaccttcttactacagcctgcttcccctgcttcgtgacatctactgtatgtttatttccatagtgctctgtgtttgctaacatagttgcaagcctcagatttacattgcccgtgagagagtatccaatgggacctagtttaaggcacctggttagggcagatgttcagtgttggtcccgcatgagctgatggccagtctggagccagttgcccttgactcaggaactgacttctgcctactaatttatggtcaggttgtgatgatacctagcatttgatatataagaagctttccgcaggaagttctgggcatatcaggcactctgagaatctgagaagggtgtagtgaaactgtcagacaagttgcatagctttcccagtataaaaatattattgatttatttctacattaaatgcctatgtgacccaagtcagtgatttgtgagg

SEQ ID NO: 49360 - DNA, 1701 bp, Bovine  19866881078977
  misc_feature (1)..(1): n is a, c, g, or t
ntttctcctgacagctcctgtctttttatgtgagatattttcctttttatcaatgaacatagtattttgagcctcaaattataccaaaagacccaccttgtaagaaattagtgtctcaggcaatataattttagtaaagaaataagcagggtttgttatcagaatatcactgaattttaatgtggaaaagactataggatccaagctattcatatgtctgcatgtaaattaatgaaatctgttgactcattataaacatttacagaatacctatggattgtgtgccaggcacagcactggttttaagaggcacagtgatttctgaaaagttgttttcttagttatttcagattttgtccctcaatcttctttttgcattattaattttcactttgaattttgtgtatgataaagaaaattctacctcagacactgcccaaatgattgtgttttatttattagcagaatcaaattttatgatttcagtagacttatttttctctcattgaaaaacagtgtaatgtacaatgcaagatgccattctatgggccaggattgggtgctattatggtttgacatgtgttaaatgccatgttaacagctataccctctttttctagccagtggccagtgaaaaactcagacttgctgggtagcatgggatggtcccttcatttactcattcattcatggatggaatagttataaaagcaaataatatccaaatcatggactataattctaactaggagattgttgacttctaagttaatcaggaacaataaggacagaatcactatcatatgtatattcaacaactctttaacagatggctgtaatcatttttagtgaaatatatatagtaagtgttagcattcaaagttcaaggaaataacatctctgatacttaatttctccagattaggaagtgtagatttcttctaaatttctttctaagaaatttcctaagacatatacctcagaaagagaagaagcactaaagagcctcttgatgaaagtgaaagaggagagtgaaaaagttggcttaaaacccaacattcaaaaaactaagatcatggcgtccggtcccatgacttatagcaaatagatgggaaaacaatggaaatagtgacagattttattttcttgggctccaaaatcaccacagatggtgactgcagccatgaaatcaaaagacatttgcttcttggaagaaaagctatgacaaacctaggcagcatattaaaaagcagagacattactttgtcaacaaaggtctgtctagtcaaagctatggtttttccagtaatcatgaatggatgtgagagtggaccataaagaaagctgagcaccgaagaattgatgcttttgaactgtggtgttgggagaagactcttgagagtcccctggacttcaaggagatcaaaccagtcaatcctaaaggaaatcagtcctgaatattcattggagggactgatgctgaagctgaagcccaatactttgaccacctgatatgaagagctgactcatttgaaaagacccagatgctgggaaagattgagggcaagaggagaaggggacagcaaagatgagatggttggatggcatcactgactcgacggatgtgagtttgagcaagctccaagagttggagatggacagggaagcctggcatgctgcagtccatgcgatcttaaagag

SEQ ID NO: 49361 - DNA, 729 bp, Bovine  19866881099766
  misc_feature (1)..(1): n is a, c, g, or t
nacagagagtgtaaatatttgagagtgttatttatgaggttggaagaatgaacttaatctgtaagaaaatagaacagaacctgatcaaattattttcaagaatgttacatagtcacctatgtctttgcaagtgcatgtaccagaaatatgttgtgaatggtcattttttgatatttgcttacagatagggaaatctcagcagccaacacttatgggcattttgacgttgaagtggaacattgactgacatgattgcagcccttggaggattgactcaactggctcaggtctatagcacacccccagacttacagttagattagagaaagaacagtaagaaatgatattttgaaggagttttatataatattttactccaatattttactttccaaagggagaaaatgataggaatgggtttatgtttccttcatgaagatttgaatataggatgtattaattaaacatacaccttcatttcactgatggagaaacttgagccaatagtgattgaattacccagctctttggttgcagagctaaggctacaactcaatggtttttactcttgacctgttatttttttaagtctaactattaatgggaagagttctccattttcggtaaaagaccaaagcagaaggaattgggcttatacctatatcaaaaaagtttagatagattgagggagattaactgtaaagtaactaaatactgtattttctttat

SEQ ID NO: 49362 - DNA, 2607 bp, Bovine  19866881101239
  misc_feature (1)..(1): n is a, c, g, or t
nccatttggctcattgacttgcaaataaaagccctaacgcgggcctgggccactacccagtcggagctctcttgctttctcaaatggggaagccgaattgtttccccaacaccgtgatgaggttgcttggagcttttaaattgctctttatgtggtaaaaatgagtttagcgctccgaataaggacttctgttcagagttgtttcttcataactagatatccattgacgacttcctgctgtgaagagcaagttccccccccccaccccaccccgcttttttttttctctctgcatcttgctcacaggactttttaaggccctttttgaagactggaaattctgatacatttcccctttcaagaatttgcagaagagagcaaatcctgattatttgaatttattacccctctgtcttcctttagttatatatgtgtagaatagttaatatatggatttaaacattgttactgtcttcctctctttccttttccacaccctccatcatttataaccgtgcgtgcaataatttttaaacctcaaaaaatgtttgcacaggagcatattgcagtttgggttgcaagaatcccctgatctcttgtccacccacgacttatacctgtaggtcatgggcttgcagttacagaatcagaggcttgagaaaacaacaacaacaaacttgatacttcctatcaaaaaaatagactcaaaaatactggtcaactttccccgccccagccccctccccctcaaaaattgccagatagattgtttacttcccttccttgtactgcagtgtcttgcgacacaaggactggctcttgaatgtctaatctaaattccccttgaaaccattaaagaaaggtgcagctccatcctgctccagtggttccacaaactattgagaaatcccttgaaaggtcacctccccatcccccaacccttagaggaaaaaaaaaaaattccttctgggaccagctggtgagaacatggtgtgctttgttcatttattcatccatccagtgaatatttaccaagtgccgggcacttttcctagctcctggagagacaaccaggacaagaactcacggtcaagagtggagatggacaaacaagccttggacacactttgataagtgtcacagcagcactaagcacagggacttctggagcacataggagggacaacctggacttccagccttgggaaggcttcccagtaggagtggtgataaatggaggccaggagggggacacaggtgggagaaacaaggttggagaggtgaacaggctggatcctacaggcattggtccccaagatgagaaattagggttgtgtcttgaaggtaaagagaagtgagtgaaggcttgtgaaccagtgagatgatcaaattttcattttaaagcgatcaggacaatactgtggagaatggattgagaaagtaagactgggagtggggaatccagttggtgggctactacagtcatccaggagtatgcaaaacccaatgtaagcaggggcttatcctgtgaactggggtgaggcagtgcagctgtatgtggccctgaaggtggtatatggttgtatttctttcctagggcgctcaggcttaaacaacagaaaattattgtctcacagttctggagtctagaagtccaagatgaaggtgttggcagagttggtttggagcgcccgtgagggaaaatctgttccatgcccctcttctagatgtggtgatttgctggccatctttgatgtttcttggcttgtatgtgtatcgccccaatctctgtcttaatcctcgcatggcatttcttccctgtgtgtatgtccaaatttccccattttataaggactccagtcattggactgggacctatcctaatgacctccttttaacttgattatctccgtaaagaccctatctctaaataaaattcttcctaaggtcctggggattaagagtccaacatttttggagagccattattcaacccataacagtggtagagaaactgagtaacacgggatccccaccatcatggaagaaagatgtaggctggaactctcttcccagctctcctgctggtctgcacttacattccttcatgtgagtgctcagcctgaggtcttcctgactgtcttccacaactagcacagtttgcctacactgttttgtttttcctcatggtatttatccctacctgatttgttgcatattcagttttcactgtcttcccccgctggaatgaaagctccaggagagagcagggacttcgcctgtttattctgtgtctaaaacaagtctttcactgattagattaatgagggaatggatggatggaatgaatatagcagaagtactaagggaacccaaataaagggcttaaggagggggtggtcagggaagatttttctggagaaggttactttccaggttggcagcagagaaatctagcagaaaggagaacagcagcttaccactgtctgcattgtggcttggcatggacttgaggaaaactcatctgtttgtgaggatcgttgattgctaagtagggagggaggaccctattggagtgaacttttgattgaaacaaaacttttaaag

SEQ ID NO: 49363 - DNA, 997 bp, Bovine  19866881111553
  misc_feature (1)..(1): n is a, c, g, or t
nctgctttttctgaagcaaacagtgtgcactgcatggaatggggaggcatttctgtagtggttggttaggcgatcatgatggggccattgaagagaatagtaaacaggaggtggaagaaaaagccatgcctgctgcagagtagtttccccttcttactcatgtagcagaaatatgagaccacagttgataactcagtgacctcatattttgagtcatggtttcaccctatttttgggaattttccttcccacatacccacagcaaactcctcccacccttctctgtgagctaaaatgaacacaagtggcaaacatatatttattttcacccaatacagactctaacagaacttcattaaacaaacatttattgagcacttattgagcatttactatgttgtaaggaatggttgagtgtaaagtagcacaagctatggtctttaattttggggaaacttcattcttataagcacatagaaaaccatactgaaggtggcaaaaatataaataaaaatgaagatcataaaagaggaataaagtgggagactaagatagagggaggcctcatggaggagctggaatttcatcttgattctaaatgaaattggtggtggttcagtagttacaaatccacctgccaagaaggagattcgaggttcaatccttgggtcaggaagatctcttggagaaggaaatagcaacccactccaggattcttgcctgggaaatcccacagacagaggagcctggtacgctacagtctatggggttgcaaataattggacatgacttaacaactaaacaacaacaacagaaaagcaaatatagagaaaagaaaatgcaaaaatattcatatttataaagtgagtggtgggaaggcaatggaattgaaaagacatttcaggtcctttcaggatggcatgctgggctctgtactattcaggctgaactttattctgtagggagaagacaatcactgatgggctttaaataggca

SEQ ID NO: 49364 - DNA, 1495 bp, Bovine  19866881121594
  misc_feature (1)..(1): n is a, c, g, or t
ntggaagagggggaaattagatgtttcattttagagttaaggaagatttgaaacgtcatattgctttcagatttaaaatttacactgaatatttcaattactctgtgtgactcatgggatgattgttccttcaaaaaatacgcagcatattttctaaaattttttgatacttttgaattgctgtaattaatatatggctatcttagttttcttttcaaaagcttttggatgacatttatttttaataagaaaaaatatatattgtaatcacttatagttacaaaacttggggaatacaatgccatcatttttacagaggaacataagatctgctgttcctctttctgtaccaaactaagggaacacgtgatctatcccatcaatcagtaagactgagtatcctttttcctaggctacaaccaagagatagaaccttcaggctgcatgtctgttaggaaacactgcagtttatttactcagcagaggacctgttgactttaaaacaagtttatttatcgccagctatcaaattcaaggcccttgctgcacctgctctgagtgaccgtgtactcacagttgaaacctttgctcaaacatttatgttggggctgagcaatgttacctctagggaactgaggaaatacatcctacttagcctgcacactattctccctttatcgaccaaactctgagttctgtaaacctagggacttataaaccagcataacgagagcgtgcattctctctacaggaagaaacccttcagcgggcacgtgaggaagaagagaaaaggaaggagatcacaagtcatttccagaacaccctgacggatatccaggcccagattgagcagcagagtgagcgaaacatgaagctctgtcaggagaacacagagctcgcagagaaactaaaaagcatcattgatcagtatgagctcagagaggaggtgagaaccacatcagacaatttacaaatactgcatatagatctgggtctggtttgtgaaggttgggaggtcggttaataacaaagttatgatcagccttatcaactgattaatatttaggtttggacttcttttactagccaaaataaaaacaaatgatattacaaaatacctggctgaaagtcacagaggatttcttcaaaactagaatcactgcaaagcagaggcaataaacaaggggtacaacatgaatggatttatccttgaaaataaaaaataatatttctcagccttttttaaactctctctacagaaccaagaaatacttcatgcatgccctcttaagaattagcatgtcatcgaaattaaaagtctgcattgtatatactgcacaaataataatatatgtactattatatagtatatatataatatactatatattactatacatatactatattactaatatatatactattatatagtatatatataataatatagtaataatggtattgttatttatacttagtttgtgccaaacaa

SEQ ID NO: 49365 - DNA, 2212 bp, Bovine  19866881129305
  misc_feature (1)..(1): n is a, c, g, or t
ntttgtatggattttataatacttagaggttataacattcgagtgaggctgttatttataagcatactccaaaaaagggtttttgaagaggtttttgttgttattgttgtttgtttgttttgactatggggacatcaaggggagggaagctgaatgataagtgaaatggcctgaaaccatgagtcaaggtaaaaaaaaaaaataataaatcaaagggaagtcattgaacactggtgaatatgaaaaaagaaattaaatcagactatggagcaaaatgcataaatttagtatccagaaatactcttcatgggaggttctattagtttgtctactaatagaggtcggtgaagtaatagtctccaaaaggtggggccattaactctgcaggcatttagaaccggtctgaacaaagcacctacaagctttaggtagggaataatattgtagacaagctgaataagcaagtgtaaagactctgactccctcagacttccagctcatcatgtataggcagttcaaaaatcctgccgcctcattcctgccaacttggatgcaaattctccttggccagaaaactgatcattagatatgaaagcctcttttttgttgttgttgttggctccccaagttcctcacatatcacctggcattctgctcaacaaatagttacaactttaaatgcaatgtgtaatgtcagaggtttacagacgctatctcatacttgaagatcactgcagtctcctgtcttacataggaggcaaacggtgctcagacaccaggctggtgagttggatttctaaccctgggatacctcccgtgaaagagaaagagagcctgggtttaggtgaaagcaaacttaggtgtgatatcaggcttaaattccctttactctgccaaagcctccaccagtttgtaccataaccttctttatccttgcagtggaattatttgaaattcttatttgcaactctgtctagcagtttgcacagttcactccatcattgtctgaatgagaccatccagagcgtggttcctcttcctagtaggaactgaggctttttagtggatgtaatcctcatgacccagataatcacgatggtgtgatcactcacctagagctggatatcctggaatgcgaagtcaagtgggctttaggaagcatcactacgaacaaagctagtggaggtgatgtaattccagttgagctatttcaaatcctaaaagatgatgctgttaaagtgctgcacccaatatgccagaaaatttggaagactcaacagtggctgcaggactggaaaaggtcagttttaattccaattgcaaagaaaggcaatgccaaagaatgctcaaactagtgcacagttgcactcatctcacacgttagcaaagtaatgctcaaaattctccaagccaggcctcaacagtgaagcctgaactgtgttcaggcaaaccataaacttccagatcttcaagctggatttagaaaaggcagaggaaccaaagatcaagttgccaacatccactggatcatcaaaaaagcaagagagttccagaaaaagttctacttctgctttattgactatgccaaagcctttgactgtgtggatcacaacaaactgtggaaaattcttaaggagatggcaatatcagaccacctgacctgcctcttgagaaatctgtatgcaggtcaagaagcaagagttagaactggacatggaacaatagactggttccaaataggtaaaggagtacatcaaggctgtatattgtcaccctgcttatttaacttatatgcagagtacatcatgagaaacgctgggctggatgaagtattagctggaatcaagactgctgggagaaatatcaataccttagatgtgcagatgacaccatccttacagcagaaagtgaagaagaacttaagagcctcttgatgaaagtgaaagaggagagtgaaaaagttgccttaaagctcaacattcagaaaactatgatcatggcatctggtcccatcacttcatggcagatagatggggaaacaatggaaatagtggctgactttattttttggggctccaaaatcactgcagatggtgatggcagccatgaaattaaaagacgcttgctccttggaaggaaagttatgaccaacttagacagcatattaaaaagcaaagacattactttgccaataaaagtccggctagtcaag

SEQ ID NO: 49366 - DNA, 1461 bp, Bovine  19866881152136
  misc_feature (1)..(1): n is a, c, g, or t
naatactggagtgggttgccatttccttctccaggggatcttcctgacccagggatcaaaaccccaggtctcccacattgtaggcagatgcttttaccgtctgagccaccattaggttgaactaatttgaaagattagtgagacagggcaggatttggggtgaggacggtgcctcacaggatttttggaatttctccatggcctcaccattgtactccaccctgaaatccttcccttccctctcaagtagaggggttccttgattacattttgagttgctgaacaaagcagacaaggaattctggctccaaagtagcctgtggcaagaccaagttggtatgctgcgctttgcaggagatacgcaaataggtgagtggcttttaaaagttaatagtgctaaaagaatcctgtcaatccattctgaaggctggttgggaagccagcttttggcctgagttaaagtcaaactagcataaaatcagaaaaagctgtcaaggacggccaactccaggttgtgatattagtttgtgaacacttgtaggagacagtacgcagagaaaggaaatgtaatcagggctgttgaagccttttccctttctgtctccctagcatgaatgttgcatgctcagttgcttcagttgtgtctggctctttgggaccccatgaactgtacagccctccaggttcctctgtccctggggggatccaggcaaaaatacagacctcctccaggggatcttcctgacccagggattgaacacaaatctcctggatctcctgcattgcaggtgggttcttaaccgttgagtcacccgggaagcccatatctccctagggggactagtataaaatacggccctgtgttcctctatgcagcgtggcccacgggaattttttaaatttctagtaagcaacctcttaaaataattttcttcccttggctttctgacacttaatatctccatgttgacaaaacacatagtgctaaaattgtgcacgaaaatcataggccaccttgtacatattgtcccgttacatttatttggaatgactctttgaaggaggataagcaggatgatggctagttccatatttcttctctttacacaatgtgtttagcaaatatatggatgatgaggccaggaggtaaaaagtgcctgaattgctgtactcctagtattttaggtaaactaaatatacaaatctttcttaggttcctctatctgataacatattttagagtaatgactctcagctggatagggccacccctctaggaggcagatcagaatggaagagggtaaaagagggcagtaatttggaaaaaagagcatattccatactattgtatattggggaaaatgcttaaatacattatacttccagtaaaacataatgtagaagactttgaaaactcttcttaactaatggggcacggattttaacaatagtagaaacact

SEQ ID NO: 49367 - DNA, 1436 bp, Bovine  19866881277645
  misc_feature (1)..(1): n is a, c, g, or t
ntatgactcaaagagcaagggtaatttttgttagctcactttctatggtggttagacatacttggtgaacagacggaaattatacatgtatctggaactaacaagatgcacacatagaaagaaggttgcaccgtaattaaaaccacatatatattttagatttctgttatagtgggtagaaaaaaatggggctttctttaatgttcctattccagcctttcctattataggcccaggacctgaaatacttagaaatccagcaactgagcaaacttgcaccctggagaacacacatgctctgtttttctccactgcccatatcctttcagcttgctggtagggagagtaaatctcaacatttgctgcaatcactcttcgtgtgtaagcatacagatttaactttcaaggcaaccatttgccattcaaataataattgaagtgcttattatttgcatatgttctagaatttcccaagtgttttgcacttgttatcttgttgaattgtcacttctgtgaagccagcatagatagatgttatcgcccttattctagtgataagaggactgattgagaggttgataaaagggctcagggaaatatatttgaagttgactgtcaccaggtggaaggcaagatgatgttttttaactgagatttctatgatggacacaaatgggccaaattcaaggaaactttatatatctatatagtaaagtgcattttgaacaacttttaaatagcataaagttaaatttttcataagaaatctatatctatttatcaccatttaatctaaacttagtcttccccccagacttgattaggcaggtttttaaatccatgctgtatccactgccttaaagtcagaatccacctaggtctaaccccaggtgcacctctctctctatctgtatgtggtctcttttcccttcttagctttctagaaacaattagatacacagctttcatttcctttctggcctgtgccctagctgcagggctctgctctgtctagaactgtctgtccccacatgaatgaaacagagttgattgctgacatttacagcatccctctatttctgcagactaaccctgcccctccaactatttccagttcaagaaagctttctcctggcattgttcttttcagagtataggaggaagctttccctctttttcttaattctgtctttgattagcagctgcaagccaggtatcttaactgcaaaacatctctgaaatctgttgctaccagtaacacaacatacaactttcaaacaactctgtctgatacaaactgttctagccagagagttcctctgaacttatttctaaaatgggtgatcttcttccagaacataacattttatgctagattttttttcaacagtgatttaaaacattgcatgacccatttatccttaaaagctcaactt

SEQ ID NO: 49368 - DNA, 835 bp, Bovine  19866881284773
  misc_feature (1)..(1): n is a, c, g, or t
naactaggaagattcttgtatatggtattctgagtccattgcaacactgtcctagacttccctagtggtccagtgggtaagaatctgcctgccaacgcaggagtcctggacttgattcctgacttgggaagatcccacttgtcacggagcaactaagcccatgcaccataactactgagcccacgtgctgcaactcctgaagtccacgtacctagagcccgggctctgcgagagcagaagcagtgttcgttacacttgttggggaataccagagtaaaacctgttatgaatacaagggtttgtttggggagacggtatgttacttgaccaagtgaacgagctagagcttcatagtattatgccccataccagagaggaacaagactaggcagagaaaaatctggctcataggatttaatcatgaggaattttgctgtctgctgagcatgaaaatattcagtggcttaaaaataatcttcagaattattttttaaatgttagggagggtatgctatttaccacaccaatcattatgtttttctagcttttatttaaaatttatactttggaaaatgttttaaaacttcatatagactttgaatgcacaatagcttgataaaaggttctagtagtaattgttcttttaaagattataagcaatgtacccattaatgaatctgagaaaatcttgtagttcatttgtattgagcaatatcttggtagaacatttgaataacacatttgtttagtgaagtagaagtgataataatgaaacatgagccattttctttttctttttgaaatttgttcaattatatgatctactcattagtaa

SEQ ID NO: 49369 - DNA, 2430 bp, Bovine  19866881307618
  misc_feature (1)..(1): n is a, c, g, or t
naagtgcccaaagctgaatccagcaagagcagcaggagcagatagctctaatctctagggctgccatgaatttcctcccagaagaggggtcatcccatgtgggtcttggaaagactgcaggtttttgagaagagatgggctctccaggcccaatccaaaaagaggcagctcagagagggaagaacagggtgtggcaaggagctgggctcagcttagccatggcagtagctgagccaagtggggtgggggactgagaagacttaaacatgcaggaagattggctttgactccctgggctttttgaacatggcagatgtgcttttcaaaggaaaagctatagaacaggtgtcaagaatgaactagagagagcttccctggtggtccagtcgctaagactccttgctcctaatgctggagacctaggttcaatccctagtcagggaactagatcccacatggtacaaccaagaattcgcatgccacaattaaagatcctgagtgccacagctgagacctggcacagccagataaataatttttcctttttaaagaatgaattggagtcagagagagagctgaaatgggtacctttgcgtacgtacttttttcttctattttttgccacttgaaacatgcaatcacacatgcaaatcaacaatttgtatccaggaaggacttatacctgagcatatattgactctccacagcagtgattctccactgtaggggatccatccagccctgctggacacattccattagacttagaggccaagggtgatacctctgtgcccaagggcactgggataaccttatggagttctctcacctccagtccaaacaagttcatgttctttgctgtgcccagctcactgtatgtgaagtagagtaagacctttgatgtgatgaaaaaaaggtgatgtgatgaaaaaaggtgatgtgatgaaggcgaagaaaacataaactgtctatggcttcacagggccctatcagaccagatcagcttttgtcttagggattttctttcacttgttcatgagccctggaaagctaaccttcaatgtgcaagggtcattattcccactgcaagtgcatgagtcctcacaattattttttatttggtttctgtttggtttttgtttggtttactgggtttcctctatgtatttttgatgcaaatggaatttaaagaataattctatagggatgttattaagtacttagctttttcttctatatcataaaaacacaatcccataccttgttgctcaaatggaaactattttggtgacaatttaaacatgaaatatccagcagagacaaatcatgattatttacaaaaggctttatgaaggaattatttacttctttgggcaatttccactttgcttgtgatttcagtcctaagagtatattcatctagttcttcacaccaaattaatgggagctgtttcttattattgtttttgatagtacagcatgttgaatccaactcccatcttacttttcctaattatttgtaagctttcctcacctctgtttttctttcatggagctgttctaaatttcattaaggaggcaatgtgtggagtatcagatgtggttttggaattgttctctaatgctggagcccttgttctggagcagatgctgagcactcagattacaagaatgagaagagcaatttgtacttgtcacgtggagaagctcttgtccagcaataccaagtactgtcctttgcacctgattcagagcaaagacacggcatctctgtgtcttggtaggtccaaaatttctgtcccaaatttcccctagttttccaaactgtggctctgtctccttggtaaggaagtgctcttaccagtcaccagattaagagagaaccacttgattatcacctgggtcattgaccagaaactcactctgtggtggtgatggcgaagaaatttctggcacagaagtccatactgaagaagagctttatgagaggtgaagccagaagagaatgcactgtttacccagcacaacttgcaagttaggtgaacggagctgatcacataattcccaaaccagtggattttaaagggcagtcacacctcaagactgaaagagatcagcctcaaggaaggttctgtcactttcagccatcagtttaaatgagtgtgtcttgtaatcaacacagaggtaaagagaatacatttcccaccacaccgcacgtggggagcccacacctgtaagacgcaccgcaaacccattcatattatatgaagtcctaatagacaataaaactgtcacataaaaacgtcattcccaggaaagctttattatcaaactaagggggagagggtagaaagatggaaactaacattttcctgagtatgttctatctaaatgccaggcactttctttgttgtcccatcccttttatcc

SEQ ID NO: 49370 - DNA, 2052 bp, Bovine  19866881314855
  misc_feature (1)..(1): n is a, c, g, or t
natattttttctttgttggaatgtctttgcagaaatatataactgcaccagtctatagattctttctggtttctgctgctttataacctctgacaggaaggtttataaccttgctttataaccttgcttccaggagtgccatgtattagtggatttctcagaattcttaaaatgccataagaaggcaatagcatcctaaaggcaactgaattctgctaaattgatttttgtcaagtgtgagggttttttaatgtatttctttaagggacaagattggcagcaaagctatcgggacctggatgtgctcagatgacagggcaggggatgtgcttcttcaaggaaggactgaattcataaggtattttattaaactcattgcaagtaaacctatgactttgcatatttgtctgtgagctgattcatttgttccaatatatgtttcagactttctgagaagaatagttccaagaatacccaggagaattcaaagtgcgaataatcccagactgcgctatctcctttgaaactaaaagatttagatcctaaatggcaaattaaacaaatcacatttgatgatttaatgtaagcttccacaaattgattagtttgtggcaagttctgacttgagacattaaaaaaaaaaaaagaaaatctaccctgactttgaagaagatggtgtaagtaaacggaaagcagaatttagctcagtgtttggctttggtttctttttcctgtgctatctttataaaggctgtaagtagcagcttagaaatgctggagagatttttttttctttctttctttcgtttttttttttttttaaacaggatttggccagagactttgttatttgcatagagtaggatcttgacatatcctatgctttatcttgtccacattgtaaaacctgactatggactttaaaatttaaaacaaatcagcaattaccaaacactgcattgaaaatgtattcattccaaactgaattatcactggtgacgttctcctctctcaactttaaaaagctgaaaaatggtaatacaaaccacatggttggttcgtttcacccccactcttggcagggccagtggcgcctggcaacctcgctgtcagctgggcctgtgatactgacagcagtattgccctgaagttaagtccaacactttctttctgagaacccattagtagatgcttttcctcttatcggtcttctcagtaatgttcgaaaagggcttttgtggatgaggagaacctgtccttacagagagactggctgaaatagtaaaaaaaaaaaaaaagaaagaaagaaaaaaagaaaaaataaagtattctagcgactttgggaaaagaaaaaacaagcccacaaggacagcctctgtgttgctttggattttggtggctacttggatccagcctgactacttgctgggctcctatttcttccttaggctttgagtctccctccttaaggaaactcaaaaaaagcaaggatccagtggttggaattaagaaattgagatctgaagacttagaatacaaatgtggtcatcttggatttggctctggaaacaatggaactatttaattccaacatatttaggggggaaatatgtatttggaacaaaactgatgatgccaacatcccttcaggtaagcctgattataactgagatgacacaaacttgctatgatagttaagcatgtgaaaagtgaaacttccagaagacatcaccagagcagtcaccacaatagagatggtgtctaaggcaacgtgaaagccaatgggaaattggattcactggcagaattttactttactttatagccaaattgcataaacaaagacagaattcaactcttcctactccttttaattagacaaaaatgataacatataaagggactggtagagttcctgcatattgctggcacttaataaatgtgagtttgttcctctccattcaagcaaatttcctttgagatctctgggtccagggccccttacatgcatatgatgctcactgggcttccacaggacttctttctttgagt

SEQ ID NO: 49371 - DNA, 1197 bp, Bovine  19866881315284
  misc_feature (1)..(1): n is a, c, g, or t
naatgatagatattattgctataatatgtttaataatcctttgtttctttctcgaaggtcctatgtcacagaagatgcattttgacttctattttactcagaaatgatataaaagaatgtgagccaggtttccagttgagtcatagtagtgtaggaggttttcttttttctctaaactaacaaggttacccacaaacaattcacatcagaaacaaaacacatgatcaatggaaagtgaattcatgggactggtcactatttttagttatttatatcatacttcattgcaattcagttatacaaaatccccattctaaagtttcagctcctctcacaagtgcaatgttagttgcaacatggccgataggaaaattgaaccttcaaaaattttgaatgtgccagagaaaaagcataaaaaaaagcaatcaaggaaataagataaattattagccattattttaagcaggtctgtttttttcctctcacagctgtatttcactgcttaacagcaatcattaaaataatctaaaatatagttctatgtgagccaaaggtttccacaacagagtagaagcatgagataatcatttcttgtgttgacttaaaacataaaagggtgattattcttaaaagatattttctccttcacgtaaaacaaggaaatatacaaaaaaatactgcctgttcttggtaagtagattttaatttgtatctacactggtgttcttctcacttcattaggcttagaatttgtgactgaacatcactgtctgggcagcctgctgcctggttggagatgtcagaagcaattattttcacagatttaagattttattatcacacatacactgtctttagctatctgaatggacagcccaatcaagaatgatatgtatttcatcatctcttccttgttgttgtgtgattttaataacagttccagtagaatcccatgttgcacaccaagcatgctatgcagcagctggatggatggttaaatagagccatccgaagttagaagattactttttcccccctctaatatcaaaatctttctgaggagtcaatgagctttattagacttagtaataaagaacttcccaaaagccacacctcattttcagtgatgttggaaataactccaaaaaaaaaaaaaaatgtatctacgggtaggttgttgaaataacttcaacttca

SEQ ID NO: 49372 - DNA, 958 bp, Bovine  19866881349456
  misc_feature (1)..(1): n is a, c, g, or t
ngcagacattaggatggccaaaagatctatcattggtgcttcggatgaaaaatatattgcacgaaacataatttattccttttaacttattagaagctatttcaaaactgatagcaaagtttatttcttaccaaaatgtaaggggaggccgcagataaaatcgagtctttctccccaatgcctgggcatcccacatgttgagataacagctggcataggatattaatagatagccattgtcctggcacctggctggggaatcacagtctgagactataaccagggcagctgcaggttcttgtcagttttttctgagccacagaaatgagaaaaataatcgttttagaaatatataacatactggccctcatgaaatacttccaatactcaggaaaaataaatgaagtacattttaaaattattttgaacagtctctaaactatttagtctatttttctactggtggctcagtcggtaaggaacctgcctgcaattcaggagattccgttggatccctggatcaggaggctcccctggagaaggaaacagcaacccattccaatattcttgcctggaaaattccatcaacagaagagcttggcaggctacacacagtccatggggtcgcaagagtggtcatgacttagtgactaaaccacacccaccctactatcttaagagtaaagaatattgattgtaaagaaaatcaaactagaagaggtattggagtaagaggaaaatatggggctaaacactgatatttgaatatgtataaacgttgtgtggtttaccaattccaaataaaatagggatgcagttatgaaaaaaagaaaaagtatgaaaaagcttgttttgagaagaaaattaaactagtattgaagacctgttatacaccccagataaaaagatgctactgaatttcttccacacccttccttctctctcctttcattttatt

SEQ ID NO: 49373 - DNA, 697 bp, Bovine  19866881364332
  misc_feature (1)..(1): n is a, c, g, or t
ngaaacagcaacccattccgtattcttgcttggaaaatcccatgggcagaggatcctgacaagctacagtccatggggtcgcaaagagtcagacgtgactgagtgtacatgcatacagggacaaccaggcacataaagatatttagagcaggaaagggatcttaaagatcagacaggaagacagacaaactcagttactggtctgttgtggggaaaaaaaagcctaggcatctgtgcactacagaagggagataagaaggagacacaataaagaggattagaaaataaaggaacagaggtttaaccatttgctcactccctcctattctgctgaccacctctgccttctcagggtttgtgatatcccagattctatcaaaatcacatccaatttttgtggagaaaaaaatgacacagaatttaaaaataggtccatactctttgataagaactgcattgcaaaaaaaaaaaaaaagaactgcattgcaagaaggaaggaaaagagtacttaatggattgtaacgaggtgaccaccacactcctgttttttaacacatcaaaatgacaggctttccttaaaacataatttcaaccttagaccccttcttagaaaggctttgtgattagcagcgaaagtcaggcctacactcaggtaggggaaaggagaactcatgacccttggggaagaaaatcaaaa

SEQ ID NO: 49374 - DNA, 1322 bp, Bovine  19866881568905
  misc_feature (1)..(1): n is a, c, g, or t
ntcttgtctttttttgtgtgcttgctatttttgggttgagtaccaaatatttcatataaaaaactgatacaataatttgagtctccagatgatgttatcttccttcagagagaacttgcttctagcatttggttaggctaggaatagcttatttaaatccagtcagagaatgagatatttcaaagctagtttcaacctatttctttgtcattcttactgaaaaggatctcagctaaaagccaggtgtcgttaccaaggctattcccctttgtgagctctgaatgtttcctctcttccttgcaagaatccttacatcttaagatgttaagaagttcttaacctcttctaaatctttcagtcataacttcctgctctgcttctcagccttagttttgctttggaactgtcaagtgtcttgaagtgaaaagtgagaccgatcaggatattacttttctgggtttccctcctctaaggtcttggttttacaagtccttattgaattggtagcttaagtaattgttttatagtattttgtctatatatttgattagataaaaccacgtgaaatttgctgttttcatatctcaaaactggttgcatattggcattattatatgggtcaattaaagttgttcccagtgcaaaggttggtgttaaacaaataaccataccatcgctagaagcagaattctcagaatctggtgcatatgctatgggagcattgaataagtgtacaaagatgactaatacatatattcatataaaatatacatattcatcaaataatatttttcctgtggagtaaggtatgcatcttatttctcagaatcaagtttagatggcaagtcaactgcactaaaaatctcaatgtaataagaaaaaattatctatgtgcctaaaaagattattactaggaaatggcccttgcaactcatctttctcatttctttttctgaaggattgcttatggatgcccaaatgcattaagtttggatggtttctgccctatacaccaacagataatgagtacggtgcttggaaacaccattacattgcttgtgtgtccaacttagattggctaacccctagggaagctgctgctgtttatgggactctgaatgaacccaaaacagaagatgaagagctacaggagaggcaaagagaaaggtgcctaaggaaaataatttgggagaaaattgcactacataagagtgagtggcattttacaactttatgtcttagccgagtattgtagaaaccaatggatttacatacaaattcccacagaagaggatggcactgtcttcttgaaatagcctata

SEQ ID NO: 49375 - DNA, 801 bp, Bovine  19866881745838
  misc_feature (1)..(1): n is a, c, g, or t
ntatgttttaagtagttaggtctctattctacttcagagtacaaataaatgcctgacttagggtgtaagccaaattccaaaatgtagcaaaaacagtgcctgcatatttggcaggaattgaaaccagttcaggtcagtgtctgtttctgtccaaagaagagtttctgcatttacactgggctaggaaaacaacacaggaagacctggggaacaacaagtaatactgtcagctccagtgccgggctggccagaggagaatgtggagaacaagtctggaatcacggcttaagctccaggttgggttggcataaggtttggggtatggggtggggggcagtgagcaagagaaagagaggggctggatgcattgttgtagcaaaattgccttctcccatctcaggctctcaccttgcaaatcaccctcacttagcaaaagcacatcttacttgttaactcctcccctgctcgctaaccttttcaatcatcccccttcttcatttcagaatggccttcggaacaaagcagcgttttaaagcctttcccactaaaagttcgcccctccccccctttaaagaggcagtgtgggggtgattttcttttctgtctttttttttgttgttttaatttgtttttctgcagtctcctctcctgaagctgtcattgtttggaagttgatggatatttcttcagagataccatcatatcgcttgttattgtaacacttattggtgataaagttcagcctaaaaattaagcagctgcaatgtagcagcacaaattagtttaatgtaagcagtcagg

SEQ ID NO: 49376 - DNA, 1118 bp, Bovine  19866881896566
  misc_feature (1)..(1): n is a, c, g, or t
ncttgatattatttctaagcatgactccatatctgttgcagtgtgacagaaaacagaagtccccagattattcaccacgactctgattgagtcatttgatttccctgaacctcatttcagctgttaaaaaaaaaaaaggagagggtgcaagaaggagagtttgggagctagtaatgtcttttttatagaattgtgagagagaatcaaatgtgacaagctaagtgaaagtattttgtaaaatgaaacacctcatataagtattagttaatagcagtgataagactgtcttgtcttcttgatttgtctactgcagaagggataagtatgttttctatgtctttatccagcttatggattcaaatgttaagcagactaagaccaaactactaatcaacatgccttagatttattttcaacctgttgtaaatatatgatgtaaagatatgatgacccaacctatacatgcttagttcaacttcaccttaaaaatctcatgagcccagctgtgtgtcaacaccaaatggtactgtagttacttaccaccaacggctttgacaaatctggctttgacttcagctcaatcactcgctagcaatgtgactaattacttgctctcactgaacttctgtctttcctgaaataagggagacagcaagacagctacatattaggaccactgtggaactaaatgaaactcagttcaatctctgggtccagaagatcccctggagaaggaatggttacccattccagtattcctgcctagggaatccccatggacagaggagcctggcgggctacagtccagtgctgcgaagagtcagacacggctgagcaactaagcacagtgggactaaatgaaataaggcgacaggacctggcatatggctagatttcaacaagcggttgctatttttatgatattgtgaaaattaaattttcctaatcaatcctctgatctcatagtagctctgtttcaaaagtaaaaaataaagcaagcataaaatggtattccttataaacctacatttcacttcctagtaaccactacattcctttgttaatactcacaaaccatcaacttgaaaatccattcttgactctttctggaatcacct

SEQ ID NO: 49377 - DNA, 780 bp, Bovine  19866882089373
  misc_feature (1)..(1): n is a, c, g, or t
natcactatatgccccaagtgatcatctccatggctggatcagtaaaggagcctgacatcttaatttgtaacatttcttgatagatccctcctgactcaccccacatcccccactttatttttggtagtaggaaagaatttataataaaaaaaataatttcaatagttttaaaaattagacaactccctcaagtatagttttaaaaacaatgcttttttcataattgaactgagttctattcaacacttacatcttttgggatatgattattcagtaatgagacttattttataaaaaatatatatatatttcaaattctttttatttcatagactctatcagaagcaaacagatatttgattagggttcaagatgtggcccaacttcactgctgtgatgaggacataagtttctatttaaggtaaacattcaactatcctatggctatgagtgtgtcttaattattttgtacccagaatccagtacaatgtttgtcatattgtaaatatacaataaatctttgtgttgatctgaaaagttacgtatacacccctctgagacgatgtaaggtgtttatcaccttactcagattccaggcagctccttcatagaatggaagaaacccaactgtcactgcctgggccactaactcgagacatgggatttctggtttggtcactttcctactgagaggagagctgatgtgagatatcacatggatgatctgctcaactctaagaaagagaagaccagttaattatctgcagttagttactgag

SEQ ID NO: 49378 - DNA, 827 bp, Bovine  19866880339720
  misc_feature (1)..(1): n is a, c, g, or t
ncatatacacatacatgtacatacatgtgtacatatgttgttattgtttagtcactaagtcgtgtctgactctttgacaacccccatggatggtagcccaccaggctcctctgtccatgggatttcccagccaagaatattggagcagattgccatttcttgtacatagtctataaacatacatatacacacacatacacctataatagaggctaatatttatcagccatcccctataaaccaagcatttctaaattctttaaacacattaatttatttaatcctcgtaactttagttcacattagcgtccgtgtttacacagacaaggaaattgaaacaaaagaaatttagttattgtgcaacatctcctgcagaacctatttggaagacaagcagtttgactccagaatccatgttcttacccaacagtaaaaacagatacatacaaattcacatttataaaacaagtttacctgcttcaacctgagcactttcttgtctaaattaaccactgagcaagccttttattatacactgaaaaattgaaacaactgcaataattgttcaaataaaacaattggaaaaaactgttccaaactgaaactgtttggaaaatctggagcaagctaatccactgaggtttgaacatactgtattaaagaattttcttcctcttgtctttaacgctgtttggagttttcatgagctgtgaagactcaagggaacaagtcaaagtatccttgcagaaattctgaacaccagtaaaactagctgtcaagcataaatcggtgtctagctattttccaacctatttataaaagtgcag

SEQ ID NO: 49379 - DNA, 3966 bp, Bovine  19866880408402
  misc_feature (1)..(1): n is a, c, g, or t
ntgtttataacattttatttctacttctatatacattacagcatgctaaccacctaaaatttactttccatctaatgtaaatgttaatgtaacttccatgtaaagtaatcaagtcaaggtagaagaggaacctccacatctgaacttcacttttgcatagcaccgtatccagaaagtcaatcgtctgatttattttttaatcattttaaatcatttatgcaaaaaagtactcaaaattactagcttttaaaaattaaatagaaaataaagaaatcccactaataacattcacatattagactgtcagtttaggaagacaaattcattttttaaaagtttttgacatcaagagcctgaatttacataaaatgtttctcaatacatctatttaaagttagtttaatttttttatccatcaataatataaatctaccttacttgcattataattgtttgagtaagagtacaattctaattgaaaatgtaaaactcttggattatttccatattttcctgaaatttgtttctttaattactttgcctacccaatccttcttttacattgactgtagtgcaaactcttcttgtagctcaagatctaaacaggaaaaattaaattaaatgtataaaactattaaaatgtataaaatatgcaaaatataatttaagtaaatataatacatatgacttaaataaatatagataaatggaatactaataaaataaaaatctaaatcaatccatatttaagacatttttaaaagagcccaggcctattttacctgcatctttgaatattcaaaattaaatctatatattagtatatgtaagggtttttttatgtgtattggaacctatcttaaaacattattcatacctccgaatattttggctctagaattttagtctagttgaaagatctacttaacatattgtgtataaaatcttttaaaataattttttgaagcactcagtcatgtgttggttaattatttgaggtcaaaaatcagatagaaaccaataaggacctactgtagagcacagggatctatactcaaaatcttgtagtaacctataaggaaaaagaatctgaaaaaaatatacgtatacatataacagaatcactttgctgtacacctgaaactgacacaaccttgaagattaactatacttcaatttaaaaaagaatcaaaaaagataaacactttcctttaccttctaaataaatgttgggaatttatgtggctgttgtattatcccattatctttcccatgaactaaagctaatcaaatgtaccctcagatcaacaaactactcaaacagacacatagaatttatgcagttttttcattcaatcattcagttcaacaaagatttattgactaagtattatatgccaggctatgtggaagacatagcaagtccaatcaaaagcaagatagacctagtccctgtcctcatgaaagttatgagtttaacattgaacataggcaaaaaaaaaacaacactatgaattaatgcatatatacatgcataatttaaatattaatgtattattataggaaacaattacaaggcagagatggagaataagatgggaaaaactagtttagatgaagtggctagtcaaggactctctgagtgatatttaggctgactttgaggatgaaaaagccaagcacaaaattactggaaaggagcaagttgctctgaagtggagaagacatgtgtcctgaggaaccacaatgggcacctgatgaaatcagatagacaagcagaggataaggagtttaaaattctactctaattgatgtgggacaccactagaagatttaggggagtatcatgatgtgatgttcctttttgcccttctctggatatttcctgtttgttgctcattcaagcaatgctccatcttgcccaggtgtccgtcgtgttgtgcaagagtgtctccaaggttcctacctaggagaggaacagtggggcattttatggacatgcattaactttactcattaagtcaaattccatttcaaagtactgtgtcattgatgctaccaccagcagttattctgcttcatcaacattgccattatctaaattttcatttttttctaatctggagggtgtgaaatggcatttcaaaataaacggttttaatgtgcatgtctcttattaagacaagagaagcatcttttcagtatgtttattggtcattttcatttcctcgtcttttcaactactgtttatgaatttatgaccctttggggaagcagaaatggagagagattactaatttttccttatttttagatagcttttgaaatactcccaatactgatcttttgttagctttgtatgttgcaaatgttttattccagcatatgacttgtctgttcaagttgcctattatgtctgagctcttatttttaacttattagtttgctttttttaaattgaggtatagttgacttacaacatttcaggtgtacaacatggtaattcaatacttttatagactgtactccatacaaagttactataaaatattgactatattccctgtgctaaacattacatccttgtcaattatttattttgtacctagtagcttgtaccttttaatcaccttgacctattttgtccctgaccctaccactctcctctctggtaatcactggtttgttctctatatctgtgagtctattactgttttgttatattttttcatttgtttcttagatttcacatataagtgaaatcatacattctctttctctgacttatttgatttatttcactaaaaataatgtcctgcaggtccattcctgttgatgacaaaatttcaatctttttatagtatatgagtaatattctgttgtatatatataccaaacatttatccattcttctgttgatggacacttaggttgcttccatatcttgacttttataaataatactgctatgaacactgaagtgcatacatctatttgaattagtgtttttattttctttgtattaatacccaggagtaaaaatactgaattgtatgatagttctatttttaagtttgtgaagtacctccatacagtttttcatagtggctgtaccaatttacattcccaccaacagtgcatgaagtttcccttttttccatagcctcaccaatgctagttatttgttgtctttttgataatagctattctgactggttgtaaggcaatatctcattttcttaataatttgcactttctgtaatttaagaactccttccactctgaggttataagaatgtgcttgtgtattttcctctaaaaatatgttttcttttcaaactaggatcctttatgtatttggaatatatttttgtttctggtgtgaattaaggcatcatctaatcatttatagggataatgaattcttccctgatggcttagaccataaagaacccatctgcaaggcaggaggcctgggtttgatccctgggttaggaagatcccctggagcagagcgtggcagtccactccagtattcctgcctggagaattctatggacagaggagcctggcaggccacagtccagggggtcacaaagagttggacatgactaagccactaagcacagtacagcacatgtatttggaattatttttgttactgctgtgaattaaggaatcatctaatcatttatatggataatgaatcctcccaccttatttatcgaacagtctttccttccccattaatctgcaatgcagctctatcacacgttgctgtcttcattactgtcacttacaaggaaagttttttatctgataagacaagacttcttacctacttcagaagtgatttgctacttttgaccctttgctcttccatttaaattttagaatgtggcttgtcaagtaaagatttattttaaaagttgaaattgcagaaaatctattgctcaatttgagaaa

SEQ ID NO: 49380 - DNA, 1675 bp, Bovine  19866880608696
  misc_feature (1)..(1): n is a, c, g, or t
ncactctcagagtaactgactcatttagcggtgcttggcatcctgtgcgtgtcagcggcaggtgacatttagcccaggctttatctcagttgtggtaattacggggctgacatgagctctcacacacagcacagattgttttcagcagatgtaaccaagcaactctgctttctcttgagcagtttatctggctttcaaattgtggcattccataaagacacacacacacacacgcatgcacacacacacaaatggtttaatgtcatttttgtggaaatactcactctttgttgctctgactatattgatttatgccatgaggtggtggaatgggatatcttcattgtatgcaacttctgcattacatgctggtagtgaatcctattaacagaaaggttattgttattgtaatgtatctcagcagtgcaccaaatgctactttaatgatgtaattaatatgcttggatttaccatttgatgttcttaggcaccaattgtgttactgatgggatagcaatgatttttttttttttaattcctgagagcagtatatttttcttagagaagttggaatggaaataaaatgttctaataaaggaagtcacagtccctaccaacagttaattatttgtgccagacatatctcagtgatgtagcaactttcaagataattcttaagttcaaacaacttatttatatttaatcaaattatttatcctgaataccatgatatgaggaaaaaaagataaaagaatcacttggctctttattttttcagttttaattggcattctcctatttccagtttctgagattactctggtcagtgagcaactactttacagaaaatacataatcatccagaaccataattcaaaacatgtcagttatattatctttactataagttgtgactatataaatgttcaaattttcatttaactgaattgtatggctagacatcatgctgtctaatggatagggacaagtaatagaattactactaataaattactacattgtagatcatgaaatatatgcaagtttcagcccaagggttctgagcaaagtgctggactgatggcagtaagtttgaaagaggcttaggtcaggtcaggtatgaagggaaatgatgagtgagaatctagctaaacagaggagaattgcccactgccattatagaaacaggaaaagagagagaaagcaaagggggaggtgggaacaaacttggccactactacttatgaaaagcaatccatttgtttaaaaaaagaggaaaaaatatctcagaggtatttctagacctttaaatgttataataaatattggatgaattgaggttgagtcagattgtaattatgcaaaataaagctttctgttaagtagaatttccataagaaatgttaacctctggcatttaaataagaaggcaagggatgaggtgccatcatgaataaacgttaaacctgagcaagatatggacttatcaaaaaaactgaaaagaattttctagcctgtcctcaaattccatcaagaaattaaatgtattgtatgaagtatctgccacttgatatgccgaatatggatttgaaataaaaatactaagtgacagttaacatcacagtacttttacttcattatgagggaagctatcttttgacagaatttacctaca

SEQ ID NO: 49381 - DNA, 1626 bp, Bovine  19866880695599
  misc_feature (1)..(1): n is a, c, g, or t
nttgcctccttgttctgctggcctggctgaactgtgtgatgtgacgtcatagctcaaagggaaagaatgtcagtgggaaggaataagctttttcctttcttacatcaaactccccaagggccttgttttaaaaggcggtgccctgggaaaactaccaactccttcaggctcttctccttaatggctcaggtatcatgggactctgctcccccaaatctgtatttagtgagaaggaaaagatgtcagtccgcgtctactggagattgtatgtgattcccagaccaggaccaaaaagctccaaagcctgctcattttgtattagtgacaaagggagctctaataagtagcttatttataggcctgtttacctagatttctcctggtaactgtgtgaatatggtgtaaaatttttttttttaaagaactgttttgggtttaatgtatgtctttgaaacaaattctccatatgaagaactttgagtgtgctggtgacatcttggtaaaaaggatttaaggcaggattttaggagggatatatgtatgcaaggaaaagaatgaaaagagtgtaagttagggaaaaagagaagtttgtgtcatctagaggcatttagggggcttcccaggtggctctagtagtaaagaacccgcctgccaatgcagaagacggaagagacactggttctatccctgggttgggaatatccttttgagaagggcatggcaacctactccattattcttgcctggagaatccatggacagaagagcctggcaggctatagtccatggggtcacaaggagtcagacacgactgaagagacttagcactcatgcagaggcatttagaacctgtagtatttgggactacagtaaaggaaacttggtataaaggtatcataatgacacaaatatttataaacattgttacatttaacaattaatactaacaatatgtaagaaaatgcagggttagttttcttttttaaaaaatactaaccttagtgtcttttccaaagaccttggaatgaaaacaaatccagttttctgatacaaagagcttcccttggtataatatttctttctgtagagcacacgtaaaacctgggaagatatacacaggtataacatcatttacaatttccatttaagatgaaaattgtatatatctgttgatgactcagggatgggcagataacacactcatgctcaaaagatctctcccctgcttttccgtcatctttagtggaatgaagctaggagatgagagtttgttttttaattccaagtcttacaaacttcagtataaacatcacaacagaaaggcaagtctgtcattgaagatgagggttcagaatggtgcttcaaaaatctccgtttggggacgtgtgtcacccttgtgctaatgttgacactgctgcctgcccctccttccctgggatggtcataatgactcttttgaaatagatggtctcattgtgggaagagcgcatgacccacaccttcctgtgtggagacaatggcaggaacccagcacgctgccttagcccttgtgtactgagggaggctggaatggaaccctgggtccctctgctcccaggaggagacaagcaggtgctgaatggcgtg

SEQ ID NO: 49382 - DNA, 3468 bp, Bovine  19866880701065
  misc_feature (1)..(1): n is a, c, g, or t
ngaaaatctgtattatcgtcggccacttgaaataaagctagttattttgatccagaattcttagatctaaagatttatgccttgagcaccctttatgatattctctttaatgaacttaaaaatactttgtaaaatgtggatttttcagtgggagaagatgagtattctgattcagaaatcgtcatgcccactgcagaaataatgtattttagtgagagaaaaatgagtgacactttccatttcttgtgtgagattaaccaagggtatatgaacaattgttctgagaagtattttcatgggaggcagaacaacttagtttctgaatattcaaggtgatatgctgcaaagaaaaaaaaaaatctaccatttcagaggaaatgtgtatgaggtcattcttttacccttgatgaactccagcatatcaggggcaatgtaataattaaaaactcatttcacagcagctgattaagctttgattcacaattacactgtctttcaaaagtcttctctatctgagcattttgaaaatatgatggcttcattatttgttatatttccaaagttagagcttcaaaggagctgcaaaaactttctcaatcatctagaaagacatgaataaaacatgcatacccagaattttaaattaaagtaattaggccacattagaatcttaaaaaaaagatttaacatccatgtcaatgtagagaaagatgcccttcattaaattatatcttcatgtccaacaatttaagctcctacttttagtgtaacattagaaaaaataattactttgattgagataattttaaaaagtaaatgttagaaaattcagaccacaacagtttcagagtatcattccaatagaagtttttttcctatagattattttaaattaataaagcaatattctaaaatgtataccaactttctggacccaaaataatgagtgtaagcaagagtctgatacttaactgaagactgaatggttttcccataggcagcaagtaagtatggacttcaaactagcacttgttagattgtgagataaaaatagttaaggatagagtgttgaaacagtatagctgtaaataaggtgggaagctaaatttgagacctcacggtgctccttcaagaaacctccaaatttagggaaaatgctagcaaaccaagaaagatcaagttgggttcagtgaaggaaaatggagataggtagagaggaaattgtgccttaaacatcacagtcatgtttctattttaattaagcatcttccagatatgtagtcactatattaaatatttcttgcccagactctcttcttggatcatttccccatggacaagagcctaaatatgagtcaccacccagggcttagcagtccacgtgtaaaatggagatagtaacatgggttgctctgatgatcaaatgacaacgtacggagaactaacagttcccggaacagttcccacttaatgaagggcatttttaaaattctgtataacagacagctgaagcaatgtaaagcatatctcatgactttatataatagagtcaaataagagacctaggaaaccttaccaatatggggaggtttaaggataaaagaggtgatatccctttgagaaggctatggatgatgtattatttgggaggtatcttcaaagatgagtagaatcatgacaggcaaagaatggaggaaagggtttcagttatagaggacaataagacacgatagaggctggggagcatgaacagcgtccaggactgtagaaatcaggtggtttggctggaacacatgatcaaagtgggaagtttaatatcaagctgaaggatttctgaatttagtacacaactgagaattgttttttgttgttgttgttttggttttcacttttagcagtaaaagaatacaataaggggggaaaaaaaacacagaaggaataactctgaaagaatttataggcattttccttcaagttaatactgattccaagaataggtgccaaatgttttccaagtgattttcaaagtagaaagaaatgcccttgagaagctgtgttattaaatatgtgcttacaaatatgggaatcaaggacactctattcttctctctttagtaatcactggaaggtcttatgctcctaaaatagctatcaacttgtgagatgtcagtcaatcatttgaatggtattcatgcaatttcagctatgtgcccaggagcacatcattcagtgaagacagaaaacaatgcataaaaggcacatttcttgcccacaaataatctagtcccgttggggaggaaaaattgacccacatgtacaaattatcacgtggatcccagcagaacagtgtgtgaccaatcaagtgattcactttcagatcttacaaaaccaggtaaattctagtactaagacctataattactctgctttcttcattcctctgcctcagttgtatacctagcatttgactaagcacatataatggaatgcaaattgctcacagagtaaatacatcaggatgcctttatttttgattacaaatacataaatcacaagatacctcttaaagttcatcttgaggaacaatataacacagtctgtgagtaattcagagtgattcacaatcatcctctcatttaaaggcagatctactctaagagaagtaaaaaatagctttttgggggcaggggaattgaaatgagctatttgcttttttaaaaataactaactcaggtggttaatttgtagtgttgaaagctcgcttcttgccaatcaacttaaaaatgttaaacagggatataaaattcagtttacttaaaactaatctaagaaaagagggaatacacttttcatactactttttgaaataatttaattcagagaaagtttttagagcttttcaaagcatttaaaacagaaatctttaggaaaacatttctaatagtttctaataattaggaaagtgaagtctgtgcaaagtgcttcaagtcaattattgataaatttcatagcgtcagccgaagtatatgaatctgtatctgccctcaagaagttttcaataaagttgtgatgacttatatgcataaaaattgaatattaggcagcctctagatagtgctcaatatttgggaaagaagttaaaggtgttaagaaagcttgttagtgtatgtcttaatattgaattcaaatggtaccttagatctaacatacacgagtcataagttatcaaatttccatttttggtagagttaatgaagactagcagagaaagaaatcctttcatgggtataatgaatgttaggtatttttattgaaagaacttggatacatttcaattaggaaaatgtttcactccaaacagaactaaactctactagagccacatgaacaaagaaagattgtgtgtgtgtgtgtgtgtgtgtgcataaaaagagatccaaagaccagtccaggtatctacaatattac

SEQ ID NO: 49383 - DNA, 1549 bp, Bovine  19866880830341
  misc_feature (1)..(1): n is a, c, g, or t
natgagaggttggtggtttaaatgtctttgtgaaataagtgtcatgtttttctatatctcaaggtgaaaattacagaaatgtgctgacttgcagcagaatttatggataaactggttccatattaattttgtttttactggaacttataaagtatttgtagggaactagcagtaattacacctattctgaagtcccacgaacctgaatttctcctggaaaaactatagcacaagcttagcctgcaggtagattccatattgtggcaaggactcctttcctgggcagccagcatcctgctccatagttgtctgctggggctccagccaaatggaacatggaaacgtggatctggttgttcttgcagccagtagacccaaatcaccccctcatcccttttaaaaacatcattgcataaagcaaaataatacttgctcaatgttccctgtctctttctgttactctgtctctttctgtaagtggtagagtgttctgaaatgatcttgcttcattaactactctggaaacgtactttcatggattagaactaatttgacattttaattatttccctttctgttgtttagaattcagtcagctgcagggaccttgcaaaacacacatatggaacattcatatgtgctgtttgatactgtatgccaccctcatattttgagacttgtacatacaagtcagcttgaatttgataatatcctgtcaaataaactaaaccttgtgttcaaagccaaataacacaagtgccccgggcatctgcaaaaaaaaaaaaaaaaaaacccaaccaggcacaccggctcaagtggatagttaggtgtgcaattacttgatttatacacatgtgtgtttctgaaattacagctgcagggttttgtggtctctgtgggggtgtgaacagttttgctggcaagcccggtatgccttactttggaaatttggctcccaagacaaattcccctcccatcactgatggggaacaaagtctatttgtcacttttccatttgccttccacagtgattcagaaagaaaacagttttattttgctgctctaattgggaattgctgattcatctcacaagtgtaatcatctttgctattcattatacaaacaccagctaatgggactatgattgtggtagaaattggtatgggaagggctttccacccccattactgacccaaacacatgtaaatttgcttgagaaaacacagttttttccactgaactctcctacttcaacttaagcttttgaaacgaaagcattcattcaaaagaaggtccggttattctcttggttttgcagctatttaaaaacaatgcttgccttgaagttctatgtatacttttaacctcttggcttagctgtagaaaagcttattattgcaagcaaactcaaatcactcatgatagtacaacactctggagatcttatccttgcatcatctacttgagtaattaaatgcaggataaatttagtaattcagtggactcactcaggtagggggcagctatgtcctgtttccctttgaatctt

SEQ ID NO: 49384 - DNA, 1595 bp, Bovine  19866880918609
  misc_feature (1)..(1): n is a, c, g, or t
ntcaactttatttcttatttactctttctgggaagttctgagtcaagacaactagcctttggtgaaatttgatcagtggccattcttaatgttcaatgctatgttatttcccctgctggttgattccaaaaaggattctccagggttctttctttcattgtacatagttttactgaaaattttgcaagtaacttgggatttcggaatacgttggaaggtaaagaagtaagcagtctagatgtaccatggtgatcactttgtaatgtatagaaatatcaaatcactatgttgtgtgtctggaactaacatagtgttgtaggtcaagtatatttcaattaaaaaatatgtagacattgggaggaagtgtataaaaatgctaatgatggttatctctagagggtaaggattatggatgtttgctattttttactttatgcttttatgtatttctagtttctatattgaagatatattgcttgtaaaattataaagaaaataagaaatgtcattaaaaaaaagaaatcaccagggcaaaacagatacaaatgtaacaggatgtcaaatgagatttctcctactatttcatagttttgatctaagagcccaaagctgaaggcagttggccctgatgtagtccaatgttccgcagagggtgacagaatggccagagttccaccactataatgaagatcagagttgcatctatttgcattgagctatcctatccatccaaactgctgatctggatggggcaaagagagagtcagagcaatggccagatttctccattcttagaaaaccatctcaaatggaattagagaagtcattaaggaagagatccatggctgttgtagcacacctggtttattggggtatatttacgctccctaaactgacatacctgctgtctacttaaataggatccacaagatggggaccatataatctaatgcaagagacttcatggccttggctccttagaatgtcagtgtgatttgggatgctggtctcatggaatggctgctggacttttaagaaccaaaattaatatgatggtagctgattgtacttaatgaatttactaggtagttactttgtgccaggcactgttccaagcacttaacatgtacaaacttatttagtgctcagaaagaattcatgatttaagtattttccccacattaactgagaaaatgatgactccaccaagattacgcaactggcaggcagttgagtttctcacctggatgccattctacctcttgtgtgaagagcattctgattgcctcaaccgtacactctgcatcagagcaatgacccagtccctgggtgctggaccccacctgacaaaaggcctactgcctcctgtcattgaggagcaatgacttcaaggtcacagctgtctctccagggcccctgaggtgggggaagggaatgagagtgcctaaacttcataattgagaacaggagacctggcccttgcccatctttgctgggatactggacttcgtaaccttgcttgcatccactgttcatgggaccatgtagcatgctctcctttggaaaattactaaacataggattagcagcacctg

SEQ ID NO: 49385 - DNA, 748 bp, Bovine  19866880969919
  misc_feature (1)..(1): n is a, c, g, or t
ntggggcctttctgcctcactccccaaggcgagtgcaggctcactatgactttgcttgtccgggtctctgacagtgacactaaagaaacatcagaccttcagttttttttttttttcctctaaattgtgttccttttttattaggatcagtgttacgtgatcttccaaaactaatagctctgattactgtgcatgtcctatgtcttcttttgtcccatgaatctgcagttactgaaaataagttgaatcattagaagagacacaaagggcatatccacaggggctaaatgatctgtgaggataagagtcctgagccactgcgcaatgtacctgtttatatcatcattttgttgtcaaaactgctttttttgctttctttttcttgttcctgcttcaagcttatttttggagtgttttagtgaccttgaatgggaaatgaaatggtgatgccacttctaaagggaaatatgtttaagatgtgctggttcataaaagagaatcatcagtcagagttcccctcgggcttaaccttcatctgcttttcaaagagaaaatctgcttccttccactcatgcagagagctttgtccgcttcctttccctgtcttcttcttagctgtcctgtatcagtagatttttaatctttggagtcttgttgaggatgcaccatctgtagttcaaaactgtgacaactttctctttcttttggttcaattttctctctggatctccctgccacttcactaatt

SEQ ID NO: 49386 - DNA, 803 bp, Bovine  19866881018219
  misc_feature (1)..(1): n is a, c, g, or t
natttattatggttatataaaaagaaaagaagcttaatcttctaccttcacttatttgggcccttccaaggccctgggaatgtccctagcaagatattcatgtagttgtacattttaataaacttttcagataatattttaactacaattataattgccttctcttcattccaattttctctctgttacatgtcccctccagtcaggtagccaagggcatttttggcactgtgaactaaggggaagttgtttggagatacatttaattagagataggggagtatatttatgtgatttgccatcatttctatgtgctaagttatcactagtcctcctagcttccaggaatactccactaagcaaattcaccttgcttggtgacacagaagtgcaggaacagggactacgctggtggtccagtggctaaaactctgtgctcccaatgcagggagcccaggcttgaatccttgtcagggaactagatcccacatgccacaactaagagttcacatgccacagtgaagatcccgcatgctgaaactaaaacctgtgatggccaaataaataaataaatgttagagggggaaaaggtgcaggacccaagatgattccatcatataaacatgtcctacaagtgccatgcatcagaagcacgtaggtaatagaagagaaattaagttgggaaacgtacaaagccaaaggttgtctccggcaaggtcttcccatcatcacacatgtaaattgtaacttctgggttctgttctcactaacaccaagtcaaaccagaaattctctctcctgtt

SEQ ID NO: 49387 - DNA, 2146 bp, Bovine  19866881121860
  misc_feature (1)..(1): n is a, c, g, or t
nattctgaagttggggaataatgatgaaagtaattgaaagtactcctctgagaaagggactattcaaccataatagaactcccatgatgctgcaaatataaaaaaaatatcttcagattccaccatcatatcaatctgtgtcatcattataccttcccaggaccgcaaatcatcacaaattctatggaagagaagctggcacatgatagagttgacagctgcttttcagtcacagctagaaaaaaactgatttttatgtttagttaaactcactgcaattgttcaccattccatttacttaaaaactgtttatgcaatgtcaactatgagcctgacagtccttgagactccctcataacacagttagtaaagaatctgcctgcaacgcaggagacaagggtttgattcctgggctgagacgatcccccggagaaggacatggcaaccaacttcagtattcttgcctggagaatctcatggacagagaaacctggcgggctacggtcccatggggtcgcaagagtcagatgtgacttagcaactaaagagagagagagagcaccctgatagagaatgccaagactagaatggatgtgggggaagacacataggaagctagtgtcttaaccctaacaggtttcccaacttttcaagcccattcaatttaattatacaagggaaaacaaagaacttatttacaaaaaaaaacaaaacaaaaaaaaagaactgaatttcacacaccataaattttcctgatactattaaacagcatgacattatatacatatcttctacttaaaaaaaaaggatgtttatatttccatatgtattgaataccaaaattatacaggggtatatctacaatcatttggatgggtatgctttaggttaaagaaaataagtcccccatcccactgctttctcatcctttctgcttattcccaaaatgaaatcttaataaaaattattttgtgccacttggcttatgtccttttaactttgaaatcctcctagcaagtaaacatctgaaaaaggtcataacatagcataggacatctcctgaaagtgaacccccagacatctgtgcacaagatgtgcataaaattttatctttattgtcaagttcttccttttttgaacaccttgcctaattcacaaataaagtttgtgggaaatattgaaagatagcacttagtctgtccccatttctgtagattattaaatttcagagtttaaaaggatactctgactttctataaatgtggaattagatggtgtcaacaatcttacaatgtcagatcttatgttaaacatttgtgtgaaaattaaatatgatttaaattctagcttttaagatttgtttctccctgctattattattatacaaaacctatattaatatgctgtgaaatgagacatctacatcactagtcaaagcctttaagtggtaatccttctgaatcctttcttgtaagagctgaacatttgctgtacaaaaccagcggaattcacacgtgctgctacagagtactagagcgattattacagcattttttccccaaagtaccttaggctttagatgattagagaacaggcttatgttttaaacgtcttgccaacaatgtggctttttagttgcattggactgaggacaaattgtagtataatgtatgttgacagtttaataacatgggttactatccttggtgtactttatgatgtaatacatccttagaggtgtctccagagaattgtgctatgatttttgaggtacagaaaattcagtaaactaaaacagtctgagtaagatttctgccttctgtatactttggacattttcctaaaaaatatataggtgctacccttctaaaatatttttctgacatgacatttctgtttttcttctcaagctgtagtttttaaaattggaatggtacaattcttattaaattttactttaaaaatataaaagtctctttttttatataataaacagtcttttttcaggtgtcagaggtaaagttccttttctataaaaagctgtaattgtggtttttaacaatctcattaaatatttagatcttttaaagcacaagtgttttctgttgaggtttaaacacatttagactaattatttctaatgttt

SEQ ID NO: 49388 - DNA, 1146 bp, Bovine  19866881147211
  misc_feature (1)..(1): n is a, c, g, or t
ntaggtgctcccagggtgttctggtggagtgctccctgctggccagaggagctagcgggcgggcagcctcgcttgcccttggaggtctcagactcaggaaaggggggaatggggaataattctggttcctgtgcaataaaagttgaccttgactctctgaggaagttttcagcgctggtgcctgaagaaaacacccgtctctggaggtctcagaagggcccggcggacacttggatgattgtggttcggcaggttattgtgactgtgtcagcaaacatattccactccagccttttcagtcctacccatcagccttttctctcatgtatccacccccgccttagccagccttcaacggaagggataaatcatgtgccaacaaactcgatacagttccttaaagaatttgccatgactttccaaaagggcaaaaaaaaaaaactctcatggacaaacttgcttcaaacaagtagcatttgagttttggggttttttccctttctgatgttatgttctggtttaagttacgtgtgtatcttaacgtctcagctgcgtattggcaagaaaatcaggcaaagctgattaaacgatcccattttatgttttgttttgttcctctcgttaatacttagtaggattaattctcacccaccccaagtcaagaatctgtgagacttgagactaaagtactaaatatatactgactctgaaaccaaaactaatctttaaaccaaaaaatataatagtgatttgatactggatggaagatactgcatttttaagattgtaggtggactgtgtttgttttgaaacaggatgtctataattaatggtgaaacccatcagcatgatgataacatgctttactcttttgctgactaaaatatataactggtagtttgctaacttctatttaccatatggattggctggtttttattaataattatttaggtaccctaagatttgttaatataaaagatattctgtttatctataatgcattttataatcatttctatgaaatgtattttgtttaatcagataagctaataagtgaattggttacatcatttgtatttgttagcctagtggacaggacttgtgcctggtgcgcccctggcttttaataaatactcattggtt

SEQ ID NO: 49389 - DNA, 3196 bp, Bovine  19866881180480
  misc_feature (1)..(1): n is a, c, g, or t
nctgagtttccaaatttgctgacatattgagtgcagcacttttcacagcatcatctttcaggatttgaaatagctcaactggaattccatcacctccactagctttgtttgtagtgatgcttcctaaggcccacttgacttcagattccaggatgtctggctctaggtgaggtgacatggaggctataaaggaggatcttaagaggagtgggaatttaccaggtagaaaaagtggggaaggacattctaggtagcaggaaaagcacagaagcttggatttccatgcagtgattaggaaatgatgtttgttatgttaggggctgtgagaaatgggaggctgggaatggagcaggaaacctaggctagagccaggtttgagaagagcttgtatgccctggaaggagtttcgagcagtagagcaaagagcagtagaaggattataaaaaggggagaagcatggtctttcctgtattttaggaagataagatcagcaattataaggatagtgagttaaagaggggagaacaacttcttggaaggcagaattcatccttgatttaaatgttattgcatacagatggtgaaatactagaaaagtatggcaacaacagtgttgatctagcttaatgatatagaaagatgtccgaaagatatttttgaataaaaaagttttaaaaatgtagtcagtaagattctgaacctatctatccttctacatagaaaaattagtgagggacttccctagtggcccagtggttaagagtctgctcttccactgcaggaggtgggtgttcaagccctgattgagaaagttccacatgccgaaaggcacagtcaaaaagaaaagaaaaatgagtgaaagagtacactaagatgttaacaatactgtttacttgctagtaggcgtcaagtaatttgggaaaaagcaactcagaggcccagttaagaatttagtatgtagaagctcagaaaaatgttgttttttgttgaaatctagtagatggtttgacatttcaagatgagagagggatatgcaaaaccaagaagagtataaagaagggtcaaaagataacaaatagaaataaaaaatagaaatcatgaggacagaatatagaaatggaaactgagaagagaaggcaggggaacaattttatttaaaatgtgtgttaaagtttctctggatgcgtttcaaactgtttcttactgtcaggagtgtaggatgttgctctttgaagatggtgttggtggtttagaatggtctcttaaggaccctctagctctataatcctcatatcatctgattccactgtaccagtgtatggagggaacacatagtttaaaatgatctcttgtattcttgtaaatattctttccagacattttccatgagacagaattggccacagatgcaagactgaattgatgcttttggataatataagtgaaagtgaagtcgctcagttgtgtccgactctttgcgaccccatggacagtagcctaccaggctccacgatccatgggattttccaggcaagaatactggaatgggctgccatttccttctccaggggatcttcccaacccagggatcaaacctgggtctcctgcattgcagacagatgctttactgtctgaaccactagggaagcccatattatatatataatgtacatgcaattgtgtgggaccaaactggttttactagttcagaataaaacctcatggaagggttgggatttgaagaggtagcccaggaaaggagaagtttagaactgaaagagaagaaaaggaaaagaatcacttaggttaatttgtaggaaggtaaatgtatttatgatgaaggaggtcaacagtcatggtactgtttgctatttcacctattttaagaaaatgaggttcaaaggaagaggaccaatgttaagtcaatcagctcagtccctcttgggtttgtactatgcccttatgaggatcacctcttgaaagtgctcatcttcctgggtcctagcaccatccaagctcaccttcttttcttctttaaaccccaagcattgattgcttgctttacatactgatttctaccactcattctttcacccatgcttctctctagttatttaacttctttttgcttcttttccttcttcttcttcttttttcttttactgtgccacttggcatgtgggatcttcccccgaccaggaccaggactcaaacctgcgccccctacagtgggagcttagagtcttaaccattggaatgccacagaagtcctccttcatttttaaaggaatataattatcttagattgttgaaaatatttaaaaaccatgaatgtctttgagcagatgcacttggagcttttctggctgaacttggggttgaaaggcagagtcccatctggctcttcttactccccccagagctctctaaagaggcatcacagagtctggtttgaaaaccactcgacctaaatctgtacttcccagagtcagtagaggttactcaggcctggaatgtgctgaagacaataaagattcttgttgagatggtaatttactttttccatgtaacattttcaactgggtttcttgaaaagagcaatttgtattactgtggtaatctaacggttaggcctccgggatcaatatttgtgttaagagaaaatgaaatgtagttatcagaatcaggaagatgtttccttatttgccactgtcttgctgaatggccttttgaaaattgctcgggattacccttcatgtccccctcacttttccataaaggtgctgtgaagatctctgactgagatgtgttcactaaggttcagggagaaaagagggagctggtataagtcttccaaagaagtgctgcctttatacctgattgagtgcaggagatttgaactcttctggaccttgatgtctcagagtatttccttgtctggtagaaaactcttagccacttcccttctaagggcttgagtaaagggaattgttattgcatcttttgttgaaagcattttctgctgccattttggtcttcccctctgaacatattgaatgaaaggagtgtagaagcatcctcctttgcaggaaaaaaaaaaaaaaaaatcatctcattgttcggttgctgtctcagaggtgaaagtcatttccaacagatggcccttcctgaccccccaaggctgcggttagcacag

SEQ ID NO: 49390 - DNA, 2925 bp, Bovine  19866880428399
  misc_feature (1)..(1): n is a, c, g, or t
ncctggtgtgctgcagtcatggggtcgcaaagagtcggacacgactgagccactgaactgaactgctcccactttagagatgaggaaaagtcagtgacctgtccaaagtgaaagggtgccttaaatatttgtatcagggtttgaactggttggtctgaccccagcctggacttgtggctgcagtgcccggttgcgtgcccactccatgcccacaagtaagccatggctctttagacttcagcttccccgtcttgtaaactgaggctaacaggctcatgctatttgtgatctttccctccctctcatagttctgaaccccctgggggacttgttacaactcagattgccggccacaccctctatgttttcgattcagtgggtctggcttggggcccaataattcgcctttcccacaagttcttagatgctgctgctgctgccggtctggggaccacactttgaggcctctccccttgccccgctgcttcccagcctctggaattggctctggggtccagcatgagtcctctgtcatccaggcctgctcaggcaggcagccctggtggcggttgcctggtgggcctcgtgttgggctctctggacccgtctcttgcctgcctggccatcttgcaggtcccttggctgggacatcaccagtgttttctacacctcagctgtggctcctcatcaggtgacagatgtgtgaaacaggagggggtctgcaagggaggggaggcacagaagagccgagatgagatagtgagatgccctcagcccccgccttttgtgtttacacagagtagccgcgcagcagtgggcataattactcctgacggccttcattaaaagctctggagcaatttacagtcaattaaggagcaggaaactgcttccttctcaggtgctcccacctgcttgggaatgagtcctgcccaagaaaatgtggagctggcttgggggcagggtgtgtttgagggtctgtcagggagggtggggtggcttctgaagtgatgaacctgccggcctcgccgtcagcagcctggccgtccatcaccaactcctagctatgcactcccaagatggtgtgatagtctgtgaggtatggagggagctctgaggccggacttcggcccctgcccgtgctgaggcctcaggcagatccttccagccctgggagcctcagtttttctcatctataaaatggggttgatcccatgcacttcgcagagctattttgactcttgaatgaaataatgaatgcggtgggcacagggtctggcccccactgggtgtgcagtggcagggatggtcattcctgtcccacctggggatctgcccctgcctgtacagatgctttcaaaaagcaaaaaaaaaaaaaagctgatcagatgctgacattctgaggtgtccctgagcccggttcagtgcctgccctcactctccagacaggaaaccagaagacatgtgtggggagtgggcttatggtgcctgctcctctgggtgggaccttcaaacttagcaggcctcagatccaagggagaatgcttcctcttttgcctgaaggtcaacttaggaaaattaaaatgttccccagctgcatttctttggctcagttggtgaagagtctgcttgcaatgcaggagacccaagtttgatccctgggtggggaagattcccctggagaagaaaatggcaactcactccagtattcttgcctggaaaattccatggacagagaagcctggtgggctacagtccatgtggtcacaaagagtcggacgcaactgaatgactaacactttcaaaataaaaatagcttcattgagtgccatggttgaaggtaggggaggagaatgaatatttttacagcttaaattacctactttactgactagaaacatgtcaatgagaaaagttgcactgccttttagctccaaatatataaataaatctgagtttatttgagaagtggcagttatgaaactgcattctgaaattagaccaggggccacattgagaagacaggctgcctgggagcctgggtgcttgtccctgctccagcctggaaccctcatttggtgagatgacatatgagttgtgacataggacttgtgacaaatgcccagcaccacgcctggcacaccatcaaggctcattaatcccagcctgcgcacacccggttggcaggaagtgttgtcttttccttcccagttactttctgtgccatcgatgccattaaaagaataatgagggctgaggacagggtcaccctccccctcctctatccctcggtctcccgtctgggctttagaagaggtgagtgagtgacaggggaggctggacggatggtggaggggattagcattctcttactggctggctctctggccagagttttctcatccataaatcaggacgttgactctctcatgacaaagtatcagtgggtgtaaagacctcagggtgtctgagagccaggccccttgaggtcaaaacatcttcttgttggaactgatctgttttattgaagttctgctgtttctcattctctgcccttttgcttcacccagggcagtgtcctgccatcaacatgtcaattcccaggcctgctggaatttcttacattggctgcttccttatgaggaacatacagatgttgtccacccaccactctatctttggaggcctcattagaatatctagtttcagcaacacgtgtagtactttttctgtgtcagtagctgctgtaagctcctttaaagtgaggaagggttactatcttttccattttatagatggagaaactgaggcaaatggttttagtgacttgcccaagatcatatagctggtgagtgggggtggagccaggattgaacttgggggtcctgctccaacaacggcttgttaaccagtgtgttctgctac

SEQ ID NO: 49391 - DNA, 960 bp, Bovine  19866880455097
  misc_feature (1)..(1): n is a, c, g, or t
natttatttataaggtattcacagcaaaatgaatgacaaaaagttaggagctaattaaagctggcacagattggcacatgggggcatgaattatgcattggtgcagaatggcagttggtggcaagaccggcaccatgtgccctgggcactagtaggaagtgggcatggggtcccctgctctgccagggtcccctgccctgcctcttggagggggcccccatccaggcccctctgtatttctctgggggcagctggagctgcatccaccacccccaaccatgggcaatttctcttcctacagcccagcatgtcatggctgtgagcggcatcaacaccacgatcagaggctggactcaacccacagaagcaggtccctggttctcctggcatgtgcttgctgcagcctccaggcaaaatgggcagggctgggcttctcaaagagtgggggaggcagcaaaggcttgagaccagccaactaacattgatatgagcacattggagctggaagacgcctttaagaccaggcagtccacacctcgaggtgccttcacagatggaaaacctgaagggagaagggtaagctttctacgaagctacacagagaataatagtaataataccattaatttaaaacagattttgtgccagacactgttccaagtactttgcatggattatctcattcaatcctcacatgaaaaagtgaaccaatctgacagatgaaaaaactgaggcagcacagaaatgaaaaggcaggttgcccaaggtcacggggagcaaggtctgaattaaatgaaatccaagcagtcagatcccaagctctgcccatgtgtgggcccagacagtggttctcaaccctgactgcacttcagaagctcctggaaggagggctaagagtgtaaaatcaggatcagagatttggatttgattgattctggctgagaactgcacagggcattt

SEQ ID NO: 49392 - DNA, 1198 bp, Bovine  19866880458772
  misc_feature (1)..(1): n is a, c, g, or t
ncttagcactttttaggtgcccagcactctgctcagtgcctcacagacagatcacagcttttattccatttagcagactttgaaagggtggcactgctcaccccattttaaggatgagaaagctgagactcagaaaatgtttcctttaagcggaaaaagccagattgaaatccagacctgtttggctcttcagtgagagttatcccctgaaattacaaagggaaacaatcaccattcctgagggcttctgatgtgtcaggggacgggcacttgatgtacttcattttacttaatctccaaccaataatgccagttaggcccactcacccagctttacagatgaggaaaccgaggatccaggagggtaacagaagccctgtgctggctgacgccatgggagtcggacagattacagtaatcagctaatgcctgagcggctctgaagatgcaaagccctgtattgaaagcctaaggatgatgattaagtcagaaggtggaattagctgcagtagagggagcaggctgctgccatgaggagagattagtgacttgctgcccgattaagctgaaggcgggttgggagggaaagaaactgagaggtttacggtgtcgttcatgtcagagagagtttgtaactgttgacctccaaggcagcgatcacaacgatcacaccgcagtgctgaaaggatggagcagcatccatagaaagcaggctgggtccccagcacctcttgcctttctccctttcatccatccatccatccatccgtgaaacaaataccaagagtgtgctagctctcaggcactacggatacagccaggaacaaggttctcgtgaagccccccgccgggtgacagacatttaacaataatcacagagcaaggaattctcatttttaagtgtaatcatggcactgtggttatatttcataaaagagccctaatcattcagagacacacaccaagatatttacagatgaaatgatgtgatgcctcagattagtacaggagggggtagtgagtccagatagaggtgaaaaaagactgaccctgagctggcaattgttgaagctgggtgatgggtacatgagggcaatgtattactctgttttcttctgtaattgttctcaaatttccatttaaaaaacatctaaaaaaaaggcaagtaagtaattacaattcttgataactgccacaa

SEQ ID NO: 49393 - DNA, 1863 bp, Bovine  19866880485734
  misc_feature (1)..(1): n is a, c, g, or t
ncttactctattgcacatagaagtttcttatcctatcaggacacctccaattctgggaagtaggagtgtagctaggagaggacaggagacagtactgcctgaactggcatgagaaacagctgggagcggtggctgggttgttggaaactaagaagagtcaggccacagaaagtgttagaagcaggtaaacatggtgtgttgggcaggagggaactatgtagggtcttctagaagtgaaatgccgacttggtatcttacagtgcttgttcagcccgcgccatggcctgcccctcagcccagggccaccccctcccacccccacccctgccactgcccaaggctccctccctcacaggttggggacattcggctgctgaggtcaggtctttgtttgaaggacggataattaatcccacaaagtaatcccagcactccctggcagatttatggagatcgcctctgtcccaggaactctgccttatcatctttcatttcccaggcaaagcgagtgacttgttatatcacaggcctcacgccaataggaatttcatttaggggtgttctccaggtggagggagattgataacgcaggcctgggcaagagcctgtagcggtgctggggtcagggagggagggcgcaggataggcaccttcgtgccttcacctgttcccttgccaatctccaactttctcccaatgccaggggcctggcttcagggggctcacctgtcacacaccccagggacccatatgtcaaccagtccaaccgtcccaagtcacagatgagaaaaccaaggccacagcagtgagggagggacctgattcccaggctcactctttcagctactctgacctactcttcatccttgttacttctgccccctcccaagtcccctcctgctccgccctgaagctgcctcaggtacaggaagctgtcaaggtccatcactgggaggactcctcaaaacctcacaacagtccttggagcctgcccccctaggaggctctcatggtaaggcagggagcagagcttggcagaccaggcagctcatcccctacacagagctggtcagctgagcagggaaaggtggcctggtcgtggagggcaggggccacctctggtctgttggctctgcttctagttgctgggcagtgcagaggtcctcgtccctttttgtaacacaaagaattggggctagtttgatgattattcatgaatgtttattattatgtgaatatcgaatacctctcttatatcagctctggggacacagccatgaacaagagagagaatgctgctgtcctcatggatcttatagtctggtgagaaattcggaatataactattgaacagatgaatgaataaggtaattttagagagtgacagggacttacaagaaaataaaacagggtgtgaggtatgatggagagtgagcttcagccacttagctggggtagtgaccgctttgatatggtgacatttgcgaggacactgaacaaaggtagaggagacagctgtgcggaggtttggggataaaagagttcttggcagaggaaacagtgtgtataaatgccccgagacagcaaatagctgggtatatttaagaaagagaaaattgggaaaagaggtttcctgagactcaggtgtggtggggagtagagaattgggagtaggaagtgaggcgagagagccgaacagagactgatcatttaggggctttcacactagggtgaggattcagggttgtttcgtttgcactgggaagacactgcagtggagtaactggatctgcatcaggcttttgaaagatctgggcggagagtgagctggcaagagggctagaggagaagcagggccaccag

SEQ ID NO: 49394 - DNA, 1016 bp, Bovine  19866880488258
  misc_feature (1)..(1): n is a, c, g, or t
ncccccccacccctcacctcccgtggcagcagtgtatcttaaagaaacaccagacagattctacttcatgcctttggacctctttcatctcctcgggcctcagtttacacaccaatgcagtggcgttaatatttaaccttagctctagctagcttcctaactagtcatcattgttgtaaagcacatgagccaatgggtatggcatgacttgaagactagaccccaggtccccaggttgtggcccggctgaattaggccattgtgtcgtggcactcagaggggtctgggtagcatccctgccccaaaaggaggaagtaggacgagtgttgtgacgtgcagaccacgctggggcacggcactgcctgctgcccctctggacgtgggcctcagcattctgtcccaggcctcgttgttgtttaggcccagtggttgacgagcagaagccgggcatgtgttgtcggtaaattggggccctggacttcaaggtcctctctgggtagctggtaccttgggaccattcccttcccatagtctcacctgggggccgttaggcaggcagggccgtcccttctgcacggctggccttgcagccggcctgtggcagacacggcttttttgtttttggttaaaaagcctcatcggagcgttatgatattggaatgtgaagggtaattgagctgaaagctattctcttcctgcgaacagtgcgaaaggagtgattgaggctcacaggcctgtgtaccagcctgggaaccctgatgaaatcaggcctgtgcagagatggggggtgatagatgaagtggatccaggccccccaaacccttgttccccacccgaggggcacaggcctcctgccctgaaatgtgctcccctgggactctgagctgccaggccaggcctccacccacctggagcagatagccgggtccccgctatgttggggctaggaggaggggcctggacgctggactgaaacaagcggaacaggctcgcactgcgtcctctgcgcccttctc

SEQ ID NO: 49395 - DNA, 719 bp, Bovine  19866880512413
  misc_feature (1)..(1): n is a, c, g, or t
nactttctccttaactcagtcagagagcctcgaggaagacggaacaggcagaatgttctcagcttgtgattcagtgtcgtctgctgcctgggctgtgtgctctgttgtatcccagggttcttttcattgctcctggaaccagcatcgactttaagttactgattagtccttgagccccagaaaggaatcccagcgccagccccctgtccacctgccctgggccccagtcacaccctgaattcttctctctcacagggaataccaacagcatctttgccctggactacatcagtggggcactgaccttgaatggcctgctggaccgggagaaccccctgtatagccatggcttcatcctgaccgtgaaggtgagagccggacacctccatcctgggtataggggatgcccatgccttggtgccagcctccagtggtgcccaaggtggaggctccaggaggcacatcactgctattcccataccggggcttgtgcccaggcccctgccaggaaggaccagcgcttgtcacacgtgggccttgtcagggaccctgctggccatctcagagcccttactgatgaccacagagaactgtggctttcttccgcatctcaggggatgaggaggcccggagtgggtgggcatcctcttgtcctttctgttaccccatgatttcaagttctcttatagccaacttggattcttagagttaccccattt

SEQ ID NO: 49396 - DNA, 1206 bp, Bovine  19866880543839
  misc_feature (1)..(1): n is a, c, g, or t
ntccatctgtctgtccagctgctcacagctttccccatgctaccctagcttctttggcagcctttctctttcaggagagcctggtcattgtcctgggcacccctgggcctcgcctacggttccctgccccagctcctccctcctgcatctccccacgcctctcaagacaaagctgtctcatgggccagcctcagagccactctgcgcacattccccactgcatctacattccttcaccccactgtcagagcacatatggaggcaccctggaagggaaggaagagtctggtcaccacccagacgacgggggacagtgtggcaagcgtgcaggaccgccctcgccaacttggcagtcccttgtcaacaggaactgagcctggtggggctggctccttcctgaggctcacacccggctctcggtaattaaagccataagtcatcttcggacaggggagctgcaggctggggctgctgcagctggcaatgcttggggcttagtgctggagggagagtgggcacatctgggcagaagttggagggggcaaaaaatcaaagactgccctcagtctggcctgggtgaaagggtgtttggggtctgaggaatcgatcagtgccatcggtggtgccaggagcttcctccacaaacaaagggtttccttcctcttttccatgggcgctgagagtctcaggcttgtgaaacatccccgcagatgccatctgtttccagctggatcctttgcttcccctcccctgcagaagcatacattcacagagcttggagtagggggaccatagggtgtccgcctgtcccttcagctgtgttgggagtatcccagagaaacagccctcctgccgagggagtaggggtctgtagcccaggccagctcctgtaattgagaaggatcccaggccacatgtcctgagggtggtccagtgggaaacaccttgaactctgacctttctctttcaacaaagtggtcagaggtcttgcagagattttggtgactgaccgtcctgcctgaacaaaaaggcaaggacatctctctttttcctatttcttgcttgctcagcagaagttcctgcctgtctgagccaaggggacggaaatgtctcgggacacccctccctgtctggctgggctcactcagcaagcattctgaacacccacttggtgtggggcaccgggccagggcccagggacatgat

SEQ ID NO: 49397 - DNA, 895 bp, Bovine  19866880556032
  misc_feature (1)..(1): n is a, c, g, or t
naaaatatgcagactccagctgcctggggttgtgatgcaaagccagcttcttacatccaaggatgtacttacatccaagtacagccaatgtactgagcaactactgtgagcctggctcagcctgaggcatggcatacagcaacgaacaaaacccacatgacttctgccctcagagggatcacacgccaatggggagatgtgcagtaaaccaggaaccaaacacgagctctacctagaggagagaagagtgcaggtagacaggataaaggtcgaaggacgccacacaggatcatatgctaccacttattatgtggagtctaagaaaaggctaccaacggacttcctacacaactgaaatagagttacatatgtagaaaatagcagttactgaggggcaaggtgaggggagggagaaattgtgagactgacaagcacacactaccatatgtgaatagataactaacaaagacctactgtacagcacagggaactcaactcaatactctgtaatggcttacaaggaggcgaatccagaagaagccgactcactgccaggagcgcgtgtgggcctcacctggcatagtccagccgcggcagcagcaggtagagcccaatgcagagcgccaggaagatgtctgccgtcaggaagaaggccagggtgctgtctgtcacgtcactggcccccccccccgtccaccagcgaggccacggcactgagggtgccccccatggctcctcctgcggagagcgcgggacatcatggggaaggtcagggcgggcgcatcctccctgcctctcaggcctgcccgttctctgctccggcttaacgttctccctggtgagagagatgcttcagttctcacaggaccctgaggcctggcagacaaggagggcc

SEQ ID NO: 49398 - DNA, 688 bp, Bovine  19866880570172
  misc_feature (1)..(1): n is a, c, g, or t
ncctcgccctctgtttgctttgaatttgactctatgaaagctcttagcaacgtcctatcagggttatttgtggtaactccccattggtggttcgtttttgcttatgaccttaattaatatcgacattgcaattcattatcattttggtatttatgtataatgtaagattgtagaacaatactattagctagcgtttattgactgccagcctccagccacggcctctgttgagcatttgaaacgtgggctcctgtcgacctcacagtgagtctcagagaggtgtcatcgtgtccactgtacagccgagagcaagctgagtgtcctggcacatgtcctcggtgccaagcacagtgctttgtgtaaagtgggccttaacagatgctggtcggatgagtagagggatgaaggaaggatggaagggtgagtggatgtgaatgtcttgccgattcccctcctgttggctccagtccctccatgtgttgccaaggttggcgcacacggagccaacttccccaggcagacctcccccccacctctcagacctccagagtgtcctgagccacaattcaggtgataatgcccacgctaatcacctacacgactaaattagtcttgtcaggagccattaaggtaggagctcgggattcattaggatggattgggcccaggcagcgcctggcactgctgc

SEQ ID NO: 49399 - DNA, 1184 bp, Bovine  19866880804403
  misc_feature (1)..(1): n is a, c, g, or t
nccaggccagctgggtgacacctactaccctcgcagtgaatggtggctggtccagctgggcagagtggtcgccctgctctaaccgctgtggccgcggctggcagaagcgcacgcggacctgcaccaaccctgccccgctcaacggaggtgccttctgcgagggccaggccttccagaagactgcctgcaccaccgtgtgcccaggtaaggccacaagccaggtggcaccgcactcgcgcccagccctgccttctgtgctgtggggtcacagagtcaggaccactgacttctcccccttctgggcttgtcctgggacccacggctggctgaccctgctggactaggtgctgtgacctctgacctcttgttctgccctgtgctgtgggagagacggaggcagaggctcttgggggtaggctccctgccctctgggctgagggttctccgtgtcagcccccaggccagggtcccagaggcacccggcgtcagagtgcctgtgctcctgcccttgactgctcggcacacctggccgctgaccgccgtcttgctgcagtcctcttttccttgtgtctcgctctgtatccccatcagtgggtctgtgctctctctctctctggtggcatgtttatgtgaatgtgtggtgtttttcgcctgggtttgtgcctctgctgaaccctgtgcgagtctgcgccggtgatcttatgtgtgtgtctggagctacctttgcccacctgagctccctgactctcatctggcccgtggtgtgatttctccggacggcctgtgtatgtcttggactcctcttcccctgctgtactctgtgtgtgcatgctctgctgtgttgtgcacatgtaatcgtgtgtgcaggcgcccgtgcgtgcccacgtccccatggaccacacgctgtgtccccacagtcgacggcgggtggacggagtggagcaagtggtcagcctgtagcaccgagtgtgcgcactggcgcagccgcgagtgcatggcacccccaccccagaacggaggccgggactgcagcgggaccctgctcgactccaagaactgcactgatgggctgtgcgtacaaagtgagtcttcagagggcggggcccaaggtggtggctctggagccagagaagccccccgcccagcccccaccgcctggcctgcagtgaaagcagtccccttgg

SEQ ID NO: 49400 - DNA, 996 bp, Bovine  19866880833096
  misc_feature (1)..(1): n is a, c, g, or t
nctgtgtgcccaggtgagctggcctccccttcgctgactctcaggagagactcaccatcttcctggccaatgataagtgggtcatggaaagcctaggtgatggagggggtccacatttcctacctcaagggtactcaccttcaggccagccaagtaacccaggagtccagagcagcctgaaacacggagggagcctgggggttagtctctgtggagtgaggagagggaagcctcagatccccccaaaaggctttgtgattaaagctatgaggatggtggagggaaggtgaattctgagtcagacagacttgggttcaaatccttgctctgccaccttgggtaggttattttacccctaggagcctcagtattcatatctgtgtagtggagatgctaacccctctctgtggggtttgtgagaaatggatgacagagaatgaacggaaaccactgagcatagtgcctggaaaatagtaggtgctaaattaatgctcatttccttctcccaggcagttcatatcatctgtgccaagtagactgagctgtaggaaagaaaggatgtgaagagggcctgtgggctttggtgtccgaggtacttcctttaccggacaaacgtgttctgatgagtgtaaggacattggccagtgcagggctggcttgagagcaggcccgcctcacatctcacgctggtgtaaggtggggcccaggaccacaagataacccccaaacgaagttggctcccctgaggtcaaaccgagttcaggacccctgcgagttagagggaaggagcctgatagacgcaggagagcggggaggggaaaacctaagacaaatgagattatccccaggaatcaaggcacttaactgacctgtctgatcccagagcagagacaaatgagattacaggctccaaggccagcccagtctcggggagggggggtgctcattccatgggagacagagagggcaggagcccctggctctgcagatatcaag

SEQ ID NO: 49401 - DNA, 1392 bp, Bovine  19866880858493
  misc_feature (1)..(1): n is a, c, g, or t
ncccgcctcggggtggcatggaggtctctcggcttattcaggcctgagaggcagccccacgcagccagagtaccttgagagccacagattaagtgccgctgcagggcatacgtgctgtgttgacgtctcttgtctctggggtgtgctggcacatctgtgcgtgtatgcatgtgcttctatctgtgggcacatcagcgtgcctctccgggaacgtgcccccacccgtgtgtgcgtgtgtgccctactcgaagtccactgggccgcctggaggttgccctctgagtacacagggtcagtcggtgtctcttctacgtgcctctcctctgccttctctcgcagggttctgggctccagaggggccctcccctctcctggatgctccagggccctctggtctccttcccccagcaaccaggcagctgagccagttcccgtaacaggccctctggggagaggtgaccaggagcctgggtgcagggagcagctctcctgcgggccaagggctgtaccacccgcctgggcagtggacatggttatatgcccgagggctgccgggctggccccagtcccacctctgtttattctgtactacaacctgtaaataacatttagcattcctattgtaacaaaattaatttttatgaaataaattatatttcctagtctaataaaaaattcaggttgtagtctgctgtctttttgactgcctttctgtcagcagttgggaatgatcttcctgcttttctcaaaattccatgagtttggggtcaaggggtcattgccagagctctctgagctcctggaaatgatcaagtgcaactgcctaattttatacaagggaaaagcggcccagagaggactgagagcttccccgtggtcacgcagcaagctggaggccatgctgactctgatcgcagcccctgctccccagccagtgctctcagtgtgtaagcatttgtgggatgtgctcagggtcagtcttgtgagcctgtcgtgggctaggtgatgagtgggaggaataacagaggtgaagccctcagtgtccttgtctgcctgtgaggcattcagacgcgtgttttccaactgggcccgaggtcagttgagagcactcacctgagacaaaatcctgccagcagaaagggaatgatgggcaggctgggccttatgtgactttggacccatggctgccatgatggttgggcagcttacatactgaacaagaaagccatatctaagggggaaggtggtgcctttcccactcagattgaagatttatgtatttattatactatgagatatttccagcagagggcagtaaagggcattgttctaataacatcaatttgttggtattagttttcctatagatgaaaaaaaaaatgggcttccctg

SEQ ID NO: 49402 - DNA, 1698 bp, Bovine  19866880898788
  misc_feature (1)..(1): n is a, c, g, or t
ntagctgtgttttgcagcaggtggagggccactattccaaccctgtgacacacagatattcattttcttttcattcctctgtatggaataaaatagcataaaaaaatagcctacaaaataaaatttaaaaagaatgtgaggtgaaaaagctgagctgggagataaggggccagagaggagaaagagcaaggaacccagaaggattcctaaaaatgccctaccccaatagccaggaagcctgtcagctgtcagttagcacagagggccaggaccgtgttgatgatcaaccagccagcttgctgtcagagctgggctctaccaggcagcagcacagttgtcgagctgggggtcaggccatcagggcagcgagtcaggctggctgtcactgagtgagtctgcctgctttaaagtcagccagcgaatcgagcgttagtcattgtcatcccgtcaggcagtcagtcagtcatgacttggtcagcctgactgtccatcagtccgttgtctgctgcctgttgctgtgaaggttagtgtgaaaggcccgtaggggcatggagtggccaggcaccagcaagtcgattgttaaatcggtttagttggtcaatcataatatccaatgagtgagagttagtcagtgataagatgatcagcccggcaaacagtctgtcagataggcattctttgtcagccagttagctggggagacagtgtttagtcagggaatccccgagtctgtcaggcagatgagtcaggtggtcagtttgtcagtgcagagagtcagtcaggcaacccatgagtgtatcagttagaggtcgtatcagtcagtcaattaactgctcagccacccagtcagtgagtccctgagacaggcttccatcagtcagtcgggatgtgtgtccttcattcactatcagctaaccctcgagtctgccagccggacactcactgtgtctgcccatcactgcccgtgttggtgggcgggtggggtcactgtggacaggcggcaggccagcaaggccacagcaggacagctgcccctctctgcctcaagccagctgcatgaaaagccacgcaggcttgggaagaactcggaggctctgcccaaaggcgagtttttgttactattattatccgagaaacctcccaaggctccggaaagtggaaaaggccgtcaattgcctaccctctccttcccctcccctcctctctctccattaatgaggttcctgccacagagaaggggcgcttcccggaggccggaattggaggagggggcaggcggttggtgagctgttccagtcagctctgggcctgctgctcagtcattcctgttatgatcacccgatgaggggtggaaagtgtgagggggggtgtcctaaccagcggacctcttcccttgacctggccctgcccttcccctgaggattccacatcctcccacccagacccagaagtcggagctgcccctctggatgagcagggaggtgcaggggcaagggtcacagtaggcctgagggaccacagacttcatgtcagcttttgctgttatctgctgtggcccaaaaagaaaagaaaaaatatcgtctctgaatctcgtttcactttcatggaagtgtcatgtgcattgtctcatgtaaccctctcaaccatcccgcacggcagcattatccctttatagatgcgggcatgaggctggaagaa

SEQ ID NO: 49403 - DNA, 1263 bp, Bovine  19866881025559
  misc_feature (1)..(1): n is a, c, g, or t
nttttttttttttttttgcttcaaggcttgatgtttctaagagtccatcatcttggtagcttccatgtgtggcagtaacagttctgtgctctctgtacaatgaccccattgcttctgaaggcctccttaggtgggaactctgtctccatcttcagagaagcagagtcatctcatactccggcagcacacctgcagaccccacccccataatcaccacactcccgccgttgcctccactctgcctggctgccttctacagctctcaaagcctatgtcttggaactctggggagaggtttcccaggcctccccaagaagcctgaggggtcacagatgcccaagggactccctagagagacttaccaaccgcatggcagcagtgagaggtcccgccacatatcctccacgttgccttggctcgttgcaaaggcttttgaagccttgctcaaagccttcctcagatattccacatctgtactgcagctcagccctctggagtcagagaaccagctctgtcatggaacctggtggctaaccacgaccaaggttcgtgctggccccagtgacctgatctgtgcaggaaatgagccagaggccacagagagcatgtgagccctagagatgcccttgagggtggccttgctgtccttccccgtcctgaccgcctcctgctgagcaccttgcagggaaccccatattatctgagtgggggaaggccgggaaagaggggaagtgtgcttattgggtatatctggctttgtcccttgaacatggcctggacttgaatggtaacagtagtaactggcaccaagccagaggcccatcttcttcttagcctggcacctccccaggagatctctatctttaaatcacaggctttcagagctggaaggaacctcccattaccattgcccaagtccaggcccagagtcttcaagtgccgaccaaggacacaacatcatcatggtgctcctggagtgggttaaagccaggttagtcttaatagcaaacttctaacaatgggcataatcagagcccaggccactgctgtgttatcctgtacctcacctccagtgagattacagcccagagagaatgtggggctggcctgggttacagcccagagaggagtgccccgggagtccctggcactagtggaatgctcacaggggctctggtgctccaggaggctgcagagaagcccatcacgcttatctgcttcgctgaggtctcaagcaccttcttcctggactaaccacagcca

SEQ ID NO: 49404 - DNA, 1130 bp, Bovine  19866881092285
  misc_feature (1)..(1): n is a, c, g, or t
naacaaagagatgcatgcaaaccaagagaagaaagcttcaaagacactggctacctgtggaggaagatggtgtgacaggctgaattatgccccctgtctcaagatatccacactttaacttctagaatctgtgaatgttaccttatatgataaaggatgggaggctttccggatgtgattaaatcaaggatcttgagatggagtgatcatcttggattatctgggtaggctccagggagatttgacacagacggaagagaaggcaacatgagcagagagactgagcttgtaatgacatgccataagccaggcaaggccagtagccaccagaagctagaagaggcaagggagaacctctcccctagaggctccaatgggaatatggtcctgttaacatcttgattttggtccagtgaaattgatttcagacttctgacctccagaactgtgggaggataaatctctgtcattttaagccaccaagctggtagtcatttttcacagcagctacaggaaactcatacagatttggatagaaaagtgatcacagaatttagaaacatggaagtcgttggggattgaatgcagggaatgaaggaaagggaggaatcaagatacctgagtttggggtttaaataagcaaatagatgatggtgacacttactgagatgcagaacaggttttgggaagcagcatcaaaaattctcttatagccaattaggtctgagaaggatgtaaacatcactgcagttaaggacactacagccaagtgaactacaatcccaactgctcctgcaggaccttgcaaaaaccatggggacaatgctttccagtttacacatggaatgagaactagaaaagatactttagctagcccttatccagtgcatactgagtgagcatgtatgtgcccagagaattctttgctgtgccagagtgagtgccagttcatgccaggggtgtccccaggcattccagaaatagtagttagtgccagaggggtcatgatgaatgcaaagcaagttaacttgatgctgcagatgtagaaatgcatgccagaagagagatatattggctggggagattaacaacatgttccaaaggggtaatattaatacaccgaggaaggg

SEQ ID NO: 49405 - DNA, 1036 bp, Bovine  19866881121890
  misc_feature (1)..(1): n is a, c, g, or t
ntccaaagaatctaggcaggaatgagcttctctctactcccctatgtacgcagtgagtgtccccacctgaaactgttctcacgggggaggcataacccagggtctacaccacgagtcctgcatgctcagtgaattcccggtgagcacacacgttccacaccttggagggctccagaacagtgcccagagaagaaggctggtccccgctcccaaacagctgtgctttatctccctggccagctcagtgctaatggccttgatggccacgtccctcccaatgtcctcctggcctcctgttggctgtggccaatttgctcgtgatttaccactccggggcgctgacccgtgagggagacacacgggacagaaggaggcagagcggacgtcatgcctgatgcgtgtgcacacgtgcatgtccgggcgcaagggtggggaggcgtctctccaggaatgcgctacccagccaggctctctaggactgggagcagggtctggcacccccaccctttcgctatcccatgctgattatggcactaggcactgtgctagagagaggaaggccaagggagaccttgagggctgccaggagccacaggctggaagtcaggcccaggagcagccctctcacaatggtctggagccttctgggtcctctgagaatccaggcatgcgcacaggacacacctcccagccgtgaacacatccacggccctgcccctgaccacagtcaacagaggcagcacaagcgtggtggggccctggaggtgcacccgctgggttcacatcccagctcagcaactgacaacctttgtgagccttaaaataatgaggataatcccaacacctacaccagagatgggcaatgaaaagtaccaggtgaatgcatgtacagtctcaattattgttatggatgtggttattcagtgctttcctcatgccagtacccatggcccttacgggtcaaggaattataagacacagattccatctttaatcagctcacacaccttggaacttgggaccaggaggacccatg

SEQ ID NO: 49406 - DNA, 1224 bp, Bovine  19866881299810
  misc_feature (1)..(1): n is a, c, g, or t
natgtgctgaggaatcctagtatctttttgtgtatgcattcgtcatcaatcagatgataatgttttgataaactctattaatattcccattgtacagatgaggagactgaggcacggacagaagtaacctgctcaaggtcagctgagacctgaaccaggctggctgtgagactgtgactaagatttctccctctctttctccagagtgcctggcccatagcaggcacataataaatactgatgacatggagatgctgacaggaacataggtgcagatgttaacatttttgttcccccaggaaatcatgaatcagagccctacagggacgggaggtggctgatgggctgagccagtagaactccatctgctttgctcaccctctctgcagggcaccccaggctgtctccctcttttggaacccaccccatcactgagcctagaaaggggagggtacagccgtgtgaggctgtgggtgacttcgggcttaatatctttgtaaccatattgcaaaggggcatgcctaagacggcgccttacacttaatctttctcttattgctttttctcttgtatgatttaaccttgcaccaggtatcaagctagataaataaaaacttttatttcagattagccccggctgggggctgccttgaaagcggagcagtcatccagggagtgagatgaaaaagggagcggggaatgtgagctgctgagaggggctcattgtatctcccaaaagatatttgagaccttttttgaggagggagggatgagatctcctgccaagcccacagcctggggaggctgagacgggcggctgacatccccctagtccagccttcctgaccccctcttcctgagtggctcttcaccccagttaccttctcacactagtatttcctgctcagtgcttaatatggccaggagacactgcctttgctgatatttagttatgtcttccccactagaatgtgagctctgtgggctcagtgacagcaacttcccttcacaattggtccccagggtctggcatggagcctggcacacagtaggaactcaattaatattggctggttaaccgaatgaatgaatcctggggttctagttcggtacatagaccgggggttgacatgaatcatttggtttcccaggcagaatagtaaaagatggtaaaaaggatgtgggttttgggaagcaagaaaagctgggtttgaatcctgtgcc

SEQ ID NO: 49407 - DNA, 709 bp, Bovine  19866881317767
  misc_feature (1)..(1): n is a, c, g, or t
nacatgaagaaaggtgtggagtcagaaaaaggccagggttgcttggggagctgtgagaagaaatgctggaataggccccatggacataagataaaaacgtatgttgattacagcctcaatataaaggaccccaggtatcccagtaagtagattttcttctcttagacagtgaagaggggtggaggccagggaaggatgcagtcatagctgagcttttgggaagggtctgtcatggctgcagaaaggatggatgggtgaggcagagcgcactgtgcaagtattctttctctgagcccccccgcccacccattaccaccacagactgtctaaacctataactccctgttccagaaaaggcatcttgtcccacttctcgtttccctgcattgttttttcctgaggtttcagaaagcgtctcctttgaggctccccccggcccccgcgccccatgcccagccaggctctgaattttaaccattctattttctctaccgattttatgataaacagcccgtgttttctgatgcctttcctaagtgtgtcaggctgtccctcgaggcgctgctgcgtcccttcactgagatgcccagtctcatccccacccggctgtgtgattatccccacttaccactggttccttctaagtggccagcacacctccggccaccccagatccataaaatttgggggcaagtgtccatcatctcag

SEQ ID NO: 49408 - DNA, 794 bp, Bovine  19866881321548
  misc_feature (1)..(1): n is a, c, g, or t
nggctttctgagactcagtttcctcacctgtaaaatggaaccattcacatctccctcactgggctgctgcgagatatacattaatcaatagagatgaagaacacagttgtagcttggattaaatggtggcttgaattactgtcaccataagaggccaccttgggatctgatccaggaatgtctggctctgatgctcaggttctttcttctgtacatgctcctggccccccatcgatggctagagcaggtcctagagatgggctcccaggcaccctccaggagatgtgtgagtgttgtgtgcctttcaggaaagagcagaaagctgagagaggagcggagctcctatggaactgtgctcctgtcaggcatgtttctctgtgccattctctcaggggtaagggccacgcccagagatggccagggaccatgcctcaaccacacagcagtcttctagggcccagctgggcccttccaggggtgccaccttccagacgagcagaagtctcatgtctgctgctccataaccactggccacgccatgtgcttgtccatctgggttggacacaaagtccgcagggcatgaaattcattttctttatgtctgatggagtattgactgcttggatgaaatccaacaaatcatagtgattgcagaaacaagcacagccgcagccctggtgtctgtgtgacacacacttacacacagtcacacacagcctcgcacactcacatacatacactgacatatacacataccgatgcagtcttacctgctcatgcagtactcacactag

SEQ ID NO: 49409 - DNA, 1104 bp, Bovine  19866881329037
  misc_feature (1)..(1): n is a, c, g, or t
ncccagttaggaaaggtagccctctcccagcactgaggaggtgggcatggctgagatggacgtctcctccccgcctggctggtccctgtctttttgccttcagtgtcaaccaaaaagacacgtgaactctgtgcggctctttccttcctccctgccccccactttctcagggaaagagcaaagtcatctccagggaaaccagcttggagaattacagtctagagacaggggaatcctcagaccctggactcccgagatcggggacacccgcagctccatgccagtggccttgcattttccaggcgtaggtcctggctcttgtcctcatcacccgtgcgcttttgatggttccttagaggcctctggggtgacgtgtgctgccctccatgcttttctccccaaggggaggctcctggggccaggccaggcagagtacacagctgacagtcccacctccctcccagcctctgggagccccaggctcctggcaagaacctctctcgactatccccagccccctgccaccacccgagctatccacagactttagtgtcatgtcacactttcatacctttgcccccagctgtctctgtgaggtggcccacagagatgtgcccattttacagatcaacaagcgtgtggccccaggaaatgagctggtggccagccctggtctgtcctagtgttttcattcaacagagccatgcttccatcctttctcttttcccctctcagactacttcatcccccttgagacatccctggaaaacagtgacaagttgagtgcctgtccagactcagagacacgggaccccctccctcccttgaagtgacacagtaacaaagttgggttgacccagatcctgtttacctctgaaccatgctcttttccatgctgttcttctagcttttcctcctccttccctctctggggcacagagggcacccagaggcgcccctccctagagaagggccctttcgtggtgcatgcagctgtaacctcacaccctttctctggctccgaaagccgaggtgagcaggctgagccgtgagccaaggaggcccagcaattacatcagcaggtgcaaacaagcaggcaggggc

SEQ ID NO: 49410 - DNA, 824 bp, Bovine  19866881351253
  misc_feature (1)..(1): n is a, c, g, or t
naagactctaatgctggtagggattgggggcgagaggagaaggggatgacagaggatgagatggctggatggcatcactgactcaatggacgtgagtctaggtgaactccgggagttgctgatggacagggaggcctggcgtgctgcgattcatggggtcgcaaagagtcggacatgactgagcgactgaactgaactgaactgaaatagtgtgtccatcttggaacataagaattgaagggctgtggacttgtgttcatctgagccacatggagaacactttctctaagttaaaagaggataggtggaagtcacagaacaaggtgaatgatagttccctgttaaacactgtgacaagtgaccagggcagaggcagggagcctggggtggagccaaagatgcaaaggggtcctgcagcagtcagtgacctgctggtggtctactgggcgactgctccccccaggaactcagctacctgagtaaggtgctcaagaatggactaacctcctgtttttgtcctctgctgtcccctgtgggtacttcaggttcctctgtgacccagttgctggctcgagacatggacaatgaccccctggtgtttggcgtgtctggggaggaggcctcccgcttctttgctgtggagcctgacacaggcgtggtgtggctccggcagccgctggacagagaggtatgacccgcctcgacctccgccccagtccttccctgggaaggcaggggcacaggctagaggaaaatggtatatcgtcttctcacccttaagcagaatcttcctgcctgaatggtgtcctcttccagggccagtg

SEQ ID NO: 49411 - DNA, 1017 bp, Bovine  19866881385407
  misc_feature (1)..(1): n is a, c, g, or t
ntggcagcctgcctctccctagtggataccatctcccatcctcaccctttactgctgctgtccaacccagagcccctagggcaggcctgagggacacccagttagcagctctttatccgccaccttcaaggtctttgaatcactaactgccagcccaaaagcctgccatcagccaccagggagagggacagcaagcaatgagaacccaggggccagcagccagcttataatcgaaccgtccgtaatgcaataatttgtacttctcaattaccagcaatggctcggttttacactcatgcactcatgcaaatacactcagagtacacaaacaacccagaggagccaacggccagcaagccagcggggcgagcgtggggttggagaaagaaagcccctcccagtcactgcacgtgccctgcatcctggggggactgttctggccaaagctgggaggcctggggttttaagtctgccaccccacctgtccaaggcccacacgctgtgaatggaaaaaatgaggtacaacctgcctctcccaacctctgtcctgtccctgactctggccagagtttggggatttatccagggccctctctcaggcatgaggctgccaccaacctgctctctgcaaccagcagacaagccccctcagaggtactggcttggtcaccagtgtgcccagagcagatgcccgggctgacgagagggcaggagagaaggagctggagctgtgcttcccccagcatcagtctacacccaggtggccccagagcagcagaccccaaatgtccctcgagtgtgatcccaggggcacctacctcagggatgcggacactgtagggctgattatgaaacgtgggcgcgttgtcattcacgtccccgacctggatgttcaccttccttgtaatcacctggcaagacaagcgtggtgagttaatgtcggcctcagcctctggcctctttccacccgaaggcccagggaccctgcctaccctgggcagcaggggtctcggggga

SEQ ID NO: 49412 - DNA, 900 bp, Bovine  19866881583728
  misc_feature (1)..(1): n is a, c, g, or t
nctgctgacctgctctagaatctgcacaagggcccactcacaagggcccaagtcacaccagtacaggcttgggtctcagatttccccaagacacaggcttgcggggcttctacgctactctacagccactccccaggcctggctcagcaaggtcttcatttctgtttcagagtcaattaaattttggtgcctagaggcaaagggtggggccagatgacccatgagatcttcctccccagaaagacgcttggtctaagccacaggaagatcctaaattagaggaaagggctgttggggagtgaagaaagaagacttaacctgccaaagcctcaataaggctagaaaaacaagactcttgccagaaaaggtttttctgtcctgagggaattgcataacagcagggtaatttatatatacaaatatatgtatgaatatatgtgcgtacacacacacacacatatatgctttgtgatatttgtgcagacttaacacacagcatgaaagcttaaagccgacaagtgaaattgagttagcacggcatcccttattctcaatttattacttcaccagggactcatgcaggctgcaggactggagaagtgatggcgcagagagagccagcaacccaggcaccggttgaattatgcgtcacaatttataaaccattacatgctgtggattttaatgatatttatttacacctgacccctctcatttcaaaacttggtttcatacatggggaggagaaagggaccttaaaaatgtgttttcgagctagggctcacctcagctgcagagggtggtcagcctgcacacctgggaatacattacaccctctccctggcctttcctttcacatacctcagggcccgacagagaaccctaggaagctcagtccat

SEQ ID NO: 49413 - DNA, 885 bp, Bovine  19866881121998
  misc_feature (1)..(1): n is a, c, g, or t
ntttttttactggggattgttagtttccctgtattaccaaaagtccccacagaagactgagaaatgctggaatcttattccaactcagtcagtatccaattctgtcatccctttggacctcagcttctccttttgtcatatgaggagttacttataatatctaaaatcccattaatctcgtagattctggatttaaatagcaaaaatgattaagcttgagaacctatattttgttattcccccattagagaggtataagataaaagaggattagaaactcatttctaaactacattaagaaactgagaacaaaagagatttttttttcactaatttcaaaagttaatgaaataagtttcaagcatgattatttctatcttctgaggaaatgtttcctgtaactgcctatgcagtgacacatgataattatttgaaaaccataataatgcggtttcattattctaactatcttctttcttaaagggccagcactggcttgacagaagtgctcctaaagcctgtggtgccctcttctgacccttcactcaatagggtgagtcaaagcttttgtttctgtaaaaaatatgtaaaaattcgtatctgacacaggttctatgaaagaaatctgactacagctccatggtgtatacttaacaaattcttccaggtttcagttttgaaatttgagaattgttccagagaaaaaataatactgaaatttgaaatgtgatagcaatttcactcaagcaacatgcctgtgtaagaaaatcttaggaaaagaagtgaaaatattatgctaaaatatctaaatgaattacaaaagataactactgaattaaaattcaaacttcatgccataactgtgcgccttaggcagagaagcaa

SEQ ID NO: 49414 - DNA, 2087 bp, Bovine  19866880492288
  misc_feature (1)..(1): n is a, c, g, or t
nttagtaatttctggagccttccatgtgttttctgatagctctttcttattctccacttacctggccacaggacattctctttcttgtcttaaggtactcaaaccctgactctttcacctcccttttggcttcaaaattctcagaaacatatcctgatttcaagtagattttatgttctttactgcataacagtgttgttgtactatgaacctctttatctggaaacaccactatacaggtctctaacttatttctacttttggtgataatgactcaaaccagtagtgtaacagtggaatgcactctctttgttaagatatttctgtgcccttaactaatcatttgctacttgtttcatgtttatgtgctttattgccctttatatattgatttgacctatctcagaccaattgaagagagaaagtctgatgcaattcctgtcttgctgtatgctggaagaaaatgaattgtgataatggtggtgatagactttctctgaagctcttggtcactagacttaccatcatttagggtctaactaaaatatgcccaactcttctttccagtaccaattacagaatgaagcagaagtaaacccaaaagggcataaactgtgttggagattatttttagtttgtgaacttaagctaattaacatttgaatggcccaaccctgatcatcttaaagacaaataaaaaggagagactgaggcacaccatctggctgccaggaggccactgttatcatggtcaggagaatgcacacataggggctctgatgttctgtttgcatgtcaatggaatcaacaccaaccactcttttccacctgcattcagaatctattgagaaagacactcacccatagaagtcaggcagttggagctggagagcaaaatgtcacccttatcgccaaggctgctgctggggtacctcacgcttagtctgccagggaggccggcttgctaataacctcagagcctctgtcagctctgcttgactgcagcccctcctttctggggcccacctgagtaacacttacacagcagagcagggcaggctgacagattttgaaggaagagcatactcagacccttctctcaaacccaccaacagaatactcactcctcttcccaaggcaggaagctgaatggggccatagctagggcgaagcaagtgagggcagagttgtttttatggaagatttttatattttgttcctcttggattttttgcatttattttgatttttaaaaatattgcattaaatattatttttctcaattattgagtttttgagtgcatccttaaatttcttaattgaggtgagtgcctcagtagccttgtctgagtctgagccttgcaagaagataaaagggtaaatggatagagacccttccagatagaaatatcaggagtagggactgtattcctatctggtcggatgtttaggagcttgatcaactctattatcaactctactgtaattgtgcagatactcatagtcacagaaactcttttttctttagtaaatatgttggatctctgttgttataaaaggagaagcaaaataagacaggtatcggagatactagaagatgattataatgttcagtaaagctaccaaataacattggttctaatgggcttcagaaccaagttgccctttaaaacaaatacttgatatgtcttgctttttccctaattagtattcagaaaatatttgagtgtgtatccgaacattatgaaaaatgtaaacacagatttgaacttgtggaatttaatgcatgaatgtgtccaactaagtcttcaggctctgaccatcagaggaacggcctgttctgtgacaagtgtgtgcctgcctctggaactcacagcacattccaggaaaatcatatcctaactagtttgggttgtttactccaaagagggcatttttgcacttcatttttcaactctagtttgtttatattgagacaaaacattctcacacaggaagacactagacactctttctcagtggagggagcattctcttttcggggtcaggaactttatgtctgcaaagttaattatcacgagactgta

SEQ ID NO: 49415 - DNA, 1133 bp, Bovine  19866880524938
  misc_feature (1)..(1): n is a, c, g, or t
natttggctagttggccgtaatgccccacaccctgtctaacattctgctttcctgctttatttacctccataacacttaatgccatctgccatacagtgtattcacttgtttattttatgtctcctctaattagggtataagctgcattgtctctttcctttaagcagtatgtccagtatctagaaacctttcctgttacatgttgtactgagctgtgcttagttgctcagtcatatctgactctgtgtggaccccatggactagaagtccaccagtctcctccattcatggaattctcaggcaagaatactagaatgggttgccatgccctccttcaggggatcttcccaacccagggatcaaacccaggtctccggcattgcaggtggattctttgccacctgagccaccagggaagtccttcttgtacacgataggcatttaataaatagttgttaatgaatgaggaaagatgaagatgcagccatgcaggagatcactggtccactagccggtagatcactgtacacgcacaaagagaagcaaaacacacaggcccctgtgtatgttgtgaggccccatctcatcatacccagcaaatctttctaaactctaccatctacacttcttaatcatgagggttactgtaaccaggataacagaaggatttcttacattttggtaacaccgtagtttttcaaaatgactctcaatggctattatttcatttcatctggacaaaaatcttataaggagtcagagaaaaatgttaatatccacagttactaattaaaaagacaagacagagagattaaataactttccaatggtcagaactggtgaggccttcacagaaacaagcctagaactgagtgatcactttgccctgatgcatttttctcctctcatacatttgattcaaggtagtccaggtttcatgcttcataataaaagagaatatattctgggaggtgggagatgagaagaactttgatccctgagatactttggcaaagttgtgggagacagcaaggcaattaaattcacccatccttgaaaataataatcctctaggtcttaataaaagaattattgggtgataaatgaaaattgggtagtaagaatgaagaat

SEQ ID NO: 49416 - DNA, 1074 bp, Bovine  19866880550876
  misc_feature (1)..(1): n is a, c, g, or t
ncagcaaatgttagatggagcccaccgctgccttcccccaccagcaacctgctgcctgtctgctccagcctgagagttggggggccagggatctggacccagcttgaccttgctttcctaaagacctggaggttttcttcccctgcatagaaggaggccttccttctttctgccctgccccagggagtctggaaggtcaggcaagggtgagtgacaagaacagattagatctgccagaggaacgtgaattttccttctatcccagatagattagtggcttgttggtctaggggtatgattctcgcttagggtgagagaggtcctggcttcaaatcccagacgagccctactttggacttccctggtggctcagatggtaaagcgtctgcatacaatgcaggagacatgggttcaatccctgggtcggtaagatcccctggagaaggaaacggcaacccactccagtactcttgcctggaaaatcccatggacggagaagcctggtaggctacagtccatggggtcacaaagagtcggacatgactgagtgagttcactttcactttctatagcttaaatgcatgtaaataagtgtatctttagaaaatttgtgtacaaatacaaatacagtaatatcttacaaattcagataaaagttcagctgaataagtgaacacattgtaaatagtattataaaagttatttgatatttaagttaaatgtttattactttaatttatattgaataattctgaatgtctataaaatttgccaagtaaaaaactttggactctgcttttagatacgaatactctgtccttttgattttgtaattatttatattcaaattatttctgtgctggtaaagtgttttacaaaggcccagagattccttttctcttacaagggctaaacatttatctcacaagctgatacaccattctttggaaactctttcttgtcagtgcaaaattaaacatcaacctttatgtgtctgagtatcacaaatgtagttaaaatgaaagtggttttattgtaacatggtattactcctgaagagataaatatattctg

SEQ ID NO: 49417 - DNA, 1979 bp, Bovine  19866880559192
  misc_feature (1)..(1): n is a, c, g, or t
nttcttatccattcatctgctgatggacatctagggtgcttccatgtcctggctgttgtaaacagtgctgcgatgaacattaggggtacacgtgtctctttcaattctggtttcctcggtgtgtatgcccaggagtggggttgctgggtcgtatggcagttctatttccagttttttaagaaatctcccacattgttctccatagtgggtgtactagtttgcattcccaccaacagtgtaagagggttcccttttctccataccctctccagcatttatggcttgtagacttttgaatagcagccattctgactggcgtgagatggtacctcattgtggttttgatttgcatttctctgaaaatgagtgatgttgagcatcttttcatgtttgttagccatctgtatgtcttctttggagaaatgtctgtttagttcttcggcccattttttgactgagtcatttatttttctggaattgagctgcaggagctgcttgaacatttttgacatgaattctttgtcagttgctttgcttgctatcattttctcccattctgaaggctggcttttctctccctatatttgtattcttttcattagaagggaaaagatatctgcaattttgagttgacaaaattcatgttgttataatgtggtgtcttgagagtatctcataataagcaaaaaactattattatattttagacgttgtttttttaataataatttgatatttatttgattcattcaatttaatgggagaaaacagtgaaaaattatttgacaccagataggtaaatattattatgtctgtatctttcaacttatttttttaagttgttaatgagtcttgagaatgactctgaaacacattaagatgtagtttatgtcactgtataaatatatatgttacatcatatattatttaaatttgaattatatattatgtatcacatataactattatagtgagtgactatgcatggggtaaaataggaagttgagaacattgattttcattgccaccatatccacacttatagaaacaagcaactgtactttgaaatgatcactttatcagaacacccatcagacaaatgccaatcttcagatcaatttggggaacattcctctttggttgggcctcatgaaccacacaagaaactgcttcagtactttataattgtgttttatgatgataatttttattattataaactgtgttacccactttgatcactcactttaataatactaacatcttgtaggtacctgaaaatgtgttcagttaacttgtaaagtataattttattcactgtgcttttcagttcagttcacttcagtcactcagtcgtgtctgactctttgcaaccccatgaatcacagcacgccaggctccctgtccatcaccaactccccggagttccacctatacccatgtccattgagtcggtgatgccatccaaccatctcatcctctgttgtccccttctcctgccctcaatctttcccagcatcagggtctttttgaatgagtcatcccttcgcgtcaggtggccaaagtattgggagtttcatcttcaacatcagtccttccagtgaatattcaggactgatttcctttgggatggacaagttggatatccttgcagtccaagggactctcaagagtcttctccaacgccatagttcaaaagcaccaattctttggcgctcagttttctttatagtccaactctgacatccatacatgctgctgctgctaagcgcttcagtcgtgtccgactctgtgcgactccatagaaggcagcccaccaggctccctggtccttgggattctccaggcaagaatactggagtgggttgctatttccttttccaatgcatgaaagtaaaaagtgaaaatgaagtagctcagtctgactcctagtgaccccatggactgaagcctaccaggctcctccatccatgggattt

SEQ ID NO: 49418 - DNA, 996 bp, Bovine  19866880696016
  misc_feature (1)..(1): n is a, c, g, or t
nggtttaaacattacatgttcttgagtaggaatgaagtgccatgtagcctttcacacagttctgagtgtttgacctaccctaggaatatctccctactccaaaggaaagggtggtcaagatattaaatttattctttagagggttagttgaggtttattctctatcttttcctcccatgaaaatctctggtgtctgctaccccatgctggggaccagtagacaaaagcctggtggtgaatcaaaagttgcaattcaagccctgagagagaatttctattaaaatggacaacagatgtgaacaaaggaaagaaatagatcaaagatgtgaactccatccatgagattatttgcaaacacaaagcatgtagggtttttgttatttttaacttttatcaatgcaaacttctgggtggaggaggaaataacaccaaaaaaaaaaataataataataatgaagggaataagcaaccatagaatagaaagaatcatgtctgtggaaaagaatggaatttaaaagaaaacattttttgagcaccttgtttatgtaggcactggaggggatgctgagtagagacgcttatagcttgacatgagctctgctttggaaaatccagagtccagtggagaagtcaaaattaaaaaatagctttaatgtaagagaaatgcaagaatcccagaggatgcaaagtcaaattattcattatatatgttcatataaaactttggtatccttttaagaattctgaattgttttcataattaaataatgacccagcaatggttagcccttgcataagaattgaaacaatttggaaacaactcaagtaattgttggcttttatgacttattcttgtgctggagagtctgaagcagttctgtagaagaaacagtggaggcagaggatagtgaattctaagccagtgactttcagcaccttaccagactgctacttacacttagtcatttcctataacttcaaacttcacgcatctct

SEQ ID NO: 49419 - DNA, 950 bp, Bovine  19866880769871
  misc_feature (1)..(1): n is a, c, g, or t
ntggcaaaagtttttccttgagattaacctggggattctttaagatgtagagtcttgggttctttggaatttaacattttatagctggagcaaagaggaaataaaggaacatagaaataaatacctagtctagtccaagggtgccttttctcccagataactctgagtaaatttatttaccatatagaaatgcctcctgccattatacattttaatttgatgataattattatttatttgcatatcaatttctcaatatcttctttcttatgtaagggttgacatttgtgtgcctttgctttctttcaatctatgagaagcttcagtaaatacagtacagtgtatacccagagataaaggtattctatttctaggcatttgaatggcagcaacttcctattttaaaacaaaagagctgactttttttcaaatgccccatgatgccagtgctactgatctcccattgccctgacttttcgatgcctaggttgagtgagcaaatgcagtgaagcatctatgcaggctggccaacatgtctctgctactgctcccttcatagttatgaaattggaagaaacttagtgtgtagatctgttgtttttactgctttgtatccattctttcttcttctgttagccacatccagattattctggggcgaggtcaccattgtcccggaacatgttgttcagatagaggcgactttactccttggtatcaaggcaagttgggtctgtgtctcagatccgaccatcctgtgtggtttatctgcttggctgtggtgatttctccaaggatgggcatgtgatccaagatactctgtatgtctatggggtctgtaggtcatttactgatactattgggaatgagacatccattctgctggttgctaagctagcatagtgggttataaatttaacactgttaggacaatctaataccacaaaagg

SEQ ID NO: 49420 - DNA, 1201 bp, Bovine  19866880797244
  misc_feature (1)..(1): n is a, c, g, or t
ncagacaggatggaagatcatttaagacccccatttaatagctgaagatcagagaaagtattgtattgcatatttaggaagcggtgataaaattacgattagaacttgaaatagtctatatctctgattccaaatattcatttccctttcatatgaaaggtttaattaattccacccattgcaatataacatgcattggcctggtacagaagtatatacctctactccgttgacattgggcttgaccgtgtgctttggccgctggcatgaaaaggaacattgcatatgccatgggcaaacagaaactttaaaagtcaccatgtgatgttgccagctccctattcttttccctctgccacagactcacatgtcctagaagagacagcctcttcagcctggaatgaagaggacactggaaacagacatgcatatgatccagcttctcatatgtcaagaacatgaaaaactgtttatgttctattgttgtaagccattgagttgtatagttgttcattcctagagcaaagatgaataatttagaacacagaacaaaaagggtacgtgatttgctcaagtttacacaattaagcagctaaatgacagaatcagaattgaatctcacttcttttaacatccagtccagtcttctcttcatatttcagaactccttaaatgaccgatgtaaatatctacacagaatactttactgagatatttagaacatctgaaaaagcaatttactccaagacaatggctttgaccaattaattgttccttacatgcaactaacagggctactagcaatccatgaaactctcatttgtggtcactagtgaccataccaaccaggagctacccctcttgatgtgaactgggtggtgtggagttggggactgagtaaggtttgcccctttacatttgttcttattagccaggtcatcttcaagtgcctgttatctgtggtaagatactggattccagcaacagctccagtgtatcagtatagtcttatcttaggaacatatggactctttcatacttggtttccctaagtaggcttttaaaagtgatggcaaattctgtcaacaactcacacctgttttgtgtccgctccagtaaaaaaatctgtctgggcacttcaagaagctccttttactatgaggccactttgtaccctgttccatttactcctgtcgccatt

SEQ ID NO: 49421 - DNA, 713 bp, Bovine  19866880843010
  misc_feature (1)..(1): n is a, c, g, or t
ncttgaacagagatgctggctgctaaatggcaataacagagtttgtgcctggggatcccactggaaaatggtaatttcaattcaatattttttaatttccagggaaccatctgaatatagacctctgggcaagcacaaccacatgcactggaaagaaacatgatcgcaacactgacaagtgcagcaaaatccggtcagagcattctttcctctaatacaactccacattcagcagtgtgctgcttaatggactcggggctgtatttgtttatctatttttgatttgacaacgtatatcattgtttgcaattgaagacaatctccccccttccaaaccaattttactgcacaaatctgaattaaaataggggcagacattcttgtctttgtaagctactgctcactcataagtattttccctgttatttcagcatgttgtgcttacataccaagaaagacttgttcaagtccactatagtcaactaagttaaaaaaaatcaaagttctagagacagaaataactaaggatatgattaaccaaggaggaaggatatttgggccagagtgacccaagaagcatatgaagcatagtatgggggtcaacatataggattctagctcacagtagctatgtttgtggcaaaccatcctgacaagaagtcaaatttgcccagtactatattttacatattcatatgtatcatatcagcaga

SEQ ID NO: 49422 - DNA, 1349 bp, Bovine  19866880895238
  misc_feature (1)..(1): n is a, c, g, or t
ngtctggaaacctgaccccctcgtcctaaaaaggcttttgtctggtaacctaacccaagtgattcattaataggcgattgaaagatttttttttttttttggtcaggaactctccttttccccccttttatagaaatgaacaatttgaaacacaactaaagtataagattgtatcaaccccacttcaaaatagttctatctgctatacaaaaagatatttatttcttatgatgaaatatttgttagctcttgcataagtatcccctgaattaaatataccatttgctttgtcaaaagtgcagtacaaaaagttctttacaaaatatttttgtgcatccaaaaatagtagttcagttagttaaaaaaaattttttaactctaattctgtgtttctagtagatgaataattatatgcttcaggtcagatggtgttgtgatttcatttattgatgttcaaaataaattagtaactcaacttgggatttttgtcatttattctttagtgcttactaaagataagtactagcattttttaaaaagtgcttccttatgtgtgggttacatttcacttctatagtattcttcccaaggatcatatgttatgtttgaccttttaataactgacttcaaataagaaaaagtaatggcattaaactacattcaacatttattaatatagcatttaaactcaaggaaaatgccagactccaacattctgacaatgaaaattcatcctaatcagcctttgtctctaccctttgtaagaaaagcaagaaactgggacacgttctatgctactctgaatcacagcaagtaccacccacttgtgaagttaaaagtcttttcatcatatttactttgtatttaaaaaataggtataggttctctccaattgcctctccaagttgtggcctgaaagaatcaatagacaaaaacatgaatcatcaccaagggcttgatcccattcacaaggaaatataagataggttatatttagtggtggtggtgatatttataactgccctcaaagtcactcaggtagaatccccacaaacattttaatattaaatttcaactctctttataattgcttatatgcctttaagactctacctcacttggtaaacacaagacttaagccttcaaccttctcaaagtagcctgggcaagccattcagatgaaggtcttgattaacacactctctctccaggtctgctctaacaaaaaaagcatttcctggaaacccgcccacagattgtgggactatttttagtagctcacctcccagtaaaggcagctattagatatcctgcccctctcaggtgcagtaaaatagaacataaaagag

SEQ ID NO: 49423 - DNA, 1575 bp, Bovine  19866880970193
  misc_feature (1)..(1): n is a, c, g, or t
ncgcattgatagtatttggctagaagaaagggatagaattccatagtgggaagtgggtgagcatttacagaggcaccaactccaaaaggaaaaaaacttttaaggagaatgataagtagaccgggcattttaaggtagatttatggagggaaagcttgaaaacacttgaaggtaaatcgcagaaaatttccaatgccaaactaaggaaacagaacttaccctctgtgtaagtggttctcaacacccactgccccccagaagcatctggcaatctctagagacacttggttatcacaactagaaaatgaatggctgcaatcagtagcaagagggtagaggtcagagatgttgctcagtattctatggagcacagcccaccatccaagcaaagaactacctggcccaaaatgtcagtagtgccatggttgagaaacccggttctaggtaatagggagcaattccagatcagtgactcagtcagcagattgcctctcttctgtcctcagccatgtgtagtaggtatctatgctatgcactttaacctagagagctgaacaatgtacactctgtcccctcatcttacacagaccatggttacaaatgtgcctattttaaataaaaataatcattacagtaccaggggatttacactgcagatactttttaagttgatgctttacggaactatatttagccttggaactggaccagcagttagtgggctggaccaacctgttctaattaaatagaaagttaatttagaagtgacctgaaagtgaacctttttgaaagtcaggaatgtgtttgcactaatttgggacttttttttcaatttctctctgttagaagagagagtgaaatggtgagagccagaaattatcttcactgaatatccatctggaggaataaaatgatagatatattggaataactccagcccaatttttcaaaattcaacaggagagctgtggaatggattattgtttgtaaaactcctggaatccagtaggttttaactaaatggaacttctcctactcttgtttacctattctgagaaaaagtgcacctgggacaagttatcctaccctcttggagaggggaatggcaacacacgccagtattcttgcccagaaaatcccaaggacagaggagactagtgggctatagtccatggcgtcacaaagagttggacacaaccgagaaactgagcatcatgcacgctggaagcagacatacatcttgcaggatttttgcttttcaaagctaagctcaatgtatcatttttaaatttcgaatgtttccctttcctacttcctttaagctaaatgtagcttgaggacaatgacttgtagagctatcaagaaatacacaggcaccacactctgtacccaaacagttttcccttatctttccagcaaatacagagtctgtctgggcactaatggccaaagcacagcagagcagtaaagccaaggaagtgattttgctttgtcctatggcaccgatcaaccactatacagtgataactgtgagactgttttatccccaacactgccctctcctcagaattccag

SEQ ID NO: 49424 - DNA, 1507 bp, Bovine  19866880982849
  misc_feature (1)..(1): n is a, c, g, or t
natttctagggtcatccctgcataagacatttatgggttgagtagcttttataactgacttctttatcagaaagacttcataggcagctgcatattttattgcctttccccattctagttaacaagagagaataatccattgagaaatgcataaatacatattcagcttatactgtgacaatttaaaaagtgtttctggaaatgccatgaacattttatggattgtgaactctttcaatttccaaatttataacataaccgtaaaagctttgaagacctttagggggggaaataaaagctcacttcttccttaaaacttatgtctgaaactgattagtctcatgaaatgcccctttatgtaggagaaaactttagaaaacctaggacttaccattgagtcaagaccatttatatcttaagctatgtttgtttatacctggcacagtcaccctggcttagacatctcttttatgatccctggttttaagtggttagtgtacagagctgcgtgtataggagagcattcagtgtttatgtttgtcctggcatgtcacttcagtgaattctcccagggtaagtggggagaaggacctgaggcctttacctgatgtataactaacctgatcccagagcagacagggcgccttttaaggcaactgctgagatgtatcctatcaactcttaccacagctcagtactgcttgttagtttccagtattattcgtttgatataatgcaatgatattcctattttactgcttcctggagctattccaagcaatagcttaatttgcataacaagtatactgtttcatctttatgtgacttttctttccctttgtgaggtccttcacatacatagtgtgcttgaagattaaaaatctcttggcacagcaaagccattgctgtctatttactttaaacagaagctcaagaaaaatattgattaactacagtgggactgtcttcctattttagcatgactactaatatgactattaatgttaatagagagttccagaaaaacatctacttctgttttactgactatgccaaagcctttgactgtgtggatcgcaacaaactggaaaattcttaaagagatgagaataccagaccaccttatctacctcctgagaaatctgtatgcaggtaaagaaacaacagttagaattggacatggaacaacagactggttccaaatcaggaaaggagtacatcaaggctgtatattgtcacccttcttatttaacttatatgcagagtacaacatgtaaaatgccgggctggatgaagcacaagctggaataaagattgccgggagaaatatcaataacctcagatatgcagatgataccacctttatggcagaaagcatagaagaactaaagagcctcttgatgaaagtgaaagaggagagtgaaaaagttggcttaaagctcaacattcagaaaactaagatcatggcatctggtcccatcacttcatggcaaatagatggagaaaa

SEQ ID NO: 49425 - DNA, 857 bp, Bovine  19866881039755
  misc_feature (1)..(1): n is a, c, g, or t
ngggcaggagaaggaagagtttacaccagtgcgtgaggaatcataggattatattcattatcttgactgtagtgatggtttcacaggtgaacatatatggtaaaactcactgtttgttaaagataaccaaaaaggctgttcttttaaaaaaaaagataagaaaacaaaattacacacccaagtccctcatgaacatagattaaacaagaaccagatctcaagttccttcacccagaaatttgaatttaattggtatatgatatgacctagattcaagattttaagttccctacataattttgatacacagaataatataagaggcacagttctatttatgaccctaaactgcaacccctaccatgaaaaacccttacttaaatgaatgcccatagttgccagggaaccatgttggaaaaatacaagtgggcaatataaatccatcatcactttcagaaaacaacctgaaatatctaatattgctggctaatcagtaatatcgtcttagtaaagtgaagggtaactttattttaaaaataaacaaaaaacagaagtgggatgctaagagatcagtgcaaggtgctaacaactgaaaaacatgtaaccacagctgcagcatgtaaggaataagtaacagtaaaggaagctttctgaaatgtcctggtaacagggaaaggtgaaaggtacaagataagcttaaggaaaaaatgggtaagttctgggtaaggggtcaggaaagaaaggaagtcaacaacttgaatcatcactcttaaaatcactctctgtcaacagaagcttatatttactttcttttatttggtgccttcaatattttttctattgtatagtatttaaca

SEQ ID NO: 49426 - DNA, 1855 bp, Bovine  19866881047813
  misc_feature (1)..(1): n is a, c, g, or t
naataaagtttctaagagtatttagaacatgctataattaattattagttctcactgggggcattttgctaaaaacgctcttagaaaaagacttagatggtaacaggctcaacattgaaatattttcaataaactaaggaaagacttgcattttaaaatagaatggagaactcacatgacaagaatgttgtttcaaagatctggttatcatgattttgaggggaaaagttaatgatttttcaccctggctatagtctggcaaaactaaatcagaacaatttatgaatacacaaaattaaaatgtaaaactaaagtaatagaaaagtggcaagcagaaatgtaaagatggggagaaaaagaatgctaaacttttattcctaaatatttcaggaactcattaggaagcaaatattgggaagtactgaagattttaaagcaaaagtagtaaatagaatatgagaataaagaaaaccattgttggtggtgggatatgtctatattgttggtagtgggatgtggatgtgtgtgtgtgtgtgtgtgcgcgcgcacgtgcatgtgtgagagacagagagacagagaaactcagtccccaaaggataacaaccaacagggttttgtggctagatttaaaataaccacaggttgatctattaagcttggtggtaagacaaccatgtagctttaaaacaacacccatactctgtaaggtcatgtactttctttcaggtattaacatgcataattgtggattagtagtgttcttaagatttggcatagcatggctcattatgacagaatcatcaaatcatgggtcaaatcacatatctagtttaataagtctaatatttatattgtgtgatatatgaaatgtagctacactttgggatactaagatatccagagacacctttcaaactacactaagaaaacacaccgcactgtagttttataaatcctacatgctcacttggaatagtgagactaaaaagaaatttgaaaatggaggaaaaaatataaaaaccctttggattcaataaagtgattctgatgtaagaagataatttaaaaagtgggattgaaagagaggatatgtagaggtaggtagacttccaagaacactgaaaggtcagacttttaagtgtgcaaccatggaatatttgtaatgagcctgaaatatcaccatgaacatagagtgtgcatgtggattcaagtggatctttgagaacgtagaaaacaatatgctatcctgtatcagcatcattcatgcatttcttaagattcattgatctctgtctctttgcttgctaattgtgaaaaaagaagatgcagaaacagatgaaaaagagttccaagaaagtataattactcatttccctcctttttttgcctcttatattatggatggtttaaagatgaccaaccaagtgagagactggggaaacaggagggtgcaaaaccgtatctgttataaaggaaaaacaaagaaaaagaaatgtgtctcaactactggtgaccagattgcttcaaaatataattcaattttatgatagaagacaaaatttgaactttgacgtcttgagacacttttcaaaggattattcttgacttttgcctgtacctgtatagactcaagtactcctgagatcatgcctgcctatgaataaatagcattgaaacaagagtttactgatatcctacttctactatgttaatgcagttataaacaagaaaaaatctcagggtcagtatttttacatgttgtagaaaatcaggcaaacctgagtctagacaggtaactactatatttcccagtttcaaatactgactcttccaattcagtggagtagcaggttat

SEQ ID NO: 49427 - DNA, 737 bp, Bovine  19866881068844
  misc_feature (1)..(1): n is a, c, g, or t
nccaaggtattttgatcagatgggcttttccatccatctcagatataacccagtacactgggtctatgctggaggctgtcaccatctgtctttcccttggaattagaatcttccattttgggtggatgccactgagatgaatgatacagtaggccttaccttcagactcagtctgcttgacctgaagatggtcatttagaaaattcctttcactggagaaacagcaaaggcatttgtagtgcatgtgtccacatccttcactgtttatgagtagtgatggaagattaaaaaggttctttttaatttatttatttggctgtacagggtcttagctgtggcatgcaggatccagttccctgaccagggatcaaactcattgcattgagaacacagagtcttagccactggaccagggaattctcagattaaaagttttctaaatccactgcactgagaaaacaccactttagtgttttaaaggttaagagatttagctatggtcaactggtcaactaatggccaaaagagctagaaatttaaacacccagttattcaaatcctcgaatcactgcctaggctttaatctcctcatctgtttgctattgttgagatgccaagaaaaggattatataactttcaaggtccttcctaggtctatgacactattttacagcagagaaagtctcatcaagatagtgacaaattagccagcacttgccccacctaaggatgaaaag

SEQ ID NO: 49428 - DNA, 1522 bp, Bovine  19866881074815
  misc_feature (1)..(1): n is a, c, g, or t
ntacttttaaggcaatcctcgtgttacagatcttcttaatcagattatatctgtacacagaaaggaaaaggggaaactgagcttaatattattaggtttaaacttgtttttggctggtgatataaagataattgatgccagggtaatattcataggtctcagttttctagcttattctctcatttctgcatttcagtttgaccactgtgatacactctgtctcaggaaataggatggaaagtacagtccttattctaggcatattgtgggaaatctaggggattcttagagtgtgcatatgcactttataaaaactattaaaaggaaacactttttaaaaattatgactatctgtccaggatttcccctcaggtttgctgccttcattattctgcttgccgaataagacctataagaactttgaacatttgtgtgtagaaattgacttgagcgagtatattttctattttatttagcattcacaaccaaaacaaggctatttttgaagactacaatcaactgccttcatgctcaagtctaagcttcctaaatcagaaagtgccagaaattacactttgaacctccaaatagtgtgagttgaacagaagtgtatttttggataccaaatgtgctctcatatccttccaactctgcaaaatcaaagaagcaggaatttcattatctgggcgttcagccttgatccctcacaactggccctgtcttcctgtgaccctgttcccctgcatcagacagagccataactgtgtctcagtgttcatttccagcctaccactacccctccctccacctcctctcctctccccctcctcttccagcagggaaacgcttcaacagagagagagaaaactcaaagaatccccctttactaactagaactaagatgaattgtgtcagagttcagagcccccttgttgctttggcatgaaatcactgcccttggtttctgccaaggcgggtgtcagctggtgaattataacactggcagacaggactgagataagcaaaaaatacaatgacagctgctacacagaactattctttctggcctagtgaatacaaaaatacattgtgtaaataaagacagacagcttcattatgcaattgtctgctactatgtcactactaaagagcaagtattgattctgaaaaatatacccagactcttcaagctaatatggtcttactctgggcatgcaggaacactaaggaaagttgtcatctaatcaaacttcttaacttcagagctgaaccaatatagatatttattataagatcccatcactttagttgtttgaaatttaactttaaaaaacttcttttgcattcaagtcctcaatatttatatgacaacagacatatttgaagtaaaattctggggctttgactagcttttatgaattataaagtaagtgtgtatgttagtctgctcaggttgccataacaaaataccgtacaccagataccaaataccataggacaaaataccataaagtactggtgc

SEQ ID NO: 49429 - DNA, 1579 bp, Bovine  19866881122333
  misc_feature (1)..(1): n is a, c, g, or t
nagataggaaaaagaatgagtaatgatgatgaaagcctcagaccttgtcaaatcagctgatgagtcaaaaagatgaggaccgagaatggaagctggatttagctctgtggggtgattgctgaccctgataaacgtagttttaaaagagtgtgggggtgacaatcttggcactggtttattcattcactaattcattcaaaagtacttattgagcatgagcatcttctttgagccagtcactgagaatttgaggtgaacatgaaagacattgccctgacatctccaagttaagaggattctactgtaattacaggctatgatatcaggcagggatcaatttcaaaacagacctttactacatgtgtgcgtgctcagaggcatacacacccttgaagactgaagagagcaagaaagacacaggttaagggaagtttactgtaagcctgtaggatgtatgagaacactccctgcctctatgggctaggacttgttaactactgtttatcttgtgagtggctgcatctggcatctttaaaaggggattatcgactctctttttgtttttattttgggaagtatttgaccgggtgccataatttgattttaatctgattttatctctgtagtgcttagatagtttaattgctggtttgatcaggcacctagaatgtgaattgttggaaaaataacatgctgcattcttatagtcaggactgtttccatggattctttttcctgaatacaagcagttattcatgactctccagggactaaaacttgcaaaatagtattttgttcatctaaatattgtttaatagaaatcctgtaaagcaatatctgaaatcctaatattttcttaggtaagttttggcatgaggtcctatgcaatagaataattgaaattgaaacaaaacttaaatggtagacatcctaatatgtttcattataatatggcccttaaatattaatctcctgtaatttttaatagcaaagtaatcactaggatataataaaaatgttaatatagcttgaaagttatttctctgtagataggagacctctgtaaagaacagagaaatatcattcttgcaaatataaagcacattagtattttgggttttctgtttgaattctgtaaacactagtaataacctataaacaaatgctcttgggccacgagaatatcaaactgtgataaagtgtgtatattttgttcattcaggcaatgagattgatctccaaagaacttgccttaacaagcatcagtatgacccattttaaactcgttcctggtgtcctagcaagcagctgaatacaacatacttctacattcagaaacctgaaacacaaatgatttgtatcttaaacatatttatttcaagaaagggattctttcgctgggaatttttatcaggaagtgggtgaatagatgagaaactatggcactgttgtaaaaaaatcagttacatatttttaaaaaactgtccataatcaaatgacttattctattttataacatatctaaagtaaactataagctccaagtgataagagcacacacattaaaaatcagaaagtt

SEQ ID NO: 49430 - DNA, 1435 bp, Bovine  19866881144562
  misc_feature (1)..(1): n is a, c, g, or t
ngtatagttatagatccttgcaactacccttctaatggaaaaacagcttcaaatatacagcgtcaaggtatatctaaagaagaacatttattctcaataaaagagaatttaatcttaaattagtatatttaccaatatccagatgtgtggcaacaaatactagcatttgaactgcgcgtgctgttttcttccctatattagacacctcagagttggctggagtgacattagaagtgctgatgggcactgaagaggcttggtttcttcttgtctctccctatccctccatgtaccttcagcgggtcatttgtgacttcctttttctcagcctgtaaaaggaaagcctagatctgaatgatctcttctgagagcctttcagatctgaaaacattctgtaatattaaaggcttattgtcatgtgggttatgagccttagctgaagcttctttagttgtttggctatctgtggattgtgtattcacaggcattccatttaaatctcatgctctgagctcatttacttgtacttttatagtaatacttaagcatttatatattgcttttcatcttcaaagcacttaacatacttaagaatccttccagcaacactttgaggtagctaagtattattaaaatagaaagaggaagaggacaagggagaaagaaggaaggagagggagagagagagaattttaagtcctttaatgatttgtctctggctcaaggaagagaatataccaagggggcacaattagaaattttaaaaaaatagtttttttaaaaacaggggtggggggaggaagaatataccagggccagaattaaaactacttccctgttgtgtgttagacttgctatcaagcttttgtccttccaaacgttcttaagggtttagaatcctccctgtactgctccaggatttccttgaatctttgtaggctgaaggcattttgatattgtctaccttcttggagggcagaaacacatctagcacaagtacagtgctcagtttataacagaagtttgctgttggtgatggtgttatggatcctttcctgttttaagctgatgtaaccaaaagcagaagggaaaagtgaagatttctactgcagcaaattcatggagtagatggtttgggctgctagcttgcgggtttgcaatcttaaatttccctgtagcttactagagaccaacgccttttagaaataatgccaaacacatgttgaactttagtaacctttactctgtaatgaaaatgtaactctgagcagggtgtataatcaaaaacctaatgatgaaattattgcttagaaatttaaagtttggtttgaggattcttaatgctgacatggaaagaacagtgtgaatggagaaagaggttgtgcggagggatggcagggagaaaaggacaaatagagggaaaggaagatgggtt

SEQ ID NO: 49431 - DNA, 1448 bp, Bovine  19866881189325
  misc_feature (1)..(1): n is a, c, g, or t
nacttgttctatgaaaaacacattttactcaaaattttcataaaatgacaatgtctgccaaatgtacagcttgttacatccagtttaaggacttgaattctgtttatattgagtattcaaacatcacaaaacattgtgttaagcaacatttataaattattgtaatatgctgagtattggccttccaaaaacaagtcctcacgcttggatatttaaatgttacctttaaaaaaaaaaaaaaactttgcaaatataattaagaatcttgagatgaattcagaagtgccctaaatgccatcacaaagacatacacagagaagtcagtgtgaaaatggaggcacatattacagtgttggagccacaagccaaggactgtcagttcagttcagttgagtcactcagttgtgtcggactctttgcgaccccgtggactgcagcacgccaggcctccctgtcaccaactactaaaaccaggaggagaagcatggaattctccctcagaatctccagaaggagtcaaccctgtcaactccttgatttcaaacttttggtccccagaactgagagagaagaaatttctgttgttttaagtcaagtttgtggcgatttgttacagcagccctaagaaatgaatacagctattacagcacatattgtgaattcttaagctagtgattcttcatatcgatatatgaacttttgtcattagaaaagtgttagttgcttagttgtgtctgactctttgagaccctatggactgtatagcccaccaggttcctctgtccatgtaattctccagacaagaatactagggtgggttgccatttccttctccaggggaatcttcctgacccagggatcgaacccaggtctcccacattgcaggtggattctttaccatctcagccaccaggaaagactttgtcattagaatatcatgtctacagtatttactaccccgtattataagggaaaaaaaaaaaaggaaggggaagttagatacggagagcaggaaattataaagtttcagggaacaaaatataaagatctggaagaaaaaaagtaaaaattaatgaagattttttaaaccatagttcttaatgaaagtagaaattagttgttttgtcatttcctccagtcttccctgagactgcctttcaaatttatttaactgatccaccatgaaagaaggttcaatttagtattttttactttacagatgaatggcatgcttttacttcaaaagccaaattttgtgtagctcctaaatggaaagataaattagatttagatttcaagagtcaatatctttagaaatttgttcttttcctgtcctagaagaaatttaaaaaaagaaagaaacagaagagagggaacaagagaagaactagagtgtgttaatattcaggctgccaaaaaaatcactctctaatcagatttctcctctg

SEQ ID NO: 49432 - DNA, 992 bp, Bovine  19866881189614
  misc_feature (1)..(1): n is a, c, g, or t
ngcatgcatatttattgaagcttttgagcaataccaacgacaatagctccactgtgattgatttctgaatactgaatgaggcaaagagaattttaaaagatttggactcactgtaacctctactcactgaagttcagattccattgctcaaagggcagatgagttcctacttaccagatgtcagcccaagcatgggatttctctctctctctcttttttttaagcttaaaggcaactccctctaaattttctttatcagcaatgaagctcaaaggaaatggctctctgtaaactatgatagtttctttatatgggatagttgtatatattcaaatctgattatctcaaaacttatctgtaaaaagtagttaactttagttcacaattcttttcaaagcaggaataatacaaatagctttatcagaaatatgcacagaatattaaaagatgaatattatttcagaaattttatgaccaataccaagataggtggtcatgaatatccaattaatcatttcaggctgtctttgtgaaggcagttatatagccttctccatgaacttctaattatgaggcgtagatattttctgaggtaagtagaaagagaaaagcccattaaaaaccttttagtatatttagtaactctattctttgattcacttcacagagtatatcttctgaatagtcttttttttttttaataagtctgaatttgtgtttctatgttcctgttaaagtctgctcagcaggatagagttctgagttaaaattttaaagagagagaaaaaatattcttgtcagcaaaattctttccacaaacaacttttaggaatctggtacaagctgttagagtattaaactacatagctttttctcttgagaacttttaagaatagctttaactcatttcaggaagagggatatcaaagcagtgaaatgtttctgcatcacttcccttggaccttcagtttacttctgaatttctgttaata

SEQ ID NO: 49433 - DNA, 1325 bp, Bovine  19866881222730
  misc_feature (1)..(1): n is a, c, g, or t
nactgcagtgaacctgaaccctccatcccaccctttaacacccatgagaagctgtaagactgaatggcaatgcatgttctctatgaagtattttctaggcaccttgccctcttctcctttggaattaattgttctttatactatgttcccgttgcattttgcttttcctccacaaaaacttagttttcaaagtgtgaactgagatgtatctgattatctttccctagattggcagtattttgaagagtgatattatctcagatattcttagagccaccagtgcccaaagtagtgctttgcttgaatatagcagacccaaagtaagtggttttgtttggttgcttgactgttttgaaataaaataaattcttttttttttttaagttaaattttaccattgttgaaaaatcattagcaatgtgaactttagcatcaagaaagttcctagagacaaaaaactgtaaaatgttcttcctgttttattttttacttccgatcattttgtcattaactcatagactatgaggaaacatcagaggaaatacggcatggactatgttgctcattaggaaacccacaagagccttctcatgaactattaataacaatccagttcgattatgaggcaattttagcaattatggagagaacatgaagactaggaggaaatccctcatagagcctttagcatcagtcttttttgaaatcttgagttatagacaagtcccatgggcatctaaggcaagcctggggaaaatacaattattttaactagtaataattaaattagcaagagtgtaggcatttacttttgtcaaatcttgttcaaactttagagactttgcaagagatttaaatatatgaaaggatctttcttatctgtttgtaatctgaaattagttgcttatttaaaaaacagttgaagttgggatatatgtgattcttgaacaatcagcataatgggagcctagttatttgtttattataaattatcaaatctacatggcaagtttaaagcataaatacattgcctcatacgttttagcttttaaaaagaggaggtataaacagtgaagtgtctcacagtaagtacaggaataaatacatagaaatataggaaggggaaaggtttgtcaaacctgtaaccattttggttttacttcagccatattttaactctagatattccctgagaaaattatttaaagcaggagtcagcctattttttctacaaagagccagatagtagataaaggctttgcaggctcctacagtctttacaacaactatttaactctgccatcgcagggggaaaaacagccacg

SEQ ID NO: 49434 - DNA, 3702 bp, Bovine  19866881583150
  misc_feature (1)..(1): n is a, c, g, or t
naaatgtaatagcttgttatataggctgattatttaggccacccaagataggtgttttctttctctctgtacaccccttgctcacccagtgcctgcttcacctacacttgctcctgccccagctgatgattattttaatccatcagaacatctccacctgatagcttttcaaaggggtggtgaggggcccccctgctagtttccctggtaacccatgagccaagctgacgtcagttccccctataagtggtgatctccactctccttccggaatcaaagactgccgccatgtcctgcctcgttctgctgtgtgctgcccactgccagctgcacatggtgtggtatccctctaggactttgatttagacatgttagctactcttatgaaaccactgatgtctctgtcactgattccaggctctaaatttggtcctgaacctgggtgaacacaggcctggcagtgcaggccaacacagtccaaactgagttcaattaacataggttttttctttccttgtagctagtcgactacattttagacaaggagttaggttcagaaactttgctggggggacagggtaaactgtatacctgcaatgtttttccatttggagaagacacagagaaacgtctgtttactcaaaggaccaagagagtcacacaaacttcactaaggagcctaagtagatgtatcttctcaaacgagccactcttgagctgataatcacacacagaaggtgcctcagctcaccaccttaattacagtaacttcaacagcatcacacctctccttctccacctccctcccctgtgccctcttcagattttagatttgccttcgttttattgggagggacatcttgacttttgtcagtgaatagtactttggaagccagtcattctggaaacagcaagcaagaaagtcctaatggaaatggagatgtccttctggggttaaccatggaaacaggcatttcttttctttgcttgtggggagagagatttggcttctgtgtgtgtgtatgtgtgtgaagtcatcaaggtaacagcacattccattccagggattttaaaataatatatggctgtgaaatggaaaatggaggtaattctatacttggtaatttggtcaactttcttttgaattgtacagataatatttatttttcttgcctaatttttgccaacatggtttgtctatacaatacaaataaccagaacaaatctaaagaatgccatgagtggggccatctcttgttgtgttatgttcataatggcctttaaagttggctttagaattttaagatatatttgcagagtgtgtatttctcaaaacaacttcactgtatataaactgggtttgttttgaaggacattggacattctgcctgcttgaaatgcctcttctagaccacacatcaccttggttggaaattcctttcattagtagccagtctgatccccagagactaatttgctaagtaaacttctatatcatttaagctgtcttagactcaatttccttatttgtaaaataagaggttgaagagtctatttctctagtctattttttccgttttcttctctttcccaattgctcccttttgtgtttagtgtttttctgtattcagtttgcaaagtgttaagataattttaattatactacaatcaaaatgtcaacttctaatcttaagaaaacagattctaaagaactaggattgcccttaagcactttcttatcaagggagtgttctctctgcaaatccctgataacctttctctataaagactcaaagaagttcttaacctccacttgaactgcctttcttagacctttccatcatcttcattaccttctatgtttccactagtgggctaatggctaccagtagttgatgtagagaaagcctcaggtttatcaggtcttactgttttttggaatagcaggcagtgtaagtacagttatcttcactttcttataagcttttaaactgagaggcacacatttctgttgtgagagagagacttaattttatatacatgccacatcatctttattcattcatacatcaagggatacttaaggttatttccatatcttggctattgttaacactgttggaaaaaacatgggagtggggagggagcacaaggaaggcatatatctttttgaactagtgtttttcttttcatcagataagtacccagaagtggaattgctggatcatatggtatttgcatttttaattttttgaggagcctctatgctactttccatagtggttgcactaatttatagtcccaccagcaatgcacttggagcttccttggtggctcagtagtaaagaatccacttgcaaatgcaggagacagattagatccctggtccgggaagatcccacataccatgaagcaactaagcccatgcaccacaactactgagcctgtgctctgcagcaagagaagccactgcaatgagaagcccgcacaccacaactagagaataaaccctgctcaccctgactagagaaagcccatgtagcaacaaagacccagcacgggcaataaataaataaaataaataaataaaattctcttaaaaaactgtatgtgggttcccttttctccacatcctcatcaactcttgattatttcttgtctttttggtaatgaccaaatagcaaggtaatatttcataggttttgatttacatttccctgatgattagttatactaaggatcttttcatgcaactattgcatatctttttgtcttctttggaaaaaaaatgactattctagatcctctgctcatttttgttctcctctcatttttaaatttattattattttgctattgatttgcatgaattctttatatatttcaaaaatattttctcccattcagtaggttgcctttagttttgttgatggtttctttttagatttctacagtcccacttgtttattttttattttgttgcctctacttttggtgtcaaatccaaaaaactattgccaagatggatgttaagaagctcattatctatgttttcttttaaaagttttatgatttcaggtcttacatacaaatctttactgcatttgagttatctttcgtgtataatgtaagacagtggtctaatttcattcttttgcatgtggctgtccaatattcccagcacccatttattgaagagactgtcctttccctcattgtatattctcgttgcctttgttataaattaattgaccatacatgtgtgggtttatttctgggctctctattctgttccatcgatttatttgtttttataggaataccatactgttttgattaccatagctttgtaatatagtttgaaatcagggcatgtgatgcttctagatttgtgtttctttctcaagattgccttggctattcaggtgagattgtcagcttttcctgaaaaaacacattccaccttatagttaggtatatttccacatggtacaagacatcttatgagtatccattatgtgttagccatcaggctgggttccaggtgggaaatatagaaagctaaactgtatgcttgtttctagcaactcagcttctagcaatggagctcctcttgctcctgatacacctaataatttatgtaccattaaatgtatagtgcaggtaaaattgccatgttagtcttaataacacctattccac

SEQ ID NO: 49435 - DNA, 1306 bp, Bovine  19866881599425
  misc_feature (1)..(1): n is a, c, g, or t
ngaaaaaaagagaaagtaatttatatctgtaactgtatgtgccatcagagattacccttttgaacattgcgggaaaacatttctaatatattcatattgatttacaatttttgtcacttatccatccctttggaacgttaataatgaaagaagctgcaaaaaaaaaaaaaattcagggcaccgtcattactaattttaaaacccacattggcagctggtggcacagtgtgggccctacaaatattttttaaagtatgagctccctctagtggccaaaatagtccttatcacctgatcaaatctgtgccacctattcatatttaactaattttaatggtaaaaaagtttaacttctagaactgaatttgtactttaaaatatttctttgccatctgaatatgcccaataatattcacagtaaatttaaacatctactattattgttatgatttgtaattatcagttttcaataacgtgtttattgagtttcagatcacaccaaaatgcaattatcacttaattaatgtacaagctaatttcctagatatatccccaagaagtgaggtcatcatttgtcactctataaaatgtcctcatcgatgaacctatatcctcttaaaactagttcagtttgaaactattccaaaaatatacatttcccaaccaaatcccatcatcccttgcagtgagggatcactctgagtggattccattgaatcacttctccccgcgggacagagtcagacaaaagcgggatttggaggagttaggggagtgaacgcaagactaatactgtctactgtgtctactgtacgtcaggtgttaggttttatgctttacatccattatctcatttgaagctctagagggatgatattcggttcctctactatttaacacaaattttccagactcttacaagtcataataaggcttagaagaaaagtagccatcttctttgcatctctgggttagggtacacagagccaagtggggagaccaataaggacgcagatgagtgtcctcactgggcaggtggaaacccaggcgctgggaaacccccaggaggggctcttcagcccaactgcagaggaggagggtggcaagcagcagggagagttgccttgaagagcaggggatataagtggagtgtttaaggatgctgaggagttggcctggcagagggacagtatgtgcaaaggcctggatggagtcagaagagagcgttaatgcatgttggctgacacttagggaagggtgaatggttaacattccattgtcaagagaccaagtcgacaccagagaa

SEQ ID NO: 49436 - DNA, 875 bp, Bovine  19866881735013
  misc_feature (1)..(1): n is a, c, g, or t
ntcttgtaatatttgctgatggttcccagatgaggacgatgtctcttatacaagcatcagtgaacaagccctgtcaagacaagcccagggctggcattatttgcatttgttgatcagcgactctggagagctgtaaagactctgacccaaacagtgactcagaaaaccaggggcccatgtcattatgctctagactcggccttgcagcattgcagtcttgtgactcgacagtcctgcagcttgcttgcctgtcattttcattgactgatggtgctgagtgaaactctcaacaattcagtgttcacacaccagcttctcagcttttcctcctgtagtgcttgcttgatcagaggccgaggacaacagtttaatgattcataggctttcttggcaagtaatcattttctcacagtgctcatatactctgggagaggggtaaggaatgttgatttgctttttaaaaaatttttttaatttaaactttctattaacatgaggttgacagggttactttgtctccatttgcaagtccttctaaaaaatatttaaaaacatttttgtttatgtagcttgggacccttaaacgtatgttatccattgagaacagaatatgataatcccattacgttctttattttttaagaaaagaaaaattattttgtaagttccttccttattttggtacatgaggactaggtatgcttcataaaagtttaaagcagagaggtccccccaccacaactccattttatagatgagaaaactgccccagagaaattgtatgatatttctattgccatagaactggtcagtggcagagatagatcagggctgaaatcagccaatttgaggctactggcttatctgatgttagg

SEQ ID NO: 49437 - DNA, 1407 bp, Bovine  19866881881597
  misc_feature (1)..(1): n is a, c, g, or t
nacagttgaaaagatgtcattgtaagttaatacaacaaacagaatctggaaaaaattcttcccaaatgtatttggccatgaagaaggaagtgggtcagaaaattatgacccctgcatatttagcctaacatacatcctcattccagacaactaattgtgagctattgaaaagggaagcctaaagagagtatcataaaaagacattctcatagcttcttctctgaagattctataaatagactggaaataatctccaggggacttttgcaacagcttgtggactggtagcagtaattaacagaatccaaataaaatgcaatctcccacttaaacactgttacaatttcttatttttctttaaaattgtgattatttgttgctagcttccttggctcaaaaggtgtatttaaattgccctacttctgctccctgtatatcaaagagtgggaaaaaaatacaatctagtgagccagaaaggaaaacatttctataagcatataattttactttaaaactggcgaagcaaatagaaataactaaaaatattatatctttgatttccatattcattacctccatgagattatatgtagtagtttcagtaactggctttttatttctaactaactgtatgtaaaaaagttcaagcataaatcccaaaaagggggaattttacttagctattagaaagaatagtcttcctttaggggactctaaaatactggaagaaaaaaacaaggaagttacagaatcttattttatgagattataaagaagaaagtcacaatttgaaggatagtttatcaatatttcccaaagaaagatatgaattctcttatatttcataaattcactaatggcatgacactgtacattttaagagggtgatgggaccactctgttgcagaaaatttttgcctagtaatggttcataaatgctctaaatttctaattttctttgtgcttttgagtagcaagatgatcctgaaaatcataatcaataaatgaggttactgaataaatgagattcataataaaataagacacagaaagcaattaggtttccaagctactagtgaatatgtgtataaagtgcaaattctgtggggtctcctttaaggcatttttttgtttcactctgagatcttaaaaactacatatgtaattttagaatctttgtgcatgtgaatgtgtgtgttcaaaaccaaaactgaaattaataatgggattttatctacacatagatacactaataggtatctgcattagtttaataggcaaggtaccacaagctgggtggcttatacaaaaaaaccaatacaatattgaaaagtaaaaaaattaattaattaaaaaaaaagaaatttattatctcacagttgaggctggaaggccagtattaaggtg

SEQ ID NO: 49438 - DNA, 969 bp, Bovine  19866881933728
  misc_feature (1)..(1): n is a, c, g, or t
ntgagatataaattataagtagttcagaaaagagaaagcaagctagagcgaaatataatacggagctaagaacaaaccaagtataaaaacacattccataaaagcctacatagtacctacaaaaggaccatgaatctgatactaattggcatcctagcagccaagaaaaaaacactgcttgatcaattatataacttagagagtccttgacataaaaagagactaattggacagaaaaaaaccttaactattgctggtaataaggacagacaggaatttctcctgagggtgtaacgttatgaacaaaaaaacccaataaaccacctcttagtagacacaagaatattttgtgtggggctatttcatccagcaattcttggtgtgagcagatggcatcttgccaaaactctggttggtaacaacaatttgatgagcgctagtcactgcttagcctcttacaatgtgctccgtggaaaagtgtgccttacaaagctcaggagaggagagaaggcaatcagtgtagacagcctagttggaggagaggccgacacttacatccccatctacatggaatgtaagctgacggagccatattcctcccagagaggaagtgaatactgcctagaaaattcagttccagagaagataaattgtgctagcatgtttttcatatacaatctttaattagcattagcacactagggcagtaaacaattccccaagtccagttggtcttcctgtggcgcagaaaggccaggtccagcctaaagcatactgcgtggtaacgttctaattctggacctgaaagtggtaggaatagacaactactgttgccctacatttgggtctaaagaatatactttaaatttaataacatcaagaagactttccaagaagtacttttttcgatggcagctgttatacaagagtcagtttctaaaatattttagatgttttgtaaatctctgt

SEQ ID NO: 49439 - DNA, 838 bp, Bovine  19866881948497
  misc_feature (1)..(1): n is a, c, g, or t
nctgaggctatgaaaatgttggacttacttctgcatttaagggattgtggaacagccgaatttagggtggctgtcattagaatgatttccaaacaaaactctaaatgaggtcgctccccccttgagagatcttattcaccacttgcccccaacatccgcagctcagatcagtaggccttccaaacgagtttccccctttcatcctctcccctccaccatgtctcccatcagtaacatttcagatcctcttagcacttttattagtccgctgggcctcttcctgaaggtcacattaagatgttaatagtggtttagtgggtttccctgcccaggagtctttaaaaaaacaaacatataaacttttcaatgagaaatgaagctaactaccagtgctctccttctaagcaggggaattttgtgcctctcgaaggagagtgaatgtgagggtttagtgctttcctatactcatccaataccccagacacaacccccatgtttactttaaaaaaaaaaaaaaactggttgtgccagatattttatttgtgcttccaatggcactctgaatctgaacactcaaataatccccatgcccaatttagaaggcttgagtctgttcagccctctctcttcccccaggactccccagacatcaatttgaatttcgaagacacagcccttgaccctgcattgcataactaccctggagggagagatgatctctccccttcacataaccttgttctcttctagagaaacagctctgcaagattaaatactcttgagggagagtgacattactgaggagaggatagttaaattgttccctcaaaatccaatg

SEQ ID NO: 49440 - DNA, 735 bp, Bovine  19866881968189
  misc_feature (1)..(1): n is a, c, g, or t
naatacctttgatacagtatttgtgtgccaagcactgtgctgaattctttgcagtaatcattccttctaatcctttaccaccaggtaagtactgttatatatattttataggtaaggaaacacaggtcacattgcattattatttatgttagattacatcgcctctccccacctacctgtaatcctctcaagaactgcaaacaggttgcctgtctcttggtatcctagtttccccacacatagtagtaactcaaaggagcaaattgttgatgttaatggccagtattactttctgtctgctccacaagatggaattttaagcatgaatacagagttgtgctctataggccatctttaaagccctggaaacctcacatcaggccagggaaatgtagtgtgaagagaaggaataatgcacatgtgagacttgccattttgagagtccatggatgttggttttgaaacacggaaagctttgcttcaacatttgtttcaaagaggaagaaaatgttgaaagtttttttaaatgttaggcacattgtgattatttgaatattctctcgtgttgatttcctgcattacatctttgaaagtgtcctgattttcgtaagtattccagtgctgagtggtatttcctgtctcagcataaaaaatgggttttaacttgcaaccagaagtgtcagaatcagttgcagtgatggagatgttgaggcagtgatgagcacgtgaaataca

SEQ ID NO: 49441 - DNA, 813 bp, Bovine  19866882113716
  misc_feature (1)..(1): n is a, c, g, or t
ngtttaaaagagctattgagaatcgcctggatggtggtttttgaataaccagtttgcttttcgagttggaactccgctattacaagggattcgtatccatcgcggcagctggggtcctgggtcaggccagcgggctcccttaagggtgataacatgtttggcaagatacacctcgacggaaacgccttaacgtcggctctggggagtatgacttcgtgatggaataatgatgcatctgaagtagtggacagtgagaagactaagcttgtaaagatctgcaacttggtgactttcaaagcaatacttgaacaaagagttattggcttgaaccaaccgtctttttcactccagagtgtgacccatttccctacaatgagcagaaaaataaaactgtttgagaattcagagccagcaccaggagaaatgaaccattctttcgactgcttctcacctccataaacgaaaggttattcttttcaggatcactaaatgtaaacgaaaaaaggtagtctgatttggacacgagtgaaaactttgggagcaaaaatgtaggtggtaggagaatgcttataagagtatgtgtaagtgtgtgtatccttgatttttgcccctaccttctccccctccattatttaaatcagcgcgctgtctttcacgcacaaatagcgtctggtatttccgcgacaagagatgcagttggagataccctgggtttccttatagaagctttttctctaacccaagttaggcttgggagcgttcatggatcttgggtatttctcaatatgtaatttctccttaaaaattggaata

SEQ ID NO: 49442 - DNA, 878 bp, Bovine  19866880353904
  misc_feature (1)..(1): n is a, c, g, or t
ntattcttgcctggaaaatccccatggacagaggagcctggcaggctataccccttggggtcccaaagagttgaacacgactgagcaatcacctttacctcatacatcatttatatgtttcttcctctatattagtttttcttttttaaattaaagagttagtatcttatctatccttgtctcttcttgaaatatagtagtatttgaagtagtcaatagtttttaaatgggtcattcattttggctgctgctgacataattaaattcatttttttaaaggaactaccaggtgctgttaattttgttgatcattggtatttattagataaaagtggctgtctttctgtataattcagaaacctgtggattaagatgtacagaaagtaactgatattttcagtctggaatagatatgagtgatttcagtgaagaattgataagacccacgacagaggatgaacagggagaaccgtgtgtgcgctctggttcaggaatgtgtttcccttggctccagaagcatatagaatccataggtaagtaaaataacgtataaccatttcagctttaatgaagtagatgataagattcaatatggatacaaaatcagatagccaagctggttcaattttcaagataagaatatatgaggattttttttaaggcagttaataaaaaagacacaggaaaaaaatattatttttttctcatagaattctttgaattaataacagtctgtattgtggtcgataccctttttttttttcttccagtaactcttctgagcattttactatatccctggcattggcttaatactggggacagatttgttgaagaagataagatctctgctattgaggaatacataccagaaattt

SEQ ID NO: 49443 - DNA, 1402 bp, Bovine  19866880383108
  misc_feature (1)..(1): n is a, c, g, or t
nataaaattttagtgatctttaagtaaacatttttagcgtaacagcctttgcgaccagatattttttaaaaatcaagcttataaataccattgctctatattcaactggtgtacactaaaaataggataataaatggaaatacatgttcttatagcatttccataggaaatgttcatacttttcacaacattctaaatcatttagcagtaacatatgctacatgaactaaaacacaggtatttttttattgcacatttcaaagttgtaaggaggctccagcttacaagatggttttttattttaggggggaaatgatatttttttaattgtttggctcaaaaatgcacactgccagggcagcttagatttaaaaacaaaccttttaaaatcagcttttggattttgaagccaatgaaaaccttaactgtaacgaatagtgcacagtctactttctctcagactgaatgtccaaggtcagttatgggctctgttttaaagccggtgagcagtcctggctagcgccctgagaggcaggcgggggctcatctctggagccggagggcggtaagtctctggcagcagaggaaggtggataatcctggggcccatgattgggggggtggtaatcgggtaccaggaaaaaagtactctcttgggccaagagagcctaaaggtctaaaaggtgcatgtcctggtggtaaaaattctcgagggtcgagaggcaggtcccgttttcccggtggaacacctggtgcatattctcttaagcctagcggtggacgcataccaggacctgaaaaaattaaaattaagtcatgtaaatacatacgaacacacttaaatttagacagttcccggtatgttaatcaatttcttatacccctggaagtcaggtggtggctcccgactttactgatgaggcaaacaggctcagcaagtttaagttacatgcctgtggccagccagtcacaaagcaacagaggctggacttcaatatcgctctacctagctggtgggttttgtcaactatacaattctgctgtctgtatcttgtaagagcttgatttgtactcagaaatactatgcatcataccaagatgacagattatgaaataagggtttcactgtaagtaaattttgataaaggaaatcccatagttactgtgtcaattaaaaatgcacacaggagctcagcatggacctacacatgccatcaaaatcaaggtgtctgccctgctgggaaaggcctgccagctccacctagttgaattcagcaactttcgacctattagctgttacatttctaccttcaacacttccttcctatttattcccaaggtgggtagtgatggcttcatctttccttttatactctgtgacccattgcttatgcttctatta

SEQ ID NO: 49444 - DNA, 4138 bp, Bovine  19866880428362
  misc_feature (1)..(1): n is a, c, g, or t
ntgaatgggtggggaggagagaagctccctaagtgatgtgcttctcatacagacacacacacacacacacacacacacatatacacacatgcacacgcacgcacgcacacacacattccagcttggaaacccagggcagagggcccagaagcccttcaaaaaggacaacatttttttctaagtttggcccagccaattccaatttaaaactcttctgagttccaaaacaatggtatgatggagttggggtggccagagctccaggccgtgccttctgacctcagagggataacagagccctgagcctgccatgtagagccaattctggaggtgctcaaccccgagggggtggaggtccccacacctctgagattctacagaagtatcactggaagggtgacaggtctacttgttgtgttgtattttctttcaattttaaaatcaaatagtagttgcgcatgtatccatgttagtgggtgtttgtgtgggatggagtaaaagacatgtcagagtcactcagaaagctttgtcaaaatcaacagctaacctttcccctaccagcccctaagatgccaggattctgattcaatcattctggggtggcatctggacatagtcctttgatttaaaaaagccaggtaactctgacaccacccttccagttgagagtaccagtgataaaatatccgtgggaccctatctatctattcacaagtcgtttgtttaaagcaactcagaactcttccaggcatggcaggaacattcagtccacaagaggcatccatgtcacctgttaatagttttctaccaaagcctgttctttagtcttgcttgctgcccctgctttgctttaatccttgctctgttttattcattgcctttctccctcttctctttcttattagctgctgtggatgattcaggactcatcagcataacattcaggaagtcctcatttgccgctgccttattttaatgccccccgacccgcccacaaacatgcctctctaggacctttagctctttcactgtgattctctggctgcctgtgtttcccacagcggtgcagggaaggggcttggctgagggtgtcctctccttgtcagccacactctgtcctgcctgggctgttccctgcccctccctggtgtcctcgtcatctcctcactgggtgtctctgcttttctaggcaccactgcagagagcagtggttctcacacttttctttttttttttttggttctcagacttaaacttcatcagaattccctaaaggaattgttagaacagactcctgggcccccacctctggattttctgatttctaagtctggggtggagcccaagaattggctttcctaacaatttcccatacgatgcaaatgccactggtctggggaccacactttgaaaaccactggtgaagaagcaaggacaggtttagagagcagctcagttggctacactttccattaaaaaggtagcccctggccactgagtgacccagacaacttatttgccttctgagagactcagttttctcagctatagaaataagacaataatagcctcacagaactgttttagggattaaataagatactgtttcctggcttctgttaaaagcagaatttttattttattttttacatatatattcttttccattatggtttatcagaggatattgaatctagctccctgtgctatacagcaggacctttatccattctatatataatagtgtgactctgataatcccaaactcccatacttcccttccctgccaccagcccaggcaaccacaagtctgttctccatgactgtgattctgtttctgtttcacaaataacttcatttgtgttgtatttgagattcaacatgcaagtgatatcatatggtatttgtctttctctttctgacttacttcacttagtataatcatctctagatccatccatgttgctgcaaatggcactatttcattctttttacggctgagtagtattccattgtgtacatgtaccacatctttttatcccttcttctgtcaatggacatttagatggagaaacagaatctattaaatgagattagaagactgagcactctttgccagtcattagtagccatgcaaggagcactgcccaccaatgccattgtcgtttggcaatctggaatgagtggccttggctcatgtgggaaaccacttaaatgtacagagtggcaggattgggtcaccttcccctgacacttaggctctccagaatgtactgtctagggacttccctggtggtccagtggttaagactctgtgctccccctaaggcaggggtcatgggttcaatccttgatcagggaaccaagatcctgcatgccacactgcactaccaaaataaataaaataaaataaatagatgttatctgcttgaaggaaaaattatgatgtacaaagagaaaaatttatgtgctgtctaaatagagaaggaaagaaaaaccactttcatcttcctggttctcattcccctccctcccttactcatgccattcaatctgaaatcccatggctaattccaagaggtacattttgtccttagaaggaatgtacagggcttgcattcctgtgctcataagagagtgtggtctaatgggtaagtagtgggagtggcagggaggtgggttctatttaaagcctccccactgactcactgaggcatcctagagaaacggcttcattcctctgggccttgggtttcctctcattaaagggaggagagctaactccttagcagggcatgcctgaggacggggtagtcaatgtgagaagcacttggaggaggagaggcatgtggtcatagcaaatacggaatctggagagggacactctttctccaccttctcctaagtattacaaaatgcctacctccatccagtgaggctggccaaggctctatcctgacccatctgaagccctgaccttcggaaacagtgcaaataatgagaattttgtgagccctcctgctgaaacagcattgccctctccttctcctctctgaggtttgggggaggcagactgggggaccaggagagccccggcccaagagactgaaataagatatctgcacatgcctctgtctgtctccaccttggacctggggccagagcctgcctgactcaagagtttaaaatgctaatgatatccaacaccccttccaactctttgacacccccataactctgaaccatgaggtctttcccaacatggtcaagaattcaaggaagagaacaatagctctgttcccactcagagacacagcacctgcactcagtcctttctgccttcccctggagagagtctctgtattgtcctctcactgcttcacccagtggtttttgagtccctgcttgcctccgtctggcgactagcctagacctgggaattggagtccacaagttctgccttcaaagctcttacctcaagcaaaagaaatcaggaagagctcttccttctactcagggggtgtagttttagaagagtccggaaaaacttaaataaagtttaaatttatgtgcctaatggctgcacaggagcacagtgaacccttctgaggagtttggaaagacctttggagaacagaagggaagaaaaaagaagctctctctaataaggcagcagaaaggaaaaatggtcgcgggggtttattgattcatcttgccaggtaccaagtgagttgcttcacatacatctgcttaccctctatcaatttcatgaagtagatttttttttcacaagttaaagttaactacagttgtgcataataaatttccttatgctcccagagctagttcgtgggagggccagtgctccaatcaatgtggttcagactctaatgcaatgcctcccaaagacagaacatctgatctggtctcaaatagtcactaagattttccctggaagagaatgggcagtttccccagatccagagaggaggctaaatcaacaaagtcccagaggtaagatttggtgagcagccaggatttaagaactgatgcaggcagtgtcaggaaatgacataaaaagggcaccggggagggggcacagccaaagctcctgtgtgtccctccaggccatgaggtg

SEQ ID NO: 49445 - DNA, 2184 bp, Bovine  19866880441842
  misc_feature (1)..(1): n is a, c, g, or t
nctgtttgaaaagatgaaaagatgaatctccttatgtttgtactcagaatctctagttaggggcaagattattcacaggctaattttgtgtaggaatcacgttttgacagcatatcgatatcagtagatgtgtttgctctgggaaggaagaaaaaaaaagcacatcttgcagatcaggagaaaacacgagttgcttcttctcaagtgtatcactgtaatgtttttacataggtcaaaaggttatatgcgggcttccctgtggctcagaggttaaagcgtctgccttcaatgtgggagactcgggttcgatccctgggccgggaagatcccctggagaaggaaatggcaccccactccagaattcttgcctccgtggacggagaagcctagtaggctgcagtccatggggtcgcaaagagtcggacacgactgagcgacttcactttccctcatagttcagttggtaaataattcgcctgtaatgcgggagacctgagtttgatccctgggttgggaggattccctggagaagggaatggaaacccagaggagcctggtgggctacagtccatggtatcgcagagtcagacataactagcaactatacatttttttcttttttcttttcttttactataactggacaagttgatactaaaatccatatggagaaagtaaacatatagtaatagttataacaatattgtaaaagaaagaccatggggagggagaactagttttttttttttagtttcttttttaactttatttttaattggaggataattgccttacaatattgtgttggcttctgccatacaacaatgtgaatcagccataagtatacatatgtctactccttcttgaacctctcccccactatccacccaatcttacccctctagattgtaacagaacaccaggttgagttcccattatagatagcaatccccattagctatatattgtatgtatggtaatgtatatgtgttgatgctactctctaaatttattccaccctctctttcccctactgtgttgaaaatttgctctctatatctgcctctctatttctgtcttgtaaataggttcattagcaccattttttctagattccatatatatataagtatatatatactcacacacatatatgtgtgtgtgttaatatatgatatttgtttttctttttctgactcttcactctgtataactggctctaggttcatccacctcactagaacagactcaaatgtgttcctttttgtgtctgagtaatattccatcattcacatgtactgtaaattgatacagcccctatggagaaaagtatggagactccttaaagaactaggaataaaaccaccatatgaccccactacagggcttatatgctgagaaaaccataactgaaaaagacgtatgtaccgacaatgttcatagcagcactgtttacaatagctaggacatggaagcaacctcgatgtccattgacagatgaatggataaagaagttgtgggacaactgaaacatgcagccatgcctactaacaatactaatgtatgaatagacagaatgccaatggaatgaaacaagtctagaaacacattgaattatatatgaaaacttagtatataaaaaggcagtatctcatattaatggggaaagaagtttttaatagattgtatcaaaataactgaatatccttttgaaaagtataaattatatcattttctcacatcatatttaagagtaaattcctattagaacaaacaaatgtaccaaatatatgactatccaagtattagaagaaaattcttttataaccctgagtataaggaaaggctgtccatgacaataaatcatcactatttttttaaagataaatttgctattaaaattttttaaatgtgaaaaatcatggtaaataaaataaagtcacaagaaaacaaatggattgggagaaaaaaattgtagtggtgtattctagatgactagtaacactgaaacacaaagactttgtttcttttttaatgtaatcattacatataaagactttattttttaaattttttaatataaatttatttatcttaattggaggctaattacttgtgaggcaaaaaacccaaaattgcaagatacatgaaaaaagcccaaaaatatactaacggcttttaaag

SEQ ID NO: 49446 - DNA, 1435 bp, Bovine  19866880460064
  misc_feature (1)..(1): n is a, c, g, or t
naataaagtgataagattgatgatgaaggcctctgtgctgagaatggcagaacacagaaatggaaagagctggatccttgaggatatcattgtgcctcctgatctcaggaggcaagttaactgatcttaggaacatcaagacactgttattaatgggtcaatatttattaattgattatttgttaacttgcaactgaaaatgctctaaaatatggtgacgcatacaagagatagtagacagagctctagagatgtagtttaaagtaagtgagaggtaaagtgcatgtgactagagctaagaatataaaagttggaaagagttgagtatgagtggtatattagtagcctcatagtgtcataagctaggggtggttggtataactgcagtgattagaaccaggcatctttagcaagagaatacgtcacagaggatatgattttatttctcctctgttctaggcttctaaacttggtgactgctttttaaaagcttgtcatttccactttgggtgtttttcattaccattattctgttaccaaggatgggaaatggggagcagagagagctggcaggggacaagattcactgttaacaagtaaaagactttcagatgttcctgagtgcagaaaatgttccattatgtcacagaatcattgtatcccaagaatccattgctttcagaccttgttaagatgatgacttcctgcagtgacacacacagccctaaggcactgtcagctctgccaggtggtgacgggaattattttctttagcaaggagccccacatacctcatcccacctttgctttagtgacttttattcgccagggttttcaggaaaagaatggatctgcaactcaccagagcccagaaggactgagctcttgaaccaaggaaggatggatttttcctttacccaggcatacttcttctggtcttctagagttgtgtttttaatttgcaggtcatgaaaccaatttatgagggtgagatcagtatttagaaaagacaaacagaatgcaataacatccattagaaaaaatagaaaagaatataattgaatagagcaaagtatcagagaatgcaaaaaatatgttcagagcatcaaaataaaaggtttacttaaaggtttactttagttttagatgtattctcaaaaatacattttcaactttaactttttttgtttcattacctctgattggaggtggcaaatattgaaagaaataaaaaatatatctttcaaaattcacaaaactgaataataaatatataataaattcaaataaacgttcaaatgatgctattctgtctggagcattcatttttctgaagttattagagcttgaaatggcagtcggacatttgaagctatctatattggtttgtgaaagttggtttcagttttgagtttgtgtggtgtgttggtaaaaa

SEQ ID NO: 49447 - DNA, 1593 bp, Bovine  19866880465321
  misc_feature (1)..(1): n is a, c, g, or t
nggaacctatgaagcagaacgactataaaataaacagtatcccagaaatttaatatgcttggttcatttattcatcacacaccagaggaagtcaaaagatagctactttctcttctgatcattatttttttgttgtcatttgcaagcaaacctacaatactcaaaacaaaaattatctcctaataaatattctctctctgaaatcagcttttttaaaaaaattatttatcagagtatagttgttttataatattgcgctagcttctgttatacaatgaagtgaatcagctatgtatatacctatatccccttcctcttagatattcttccctaccatcacaaccatctgtcactggagagcaccaagctgagctccttgtgctatatagcaggttcccactagctatctactttacacagggtagtgtataaatgtcaatccccatctcccaattcatcccacccccttgtcccatcttcatgtccatgcatccattctctacatctgcttctctattcctaccctgaaaataggttcacctgtaccatttttctagatcccatatacatgtgttaatatatgatatttgttttactctttctgacatcactctgtatgacagactaggtccatccacatctctaaccaatgagtcaactgtgcaaccaaaatatccactgataaatggataaagaagatgtggtacttatattcaatggaatattattcagctataaaatgaaatcagcttttgatgaatgttcctaaccctgctcagtttagtggatgaagtgggtcacgtgatccagtcttgccacttgcttagatcagagtttgatctacatgactcacatctcatctagttttacatcacccattcccatagctccggatactcaggaagcatactcattggagagggtcatggaaaataatagcaattgtcttgcctccactatctacaatgactggtgagccattaggtgagatttgttttcataagccaggctcttgggacactagaactgcattgcttctatgcagagtcacaaacactctgagttgtgccagacaccggcgagtaagtctggatggatggatcagtgagtatgaaccccctgtattctccatattccccatgcaatccatcctcacccccagtacagagaaaacaattcacagcgcttgccctggtcacagctgggatgcagaaacagattccacaatcctgccttacagacataatgtaactggcaaaatatggtaccccttctaaacaaacaaggctgtgggtgaggagagctgtcttcttctatggaagtgagcacttcgtcatgactcctgcagacctcgatgaagtcagagggatggaggatgagttttcactgcaggccagctcccgtccaagagcaaattcttccttaagagagctaatgccctgttcattacccttgtaacctgagagaaaaccaacaccccaacagcctacgatcttactagcaaatctactgattcattagtaggatatggaccacttcttataccaaatgccttacctctctgtagccattttcactgaaacaatcatgatt

SEQ ID NO: 49448 - DNA, 1543 bp, Bovine  19866880486068
  misc_feature (1)..(1): n is a, c, g, or t
ncatccaggcagcttgttaacaatgcagaatcaggctactccccaaagcccctatagaatctgaattttcacaagatcccaggtgatgcatatgcttattacgagtttcataatcaatgctgtgaacaaactctcccgacaaaacgtagaaactctgccccaggatgacgcagagtgtatccagtcaatcaatcagccaaatactgcctgacagtctgctctgggcatgatcccaatgaggtggccaaagcagaatctgaacactagaatactaacacaacagaatgagagtttggcagtagttccctggaagacatgggacacaccacaaaggggccaatgagagaggaaacttgggccacaatgagatttgtctctaaaggagccctgggagtcagaaatatattagtaaagcaatgattatgccttcagcctctgcagaccttcccaaagtgcttcccctaataagggagcaggcagatctgaatgaagatgttaaattagagattacatgaaataagctagcagtgcatgagagtggagcaaaaacaagagaaaacaggagacagaggcctgtccctagccatgactttagtaaccagtctcagggctgccagaggcaatcttcatcaacagtcgtgagtgagtgaatgagtggcttctgccgcccttgtgattctgctccagctgcagtcctaatgcctcttgggatttagtcttaaagtcaaagaaagaaacatcctgaatgaaacaaaaatttgttccctggcctctaagttcagcaatggctgatagacaggagacaggagtaagacagcaagttacttccttcaccccgcaccactcccactccttgctctgggtctggcaggaggctgaatcggtccctgggggatatttggccaagtgcagagacatttgggtttcataactagttgcgtggttactactggcacatccttggtagaagccaggtgtgctgcacaaggagttcagcccagtgctctgcgatgacctagaggggtgggaggggatgaggggaggttcgagaggaagggaatatatatgcgtatgtagctgattcacttcattgtacagcagaaactaacacaacttgtaaagcaattacagtccaatttttttttttttttttaaagatcctacaatggacaagatagcctccacaacacagaattctctgacccgaaatgctgacactgccaaggatgagacactcggctctatggcaacagccctgtgggggcgcttcctgcaagactgtcttcaggtgacagattcctgctgttgttcttcctatgggcctcaactttgggggtttctttaatctactggccccctgaagtcagcaccaacattcagttcagttcagttcagtcgctcagttgtgtccgactctttgtgaccccaggaattgcagcacgccaggccttcctgtccatcaccaactcttggagttcacccaaactcacgtccatggagtcggtgatgccatccagccacctcatcctctgtgtccccttct

SEQ ID NO: 49449 - DNA, 1226 bp, Bovine  19866880534992
  misc_feature (1)..(1): n is a, c, g, or t
nttaggttgaggccgccccgctcccccaattggctgccattgctactaaggaattcttcctcggcttaggaggctcggccagccatgctctttgtctctagaggagaccgcagctcacgaggaaagactgtggaggaatatctttaaaagggctgaggaacgaagtgttttaagggggctgcgacaacgcggcagcctccactaccgaggcggcggagcgcgccgagcctcggtagttgtcatggccgccatgggcacgtgaccgcggctcgcgcaggcttcgttccgtcgctctggttcggtagtcccggcttgccgactccctccctttctcgtttgaggagtcggacattgcctttcttccctcaggaggactgctgtacagactccgaggaatctggtaagtatgttatgaggctgaacctgtcgtctccctacagtgccgagcaatagggtcaagcctttttacaccggttccatagactcccggataagtggtctacaaaagtttcctcctagtgcctccaaacaaatgaaagaaaatccacgttagccccacgaatcaatggtggtaacaagctaggttcgctgaatccccttgcccgcgtctccactagcagtcggggtgtctcataagctatacgtaggggtttgtttaggcacctctgtccgcctctcccagttggatagtatcggctttccacaaaaatgtctgtttaggaggggctcgctaggatatgcgcctgcgcaaggtcacggcgttcaactggtctgggcaccggaggaagaggctgggtggtaaacaggaagtggaccttcggagctctggtggcggtaggtgactcggggacccagggtctccagagtgggggaccgttgtcggtagtcagacttttcttgtggcagccggtttaggcggcaggctcgatccgactgttgtgctgcgtggttttaaagacacccttccttgcatctgcaggtggggtgtgtcagtgtttttaccccaccctttcgaattcttgaaaacccggagtgcgagtctctccccggacagatcggccaggggcaaaggacagagtatttaccctacttcgttcctaagtaaaaagtgtacggaacttaaaacatttcagccactaagtgggagggcgagctaaaatagtatttgtggaaaatttaaactcacaatcagagtattgtgtgccacaatttctaggaggcttggt

SEQ ID NO: 49450 - DNA, 845 bp, Bovine  19866880589580
  misc_feature (1)..(1): n is a, c, g, or t
nacccagtgcagtcaaacacagtaatacaatttttaaaaaattaaaaaaaaaaatttcaaggaaggggctatgtctgtaaagtaattcctatcccttttcttcacagacctcttgtcttttggtagccaaacctcaaaatttccacttaatctaccattttatttagcacactaagatatacttaagatataaatgaataaaagaaatcttattttgcccctggatgatctcacagaatgttgaaattaggtcaaatcttcaaatagcatgcgctatgctaaatcaaaaccacactgcaatagcacgatgaacactggatgaggcatccttttaacacctgtcttcccacactcctaagaaaggctctgaccaactgtaaaatggcgaggtaatgtgttgaaaacatatcagtcaactatgtaagaaatcagaagacaactgaggcctagaggtttatctgtgagagagttctacaatagattttacacaaagcgctgtgattagctaatgtaacatttagacaaacctatctatttagagaacaacatcagactgtgaagtctgaattctcttaaaatgctgtcaatgaacggaaacaatccatctcttacactgtcatccttgggtcttttggtgagatcaaaagcagccaatgtttctggtgtccagtgcgcacttggaggaggaaattcgaaaggtacaggttctacgagaccataatttgctttgagttccagttgtggggcttctgttggaactttttgaaagtaactgcaaaaaaaatataaacagcaattcattcattcattttttaactatttgagtgtctacctgtgtccaagag

SEQ ID NO: 49451 - DNA, 799 bp, Bovine  19866880667907
  misc_feature (1)..(1): n is a, c, g, or t
nttttaatggattctactactatatatggaatgaaaacatgtaataaatgcacagtgcttctgtaaaatgcagtaaatactggtattaacatttaatcaattggcaacttcaacataagcagatagtaaatattccgttgactcagcaaacgtgacactttttgactaaactatcccattttatatatatgtatatatatatactgtcctttgaaaatggtgttggaaatttggggaagttaacaaatgtaatgaagttgcatgaacgtcttagagagatgtaactgtttgtgttaactgttgcacacttagtttaaaccagataatgacagctaacatcctgctaaaggtgttaatacactgaattatctttttatttatgaaaataaaagtgattttacttacaatttcattggaattttttgtttttcaataaatgtttttcatgtttattaagctggtaacaaggttcatacaatgtaaaatcataattctttacagttatattttaaaatgacagatgcatttgtatctattgctcttccatgctacatgaattcattaaaatattcaatgctccttgaccttttcagtttttctttggcttactggtacttatcttttcatttcaaagcaaggtttcaaatcagcctgcatatagtctttttattttttaatatttatttatttatttggttgcaaaagaccctgatgctgggagggattgggggcaggaggagaaggggacgacagaggatgagatggctggatggcatcaatgagtcaatggacatgagtt

SEQ ID NO: 49452 - DNA, 3017 bp, Bovine  19866880675831
  misc_feature (1)..(1): n is a, c, g, or t
nagaaacgtgaaaggaagagtcatctagagggcaaactgcattgctgtcttagtttaagaagttgtcacagctactccaaccttcagcaaccagcaccctgatgtcagcagccatcaacacaagaccctctaacagcaagaaagttgtgactagctaaagcctcagatgatgattagcattttttagcaataaagtattttttatagcacagggaactagtcaatatcttgtaataacctataatggaaaataatctgaaaaataatatatgtgcatcactttgctgtgtacctgaagcactgtaaatcaactatacttcaataaaaaatatatacaatgaaatacaaaaaaattttttagacataatgcttatcacacacttaacagactactgtatatgtaacttttacatgcactgggaaaccaaaaaattcgtgtgacttgctttcttgcaatattcactttattgtcatctggaactgaacctgtagtatttaccaaggtctgcctgtacttttgttaccaagaaagttatcaggataacacataaattgtatctagctgtattttaaagcttttggagtctattataaaatacatcacaatatatcagcatattacactaaagtgaactaattgaccagaaatgaaaactgtgtgctgtgtaagaacagaacagaggaaaacagtgatgggagaaataagaaatttatccagtgtgcctgcttaggttattgacaggcagggaagatcaactataaataaaaagcctcaccattatttactttctttaaaacagatgggaagaaaaaggcatttgctcagtagccattctccctgggtccagtttttaacaaccaaatttgatagtgaaccaaaaaagagttaacacagcaggtctgagacggtcactcttagaaaggcctgactacaagggcagcccctgactagcatctgggaatctggattttgggagggttgctactacctctgataagaatggtcactgggtctacattcttcttacaaacgatatggtttatgctgaattatctgcttgctttctgggagtctggaattttggtcagtgctaggcagaaggtgtctatgtaacagctctgggcagagagtcccttatgtgcctcccacttcaagggacacttcacaagtgtcattagaatttgtcactagaggaatcaagtacaagctgtgtgactccactgggagaggactcctggaagcttgcacctggtttcctctggactttgctcacatacattttcccttggctggttttgtgcctgtaattctttttctgggataaagcacagctgttggttacagcaacatgctgagtgagtccccctagtgaacttggaacctgagtgtgctctttcggatcccaacacagatagtaagataattccaggctatacctataaaacagttactgccgataacatgaccgtcaaattttgcctaaaatggacatgcaccctggaaaggttttactcccactagcaaatgctaaagtaggttccaaaaactttgactgtgaattaagctatggatatttttcacaattgatacttaccgggaactctggcaggaaaggaatcaggagatcctgctccagcaccaccctcttcttcatcttcttcaaattccaaattctcttcttcaccaggtgctaaaattcttctacatgcaaaaggacagaaaaaacagtgagctacaaaaccaaatatacaagagaagccaaatagctactcatttcccaggtaaaatgttgatataaaaaatgctgacataaaatgctaatatgttggattaatgatatcaatgatactaacattgatatgatacatccagaaatatctgaaaaataggtataaaataagatgataaaataagaagacaaatactggtgctaatttattttaccttaaagggacaggctgaacatcaaatgggaattctttattatatgtaagaatattctttaggactagaataaaaagagaaagacacatgaattatgtcatgaatcagaataaaaaaatttattgtaagtgactgattttagccaattttaccatgcctattaataatgtatgtatacgtgtgtgtgtgtgtgtgtgtgtgtgtgtgtgtgtgtgtgtgttcaattgctcagtcgtgtctgattctttgtgaccctatggaccacagcccaccaggctcctctgtccatgggttttccccagcaagaatattggagtgggttgccatttcctcttccagaggatcttccagaccccgggatcgaacccgtgtctcctgcactgcaggcagattctttactgctgagccactggggtgtctattaatactttaaatattcccaatcttatcatccaaagccacaatgcacttgtccattgaatatcttagcaaaatgaaaatattcacacttcagagtactgtcagaactccaaggaaggtaacttccagagtctcagagcgcttagggaaagtgaactccaaaatagttctaagtacaaaatccaaggtgagacatggggcacctgagaaagacaatatctccttcctagagtactttaattaaaagactggtgtcaaagatgaccaatgagagggatatgagcctatcttattctatgtcttgattagtcttcccctcaactccacaaaactggtaaagtttatagtagtgaggttataattctcatatacctttaccatagtttattatacatatgtaatgtatacatacatatatgtacatatatgcttacatacaggctcatgcatgctcagtcacgtctgactttttgtgaccccatggatactgtagcctgccaggctcctctgttcatgggattctccaggcaagaaaactggagtgggttgccatttccttctccatatatatgcacacacaaacacaaagagggatttatcctcaagagaagtctttaaacaatctcttgtattacaacctcctgtattatgt

SEQ ID NO: 49453 - DNA, 1760 bp, Bovine  19866880739696
  misc_feature (1)..(1): n is a, c, g, or t
nacagctctaagacaggcagagagagagaattctctctcctccgtattttgttctacccaggccttcagtgggttgcatgaggcccacccacattgaggagggcaatatgctttactcagtctactaatctcatcctgaaacaccctcacagacatacccagcaaaatggttaaccaaacacctaggtaccatatgatcaagttaagttgacacataaaattaaccatcacaggatacggggaaaatgaagccagcagtatgttagtatggtttctgtccctcctttctgtttcctcccggcttcttcctgctgaccaagtgttgtcttaactgaatgaagtggggagaggtaggaggaaccagcaagaaaatggacaggatggatgaaacaaagagaatttctcttatttttccaaagagaatgtctaaatgagtttggggccaaagcacttttggaataagagttaatttgaagtaatctaccagtttatagaggggcatttttaatagtccttctgtattggcctatatctctagtatgataatgcatcaaatgggactgtaatatcttagtcgggatttgaaaagaattaacaaaaccaagaagagatttttttaaaaaaagaaagaaagaaagaaaaagaaaggtgttagggacttccctgatgacccagtggctaagactttgcgctcccaatggcggggacccgggttccatccttgatcaggaaactagatcccatatgccgcaactaagagttcgcatgtcacaactaaagaacctgaatgctgcaacaaagattgaagattctgcaatgccacaactaagacctggtggagccaaataaataaataaatattttttaaaaaaagagagagagagagaagcatttgtaagctcccgcaatgtccctgactttgtctcgtgcccaagagctctttgaggtaggcattgttatcctcctattacagatgtggaagggcttcctggggggcactagtggtaaggaacctgcctgtcaatgcaggagacttaagagatgcagctttgagccctggatcaggaagatcccctggaagaggaaatggcaacccagtgcagtattcttgcccggagaatcccatggacagagaaacctagagggctacagtctatacggtcacaaagagatggacacgactgaagcaactttgcacgcatgcacagatgtgaaaattgaggtagagacccgttctgccaagatggcacagtgaggaccgaccagggttagctgtctttcctggtctgccgctcttcacacctcacactcagcagctgacctgctgttaattagcaaagaatgcctccctcctttctccccatgtgcatatctctggagaacatttttctctcattagtatcaaaacgaactggagtttttagcacccaagctctagaatcaattaagcattttaatcagagatgagagttacaagaagctgtcagtagactcattcccaggcaaatactcttgcctatggctcatcacttctaataagacaataataacacttttaatcctgcactccacagttagtgagtcattcctaattacccacatctacgagagaaatctctttattaggccctgagctaatgctgtcctagaaccccttccgtgatatcaccaattctcttggacaaggtctgtcaagatgagagaaaacagggaaatatatattcatccctgagcagagagcttgcagaatacatcatatt

SEQ ID NO: 49454 - DNA, 1015 bp, Bovine  19866880755176
  misc_feature (1)..(1): n is a, c, g, or t
natggcatcaccgactcgatggacatgggtttgtgtgggctccgggagttggtgacggacagggaggcctggcgtgctgtggttcatggggtcgcaaagagtcggacatgactgagagactgaactgaactgaaaaagcaaaccaggtacttagagctggcctgaataaaacttggaaaatctaaattgatttcttggtgagcaaagaattaagagaaaaagtcagtggtatggtttcaatgtttaacagcatctggcaatagcaaccaaagcatttggaaaagattaaatttccttagcaaaagaagctttctcacagactgctataaacaccaaagagtgaactacaggaacaaacacaaatagcaactgccaccaataagctacttgtatagagagttcaggtatttttgtgaagaaaattttaaatgaactacaaaagtatatctttcaaaagatacctaactcctaatttgagatgtctatttcaaaagattaatacctaaatacaccaaacaggtatttctaaattcaaaactcccaataaccttgccatatttacgtattatatatgtatactctgaatattttaccgtattaagttcaaaaacttacaatattgtcagtaactaaatattctttttaaagtataatgattctaccaaaaatcatgtcttataaatccctcaggatttttaaaggctataagaactagaacaaatgtaagacaaataagaaggatgtaagtgacaacaacaaagaacactggaatgagcggtggagctgcagaagggtgcagattatcaaagaagcactttcagaacagcacctgttagtaccaataactaccacccttcaggtaaattacaggcaataatttctgacaattagtcaaaatggaaaaaaaatgcaagttatgggaaacagggtagaaaaggaagaagcctttatctatactaagtatagatagaaaatacaataaacaatctttaaaaaagacaagattatctacagt

SEQ ID NO: 49455 - DNA, 1253 bp, Bovine  19866880833449
  misc_feature (1)..(1): n is a, c, g, or t
ntgaaacaatgaagaagtttcaaagtgaactgaagttccaggtttcactattggtaactaccagtttgttttctgcatctgtgagactgcttctgttttgttatattcatttgtcttactctttagcttccacttataagtggaagtatttgtacgtacagtatttgtaacatacagtatttgtctttgccgtaattcactaacacgacaccctccaatccacccatgttgcaaacagcaagactgcagtcttttaatgaatgaacaatactctattgcgactcaacggacatgagtttgagtaaactccaggagttggcgatggacagggaggcctggagagctgcaatccatggggttgcaagagtcagacacgactgagagactgaacctaactgaaatgaactgaatactctactgtgtgtatgtatatatatatatatatatatatatatatacacaccacgtccttatttgctacatatggagtactcgtggcttgtaaggcctgactctgaggagcagcacctggaagcagttcacttctgttggagacccccttctgtgccaggcctgatgccagcaggggacatagaacgagcccctttttccacagtcaagcagaggggacaagttaactccatcaagaccccaagaaactgtagctacttaaatctacagtgcttaaacaagtcaataaaaaggcagaaaattatgtcaaatttttacttacacttccagcccaaacttcaggtgatccccctgccagtttatagtagacatatacagtgtctccttttttaaaattcacaaaacgacaatccgggcctgtaaaatcttctagagcctcaccccggtacattagcactgtatagaaagagcggggagggaaaaagcgggtatcaggattcaactttcaaatactgatttatcaggaaacataacaatccactgtaaacaacaatcaagcttctccagtactctctgaaaccagtcagcctcagctcatatgctcagagcatctatagagctgtatcgttataaatcaagacatccccttgcaagtagccaggagagaggtaaacttgccttgtttttcctatggataatgcaaacaaaaagcaatgtgtccactgccacacatggctggtctcgagtgaaactcttggttccctctctaaccatccagctttcagtctttggtgtttcataattataaaaagcttcattttgcagtgggtaattcaagcaca

SEQ ID NO: 49456 - DNA, 1117 bp, Bovine  19866881069241
  misc_feature (1)..(1): n is a, c, g, or t
natgtccatgtcagctgtggaaaaatgtctgtttcctccccctccatccctctgatccttttctatgtttttaatttaatgtccacatccaagtgcatctcaatttttgacctgatgctggtgaatcctcttcctcttcctctcttcctctccaacattagcttttgggtttgtgaatatcctgcgggggctgctttctgtctcatctgtgacaatggagcagctcctgacacttggcacttgaggcttcatgtcactgctcccatacaatttgcctttggagttattcctgccctgttggtaagtgtgtctgagcataaaaatatgagcatgtgttcattcagtgtttactcaacagatgtttgtgaaacattgccagaggcttggcaacttacttgtccttaagggaacagagatggatgaggcatgaagtttataagctaaaattaagtcactaacatttattgagcatttatttattttcatccccattcatagctgagaaagagaagcacttgttaagttcacaccccttggaggtgggattgctggggctgtgacctaagtgatctgacctcaggtccctgctaccaacaagagctcagctctgaccccagaatgcagtgtgactcggggcatgttttcctgattctggtgtgtatcccaagttcagtagctttcctggaaatgaaaaggggttcttggaaagtaggacaaagagaaccagttgctgtcatatgcatcgctttgaagagtcaaaatttctgcatttcttttggaaagcagtctggcaggacacatcaagatactttaaaactttcaatttaattgtagctcttctgggaatttactctgaggaaggaactgaaaatatgggaaaagctttactcctggagatgatcattaaaacactacaaagacaggtagaaaatattcttacactgtattcagatgtacagaggaaactttcctttatgttttcctgtaattaacctaatccttcccaggacactcatctaactattcccaccatccccatcccctccacccacgggaaatcttcagtcgtgttggactgtttgcaaccctatggaccgtagcccaccaggctcctctg

SEQ ID NO: 49457 - DNA, 1729 bp, Bovine  19866881122751
  misc_feature (1)..(1): n is a, c, g, or t
ncttgcaaatgttgtagttatatattggacagatggtttgaattccttgaggaaccagtgatgactataaaagccgacactgattcattgaatacatgtcatgctaaccttgcttcattttgggatgggatcactaaactgatagaccaggcattgatgcttgctttaattcaattttctgctgaatagcctgtgaatggaaaggggaaacagtatcttgagcattagtttcactctgaactgatcccagcaagaaattgctcaggctgagtaatgtaacagattgggtaataacaataattgtaataaaatgcactttcagagcctaaaatttagtcaataatgacatgctttacagattactgaaaaaaacagaaaagcctgattttccagacccacaagatagcctaatgcctgctaggcttttgacaaagttcttttcatgtctaagttgaagaaatagaataataaagctaactgaagtcattactggttgaaaccctgtgctgcactgcaagaatgttgacttgtgaccaggctggtcactaatgtggggtcctagaggacactgtcttcatgctctgtcctgcttgacatctatcagtgtcttcaatgagatggagaagctggcttattatattttccataagtctctagtaccaggttacatgtggaaaaatgcttgtaatttaataatatgtcatccttctttaggtttaattttgttgccataaaaataaattggaaccgtatgtctataagacacaagtgtactggctcagatgtttggaatggcggtcatgctcattacccgccttggagaaaagtcattgcaaatgatttgtaccacacgtcctgtccctggactttgtggattggttcccgactcaagggtcacctggtgactgtcgggagagttcttccactgaacttgctttgtattagacaatgactaagagaccccgaatgggtcttttatggctatttttatgtgagaaacagatgatacacagagtggcagcatatggtaagagagcacagagagggcggtgaatgaacttaagggaggaaaattgagggaacatgttggagaccagagaaagggggagttaacagaaagaaaagaatgaaagggaaagaagcctgtaggagaggtgagatagatgttggcgttattgttgggacataagcagtactcttctgtcctgaacaattttccacaaagtctgtttttttttttttttttgttcacatgccatttcttacctttagcaaaacaccttgttgtttgaggtaacccaagtgttttcttgaaaatctgaaaaagtctgaagacttaaaatgaggggatgatgtggattggtgggccaccttccagggttttagacccgtaagggattcccaggtggcacagtggtgaagaattcttctgccaaagcaggagacacaggtttgatccctggtctgggaagatcccttggagaaggaaatgacatcccactccagtattcttgcctggaaaaccccagggacagaagagcctggtgggctctctggggttgcaaagagttggatatgactgagtgagagtttacatcaaagccccaaatgggtcttgaagagatcagtccttttggtaacaaaatgaatcaaacaatgatcccatctcatccaggaagctatcactctgtttcaaccaccataaaccatttgcattttttatgtgttt

SEQ ID NO: 49458 - DNA, 657 bp, Bovine  19866881151117
  misc_feature (1)..(1): n is a, c, g, or t
ngatcttgagaaagtattgtctgtaggaagaccacatgcacagttaacagtgaaaacttcccagggtatcagaggacacacacttcttccttgagggggaggagagtgaccaggaacattaatgttctgatccaattgtggaagggtgttctaggaggagggaagaatgtgtgcaatagcttgatggcctgtcattccgtcagaggggagtatgtggctcgaactgcaaataaaactgtgcttttcaaaattggacccaagtctggctggctgactccagttcacatctgtttattataccaggctgagacatggtttggataccaggtagagggtggtgcctggggtcggatggaggactcttaaggcccacgggcatgctggctcttgtttggctaggaaaagaacatccattctacagccacatttcactaaagaaagtagggctcagagagacaaagtcacttattcaagattacacaccttgtaagaggtcggctgtcacagttcagtttgttaagggtggtataaaaaagcaaaaggaagtgtcattttacatcaaactgaattgggaaaatactcatgacttcttaactttttttttccccttgcaccttgtgacatgcaggatcttagtttcttgaccagggatcaagc

SEQ ID NO: 49459 - DNA, 2017 bp, Bovine  19866881152811
  misc_feature (1)..(1): n is a, c, g, or t
naaattacaaattatactttcaaagaaagaaagtgaagtggctcagttgtgtccaactctttgcgaccccatggactgtagcctagctggctcctctgtccatccatgggattttccaggcaagagtactggagtgggttgccatttccttctccaatactttcaaaagtgttttacaaaatggcagaaatgattggcaccagaaggtcaaagggcaaagatgcccccatttgcccaggggcccatttctgagctcagggactgtagccccatattcacaccccaccctcttccctgccatacccagtgggaggcaaagggtggtctccatcttccctaagacagtgctatcctatccccaacctcaggaagccatcccaaagcacattccgccttcccacaatgaaaatctcagctcttgagacttccctcgtggtccagtggtcaagaatccaccttccaatgcagagaactcggattcgatctctagttgggggctaatatcccacatgccaaggcaactgaggccacttgccacaactgaccccgtgcactctggagccctcaagccttaagtagagaaaccggcaagctgcaaagacctcacatagccaaaaaaaaaaatcccacattacttaaaaataaagagacataaagagacaaaaatccagctttcaacatcatttccttcatcccttgagggggtgggtagcagctaaaaggggtactctatgaaaaagacaatttctattccaagtgcttattatttacctccagactcttcttttttgctttgtttttcgctttctcagtttgtttgctgagtgtgcttttgaaaaagcaagcagtacaaagaggaagagaaaggatttgtgtgattgatgactccacctgataaacaccctgccctcatgattcaatggtgccaagagcgaattgaattattctaattccaggctgtggaaccactttcctttgccaaagcataatagggagcaaatcgttggaggcacctgggccccttcctgcctttcagacagccaggtggtcatcaccactaccattctgccatgcggagacagatcgtcaaccacacagagtcttggtaacctggaattctgctttatataggaatttctcacccttctcacagggatggggaccagagtttaactcagtgttgctagctggctacacccacatgacgcatctgccttctgtccacagcatccacactccccactgatggccatggtcactccctcagctcccctacccacccaattcccccaagtagagacagatgacttgtaagagaaaaggaagcaaacaagagacctctcctgtggtctcaccatctctcctaccctgaaaggagaagcacatatccaccagcccatcatcagaagccagcagcatctctgttgttactgtaacctctgaactcttgaaacctcaggcttgagggtagggaaaaaatgcaggttttctcctcaaacctacagttgtgcaggaggacctgaaagggtaggacagcccagaaaaagagagggagggaaggaggagaaaaagaaaaagattggctggtaagaccctgcagtttgggatcaagaccccagcaagtcttcttcctacaagttcatgagcactatcctccatcatagcctttctaagggtttgagaaagagcccctagaaagagcccctgcatggggctctctggaagcccactccttctcaccccctgagccacacagcctggcctcagtctcacctgggacatatgcgtcctctcctccatgcccctctcctctctccaaggccccttggtacccacatagccttccccctcctgccttttgcttataggcccatatgctctttgcttctgttcacccagctatatcccagtcccatctatcagaaacaagtcctgacccagctggtcctcaaagaggaccagaagagctgaagaacctcaaagcagagcacaagaaggaacccagaagccacagagc

SEQ ID NO: 49460 - DNA, 695 bp, Bovine  19866881259525
  misc_feature (1)..(1): n is a, c, g, or t
ntgtgtacagtgccttcctcctcccctgtgtaggacaggagggaacgggtggcgattgaagggagggggtgcccccggcaagcatcgagaccggaggtctcatcagacgaaagaaaggtcccctctcgcgccccttctccacccctctttctgagtagccttgttttcccaattcacctcgaatccgtttcggtttctaggactgttatttgctaggctgggtgagtcccacccgcccctcgctccgttgctctgggtggagtccgcgcaggatgtgaacagaagagagcaaaatgtgaattaatagaccacgcacaggagccaccactccctcttcgggtccctcctccttttcctgtgtataatgtatagccgccgggtacaagtgagcaccaggttctttgatctccccaagtccagttttctttccttttctggtttcctcccaaaacttcagggatgtttttaaaattataaggctaggtttgcgtatatataaaaccttgcttggtttcttgcacattttactgaactgcctgctaaaatgctattgtttgcaaactgttgacattaattacttcttggtttaaagtaagttattgttttgaaaccatgtgttagtaaaacatttttttttttccttctcaaacgtcttttgcaaagaatacaggattggtccttgaaagatctaaatc

SEQ ID NO: 49461 - DNA, 1471 bp, Bovine  19866881404171
  misc_feature (1)..(1): n is a, c, g, or t
ntggccctttccccaaacacaatcataacgtcagattgacttagtaggacgagagtctaccattagtcatgccctataactggaacactgtctaccaataatctagacaaagaacagtacttgtcaccactccagaccccacctcttttcacagagggtttcctcttgagtctttatctccttccatgacacctaaccttggtcagtatcatttcagttcattctacctcatttttatatcactgaaccttggagaaggagttccaatctgagtcactttcctcccaggagtcatctctaccttttgtagattgatggatgctaaagagtatgtgcccagctctatctggcagctcccaagatccaaagatacgttgggaaagggctaactaacttcccttccaatgatgtttaaacccaagatccttgccagccaaaagtatccccaactaaccagttaagtagcaaaagtttgttgatttaatcgatcaactaaattttaatgatcattctgatttcttaatgttttaggttactgccaccacacttcattgggtgtagtacaggcaaatcaaagttcattttattatctttcttttctaatgatggagtcaccctaaaccttaaccttgagagtggaaattcaagaagtctgaagtgatgagagaagctgtctggcaaatgcacgcaggcgtctaccctttatctccataccgccaaacatcatttgagcatcttaccctggatgaacagcctgccaagaattgcttgggtctttttcatctttgcaggcttgtgggagatgatacccttcaattattcctgtaaaagtttctgtcttctgccaaactgccccatctccaaccacaagatataattatttattatacctacagcaaaatgaaggcaaccacacctttaaccattctgtttctcaggcaacttatgcaggcttgccaagagctagcaaacacagttatcagcttttcaggcacaagaggaaaaagaatgttgaaatctctttagggaaaatcttctgtatatgatttcatttatgttggggacaaagtgggagtgacatcagtctgaatttaatttgagtggacaggatttatactgagaaaaagaagattaaggttccccaacaaatcatttgaaaggaagtggacacaatttacctgacacatttactttgtcatcttcaagacggcctcaggccaacaagctgtataaatcagggcaaagtagtagaaacaaaattctatttagaattgagtggatttctgtataaaatgtcttctaagataaatgtttcctgatggtctttagcggtcttggggaaaaagtttcagtaacagagaaaaatgactcccaagaacaaaatgtctcccaagaatgccttgatggtggggaacatacatcttcaagttcaatgaaaggtagttcttgaaactttatttctgtttattta

SEQ ID NO: 49462 - DNA, 882 bp, Bovine  19866881595572
  misc_feature (1)..(1): n is a, c, g, or t
naagctgcaacttgctcagtgtcacagggaccggggctgcatcaaacttttgcctaatagttctctttgagtcaaaaattggaaagtcttaactatatatatacacacacatatatttatgtgtgtgtgtatgtgtgtgtgtattatctccccatgtgattcttggttgtcagttgagatccactctcagtagactatctcgggccatctcctccagttctgagatgttttattttatttagaatacgtaacctgagatccactctcttaaaaagtttaagtgtgcagtacagtatagtacagtattgttaattgtggggaaaatatagagtgggtctgtggtacttactggagaaggcaatggcaccccactccagtactcttgcctggaaaatcccatgggcagaggagcctggtgggctgcagtccatggggtcactgggagtcggacacgactgagcgacttcactttcacttttcactttcatgcactggagaaggaaatggcaacccactccagtgttcttgcctggagaatcccaaggacgggagagcctggtgggctgctgtctctggggtcacacagagtcggacacaactgaagcgacttagcagcagcagcagcagcagcatcatgtgacctagcaatctcacatcttcatatttctcctgttcctgtttctggccttcttcctttcagaagttccctgctggggaaagtgttaaaggatcgatgtgaatggggccggctcaggtggcaagcggtaccgagtgcccatggacaatccatttgtttctgagccaggggcccatcccgccatctacgcctacgggatcagaaacatgtggcgctgtgccgtggaccgaggggaccctatcacg

SEQ ID NO: 49463 - DNA, 1354 bp, Bovine  19866881978744
  misc_feature (1)..(1): n is a, c, g, or t
nttttcacacagatgcagacagtcaagactcaaaccagccatgactaggcaatgctgtgtttgttttaataactgctctcagtcattaagatgcctctgttggatttatcaccaatgattggatcgattactcggtgctcaactgcaatctgagcctttctgtgcttctacttcagtcatttcattacgatggataggctggtaatgccaccctcatgggaggttgggctggagggttctgtgtgaatggagccttcaagataaaaatacaccaggcatatgaggagcaaaggatcagagaactaggatgctttcctcctaccccctggtgcccggggatccacccagactggcgaacagtccgtctgcagctggtggtaatagctcacagaaggggaccaagggcgccgacaaggatgcccccttagaggtgtttgtcttggccagacgtgaacacaggttcatggagctcttcagggttctcttttccaggcctggcctacccatcccatgcaaaaagaggtcttagctactgggtctctgtcaattccaggagatctcctaggtcatgactgggagcagactttgttggagaaactaagatgtccttcaggccttggagattgcccataggtcctggtgggtctcctgaagcacctacgacaacacaaaacaaaagtgcaaggaataaaccgtttctggtctatttgctactgattgaaattcaccagcctggtcttctagagaggtccttgtcaactgcccattttgtgatgctctaactccaccctgtagagccaacctgctcacctgggacatcccacagaccctactgcccaccagctcatgtcagcactgccctcaccctgcaggacatcggggcccccagaaactccatgctcccaaatcaaacatggtcccagctttgtgtgcattccatgtgacactgagtgtgccctgcacgggcacctatttcatatctcctatctacctgttggcacttttggggggcttggctgccagaaggagattcaagtagagcttggagttggtgcaaacgtttcctgctgctgcttctcaggccttcttctcactcaagggcagccccgtgtccttagctccattctgggccttcactccacatcacccttcttgacctgtgctgcgctctgcaaggtcagcgcggccggtcatctggaattttgaatctggaggcagacttttattcacaatatcatttcaaacttcctctgcattttatatttccctttcctcttcactgggctccatatgttggcaactccaggtaaataatctgcttggacctgccaggtacccaaggtgttatccctgc

SEQ ID NO: 49464 - DNA, 1834 bp, Bovine  19866880346230
  misc_feature (1)..(1): n is a, c, g, or t
nagatctgactcttgcggaaggtggtcagtggctgcagtgaagaactagcaaaggaagtagtcatggattagcttctggacctctgctaggattcaagagtagggacccacatgtgtacctacttcctctgccaagcttttttttttcttctgaaaatatttttctaacactttcttggcatgaccatttcttatcaactactccttaggataagggccaaattgatctaatatttttcaagtgggtgattcagtgctgggggtgaggggagcagagatcctctaaattagttgctgttactggctatgcctttcagctttggttgcactagtttgcttgatggtattatataggatcttggtaagaaggaacttcatccctgataaaactagatttttaaagccccgagcagtgtcagggttgctaacatgatagctgcagtgaatatttgttctttctttcaagaagttcatggctttaatgaacattgtcacccccatcctctctgtgctccctgtggtaggtagaggtcagagaaaaatgtcatcactgtatttttagatatgggaactgagacatggaagagtattaaatgtctaggcattgctgccttggcaaagtacatgggcatcattaatgagaaatccacatttccaacccactttcttagtctaagtcaaaagcaaatcaaaataaatatgatttgtgtatatatccatgaaatatacacttgtatgtaaatgttgttgcattacatagagccacgaaaggttattattcagaggggctttggtctaatagatgaagaaaatgtggtccattgagttttactcatgccatactaattgataagagcttagatgttgtgtgctctatgtatatatttattaagaggtattttgtaaaaggcatactgtgaaaggttaatagcactgcattttcaagttcccttaactagtggatgacccaggaccagaactcagttttgttgattctgcatctacttcatccattcgtattgttttcattagcaaggtggataaggtgtcatttcttttaatatttgaatgctgatagcatttacaggtctctgtttggatggcatctccaaggtaacttcctaatacattttagtcttttatttaagatgtaaacataaggacaactctttccaatcatgtaagcttgttcctcggtcttttctttctctttaggactagtctcttgcccgggcaagcttcagcattttgcctggattagttgcctgagagttgatatttgtacattgtgttatggtactaatggataatttctttttaaatgtcctattcactctaggctgttagaatgccatgggaattcctagaacagtattttaacaaccttcctccttctggccccatcaaggagaggccaagttcaattcaacaagtgtttattgatcatccacttttgccaggcaaacatgaatgttgtttaatcagtgcaatgtgatacatgcaatatcagaaggtatcagaggctcccagtttattcagaggaaaacatcagagaaaggattctggtggtgaccttgaatagggatttgaagatgaatagatctttgggcaagccaagtgggaagcaatattccaggcaaggggaagcaggatacacaggcaggaacacaaatggcagcacggtgtactcctagagagacgaggctgaggcagtgtgtgtgtgactggaacatacagctcagctgtggaatgtaggggagaggacctgaggagccagcaaggccagcgtataaagggatatggggccacactaagtgttatgctgccgagtaaa

SEQ ID NO: 49465 - DNA, 1493 bp, Bovine  19866880504664
  misc_feature (1)..(1): n is a, c, g, or t
naatggcttcagtactaatgggaacatcccaacccaggcttcccccctgatgggtgtatgtatatgacctgggctttagttgtgggagcttgtggtggtgggaaccctcatgttctaatcctgaaatgcttaggcttttgctataaaagaacaaagaaagaatggctactacgtaccagcttgggctttcctgttggcccagtggtgaagaatctgcctgccaatacaggaaacatgggttcgattcctgattcaggaagatcccatatgccacagagcaactaagcctgtgcaccacaactactgagcctgtgctctagagtctgggagctacaactactgaagcccacgtactgaacccatgctccccaaagacaaaagccactgcaacaagaatctcacgctgggaaactagagagtagccccaccccctctccaggattagagaaaagcccgcacagcaaagaggaccctgcacagccataaattaataaaactataaaagcactactgtgacaataacgttaaaaaatgaaccaactccagtttgtgctgtgagtcctgttggtgtgtctggagaaagtcaaggcaggcagcgttgctcctcacaggtcagaatgcctgacgcctgctgctgggtgctcctcacagacctgccagccccgggctggcccagcctccaaaaggaaataaaagccctgagtcctgacagagacatcagtggtctaatgcagaggtccccagccttttttggcactgggtactggtttcacggaagacaatttttccacagacaagggggcacaggtgggatacagttttggttttgccactcacctcctgtgcagtgccccagttcctaaccagtcctggaccagtactggtccgtggcctgagggtctaatggatgggggcacttacgtatctgaagcaaggtcctggagcgacatccctccacctgcagtgcagaaggcaggtggcaggggcagcagcatatggcaacagtcttcgtgatgcgggaggggtaggttaccagttcctgggggaactgacttctggtcttcttgttggttaccagggaaactagcagggtggcacacccctcaccgcccctatgatatctaccaggtgatctaattagaacgataactaggctgggactggaggcaagtacctaggtgtgttgattcagctgcatgatgaggagggaagaccagttaggagaggagggtagagctaaggcagggactggtcgagcagtggaggtacagagaacaagggaacaaccttcttgggtggcctgatcagacacccactcaacagggaaggacaagctggctgaagggtccaccacattgttatctttagcagctgactctccccactccccaccacacgtgcgatgtctgtcaacacaggtgtcacaaatcactggtgaagccctgcgcttacagaggcagaaatctagaacaattgtgtgacgcaaagaagga

SEQ ID NO: 49466 - DNA, 1588 bp, Bovine  19866880577026
  misc_feature (1)..(1): n is a, c, g, or t
ncatacatacaaaactggaatgttatatatattgttttgcatcctgttttctcccttaatattatctatgagctcacatagtattaaaattcgtccttaaaaacccctcctctttgtcacgtggggtcatgacagctctatgatgacacattagattgggagatcatggtcacccttgctgcctaatgaggataaagcagtccgtgaagctgggtgtggattctcttcccagcatggaagggaagtggaggaagtcagtgaaaaaaagggaccacatgactaaatatgataatgaaagggcattccctagggtagcactaagagaacgttgtgtgttgatggaaatgacctatatatctcactgtccaatacagcagctgcataacatgccttatagctactgtactggacagcacaactccagggcaagctgcactctcaggtttaacagactttgttttaggaatgtttctgattacattcttagaggaaaaaacccatgacccaccaagagcttaaataaaagccagataatgattcttagactcctggtcttcaggatagaaagtatattagagctttattacatttatcttttccttacaaatttacactttagtcattgtggaaggaaccagaatataaatacttcaatgaataaataatggtcacccagctcccaaccctcctgagggctgatgagcattgttctaagttaaacttctagggcatttcagctctcctgcaaaaatcactttcctttctggaagtaagagaaggaaaaggaaacatctcacccactttctgcagactacgggcctagctcactgtgtgtgtgggaggcaacaccataggtgggtctccaatctcactaccagttgaggatggaataaagtaccgaggctttcagtaccgaggctctatcttacactcacggatggagatgaataccaccagcccaaactttgtcaaggtgctatgtccgcagctgtgcctccagtgggtttgtttatatagcaaatagttttgtaaaacaaactcttcttctcctttatggtgaggctgagaaccaccaccaaactccaggtgccaggaaaagatggacaacattcagaagactgaatcttctctgctgtaggttctgcccgaccttgatgccaacttgcagacagcccacgtgtggagtccatcacaggcatcaggaaaggggtctcagaactaatttctcaaccagagtgtggcctgatcaggctgggaagaaccctttgtgaagctacttggaaagaatgctcagagcagttgcttcctgacacccctcaatatcttcagatgggaaagcccttcaactcctgtgtgatcagagtgcatcatttcaagcatccaagccaaacattgttattttcagatgttgcccaaatctcaagagtcatctgttcacttgacctttcagaagaaacactgactaagagtctgtatttttgctattggatatttgtaaaatggggcattcacagtatctacttcataaggcaactgtaaagggtaaagaggattaaggggatgatccatgtaaagagctgagcatgtg

SEQ ID NO: 49467 - DNA, 2010 bp, Bovine  19866880587687
  misc_feature (1)..(1): n is a, c, g, or t
ntgtatcaactctcacagtctctcttcataacaagtcttagcaagccatcttattctgttgacacaactgtggtcctcgtgtgtctcatagtgttcttatttaatcactgacaagcgcaaaggaaggtaacgagcagtttggggttgggatgcctgtgtgccgctttgtggcccagctgctcagatttatcaattgtgctctgggtcagaattgacttcctctttatttccatggtcttgactgccttttcaacagtgttaccttatatattttgtattataagtcttcccctcattttatttggaaagagtgccatggaatagagtgaataggtccattttggtcaccaaatgactcaaagcagtacttcccttctctgaggctcagtttgcaaacgtgtaaagaggattgaattggaatttgtagcctcatccagctcttacattctaccactagatgatttttgcattttaaaggagagcatgaaagtaatatagatcaaatgccttgaatagcaaggcatttcattttttttcctgtttttatgactatctgggggcaggaggaagggtatacggagccactgtcaatttttaaataggagctatgcaaccctggaagaattctgcaaactgaatctacttctcattatggctgaattatggtttatttttgaactttcaaaggatgcagtttggtttattcagagggtacaagtaagaaagaattcatctggctccaaagcttcatgctaaagacatttaaggatatcacagaaaaattgagataaataccttgagctgctcaaaaagaggtcttcagtccagtccattagggtttccaagatccgtgggacccttgtccttcatgccagggccaaatcttcatcaaaaacttcccctatttacttgttcaatggggctgaaaaagtctcacagagtaatgttaacttgtccttctgttggccacctctggcccttgagcaacccagatacagatgaaagggagtcataatgcacttgctttccaagcatgcaattcagttcatggatccagaaaacagtagttttctaagccttgcattttccaactttaaaaaacggaatcaaaggttattaagacaaaataattaattagatatcatgtttcatcttcctcctttttaatagatgcttttagtagaaaaggcattttcattatgcgtctaactttcttgttgcagtgcgttggtagaggtctataaagagaaacagctctgtgctaagtagtaggggtgggcctggcgtggtggggggaaggaattgcaagccacatttcctgatgcacaagtggaaagaagtcagtagttcttaagtgtacagtgtacattttaagagtcaacaagtagacaaagaaaatccagacctttgatgacccctggtgaataaagtaagcactgcattgaaatgcagttagagccgcagacttcccttgcaggccagtcccctggattgctcctctctctcaagtaaggcaaaggattttttccccctaagtgcctgttttgtttgcattacagacatgcattactgacttgaagtatccgtatctctctaaacaaacctgattttgttggtctctgttggtagattaagaaatatgtgtgcatacactatctgtgctgtgatcctgttagacacaaacagtgttatttgggaatttaagcaaggtcttaactttctttcagattaggtatatacttagtattgttttatggaagagttatgaagaacaaataagccttcttatataacccaaatttaaaatcagaatttatcttgtctataaactctgagtagcagctaaaatactctcctatgcagcaaaagtctgccttttcataaagtgctttttgtgaccagcatgtggtacatgtgagccagaaggtaggctttgttttgtcagcttgcaggaaaggagagagacttgctactgtcaaagatggggggtgggggtgggcaggcagggga

SEQ ID NO: 49468 - DNA, 1264 bp, Bovine  19866880600544
  misc_feature (1)..(1): n is a, c, g, or t
nattcaagctgtgtatggaaaagtgtgaataacctcccaggagggcagaacaaagcagcattatggagctcagggtggataagaaatccattgcctctcccctctacctgatagcagtaatcacatgaaccccctatcctcaacaaaacttgggcctgtggtattattttttaccttcttctgtcagtacatttcttctcaagctttagttatgtgtttacgcaaccaagaaatattccttgagtgcctactatgtgtaaagaaatgaatgtgtgaaaaagaccaacagaacactctctttccgaggggggttcccaactctgacaaggagctcttctaatgtgggggagacccaggtcctctgaagccaccctcatctgtgggcggaaggcaaacaacagaagttctggctttgtagaatacagaatagatcattgattctaagacacgcagtttttaccttcatattttaacactgctaaaatctgaatatatctcagtcagtggcatcgtgtaattggcagtgatttttctttctggtgttgtatagaataatggagcatttcacagtcagtggtgtcatagttccaatgaaatgcaatatcacacactttgattacaactgtgaagcatattttaaaatttcaaaaattaacctgcttgtagaaaaaaaaaaatggaaggaaattctccaaaacattaacagttttgtttttttttttaaatcgtggtggtaggataataggtagtttcctgtctttttttttttttttttctgctttctaaagaaattctaaaaaagattttggaattagaccaattggaatgcaaataccaatctactcagctgtgtgactctggacaaattattgagcttgagttctctttcattaaatgagggcagtcttaacctatcttctctcatctgctgttataaggattcaacaaggaaagcacttggtgcagtgtaggagcttaattaattaatgttcttccttctactcccttttctttatcagactatttgagaatagcaataatatttgtagccttagggtaagcataatacttgatccagaatagacatttagtaagtatttactgaaaaagggattgacactctctcattcaccaaacaaataatgaaacaagatacaaataatggatttaccctctcattttgtcctgcctcttaacaaaagactcttctgccatatttctcatttttagttgaataatgaattttcacaagtttagttgaaat

SEQ ID NO: 49469 - DNA, 1249 bp, Bovine  19866880605624
  misc_feature (1)..(1): n is a, c, g, or t
ncagcaacatacctggcaagtcccaggaatggagcagaggccaggggggttaagaaaagatgagcctgaggaacttgacagggcaagaggtcagaggtaacaatggtcagggcacaaagggctttgcatacactgaagaacctggattgcactcaaagtgaaatgagagctgaggaaaggcttcaggtagaagattgacacaatctggcttatgtttttaaaggatggctctggaagctgtgttgcaaatagactgaagaagggcaaaggcggacccagggagactagttaaggagctgctgcagcattcaggtgaatgggaatgttgctcagatcaaggtaaaagcagtgaggtggaacagcaagtgtaattgggtcatgtgctcagtgtggagaagcaaaaggaaaaaaacgtagtttctcaccctccataccaaataacaagatgtttgctttttcgtttagagataagctttatccaacatttaaaatctaggagtgagttatccagtatatctttctgtagagttcctggaacaagataatgggaagtatctttaggctgataggggcaggggtggagggagtacatttaacaaggacccaggagtccaaaagaaactccagggtgccactatactggatatcaatccaaattttaagatcttttaggcagactgcccttgctgagtggggtgccagaaaaattgttgcttttgtgtttatacgaaccaggctcactctccggaggtattttctggggctccttagtgatagttacttttaggatgctaaacatccttccaattattaaaggctaatatatgaagtgaaattgtaatcctgaagttgtttttaagggatagcatgagagatgtgacacaattcaagagcagggttcagagaatcaaaagaacagagtgaactgtgtctgagctgtgtggccatcctcccttgaatgacttttgccatgtcctggacctgtgaggcaagcagttagaatcagggttgggtgtgtgcacactcagtcgtgtccgactctttggaaccctgtggacagtagcctgccaggctcctctgtccatgggatttcccaggcaagaatactggaataggttcccattccctcctccaggggatattcccaacccaggggtcaaacccgcatcttcagtgtcttctgcattagcaggcagattctttacctctgcgccacataagttttgtgtttgatcatttattaaaggat

SEQ ID NO: 49470 - DNA, 2455 bp, Bovine  19866880625928
  misc_feature (1)..(1): n is a, c, g, or t
nctcagctcagctacttattaactgtgtgaccttgggcaaatgatttaaaatctctgagagtgttttctcatagatagaagagagataatatcaccctacttctcaggatgttgtgagactttgagaaaaatattagaagagactggcattgttgatgcctatagttgttactattataatttaaatgaagaggaagaatccaccttatttttttctatccctcactactaaaattcttgcagcaaaaaacccaaatacacaccaaaaagcaggtggaaccaatatctccatattcttgccaccctctcattcattaatactttactttaaaaaaattgacaccttaggttaatacaagttatatgtcaataaagtagggcaaaaacaaccagaaaagtatgattgcatcagagtataccttgaaatgctgtgtcttcaaggaaaactcatgaaggggtctatctccttcgctctgtgagaggaggaggagaaggagatggagtagttgacagctgagggcatttttcttttctgagttttacttgaatgggctcaaggtatcttgcagtcatcaagtctttttactcccataaactagccctataaattcagagttgccacaaccctgtttatcaagtaagcaaaaatgaaagcactagatgaaatacaaatgagaaaaagccagaagtcatagctggataaggaagtcccatctcttctgtgagtcagcaaatcctaacttctgccaaggttgactcaggaatccctagtaagtctccaaagactaccacatgagaaacacaagcctttgtttgtttttgtttttttataaaatctgagcatgaaggaaatcctaaaccaaatatgagaagatatgggttaacaccacaattacgatacatgtgagttagttaacctccatgagactattttcttactagagaaaaatgaaaataatagtatctctctctgtgatgatccaatgagatatcactggaaacagccattttagaaatttactgtacaaaattggtggaattcaacagttgcaggggctttgtttcaccacaatgatcttgggtgcctgtgatatggggagcatttgactggtggggatcagagatgccacatatcctgcaatgtgcaaacagtcttgtacaaggaaaaactgttctgcctttaatcaattttctaatgtcacagacttcaatttgagaagtcagacatttgtgtaagtgaaaaagttgtttataataatccgagtgtagatccttacttaaattaatacataaacaccaaggagttttgcatggttggaatatgcaccaaattttccagatgaaaattgccatttaaattgaagaaatacagaattcagttttgtttagaacctatctagcaaaagcagcattgagtcacaaatataacacatgtgttttagttttcatttgtaactgtagtgtttatggcaattcacacatacatacatatatataaacacacacacatatatacatgtatacacacacatacacatttatgttgttgtttagtcactaagtcgtgtcttactcttttgcgaccccatggattgtacagcccgctaggctccttccgtccatgggatttcccaggcaagaataatggagtgggttgccattttgtactccaggggagcttcctaacccagggatcaaacccaaatctcctgcattggcaggtgggtcccttaccactaagccaccatgggagcctatatgcatttatagacatacacatatatgtacttacaaaacatttatttttcaaatgtgaaaaaagtttaaacaggaagacattagttgaatattatcttaatttcgaatctgtgaattttatgtatgtgcaagcatttgactactccttgattctcttaggtgaggtgttcctcagtatttacatattgagacacatattaattgattatacattacttttgcatcattgccttttatactacagtgaggacattttattgaagtttttgaaattatgcttgtagataagctattttatctatgaatttaatttcaaaatagtaaagggcagcagagaatatgtgctttataaagtaagagctggaactgagaaggttgaggactacatgaaagaaatgtaaatgattgctgtttgtccttggttttgcacaagagactgactagattcaaattagccagggagagatgggtctctgctctttatgatgtcaaggctgctacagtaaacatctccctactggcttcttttgtcctttggtgtgtgtgtgttacttacggtttgctaaggttttccatggacagatcatagacagttttctgaaagaaaagtcaactctgggtgtgagaggtaatcctaaggaacaatgactgctggcataactgcacccttaatttgatgtctatatgtgtgtggatg

SEQ ID NO: 49471 - DNA, 1926 bp, Bovine  19866880647526
  misc_feature (1)..(1): n is a, c, g, or t
naaatggcaacccactccagtatttttgcctagagagtcccatggacagaggagtctggcaggctacagtccatagggtcgcaaagagtcagacacaactgagcgactgagcatgcatgcatgcacacacataaattaagaggcattcagctgcaagaaattgaaacccatggcaattgactttcagaccggtgattatcaaagtgttatccctggaccaataacatcagcatctcctgggaacttgttagaaatgcaaattctccacttctaccccgggtatactgtcagaaagtctgggggtgggctgagaaatccatgctgttaaggctcagggggtattctgactaaggttaaagtttgagaactttgagaactgttttagacaataaagaaattacgttcttcactaagcaggaggtacaaagacagagcatctctgggtacaacaggatcagggccaggttctatttctctgtttctctttcattttcctcaagctgactccccttcatggcctcaatacctagaggcagaaaatgagccattacttcatttttgaagaaagaaaagagtggatacaccctttgagaagtctccacaagaggtttgccctcatgtttcaaaggccagaattctgtcacctagcaacacctttagccaattactggcaacttgaatggcaccaatgtaattggctgaaaccaatcaagaccccaccccctgccatatggccataccaaggaggaagcatacctgaataaaaatgaagcaaggaggtgatctatgggaatagataccgtatagtgtcaactacggtcacaaacgtggttgattcacactgccgctaattcttactacagaagaacttcaactcgtaatctgtacatttgcttcaataatctgactaatttgttagccttttagaatttcaggtctaaagcagcaaccgacagatcacttttatattttggtgattaaagtctgacatttagaatgtggcatcattttgagatctgttttatctattttagctaaatattctatatttttatatcaagctcgagataactataattaaaaggacaaaaaattatgattaaagtatgtattttccctctacagtatttgtgcttcttcaaatgacaggtgtttcttcagaaaggaaattctactcattgctatctttgttatctttcctatagcaaaaaatgaattttaaataatgacttttcagaagagagaaaatctgaaatgatgagcagattgctttgatcactgctttgttgaacaaaacagacagttgtttggagacaggttgcaatacaacaaacatttaatttttgcttgattcacacatgaaactatcagttgggaaggttagtaattaccaaatcctcaattcaatcagacatgaatgccacacagccctgtgcttgtttagctgtaatatggaattgatctcagcagatgtagtaaaatagttcatatccataacgcctgaaaaaattcacacagcctgcatttcattgttgctctgtactacagccctccccaactctcccatttcttgagtttttcaattaagtgctttccttatttatattctacatctgatcaaacaccaaaaaatgtggattagtcacattcctaaataaattgaaacattatgtaacaagtgtcccagcagtttgagaaggaacctcaaagtggcatgttggaaagagccctggactggctttttctggcttctcatcccagctctaccatccacatatatgatgatctggagtgatttaattcacacctcaggcctcagatttcagcggtaaaattagaagattggcattggctatctctcagttctactacagttagaactgcctggactgaagaaagatcaaaggagaggcagcttgccacagt

SEQ ID NO: 49472 - DNA, 1376 bp, Bovine  19866880734254
  misc_feature (1)..(1): n is a, c, g, or t
ncattgactttttgcaggacaaatgttttcaagggtacctacctccaccactgcctttctcaaccattttctaaggtaaaaaaatttgagaggtcattagtttaaagttggtggtcactactgtacacagtgtgctggcatctctcccctcagactcttcctctgccatcagtactgaccagaagttataatttttggtatttgtcataaactaatcttcataaaatgttttaaagaaaaatacatttatagacatctatgtatacatattctcttatactaaaaagatatcattttgagtcctttgtaggaatattactttaaaagagtaggagctagttagtatttattgagagttccacattctggtatatttttattgtatagaaaaaaatctcagaactcatttctcagtgttccattctttggcatatgtggaggtgatgatttagaggagttatgcaattcaagactggacagggcagttttcacaggacagtgctggcttgcctacgtgataaatccagtagctctactcagcgccatgccaaagttacagttttcagaaacttctgcaaaaggatctaaacagtttttgccttgccaccaaaatgtgtgttcatttttctacacctccacacctggcagtgtttcagcccaacatttgctacagtattttgagttcatcttgtttattttctgctttattttttctcctgatgtacatttcatgtgcaaagcctaccatttcccatatatactgctactgttcagcccggctcctaaaccacactctattcttaaataagatacacttcaaagtaacatggacttcagactttagaatttttatttctactcagcttttgtccctcatatccagagtggcatttgttatatagaacaaaaattgcaaaggtataccagaagtggcttcccacgtggctcagatggtaaagaagtggcctgcaatgcgggataccctgagttcaatccctgggttaggaagatcccctggaaaagggcatggcaacccactccagtattcttttttggagatttccatggacagaggagcctggagagctacagtccatgggatcacagagagtcagacacgactgagtgactaacacatacacacatacttaaagcttatatgtgacatgaaatgttatttcttggaaaatcatacttcagaatattgatgagatgtcagtaatatgtgatgacagggaatgaaggctttttggcatgttgttaaagggatgcaatataggggggatgtaaagaggtccagaaagagaggatctagatctttctctcaaaggttgatgctcctagatcaggagcatcagcaccacctggaaacgtgt

SEQ ID NO: 49473 - DNA, 952 bp, Bovine  19866880793985
  misc_feature (1)..(1): n is a, c, g, or t
ncacatccaagacagcatgctaatgagaattattattaagcgatgtagagttggcaccagtctcttgcaatctgctccacagcagaagcaggaagggcagagacagagagtcagaaaagcagctttactgaatactcttctggacccaattagttttggtcactttcaacaccaggcaaagccaagcagaattgtaagctttcacaggcaaagccattctgcttccccactgtaatgtatctagcctgtcaaaaagtcttctagattttactgttgctttaaaaacattcttcgctttaagaactgcaaaatcaagagtttctgtaaattcaataaccaggataccagaaagactgatttgctctgcattgcaggatttctttcattttggtacgctattcaaactgactcatctaactctcagaataggaattatgtttcaggactttttctggcataattttcagagtaagctgtgacatcttggtcagatggagaatttggaccaccaatcaatgtgaaacagaggggcccaaaattagagctattatgagtgcttttcaagcagttagaccagagcccctttgtgaagatgaagtgtgatgcaagcaacttggagataagccacacaaccaaaataaaaggtcattttcacgtttatatttatttactcttaaagacactttatcagacaggcttttactgaaatgtaataatgtgagatgatctttttaaaaattaattaatttttaattggagcataattgttttacaatgctgtgttgctttctgccatacatcaacatgaatcagccataggtgtacacattcccctccctcccaccgcccaccccgtcccatccctctatgttgtcacagagcaccgggctgagctccctgagctatacagcaacttcccattagctattttacacgggtaatgtatatgttt

SEQ ID NO: 49474 - DNA, 1526 bp, Bovine  19866880828992
  misc_feature (1)..(1): n is a, c, g, or t
nagagagcaggtagcatcttccctccctagtctccatgtgttaatcccagggaagacctctgattgggccaggagtatggggcctggcctgggtcatgtgaccactccatgaagaaggggtagatgacagctcttggactgcagagtgtattttcagagtaagggtcatggaagaaatagttaggaagacaaaaaccaactgactcagactgcctcaggaaccatctggctctctgatatagtgcctgagaggacacttgagtatgggtaccactgccacttcccgtggctcatatgcgtacagaaaagaatttaaaatactcatatgtaagaacatacaagatggctttctaagcacaaaacccaagctataaatacagcattcattttgttttggttgaatccagcaagtaattagcttatccttggttaatgaacaaaaatctagataagaaatgaaacccacaaccctgagattgtaaggagcaagcagatgtgcctgccttcaaggatctcatcatcgagggagctaagcaacccagcatatttgtagcgcatgccacgttttctcatggcagtgttcactgaggaaaggacaagtgaacagcttgtgattctacatgggcattacatagctgcaaatctctctgaaatgcaggcaacaaatagtcacatcatgtctctgttcttgcaaatgcaatgttttttctttcactaggatttgttctttattccttagatcgaaaatgcctaccattttccccaaactatctgtaatatgagactacagcctcttaaaccaatacacccatggaccaatagtgtagtgtaaatttatggctgagagatgcagagtttgaaaagtcaagcactccctaagagccagggtgacaacaacttatgaatttatatgttgtgatggattaaagtaattatttagaccagctcagagaaacccaacataatccccacccttaaaacaagctatggattgcaatttcatcttgaaagccctggttagatgggtacatcttatcaataattttgaaaactatatttccactgagaaattataaaagaaataactgccattcaatttcttgatgttttgcattctttcagagtcggcaaacataaaaaagtcagcaggtggagctcctattcccttggcaggcctgatagaagtctttctcttgtaagaactttcaattacagactgtctctccggcagccagttctaggctccctacagacagcatcagaataatacatgaaaatgtgagactgtgaaacattccagagtgtgtcataggtcaggaaagagaagagagaaagaagagccagaaatcttttattttattatttttttggctatttcccccaaattatatttcttttaaattagtaaagaatgtgccatccttcatgggtggacctggcaggatatactaattcactggttttctgggacactgcagttctcttctcctgtttgcattctggtcaccctttcacagcgtggcatt

SEQ ID NO: 49475 - DNA, 1867 bp, Bovine  19866880888527
  misc_feature (1)..(1): n is a, c, g, or t
ncattcttccttctttgggaggtctataaccctcatggaagaaagaaggtggggagggggcgaactatccaagcacaatattaatctagttgatcatgtaaacaccttcttttcaaagtgttaacccccaaagcagtgctaaaacacacagccccacgttgcttgccagcactgattgcatatacaatacaaatgaggaaaagtgaggcatgcttatgacatgtgcttggtttgcaacacagcctattaataaaatttgtttgaagaaacacaattgttaattgacacatagaaatattttggatttatacataagggagggtgtaactgaaaggagctatccagttggaaagattaaaggtataagcctggcttgggcacaaagatccccattttagaaccgagcaaactgggaaacacatagtcagatttcttaaaggcagtagcttactgatgcccgccccccgcccatcctcatcacctggcggtgaggaacaaaacctcagaggcccgcaggagtcctcttccatgctcccttttctctctgctttgctttgcatctctgttaaaaaacatcttaccttattgggataaagtggtatctggagaactaactgcgtgactttggcaaaccatttcatgtctctgggccagatatgatggtgcaccaatgtccttcacctcaaatattctataggtgtatggatttgtgggctcagaataacttgttggaaaagctggaaaaccacaactaagtgctcatagaactagaaaattaaccagatgagtaaatgcctcactttctttgagcctctttccatattgaaatagtcaagggagaaaagagtcctaagtttttttttttgttttttttttgagcttaatagatattctaacacaatgctattgtgttagacaatgcttaagcattgggtatattttaaatcagatagcttaaatgtaccctctgttcagagaagtcattccataaacatgtattgatcatcaaaaatgtatcaaacattcattgtttaaaggactttgatacctaatgtaaaattgttcgtagttaccctcccatccctcaccttccttttttgtttttctctgtactactcctttcttctagctcaatacacagtttgtggatttaaacgcgttcattgcctgtctcctctcaccacagtagagcttccataaactcagtgtcgtttgttactgtatctctagtgcaccttccctgatagctcagttggtacggaatccacctgcaatgcaggagaccccagttcaattcctgggttgggaagatccgctggagaagggataggctacccactccagtattcttgcacttcccttgtggctcagctggtggagaatccacctgcgctgtgggagacctgggttcgatccctgggttgggaacatccctggagaagagaaaggctacccactctagtattctggcctagggaattctatggactatatagttcatggggttgcaaagagtcggacccaacggtatgaatttcactcactcagtgcacccgaagaacttagttggtgctcaataaatacctcatgaatgaatgaataaatatgttatctcagattttatgaccccccagcaagagttgagagtattttgcacttgaaattgaggctgagagaagtcagggaatttattcaagactagctagctattacagtaaggggtagagccacactccaagctcagaggatctgacttctcgtgcatctgtcttctatgacatccatctgcttttcctgccatttgcaatttctctgcacatgaatttcaccagttctacatggtttcagttggggcctattgttctat

SEQ ID NO: 49476 - DNA, 1348 bp, Bovine  19866880946296
  misc_feature (1)..(1): n is a, c, g, or t
nttctgggaataccctattcctaagcctttgtggcaggggaagcagaatccctggagtgaagaaaaataggataaaagatactgggcaggtgccaagtatggaatatcatgaggcagctgggtactgaggggcaagtgaattagaagacttgaaactgatctctgactccatcactgattcgctgtgagaatcctggcagagtatttgacttctctcgttttaggtttccttgtttgtgaaatgtgtggactaggcttggaacagtcatttgtaagcatctttaacttcaagattctcaatttgaacaaactgttgtacagaacacacaggaccttagcgaagccagctggagaggtgctggggggcaggggcatgcctggagccccacctgctctgctccaccttctgtcctcctgatggggctgcgtgaaactcctgcagctgctcagaacacagtctgagaaaccttgaggtatctgatctcctacgcctcttctagcctggaatttggggaagtctacgtagactgtgaaatcctctttaatctagtttttctcactttccctctatttatttttgggctaaaatcatgcatgttggctatgtgtgagagaccacttaggaaaaataatcatttattcaaatatccagccaatttactttggcctatttggagcttgtttttcctgatggggagggaataaatttccaaagcccacttttaagatcagcctagaaaaggtgagtgtacaagtgaggaaaaataggcagtggaagctgccaagctgagctggaagcagtaaattcaaaccactcccatctcccccacacgtgtgccctgctgggcactcaaggccaagtgcacggtctggaacagatggcagaggaggatgatgtagattttggcttcaccacttgtgaaaacttactttggggagacaccttcacctctaatctgagtgtgtttgattgaaatagagcattgggcaagaggaagggaatggccagggacgtggccttcctgcagccagcaggcaagggggaggagggcatccttggtccagcggcaccaggagtgagaaattcgtgctgcggtgatttcaaaggaagtcagagcctttgtgttcctttttcttgcgactgtttagaaaacaatcatagagtggctaggagacgtcagccagccctttggggaacagatatggataagcagtagtctctagtctcctctcttaaaatcaagagaggagacaggcaaaccagtgcaggacactgtatgggaagctgatacccagctgttccgcacaagctgcttgcagcttggtgtctctaatctgatagatctgt

SEQ ID NO: 49477 - DNA, 1861 bp, Bovine  19866880985462
  misc_feature (1)..(1): n is a, c, g, or t
ntggaaggtggtatagcaggatgggccctgggcagcaactccagaagcagctcggaattgcctcctctgaggctctgtcctgaaaattcagccttgcctctcaggttcagaaaacctatgggaagtaaagggtttgtatgtgacactcctaaagcagtgcttgtcagcgatgcctctttctggagggtatctgtgaatgactcatatttcatccgtcaggtgcgctctggcccatccatctctcagtctctccctctgttgccagataattagttggtattcaataatgctgcctttgttaaatgcctgctgaatgaggtaaggttctaggatgaaagccaatgcctctacacacacatatgcacacacacagcatgtcttctcagccatgagggtcattatttctttattttttaaaaaactacagcaacaagattgtgtaagaaaaggttgctttcctctttgcagcatctgccgtgctgccccatgtcagcacaaccagtgtcgtccctgctgcctgcccatgctcccaccagggctcccctgggctttccttctcctcacgtgtgacagcaagagccaggatttgccactgggcagtgctagctctgccactgattagataattgatatgagacaagaatgtagatccagtcaaggagggtagattcccccatgtaatgggagatgagattacagaattcactagggttctcagcaccaccttcaggagcaaaaatctgaaggtgagacttagaggagggacctgagggaagagtgttttgggtacagggctcagctggagcgaaggtcctgagacaggagtgtgccaggtgagtctgaggaataagaaggaagctggagtggtcagaggagagtgagcaatgtggggagaagttagagaggtgatcgagaggtgatggcagggtggcattatcaggacattgctttactttagtgacaggggagccactgcaggattttaagcagagaaaaggttaggtgatctgacctgggttctaggtgaatgacccaggatgctgtacagagagccgtctgtagggggcagaattagggagcgaggtggtaggctgggccaggctggcagcggtgaagggggaaaggtggttgaatactgtatgttttgaaggtagaggactgacgtgatatcttgatagattggctatggggtgtgagagagaggggggatgtcttcaaagcttttggcctgagcagctaggagaatgtgactgccatctgcagagctgcagctgttttgtaacagttaaattggatgcccatcccatggagggtggcatgtagcagtcacccacgaagtgtcccttcctctccaacagcctctaggtcgctctactccttcctcctcacattgcctcccagtgggctaatggcagcatctttaagcttcagtctcctcatctgtaacttgggatcagcagagccgggaatgtacggaggattatgtaagaggaagcattttgcaagggctcaacgcagagtaagcactcagcaaatgttggcttttactaaacagaaagaaaaacctagccagctgttgggcacttgagcagaagtgattctgtctggccttcccacctcccagacctgcagtttcactggggccccgatgaagcttctcaaacactggcctgatcacagcacccagcctctcacatgcagtggctcacagttgcacccatgagcaaggtcaggcttttaagcagtgtctgtaggcctgttgcactccactttcacctcctcaacagctgttctccaacaacttatgctcagttcaccagcctacttgttcagcttcccaacctctgtgcacatattcagg

SEQ ID NO: 49478 - DNA, 1441 bp, Bovine  19866881048325
  misc_feature (1)..(1): n is a, c, g, or t
ntgtcttggacctagtctttgcttgcttgtgtattactgtggaacttagattttggaacatggaaaggcacctttgagctctttcaataaaatgaagatgactgcaaaaggctgtgagaatcagatgagatcattaacactgaggtggacatgtgtaattcactctagctcccttgtatctaaagctctatctacgtcagaaactctccacttagtaagtcttggttgaggataaagactttcttccattagaaatacccaaaatgccacatactcatcttcccagactccttagcagccaccagtcagatgattcacagtacactctgtcttgggagtcagtgacacaacagccaaggctgggtagcacacttactctctctctctttcatggccacggcaataacaatgaaacaagataaaattttcagcagagaaacagcaatggtgcaaactgtaggtgttgtgtgtggagagggacagcagcaggggcttcttcattagaataatgctcatgattttggacattgtttctggcagcttaacctcaagcctcattcttcagctatcctgacaactctgaattactcaaaatccaatgaataaagtcattttctggttaaattagccaggaacattttctattgcttgtaattaggaacattgtctgccacatatgcataactgtaaaacaccatatgaacacaagggacaccacagatgcttttgttcctctccagcagccagtcttccctctcccttgctcacaggtggacctttgacccagtttcagcagagatgttacaaaggatgggcttcttgagacttctgagaaagagttctccttcctttctaataagagaaaggtatataaagagaaacttctgccactcccctcagcctttctgccccagctttctccttgggatactctcatgtaagaatgagtagcttggagatctagcaacccttttctgaccacgcggagagatgctgcctgcataggggattaatagagttcaagaatgtaaagagccttggtccttaatgacacaactgaatttccaaaacaagcttagtttgcctacttccagactctctgttaatgaaaagtaatcatgatttaagatgctgaaaataagagtctattacttgcagccaaacataccctgaataggtacaaaatatttgattatcattatagcagctgtgagaggctaggttgatgggtttgagttttcaggatctcaactatctgactctatttccagttaaaatattaccccaaattgataaggtgtaatactgaccaccagtattatccctgatgacatctgatagtttaagtccaaagcaaacatttggatagttcagtttaagtatctggctttaaaaaataccaatgcctgggtcccagccccaaagattctggtgtaatggg

SEQ ID NO: 49479 - DNA, 775 bp, Bovine  19866881705035
  misc_feature (1)..(1): n is a, c, g, or t
ngagacagaaatgaatgactcttgccaaatctgactaccccttgagcttgtctcgttctttagaaaattgttttcctctgaatgcttctcagttatgtccatgacttttcagaaacaatatatttttaaatcagttctcccctaggtaagtgaaaacaatgttctgctggtgggatcatctcagcaaattgcagtgggaatacagctctgaaaacaatctggttttgtccctctaggttgccaaatcctgggtctggtggcagtggtgataggccttgcagacctccaaccagggagagaaaattgactaaggccccagctgggacactgtgaagcccaacagcacatttatgattggggatacgcttgccacactgctctcagccaacggctgagtgggcagggatgctaaggcaggctattcctgggagaaccagggaccctctgacaacttcaggactccttgactgtcttgagtcctgcgatgcttctattcaatcttttctttttctctcttccacttagcatcagatttcaatcaggtctgaaaactttttctagctcgctccccattttctctcacaaaggcggttaccctaagaaaacctctgcctgtttaatcctgtcttggcatctgcttcttggaggaccaggactaaaaacatactgtttaattttaaaggtaggttatgttaccttaaggaaatattaatacatcgtcacagagtcaagagctgcagctctaaattagtcttctgctgcaaaaagatgtatt

SEQ ID NO: 49480 - DNA, 3359 bp, Bovine  19866880340538
  misc_feature (1)..(1): n is a, c, g, or t
ncacctcacaccagtcagaatggccctcatcaaaaagtctacaaacaataaatgctggagagggtgtggagagaagggaacacttttgcactgttggtgggaatgtaaattgatatacagctactatggaagatggtatggagattcctttaaaaactaggaataaaatcaccatatgacccagcaatcccactcctaggcatacaccttaaggaaaccaaaactgaaaaagacatgtatcccattgttcattgtagcactatttacaatactagaacatggaagcaacctagatgtccattgacagatgaatggataaagaagttgtggtacatatacacaatggaatattactcagccataaaaaggaactcatttgattcagttctgatgaggtggatgaacctagaacctattatacaaagtgaagtgagtcagaaagaaaaagataaatatcatattctaacacatatatacagaatctagaaaaatggtactgaagaatttatttatagggcagcaatggagaaacagacatagagaatagacttatggacatggggagagaggaggagagggtgagatgtatggaaagagtaacatggaaacttacattaccatatgtaaaatagccaacaggaatttgctgtatggctcaggaaactcaaacaggggctctgtatcaacctagaggggttgcatggggagggagatgggagggaggttcaaaagggggggaatatatgtatacctatggctgattcatgttgaggtttgacagaaaacaacaaaattctataaagcaattatccctcaataaaaaataaatacattttttaaaaaatcagttgttttcaatacattagcaatgaacaatccaaagatgaaaataagaaaacaacttaatttgccaaagcaccaataattacaaaacacatagaaatatatttaacaaaagaaatccaaaacttcactctggaaactataaaatattgtttggagaaattaaagggaaaaataaatggaaatcatctcatgttcatggatttggaagatgtaatgttgttaaaatgacaatacccccaaattaatctgcagactcaatacaatccctaccaaaatctcagcagcttccttttttaaaaaagaaattgactagctgattctgaagttcaaatggagatttagggacccagaatagtcaaaatagtcttgaaaataaatattcaaaaattattataaagcagtggaaatcaagacagtttggtgctatctacagataaatcatcataatagaattgagagtctataaataaacccatgtacctatgatcaattgattttccacaaagataccaaatcaatggagcaaagaatactctttcaccaaatggtgccaggaaaactgtatggccacatgaagaagaatgaatttgagtccttaccttacatcgtacgtatagggtaactcacagtgatggaattatacccttgcttttgaccaaggaggtcctgatttctttggcaatgaggcagctattgacctcctgaaaggagtgtcaggctttggctgtttaaaagactgggaagaaagagcccccacttttcctgctgtcctgcctttgacatgatatctacaatatcccaggactgactctgaccaccctaagttttagaatgtcacacttaatgctgagacagtaagctgagatactccatggtaaactgatgtgatcggcttcctgtctgagttcacataatcacaaccttctattactaagacccctgtcctactctcaacacattatatcctcaaaccacagttgcattaagagattaggtgcacatggcttaatattctcactacttccactggacatttgacagcatcccctaggtaactctggatgttttataccaactgtacccatcaacggttacctaagtcataacctcaattgtgactatagcttcaaattcttggtagcattagaacaacctattcacaattaaaaagactattgatctagaggagcttggactttcagaagagaccaggaaggtacagtcaggtggtaggcagatgttatgtggtaggcagatgttacaggataagcagatgttatgcggtaggcagatgttatatgaatatgagcaacctgcagaggagttggcacactctgatttcctctctcttccctggacctaccttgtcactgaagatggcagagttcttacccctgacttaggccacagaaccgctgctttctgcactttactctgggatgtggtgggagaccatcaaccctcattgcttttggctcagccctgactcatcatctcactggttcataatgtagtcatgctcccaagtaagaaaagctgttactgactcaggaatgcggaactgagctgaacgatcgctgagtagatcagagcagaaatgaaagtacccctcctaatttcaccttctctcatcaacatacaaagcccttctcttaaccctatctattctttgagactacatggtccccacttttataggaaatgtagtagggattaccatatatgtaaatatcagagagagatcattaagtggaatttctttattgttaggttattttagcaaaaaatctagggatgataaaacattgagaaactgtgaagcaaagctgactagtcagaaggaagcttgtacaactgttacaacaagttcattgtgaaccattaaaatagaattgctagggatgggaagtggggttgaaggaatgtcagggggctggaagaaagtgatcataaacaatagagatctttatgcccaccctgctaggtttccaagcttggctaaaactaaccttcctactatagtgttgatatagaagtaaagaatattcaaactagaagatcttttagaaagtacccagtctagaatgtatgtggatagttttgaaagccccatttagctctaaaaataatctgtttttgtttgtttgtttagttcagaatcatttttaaaaagaaatgtaacttgaagctcaataattaacaaagaccacttcagttcagttcagttcagtcactcagtcatgtctgactctttgcaaccccatgaatcgcagcacgccaggcctccctgtccatcaccatctcccagagttcactcagactcacgtccatcgagtcagtgattccatccaaccatctcatcctctgtcatccccttttcctcctgcccccaatccctcccaggatcaaagtcttttccaatgagtcaactcttcgcatgaggtggccaaagtactggagtttcagctttagcatcattccttccaaagaaatcccagggcgatctccttcag

SEQ ID NO: 49481 - DNA, 1108 bp, Bovine  19866880456391
  misc_feature (1)..(1): n is a, c, g, or t
ntcacctccactgtggcctccaggccctcaccaccctcctgaaaccaccgggggttcccctggctccttcttccagaaataggaaaccaagtcattacccacccaccaggtctttagttacctgcttcacagtttcctctgtgatttgcatggccctttgtcccctagttcagagaacacagcagcagtgtacaactgctgccaacctaacacacacctcaactgtacaacttcacacaccccacctaacacaccctcaaaaacccctctcccctggggcagcctctgcatttgcctacatacattccagaatcgtgacttgctcacacccactccaggcccagccaaaagactcctgggaacctttctactgccctgacaagccctcgctccctgctagagaagggtcctgtgtgttcactgcccaaggtaattcagctcccactgtagagaaataaaagccgactggtcagctatggtgtctctatatcacaggaaggaagtgagctgtcagaccaggtagttctgggctttccaggggccctccatgcaaccacatagcacacaggtaatgctcatctaggtgacccactcccgtggacaggctggggcaggagcacaggtaagactggccacaagcaagtcctggcgcatcagctgggacctgccatccagggtgctgtgactcaggttggaacgccctcttcaggcaaacataatgagctgcccttggttggggcctttcgtgcccacccacaccaggcgttccgcaaggctcatctccctcttttggctaccttctccgtgccccttcaccccaccctgacctgatctccccattcacccccaccttctctttgcttcttttccttcccagggtcacagcctctaaccctcctggaacatagacttaaaggagggcaccctaagaaggcaaactccagccccacggagctggacttggggccctggccaggaagctggaaggcacatagcccctctgtccgtttacttccacgaggctccatttctgggttcccctttcttgtcctgggcctccagcacagtcacccgctggcctgcctgcagactcacttcatggctgctt

SEQ ID NO: 49482 - DNA, 1972 bp, Bovine  19866880572721
  misc_feature (1)..(1): n is a, c, g, or t
ntctcctcccaagttcaatctttcccagcatcagggtcttttccagtgagtcagttcttctcatcaggtggccaaagtattggagtgtcagcttcaggatcagttcttccaatgaatattcaggactgatttcctttaggatggactggttggatctccttgcagtccaagggactctcaagagtccaacaccacagttcaaaagcatcaattctttggcacttagatttctttatagtccaactctcacatccatacatgactactggaaaaaccatagctttggctagatggacctttgtcagcaaagtaatgtctctgctttttaatatgctgtctagtttggtcataacttttcttccaaggagcaagtgtcttttaatttcatggctgcagtcaccatttgcagtgatttttggagccttccaaaataaagtctgtcattttttccactgtttccccatctatttgccatgaagtgatgggactggatgccatgatcttagttttctgaatgttgagctttaagccaaccttttcactctcctctttcactttcatcaagaggctctttagttctttttcggtttttgccataaggatggtatcatctgcatatctgaggttattgttatttctcccagcagtcttgattccagcttgtggttcatccagttcagcatttctcatgatgtacactgcatgtaagttaaataagcagagtgacaatatacagccttgacgtattcttttcctgatttggaaccaatctgttgttccatgtccagttctaactgctgcttcttgacctgcatacagatttctcaggaggcaggtcaggtggtctggtattcccatctcttgaagaattttccacagttatgatccatacagtcaaaggttttggcgtagtcaataccacagatatagatgtttttcagaactctcttgctttttcgatgatccaacagatgatggcaatttgaatctggttcctctgccttttctaaatccagcttgaaaacatctggaatttctcagttcatgtactattgaagcctggcttggataattttgaacattactttgctagcgtgtgagatgagtgcaattgtgtcgtagtttgggcattctttagcattgcctttctttggggttggatagctttaaaaaagtcacctttcttagagctgtagtctttggccattaaatgggaggtagggatagatgacatctaagggccttcctattctgaactgaacaagcctgtagtgggaaggaagcacattgagggccattgaggagatgagttcctgctctgaagagctaccaaagagttggcaagcaaaaactgtcactaccccacaaagcaacttggctatgtttgtttggtttctttttggcatatttcaccattgagattcctgctattctgagtaggaggtgtactattacttactgaatacttttttttgatgctgacttatttctaaaactcaaatacatttatttttaaagaaaattttgtattattgtcactactgcacatggaaaaccagtgtcaccagccataaatagaaggtaaccatgaacacagagcaatgttaataaattctagctagactttgttgccttccaagttctaagcctgaagtctgctttcattttactgaaaagtaagattagcaagttccagggagaacttaatggtgttctaacattcagtaggaccttctccatattttaaaagatcaaaagaaaattgaaaagggtaaaaataattcctacactgttattaagtgtagtgttactgaagtgtttaaaataattccttattatacctttggtgtctcagccctaggccacactaatggaacacacagctgtcgtgcaaagaacctggcctttggagccatgtggacctggattccagtcctgattctgcccttaacagagtgctgcaggtaatata

SEQ ID NO: 49483 - DNA, 1025 bp, Bovine  19866880579315
  misc_feature (1)..(1): n is a, c, g, or t
ntttcagttacttgatcacttaactaaatgggaaacattccctttaatggctattttggaatcagtttgtctaagagagtcaccatattggagaaatgcagccctagcttccttcctctgccttctttggatcatgtaaacagtagctgcagaatgggaaaaaggaaatgtcatatttatgtgatggctaaagcctgagattggatcctctagagtaacaacatcattcagaaacccccaagaactccctggtgcttctgctgtcaaatccctgctcatacttagaaagtccctaggggatcatcaagttccttccccctgccatgggtggggagcctgaagctcagcagagggaagctgcttgccaaatgacacagtcaacttgtgacagagctgggatttgaaacctgttggcaggaaatctttcgtaattatgtgaaatcagtttatctttatatcaggttcttggtttgtgctttttatgtatccattggctctcagttcctatcccaccttcttatccctgctctgtgatgctggggctaggagtctgcaaactacattgcctggataccttgttgggtatcttgatgttttcctctgacagcagtggacagtcatggctgtatctccagcaacctttgctgccgctactgctgctaagtcgcttcagtcgtgtccgactctgtgcgaccccatagagggcagcccaccaggctctgctgcccctgggattctccaggcaagaacactggagtgggttgccatttccttctccagtgcatgaaagtgaaaagtgaaagtgaagtcactcagtcgtgtctgactcttagcgaccccatggactgcagcccaccaggctcctccatccatgggattttccaggcaagagtactggagtggggtgccactgccttctccagcaaccttcagcacgtcctgtatctatcacccctggtgttctccaaatcagaggtccaagctacagccacagagattaagccatgcctgacaccctcctctaa

SEQ ID NO: 49484 - DNA, 995 bp, Bovine  19866880589334
  misc_feature (1)..(1): n is a, c, g, or t
naatttgtgagtaaagctctttcccaaatgctaccaaggaagtttaaaactgctagagctaaacaacatactggaaagggaggggtgactgcccctcagaagttagaacaggagcacaacagttgaacacagcaggagacaaattgcagtgtccggttcctcctggctcttccttgctccctgtcattccttagtccacgcttctctctctgatagtactgctgggggtaacccgggttccaattccctttctgcggtcatctagttttctacaggattgcaaaatcttccaacttttctggcttcaattccttccttagttgtcaagaagattggacaaaatgatttaaagtatctctcccatcaaaaactgcttctgtctctgtgtgttcttttctgtgcctctctctttccctccaccttttcttttctcctctaactggtcccacttttaaactagactgtgctgcctgttatcagatttattagtctctcttaaaagcagataatggcatgattcttctttcataaataacacaacctaagtcaaatgttctctctactgatgtggcaccggcacacattttttttcctctcctgagggtcacttgattttgtgggtaaaagtgttcccacattctaactgagtcatctttaaagcaatctttaaaagatattatagaagcacctatgtaatgctggggtataattaaaagagtgacagaactggcatggagatagtataacaactgtgaataactggctagaggtgtaataaaaacagtggagcttctgtcttaacagtgaaacatcaagcagagaatcaactggttcagcaatgagctttccgtagcccagggccccagaaaacaatcgagtgaggcagctggcatgagccgcccagctcccaaagtacccatagtgtgttaacaggtattcgctaaagacgcaggaggagactcaagtgaggatccaggcatttcacaggtagaaag

SEQ ID NO: 49485 - DNA, 904 bp, Bovine  19866880621002
  misc_feature (1)..(1): n is a, c, g, or t
naaatcaggctttgggggaggtaaaaaggcacctaatttctttccctcaatagcaaccacccattacttagctaaatatttatttgtgtgtgtgtgtgtgtgtgtgtgtgtgtgtgtctacatatgtgtatatgtgtatttgggcttccctggtggctcagacattaaagaatcttcctgcaatgcagcagacccaggttttatccctgggtcgggaagatcctctggagaagggaatagctacccactctggtattcttgcctgggaaatcccatgaacagaggagcctagagggctacagtgaatggagacacaattgagtgactaacacttccactttttttcatatgtgtatttatgcatatataatggcctaagaataatgatggcgggtactagagtgcagatcaggaaaccaagaagagtcatcctgagtttctggcagatgataaggaagctgtgattgctgtccccaggccagggggtgtcagccttgagcagcttccctggcgtgggcaggtacagcctgacaggtgtgcgttgcgggtaccctgggacaggcaggctctgcaggtgccagcagctgtggagaacagaggcaggcaccctctgggaacctcacagatggccctgccctggccacaatttccggaatcagcaggtcagtaaaacagtctgtcatcccaagacgatattgtaaaacctttgctgcaacggaaagtcctccagagcctccctctgccaggctcctcagcatgtactgtggtcagagtgaagctggcaacacagttcataccgctttctccagcaacatgttgtcaggacatgtgtcagaaccacatgctcttggccagacagactgctcttgcctggcagccagctgccacgctacagcgacagcag

SEQ ID NO: 49486 - DNA, 842 bp, Bovine  19866880636275
  misc_feature (1)..(1): n is a, c, g, or t
nttgctgttctgtgttttatgtaaatatgcctttcatagcagacccctggagaatttcctacatataatgagagtttcctctactatcccggatggcagttttgtttctgctttaatgtctccaagaacagggaactcattacctttcagacgactcttataattgttagaaagttctagccctcaaactgggtcaaaaatctgttgcccaaatgtgttcatgcactgggaccagatttgccctttggtttacaaagactgaatctgcttccctcttactcagcaagacttttggatatttgaagacgatgtttttattttataccagcattctccaaagtgtgctgagcggagtaagtttgcacagtgttaataggtgtcctctataaaacaaacatatcaaaacaaacagacaaaagcccataaatagcattctgtgggcatgctaggttaaatcaggtcaaccagatatgtttcctgcaaggctgctcagaatgtttactatgctgatgcagagtatggattccaaaatggaaatactgggcatgcaatatttcccaaactcttaacctcctgattttttttttttaatctcaaaatctttttttcccctcctagtatatacttttactattttccatatatgcttttagaaacactggaaaatgcttccctacacaggtcgagattcttactattgtctctgagctaaaaaccagtctccttcaactattcattttgagacagggtgttgggtttctttacattcttccctctggttctataacagggccgtcagtttaaaatacagggtgcccagttaaacgaatttcagataacta

SEQ ID NO: 49487 - DNA, 5877 bp, Bovine  19866880646805
  misc_feature (1)..(1): n is a, c, g, or t
nattcttgcctggaaaatctcatggacgggggtggggaggcagctacaacccatggggttgcaaagagttggacacaactgaagaagcaagggaagtacagtaatgaccctcagtactctctacccaccagctaataccagttataagaaccacactatcaaagggacaggaattggcatctggccagaggacagtaataggtcagtggggaaaaggggaaaaggagagggtctgtaacctgagacaggtggggaatggttcatggcttggatcccaaagatcccagagaagcaagtcttctccaactacaagattcgtaaccattctggaatgcatgtgcctcccagcaatgttgttgaaaggcttctgcatgggaggttagactcaacttcaacatccctcccttggggtctttatggtttgtgttgggggcaaaaccacatccatcttacatggcagtggactaggtcacttcatttccttcctgaagaagaatactctagagtagagagcattttaacaaccaatcaagctcctaagagaaaataagatgtaccagtatgtgcacaatattcctgactagaagatgcagtgctgactcaattcaccacctctatcctacccttccacaccaccaatcatccggttgccccaagaagctagaaagaaagggcagagcatcttacagtaaatctaagccgtctgtgatcagatggtgagacctgtagctagatcttgtatgtttccacatttcagaacaatagtgaaccaccagcatctggggtatttcagatgctcattaaaaatccatgttcctggggtatctcccagacctactgaatcaaaattattggggtaaggaccagaaagttcattttctgcaagtttctcaggtaactccttttcacattctctgagaaccatggttccagagcactgcttctcatgctttagtgtgcattagaatcacctggaaaacagggtaaagccagggctccttggccccagagactgtgcttcagatgtcttaggtagagccctgatattcacatttcatacaatctcatggatgacgctgatgttgctggtccagtcagtgggccatacttggagttcactgccttagaaaattcctgattctgtcatcaaagaactcagatactgtggtagccccaaatgactccccaccttctggaatccacatccttggtaaatccttcccttttgtgtgggctggacctagtgattcacatatattttgaataaaattcacatattttgaatacaatatgcaaaactagtcataactggtgactagttatgccaagacagtgactacccactatcacccttgctcttattcttctcacatgctcactgatgaagaggctgccatgctatgaactgcccgatggcaagtcccacaaggcaagaacctgtgagcagcctctggccaatagcaagcaaggcactaactcctactaatagcaatgtgagtgagtttggaaacatatccttccctagatgagcctgagaagactataggtatggctgatgccttgatggaagacctgtgagctactctgagccagaggacccagagaagtcaagcttggattcctgccttctcacagaagctgtgaaacaatcagtgatccaagtcactagatgtgttatgcaatgatagataatagagatactttgtacatgagcaaccctggaatcgatatgaccccttggtatttaacccatccttcaagtctctcatctcatcttccgtattattaaggagacaaatgtgtgaataaacataaatgagcaatgtttaataatacacactatttacacgtgatttatgtcataatgttcttattgctcaatttttaagctatgaccctggggaggcttcccctgggttttagggaggttgtgggggagcagagcttcagggcaggatggggatggtgcatccacatcagacctcaccctctgtgcactccacctggccattctgaggctgtgtcttttgcactaagagcatggtgaattctcacccgccagtccttgtgacaggaggagtagcacctccattggctgaagaaagagaagaaagaaatgactagtttcgctgctggcaaggggaggggtctttccctgagaaaagtcagtaaagggaacaaaatccgatctgcttgccttctctccagtgcagtgcctgacttcttcactgagggaaggggacagcttttctaggggcaaaagttctcattttctctagaactgtgtgtctagaaagtacatttcaggggctgcatgtgtggaagggccacagtctactgaaaaggctctagacacaaagccaggaccctaatccctgctccaccatccattccttgtgtgactgagttgagcccattccctctggactgtgctcttcccattctgagatgagacgatgggccaggacatggcttgaactccccagattagtgtctaagaggctaagaagagaggtagcttctgaccatggcaactggttggagatgggacagctgtcctcagagggccaggcccccaccactcagccagcgtgccctctctgaggagcgcccagaaggacagctatgccacagggggctctggcagatgttgtccagcctggtcctaatgatgtcctgcagctcctcgtcaccaagcaggaccgctgctgccagggccagccagaagtactcggtggcatcgtgcgcatcctaacccccagcatgagggcagaaaagagacagtattagcagacatttccaggacaggcttggaggcaatgccgggaaatctaagaaaactagcttttgcctgtttgacatcctttcccacccctttctcctggttccttgggggagttccctcaccaagtccatggcagttctgtggcattgctaacctcggtggccctcctccccaggcacagagatggcattttacccagacacagacaatcataaagcagcatcatcctgggcacagaactttaggtatatgaatatgactcaagctgacttgtcccaagtcactccctgggacttttcaagtgtgacctaagagagaaaatggtccctcacccttttagatgggggcttgaagttgccaataatagaaggaaaaaaggccaagtaatagagagaagtagaaacattctacggagaaggcaatggcaccccactccagtactcttgcctggaaaatcccatggacggaggagcctggtaggctgcagtccatagggtcgctaagagttggacacgactgagcgacttcactttgaactttcactttcatgcattggagaaggaaatggcaacccactccagtgttcttgcctggagaatcccatggacagaggagcctggtgggctgccgtctatggggtcgcacagagtcagacacgactgaagccacttagcagcagcagcagcagaaacattctaagccaagaagtacagagagaggtccccacgtctctctcagatccatgatggcatctgactaccagcttccagaactacctgaaattaaacttatacctgaacttcccagttccttgagccaataaatctccttatttgcttaagctagtttgagttgagctctttcccttgcaatgcctagagtccttggttgatggaatcaaatcatacacattttgtcccacttcctgggagctgtggatcaaaggcaagatcactgaggggagtccttcactaccccatccttcctccctccatggttgggatgcagaacatatggttcttccggtgagactcaaaaagatatgtctggttctcattaaccctcgtaagtcaataataaattcagaccagaaacactctggcaaataagaaaaagacagcagagctgccctaagggtctgcaaacagaagccactgtttctgtgtgaagagagtaagggttgtgctgaagcagacagagacatctggtaagggaagccagtgcctagggacaaagttcaagggccagaatgcaactgagaattatagaccacacacacagttctattaatagaagtcactggaaaaataagaagttctggattcaactccagcagagcaaacaggagatcagggctaagatcttctcaggacctaggcatgcttacactctaagaccctgcatgttattatctcaaacgtgccaacatgtacctagatttcatctaaaatatcatttataaaacctcataagaagtgagtttcaactgagtagttcatctataacattttttagacatacagttaggaattaattttaattttgaagcttatagttcttttgtttgggggtctcgtgtattgtttaggtctcatatattttcacaggtcctgtggaggagatcacaggcactagaacatgtgcccatagtatctgataaatgaaatgggcccagaaatcccagcggggcaaagaaagagaggaacatgtctcctcagcagagatgggagcctctttgaggtctccaaggggggcttaagtggagactgtcattgtgttcccagaggagccactccccaccctatgagacaacactccccaatttacttctctctactttaccatgaaggctcagggtaagggaagaatataactggacagcagctctcagacagcctcacaagcctggttcttaccttcagttggtagaaggtgagtcggcccagacgataatacaccttggcatagtataaggcctccttggggctctgcaggcagggtggacagagggacagagtcttcaggtagcagtcctcagccatctcatacatgtgcagggaatagtacacagtggccagacggtggaaggccaccagctcctgccgctgatctcctagaaattgaaagactgagagagatatcctacagccaacaccttgcatcattagttcacttattcattctgtacagtttagagaccctttcacttttaactcatgctttagaatcttggggtctaatgggtctatgactggttttgtctttggtgtatttactgtttcaataactaattcttttagcacaaaacagacttttaaagagaacaaaggcttccaattgtattttttggaatatttacaaggtggctgtttgatgcaatctaaaaacatcacttttaagcttcaaagagccaaaagccaaagctaaaagagaaaaatccaactgtctgatatggaaatatccagtcatgcggaatagcatgaaagggtgaatatatcctcctttcagcttccgttcaaggaaggataagaatgctccagagggagctgcctgggctctcaaggccttcctaagaccagcagacagttgcacaaataaggttttctgcagtaaaggaagagttaggaaaagaaaagagactctgaagtgcaattaaacacaataaagttcagtaccatccacatctcatgcccttgagaatgcccagaagtcccttctagaatcatcacagaagactccatttgcccttacatctaatcaagcatcctttaataaaacctgcttttcctcaagcatcaatatttgagatgagtttatctttttatattctgcattttttttctattttaatgacttacattgtttctcattagcttctgttgtaaatgcaagctatttcagctactgagtgagttatgagaatctgactttcatttatatttcaataccataggaaaatatgcacttgattaataatcaactaattaaaaaggttaaggcacagtgcttttgtaataaggccattagtgcataggataggataggataaaataccatttaccctggactcagaataataccaccgatactaa

SEQ ID NO: 49488 - DNA, 1077 bp, Bovine  19866880713195
  misc_feature (1)..(1): n is a, c, g, or t
natggggggaaaaaaaaaaaaagaacccttcttctactctgtggtcccagttgattgctagaatctgcatttacccagtaaggaagttagtaatcagaaactagccctcatctgcatttccgtttcctccactcccctgtgttcagtctgggtccacatctggtcattcctacctcccaaatgtgacccaaactcttccttcctcagctgccatcactgcccagtgtccccagcaccagccatggcagccactggagtaaatggttgggggaggggtgggttgagctcaagttcagtcgcaggcgtcagagccatgtgggctgctggacagtgtgattccaggctgcaaggggcaggaggggtcatagtgctgctctgcagaaccctgattaggctgtgtctgagcattgtatccagggtggagcatgcccagcaatggtggagggacttgaaacaccctgaggagagggccctgaaggagcagcggggatcctccagagtcagccccacacattggttctgtgtcccccagagagtatagatgatcccttggtgatttcacatgatgctactggattgtggcctgcaatccagaagtgttagccttctttctgagtgcctcgccagccagacaagaggtccagacaggctccactttgccgtcctattgctccctgtgctgtggttactgctgtgtgctcgtgccacagccccaccccccttctctggcagaattccactctctactgcctgtatcatttcaaaagctttttcctcggatctgcttgattttgtgcaaggcacaggtctttctccatgggctgttatctcttgccctcacccgcaccagcagggccaatgaaaggactgccttgcaatggtctaatgacacagttgatctattttaagcacctgaagcacactccaccaagtgccaatcttcccgcagcaagctgctctcagcgtgcggggccagggccagctcgaggtctgctgctgctttttgaaatctggggaagcagcccagggatccagaccctgcccgtccaaggacgatctaaagcaaccgtaaaatta

SEQ ID NO: 49489 - DNA, 1946 bp, Bovine  19866880742383
  misc_feature (1)..(1): n is a, c, g, or t
nggtgtaaacttgtctaaataactcaatttccctttgatatcaggcataagagagtaccatcacaaattgtttgagatcagcctttctgccaacctcaaggcttctggggaaaatcataaagtatgatcccttcctttctgctttttttgtaaccataaagtagaggtcatggccagaacatctatctaagcatcaaagcactctcatcaggctcaagagaaaggcattagtttttaccaatggcaaaaggtggtgtgactctcttggcaagaatggtcctatgttctgtaacatttaatgtatctcaattgtggatgtatgtatgtcagtggatgaaaatttaagggtttatttctcactgacaagtgaagagattgtgctttcattctctgtaagttcctttctggtgctaacatttaagaaatcagtatccctctaccaaagaaggcctattatggtaacagaggcactaagatagtaataatcccctgagtgactcatggaattcccagtggcccagtgtgaattgacattttaatggtgcagagtttgggcatcttaaaatgtcagttctggaatagcatcggtcatcatcattcactatgggtgcattgaggagtctgggacctgaaggttatggatatccattcactggttcctttaacagaagtttgttgtgcctgtgctatgtgccaagcactgtactagaccctagggtacagaaaccaataaaacagatgaggtatctttactcaaatatgctagtggggcaggaggtgtgataacaaggaaactaaaacacaagcaagataattacagtttgtaataactgtttgaaagttagtaaaaatatatcatggattcattcattttatttaatggctattgaataatttgggatgggggagtgactctttgcagaagcagcaagtaaggtagaatctgaaacttgagaagaaagcagctgtagaaaccaggaggtaaaaaagctgtaggcagaaggaatagtgtgtgcaaaggccctgaggcaggaaagactcaggagaaggctttaaggagcggaaaggggaccagtatggctggaaggtaataagggaaaagtaatatgaggagtgtctgggaccatgttggtctcatgggcccttgtaaggcccttgtaatggcatcaccgactcgatggacattagtttgagtaagctccaggagctggtgatggacagagaagcctggcatgctacagtcccatggggtcacaaagagtcagacacgactgagtgactgaactgaaggctcttaagcgagtaagcaacttgatctccaatttctgtttcttaaagacccctctgactgcaggaaggagaatgtattgtaaaaggcaaaatgaggccatttaaacagcccagatcaaaaataaataaataaataaatttatagacaaaactagtaaaaatggagatggaaagaagtggaaggatttggagtatgtctaaacatagatcctgttaagacttgctgatggcctggatatggaaactaagatcagaggacccaaaggaaatgtctaggcttttcagcaactgggtgaattgatgttctcttattgatgtagtaaaggaacattagaggtggttgggactagagagacctatttactgcaaaaggaaatggagctctaggttggagagtgtataggtatatggatggcacaagaattggaatattagcaaatgtcatctatgccttaagagaaagtgagaccttgaattactttatagcagtgatagtcaatgggtgtgatttttgcctctaagggacatttgcaatgcctggaaagacttatggttttcataatttggattgggggagcagcagattgaggtccttctggcatttaatgggtagaggtcatggatgctgctaaacacgtttcaaagcacaagacagc

SEQ ID NO: 49490 - DNA, 2150 bp, Bovine  19866880754719
  misc_feature (1)..(1): n is a, c, g, or t
nttaaaagatgcttactccttggaaggaaagttatgaccaaccttagatggtatattgaaaagcagggatattactttgccaacaaaggtccgtctagtcaaggctatggtttttcctgtggtcacgtatggatgtgagagttggactgtgaagaaagctgagcgccaaagaattgatgcttttgaactgtggtgttggagaagactcttgagagtcccttggactgcaaggagatccaaccagtccatcctaaagaagatcagtactggatgttcattggaaggactgatgctgaagctgaaactctagtactttggccacctcatgcgaagagctgactcactggaaaagaccctgatgctgggagggactgggggcaggaggagaaggggacgacagaggatgagatggttggatggcatcactgactcgatggacatgagtctgagtgaactccgggagttggtgatggacagggaggcctgacatgctgcgattcatggggtcgcaaagagtcggacacgactgagcgactgaactgactgactgactgatggttttatttttaggaaaaaaactgatttttgtatattgttattttattctgcaaacttactaaacttgtttattagttctaatagtttttatttttaaattagactccttatgattttctacttagaagtttatttcacctgagactatagttttatttcctatccaacctgaatgccttttattttattcgacttcactcatcacctgggggtgaaatagtccagtgttagctctgtatcctcaggtgccctctccccttctgctgtccctctcagtctgggctgtagcctccggccttgaaggcgagtgggctaatagctcaggtgagagcagggaggaagaggcggcagagaggacgcgggcgcctgggtccatccgctcctgggacgtgactgcccggcagaagcggggccggcatcgcctgttggcgcgcaccccgactattgcagctcagcggctcgggagcccaaagggggtgtggaccacagggcggcagggcgggggcagcgcgctgggcgccgggctctgctgggcagcgcgtccccgcccggcgtccacgagcggcgacccgccccgggacccacctctcggccagcgtcgggagccagaggcccctgcccgggcccctgagaccagttcatgaatcctggtcctcgtctggggtctcgaattctgaggcgagcaaagagaaattggagagctcgacacccatgatgcgggctcgccgggtggctgcgcggggggcgcggctgctcgctgctgccacctgctggacgcgccggcgcgtgtccaggccccgccccgcccgggcttctctctgggtcctgggctgtgaagagtaatggatgggatcctgtgtcctggggcgaacgagggggtgcttgagccctgcttccctccctcgatactcgggtctaagaactagacaatgacaggaaaatagaccctccatgagaggggctgtgaagaaaggattggctttgcaggaagccagtgttcacttccaactctgcttctgacgagctgggtgtagtctggtcttgagcaggtcgctgctggctttgcctcgtgtttctcaagtgtagaaggtgggggctggacaagtggataagagattatcggttcctccagccttctaactgtgttcctacctccccttcataccccttatcactgactcatttgttacaattatttatcatcattaactccatgaaagaatagaggggtctgctgactttacccctgtacctactttccttcctaaacttgtatcagtgaaggcctgtcccacagttggtgcttaatcagtatttgtttaatgaagcccccaggtcatcgtcaatatttcttccactctccatacttcaaggttctataaatgtcggttgcattattctttgccaaagcattaattaggacaactttatggtgttctagtcaagagcccccagttgggtgagctcagcttaatgaaacacacccagtgcttcccagcacctcacaactaacaaaatgctttcaaggatctttctgattttcatcctcccaactactctgtaaagcccacaaggcagggattacatctgaa

SEQ ID NO: 49491 - DNA, 760 bp, Bovine  19866880774781
  misc_feature (1)..(1): n is a, c, g, or t
ngggcaatttcatccctcaaggtaggggtatctggcagtgagtggagacatttctggttgtcacagctcagggaatgctcctggcatctcgtgggtagagaccagggctgctgctaaacatccgacaatgtggaggacagtcttccacagtggagaattctctggctgaaaatgttaaaagtatgaggttgagaaatcttgatttgtcctgaagtgactagagtcacagggagagggggcaaaaaaggacagcggttcaaaaggaggagggttcaaaccctgtttctagatcatgaggttttcaccagtgacatgttttccagcttttctccctataacccatgactttttcatttcccttggaatttcagggctatgtttgagcaactttttcacaagaacttccttatcctcaaaatgccaagccctgatgcactatgatctctactatgagaaaagacaaagataaaaatataagcagctgcaaaacaagtagaactggaaggtgggcagcagaggcacatggaagcacacaacagatgcccataactccagttctatgagtcagtgtttctgatgttacaacataggaataatactcgtaagaagagcaagatgagctatgctgggtgagcacacagtgaaagaactgatgtgagagcagcagcgttagaagagacgcaggtttgcagtggcagattcaaaggcaaacgaaagggttaagcaatcagtgcatgtcattccacattaagtcaccggg

SEQ ID NO: 49492 - DNA, 1408 bp, Bovine  19866880778926
  misc_feature (1)..(1): n is a, c, g, or t
natctactgccctgccttcctactcaccatcactgaacactagagaaaacctttcaaacaggaggaatgtaaatgagcagaaaagcagtatgggtagtgaaaatgactcactctttcttcctcataaggtcatcctgagattgcacgttggttggtaatcagtgcatgctcactgaatgtcttccgttactattatgaccaccattttcaatacagatgctgactgtgccagtccagaggcccaccgtaaccccctgcaccctcatctaacctccatatccctctccgggaggtaggctataatcttctctctcctttagtacctatacccagagaaacatcaaactcagtctgttaaatctacaaaatgtttttcaaatgtgtcctcccctttccattgctacagttagacccttggccccaaatggtcttctcttaccctgctctagttttcaaaatctttcttatccctcaagggcatctttaaatgctatcaccttcatgaagtgttccctgacagatccaccaacccttagctgaaagtgttgtttcctctccctccaaacctgccccggcagatgcctgccatctcgcccatgaacacttcatgcctttgcctgatatggctttgagctttgtaagaatggaaatcccatggggagaatttagttgaaaaaactattacatcaaacccacttaataaattcttcctagaagtcagtgccaggaacaaatttgctccaacagatacatttgtttatatttttttttttatcagacagtaagaacctcatatggtttttccctttttacctcagctaccaggaagcttagagctaaattacagtaaccacctccaggtgcatggaaacacttgtttatctatttctgttagctggtctttgttctattctttttcacaaaggctttgcaggagtagttgattgatagacgctaaataaatgtagcattatagcatgttctccttgacaaactgagcatcctgaaaaggggtaaacatcttatgcccacacaaatatgtatgtctctctgttctatgctagacaccaggtctacccacttggagtttacagtcactacattatgatcttctgaagctactgcagagtctttacaaatccccaaaagtttaggtctctgatctagaaggcccataactttaagaatctgcctccaaaactcaagactctttggaggcagcaggaattcttatactaacacggccattaccagtgtcagcatagcatagctggctcatcctagacttaacattttagaacaagaaggcaccttattcaatttaaccttataaatggggggaaccaagaagagaaatggcttatttaaggatacattgtaagctcatggcaggctcaaggtttcctga

SEQ ID NO: 49493 - DNA, 3924 bp, Bovine  19866880785091
  misc_feature (1)..(1): n is a, c, g, or t
ntcttcttccaatgatcctaggctgtaggtccctctgttcatctgcagcatcagcagagcaccctgcacgttttcttatgagtacttattagagtgccatcctattatctgtggaattctggggtcagtgttacgaggacaggcagcaggtgaatgcggttcaccagagcccagcccttagaccagaggggacactgagtacctatctgcttaatgaatgaatgaatacattacacatcaaaggggcctgtgaagtcatctaactcaacccttgtcctttctgccacatccctgcaaatgaggggcctctccgtgtttgaagcatctggggctgggaactcagactcaggcatgcagtttactccacccctggactcctcacatgatcagaaagctcttcatgtttgcagaccctttacagccatgtttccacattcctatggcttcttcctcctgtctgcctctttaccacacaccatcatctccacatcaacatcccactcaagacctactccaaataccactgtgatccaagctttcttcttgcactatacgatccctgtaactattatgaggctgcgggctccacaagggcagggcccacgttgtccttgtgccctgctgcatcctcaggacctagcacagagcctggcacaggacaggcacacatgagataccagatggatggaaacctgactgccaactttgcctgtctttagagactctttggggctttcctggcaactcagcagtaaagaatctgcctgcaatgcaggagacgtgggttcaatccttggatcaggaagatcccgtggaggagggcatggcaacccactctagtattcttgcctgaaggatttcatggacagaggagcctggcgggctacagtccatggggtcgcaaagagttggacatgacttagtgattgagcacgcatgcagaaaatctttagttaccaggccccggggaagaaaaggggttagtggctgcaaagtgatacatacgcagatgactcggttgggtgacccgatgctagagccagggggtgagatggaagtttcagacgtccgccgatgctgtgggagagaggaaggcagagggtgagaggctgtgcctgccgcttggtggggcggggagatggggtgtagttctttgggacacattagtaatactgctaaaagcactctctagctctttctgtactacctctttatagtctgccttttaaatcaatgtctgactgtgaatgaacgtggaaatgcacaggaccttacatggttggacagaatttgtttttcaagtatttttaactggcctgttagatagtagtaagagtcgctcagtcgtgtctgactctttgcgatcccatggactggagcccaccaggctcctctgtccatggaattctccaggcaagaataatctactcataaaaacttgtcattttggcttatcccagtcaataaggtgtttactttaagtggatagaactgcttagcctcattctttagcactttgtttatacaaaaaggaaaggtaggttaaatgtcgcatgatttgcacaatatgctgattctttttatagtgtacccactgcaaaatgacatcaacctaagtgagaaacttaaaaactctttctctgaacaatggcaatgatggattaacggctcccttaacagaaaggcactgtgttcatctttggtgtatttaagcgagtggtagcaagtgcggttaaatagtaaacaaattggaaatcaaggttcactggtaaactatgtgattttaggcatctcgaattcctgatctgtgaaatgagggggcttgtcttaaggactgctacactcccttcaggatctctcatcctacaagttaaagccactagggaagcccctaaagcattctaagttggactacatggcactggttcccaaacgtagatcatggactagtgtgtctctggggagatgaatttaggaaaaaatttgataatactgagtcatagagtgagagaaatgtaaaattctatttcaatcctcttggttagattaaggaagaaatcttaatttggtcctaatacatttcaataacaattgctaattctgttccccaactctctcccccactgttttttttagaaaaaagaaattacaggcaacatgattagctaaaatttctagagttattcttccaaaatatttcattttcaatgaatttattttagggttgccttctatttatagaaagcaatactgattttccactgggtgatacaaagtctcattttaaaataagtttgattaactaaaaaggagtaagtgagttcaacaaaaaaagaagtacatgattatataagtggtacacagatatagcaaaaagcatcaggtttgtagacaggtaacttaagtttgagaaatgccaacaaagagaaggaaattgtggaagaaaaggacaaatatgtcttcttacaccttaaaaaggagaggccttggaagaaattggggaaaaaactcaacagctcaaaaaaatttgcatcaataaaccagctctttcacaaatggaacagacgagatggcaaaggatatagtttaaccagctggtcagaaactgtacacacgcatttttagttgagattccagcaggtaactttcacagcgtcccaacagccgagttaataccgggggaccagggtggagagacactttaagaggtcatcgggggcccccaacacacaccgcagggctcctctccacagcatcaaggactaaggagctgtgccccacccctcctgcagtcctaggatcaagaacccagattcatgggccttcctggtacttgtcagcacacggtcattcagagggacacaggacctcagctgctccagcatgtgtctggggaggctggctgtgctcctgcctggctgcatgactgctggacagtcaccaccctctttaaggccctggttttctcacaagcaaagtaaagatacaattccttacccatctgccctgcggtattaaaacaaatcagagggtggctgtgaagacgccttgcaaactgtcaacttctgtgacaattttaatcactattattaatgaatgactttaggctggggaaaaaccatggcatctgtgcctcatagatgccaccatcctggtgagtaatgagaagggtgtagcctcgccccagaaacatgaaaaactcatattcatacagtgctttacagttttcaaagtgctctcacatccaaatgtcttaatcccttcaaaacctccatgaggtggatgttactgttaaggaaatccaaggagacaggcacacatttgaaagtgtgcacactaaggtgtgattctctagcaaagcgcagtgcctccaacctgggaccagaagtaactggtttggtattatcaccacctttgcttacctttaacttcttctctgcccgggctgcctgcttgcagatggggtgccagacctcagaacctaagggaccaggaaaataataatttcagacctttcacacccatcagaatcctgggtttttcctcatgcccacctccatttactcccctgtcagcacatgtgcctgacagcagccaggaggaccccttggttttcctggatctcagctgcaacgtcgctccaaccacccacactctctctgcctgtccacgccctgccctccccaaggtccacatctcatatgacatcctgtgaagcttcttacctgccagctgcgagtgacttggctctcctctgtgatccgtcattctctgtatcattcccagcacatatggccttaaaacatagtagcttgtggatttatcaccccaactaaattaagagatccttgtgggtgggagctgagcttacttcattactgggtttcccacagcatccagcatggggcttgctctcagcagagg

SEQ ID NO: 49494 - DNA, 2936 bp, Bovine  19866880808476
  misc_feature (1)..(1): n is a, c, g, or t
ntcagagctggcccaggattagtgacttttcctggttcagttcttttcccaaacatgatgcttctgctggtccaacctactaaaatgatctttcataagaccaaaatatgttgtaacagctcattttttttttagcaatctctatgcaagcaaatatttttaaagaaaactacataaacatgtaatgcattctcatagttcccaagtaaaagattaatatggaatggcatacaaatcctgtctccttcccttacccctgtttcatctatccatagcagtgctttttgttagtttcttgtgtattcttccagaaatattttgtgcataaataagcaatttaatgacatactctttccattttttaaacacaaattatagcatgctatatacttggcttttacactcaagttgttgtcttggaaaactttccatataaatatatagagagcatcctcattcatctttacagatgccaagttttccattgcacaacggggaccctaatttatatagctgggtctctaatgatgtcaattttgatggtttccagcattttgccattgtaaacaacactgcaacaacaacaaaaaaactttatataaatgtcatttcatggtttttgttattatatatataatattatatataatatataagataaattccacaaaaataaaatagaatcttaagggtatgtacatttgttgtttttatagatgttgtcaaattgcccccaataatagtctcctataaggtagactcttataatacttgagagtgcctttttctccatgtcttctccaacacagcctgttaccaaaatttgtatctttgcatatttgatagtactaataaagtatctcagtattttaaaactcaaactatagaaatgtaaacattaataactgaatctcccttcctcacttctgaatttcttttccaggatactttctatgatcattttgacaataagttctcattagctaacttttcttttttactcaaaatacatcattagttttattcaaaacatacagatctgcctcattcattcatacaacaattatttcctgagcatttatcatattttaggccctggagataaagccctaaacaagacagatacattccatgtctcaaggggcttgtattctggttgggaagacatgtgctgctgctgctaagtcgcttcagtcgtgtccgactctgtgtgaccccagagacggcagcccaccaggctcccctgtccctgggattctctgggctcccctgtctctgggattccccggagaaggtgccattgccttctccggggaagaacatgtagcaatggataaaccaaatagactattatgtaagagaatgttaagtcccttgaagaatacacagggtggcttggcagaggtgctaaggtggggatacagcctgaccaaccccctgcatctaagattgttaagaacaaacaggacaatggctactaagggagcaaacattattaatagtaggaatttatttgatcttataattttttattggagtatagtccatttattggagaaggcaatggcacccccactctagtactcttgcctggaaaatcccatggatggaggagcctggtgggctgcagtccatggggtcgctgggagttgggcacgactgagtgacttcactttcacttttcactttcatgcattggagaaggaaatggcaacccactccagtgttcttgcctggagaatcccagggacaggggagcctagtgggctgccatccatggggtcactgggagtcggacacagttgaagggagttagcagcagcagcagcagcagcagcagtcgatttataatgttgtgccaatttactgctgtacagcaaagtgactcagttatacattcttttctttatatatattcttttccatgatagtttatcaaaggatgttgagtgtatttccctgtgctatacattaggaccttgttgttaatccagtgtgtgtgttagtcactcagtcgtgtccgactctttgtgacctcatggattacagcccaccaggctcctctgtccatgggattttccaggcaagaatactggaacggggttgccatttccttctccaggggatctttacaaccaaggaatcaaacccaggtctcctgcactgccggcagattctttactctctgagccaccggggaagccctgttaatccagtagtgatttctcatttgttagttttggcctggactgacctgttcctctggtattatgtagacagaattcagatcagccttaagatcgcctcagaggtgctgagctagagacagaaaaagcccttccagtttccctagtgggctaaaaacacaaatgtcagtctaattcctgaggacacgagccagaactcagttaaaagaaaatgatctcctcattttcaccaagcaataaacaactcattgtcttgaggtttagaaaatcccatttggatttggagtctagcccagcaagcatcacatgaattaggtagtggaaagagtcctgctcagtggatcaggtacagggagctgtgtttctgattcctaccccttactcgccatgtgactttggacaagccttagtgggagacttaaagtattctgggcaggaagtgtgataccaagtagagtcagttctgactcttacttttgctgtgagtcatggttcctccttcataaaccagccaaatccccaccttggatttcagttctggtgtaagtcttgtatgtatttaagtcctagtttttcccagggagggaccttatttagttccttcttccctttccttgagaccctggtcctctgacctgctcttagacctcccagaaaattctttggtcataaccagctatcaggcgtgtagtttaacacccctaagagctggagagtgctggtttctac

SEQ ID NO: 49495 - DNA, 1278 bp, Bovine  19866880809774
  misc_feature (1)..(1): n is a, c, g, or t
ntgtagaaatagagtctaagtttggatggataatttaattcaatggccttttaattttttctgaaatcaaatatcttaaccactaagtctgattttgccagaaagagaagttagaacagcagttttcaggtttttgagtatgtggcttacattcaaacactagaaatgtagagctcccctcaagggatcaggtgattcaaaagaaggctaaacaagtcaacagtgattgcaatgtaaatactaattccacataccagtgcctcagagaatctgtagaagcaccctagtttgtgctttgtaactttatcacccagcaccattagggagctcctaggggacagccttttgttgctctctcctgctcctcctatacacacagccatgtgccagcatatatgcatcctttcttagacgccagctagacaccaaactgtatcaattattcaaaacaaattctaccatctctacactatttcaaaaaactattcaactcatttttatacctgacaaacagccataacagtgtgaaccaacaggttaagtaaaattaagtttacacattgagtaactgtaggagcatacctgtgatgaaactatagaacaattgctatatgatgagcatgatagaaacggttgtattttgagcactaatgttgcatggggcacaaactggtggctgaattaagccttttaccattactgcccatgatttaggtgtcaccagtaaatcatgaacatatcctaattcaaagggaagatctgccccttatttaattgtgggctggaatagcctcttatctgaagtcttcagaagacaaggcaaaatctgactgtgactcagtggacattgaggcgcaaggcaaacaaactccatgaacccctaaaagctcatcctcttctgttgacttattgatgtgcaatctaggcaagtcagtaagctgttatgagcctcgatttctttatccataaaatggtgatattgataatgttttctctgtaagattgtactgtgaaggcaaaatgaagtaaagatcattaaagatctttataaactgtaaagtggcatgaaggaaaaagagtaattattatttttaaagtgatgttctaacagaacctggactgtagccgaaagcaggctgactcagaagcaggtttgtaggggagctggaagcctgctggggcattgctaaggaaaccagcagagaaatgtacgtcactgagccccatccttatctgcccactgcatagtatctaccaagagcacaaacagtgcaaggg

SEQ ID NO: 49496 - DNA, 1131 bp, Bovine  19866880903988
  misc_feature (1)..(1): n is a, c, g, or t
ngagggaggtaggaggggggttcaggatggggaacacatgtacactgttggcagattcatgtcaatgtatggcaaaaccaatacaatattgtaaagtaattagccccaattaaaataaataaatttatattataaaaaaataaaataaaataaatttttaatttaaaaaaagaaatgaaaattaagtgtattccatataatgtgtccattcttccacttactattgcagtaaaatttcttactatagccataagtttctgtgtacatcttgtatattacagtacacttgttcagactcttaagtcttgaaccattctacatcatatgtcaaaattcttctcaaccaccaattcacaggtggaaaaaaaaattctctttctctgaattctttaactcaaaattcttttaagcaagaataaaataagatcctattaagtaagaatgtaagttctgtaagggtagatactttattttgttcatttctctatctccattacttgttgaaaagtgtcttgtgttagtaggcaatgcaaatttcatgaattagtgtaactgtcttattcctagcttctctcctcaccagactgcatgttcactgagagcagagaattgtaatattaatatgaatcactcatgcactgcccaacctgcatgtttaactttttatgctaataattttcaaacatatacctaaatagagataataactctgacccaaataacccagttttattatagctagtttttctacatctagcaataaaagtcaagcaattcaaaagtgcactcatgcacaagctaaaggtagagtgatttcaaggtacaaaatcaaatttgtattctaagtgttacattcctcactcaaaagtcaaaattttcagtggtttcatgtccagatcttaatttaatggatcctttcaatgaaaccttctaaaatgtctcttggaagatgaaattagcaagtaacattttttcctgaagcataatagaaatagatttgtactggttctccacatttgtttcataaatgccacatcctaaagctcttcattatgatagttgagtttgttgcattttttcccaagaagagttaaaaaaaaaaaaaaaaactcacagggagaagtcccaaga

SEQ ID NO: 49497 - DNA, 1226 bp, Bovine  19866881123592
  misc_feature (1)..(1): n is a, c, g, or t
ntgaaacacatgactggacgcatggcctaacaatgggatgaaaaatttgaaatgaggacagttgtacataaggacactagaggcacaatgaacggactctttttacctcgtcccatttacctataacccaaataaagctagatttgccttgtgctcaatttctgtgcacagctgtattaaattctaatgacgaaaagaaacatatctaacaatccaaagcaataagaaaaaacaattcaaacatttgctggattctctttcaaagaaagtcaagggagaaggcatctatgtaataactagcgaaatagaggttaactgaaagcttctcattcattgcaataattatatcacaaaacatgagtcaagggaaatgagatcactccacctattttacagatgagaaaactaaggctcagggaactgagatggtcccagactccaaatcaaaacttccgactcctagtttagtgagcttgcttttctacacttgtgcacacacacaccaccagacttcctttccaccattctgcattataaaatactttttaaaaatttcttgacactaatggcagcaaaaaatgatgattgtcaatatgagttcaagaaatactcagagattcattgacatttaattcccaaacctcagctaagtgtggcgcccagacaagaagaaacaaacatcaacgaaccatacacacattttcactcttgcaacctctctaaactagattaatgcttcattaaaaaaaaaaaaaaagcaacctaccagaatacctcttttccagccaaagaggcattctgtccccagtcgactctatgaaccctgggacaataattaacatgtgggccaaaggcccaaacccattggcacaggacagattctcagatgagaaacagagaagccccaaatcccactcacataaagggcttattgacactggtagaaagaacacagactacaagggagacagtgaggcagaatttgggctatagaggaaatgggtgggaggacggggtagacttcttccctatttcaaagccccttagattttcaccagagccttttctaagtttacaccctccattggactttgctcctggctaacaagcatttccccacagcacagaatgatgtcaccgaagccaaagtaatccaggtctgctaacacattcctgtggtaaaatagaaggttttggagagctcccgtggacagatcagctcaggg

SEQ ID NO: 49498 - DNA, 1938 bp, Bovine  19866881125010
  misc_feature (1)..(1): n is a, c, g, or t
naggattcaagccagacataggtttttcagatagaacttgcctaatataccctagactttcatggcaagtagtcccctgtctgtcagtgcacgtgactgtttacacagcgtaaaggaatattaccagacataacagaagaggaatccagaataagagtgggattacagcagataagatttcaggtcccttctagtcccatgtatcagtgatttttaacatgatattaattatgttctaaaccttaagacattcatattgttgaatttattaactaattccagactccaccctcctactctggggatgtagaaaatatcaaaaggcaatgtgaaagaatttgaaactagagcatcaggacgagtagatattggattgtgtaatcaaacaggtgctgcaacatgggggctgtgaaaaaaatagatggactaaatactagtgaatatggagaataacaaatatatatgttgcagtaacatcagaatgctaatgtgattgttcagattcctatttcactgacatcccaaagatctcattttaactcttggtgagatttctcattctattttggatgtttttatcccccaaaattggcactgaataaaatggaaagtatatatgtagtgtcatcatattgatcagaggaatttctgggtagaaaaatattaaggagcaattcatatctctggctatactaaatatttagttgataaaaaggaaataaaactgatatagttcactttctacttctcagaccatctaggtcacttttaacatagccattcatggtgtttcctctagagaggagggtatgccatagtctccccttgtcttcctcctctcatcaaaacagtcgttggtgttattgttattgttgtcatcatcattgttctcgttttcatcactatcatcatcatagaaaaggctctatgccaacaagtttacacacattatctccttcaccttagcacattccatcaaattataattatcttcagtttatagaggagacaactcctctacagaagagagagaggaaaagaagtcatttggtctaaattaaagtgagtaaggcaatggcaccccactccagtactcttgcctggaaaatcccacggacagaggagcctggtaggctgcagtacatggggtcgctgggagttagacacgactgaatgacttcactttcacttttcactttcatgcattggagaaggaaatggcaacctactccagtgttcttgcctggagaatcccagggacaggggagcctggtgggctgctgtctatggggtctcacagagtcggacacgactgaagcgacttagcagtagcagcagagccccttttctcagagtgctcccctcccaaggactccctccatgccatgtggagggccagcatctttcagctggaggggcagtgatacagcccagaatcctgtccctgccatcccaggaaaaatctccactagttcctaccccacccacctcccatctttgctcctggtccaggtcatctctggtgtctgtgggcagacggggcatcaggacaaggtttccttttatgattagattttacttagaaccataaatacatttcattgatcttgtttggtttagttgagccttagggagatacagtgaattccaatcaagaaaaaccagggagaagtagtctaatcattgttataagtcttcattttttttttttttaaccaggtgggacagagagggggcatagaaatccgagttgataactgttcacagggatgcaaaaaagtttgtcaaataaaattagaaacctacttaaaaatttatctaaggttataccactctgtgcttattgttcctggtgaatacccaactaagactaagatcagttttctgtctgctcctccaccctccccacctaagtgaaaacagtatgaggtggtagag

SEQ ID NO: 49499 - DNA, 430 bp, Bovine  19866881156519
  misc_feature (1)..(1): n is a, c, g, or t
naataggcacccactcaatactatttaaaggagtgaatttgtgccttcatccaagagtattaaaatttggcctggaatggaatgagagctgcaactaagaacctactctgaagagagcatccaaggaagcattaagtaatttattagtagtctttaaatcagtcatcaatctgtctaaccttatttggattcagtccatattttttccatctcatttgcaagatctcatgggaggcttttctaaagttcagctcactatgtcaactgcatgcccctgctctgctgactgtccaaaaaagcaaacaagatttattttatgcagttagaattcgtgcatagccttaacatacttggtcctccatcctctcacctgtaaaatgctggactacatcaggtgatttcctggattccttctgaccaagactttggg

SEQ ID NO: 49500 - DNA, 1858 bp, Bovine  19866881180545
  misc_feature (1)..(1): n is a, c, g, or t
ncatattgtccattctcacccttaagagtgtttctccccagcattagaatttcctccactattgaaccacttaagtaacaaaaggttattttgatccttgtcattctcttacctagtataatgtcaaaaaatcctactgattgtatcttcctgggactttccaagttcagaccttcggcatgtcttacctggaccatggatttaggtctcacctctatttttcagtcactttactacctcttcatgaaaaggctaaatctacctttccaaaaggtaggccaatgtgtgctttttccttacttaaaagtatttgatgactccctgttacagaagtacacactcttttctatggcatttgaatgagttccttttaggggcaatactgggaactatatgaccaaacaagcaactgtagtatcaagtggggcttaatgcagtgtggtcttgagctaagctcttggtatgatcaagattcttcaacagacaagaaattgtagggaatacagagaagcacggatatgtgatccagattgtttttaaaattgtgctttctgaaaattccactggtcattagcagctgtgtaggtccctgaatcatttttggcctggataactaggactaacagagatgtgataaatgagggaggtattaaataaacagactagaaagtcttttccattacaggtttgtaggcatgaaaaccgaacttggggccatcattattgagaataagtgagtgaggtttattgaagaaagccacttatggcttgtttttaacaatggatcacactcaaaatttatatgtatattgtttatttgcctgtatattcttattttaatcactgtctctgatttgtggcttaaaaagatttagaaaacaaaatattcctcttagaaacttttttgatgaggcacctttttctaaccactcttccatttagggacagacctggaaattacattgtagggccttctgggtgatggacagttcagatagacacattgagagaagaaatgggaactgcaatagctgatcttggttaagaataatcaaaagtggacaatacatactcacatatgcttaaaatatccaattggattacacatggagtgatgaacagaggttccttctgcaactgagtgatgcatttttactctgtattttacaccttataggatttgcttaaccatgaaaaataattacacatttatattattacagatatgcagaagataccacccttatggcagaaagcaaagaagaactaaagagcctcttgatgaacatgaaagaggagagtgaaaaagttggcttaaaactcacattcataaaactaagatcatagcatctggtcccatcacttcatggcatatagatgggaaaaatggaaacagtgacagactatttttttaggctccaaaatcactgcagatggtgattgcagccatgaaattaaaagatgctctaccttggaagaaaagttatgacacctagacagcttatcaagaagcagagacattactttgccaacaaaggtccgtctagtcaaagctatggttttttccagtagtcatgtatggatgtgaaagttggactataaagaaagctgagtgctgaagaattgatgcctttgaactgtggtgttggagaagactcttaagagtcccttggacagcaaggagatccaaccagtccatcctaaaggaaatcagtcctgaatattcattggaaggactgatgcagaagctgaaactctaatactttgggcacctgatgcgaagaactgactcatttgaaaagaccctggatgctgggaaagactgaaggcaggaggagaaggggatgacaggatgaga

SEQ ID NO: 49501 - DNA, 3218 bp, Bovine  19866881196711
  misc_feature (1)..(1): n is a, c, g, or t
nccatacggcaggggtcagttgaaatagagtaggaaccatgcctctttggccacatctctcactcccttcatcccagtccactcactcatttatatgacctcctacccctgaagcactgagtttgtgttccctgatttgatacagtcatccatctgattcccaaagatctgattcctgtcaatctgatccttccaacctcaaccagcttccacatacgggaaactcactgtctggaaaggcagctcatttcatctctgagcagctctgactcttgggaatgctttccccgtgtagcccatccccctcagcatccccaaatagattgggatgacttgccctaagtctcctagtgtgctggaggattagaagcaaaggtctcaagctgatggcctttttatcccacctgacagaggtgtgttctttctcaccttccttattcactcactaatgcccagtccaatttaggggcagaggggtacttggagaaatgtcattcaacatcaattttatttttgacagaagcgtttgccttcgtaaatattctaaagaacaagagttggcagactttttctagaaagggccagatagcgagtctcttaggctttgtaagtcctgcaggctctgatgtaactatcaactctgctatcttagcgcaaaagtagccatagacaaaacatccatgaatggacatagcaatggtccaataaaactttatttacaaagacaagcagtggaccagaattgatcttcgagccatagtttgtctgctatagttgtagactggatcagcagaagaggagtgtgtctctgctggtgtccccatgccttccatcttgtaaggaccaactccatttctgagtaggaatcaattgccctgattcctcagcaggaagttatttctaaaacattaggattcctatagtgcaacagttttcagacatgttacagggacccctgagactcctggaggccctctgagtggtccacaggatcaataccatttttgtaaccatcctaagaagtgttgtgcctttttcactctctgtctctcaggaggatagagttgagttttccagaggtgatgtctgatgaggtcaccactgacagctaatggaatgtgtgcttctgtttttttgttttttaaaaaattctcgatgtgactctaatatgatagatatcaatagatgcaaagcacctaaacaaaagctccttgaggttcacaatactatttcaggggtgtataggaatcctgaaaccaaagagtctccaacctgctgccgttgtgattttcttatacttcaaaacagttatcttaaatatgaatctttcaaagagtccttacaagaatgtaattttctagcagtcaggatctatgctaaccgttgtgttccatgattgcacatgaatttgcacaaagtaagttcatttattttaaaggtgtttattataaatgtgctgtgtgcctgatattgtacttggcctgattagagaagtgagctcgataaacagcatccctgctttcatcaagcttagagtctaatggagaaaacaataagcaaataatcacaacttgttatatcaatacatactgaaaataatacagtcaagggagggtacccaggactctgagaaccagtaacagtagggtttgtactgtgaaggtaagtcacagaagggcctttgacctgaggtctatggggtgtaagcatagatctaaataatctaaagcaggatttctcaactttgacactatctaggaccagataattccttattgggttggagaggagctatgttgtacaagatagttagcaatatccctggcctctaccaactacatgtcagtatcatacccacacacacacccctcatttgtgacaatcagaaatgtctccaagcattgacaaatgactcctggcaggtgtagtcaagaaggaatggagaattgccccagagttgagaaccactggtgcagaaaagaggtatggtaggaaagccactgtggtagcccagaggaaagatgcttgtcactgggccagagctgatggagatgaagatgagctgaatggcagagctgtgtgaggggttcatctgcacagcttggtgatgggtggaccatgagagtggatgtggggaggccaacaaaggatttcagggcttatcatgctgaaggactgcctttggtttgggcaagctggctctgagacatcacagctacactcctcagaatacactagataaagagaggggaaatacctttgtttgtctccctgtctgcacgacccacctgtgttgtgcatttctgcctgataggggtggctctaataacagatcagaaacagctcttcctaaaagaaatgacaactttagaaaagaaaaaccatctgccagggctgagtgaattaaatgtatgtttaatctagctgtattaggacattatttcaatgccagttgacttttttttaatgtttgtgaaggttggcaaacgtatcagagaaaatatactttgtagtactcagaaggatattggcacattctctatgatggcactttgataccaattaatatatcaagatttctaaaattctcatctcagtgccaaagattgtatgagtcttctagtcactgacccaagggttctcagcctttagtgaacaagactcttcagaggagcttgtttaaattttaaagtctgactcagtaggtctggggcagtgcctagggatctgcattttgataatccacgccgatctccccccacccaccaacccctggacattctgaagcaggtggttagctggtcagtttgagaaacactcccatagcaaaaagcaccatgacggaatgtgttccagttttgcttccaccactgacttctgctctaagaccacttcatctcacatcccaccccccgcccctgcttggctagctttgcccatcttcagagtggcttcaggaggctttccctgatggctccgatgaccccatagcatagccttagttccatagagtgcctgcagcaacaactggcagctcccaattaaaagtggctgaaacaatctagacacatctattttataggacagtgagtccgaggagggacagatccaagacaggttagttcagaggttgagcataatcctcagacacccagattttttctatcttggatggctcccctgtagagttcaccataggcaccagggcggagttccag

SEQ ID NO: 49502 - DNA, 1516 bp, Bovine  19866881199612
  misc_feature (1)..(1): n is a, c, g, or t
ntaaaatgcagtgtaaggatgatgacaactctatactaagttgtcatctattttgtttgtagtgataaaaatgtttcccttatctttcccaactgaatacattttttagtttctgtggaaaaggaagaattattgtagctcttctttctttgaagttttggtttttgtttttaacttttatactgtcagtctgattcagaattctccaagcttgattctgattgtgcacaaacaaaaaaactgcacaagcgtgttataggaaaagggaaaaagttaattaatataaatggcattcatagtgaatataaatattatagtcaatttttttgtcaattaatttttaaaagtaatatcttattaaggaattctaaattttaaaagctcatcataaacttcctggccttactattagataaatatctctttaaactagtttgtgattctattgaaaaacaaaggttaatatgaagttaatttacaaataggatcaaatgtatactttgcagatatcagactgagggatagaatctcctggttaattacaaatgagcatttttttctccttttgcagatttgttaaatcttaaatacagctattaactcctgaacttgtcacattagttctccagccttgttttaacttttccctcctcctctttttttttttaggaacaaatggattcagtccttattttaactgttgtgatgaagatgggttttggactttgagaagccaggagacaccacctaaacaaccacaagaaaaaccgaggactagtgcgcactggggaaaagaatacttgaagactgaagattgaacacctgctgaatgctcctattgagatttttcctaaacagacatctctaacattttaggacgatttcaccggagaaacattgatctctgggtggaacatcctaccattggcccgtctgaagagttgaatctggatttgactcctctcttctaccaggaatattattaggccagcctttaaccagtccctaaataattgtaatcattaattaacccagaagttcttcaaatataagattaaaaagatgaacagatataattcttacccttattaaagacaaaagagttttctaatattttgactgatgatgtaaccttatgttttctttttagtttgttagtggtttttattttaaagctgtttggatattcagcatagtacaggtttgccctctacctgaaagtaggggtgttcttaaaacttttccaaagctacagtggcataaagtgaaaaaacagttaccttaggatacatgttgctgatacattgagataatgcttagatgctagctgacacagttcaagagcctgtggtaacttaagggctgagaagcagttcccagggaaagaactttgggtggtgccattcttaatacttcaaggtgcatactacgttctagatctgctgagaaacactgagcgctatttttgattttgcctttttttatttttttggaaaagcaaaatacctttgaattt

SEQ ID NO: 49503 - DNA, 1066 bp, Bovine  19866881218939
  misc_feature (1)..(1): n is a, c, g, or t
ncacaactgaagcgacttagcagcagcatgtcatttttcagtaaggttttgatgacccttcaaagtacagctctatggctatcattgaaccataactttcaggaagactttatcattattattgcttatgtgcatacatgggttaatgataagcaaactaaaatcctataactactttatgaaggaggctatttcatctgatccttgcaacagggagcttgatagaacgtcccctctctcaagtccacagtcctacccacagactagcagcacagaagtcttgaaagagggagaaagtattagagcttctctcgatactcactttcacctcagttttaatttttttattttgcatgttttgtagtatacctgataatatcttggtatatatgtaaaatgctcatattatgtaagagtattcaaaattatcttactgatagagggcatgatcaaaaaggtttgagacactgtgttaggtactgtggtctccatgttagagcacttgagcaaggaacaggatgtgatctgccagccatgttgcaaggtgtgcatttcatagtttggtgacaaatttctggctgggttaaatgcttgaaatcaattcccatctccccatttttcctattcctgtttcccaactactagtagtggcagcaggaccaattaacatgcagtgagtgcttgctctgtgccagacactgtattaaacattcttacatgtcatctcacttaaaactcataaaaaactctgaggtagacactattatccctgattacaaatgaagaaactaaagtataataacctgttcaagaactaccagtggcagagccaagattcagccctaagccatttaggagttccttgaataagcaggtagagctgaaggggtagttctggattcaaatacagacttagtcatttattaggggggctgtacaacagtactgtgtctacttagagatacgtgatacgttgttttaatgtctagtccaaatcctatagtggccctcccaggcagaggcaaagaaaacatgatgcacacgggatcctgcatttctgatggat

SEQ ID NO: 49504 - DNA, 1686 bp, Bovine  19866881220407
  misc_feature (1)..(1): n is a, c, g, or t
nacaatatataacatcctgatgggcaggtccttacccgttctccttaatatttgtcagaaaaataaaattctctaacagtgaaacacatggcaatggatagatagttagaaaccagaagagatccccaaattagaagagtttgggaaatatcttttatttgaaatatttaagaaacagaattaaataattctccctggaggtggaagaggagccttacttaaatgacctctgtaggtcccttttagtctaaaaaaatccccacttagattctcttcagggaaagcacaaaatgatttaactcttcaacacagccttattcttggcaaggttgaaattcaacagtgaaaatcaaggaaaatttgtttcatattctctttaagattgtttccaccaacccaacgcttccctctcagagttgctttgaaataatgcctgaggctttaactcatttgtctgccatgaacattctgcaatgtaataattgaatgccagagatgtgtcctgacaggaaattcaaatcattgatgttcaatgcacaggttaaagaccttgccaaggccagaccttgaagggcactgtgtaagttgaaatgcctaggttccccctgagttccccacttcacccccatttatcttgttctggtcagtctatctgacctagcagtatttacctatcaaattatattttacaatttctattttaataacaaactattaattcctggacacgcactgtcatgcatggcatttggggatatttgtgtagctaccttttatttgtaagaatttcttcagcgttttggggtttctgacgttgctctgtcccttttctcagcctcttttcttttcccttgcattgtttattagcaagggcatgaaaccctgctcccaatgactcattattactcaccatagtaatctacttttctttgtgaggctcagttcagaagatgcttgagttgccattcctgagaacaggtcctaagagcacatcctgttaactctcatctctccatgctaatgccaagaagcactgatactgatcacagaaagtcgaacagctgcttcatttgatgttggccaagcctgacaccactgcaagacgactttctgcagtaagcagagaccaggatctgattggggagaaaaaaaagaactctggattgtaggctcctaatccacaaagcaaaggaaatcaaattgtatttatagagccctagaaagggctcataaaattcataaagtaatttgtcatacgctaaattatacttttcatgaccagttttagagataggtaaatcatcccttgttatatatgaaaccgaggaaggccctgtggagcttccaggcacagaggaccttttgtcccctgttttgtataggcaagattccatgaccttccctgagttccaaagtgcagattcgaaccagttgccaattaagggaggagcagcccagaaactatctgaatcaagattaaagggactagagaatctcatcaagattagagactggaccacgtgagatgagattaagggcgtgcaaaccctactgtcatcctaatcttgtcagagacctcacccttaaaccattgttataaaacctttatcatatcctccgcaggttgagacatagatttttgaggcagactctcagtgtgtctccctttgcctgttaaagcatcac

SEQ ID NO: 49505 - DNA, 1675 bp, Bovine  19866881334659
  misc_feature (1)..(1): n is a, c, g, or t
nataattcaacaaaatcctttgtggattatatttatcatcatggcctggcataagtgccccaaaatcttagcagtacagcccactggattcttcttcctttagtgtggattttaggctttgcaaaaccttttcacacatacacacctcatcaatcttcagcaacccaataagatctctcacaaaagctggaatcccataagagcacaaaagaggttttttcatgaaagtagaatttcagaagtaaattggaattgatctgctcttagaaatgaaaagtgtttgatccagaggtttactattatatttaaatcaaacagtgcttgaagaagcagtagaaaatctatcaaaagcagaggaagattcccttccctttgagggttatgactcctttctggcaggaaaacagcaatcagccagggagccactatgtacctgctcctttttgtgaatgaagagaggctgcaaagccaggaaccagagcagagagatggctagttgctttcttcttccttcctgttatctagaagcctcttccttgtagtatcagggcaagaagatggacaggcaggtggtaggccagaaaggctgtggctggcatgagatacccacagagcagcagttccctgccagtacttggggaaacctgagagttaacgtcaaacttcctgcaatcctaggaagggtctgattccaagaaaacaggctgtgatgagtaagaaaccagtgttctgatcaaatatgcctgcagattaaatagtgaattgtgccaagatttgtgagaaaggtgacaacttgtgagcaggtgtttgtttcgccctagttgtttagtggtgaggtgaaactaggtttgcctacaatattcacgtcttttctaatcttcagtagctactaacagtgttttgcttaacagttttcttcctcccttcaaggaccgatacttctgaagagaagaaagataaaatttcaaatcctgttaaaatattttttttcaaatgctctctcaggttatactatgggtttttatattctgataaagaagtgaacttgtgagttgcagtcattggaacagaattaataggaacagccttacttaagccctgactagagttctttgtcatccaatgtagttaggttaaacaccaacagggaaatattaccagtagataattctacaaactgaaaaagcaagggaattaacaaaagtggtttttaagaaacctagactttaagtttttagtctcttgttcagatcatctcttgccatgtaacctaattcctcccctttgtaagctagtggtacaaaataacaccaatttattgtttctgatttggggagtcaagaagtccagggaaacttgcctctgcttcacagtgtttaggacttgagctggaaacactgaaaggcctgtagtgacacaacagttgagggttggaatcatctcaaagcttattcacttatatatctagaggttagctgtccactggggcctcagtgggggctgtcagcaggaacatgtcttgtggtctttccacgtggtcttcctgcttcctcatagcaatctcagaggaccaggtggaagctgcaaccctttttatgacctaccgaggaattcatgtaaggtcacttacagtcacagtcttgccaagattcaaggggaggaaagacagactcca

SEQ ID NO: 49506 - DNA, 585 bp, Bovine  19866881347696
  misc_feature (1)..(1): n is a, c, g, or t
ntgaatgtattactttgaggacttttttaagaaaggaccggacaaagttggcatttgacttcagaattaatgttggattggggaacttgtacaaatgcaatggttacaaaggaagaaatctagctgttgggtaagtgtatatacaatatcattatttgcagaaggcagaatgcttagttgaagtaagagtcaactaaaatatttcagcaatgtgatcagataaagaagctttttgttttgtgttgtttttactttctggctagaataatgtcttgtttaataactgtttctcttaagtgaactagaattgtcttcactgccaattaaggctaaattcgacactcagctatattcagtgctaatatcctagagacttgttctttttaattcttaaaaactaaatgaccatacagctttatctgtgatttaataatatttactgctctgagttcctctggcaagaaaaaggcatcgtattctttccttctggatatttttggtttagaagcaattgctgacctgaccaacatgcagttcaagcacatactatgctctgatcaaaagtcaagggcaggtcactaccaa

SEQ ID NO: 49507 - DNA, 1624 bp, Bovine  19866881360542
  misc_feature (1)..(1): n is a, c, g, or t
nttccgtgggaaaatgtagatgttggatggatggatggatggatggttagataaatagaaagaatgaattaattaatgaatttttaagggactcctactctagattctaggacttgtttcttcacttcaccatagccatgaattattttaccatgttcctttttttttctcttttaaccatgttcttctttaatggttatatagggttcttttccagggcagcttatagtcagctcatcccctgttgatggatatttgagttgtttcccaaattttactgtcacagaattgctgaataacttctacctttatccatgctcacttgagttaatatttctgtgggtagatttctgtagtaggattgagggaattgtatatttcacaagttgctaaattagtttctaaaaagatcccaccaactgatactctcaccaatagaatgtaagaggactggtttccccatattcatccaactctgggtgagtctttcaatttttttttttggccacaccatgtggcatggggaatcttagttcttcaatcaggattgcacccatacccccctgcattgggaacacagagtcttaaccactaaactaccagggaagtcccaagtctttaaatttttattgctcatctgataggctacaaaaagagttttctccaaattactttagaaaggctgtaaagaaagaggttgctgtaattctgtagttcttgatgattgtggagaagagaagtaatcatctctttgaatgctccctgccctatgtcatctctgacttgtgaggcaatagttgtccccatgaggcagttatccttttcccatgaaaagtaagcccagaggacagagttttgcaaatatctgaccactgtttccacctctcctgcccacagtcagccaggcactaggaaacccttggtgagagcagatggtcagcacagacatatcctgacagatagttcaacccctgtgttccaaccttctgcagttaatgggagggagggggtagttcccacctgctctgtctgttccaggccttatggctgatctttcttggacatttggtctggaggttttttccataggaagaacagtaagaggcaaaggtactgtagagagccagataatagtcatgagaggtatttgtgagtcttcatgaaggaggcatgcttagacattgatgtttgaaaccctcacgtgtttctcagaaggttggtctgagggctactggtcgtgatcaaagaaagactgttggagccttgtcccagatgccatggacttgggcactctttctgcaacttccagacatcatcaggaagggggctagaaataatcatttatgcatcaaatggtacatctggaagggaccttgacactattagttcctgtgttttgtattttcctttttcaaattaaaattttcaagccctatagaaaaatagaataatgtaatgaacacacacacccgtcacctgaaatgagcaagtataaatgccttctgtttgctgcatctaattttatactgagtaatttaaaggaaattacagatactatgagtctttacccttaaatactttacacacctctctaaacattaaattcctagattaaaaaaaaaaa

SEQ ID NO: 49508 - DNA, 1687 bp, Bovine  19866881374835
  misc_feature (1)..(1): n is a, c, g, or t
nctgcttcctgcctgctgctgggaagggctgagggtcctgggcctggaaagagaagggaagagggctgggaggctgaagtccagtccctgggctgataagcagccttggacgttgccctaagaatttcctgttgttgcttccttcttcctcataagtgcagctccagtctctcctctagcaacctagcatctggtcgccattgcagactcagaggtcttttgtaggtcagggacctgggtttgccgtacggccctgggctggtgtgtgccttagttttctcatctgtagaatgggggaaataatactgaatgcattctgacagatgatagctaagggattgtactgggttgaatagtgtccccttaaaatttacatccacgggaagctgtgaatttgaccttacttgaaaatagagtcctggcagatgtgatcaagagggcatagtgcagtagggttgccctaaatctattgtgactgctgtccttatgggggatttggacgcagagacgaaacaaatgcccacagaaagaaagctgtgtgaagacggagccgagattggagtcctacggccacaagccagaagctaccagattggaagaggcgaggaagatttctcccggaaggctttggaaagagcatggcccacctgatacctggattttggacttctggccttgggagttgtgaaaaaacaagttcctgttgtttcaagtcaccagtttatggtaatttgttattgcagccctacgaaatgcctacagggatgtctatatgcatgtatctactacacagtggtcactcgggagaaggactcccacccccacgtggctcctggtgatgttagtgcttcttcttcctaaccctaaccctaaaccctatccctaaccctgaatgcctccctctccttgagcatgggctctgccagccaggctgggtggaagggcagagcagtactagacatatgggcacgatatcagcctcaccagggctggctgagaccaggcccagaaaagaccagtttccccacagcatggaggtcagaagtgggcaggagtccccagcagccactgaattctagactctatgctccgtgggggcaggagccaaatccacttggtaccctcagcacccggcacagggcctaacactaaataggcctactgtgtgcccatcctactttaatccctcacaggatccctgtcaggggccctcactgccccccttttacagctgagaaaactgaggcaccggtagtttacgtgaattagccaaagtttattgttggtaagtggtatatccagggaatctggctggtaagcccagcctcttatctgctcatcttcaatatttattgaaataatgaaaggctagagccaggctgccagagaaggcaatggcaccccactccagtactcttgcctggaaaatcccatgaatgaaggagcctagatggctgcagtccatggggtcgctgagggtcggacactactgagtgacttcactttcacttttccctttcacgcattggataaggaaatggcaccccactccagtgttcttgcctggagaatcccagggacaggggagcctggtgggctgccgtctatggggtcgcagagtcggacacaactgaagtgacttagcagcttagcagcagagccaggctgcagcctctggatgagttcg

SEQ ID NO: 49509 - DNA, 1177 bp, Bovine  19866881380618
  misc_feature (1)..(1): n is a, c, g, or t
ngctccagtttagtgtttacagctagcggagaaagggtccacgttctcctggaaggtgtggtgttcagacgtgagtcttaggacagcaatagccacttactgttatgagggaggccagcttgaagaggcaagtgacacatagtgaaggtcagagacaagagaattatagggaaatgacaccagctcccagactaaatcctacttaaagcccacgttacctctggacttgtaggttacataagtgactgtcttccctttactagtgaagccagtttgaggtgagtttttttgttaactagaagcattctcactaatgtatcacctaaatgccccaagtccttacccacttctttgcgcctcttgtactcattgatgttggtgaccacatcctggagggcagaggtagccctctgaaggacagcataggcactggcatcagggagtgtgttttccagaattttctgcagcagcaatgggtatttggtaatcctctgcagaggaattaccagcaagaaactgagtcctgaaggtcccgcttgcggcctgagggagaaggctggtgttaagtaggtcaagtccacccttgggggcaccaaagggcctggggtctagtcccagctctgctatttaactcgctgtgtgacctcaggcaagttgccctccttcgggggtcctcagttgcctcaccgggtgctgctagttctcactttacacttttctggacctcgattccccatatgtactaaatccaaaggtcagttctctgtcctcagcttaatcggtctctcaatagcagacacagcagaccattcccctctttctcaaaacactttcttcttttggccccagagatgccctttgtcctgtttctctcactccacaggccactcccctggcttctctccaatgctggagtgcccaggggcctcctctctccactcactctcttcctgagctcctttagtcttacggctttaaacacatggcaaacccagatctccatttcttctgcccagagctccagaatcatggtcaactagcctacttgagatctccacttgggtatgtctcaagcacaactccatctgctggacacgcacatggtatttcattttaaaaaatggtcctgctgctttaaaaaagaagcgcttttaaaatcacaggaactgggaaatcc

SEQ ID NO: 49510 - DNA, 941 bp, Bovine  19866881408311
  misc_feature (1)..(1): n is a, c, g, or t
ngttttggatttagtctattggctttatttctgagatactcttgatttaatgtgacctgtttggtctcatcagaagtcttgccattgggcatttgaacaatgtgacaagtgttcctgtggccttatcaaaatgtgttgaagaaaattattttaaaattggtactctgatgactttcaatccaaaatcttttttaaaggtggaaatgagttgctatggtttatgtgttttcaactaaacgttcatttctggtccctataacagaaattgaatacgatcttgaatttggtgggaagaggaggtggtagggattggtttaacatttgggtactgaaattataaagctttatagctgtatgaatttaaatcatttggattgatttttatgcacatagattttcagagcctactgttttcattttatttttcttctaaccgtcttttgtccttatagtttctgccaggtggacttcatattcacactcatttcccttttcaaatcccatttaccaaggctaaggccccaggaaagacttggaagacagagactggcaagaaatcaagataccaggtcccttgcaagcaagtctggccaagaaaccttgtgctttcctatactgagttgtcttcaaattattttcagcctccctgggtgtataatcatttcagggaaattgaggcagcgccaacagctaatgacctaaactggtctatgcaagtagtttaccacaatttctctttccactggcccttaaatcctctgccactttgtcagatttatcttgtgatccatgattagattatgtagggaggcggtcaggaccaaaaaatgttaggttcttatgattcctcatttcatttagttataatgggcttggagtttttgttttggggttttttttggggggggggtactcacaattcactacctctcttacattaa

SEQ ID NO: 49511 - DNA, 1519 bp, Bovine  19866881430980
  misc_feature (1)..(1): n is a, c, g, or t
ncatgtgatttttgtataaacaggattcaaccaagtttaatttctttttcttcattcttaatgcctggtattccatttgtgaaactgtaaggctgcaaaaatgtccaatttgatgaccattggtcacatgaggctatttcaatgtaaatttatattaattaaaattaacaaaattaaaaattcagtaccacagtcacactagccacattttaagtgcccagcagccacatatggctaacaattattacattggacagtgtagatacagaacattttcatagctcagaaaattctattggacatcactgcttaggaaccagtaattggaaatgtctctcctggataacaaagtgtatccaagtagcataaaacagaagctagaggttcctgccttttagaaatatgtcatatgacccatatgtctaaacttgttaacttcatggattatttaacaagtgagaagagctaatgtcctctgaggctttgaagagctaatgtcctgctctccaatgttgctttaaaagataggcagttcctagcatgaagcagctcaaaacttcatgtataagtcaatttggaattccaaagttattggcccataagataaatgttataaatcacatgactgaattttagtactttctgaaataaaacttaatggaaataatagccagaagaaaatcaacagtaaaattttagagtttcagagggtgttacagattggaaggaagaaatgacaaccccccgcccccaccccccatacactcacagaataagattagattaagttgctgacttaaccaagagtacaacaaaatcttactggaaatgaggtggcttccagggcaagagcagatgtagcatatctcagtggcacttcccttgacccctacagttcctactggcactgtctgaataagaaaatgtctggaagctcaaatcttacacatccgctgcccatttatagtcacggcttacatcagcaatctggaagaacttgaaccaatgatgcatgtattaatttttttttttaatatttatttgtctgtgccaggtcttagttgcagcgtgggatctttgatcttagttggggcacgtgggatctttagttgcagcatgcgaactcttagttatggcatgtggggtctagttccctgaccagagatcaaacctgggcccactgaattgggagctcggagtcagccattggaccaccagggatgtcccattttttttttttaatttatttatttgactgtgaatgcatgcatttctgtttatgggactatttataaacatcagacatttgtggactccagtcatagtcaggatcactgaaacagcaccctcatgctgaatgaagcagtagagttagggcagggagcccaaggctactctgcccccaaaggtctgttttcccaatccatcacctctctgattttatggcttttatctgaatcgttcaaagatgagtttgactaaaaccaggatcactaacaatcttcctagaaaatcaaat

SEQ ID NO: 49512 - DNA, 770 bp, Bovine  19866881609992
  misc_feature (1)..(1): n is a, c, g, or t
natttcttagactgtaaaaggaggtagtaccagtccctataatatagcatatagtaatatccctggacttccctggtggctcagtggtaaagaatctgcctgccaacgcaggagacgtgggttcgatcgttgggtcaggaagatcccctggagaaggaaatgacaacccactccagtattcttgcctgggagaaaccatggacagaggagcctggcagactacagtgcatggggtcgcaagagtcggacatgacttaaggactaaaccaccaccaccaaggtcctgacatgcagggagctcttagttccctcctgcagcagatgcctattgagcaccgcctatgtatccagtgctgttctaacaactggagatgtggccataagcaagtcccctgccctcctggagcttacatcctcttgttccagtatcttccaagccctgcattagaccagaacttcacagattgctgaaagagttaagtgatgaagtgagtagctttgtgatcaggagagagagtgcacaaatgtctccaggaggtggagatattcttggtgataaagaagggtttgtcaccctcctccttaattatccccttccctacttccctggactcctgagagagtgggagtaattgcagggcattcagggacctgcctcgagggatgcttgagtgatcctggaatgaagggggtctgggccatccactggcttgggagtcctgctgacttggcttatgggcatctttagaggtggcagccaccaggggctt

SEQ ID NO: 49513 - DNA, 1526 bp, Bovine  19866881635652
  misc_feature (1)..(1): n is a, c, g, or t
ntttccccaaggagaagggcactaatcatgactgctaatgaaaggggtcagttttttgtagaagccaagagcagtgtgctcattgtttcacctgcttgccacagagcaagttcaggttcactgcccctgtatgaaagggttatggtaacagagggcacttattggagataatttccagatgggagcaacatggttggtgggattaggtgaaattactttaatagtcccctccaggcctcggcttaagttgactttgcttatccatctctcccctttgccacagaggccccctccctgctccctaccctcaccctgcccgtgtctccacatctgacactcctcagcagccctcaggactgcaggctgactccaagcctttgtaaaccaccggggattattaaacaaatcctataattagaagccaggtttcctaaacgaagtgaaaaatgtaacgttacccctttgtttgttcactggatgctcaacgcatgtcccatgacccagaggagctgtgactttgggtttccaagaagccttaataaggtaatgtttataaagttcttaactttacaactcccatcagagcacaactctgtgaaatgaggacaagctataattccgagatatctgccccactccttgcccagtggtagagaatgttgttcccttatgtgatgtgtggaaagccctaaggctgggattgaaggaagtgcgttctggtctcagctatgacactgaactgctgtgtcagtccccttccctctctggacttgtgtttacccttctgtaaaagagaggtcatgatgagaccttcttgttttaaaagtctcttgtcacactgacattctatagtttgattgctgtgtttctctaccacagggttgtaactcaagaaagaattctccagattttacttctcttctctggattcatcaaaaggacttggtaatgtaccttgaactggataaattggttggggttggaaagacacatggatgtgtccttttgtgcctcagctttgaacccttaagggcctctctcatgagataaagtacattaaaaatagtgtgaaaatgacttgcatcataaaaaaaactcttcaaaggaattcaaactggtcaacatgaggaatagtggaaagaaccactgttctgtctggagctggtaggcactattcagttaacataattccatggtaacattgtatataactgacatttattgagttctttctattaaccagactctgggccaagggtttacatccatcctctcagttaatctcatagcaaatctgcgagataggtactttctcatgatcctcactttatagataagagacagaaccttgaagagatgaaataatttgcttgaagaaaataagtggttggagccaagactccagaacctgtcattgatctttgtaaatccactgcctgtatactttttgatccaattatggtgcttgtggaagcaagtatcatgatgaaacttccaccacactgtgttgctgagtgattctgatg

SEQ ID NO: 49514 - DNA, 905 bp, Bovine  19866881980579
  misc_feature (1)..(1): n is a, c, g, or t
ntctgcccgcgtagcttaatggaacagtcaaacttttggccagatcactgagcactgggacccccccccgatcttcctggggagcagctccagcagaatcccttttccatatggcatgtgtgagcagttgaaattatcaccaagaggagccttagcaatcagcccattcagaacacagaccctgaagtcagacatccctgagttcaaatcctgccttgctctccttttaactggatagctgtggtcttagtcttttgaagcctgttttcccacctgtaagatggaaaatacaaaagctcccacctcgtgagactgactgtgaggactaattcttatttcccctatgcttattcgacacaggggcccggagagtgaaagggctcggccagggtcacactgggggttaagtcataaccaggtggatcccttccccctgcccccccgacctgcttcaccctaagcagcccagagccacaatagctggccagtttgtgcagggcccacagggacatgtcctgggtcctgccctccgtcttgagccctgcccagcctctgcagcaccagagtcccaggtgaccagtggtggccccccgcccacagagacggcggggggtgggggcacttagcagcaggctcccagcccagagcagcctggccatataagggaaggagccaggaaggtctcctcgctcaggcctggcgagaaaatccagacagccactgtttattttctccttcccaggctccccagagcttcccgacagaagacacaggctgccccccggggccaagcgacatttcctgaagacagtggggaacagggaaagaaaaaacagtccgtcctccgggagtaggaaggatgtggacagccagcaccaggtaagattctgccaggtaagacttgt

SEQ ID NO: 49515 - DNA, 938 bp, Bovine  19866880464307
  misc_feature (1)..(1): n is a, c, g, or t
ntctgggaggtcgagcggaggctaaggtccgcgcgctgtgcctaggagtgcccgcgtgcctgtctttttaaaatacaggaaatgcataaaagaaagaagagagctcagccggagccagcgctcccccgtctttgctttttcccttccttccctcctccccctccccccaagcaccggcttttaattttcaaaagcactgcaattgcttggtgtggtttcaagagctggggtgccattctccctgatgatgactctgctgacgtcaatggcattcttatcgtgcctagtgcgacatcagaaaccagccctcagaggctcctcttattcaccgagcctgggctctcagtaaaacgtggaacggacttctgaagtgaaagggattcagtcctcttttctagcaagagctcagccagacatcttttttcccgatggcaacttgccagttaggactgttcctcagtgttttcccctgcacagatcccaaaaggagaagagaggactaggtggatcacagagccttctctgtgtcccagctttccgagatctgcctctgtgtgtgtgtgtggttgacctacttctgattagtcttaaggtttcgctaaagcctttgataaggtgatttccccctataccatgctgtgaacaagacccactcagttaagtgctcctagcttactctcagggtcaaaactcaagcccaggaccaaaaatgaagccaattttcacttctccagagtgcagcaaacacccttctcctcttcttaagagaaaaatagaaggttgagcacatagaggggaaggactcacagctgaataacaatagtaatagcaataataacagctgagtatgagcagagtattttgagaatttaacattttcctctaaacactcctgagtttttaagaggccggtcacaaaggttccagttataagcagc

SEQ ID NO: 49516 - DNA, 2242 bp, Bovine  19866880467184
  misc_feature (1)..(1): n is a, c, g, or t
ntttatgttcctaaacaggagcaaaaaaaattttgccatgggtaatttaggtgggatttatctattttctcttcccttagatgtaccttctgacaaagccacacttgtagcaatcaatcaaaataaaataaaacgaatattcaacctaaaaaaatggatacaaatgaactcatttacaaaacagaaatagagtcacagatgtagaaaacaaacttatgattaccaagggggaaagggagggagagataaattgagagagagagattgaagtatattcactactatatataaaatgggctaatgaaggacctacagtacagcacagggaattctactcagtcctctgtaataatctatatgagaaaagaatataagaaggagggaagtccatataactgattcactttgccacacagcagaaactaacacaacattgtaaatcaattatacttcaataaaaatgaattaaaaaaaataaaacaacaaaatcagaaaaacactgttactgttatgaccaaatgaatacaagcctgttcccagaatttttttttttttttttttttgatgaaacaccactgggcaagtattcagggcagccctagtagggggaattagagccacagttatgctacgaacttgccatatgaccttgagcactgttgcctgatcttgtgaattcagtgtcttatccaaatgagaatcactgaaaaaactttttaagatgaatgaatagaataatctacaaaaaagcttttggaaaatgccaccccaaattttaggaattgctactaatgtcagtaaatgttttcgagaacaagaaaactatttttcttactgttagaaacacttacagttttaagaactgtcctctaaaatggtcactatatgggcagggtaagttggcgtatcatttaaccagttacagaagatatcaatcttcagttttgatgtccttttctcctcccttatttgaaatgttttttcctgtgtgcaaggacagaatatctggcatgttttaaagattaatcctatagcaaaattttaatattttatttgcaaattaaaaatcttctattgcttctatttaaaaacactaaaaaaaaaaaaaaaagtatcaaaggattctaccaaagttagctgatggaatttttctcaattgttcaaaatcctggccttcacctaaatatagaaacatgactatttatttcttgaaaacttatggggtcctgaagacaggttgtttaattggaaaagcattcacagtactgattccaactcacgctgctctccttgttgaccacgcaccaaataagggcagaaatggcctctttcagttttttagaactatgttaacagacaagaaaagcagtgatggaattaccaggctgaggaacaaaactgctcccttgggagaaagaaaaaagaccccaaataccatggatccctaaataataacaacctcatgatttcaactttggcactgggacttttttccatgacactattcaatatctctctaaatctggatgtccatttattggagccaatattcataaactttcccatttctgggcacttacgctgatatatcattcccagaaccccttcttcagcctgacactctctaagtattgactgattctgtgaagcaaatgtcatcacaaggctggggttcttttttttttaattctttattttactatgacaatggtggtggtttttagttactaaattgtgtctaactcttgcaatcccatggactgtagcccaccaggctcttatttccatgagatttgccaggcaagaatactggaggcttggtggggtttagtcaagacttgagaagtgacattattaatataatgtcagtgtttgtagcactgtgtattgttctggattttctttctgtatagtttaaacagaaaagaaatgaaaacacttttcagtccatccaaccaatgctagcagttcattaggagctaaaactgaaacctgggtgtttgagtaacagtgaaagaaaacagtatatttttgttatttgttttataaccggacgcatacaatttaaggcaccactttctagctatccctcaaaaaccacctaagacattcataacagacatgtgcacaatcaggccattcacatggcaaatatagcaggttcttccttccctcccttcttcccctttctctttctgcccttccatcccctcataagtatatattaagcatctactgtgtg

SEQ ID NO: 49517 - DNA, 789 bp, Bovine  19866880467264
  misc_feature (1)..(1): n is a, c, g, or t
ngcgtggatgagtttgtcagctggggtggctggacatgaggaacattcgtttttgatcgttactattttctctttgaggaggaatatcatctgctgtgtgtgggaagtggggagtcaactgagaagaaagaagaaaagacatttgctacagtccttagggaaaatgggagagagagctgattgatagttgttagaattttaaaatgtaggtatggtgcttgagttacagttgtttaaggaatattaacagctttgcttctgcgttttattgttgatgctgctagacctgtggccacagtccctcttttggccactagatggcacactctgtgctgaaatgctgacctgccaggttccttttgttaccagcctatactgacaaattggtaaagtgagttgttaacttcttgagaagaattaagatgttttacttaaaaaaaaaaaaaaaaaaaaaacttttcttaaaaaaatcttcacatgttcctcaattttacctatgggcagagagtgattgtggcaccacaaaagcctcaggaaatacacgattctccttcacactaagtgtaacatgcctaacataccatcgcttccaaattctttgccttaaaaatgctaatcagttggcactaggtgaacatttgcatagtcaaaatagagctgttggcttaacattttaccttaaaataaaccaaaaattgccttgctcttggatgtcagtatggtgcatacagctggaatgctgaagaaatactgccaaatgtcaaatacacagagaaacgaattccatca

SEQ ID NO: 49518 - DNA, 1949 bp, Bovine  19866880468705
  misc_feature (1)..(1): n is a, c, g, or t
nctgctagagaagcccctggtaaaagaagccaatgttaaaagattatatgctgtatgactccagctatatgcccattctggaaaagacaaaaactatagagatagtgaaaagatcagtgggttgacaatgagggaagggaggggaggaaggcataatggtggaacataggatttttagggcagtgaaaatattgtgtatgatactataacggaagatacatttctccaaacccaacagtgagccctaatgtaaactatgggctttgggtgtaatgatgtgtctggtgtatgttcatcgatggtaacaaatgtatcactccagtgggggtgggttgataatggggaggctatgcatgtatgggggtacggaatacatgggaaatctctaccttccagttaattctgctgtcaaccttaaaactgatctaaaaaaataaagtcttattttaaaaagaaaaaaaattaaaagaccaaaacctgaacacctgtggcttcttggaaggtcacaaaatttttataaagcctaaaaagattaatttgtggaacctttcagttctattccatctgcgtaagtgctgatgaaaatcacttggtgaataatttagaagtttagcataaagaacctccttaaataatatgtagttatgagggggaaaaccccaaagctcaaaattggaaaacatcagtaagggaaagaacagaagacttttctctccaaaagtgccaagcaagtctggtttaattgaaattgatggcacagacaacagaatacacttaattaaattttaatcttaatgatctctaagccatgtttgaaacataaacatacatgtaagagttgttcaagatgttggacataaatatgttttcataattcaaaagcatactttgcttgtgaatctcttttaacaagctttggcaggggattcctttcttccagatgtttggtgttgtatagacgcaacctccatctctctgaaaatgatttaaaacacggttctaaagattgtgtttattttacaaaatggtaagaggatggaattctaatagattgtctataggtttgcaaaatgatgagtgtgtgtgtgtgtgtgtgtgtgcacgcgcgtgctcagttgtgtctgactctttgtaactccaaggactgtagcccactaggttcctcttcccatgggattttctagggaagaatactgggttgggttgccatttcctcctccaggagaaaatgatgagaatttaagtcttataaagtcttaacgggtggtgtctattcatctgaaaaaggttctcttaatactttccaaacctgaaagaagtttttagttctaaaacaatattaaataggctaattaataattttgcttaaaagaaagtctcctaaatcataaatagtattttttttcaaatgcattttcatttaaaatccttgttttaagcaatttatagaaggcaagatagtttggtggttgagaggatggtctctgaagttagatttggatttaaatcccagctctaccatttactgacttagacaagtcatataacctctccatgcctcagtgactacatcctggtgctcttacaaggatgaaaataaacaacctatgtaaagaactttttgcaaagctccaagcacataacaagccctcaaaaaatgttacctatcatcagaaacagcactttctagaatcttgctgctcttccatccaacttgcttgatcacttattttctattataaagtactcttttagccaccttcctccacagctatggctccccagaatttctagcaaagatgcttgaacccgtacatgcttatcttttccttctcttcctgatacctcactaaaatgaaaggggggtaaatacacacaaatccacaaaggcatagataatgagagaagagagatcatcaaaggagaaatcacaacgggtttttaggaag

SEQ ID NO: 49519 - DNA, 861 bp, Bovine  19866880493903
  misc_feature (1)..(1): n is a, c, g, or t
nctaatgactttgtgtaagttatttttcctccttatgctctctttggtaaaataatgttaatgacataaaaccctaagagttattacaagaatcaaacgaaagaccctggcacaaacttgctatctactaagtgtaaatatctgtaagttccttgtatcactgagtgacaggtttcatttactgggtatttactctgtaccaagctgtcttcatatactttgtatcatgagtattaacacatcaaatctttgcagtattcttatgcaatagctattattctcattctatttcacacatgagaaactaagccatagacaagtgaagtacacagctagtaaatatcatagctggggttcaaaacatgctttgagttccatacatatgttcttaactgttaaacaacataatctctcccactatcagataatttccatggaccacatcctctagacaatatgaaaatatgaaaagcagtctcattttaatgcactgtttacttaactaaaacgtggttgggagaagtatacaatgcattccgtagttgagtataactcattttaatttatccattcttttgaattagctgcaccattgctccctttgaattgtgagaaatccagccttgtttgtttttacctaggcaagggcacacttttaagtctttgtcccataacctgtacaaatcttatttcttatttgtgttgctgcttatgaattatacaaatgctttcaaggattccaaaaacctgaaaaaacagattttgaaaatccacagaaaggtatctaggaaagtttttattaagttgagatgctatctgctgttctaggcgtgggtgcttttatcaaaacattgtgcccca

SEQ ID NO: 49520 - DNA, 1421 bp, Bovine  19866880579601
  misc_feature (1)..(1): n is a, c, g, or t
ngattgttgaattctatgtttttccgcattgtgttgtctttagtcaggattataaaaccatttcaaggaaatataaaaaatatatatatctttactcttcaaaatcattgttggagtggatcagtccaacagctgtttggcagtccatcccaatgttttaaaacatttgaaggatcatttgcaagctcgtataattcacctcatataagaaatcacaaaggaaagcaaatatcagtaggttcatagcacaatgaatcataggctgcttggtgtggacatttacatctgtgtctgtattctctgtgatatattttaaagaactgtgaaagcactgatcatgtataaccatcagagcattcttacaattgctctaccatggtgaaattgaagaaatggtatctaattcaggccacacggctctctgaagcccttccctgttctcttccactttcattaaagtggaaaaacccatctgtttggatcattgaggttggaaactgagtgatatcacttctccaaaatagatttaatagtatggcttggttaattgtttcctgacctgtttgagagagagtccagactcagagaaaaacatggtgtataaattttcgtattcaatagtggcaaagagtcggatttgcattatatttttaaaggtaattttggtagaactattacagtttttgttttcagttattaaagacttatctagacatttaatctacttaatatatgatatttaatgatactttcacaaaggacttataatatttgatcattattattcatccaattaagccatttgaaaattaattcttaataagtcaaaatatgtgaatagccagaaatgagattgagaaccacgttttaaagtccacttctcaaagagaaaatcatgatccctgtagagacatatggtttaaaatagatccttctcagaccttcaaagtgattctagcattctacctggtgggatcactcatctggaagaaggagcataagcgtattgcaagcaaagttatgaaaagtatgggtatgctttggaaactttttggctatcaaaaaaataaagaaaaagaagaattagggaaaaaactagccttaataataatatatcttttaggaagaaaatatgatgccacatccccattttcagtctttccgttgtttccctgtcctttcccattctgttatggcctcaaatgcacagggaagctaatgaagatcaagcttagagcccttcacgggctgggccccattctaaattctagaagagaggcataataaccactgcacatagttatagattttgtaaaatttgcaaaagttagaacttgggggggcattacttttttcaaaacagactctcaaagtaccatgaaaccaggttcctacccctgattccatggctgactggaggg

SEQ ID NO: 49521 - DNA, 1058 bp, Bovine  19866880632373
  misc_feature (1)..(1): n is a, c, g, or t
naaggtactttgtcaccttaggttctaaaacttagaggctcattgatttgatgactgaaaacaaatggaattcctaactcttattgagttccaaaacaagtttgtaccccaatctacctctaaagacaaccaaacaataaaaaagaaaaaaattaaattgttatgctcacctaagaatgtgtttgatatatactctgacacttgatttccagaccgactcatttcagagagatgggtgagctctcgattaagcatccttttaaactgaaaaaacagaaagataaaatgaaataacagaagaggaaagtttaagtgaaataacatgagcatatgctaagatatggaaaatatgccaaagaatctttaacacatcctgactctttaggtcagtgttatccaatagaactttctacaatgatgaaaaaatgctatactctccactctccagacattagtggctaggagccaatagctatatgtggctatcaagccctttaaatatggttagtataaaggaggagctgaattctagattttatttaattttaatgaatttaaactgcaaagtcacatgaagctaggggctaccataaatggacagcacacatttagatattcaaggaggacactggggggagaatgcataaaaatagcatgaattattagcatttagagaagagaaaaaactaatttataaacacacaaaagggttgccacacaataaaacatggtatgttttttatcaattaatttatcattagcagaaatgaatatgtatactgatcagagattaaaatgtagtcttttccccgaaagcagaactgagcagatttgagtactctactagactctagagaaaacatttgaacagataatacataatgtttcctttttaaagttttttaagtagggatttactggttttcagcatccaaagaatttaccaattcatcaccataagtcccataaatacaattgaaaacagacctgttcagctgaaacatcattgcttcacagtttattttactggttccctggtgcctattttatccaaagaa

SEQ ID NO: 49522 - DNA, 1696 bp, Bovine  19866880641431
  misc_feature (1)..(1): n is a, c, g, or t
ncagaatcacagtgggaagaaaaggcaaaatgattcaactttgctcactttttactaggagcctacctgtctgtggtttatgttgtaatgtcacacatccatacagatgcagcctgcttttacaaagatttcttcaaaatccttctgaagttgacttgaaagtgtcaccagtctctgagaagcttactgaaagcaacaaaacatcatatgactttagccagaaccagtatagcctactttaaatatttataagtttaaattctcttttatgtttccatgaggtatggggagggggggaatgacaaatataagatgtaaattgagggaacattttaagtaatcttataatatatttagatcataattataaaccctatcatgtacgatgcgtttgggagatattatgaattccttttatctcttctcattactagaactttctcccagcttagcagaatttcttctttaatatccttggtttccagtgctcacaaatattttgtatagggcttttttgtgggtattttgcttcagctccaaagctctaaataaggtcctgagcagtcctagtcacttataaggaaacttcattatgccctcccttttagttcatgtttttcttaaatctgaagatgagggcattgaactgaatacgcataaaaaatacctactgttctaaaaattgcctgatcagtttactcatttctggcttgtataactgtccttcagttaaatggaatactgtgaaatatgcattgatccataatttactctagggctgaagtctgatgtttttctcaaaaaaaaaaaaaaaaaaaaagccccttctgcagaaaatccttaatctctcagccttaggtatttggcttaattccttctatatgaaacttttaaatagcagccttcttcacgggtaagatggcaactttatgtttattagtgctgatatcaccagtaattggccactctgtgcaacatgaggaacttgctcacccagggatggaacccatggcctctgtagtgaaagcacaggctcttacctactgggcaacgggggaagtccagatcaccagtaattgagaaaatatgtcttatgtaccatttttgtgtccattatatttccaactcttctcttggtcgatgttctcaagcttatccttgttcatccagcgtccgtctagtctaagaaataacatggagtgaagttctcagtatcagatacgtagttttgagtttctttgtgtatgagtgcttacttagtgcatttaaaacagattggcaatgtgatggagcagctgttgatgctttagagaagaaactttggcaagttgatagcgggcaaactggtaagaccccagggtcaccaagagtagtagaagagacctcttatacatcatgaagtatggcatcggagtcttgggaattgagttctaaaagaaaaaaaaaaaaaaaaacaattggaaaaaaatcacattttctagaaagtaatccaggcaagtttagttttgagaaagtaaaatgttctggtggatcaggatgtcaccattttaaagacggataacatttggccaggccttcctgcaaatcttgcttccaggacctttctgtgaccaagctaacctgtgagacttcatggtaacagatcacgtccccttctcttcatgatagtagccatctgttctttctatcctgagct

SEQ ID NO: 49523 - DNA, 826 bp, Bovine  19866880693324
  misc_feature (1)..(1): n is a, c, g, or t
ntggaaaaaggaaaaaaaaacttgaatgaagtggattttaccgaaagctttatgatgctttttgaatgcattatttatttttttgtgccatgcatttttttctcaccaaatgaccttacctgtaatacagtcttgtttgtctgtttacaaccatgtatttattgtaatgtacatactgtaatgttaattgtaaattatcagttcttattaaaacatcatcccgaattgggatggtgttgatatatttggaaactcttggtgagagaatgaatggtgtgtatacatactccttgtacattttcttttcttctataaaatagtcttgtcaccttagagcttgtttatggaagattcaagaaaactataaaatacataaaggtatataaaatataaaaacatagctgcaggtctttggtcccagggctgtgccttaactttaaccaatattttcttctgttttgctgcatttgaaagtaaggtaacggtggggttagggctgggcattttacatctgagctttgaatcaattgggtttctggcagcagctggattgtacagaaccatggtcaacctctagagcattctgagactcttgagagacaagcccttaaatgctttctgccacgaagcaccaaagcatatatgatgggtgttttttccaataagatactagctgagctgcttcagttagttacatttgattttttcttttttttaattttcaaacactactggggaaattattcttgtccaataattattaaaagtcttttcgacttgagcacatggacaaatgaacttgatttgaaactagagccataggcca

SEQ ID NO: 49524 - DNA, 1302 bp, Bovine  19866880712272
  misc_feature (1)..(1): n is a, c, g, or t
ntgaaacacttgattctgagacagatattccatagaaaccatggtggggacacatgagaccaagtgacatgataagagggttttcttttgaccagaaatagggcaacatttacatcttcagttatgacattaaaaaaagaaatgccacgaagaactttgaaactgctgaaggaaaaacagtcagtggaacaaagtcttgaacttagaaaaaccttagctgtccaagagaacagtcctgctgttttctgggaacacacacaaaagtagaatcaagggctgcatgccaattccttcagcgtccagctttgcactaagggagagccagaattgagcctcacctgcttaaggaccaaattaatcaccacagagcttggctttcaaacacactgatggagaaatgagtaattttcagtgaatgcctttcagcatatacttatatcctaaactaaagaagtctaataatagcaaggagactcctccactaactggggttttcatgagataattacacccctggaggactaaaggtatcatctttgtttcttgctgtataagacaatggatctgattgtcttttagttaccacccactgctgtgtctctggctccaaaacttgacagtaggtaagggagaatatatctgtgtgtaaaatcatggcttgctatcacatacattgtatttcttaagggtagcataataactatagaaatcagagaatccatttgcagactttacactgaacctcatttcagcccaataagttggaagaaattatacatgacccccaccacacatgcacacatatacatacaaacacacatgcaggcacacaattgcacccctaaaggaggatatatatagtcatcatatttctcaagaagaatctttgtagataaactttctagctcacttccagaaaatagtatatctttagactagtttgtatgtgtatgcaatgaaattatactagattatttctcttttcaccttagcttttaattgcaacagttcttttttcaggtgccttgtagcatctactcctttatctcttttctagaatctctgtttggttcttaaatccttaattgtcctgttttacataatgtttaattttatgagatgcctggaatatgagattttttaatgagatttctggaaacctagatgtttttaaaatcagttgaatacaccctcctttccctgaatggagggaggtaaattcccttaaatattcccttgccagattcagaattctgccacagtcttcagaagcactcttgttctccttggttcaagtttctt

SEQ ID NO: 49525 - DNA, 2943 bp, Bovine  19866880764877
  misc_feature (1)..(1): n is a, c, g, or t
ntataacttcttggtaattctagagaagttatctattctaacaccaccccccaactcttccccacccacttctacaattatatttatatccccctcttttaatcctgaggcacctcttccacctccctgttataatatttgatgtacttttaattctaaatctatgttcctcagaagggagaaaagtacataggccatagtaagagtttaaatacttgttaggcatcaaaggttgaatgctgactactatgagtatgaagatatgaagacagtaactgattgtttattgagaatataaaaggtttttatattaatttacatttcagataagatgcagctggcactcagacacattaaaaagaatgttgaatgaaaaggaataagctttccttgagaataaaagaaaaaccaggttggaattattacactgtattatctcccacatttacaaatttataatttaaccaaaataaagttcatataaagtatatttcagaatcaattcagctccttagaggaaaaaaacccagatatttatttggcatagtcattgaatggctagcactaaaatatttgttcttgaaccaagaatgtagaaatgcggggaaattaaatttagaagtgtgtttattctaagtgcagttttaaagcaagtcctataaatcaaggtcaatactcacatatgtgtgctcgtggaattcgagtgtactttattctcctataaactcaaagcttagttacagttgctagccacacacaaacagcttcactgagcggctgaacacagagggcaaccaaggagcaagaaggtgattccccagtcctaagttacatcctggtgcacgtcagacacttatttctcacattaacgtactcaagctaccagggtaactcttaatgcaccaaagttataatttgagaagaccattttgttaccaaaagttctggagaaatcaccagcaattcttaacacctgatcttcttaaagtgtgaatttcaggcagagtcttgttgaaggaagttgcttatgccatttgagattaaccgtctacaagaggggattctgaagtgcctgccattttcagagcactggagaatgtcttcaatttacagagcggctccactgctacaggtctgtatgtcagttaatctgagtaagaattatctttaaaagggacgggaaagttcaggagcataacaacactgagctcccaacacccataagccataagatttaggtttagaaaccttggaaccagaacacctcctatcattgttaataggaatatttaaaaagcactatcagtaggcttaactccattccggctcaattagcttgtatatttaattagtcctaaatgaaaattctctaaatcagggcagttggcttttgaaatttatactaagcaataccattgtcagcggctctctttctcatttctttttccctttcccttactcatctctctctcttctctctctctctcacacatacacatacccctccttcattttttctcactgcagagatgtaaaccaaagtgtacctgcaaaagcacaaaatttgtggtcaacctagaacatttagcaggtactgcatttgtacctgaagactgtagatatattctgtgaatgtttatagataatctaacatgaatttatatagttattaagtatcagttttgaaccatggaaccattcctaggctatttacacaaaatgagctccgcacagagctcactggttctttccatttggatgtcgcacatctggaaaaaaggctgcccctaagaaaaaacctacatacaaaactttaagaaactactttgtaaaaaaatatatatatatacactcccctttgtcaaaacaaactcttgtaatcataaacaggcttattttttaagtgctatgaaagaccactgtagagcaaaactcccggcccctcccccgccccaggtcgttcccgtgccccgtggcgcacagcagagctggctgcatttcctgaggccccggggctcatcttcagataaacctgctccagtaacgtcacagggcaaacagttccacggaagccgactgcacagctttgaaaaacgatccgctgatacacaaaccacaatgaggcaatgaggagaaactcgctatcactttcaatatcaaagcatgtttctctgaaggcgtgaatctctatctggatcttgacatcaatgacagcaaagggacgaggcaggggaagaggcagatcgacgtctactacacaccactctcctggtggtttgactacagaacgataaaacagaattcttgctaaaaagacaagtgtatgttctgtggtacacttttttgcttttaaagtatatatgtatactttaaagttatgtatactttttgtattaaaaacatgtatatgttattctttataacaatcgctgtttctggaagttagtttatcttgcaggaaatctacatgttgaccagccttgaaaatgaacacaagaagctttcccattgcttaatattacttcttatttgtccttttttgtttatgtactcattcccctattgacagatattttattcctttccatttctattaccaagaattctatagggagattttaaatttaaaacattatatttttcttcttatgccaaaatgaaagcttataaaagaaaacacaggaaaacagaaatgtgagtatttaaaagtatctacaattctactttgaaatagttactgaatgatttgttggtatgtatgtatacaagtgtgttcatacatttatcctttcctctctgagtataagcatatatgtcaatctgaaaatttacatatatgtaaataaacaaatgcatcaatttataaacattggatggcaggcttctaagtatccaaaaccatatccagcaatatccaacaaaactacattttttcaatctcca

SEQ ID NO: 49526 - DNA, 1043 bp, Bovine  19866880780499
  misc_feature (1)..(1): n is a, c, g, or t
naatttgcaacataatgaatgtattagttacactatggatcaatgctatacataatattcctgagtcaacatgagctcttaattaaatttccttattatcatgcctctggaaattttccttcacattactaaacctgaagacatgcatttaagtgtcaactgataactatattagtaattttctgagctgggccagagccagggccaaggtgaggttaggaagtaatctattataaatagcaggtcataaaaactgacacatgtgatatcaaactacctataaactaattcaaaacatttttgcctcaagttattctgtcacccagagtatctgccctggagcaagccaatttcagttactgccttaaaaatataaaagagagataaaaattgagataatcagtttatttggcagaagcagaggtatggagaatgacaaataagttaaaaacaagtgacaactggacagtcttagtcctctagaatgaaaatggaagtattttaaattgacagatacatatcacttagaaatacaaaagagacagagagggaataaaaacctgattccaaggtaactccaaagaagaggccatttaaataaaaaatttggatggtgggcaaaattcaagcgttttggctgtttggtttgttgtttgctgttaataaagaaacattagaaaatatatgttttctcttattaactacaaggtcacaagaggcaagagaagggagaaagagagaatgactgacaaagagacaaagtctggaaagaaataaaaattcagctttaagattcctgctatatttcatgcccttttcaaaatatcacatttttctaaaatacattaaaaaaaattttttttttccaatcaattggccaagatgacatgcatccttggtactcttttggggtgagttccttaagcaagtcctcaccaagctctcattggtccattttgggctacgtaggctacaccacttcctaaaataaaccacacagccttgatgctgctcctgctaaagaggagtctactgtcaggtcc

SEQ ID NO: 49527 - DNA, 2387 bp, Bovine  19866880820910
  misc_feature (1)..(1): n is a, c, g, or t
nttttaattggaggatattgctttacatattgttaatttctgcctacatcaacatgaatcagtcataggtatacatatgttccctccctcttaaaccatttgtttctccaaggtgtgcttccaactcaagaccattttagatcaatttcttacactgtggtttcaataacaacagagattacataaaatttaaacttgaaatatatatgatggcagagttgtaattacatgtgttcatgtgatcttttttcatgaaggagtggtgataaaatggaggaatgaaagaggcatttttactagtcagaggtgaggtcagatcagtaggattgtttgtaacctcccattgctggaaggtatattgtgtttcttttacccaacccatttatcaagaagaaaattttttcaaaagtttcagcttaaatagttacagttgtaactatagatcaatctgatacacattagattcattttttttttttttttttactagttttctatggctgctaggagaaggcaatggcaccccactccagtactcttacctggaaaatcccatggatggaggagcctggtaggctgcagaccatggggtcgctaagagtcggacacgactgagcgacttcatttcactttcacaagttcatgtttagggttcagggcataataatgatggcagcaagcacattgtacaaaggacaggaattggggtggggagggcactgaagatgtccttggtgctgaaacatgttgctacagaataatataatggacgaactctcgtatccagagaggaccaaatggatgtactctttcagcactcctgtaagaactttcccatgtcatttctgcacagagctttatttcatggaaaagttaccatgattttttaacacatttatcatctcctcacaccacgtagtttcacattttaattgtaaaatgcacgcatcaaaaatgtttggcataccatgtgctacatattacacacttatatatttctaaaatcctgaacaaatctctcaccaagttctgtttaaaataaaaacacaagcccagtcaagcatgatagaatatccactcacagaaggccagtacctaccctacaggtgatgcaatttgaaattttgtggaaatgactttgaaaactaactatgcaagatagaagagcaaaggcaggctacaataatacttccttcactggacaacattataaggcctcagaaatgagatgtccaaacctcttctagaaataaaaatcaattgagaagagcagcccagaaagcattaatgtaatcagtctgcatgctgccatctaacttacaatccatgacaagttgagccaagtgggagttatttacatttgttcttctggtataataggagggaggagagcgaaaaggatttgctgaatcagattgtgtttgactgaggagtgacagggaagttttcttcaattaatagccagctgcataacttgagctaatgccagctgggctttcgtcatgaagtgacactgaaataaatgattctgtactcagggactgactgggaggcagtgaactcatccaaagatggagcagggacaggggtgggcgataataccacctgaattttaggagcctattctggcaactgttctaacaacactgagttcatgtttattgttaaaggtccataagaatccatttaggcgcaaagatctacttgaattcttagaaggggagaaccaaagaagatagaaatggtctcattaaagtcatgttgatttctttcactgataagtgaaattcacttttatatttatgttaacctggccggggggtggggagcaggcaaaagggttttattaaaggcatccacattcttgagaaggaaaacaatggctatgacataaaagaaacctagtgtagattgaaagcaatcaaatgcctgctagtacactcagaaaaactgaacaggcccagctgttgggatttttccagtgaggtgcctgtcccggtggtcacaagtccatgtgtctcctggctgccgagtcacattcccgtctgtctggatggaagggcgcccacccacaagccagaccttttcattacgggaaagtttccgaggttccttgggtcaggcaaactccacttccccatcgcctcatgtaaacacctcttctatggggatttcttacagaaaaatccacttgaaagcatctaatcaaagaaatggaagtcagaaagccagagctccacaggaatctagatatgacaatatgggcagagaaagagccctccaaagaggaagcaacagcagcttgacctgtgaattctttgctatctgtctgctccctcgactttcaaaccgtagccctggaaatataacacatattctaacattca

SEQ ID NO: 49528 - DNA, 1480 bp, Bovine  19866880859969
  misc_feature (1)..(1): n is a, c, g, or t
nccaggtgagcatatgccatggggctggcctgagccttatctacattgtggctggataatggatgttcctgaattagaaaattattattgggacaaaattatctatactgactgctgtcaaccaatttgaggtaaaatattatcttggcagttgactgtgggaatttgggatactgcactggtctacgtaatgtattattgatctacagttaaactgatctgaaggtcagacttctaggatttctctcaggctcacattctgaatcaattactgtcttttaggaatggctatattagaggtccctgactcatctttagccagaataacaggaataaactcagtgttgtgggctgcagaggcaacaaaattagtgcctctatattttgctttacagattgttcctgaattatggccccgcagtcatgctgccttgctcactcgaagcttctattttgagagagaattcaaataacccacttgtttacactgcaacttagtccagaggttctcatcaccatttatttcaggtttttcaactgaatcactctgcccatcgatatgtatacttgtaaaatttgtatttatagacacacgtgtgtgtgtgtgtgttttaatcggacaatggtgaattctcaacttcttgcggactatactgaaaaacctaaaggacagtctggatcataaatagagtattctactctctgaattaggtttacatcctattatcacataatattttgtactttaaaataaaccaaggggaacatttcctgtaaaggtattacttctttctacgcaggtcataataccgggaaacaaaggcacatttaaagcttactggagccgtttttctactccgtctgccaaaggactatgctattaatactaaatgactgaggtgacttaaagtggtataatttgtgaaacaccgactaccaaaaaacttctagaggagaatgcataaaaagaacttcattgaaatatctgagaaatggtggctaaactctaagaaaaacagaactacttgtgtatgactgtacagccaacttctttgttccctttggcaatttgctatggtctggatattttcctgtccaccacaaaaacaggtttaccatgaaaggcaaagtttccgacctctctccaaggcactgggtaaggctgggttgacatgctcagatgatttaggaattttgcaaaagcaagatattttaactgtactcatgaccaatgtctactcactgactttgtctatacactaatactcccccttaggttgggtgtcactggagtgactatggatcttttggggatctggctaactaaaagttgaactagagatgcatttagtttaggtttggtgatattattacttggtggatctcagtttcttccctgtatctttaggttactgctagctgttccacaattgcattgtcgtttcactctctacatagaaaacattatagaatcaggtca

SEQ ID NO: 49529 - DNA, 1906 bp, Bovine  19866880862326
  misc_feature (1)..(1): n is a, c, g, or t
nattttagtaaaattatgctgctatatataattaataaaatttattctctgtctcttcatctatacacacacacacacacacacacacacacacacacacacacacactagttatatacatatgtaactgtttcaccaactgttaggtatgactgtgtctcattttctctcaccacagaaaactgggaaagacattttaggaggtgagaaataaagcatcctctctcaagttttcaccgtctcccaagagaaacaccatcatctcatagatatgtctccatgccaacagtacacacctctgtgattatttttcctattcatcagggagtaatttggtacttccagctttaaaagagtgcacagacatcccttcaccccttataagtgatttaacaggtgttttacaaaattcaaaatcagtagtaagatatgtaacagaaccacatttcagctgtttctctccattctcactgcctggatctggatccaaggagtttttcaggactaatttcggaaagaacatgtactttttttatattatataacattttgagcaacatttaaatgaatgcttaatgagagttttcaaatagaaatttaaaatattttttaatgctactgagaaagatgaacataacacaataaattatacctaatatttcaggaactattgcttggcagggggaaaaagacaaggcaaacattacaaagcaaaaccgaaggaaacaaagcttctaaaacaattaacccttccctcctccttcatggagcactctgttatttacagagctggcaacaaatgaagcaaagtatggaacacaataatagcaacagttttttgagcacttgccacatacctggcgtaatgctaggttatatacacacgagctctaccactgataatgtcagctactcagggcaactgacaaccatagggacagagcagaggagacacggcgtagcttacacttcctggtgccaagctctaggggcaagaagttctttacaggaaccatcttattatattttcaacaccatcttacagacaagtgattattgttcccattatgtagatcatgccactgttttaagtttgactcaactgctttcttagaatacataatggctaatgtgtccttgctgctgttcggtcactgagttgtgtcccactgtttgtgaccctatggattgcaacaggccaggctcccgtccttcactgtctccaggagtgttctcacattcctatccattgagttggtgatgctatcaaatcatctcatcctgtgccatccccttctcctgccctcaatctttcccggcatcagggttttttccattgacttggctctacacatcaaatgtttaactcataagctacctacaacatgtgaagcactgttctaagtgccttacttgcaacatcatcttcttgaaacttcacaacaatcttttaaaatagggaccatggtttggaccatgattgcccaaaacctgatttaacagaaaagaaaacttaacacttaaaagaggttgtcccaccccaggtcatacagttggtgagtgacagggccagaatatgtacccagactatttaactcaagctcaaaacttttaatcaccatattttcagaaatgtccaaaaataaaaaaataaaataacaacacatggctgatcttggggaacaatatgcataaaatctaaagaaatgtgattaaattcacatttgaaagagaaggctatgatttctaattctgagatgggcagttttccttagacatcatttcttcccagtctccactgaggaaggaacgcagtgaaacacaactgaaactgcatcaggaaggttaaccagaaacaatgtggacaccgaatagaagcaggtctcatcttcccaaagaagctcgg

SEQ ID NO: 49530 - DNA, 3933 bp, Bovine  19866880877749
  misc_feature (1)..(1): n is a, c, g, or t
ngaatatatattaaaatgtgaaataacttaaacactattttaaatttcatttaaatcttgctttactattttcaaatactaatttaatcaagcacaaaatgtctgattagaggctgaaagtctgaatcctaattattctgactccatacaagtgaattataaatatttcttttttatatacccttgagaataagaattagtggacctctacagaaatgttctacatgagttatttataaaagtgggtaatactatattactgctggagttctgaaacttaataatgaattaattaatacatcatttagtacgtcaatgtctgtttgcctatttttttaagtacagaaaattattagcagtctgcaccttccaaatgaataacaaccttctatcatttatcttttgttttataaagtgctcacatatttaatctagttttaataatgacctaataatctactcctgtgtatttactggaagagtaatccatttatttttcctactgatgtttttattctaaaatagaaacaagttgggggagaaaaggatgtggaattattttataagcactgccttcagtatagtttgcaacaataggcaattctcacaaacttttaaattcatgacctatttataacttgtacaaaaataataaatagtggaacagtcatgtagaatttagacagaaagaagttttcctccccgtaaccatcactcagtattccttttttaaaaatgaagtatagttgatttacaatattgtgtaagtatcatgacgtacagcaaagtgattcttatatataaatatatatacctccaatgttttccattataggttttataagatattaaatatacttttctatgatacatagcaaattcttgttatctgttttatatacagtagtgtgtataggttaatcccatattcctaatttatcccttcctctcctcctttcctttcatcaatcatttaaatgaaagatttcacttgaggcaatgggatccatgagacggagatgcccggatgaaaacagaaacaaacactacagcggaattaaatttgggatttcctctccttcaagtttgagggaaatatgcaatcagcagctaagaaccaagtgacgtctgctgcttcagcaacctatggagtcatccaggtaaggaaggacgagcgtggctctgtgcacaggaaaggacttgagagacaaactgcccacacactcgttttccatttgaggaaatggagcctaagtgaagttaagtcatttgtctgaggtcacacagctagccaggggcagaggaggaaccataaaggtctctggatgtacagtgaaccggtctgttaatacatttctacattgttgcttctagcactcggcacaccaagagcaatcgaagtcaggtaagcaatgcttcccgccaactccagggtcaacgtgagaaaaattaaacaagagctatggaaaaagataaaacaagtggccactgagtagaaataacgaattaatgataacttcttcccactttccttccatccccattccccaaggcttttgggtcagactaaaaagaacagtacacagcatccactaatctgtgttctagagctctcactgccccagcgtgtgctctcaggcacttttctgtacctctctggagcccatgttatgatctcaaaacgcaagatgacctctccaaggccccttttcctctgtctctaaatggctgacattagcttctttttttttttttttttccttttgaaccctttatccatgcaataagctcaccataaagaaactccaacagtcgtgatttaaatgcagaaaaaatttcaatgggtgtgtctaataacaccagcttttaataattctacttgtaccatgaccaattcagtgtttcatactaatacagttcactgaaagagaacacctagctctgactgcaaagctgtcttgagacatttctgttggatgttagttttaaatttcatatattttcacttcacagaaccttatttcctcctttcaattcacaggagaaaaattgttttaatttacagatggaagcaacagcataaatgtgactaatcactccccacccccacaaaaataactatctttacacacccagtttcttccctttcaagcaacctgaaattacattcttcaagcagttaataaaactccatagtaaatataatacagaggaaaccaaaagatgaaaaaactggctgagtagggaaatttttcctaacagtatgccatctacgtttaatagttcactgcaaccttttgggttttaatgctccaaatgaatccataaacataatgggtctttatacaatgtagggattaggagcctagccctactgtctcaggagtacgttctctgttaggaatggactacttcaaagactgtgttttacaccagcaggatcttctctcaccataattactgttgttgttactgataacaattatcatcatcatctttttagcatatcatgttgtatacagtacaaatcctacaaattatcatgcttaattgcttaaataaccttttcaaattttcgtgcatgctatgtatccctatttagcaaattagaaaaccaatacttagaagaataaggcaacatattcaatcttacagctaagttataataaagccaggccttgaacaacctgattcccgatcctattcctttatttgtaccataagatggtaagtatgattccaagtagtcacaaggttagagctgtcaggatcctacatttaccccaagtacatttagatagacgtcttgaaatagacatcccttttactttctgtagaaactctctcattatttcacatttgaagcaaaaatcattctacaatgtaaaagtcatcctttcacgctggcctcccatatcactgaaaatatatctccttgtttactcagcccaaacaaaaagttattggggaaaaaaagttagtatttattttgaaagtgaatagggctcaagaaagggaataatagagtgtttttaagcccatctttcaaacatttaacctatattaaaatagctaacatttaccattcagagaagtgcaaacaaaattcagcaagatatcactgcacttagtacaatcattacagtggtaagtatggccaaagtggtgctcagtacaaaagcctgcttaaaatatccaaatcttacaagctaatgtgtgatcagtgattatcttataagttggggttggggaaatggttcaaaatagctggaccctttccttaaccctcatatccaaacaaacgacagacgtatcaaaaattaaatataaaaagagaaacctcaaaagaactaggataaatgtaaaaaaagtgatgattttaatatggagtagcacaatcctttggagaaggaaacagcaaacccactccagtgttcttgcctggagaatcccagggacgggggagcctggtgggctgccgtctatggggtcacacagagtcggacacgactgaagcgacttagcagcagcagcagcacaatccttaaacatgttataaaagtagtacatggaggaaagtttattaagccttgctatattaaaaaaaaaatcattaaagcaaaaaaatcaagtaacctgattaaaaattgggcgatgacttgaatagcctcttcttcaaagatgaaaaaaatcaaacaagcatatgaaaagatgcacaatattattaatcatgagagaaatgtaataaaaccataatgagatataatttcatacccattaggatggtgacataaaaaagcagaaaataggtataaaggcagatgtggaaaaattgaaactcttttgcactgtgggtaggactgtgaagtggtacaaatgctaggaaaacagtagaagaatcttcaaaaaattaaaactagaactcccacataa

SEQ ID NO: 49531 - DNA, 1306 bp, Bovine  19866880919969
  misc_feature (1)..(1): n is a, c, g, or t
nagctgagtttgccgtggtggttgcttaactaactggtttactagtttgagtctcatgcatcatgatggctgttactggttgtcaaggtgtggttgatgagacatagaatcataaaacttcagacttctcaacgaaattcacagctgactcaaattatgttttatagaagagataatgtgaaacaaatggccaagtgattttggcagagccagacaactagttaatatgaaaactgaggcttaaacaataggctgctaacttgtgatctgatgttctttctagtgtaactgaatcacggaaatgtatgggattagaagtgccttcatgggaatgacagtacagtccgcgggtttgctcctgacattgactaagggtggagtgaaggtagagccaccaaacatcagtgtgcctactgtgtgtatttgttttagaatgttaatggaggtgtggaaagtaagaaaattgtatctgactcctcaaggccctagtggaggctgtgactggtctaggactacctcagttcagttcagttcagtcgctcagtcatgtccgactctttgagaccccatggaccgcagcacaccaggcctccctgtccatcaccaactcccagagtttacccaaactcatgtacatcgagttggtgatgccatccagccatctcatcctctgtcatccccttttcctcctgcccccaatccctcccagcatcagggacttttccaatgagtcaactcttcgcatgaggtggccaaagtattggactttcagcctcagcatcagtccttccaatgaacacccagaactggtctcctttcgcgtggacaggttggatctccttgtgaggattagttagttagttagttcagtcgctcagtcatgtccgactctgcaactccatgaatcgcagcacgccaggcctccctgaccatcaccatctaccggagttcactcagactcaagtccatcgagtcggtgatgccatccagccatctcatcctctgtcgtccccttttcctcctgcccccaatccctcccagcatcaaagtcttttccaatgagtcaactctttgcatgaggtggccaaagtactggagtttcagctttagcatcattccttccaaagaaatcccagggctgatctcctttagaatgaactggttggatctccttgcagtccaagagactctcaagagtcttctccaacatcacagttcaaaagcattgattcttcagctctcagctttcttcacagtccaactctcacatccatacatgaccacggaaaaaccagaccattgtgag

SEQ ID NO: 49532 - DNA, 1169 bp, Bovine  19866881014515
  misc_feature (1)..(1): n is a, c, g, or t
ncaagagtgggcctggtggctcagattgggggaagaaccagctggcggaactaggcttcagacacgtaacagtcttttccttctctaagtgtccaaattctcttcagtgaaagcctgtgagtgagagagaaaaggaagcagagagctatagccactggggcaaaaaagaaaggctgggcacgggtctctaaaagtaaagaaattcaactggaagctgagaacatcaagcagatcatgtttatttaaaaaggacaatgaaagaggcaattgtgggaggagaaaaacgggctggctgataagtgggtaaagaaaacccagccatttgagaacttaattaaattttgtagcttgaattccccacttgctgctccttctgcctgcctcctccccaggagttggcccctgtggcaccagggtcctgctctctttgtggggaattaaagtttagaaatgaattcatcagggaaagtaaccattggtaatgtaactctccttcagggtaagactggcacttgaacccatttggttggctcctggaggaaggtacttgttctataggaataaagccgctattccagctctgtctgaccgcccctactccttaattcctttattttgaaatgagacagggtgggtccctgatcctcttaatctctgagtggactatatggtgggttactctgaaccacagagggacaaaaagtttaagagaatagcttttagagtaaggcagtccttactgcctgagttttgccactgactagcctgagacctcatacaagttaattcacttgtttaagcttgttctctacgataattttaaaaatgcagagagcagtatatcatagggtgatgctgaaaattaattggattatgtctgtaaaaaataagtgctcagaaaagcatgatgacaatgaattttatatgcagacacatagagtgtggggaggattttctgaattatttccagctccttccagcattttactcttctctcagattctattacccactgactgactgagagggtcttcccagcctttaccgatgtgattaggaacagtaatcctggaaattactctcaaattgtttatctaattaaacaagcaaacctttttaacgcagacatcctgaatctctatagcttgtctctgctcatttgctctgaa

SEQ ID NO: 49533 - DNA, 986 bp, Bovine  19866881015495
  misc_feature (1)..(1): n is a, c, g, or t
ntttattaagagttggctgtttaactctgaaagtcactgaaaaaactaaaccctggaagcctttccagctctccatttattttccattctgccatctccatggacaggccacataagcaccgcactgacacattccagcctggactctgtttgcacaaatgtttgtgctgtaagctcacggtctgtaatgacaagcacactgagtacactgcgagaactccctcctgcaaaacacatgagactcttacagctaatactggtatctatttcaggtagatatcgatgcaaatgtaattaagatgtgtacacgtcactgtggctttttaacttccttatgaccgtgtatttgatagtagagatctcaggactttactctctactcatttattttctcccagaagagaaattattaatataaaaccttgattcctcagtcattctttaaatctcaacactttgattaattggacatcagcaaacactcatttttaaatataacaattcaaaactgactgtatgctctttttttaattacaaatttcatcatggaaactatcagaggtataaatgcagttaatgtgagactcacaaacaagagatgctgaattctcttatctgttacccagtgattcattctgttctgaggaagcaatcttaaatagtgttgcaaggtacataaatgccacttatctggctctgcttattcaaaacaaattcatggatatttaatcatagttattagaattgaactgttacattccagaaacatttttaatgcaaaataaatacactttttagaaatatcagtttttaaaagtgaaagatatcatcccacctttcaaaactgaaagtaataaaatatagctattggtaagatttgcatagcggcatactgagctgactattctttaattgaatgttaagcaaaaaaaaaaggggtttaaaaaagcaatgattatatgtgagaatataatatgagtatacat

SEQ ID NO: 49534 - DNA, 947 bp, Bovine  19866881042212
  misc_feature (1)..(1): n is a, c, g, or t
nttttgtaccctaaatgcaggagtccgtataacatcaaagcctggtcaccccaaggtctgatgcatcccacagtaataaattgccaacgtaagggcccggtctgataaatctgacccttgttagagttcccccaaaatgaatctttaatttaccttcagagatggtgttattaaaggaatgagtaaaccaataattattattcagtacttctgatgtgacagtttattagttgcttttacttaattaaaatctcccctgacatagagtctaaatatataacatctgacattgactcgaaattatacagattttgctttactgtttttcacacacatatgaaaatatagaagggaaacaggttgacaagaacataatagaatttatacattaaccaaatagagagtgagacttcctaaatgattcctgtggcgtgttgccattattcaaatgttttggggattctccttttgagccttccttcagagtctgtgctacacttacttttaaattcactgatgccaaatctccatctgctgaaggtcggtctccttctatgaagctgccaaaagtcctttggcattaatatgtgggtcagttggtaaatgactctgaaatcaagaagcggttttcttaggaacactggaaatggtttgtaatgataattcccaaagggttattccaaaaatgacctcaaccctagtagcattccttcattcattcaatcattcaatgaataagtcatttaggaaactaatttgaatttgtgtatggtgtatgtgtttgaaaaagtatattcattactttatatacagtttatttagtaattacttaaaatgaatataaatagaatgatagattatctacaatatttacatataataagatctgatctgataacatggatatgctatatatatatatatatatatatatatatatatatata

SEQ ID NO: 49535 - DNA, 724 bp, Bovine  19866881059209
  misc_feature (1)..(1): n is a, c, g, or t
natttttctttcccttctacccatcaagtacttgaattcattcttggattttttttttggtgtaataaattcatttttaatttatattattactaagagttttaaatgccttaaataactatgttgttacttttattatgtacctttttagcagaggtttttgctgtaaagcatgctgttttgaaaactatatttttttttaaaaagacagacaagaagagtggtgagccatgtgtggaggggaaaattggtataattacagtgaacatttatgggtcagtggaacataagccccgagggaaaaactccgaaaatggggctctgagaaccagggaggcgggggagaggggctgcttctccaggccacctgggaagcccggggctacttggcttggctatgccagcagcacagatggcatctcggtgaaatgattactcttttgttccttctttacaagcatcttgaagacaaatatttatgccccctttctactgaagacattttccctcagtgtgactcattctccttcatcttcagatatgattattctttgagcattctgaacaggaagttgaggccagctgcagacttagcacagagacagctagtgatgtgtgtgtgcgtttctgtgtgtctgtgtgtgtgtatatctgtgtgtgtgcaaacatctgtatctgtatgtgtgtatctgtgtgtgtgtaagcacacaggcagagtctcaca

SEQ ID NO: 49536 - DNA, 1105 bp, Bovine  19866881093820
  misc_feature (1)..(1): n is a, c, g, or t
nacagttactgatattgtacaaaatatcctataatatctatgaatcagaggagctgttcaatacatgggaactttggtttttctctggattttttgtttccttatatttttaaatgaatattatatcaatgcatcaatcttaggcctagattgttatgggcaaaaaagaggctctgttttgtaaaaaaaaaaaaggaaaaacaattctaatatcaatgaatctattttcacctactatttctgatatgtctgcagaaaaagcttgctaccttctcaggaatttgagatgcaggtcaaggtcaaatgacatcataaaagtgacaaaggaaaccttagtctccatgaaaccaaagactcatacgaataattaccaaacattctctgttcatctttggagttggatacttgaaaagaatccaatcaagaagtaagtgctgtagcgtcatctgagaagccttggctctcaggtgttccaaggactgtggagcctctcagattcagagaaatgactctttaggtacatttaaggatatgtatttgcaactctagtactaacttatcacagggttgaatgaaaatggcaaatacagcaaaaaaaacccccacaaatgcatagagtggcattttcaagatcttagtgtcaacattttgttaaaagagaattataaagtttgtgcttgtatacacacacacacacacacacaatacgtacacacacaatggaatattattcagtcatgagaaagatggtgatcctgccatttgtgacaacataggtttgctctgagcacattctgttaagtgaaataagtccgacagagaaaggcaaatactgtatgatatcatgcacatgtggaatccaaaggagttgaactcgcgaaaacagagagtaaaatgggggttataggggctgaggggtggggaacaaagaagatgttacttaagggtacaagtttgcaactagtagctaaagaaatcctggtgttctgatgcacagtacaatgattataaacaatattatacgataaacatcaaactttctaagagactagatcttaactattcccatcacagaaaagaaataataattatataacatgaaaaa

SEQ ID NO: 49537 - DNA, 2155 bp, Bovine  19866881100849
  misc_feature (1)..(1): n is a, c, g, or t
nctgatctccttcagaatggactggttggatctccttgcagtccaagggacgcccaagagtcttctcccacaccacagttcaaaagcatcaattcttcggtgctcagctttcttcacagtccaactctcacatccatacatgaccacaggaaaaaccatagccttgactagatggaccttagttggcaaagtgatgcctctgcttttgaatatgctatctaggttggtcatgactttccttccaaggagtaagcctcagtaaaacaacagtggtaccaaagtgtggttgctttagttttctcagtgtccttccaacagacataaaatctaaatcctaaattttaatttaggattaattaatttaatttttaagtcctaaatcctaacgtaaacactaaatccatagtgtaaccactatgcttacttagcaaacacagtgtcaagagacattctccagatcacctcctccaacttgcttctcctaatttcttctcactgagctgcttttgtcaaattgccagccctacaaaggctatcagatttaagggcactattaaatctggggctgctccgagacgtaaagattctgtgtgttttgtgcgtaagctaaatgagatacatcttttgtatctaaaatagaacgccgtagcttagcattcaacaaacaagtaaggctacctgtggttcagataaatagataaattattctatttaaagactttgcagctttggatcaccgtaaacaaaaccttcacatgacatccattatatgctgaatctcaaaagaaatgatacgaattacctcttttataaaacagaagcagattcgcagacatagagaacaaatttatggtggccaggataatgggggaaagagatagttagggtttgggatggatgtagacacactgctgtattttaagtggatagccaacaaggacctactggacagcacagggaactctgcccaatgttatgtggtagcctggatgggaggggaatttgaggagattggatacatgtatatgtatgactgagtccctttgctgtccacatgagattatcacaacgttgttaatcagctttactccaatgcaaaattaaaagtaaaagaaaaaaaaatgccttttcttcaacaatatattgttttcattgtaatgtattatatacaacttgttatgtacttaatgagattactgtcctgggattttaggatgtgtagaaaatacaattaaggcattaaaattaaatataaattatccccaccagaaatactcctagctggttatttactaaagcatcttgaatccagcagatcaaggaaaaattccccaaagagactgtaattagaactatttaggacttggcagaactggaaccaaaatttctttataaaaatgaataatgccttgggctacgtaaattataaaatctgaagctctaatagcagcattacgataactgagtttaattgttctgatagtgagctggagagaggcacactcagcttcctgaatttatgttagaaatacatgggattcttgccaactggcgattgttgttaagcagtactctgtccaaggaatgtaaaacatttttaaaaaacaaacaaacaaacaaaaaaacacctggacgacaaacattctatgccattctatgccatcttcactattggagaaggagatcacagtaatgtttatatgaagactaccagtggatttgaaaaatggttaataataatccccagggggaaagaaagaagataacagattctcttagtcttgaaaaaattgttaataataatccctgggggaaaagaaagaggacaacagagattctcttagtgatgagtgatttatgttgaaatagccagtgcactctccctcacttcctttttggagcattgaagggtagtggggagagggctgccctggtggctgccctggtggctcagtggtaaagaatcacctgccgtgctggagacacaggttcaatacctcattcaggaagctcctagagaaggaaatggcaacccactccagtattcttacttgggaaatcccatggatagagaagactggcaagctacagtccatagggtcgcaagagtcagacatgacttagtgactaaacaacaacagcagcagcagcgttt

SEQ ID NO: 49538 - DNA, 1223 bp, Bovine  19866881119538
  misc_feature (1)..(1): n is a, c, g, or t
ntggctctgtatccatatgacttatgaatagagtctacaatttaaaaaggctggtaattaaggtctaatatcgagtggccacagaattggaactacatgacttctactatgttaaactcctcatggtttaaaacatgttttgctttgttttttttttcccccccagcagcaaaaccatttaaaaaatgacataactttgccacactggtgatagtaaagcttcttcctgaaactgctacttgaacaacaattttggtagttttctgtttaaggaacaaaaaaatgtactgaagctccaaagctcaattaattcagtaatctcacaagagctttttatttataaagatatttatataaagaataactttaaaaattattttaatgaactttgagacaaatttttttaaattttttttctcattcagcatttctaccaagtttattagaaagactgttttgcttggaagtaatttcaccactagtagaatgactttggcacagatacacttaatatcttttctatttctttaagataaatgtcaaaggtcacaggaagtacatatgcgtaataaattgcaatgttacttcattgtttacttcactgtctttagttactatttgtcacatttttatttttaaatgctcagttgctcagtcctatcagactctttgtaaccccatggactatatccccacaggctcctctgtctatgggatttcccagccaaggatactggagtgagttgccatttcatcctccaggaatttcttaaatattacaaagcgattaacaagttctttaagatgaatgtcttcctgaggttttctgattttaggaaaggttaatcagattttcaaaagttatagtcacttttaacttgcagtgccccaggatttccagggacacagccagttacaccaaggacacagttcagccaactggccccacccaccctgctggcattacttcctgttgtgcatctcagaaactctcccccaggaaacttcctccccacctccttgcatcacactacccagagcccacctctgagttcccagctccacgggcagcaccagcaatgcccttctctgggtatcaccactataagtgatggagaaaagataaccttaaagttaagatgggcaaacgacagagttggaacaaaggagagagttctcaaatagagtctctaaataacagcttgaaaaactaattgggtgtg

SEQ ID NO: 49539 - DNA, 2094 bp, Bovine  19866881123135
  misc_feature (1)..(1): n is a, c, g, or t
ntatatgagacattcctcacagctacacagtatctcattaatgttatacaaaattgttgaatgagccctatactaattgacatgtaggctatttctagttttctactataaaacttgctgtagaacattttgtatacatatatttttgcacttttacacagggccaacagctagaaaaaattttaagagtggagttgatacattaaagatacacaatataaagaaaccttaaacaatgtaaccaaagtatacctcttaaatttgttgacagctgcagcagctataaaaactcagtttaaataagcataatcacttgagcaaaacccattcttctgaacaagattaaatgaaaattgacaattttcccattttctgttatgagagcattaaagaagaagcacaataagctcctttgaaaagaaattaagacaaaacccaactggcttattctacataagctctgaaacttgagcaagagagaactccttttaatagacatgaatttatttgaattcattatgcggtttcccacatgccgtgcccatttaaaagtgacctttcagcctccaagtagaagtctaacagcaaaaggatgaagagaatctgtttcaattaagataaacatcaactgtcaaaatctgattagactatttaaattctaaggcaaaaccgtcatcaaaagaaatggaacactccagggcagcagtaaattgggtgtaatgtcattctgtgaagttctgatggtgcagaaagatttctgagtgtccatgaaacacagggctatgtttggaggcattcattctcctcttttcttccttccactctctctggctcattttggagttgtttttgagtgggtctccttaagctgcattatcacctcttaaatagaggtatctgagcaaaggaaactgttattccctatggtcaaggaatggtagatactaactaacaaacttttatggtcgacagtaacaaaaagttacacatacatctttaacagacattaggttgtcaaaagaattagaatgcaatatgctaggaatccaggaaggcaatggcacctcactccagtgctcttgcctagaaaatcccatggatggaggagcctggtaggccgcagtccatggggttgctaggagtcggacacgactgaccgacttcactttcacttttcactttcatgcattggagaaggaaatggcaacccactccagtgctcttgcctggagaatcccagggacgggggagcctggtgggcttccgtctatggggttgcacagagtcggacacgactgaagtgacttagcatgctaggaacagagacacagagaaaagacatgtgggcatggtgggaggaggggagggtggagtgaattaggagattaggtttgatataaacacaagtaccatatgtaaaatattaggtttgacataaataaaagtaccatatgtaagacacatagatagtgagaacatactctatagcacagggagctcagctcagtgctctgtgatgacctaaatgggtggcatgggggtgggcagtaagatccaaaatcgaggggatgtaagtatgcatatagctgattcactttgttgtacagcagaaacataacactataaagcaattatactccaataaaaaagaatccaatatcctatatttcacactaaacccttaattaacttatttttggttgttattgttgcttttgtcattattttgttgttttctgatttgtgacgggtttcagtgtgcttgttgtctggagctgatagagcccattcatgaactactgaggaattcaagggggaaaaaatgacatatgtctcaagcagtcttgccaaatagaacttctgtctttttcaccattcatattgtcacagggggcacaccctcccatcagctgaaggccaaattatatcctctgcaaagattactctagcaagttgctagaatcatttttttttaaaaaacacatatatctattcatcaactacatttcggattcaaaccttaactaaactaagccaatagaggtattagaacactgaaatctaggtactcacaggcagagaaaattcaatacg

SEQ ID NO: 49540 - DNA, 1282 bp, Bovine  19866881160240
  misc_feature (1)..(1): n is a, c, g, or t
natagccttgactagacggacctttgttggcacagtaatgtctctgcttttaaatatgctatctaggttggtcataatttttcttccaaggagtaataaacatgaaataacttagggtttttagttaagaaaagagaagaatttttaaaaagcatgataacactgactatgttgattaatgggcttatcaagatgaatagagtaaggtcctggctctctgatgggttactccaagcttcttgccttggtctaagttatggaagacacgagagactgaagctgtggggtttccaaagcagatccaggaaccaagaatggcagggaaggagatttcagttgtatataagcaaggacttcccagtcaatagacttgtcaaaacacagaattgctctgtatgatcctcatccaggaggtctgcagaaatgttcatcacagacgttactctacaaactcaactatggtatagagggagaaccaatagccattagcacattgtgactgacacgggctggccattacccacatctgttttaccttgtggctcagctggtaaagaatccacctgcagtgcaggagacctgggtgtgatccctgggttgggaagatctcctggagaagagaaaagctacccactccagtattctggcctggagaattctatggactgtatagtccacggggtcccaaagagtcgggacacgactgagcgctttttttttgggtaacaggactgagataggtttcccagcctcctttgaagttagatgtggccacagaactgacttctttctggggaatcctgggataagtaatgggtgcaattctaggcctgccttataaaaactcaccaatgccatcttctgtgatcttctcctctgattcagtggagcccagcaaacttggaaaccatgtgttactaatagcggaaacataagataataggaccccgggggtccctgagctacccaggtcaggctagctccccacaagaagcagaagcaagaaataaatatttactggtgtcagtccactaagatttgggggagtatgttgtagagcaaagtgattatcttaatcagatgctttccaatgtgattttatatatatatatatatatatatatatatatatatatacactgtagtataagtaatttgaaaccaaggaatagctcttgttcaactttgtaatcagtaggtacaagataaacacttcggattcagtaggtagtaaacatatgcatattgaatggaagggagtaccaggcataggaaacaacat

SEQ ID NO: 49541 - DNA, 1265 bp, Bovine  19866881199350
  misc_feature (1)..(1): n is a, c, g, or t
nataatttacaatttccctttaggaggtcacttcatttagactttgttggtcttcttgttgatcttctatcgttggttttcttctatgcaattaaatgttcttgtatcttaattattttctgtgtcccatacccggcaaagtatatttactcttctgtagaacatttgctttatttatgttctaattgctgtttttaagtcacttatgtttaggtcgcagttgtactttaaatgttagcagacataatatatagcaaataagagcaaataaagacttgatatttttcctactcctttctatagaaggataagctatgtgagctaagcgtgactttaaataggatgctgggaggaattagaaattgtggcacggtcacagagaccccacattacaatccatccttgtcagcactctcattccacataccagcattcctttctggttaatggaaaaatcgttgaaagatattagaggggaaataaaattgtgtaaggggtaggaagttcatatttggaaggagggattatatatggctattataataacagataggggaatgcatatgtgaatttttgtacacccttggttttattgagcaaaagtagagagatttattttcctctctttgttaattgtcgaacagaaataaaccctactgtgcaggaaactagtcactcttccctactctctcctggtattaaaagagtttattgaaatcctcaaatgagcttcatactgtggtcccagtgatgtctcttgcattacttcagtcaaaccgtgcagtgtgaccaatgcagacagtctgttaggagcacagggatagcttgccttttcttcattctttctgcctctattgtttctgtattttggttgcttttatcctgccattttgaatctctgatgccccaaattatagtatgctcattatatgcaaggcttctcctcctacccaccccctctttcttccccccagcgacatctcacttcattcccaagaaaaacatcaccctcctctctcagctcgctgtgtttacatttctctgctcttttcctctcttcttctggcatgctggtttaatcaattttaccaaatgactttcctggcagccgtaaaaagaaaacccagagccggttaatagcaatctgatactgtactttttgtcatttctctgaaatgtatagaaatgtttggtcattggattgatttttaatgatgtaaatgatcagatgtttcaatgctgcattgcagcaggccgataataaa

SEQ ID NO: 49542 - DNA, 1592 bp, Bovine  19866881275932
  misc_feature (1)..(1): n is a, c, g, or t
ntcagtctcccttgagatccaaggcccaggattcccaggaagcctgacttccccttgatacagaccgccaccccttcctgcttcccatctatttcttttctttgctcagaatgagggtgcaatgcagtagtccataccacatgtgatcatgaaaggacaagcagaggatgagataatgtgctaaggatggctgagaagagcataaaggaaagcatgcatttgaagacatcacaggaccactgtgctagccctgggctgctacctccagcatcctttgtaccagacaaactcttagatgcttaaactgctggtagtttactgttacccacagctgactgcattcccacctgataaaaaagactctaatctttttttaagtaaagacttcctagcacacatatacttttaaaacttgagtatttgaaaacagttggtgccagactatcataattcaagtgactgccttcttcctagtgttctatttggacacattcatttagctttttagagttaatgtttccttcagtcatattctttgcctactagacatttttaaagtaaatataaacaaattacctatcttagaaattgcaaaaaaaaaaaaaaagcagaaatattggtaagtcatctaattcatttcttgcttcctttcctaaatgattaattcttttggtgtaaaatatattataattgaatgcagtttctactgtattttatgcacactgtcatgctaatgtgtacaaaaggttttgtctatcatgactttatcaaataaatcccaatccttgccgctgcaaacgctgacagactgaataaaattgctgacaatttccaaaatctgtccacagagatcactgctaggcaaacattattgcaagtcctggtgggtaagctaatgctttcatatttgctttcttaatttcaaaatagtaattatgtattattaaattatatcttgcatcccctgtaattttctgtactcactgtacagtgtgaatttcaataaaattcaatctctttctgcctgtagttttatgtaaggcttaaaaataaacccatcaactaacccatccttctttgaaatcctgcaccttaatctatgctcatatccttagtgaaagccatatttttatgattttattgattataaaattgcacagtgtatttcaaatgccaaggaagggttggggtggtggtggagagagaatgaacacaaagaggcagaatttctccctaccaaaaggtctttgttgtcatcaggaagctttctggattaaccaagtaatttaattcacaaattaacaaaactccactatgaagatctgatgcaagagggaatggaaaactcttgaccttttggattctaatctccagatcggctctttctatgctcccccattaaatactggggatgatcagtatcagctttcagatttaggcaaagtagctaataagcctttgactaagatagtaaaggggaactggtggtaattaaataataaaactgatttacagaggtttcacttctaatcttcttcagatggacacaaactaagaacctatttatgtcaagtaaaggcttcatcaatgca

SEQ ID NO: 49543 - DNA, 839 bp, Bovine  19866881277241
  misc_feature (1)..(1): n is a, c, g, or t
ntcccatcggtggtgaatttggcggtaattgtgctgttggggagctctgaactcaaaatgttgccattatgagcttgggcacacaagggacatattggaagtggcaggcagtgtcagcttccgccaaaagaatggtcacgcaaaatgtgtgcttttgcccaaaaaggaaagtaacgtggctgtaactggatattgtaaataagcggtcaaaggatccctaaagaagcaatatcacataagcctccttacagcatatttttccttctgggatttgtgtcaggctcacagacatgaaggcagccaggaaattgttatctgtttatctctaatttctttttataattgcacatgccagcaatgggagaaaatacttcttttaaagaaaagtaaaattggcagtaagccttctgagttcttaaaagaccttaacaaacccaaacttctacttatcatggagttgtcatacttatccccatcagcacttgattttcaactgactttgagcacatgcataggtatgtgtgtattagaaccctgacttggcctcaaatcttggctctgccaatagctttatgcctgggcagatttcttaggctctctacatcttggttttgttatctgtaaatgtagacagcttgatgccacacagagttctgggaggttagttgagaaaatgagaaacagggatggagcacaaagctaggcaaatggcaaagatgaaatacaagtgaatttgaacccagttccctctcaggagacagcaaaatggtttcaggtctctcaaaagcatttcaagggacttgcctggcggttcagtggttgagacttcacctttcaaa

SEQ ID NO: 49544 - DNA, 1022 bp, Bovine  19866881351432
  misc_feature (1)..(1): n is a, c, g, or t
ngttgatttcttttaggattgactggtttgaccttgcagtcaaagcagtcaggctgttgtggtggtggttcattcggtaagttgtgtctggctctttgtgaccccatggactatagcccactaggctcttctgtccatggaattctccaggcgagaatactggagtgggttgtcctgctctcctccagggcatctgcctgactcagggattgaaccctcatcttttacatcctgcattggcaggcagattctttatcattcgtatcacctgggaccaggctatggataaataaaagagagagtaagatgaccctattctgtttattttcactgtcaaactcctattttaaaatctgttactgtgacccatggaagtaactaattctggttgggtagacagattggcaagtgtttcaggtttatgatctattaagaggaatattatctaatcagagtgcttagatgaccctgtctaattggagtccttttttacgggaagaggagcaaagcagcaaaagattctctcctttatgagagcaatggggatttccaaggttaagggacatgtgaagagcagatctcggtgaaattctagaggtcacactgaagcagcacttggcaaaagccactgaacctctggccccagtccataggtggtttcacatttggggttcctatgctgagttaatggcactctgatatagagtcccaagtcagaaactgctcttttctttatttgcttttgctctttaattttatttcatcaattttgaatatgtgggtagtattttgcatacagtgtctgatcctttttcttgtagcaattcatttatcagactttatctagttagtcatgtggctgtattcatcactggggccaagttgctctgatcatagaggttcaatcctataagccccagagagctgacattagtaacaggcaagcatagttgttccataaggactacttaatttaaatccttcagccatcaccacattaggtgccacaggataacagtttt

SEQ ID NO: 49545 - DNA, 1056 bp, Bovine  19866881359681
  misc_feature (1)..(1): n is a, c, g, or t
nagacggataggacttggtgactgaagagcaacaatttttacattatataggtacatacatttattgtatccctctatacaatcttaccacagaacagttttttctaggaaaaaaaaaaaaagttccttcattgaaaagtaagatggcaaagtttctaaatgctttctctttttttgcataaaatcaaagccaacacggtcagagaatgatgagcactcagacattctcactattgtcaaaatagtacacgaagaggaggagtgcaggattgcctcgggcattcccagctccctgacgtcaatttagatgaaattcagataacaggctctgccagctgcttgattctcctgagttctgtgagaaaccaattctctttaaaaagaggctgtcatctaaataccatcaaagctacttgaaatacaagaatttaagcttcttttgaatgcctttcaccacccaacagcaagcctatagaaaatgatcaacacattactattcctttcaatcagggtcactatcaggatataaaatagcttgatctaaagtaaagacaactgctgctgctgtggctgctaagtcgcttctggcaccctgttaaaagttacctcctctaggtacattcccagctcagctggtaaagaatccgcctgcaatgcaggagaccccagttcaattcctgggtcgggaagatcccctggacaagggataggctacccaccccagtattcttgggcttccctggtgcctcagacggtaaagaatctgcctcaatgagaaagacctgggttcaatcccttggttgggaaaatcccctgcaagagggcatggcaacccactccagtattcttgcctggagaaatccccaaggacaaaggcacctggcaggctacagtccgtggggtctaaaagagttgaacacgactgagcaataagcacacatacattattattattatccaggctgatatctgtcatgtgacttgctcagtgtcacatagcttgcacacagtcaagcagaagactgaatcatatagttgggttaaaatatccatgtt

SEQ ID NO: 49546 - DNA, 976 bp, Bovine  19866881366771
  misc_feature (1)..(1): n is a, c, g, or t
ntggttctaaagcttatttaaataaaatgaacttaaccatttaatttggctgacatagccttgttaggaggtgattaaataagcaatttacctagaatgaacatattcctctaatctcagggaaaatattttggttttaaaaaaatcaaatatcccagatttatttcatattaccacaccctaaattcaagtagtcaggtttttaaattattctgttcactgctggatttttgagagcaacccaaccactcacttttaaactataaatgtatttttataataaaagcaaaaaaaaatcctagggatatagaaaactgtaaaagtagaaatcttctacctcacaggaatactttagaaagtcactggattgggaattttatgaaggtgagggctaatatctctctaagacccatcagggtgcctggagcagaactgagttaataaacattgttaagtgaagcaatgaaaaatatacctttatttttacaactaataaaagttctacagaaacaaaactcttctttaagaacagtacattttaagctatggaatcagatttcatggtcaagtggctagaaaatgatcttgtaccacactaaaaaccaatcctcaattacaaaggattaagacttaatttcttagtattctgaaaaacgtaagtctagaaatgtggtaaagctaaaagcaacttaatagtggggaaagtgcacaatccaggaaggaatgctcacccagacttcggaggccagaggttagggctctaggccacacttggtccctgacttaacatcccagccatggagtctgtctgatggggtggctatgttttgcttcaaaaggctgacaatgaagctgcagtgagcctgaagcagtggttgtggttcttgccccaaataggtctctcagatgaagagaacaccaaactgataaagagttagagaaagtagcccagacggtaaagcgtctgcctacaatg

SEQ ID NO: 49547 - DNA, 1488 bp, Bovine  19866881385941
  misc_feature (1)..(1): n is a, c, g, or t
nctccagatctttcgtgatggtggctttttaaggcacacacacaaacacgttattatggcatctcccgaaactgacattctcaaaacagtgtccgccactatacaaaggaggtttgaatgttctgaagccattttttcttttaagccattgttctaatcttgtttcttcctcaaccacggttatcaccacttccttacactccactcccaacaacattcccaacgaaacccaatcacgatggtcattactgcaagctttcttcagcactttgaactgcataattaggctcctgctctcatgctttacttgttttatgtcttaagcacgttgaaagcagggtctctaccatctttattttctgtaacgctcagcatatggtaaagattccaattttctttcacaatgccatgcttagaacatttcaatgctctcccaaactggcctccctccctgttgccagtggctttgctgatcatttttttctcagtcccattcaccacctgttctgctgaggtcatctaagtcagcggtccccgacctttctggcaccagggaccaattttgtggaagacaatttttccatgggctggcgaggggcatggttttactgatgtgactgatgtgactgatgtgcattatacttattgtgcactttaattctattattacatcagctccaattcaggtattcaggcattagacccctgacctaagtaatttctcaaaactacagaacagagcaagccatacttatatttggtggtgcaccaatatctgtaaatataaattaaaaatctttagaaggtggctcccacctgaattcacacttaatcttattccttgccatccgtttgcagcaaaggtcactagcttttctgcaacaatcatctcttttttcacatgtctatgactttataatgctgttcccactgtctgaaatgaccttctttatttatggagagattccaaatggcctctaaggtgtaagtcaattactatctacactaggtatatccagcatttcccagaagacagggaagcctcgtcagcaacttgactatatctctacacgcacttccattactacactgggtctatcgactctggaaaattctctgagtctaaaggttgtattatttcatttcgctgtgggtcccagttcttgacacacaggagatactcagtagtctactagaagaatagatgtcagtttccttaactagacttgaataattttcttgtgggcctacctgcttgtcaaatagatttagtctcatttgatcctatattcacacagggtaatgcttagattgcaaatactgtcacatctcttgtttttccagttaatctcgggagtctttaagtaggaaatctggtctcccgcttattggttattcagtctaatgtagacccttgcttctaaacttcaggtggagagaggaccgcaattagcatgaaggcttttgccactactgcgggcatcacag

SEQ ID NO: 49548 - DNA, 1219 bp, Bovine  19866881389713
  misc_feature (1)..(1): n is a, c, g, or t
naggatgtttgggaaatgctttctcaagatgatgagtttagtgctaatgttgctgagcacactgatatctaatggaaataatagtccttaatattcccccaaatatctcatactgttactaaccagggttcttggccttcttaatcaattggaattgatgaaaggccagacaagaaattcaggcaaggcttcttgggtcccctgaggcagtggtggtagtttagtcgctaagttgtgtccatcccttgcgaccatggactgtggcctgccaggctcctctgtccatgggattctccaggcaagaatagtggagtgggttgccatttctttctccagaagatcttcctgatccagggattgaacctgggtctcctgcactgtaggcagattctttacagacttagctacgagggaagccccctgatacaacaggagggagcaagaacagctagctcacttgctccctgaaggggtggcaaacgagttccttatgtgtggtgaggatgagagtctgaccaggggttgggctggaggggtagcttaggtggtgtgcccacccacagcttaggtgctgtaccctgcttttgctcccagctcttcagaagtggcatttggatttttggtctttttgcatcttcttgcccataatttgccccaactctgcatgcacatggttgtttgtaggcccttaaagttagtttttgttgctctgggagaaatttgtccaggtgcaagcactgcagagaagggttccaagttccaggtcctagcctgtctctgtactagatgtgtgtgtgtgtgtgtgtgtgtgtaccttaagttaaggtcattactttattggatggtgatggaaaggtcagtttgaaataagtagattaattttccatgcttggttcctggactttttagaaactattcattttcaaaatctaggttcacttttcaatcttgcattttctgagttttatacttttttgttttaggtttacaaataacacagaagttacagaaagcttaaaagataagtcctgtgacatccttaatagatactgctttaagtgaggggcaggtggctaacaaaggatgtgctggaacaccagcaggggagcctccctctcctctggcccttttcagtccaattacaggtgaaaagatgctatctttcagtctgtcatttgaattcaaatatagaaaagatctgccagttctcttttatgta

SEQ ID NO: 49549 - DNA, 1374 bp, Bovine  19866881396575
  misc_feature (1)..(1): n is a, c, g, or t
ntaagtatctttaaagattagtcctgaattgttgctttaggatggattctcagaaaagtgatgcatagagttaaagaagtgttcaaaaaacattgtgagctgcttttcagaaactgttattagggtgcttgtagtattagtatataacactccccaaatccttgcattattgcaagtttttactattctacagttaataaagatttgctaaattagtaggatgaagagtaatatctgtttcaattagctaatattgaggttaaaattttttatatatgcatataaataatttatttcttctttgtgaatttaatattagtgttatttgtctatcaggacattggccatttctttttctatcctggttttcacagaaacatttttctcagttcgttatttgccacttaattatttactttgacttttgatgtgaaggaattttttttttcaaactgtatccagagaagttatttttcttttaaaaatgtttatttcctactttcattcatagaaaaagctttcttcaacctcaaattagattagaactcacttttctggttttttaccactctttgtttttaatcactcttcaaataattaaaagaagatatttaaagtctgtgtaaaattagaccattctgataaagattgaaaagggtatgagattttttaaaaggagaaatctttatccagtattcatttattacactattatcatcaaagtcaggaatttaaatacatacctaaaagcattttgtaaaatattagaaactgttcaaaaacaagagtaatcataaaataacatcttaacattttagaaaacagattcttccagaggctttctcctccaagagggccactttgaaagcctacgctttatgttatgctgtcaaagtcaatggattggaaaaaacaaaaagcaaatcattggactgaattctaaaatagtgctataattaattaaatgtttttatataaatgcagaatttagtaaaaagaatttcaaagagtgtaacaatgctaaattgttttcttgataccttctactataaaaaagctataacctaataatattcatttttcattatattatacatatattcaaagtattttattaatagatatttttctgattactgaagtaatacatcttgtgcctagatgtttgaagacttgaaaaaagtacacagaagaactaggtctaaacttttttaaaatgtgtgactttgggcaagttatctaacctctctatcactgtcaccacctatataatgaaggtattgaaatgcacattttgttaacactcttaaccggttacagtattgtgaaaaattacctataaatctaagaaactaatacaaatggtatttcatt

SEQ ID NO: 49550 - DNA, 847 bp, Bovine  19866881589143
  misc_feature (1)..(1): n is a, c, g, or t
ncaaactgaccaggcagacctccatttcccttctcttgcccacatcagaccactagcagcaagacttaatacccatccctagaaaacgcaaaccacctcagagggaagaaggtcatacagtgacatttagggtggtcagatgaaatacctgctgggcacctaatctcactacagcaaattccccagtgcacaagccccacccaggcactcagcacctctatcacctttctagggctcaacctcatatgtgaccttgggtcagggatcagtgcaggagtttgagaatcctactctcaccaatgatgagctatttgcacgcgcttctttaatatcacttaaatacttaatttaaatgaggttaaatttacagagatacatgtaatttgagaataaagaagaacatgaagaatgaagaagagaaggttagaatatgaaggaaatacaacagcacttaggaaactttaaacagctgacttgagccatgcaatgcagggtgtttttttcttttgatcccatattttgaattagtacaaagttctgagagttatttacaaagtacatatcttgtcaacattactgatctcaggcaaaaatgcttatgcctgttttaaaaactagttttctgcaccttttgattgacaatataattggttgacagatgttgaaatctatattatcagagatctcacgtattgttaccttttaaaataatcatttgttagtcaggattacctaatgaggtaatcaaaatgccatctattgtggaggtaaccacaagtgactatggctaaacatcttacacctttcacagctaacagacttgtaacctgtcatgtatagcctcatc

SEQ ID NO: 49551 - DNA, 635 bp, Bovine  19866881878680
  misc_feature (1)..(1): n is a, c, g, or t
ngagtgaatagccttcctttctccgcagatcttccgacccaaggatcgaacccccatctcccacactgcaggcaaattctttaccatctaagccaccagggaagcccacttgttattctgccccttcaaaatgacccagtatcagactatgatttgatttctaagattttatgtagttgattatatttgggataagattataaatttatatactatctccttcatagtaatagtacagatgttgaattaaaatatttcataattgttttataagagtaaacgtaacattcacagttcctatttgtgagtctgacttctgtgcctgtcatgatgactgatacagattcaagtttgtttttaataaactccaagaaagatcaaagccagggatcatctgtaacattgctctcacttgacagccctctgaggcccctgttttgccctgcagccttttcctaaggagaaagccacatttttggctgactactcactttcatacttttttgtttttttttttaacaactttaggtaatgcgtggcaaaaaacaatatgaaaatgttgataaatggagagatgcactctttcaccatctggtgagcattctggagaatggagacaaattccacacagcaaa

SEQ ID NO: 49552 - DNA, 1253 bp, Bovine  19866880116800
  misc_feature (1)..(1): n is a, c, g, or t
ntttctggtcttacatttagatctttaatccattttgagtttatttttgtgtatggtgttagaaagtgatctagtttcattcttttacaagtggttgacgagttttcccagcaccacttgttaaagagattgtcttttctccattgcatattcttgcctcctttgtcaaagataaggtgtccataggtgtgtggatttatctctgggctttctattttgttccattgatctatatttctgtctttgtgccagtaccatactgtcttgatgactgtggctttgtagtagagcctgaagtcaggcaggttgattcctccagttccattcttctttctcaagatcactttggctattcgaggttttttgtatttccatacaaattgtgaaattatttgttctagttctctgaaaaatacctgtggtagcttgatagggattgcatggaagatttttctttaaaaagatttgaagatgacttggctggctgttctttcttagagcaagtaagtgatggcgatggctccaactagaacagtgacagcacaatggatggggagtggaatgtggagaatgaataaacatataactgaaatgtatatcgtttaaaataagcttctccattcattcagattgttggtattcatttggtcaaccatttatactgaactctgtgatgctgcatgtactcaaatacttaactctagaaaagaattgtcagagaaaagtaaaatgcattcctttcatcctgtaatgttattgaaattacacccttgccagtctttattggaaatgcggtcatagttgaacatagctaatacttccaaggactactttttaacctatctttaaacattttgggattatttgaagtcaaatataatttattaattctggatataataaaaactctgaaatactttaactcttaatacatctgctttatttgtaaaagtcagttatgatgagaaaactagcaaatgctaatcttgttcagaaaagcttgtagccaaatatagcagatatttaaaacacaaatacctacacatgttcttttattgcttattcacataatttccacattagttgataaggtatactgtgctcctttattgttgatgcaaaataacacacataaataccatgatttaaggttttggcactggtaatgctttttgcatgcaaaaactggtaaatgttttcatcattaaaaaaaatatacttttagaccaaattctagggattcttaaaaacag

SEQ ID NO: 49553 - DNA, 1570 bp, Bovine  19866880393532
  misc_feature (1)..(1): n is a, c, g, or t
ntactgctcaggaggacctgaaatccattaatagttacatcatgggggagggaaggatgataggggtctggtttttctgttcctgcattccaagaccctccttggttttatctgctctttcgtccttgggtcaccacaattatgttttatttcacggaaaaaaactgaggacttcagtctgggatacagactctcaagtagctttgagaagctattccaaagaagtaagggaggagccaagatatacaggagtttctgcaacaaacacaggtattcagaacatcaaaatattactgttactaaagaaaaaccagacatctcaagtgactcaatgtaatgcttttctgtgtataagaaaatgcaaaatgctgggctctttgaacccgttcttcaatgtgtacctcagctacttgggatccatatcctgtgtttccctccagagtctcctcagggtgcactgccggggagtcactgaggtgactgatggcttgatggaaggcatggcgtttctctccggagtcccctcagggctcacagtagaggccggatgatcgcagcattcttcgtttactgctatgggctgctgctgctaagtcgttcagtcgtgtctggcaacttttttttttcactcacgatttatcccacaaacattaagaacctatcatgggccagatgccagtctgaacactgaaactacgagaaaagccactctctttgccctcaaccacagtcctgtggctgtacctacattgcaagcagataaattacaggaccgtagaagcgcactggtagtaaatacagacagggaagagttaatgtgtccttggaaatcctagaagcgttcatagaggaaatgacatttcaactggattataaaccagttgcttatactccactgcagagttaatgagcagtggaaggacagaataccttggaaagtaggacatttttaaaaaaactcaatgaagaccatgttcattttataggttgaaaggactactttaaacataaaactgtgtttagtatattgatgttattatatacttaggtttctccaataataaaatcttttttaatgcctcattctttttttcttggcaataaaatatttttcgggggaaatgctgaatgaatcattgttgagatacacgccattgctttcttccaatgaccctgaagtaatgtagaatttacacttcagtggttgcagtgctcaatgtggcaggtagtacattgtgctgctgatttaaaaaaagaaaatgtatggaataggtctaaatggttttatgcatatttagttttgaggaaaagatcattgacttaacatattagtaccaaactgcaaagcctcaacagttgattgtcagtatttttaagattattattgcaaagatcattgtgtctaaatatttttgagatgactgttatctttttatgtatattatgtaaattagcataaacagtgggagtggaaaacaaagctatcccagaatgtgatagagttttaagtggtacctttattttcttatttacttttgccttagaaacagaaagcatatccagaagtttt

SEQ ID NO: 49554 - DNA, 1592 bp, Bovine  19866880452776
  misc_feature (1)..(1): n is a, c, g, or t
ncaaacgcgttggttcttttactatgtgaaataaaatggagtttgttaggcatgttaacatgtttatctcaatattttattaacaattatggcctcctctcatggtttagcatttatttttctcatttgtttcccctgcattggcttaatctctccacttgaattaaacctcacagaaaacaaatataagcttatacataggtgaattccataagattttttgaggggaggggaggggagagaaagtactggtgggagaaagtaagttggttgactaaatcacagatttaaatggccagacctaccatatttacaaacagagagcaatacacaatcatgtctctcatactgatttcaaaatatatgaagaatagaatccttaatactctcaaaatccaaaacacctaatttaaatgccagtaagggatttgagagatttgtgatgtaatttcttttcttttttttggctcccatctctgtactacagcctgcagtcttagattaattctgtagtgatatggaacatacagccatcttcctgctcatgctcttgattctgggagagagatcccatcttcaatgtctctggggacccctgtaaaagcaagcagttgctgcctaagacaacaagacctacaggattgaaatactgcaagggaagtagcatttaagcagagttctgggtaagagtatttattttagttgcttttctaagtttctctcttgacaggagaacaaaaagagaaagaagcaggatgaagaactttttatcttctcctctagagaggacgtccttagcacttcttgtaaatttatgtgactgcatttcaacaaagcagtgaaaagcagaagttgccaagctaatttaatcattgggtcttccccctttgcttgcctagtttagataatattgttgcagtgataatccatttacaaattctataacaatagtattttatgttttgttggaaaggtgtttggaaagaaaacacaatgttgaatgaattttatattttatcctgttatattttgcttataatatgctacctctggatttatttttcttcatatgcattacagaacaactatttgattttaatatgttttatatattacatgaattacatagctgtgacaataaagatcaattataactatcatcataagaagggcaaatgaattactagcatataaaacaatgaaacataccctatcatataatatacaaatatgcatatgaaaaaagattggaaaagaaaatggtaacactagttttgcttagacaagaggtaggacattttttttctaagcagcaaaagctctctatgatgttatgttgcttttgcaataaaaagatgatagtttatattaatcacattgatttataagtgaatattcaaattaattttctattaggatctcatctgcaaaactagggcacgtaaataaatccttaattcaatagaaagtctctgtaagactataaaattaagtagctggccattttaattctaaaatactctttgcattatatacagggaaaatagtcaaaagaggtcaattttagagcttgcattttataaaccattatt

SEQ ID NO: 49555 - DNA, 784 bp, Bovine  19866880488045
  misc_feature (1)..(1): n is a, c, g, or t
ntcagacgtgactgagtgactatgcacagtacaataagtctgtcaattaattttttttaatttaaacaacataactgcataaaactgcagaactaatcccatgcaggtcacctaggtcacaaccccatcttctaaacatccatttcttgactgtgccttgccactaggcatgggagggtggggaggttacagtgataatatatggatgcttttggactctttctgaatgtaacaacttccaaacttatctgcctaatgcaggacaaaatacacatatggataccaatataacctttaatctgccttgagcctgttgattttcagttaaaagtttgatttctagaattaaatcatacatgtcaaggtctgttacaaaatcagctctcatagaaaatgtatatattttggcagcttagcaaagaaatcctcaatttcagtgagatcaacagaaccatttttagaaaatcactgccagacctaaagctaatttcctttcattttgcaacatctgtaagcctcgtatgggagtctgggttttaattagcactgcaggctaacaaatggctagtgatgtttaaaaaataaacaccaaaaaccatttcacaggaaagccacaagatagtgtaaaaaagcaatatgggctacaggctctagaatacatactgttttactgacaatggttaagccttcataggcagttaattcaaaaaacaggaaaaaagtgttggcatcataaagggaatcttcttcaccaaagagtattttttttttaactagaataaaa

SEQ ID NO: 49556 - DNA, 1959 bp, Bovine  19866880513634
  misc_feature (1)..(1): n is a, c, g, or t
nttttgatgagaatttaataagacagagaacagtaccttgccaagtattaactttaaaccttatttactttagaatttcaagatttatggaataccaaaaaacccatggagatgactcacaaagaactggaactttctagtttcctacactcttttaaaaagtcttagttatttaactttgctacatattgccatgactaatactgaaatcaactcatgaattaacataaattaatctgtttctttttggttctcaccccaaatggttaatcactcgctggttattgtgctgaaatggactatttaaaagcggtggcattagtcttttaaattacaaaggtgatgtctgtatttaatcagagaattactcaactatgggaatacaaatatagtttttctctttttatttctaaattatgaaaataagacaacacttagaaaatatagaacaaagtcatatagtcccattatataataaaattatttttaagtggataaattaagatttttgttggaatttcaatatcaagctctcaaaattaatagaatatacagaaaagtagaagggtatagtagacctgaaaagcaccatgaaccagtttaatataattaagatttatacaattttcacacaagagtaggttgcaaagttctatttcacgttcccatagactataaactcggagacactggaacacaccggggacataaaacaaggtgtaaaatttcacggtctaaaggtattgaaatcatacagagtctgttctcttatcattgtggaattatgttaaaaatcaatatcaaaagatatttgaaaataacccacatattttcaagtgcaatgtgacatttaccaagagagatctttgacttagccattgaaagtctcagtaaagtcagaagcctgaaaaaacacagagggtgattgctgagatgaaagcacttaaaagaaattgctgtcaagatgaggaattaataccaaagatcctttaaaaacctcatgtatttgaaaattaaatgtccacttttaaatgatggatgtatctaagaaggcatagcaaggaaaattagaaaatactgataatgaaatacaaatgaaaagagaatttgccagaatttgttgcatgcagctgaagctggcttattgcaactaaatacaatgtggaatcttgaataatgtataaaaacaaagaatggacactagcataaaattttggtaaatttgaaccaaatctgtactttacttaataacaccatatcacacattaatttcctgttttattttgtttttcaacaacagtaaatacagtttttaaaagaattctatgatttagaatgaaaatatacttcatttgtttcatgtgtatcaaccccttttccatcttatttgtcttttggcatacttactgaccgttactattcgaatctcagttacccacatcctagtattctaagcatctcctgtttggatgcttcagagacttgtgaagcacaaaaccagcctggttttatgtaagtaggtgggttgctaatctgtaagaatgccattcttgatcaggcctctatgaattgtttgtaagtaccaaatcagacaatgcagtctttatattcgtcctgcaattagccaaaattattctagttatagtccagttaaagatctctagtatgaaatgaatgtaaagtattcattctttctttatctttctctctggcttcattctagctcatttatgtacttaaaaataatcttctaagttactttttcactgcttttcgtgttgcagattgaaaatgttgatgtctgccttagttttctagcagccagaggagtaaatgttcaaggtctatctgctgaaggtaagtagaagcataattgtcacaaatggcatctgtgtttgaaaagacttttgataacactagaaatgtcaaatgagagtacgtgggcccttaatatagaaa

SEQ ID NO: 49557 - DNA, 1476 bp, Bovine  19866880562372
  misc_feature (1)..(1): n is a, c, g, or t
ncctcctatttgtgggttgcctacttaaaagtgtaggtcttgactatattacatccctgcccttcctacctatctaattgtagttccttctttatatttctagttacggaaaatcttttctgctagtccttaggtcattatcatacagctattctgtaaataattgtaattatggtgtgcttatgggaggaattgagctcaggctcctcctataccaacaccttggccacacaataaattcttaaaagtagaattgttgtgtcacatcttatttattttaaatttgaatgtacaatgtcaaattaattaacaggaaaactggatataagtggtgaaaaaaaaaaacccatttcaccatagtttgttagactgtgtgtatgtgtgtggaagttgctcagtcatgtccaactctttgcgatcctctggaccatagccctcctagctcctctgcccatttaattctccaggcaaggatactggcgtgggttgccattccctccttcaggggatcttcccaacccagagaccgaacccaggtctcctgctttgcagtcagattttttactgtctgggccaccagggaactgtaaatttctcaaactcagggactgctactgtcctggattttaccctattctcagcatcgtaactacatctagcatgcagtcagcacacagtaaatattacttgactaaattaatagagattatgtgggatttaaagaatttaatttgcatctgattacttttagatttgaaactgaaccccttctcttcaatatactcactgggaacattttggctatgaagtaagaacaatcctctctcttgacactgtacatgaattatgtacccattgtgctttgccgtttaccagtttgcatgaccttaggctaattgtttaatatcttagaatttccaattttccatctgcgagatgagtataataaaacctcactctgtctacctgtcagaactgttgtgagatttaaaggatataatgtgaggtaaagggagtttgtacaaaatagaatggtctacaaataaaagagattaacaattaaagacaggtttaatgttctggaatgcattatacttgactcatattaacctgaaaagattcctgcaaacatcctaaagctccaggctcaaaagctaccttttctggtgcttacctgaggatgcctcgtgatggtgatttcttttaagattgggaaacggcattttttttccacgtttatctgtcatacttagctgaacaaagtcacttcccttctccaagcacgacatctgctattttctctttgtaagcacagaaatctaaaagcaataacataaaaaaataaataaataaaacccctgcagcttaagtattgattaaaaacaagcttggttcattaaaaacactgctgggatttgaagcacttagaggtaattttattttacttagcattaaaaaatatagtgatttatagat

SEQ ID NO: 49558 - DNA, 1540 bp, Bovine  19866880571929
  misc_feature (1)..(1): n is a, c, g, or t
natccacatgaaattaaaagacactccttggaagaaaagttatgaccaacctagatagcatattgaaaagcagagacattactttgccaacaaaggtctgtctagtcaaggctatggtttttcctatggtcatgtatggatgtgaaagttggactgtgaagaaagctgaacaccgaagaactgatgcttttgcactgtggtgttggagaagactcttgagagtcccttggactgcaaggaaatccaaccagtccattctgaaggaaatcagccctgggtgttctttggaaggaatgatgctaaagctgaaactccagtactctggccacctcatgcgaagagttgcctcattggaaaagactctgatgctgggagggattaggggcaggaagagaaggggacgacaggatgagatggctggatggcatcactgactcgatggacgtgagtttgagtgaactccgggagttggtgatgtacagggaggcctggcgtgctgcgattcatggggtcgcaaagagtcggacacgacttagcaactgaactgaaccgaactgaaaattgccgaggaatttttgtatattttgtatattattggttttcaagcgtcatctagtggctgtgctttgtaatcactacaggtcctcctgtaaatctttctcaaccaagtcttttatgtatacaaaaatgattaaatgctgtgtgtgtgcactcaattaaaggagcagttatactttataactgagtagttcatcagatattaagacgttaggttatatgattctatttgcaactgactaaaacgctacccttattctaaactcaatactggaacccagcgtttcctttttgtctgtttggtgacagtttaatagagctatagcccggtgacagaggagcactgtattctccctgggctgcaaaatgcaggatcactagtcaaatttaggaatagggcctgaaacacctgtaaatgggcaaaacgctatcaaaatgcatggggttctgattatacagtgatgagtacaaaccatcatcagagaatactactccttcatcctatctgtaatcctggaggaagtacttgtcaagcacaaacaattgttttaaaaaatgatatgaaaaccgtatgtctaagtcgtttcactcttttacacagaatgttcttttaagatgatcatgactgagaatgaacttataaggaaaaagggctatctctgagaattagggtgttaacgctttgaagagggaatgggtgagggcagtggtgggcaagggtctccaaattcgaggtgtcctcgcttgtgaagtcctaggcatgctgtgattaggcactgtgcgcgcaaaatcacctgaggtaacagactccgcgatgttcagattgttgagcgagagccctaaggactggcgcgaggaggaggaggaggtgctgctcgcggactcggacgggggccgagcaggcttccccacgttccccgtctccgccttcagccggtcattttcagccttcagtatttcaatctcgttctgttgtgaaatt

SEQ ID NO: 49559 - DNA, 827 bp, Bovine  19866880775904
  misc_feature (1)..(1): n is a, c, g, or t
nttgctgccttatttcaagtcccagtggccattcctgaacataccttctgttccgctgtcatggttagactttgcagtcggccagtcatattccctaaactcttttcaaaagctgctacgaggtgagcctgtgaacaaaatgaaaggaacatatcttaaatgtcagaaccttatgtggatggatgaaaacccctcactttaccaaagtgcttaatttcaggtattcttattctttaagtactgtgactatcatggctggctttcagtgctgactttcctttaacacaaatcttcatctgttatttccaaacttcagcttaaaaatcagtgtttcagtcctgacatgtaatgtgagttcaactactgaaagggaatgatattttgcaaataataacaccttctaacttgcacatcatagagcatttgacacccgccagaaagttctgagttgccaagtttttagactcaaagcccaagaggaactcactgccaacagtcaatggaaaaacgttcctcacattttatacctgcacgatgacctttgaagatattgttagctcctctgttgaactgatgcttcctccaagtgtcagacatctgctgacagctctaacattatctttccttttttcctacttacagagaattcaatcgaaaagagttgtcttcaccctccaaactcttttcaataaaaagggcttttatttttactttattccctcccactaaggaactgtaggtaggccaatgagagataatactcgggcatattttatttaagtttttgtggctctggggttttcttttaaatctcagagaattataca

SEQ ID NO: 49560 - DNA, 2444 bp, Bovine  19866880776494
  misc_feature (1)..(1): n is a, c, g, or t
nattctattttataataatataccaaaatactttgaacattttgaaagttaaaaaaaggagcattcagatttaaatatggcttgttatcaactggtcctggtttacctcaccacactgtttcccataaatgatagttttcaaaatgcctcaatcatcagttttatgactcaacagaaacttggaatgctgttacagggattgtagaggcactgtccattctctggtgtatatattgtaccgtatgtaaggtgagagtgctgctttgtggactactgtaagatttagggacgcttcagttcaccagccagattcttgaaacacctaatttatgcataagcatgtatatatgtgtacacctcaatatgtgagcatgtatacatagaaaacaacatattgtttatttaatcgtatcacttgatctatgcacttaattactttacctcataaaaatccccaagattaacctgaagttatcatatcattataggtttatataataattaaggaaataaagcaaaaagtcatggcagaatacataaatctccagtaaagggacataataagtaaagtatatttgcattgcattgaaaaaaaaaagagttcattttttgtcttatagtaatttcagagtaattttttaaaaatacttaattagataactgttttaaaaaaccatgagtaatacaacatttacattaaaccggtagtttaaaaaaaagcaattttgctaaattctctgtatcaagtctaccaaatctatattgaatgcaagtgaaagaaaacacctccacaccagaagctacttcattagaatctaggaaaacagaaaacaaatctcttttggagatgtgcaagttccatgtaagaatcacatgggagaaatataaagagacgggagcatgccctatgctgctgtggcatgtttcttagcaacacagaaaaacatctctctgctaagaaactctgtcaagtaatatgtgttcagggatcataattcagaaagtgaattccaaatagaaccaggaatatttacattcatgataacactaaactgttaagctgttttcatatttatcatgtcaattttataaaacaattattaagataaactacttcagtcataaaaaatatgtccaaatgaaccacagcattttttcccataggatccctgctttccactgaataggtatttgatttttctttaaagcatacatttgtctagagtagtcttataggctccacaagcaaactgctaaatgctagtgtcagaatatattattcattgtcagtttctgaatggcaggtcatcaagggaagaaacttggactccccaaagaaatgcttctctacaaacaatgctgtcttcatttcactgtttgttctgtgaaatttgtccctactacattccatttcaacagaatggtggatggcattgctttatattttaaaatttctatttagccttctctgcaagtgataattaatctatggccatgttcactgatattttaatccatttggtgaaaggagcacactattttttggtttgtattattattaagatgatattagatgtatcatttgaagtgtggtttgtgattctctactgattttcctttattagataagtcacaaaactccaaataagctatttttaccatcccaaacatgtgagaagctactgtgctttcaaaattatgtttttaaataagaagtgaaatttctttaattgtgaataagtctttactatctattacaaattctagagattccccaattgattcatataactcatcatttaagacttaagtagaaagtacatttttcatctagaagcattcagggagcacattacagatagtatgattattttttctagcaaaatatttattaaacataaatgttatactttctaataactaaaaagaaaaggcaattagaatactcaagtcagtactttctgaattctgtcattgtaatactgtaatctttgaaaatcttgtttaactttaaccttatttggacatgcccaggatatgtatgcaaactagttggtcacagagatcaacttattatctgatagaatatttttagatgttatcctaccacaaaacatctccatgtcaaaaaggttaaataattcttatccaaaaagatgtaccaaggaacagtctaaaggataaattatgaactgtttcatatgcgatgtttatatttgcttggtttgctctatagtttaagataatattttgaccatatggcttccccggtagcactagtgttaaagaacctgcctgccaatacagaaaacctaagagacacaggttcaatccctggattaggaagattccttggaggaagacatggcaacccactccagtgctcttgcctagagaatcccatctcttgcctggcaaaactcctggtgggctacagtccagag

SEQ ID NO: 49561 - DNA, 1048 bp, Bovine  19866880794929
  misc_feature (1)..(1): n is a, c, g, or t
ncctcccgaagatgtgccatttttctgtgctttctaaaactgtcaaatcatttattcacgatttgcttttgaacaagatttctttatccatctctaccactgaatctgcagatctctcaaaatccaagcaaagtggcttccttttattttctaacacccggaaacactagctgcctttctccccagctgctttcctgcccatgtcccttttatgagaacaaacgttgccattgtcctaaaaggctgggaaacttgagacagctgctcttgttccagaaggtggtttttcttttcagtgagatatccgtcatattttagccaggtgttcaacagccacagaagcttgacggtgaatcttccctttgccctcttcaaatgctcatggtcggcttcattcggtcgcctcccctcgaggtcaacgcttaagcagcagatggggggcttgtatgaagcagctggttccattctactccagccccgccttctctccagggaccctgagcggaagcctgtgtgcccgtcggcgtgtaggaacgttcaggactttcagttgccattcagcgctttctgcttctcacagccaaaaagctgggcagcttggcgtcctctgcagccacgagctccagatgtccggctgtgatacagtttcctttccgcgctccctgctgggcgctgtattcatttacaatcgcgaataaaagacttatccagaggccctattttgtccttatggtttgccgttgtagtcatgtgtgggagaagcagtctgggagccggggcaaccagtcaaagtctaaaattgttttccgtttcccttggaggggatgagatgggtgccccgtgtggctcggggccgtgtattttctgggcctggctttttccatgcatcatcgcctccatcgatgtctctttttctttcttcagatgaatatgctaatgaaactccaagaagcagccaattactcgggcacacaaagctgcgacagtgatagcaccagccatcatgaagacattttggattcgtctcttgaatctaccctctagaggg

SEQ ID NO: 49562 - DNA, 1425 bp, Bovine  19866880796291
  misc_feature (1)..(1): n is a, c, g, or t
ncttaaaccgatttctacaacagtttaacagttggtttaaatcctgaaccattggtaatttccaccatcttcacttataacaccagttaacacagtagcctcatctctatttttgtgtttgtttttgaagaaatggataggagaaagatcagtatttttaccttgagaatagattgctttgcctatcctccaaaagactcaagtaacccagaaaccctctttgactgtcatttaaaagctaagccatgtggctatcttccatccagttctaggggaaagagtttcagaaggcgggagagggtgaatttttatccagcagagctggaagcactacatgcagcatgagcacaactattcggcttttctctcctattttttttttttaattattatgagttttgagcatgttgttttgatgggtattattgtacatgagaaattcagcattcgagaacactgaagcagtgaagtcactgtggatgagaaggcatttatactgtaaaagaaggttagatttgcacagtctactgggtaggtattgtaaataatcatttaaaaaacttgcacaactcaaaacaaacacacacacaaattgtattttatcctgtgggtgttaagagatgtttcacttgctgagatttcctgtacgttgcaaacaaatacagaatgcagaccctcaatgctgttgttacctggtgtgtttgtcctgtatttacagtcgtgatgaccatgcaggagctatcagtgctagagtgagcatgcttcaaaactgtccatgaagccaatacatttttggaaaagtaaaaatgtctgaaagtgcatctgtcatggcaggctttcaagagagtatatgagagctgacgggagtgactggagaagttcccaccacgcacagaggacaggtttgaaattcatcaccccaagggctaggccacggtgtagacttggtccatgcgtgtgaaaatttgctacttcaggacgtccaattggtgctaccctctgtgacggcccacgggtcagctgctgtagaacaaccaccgcacgagacaccggcgcagctgccagagtcgctcagtctgcaggccctccacggtgctatcgccctaagggaagtcgggactggacatgtgcacataggaagggcaccctgactgtgaagcctcaaacgtggatcacgtctgcagggaaacgtcgacgtacgtagctggatgagtgactggtggcccttgtacaatatgtgatctaagaaaattgctaatctttccctgccgttttgagaaccacagtccaaacatgatcattaaacagaaattcctgcaatacatcccagtaggtccgcctagttcacaacttaaactagtttgtgaaacatttgtctgtatacattttatattttgtacatttttgatgtaacataccgtgtaa

SEQ ID NO: 49563 - DNA, 836 bp, Bovine  19866880837345
  misc_feature (1)..(1): n is a, c, g, or t
nttgctcccaataccccactacttcccccatattgattgctatgttttaatgtaaagatccaaaatttccatatttcttctctggtttgttttgctcaatggcagatatgaatctattacctaatctctctagacccaacttcaccaaatcaagaagagagaagagttcgactgtaggagccaattcctaaggtcagtttgatactgaaggctcctgttcttaaattctgagattctgaataatagcaattatcaaaggcagtgtgactgaggaaaagcagctttgctctaattaataaaaatagatgcctatcagactgcatgaaaaaatggcaagatttctgaatatacctttgggagggtggtcaggaccattcagtgctccctgaatggctgcctgggcagcagagttctgggccttcagcatttcaatggtttctcttagttctatcagttcagactcctgtgaaacaaacagaatttagaagctttaatactttagagagaagaacaaaccacttttattcacagctccctatctaatgagcttggttttatgtagcactactgtcctgggagatctggatgcttggctgaccttctaagctgtatcctacaatcttttacttgtaaatgtaagaagctaaatctgatagagaatttaaaataatgttttggttactctcttacaaatgtgatctgaatagtctttatttctctaaaagggtaccccaaactgagagcttccagggtaaagaatcctggaatcttgccaatgcagaagacacaggagatgcaggctcgatccttgggtcaggaaggcccttggaggagga

SEQ ID NO: 49564 - DNA, 1828 bp, Bovine  19866880907198
  misc_feature (1)..(1): n is a, c, g, or t
ntcactcctttcaatcagtaggtcatcatgtttgaagtgcaatgtccttgagatgcccatgctggtgaggatatatgctgtcactattgcaattaagctgctggacaagtgagtgaaaaagtcaccttggaagtgattcttcagtcaaagacgttttgcctcctaccagtctgtggcatgccagccattccaccctttcccgtgaaagtcccagacacagtggagtagaaagattttcttgctgctcccagtctgactcctaagcttacattatccatgagtataagaaaatcattatcactttgggccaaaatattttatgtagcaagagatacctagaacacatttctactttcacttcctcctaggccaaaaagtggcagcttcctgaatgtgccatggcatccttcaccagtgcctttgtttggtactctgttgtagtagtctgcacacctcaccaaaccatctgtttaaacatctaggttctctattagttggtgggtgatgtgaaagattaaagcatcggcagatctcagctgcacatctagcataattcgtggtgcatagagggggctgaatctttatttgctgaaaggtcacacatgagctttcaaatcaccaataaaaaagcacattgtgctctaaggtaatatacgaaagatcattagaacagtattgtttttcattaagccatatggtatttttggactgtgcccaaatgcatagtgactagctcaccaaaacataaaaaataagacataaaaacagtaatttttaaaatagatgtacttaacataaataaccgaatagactatgttaaccagagcaattttcatatcatgtaggtttttacaactcatctatattaagaaaccttatacaaaactatcttagaatcaaccatctttcctccttttagtctatataactttaggcttggagtcacacaaatattataagagtggaaatccctatacaaaatccctctcagtcagatctttagtattctattcccaaagaaagggaaatgatgcttaatcataagatcacatttttctcttaacaacactattcccaaggagccaaagagggatacaaagaaacaaattttataacaagaggtgagacatttcttgggcataaattttggtggaattttttacctccaaattttacctttcttttataagacagttttaagtgaagaagataggaattatttcctttcaaatttactaaataaggcttgagagaaatcaggtataaattacccaagatgtactataattaacacattgcaagaaagttttaaactaggatttttatacaaaataacactgaagacaatagggcacattccctaaaattttttaagaccgaggtagcttgaaatatatttccttatatatcctatgatatagaaatatagaaaaatatagaaatataaaaatatagaaatgaaaccagatcttcagaataaatattatttaaaccaaattcttcctttagtagatatagtttcccttctgtaggatcattgtgcaatgttataaaatgataactgacaaggtaatagctctaaaaaagaagaaagtgttcagacacttctgcaaaatatcttttgtaccttattcaaaaatatttaagacattttgtaacaactactcacttcagagcattttttaaaatatattgtccctacacataaattttgctgagacgtcactaaaaacagttattgcctaatccataaatgagtcagaaacttagccttcatccacatgtgtttctttttagcagctgggtggctgaaatatcatcctgatta

SEQ ID NO: 49565 - DNA, 1033 bp, Bovine  19866881038611
  misc_feature (1)..(1): n is a, c, g, or t
natacctacaagcacccaggcattcttaagcaggctatgaccggacttctagactttctactatgtcttgtgaatatggttctctaggaactgacagatacacatgatttgtatcacaaatgatgtacagagtgactccatttactgtggctgcacttcattatccgatgccatctatagggtataaaaatctagattaacactgaccatggagtacttaatttttcctagaaaaaaaaaagtcacaaaatgagattaggatatagattttctgacttggaattcaatggttttacattatactcctcctttataagtgtcccattaaacaggcttaaatatgttggttaaaaactaaagccaataaactataaagatgttcaccacagtgcttactctctcttctgttttctctatttggtcaagatctttcttgggggagaactatcccaaggtgaaattcacagcacttatcatttctttgctcaggattcccattttgatctttccaggctccacctatcttctaggctctagcattcgatttccaactgcttggtatattttatctcttcctctgaaaaaatccatatatttaaattgcactatataactaaaccatcctcaaaggacttgaaaagcagaaagaaaaaagaaaatttggtcgaaagtacgtagtacattacatctaaaggggggaaaaattccaagcatgaagcagaactttgtactggaggacacaaaccctcaggtttctgtcctcctcctgtgaccactaagcagcacgctcattattcatctgtcttttcggggagctccacctgtgaaagtggctcttctcaaattaaatatttttatttagcataagcttacgttcagctgctgtctccatgttcagaaatatttttatttagtaaatatttattgagcatgcactatattctaggccctaaaactgaacataagtgagatcacagtgtatatatatatatgatatgtgtgctcagtcatgtctgactctttgcaagcccat

SEQ ID NO: 49566 - DNA, 1950 bp, Bovine  19866881098434
  misc_feature (1)..(1): n is a, c, g, or t
ncagagtttgtcttggcattggcttaatatgtttataaaagcatgaaagttagggactcaaaaagaaatggcctcatcctataggtagaaatgtgtctccgtacttcatgtttattcactgaaaatagtagcggctgtcagccaccctcattcctaaaacctaaaaagaaacacatggctttctttgacatagcatcttatctaactaaatacaggtgatgtttatgatgtatggtaccgtgttgctagaactgtcaagatggtctttccacaaagaggagactataagctatgtggccattctagacactggaaagatagatatattttattagactcattataacaatgtccattaatactacttttgtgtatcatttttaagcaaggccctagctgaaaaggcaaatatttaatttttctggaatcaaatattgccttcaaattggcagtgtcatcctgatcctagactcttcttgaaacaaaaaatatttttttttcaagttgaaattgtatttcagtggccaaaaatacaaatttgtaggtatccaattttttcgtatcaaacggaagagcaaagaactttagaattttaagataattgcagtatttaagtttgaaaagtgagctagcaattgtgaatttttacattgagcatatattctaagaattataatgccataagctttctgcttgagctgcagatctgtgcctgaatttcccatgtgggtctttttgtaaaagactataatagtctcagtgaagcttgaacgatctctgatttaaaagcagcagcttaaaagcactgtaagcatgtccattttgactcagttacattaacaccagaaaacaagttttctttttcaaaataattctgaaagacaatatttctgaatgttaagaagaagatatcttggtcttcttgagttaccataacaaaatactgcagattggatggcttaaacaatggaaatttgttttctcctggttattaagtccaagatcaaggtgctatctggtttggttcctgaaaagggctctctctttgggttgcaaatggcaccttcttggctatgttctcacaggcctttcctcaatgtgtgtacttgggggagagagagatctctctcttacttcccctacttagataaggctgctgctgctgctgctaagtcgcttcagtcgtgtccgactctgtgcgaccccacagacggcagcccatcaggttccaccgtccctgggattctccaggcaagaacactggagcgggttgccatttccttctccgatgcatgaaagtcaaagtgaagtcgctcagtcgtgtccgactcttcgcgaccccatggacttcagcctaccaggctcctccgtccatgggattttccaggcaagagtactggagtggggtgccattgccttctccacttgtgatggcaggtggattctttaccactgagccacgtgggaagcgctgcatgatcgtagtctcaaccggaaaaccaggcagcacgtactgtctggcagtcctgtagtctgagtaagtttgttctgtgctgcagaatgagtagttcacatcagtcccttaagcctccaaaacctcctcatcccacccttgctctcagtcgatgaacttgccttgccattcattgactaaagtaggacctactaagtaggaccttgctaagacacgtctccccactatctggatctactccatgcctccttacttttaaatgaagttctcagctcctttcaaaggcagtcctgccatctgtgtctttcccctttccagggcttcgctcctacaattaaagtctcctctcatgcataatcaatttcttcttttaaataattcccttcaacatacaaatgtgctctgtattaatcccctctgtatttgttttctacttactgctataacaagcttccacagactgacatcttcaacaa

SEQ ID NO: 49567 - DNA, 898 bp, Bovine  19866881426533
  misc_feature (1)..(1): n is a, c, g, or t
ncacggtaaatcctttataagtatttaccatgaatctgagacttggaacttattttaatggaacatatttactatatggcaccattttcaaaacataagactttaataatactattattataccgtaaaacttttataacagtcagctttcaagtgatttcaaatatttgagatcaaggcataaccttgaaagcatttttgagatcaaggcataaccttgaaagcatttctattcttgaaaggtgctcaaaacacagtgtttttgtttttgttttttacaaattatcttcacccagatgcttgaacatacagctagctacttagagagagtaacaaaagaaaggaaaaaggaatatgaatgtgcatgaaggtgggagtgtatgtgtgtgttcaaaagagagacagagaaggggggagagaaagaaacactatgttgatggagacatttagctttttgactcactgagttttaagaggttatcatcagctacttttatatgtttatgtagcttgtttaataaattcaggggattagacagaaacttacgttgaaaaatattgtcctaaagaatattaaaatgactttaaaatatgctataactatagcttctttgtcaggaaggcattcttgatagaactggtaattaccagtgtgtcactttatttcacaaacatttttttaattgaacacacattttacactgaatgtatcagcaagcagagcttaacatatgactaaggaatcctttttgatttagcctttctattggatcagtttccctaaattttaagttgggggaaaaaaagaacatctttgattacataataaatagtaaagttagcatgcattaaacaatacaaagattattaccataacagaaactcttataagaaaaca

SEQ ID NO: 49568 - DNA, 1102 bp, Bovine  19866881803206
  misc_feature (1)..(1): n is a, c, g, or t
ntctagggaagatgcagctccttgcctcttccgctccttgtggcatctggcattcctacacttatgactgcaccactccagtctctactgatgtgctcacatcatcttttctgctgcctgtctcaaacctccctctgtctttctctgatacagagccttgtcagtggatttagggttcccctaataatcgaggatgatctcattccagattcttaatcacatctgccaaagtcattttcttcaaataaggtaacatcaaatgggtctaagcatttaatgtggaggcttatcttttgtggggaagggggagaggtacatgtctaccaactacaccttgaatgaatattctccacaaacagagtcactgaagagctgaaacagtctgttttcctgttgataattgtctcttcttcagatgacgatgagctcagacttcttttcttatgatcagggggcaagggtagagaacggaatagagaggtgcactttgcccagacgggccttttctccagctgactttgctcacagccagttccagctctgtgaaaaaaattctaaggatgcatacctaatattattaagatattccaaacagatacttattccccacagaaaaatatttttttaaaaattttccattaccaacagcaattttctttggacaagttgaagtttacaccaaggctttacactttcaagttaccagagatcaattgagggtctctgatagtcataaataatcctaggcttgagtaaacaaaaagaaaaatgtccagcacacagctggagtaaatcatgcccttgaacatctggctcgatgggatattaaaatgttattgtctgtctttctgcaataggcatattttataatcaccagggatgttagaagctcaatttcccaacaatagaagtgaaggacgaatttttgctgaccaaacaaagggttgcttttttttattcaatactcctcactttccttcttaaagcatatgacccagggctccagaaggagttatgaatactaaagaattacaattagacccacaaattgagttttctaaaatcaaattataaataattgaactgactttataaaagtcat

SEQ ID NO: 49569 - DNA, 1858 bp, Bovine  19866880165982
  misc_feature (1)..(1): n is a, c, g, or t
naaacaggatcttgttatctgccttctgaattatttctatacaatatcctttgatgcctactaggtactgagtgccttgcatgcattgtcttatttattccttatgaggaaggaccattattactcctgctttaataagaactttgaggtttcaagagatttagtaagttgtcaaatatcccacagctgataaatggcaaattcagtgttcgagtccaggacagtctgatttgatgactcacaattcagtttagccaacgtttcccattttctaatccctgatgactggcggtagcataactaataaataacatgtcctccaaatagggtcggagaaggcaatggcaccccactccagtactcttgcctggaaaatcccatggacggaggagcctggaaggctgcagtccatggggtcgctgagggtcagacatgactgagcgacttcactttcacttttcactttcatgcattggagaaggaaatggcaacccactccagtgttcttgcctggagaatcccagggacgggggagcctggtgggctgccctctatggggtcacacagagttggacacgactgaagcgacttagcagcagcagcagcaacagccatctatttaacctacaaagtcttggcaaataaaaagaagcactaggaatcactgtgaaataaaactaaccaaagatcacttatcttcaagaaaccctacttctttcaacttctaaatatgcaagacaacatgaatgaattctgtaagaccatattctctggtaattccaaattgaaaacataaatttcttatcccagtgcctgatattgaaagtaatatttctacagcttatggaaatgcaaacactgaattaaaagctaacattgggaggaaatgaaatacaataaatagagaactcggcattttcatttctacattttgttgttcagtgtgtgttggaatcccctggtaacaactgatgaaatatttaacatgtttatttgtagggaatgtttttcatttctgttcggtaacatttaaaaaaaaaaaaacactactgaaggtcttccatgaatcattaccttgggatttagtttttcatctgctcttaccatttattgtttatttctttattaaataagatgtgtgtctgacccctgaagccctgtcagaacaggccttgaataaatgtctttgcatgattggatttttttttttggtacgtgactcattgatattctagaagataaacctgttcattattagccttgtttgtttttaatttagaagggttaaattacattttattaaacttcattagcttttcaaataagcaagatgaatgtggcttgcgttctgcatagtcactttatctcattgctgctagagtaataagttgagatgaattttctctttgcagttgataatacttctttagaaatcgtgtcagatcacagtcatgattgacgaattgcttggatttgctcctgtttgcctgttgctgctttaatttgttggtaatgtttaaatctgccacctcacatctctatccgacagtttcccttgcttcaggctattgtgactaatgaaaaaatgatctcaaactaaatcattttttaaaattcaagtgaagcttaggtgcttttcttgtttgtaaccactgtacatctgctgaatactgatagagatactcaaccctgtgcatgaaacataacctcactctgactgacacattggtggctccaatacttgaaggctgtgtggatattattcctagcgagtcctgtgccagttaggttagcagatttctcaatccttttagagtttgtcatcagggaaaatgacaactactttttacattgagga

SEQ ID NO: 49570 - DNA, 1490 bp, Bovine  19866880368514
  misc_feature (1)..(1): n is a, c, g, or t
nacgacagaggatgagatggttcgatggcatcaccaactcaatggacatgagtttgagcaagttctgggagttggtgatggacaaggaaacccggcatgctgcagtccatggggttgcaaagagtccaacacgactaagcaactgaactgaactgtagccttaaggatagttgcattgtcctcacattgcactaaatagatattaaaatctttaaaagataaaataagagagtagctcaccacttctctccttttcacaaatcttcccaagggccaaatactgacacagaaataaatggctatggcattatttacagagagatacaggctaaatgtaatccagtacatggatttggatataattaaatatgatatgtggcaggaaaatgtatagatataaccacacaattaagtcaattcagtttaaaaacaggaaagctgcatttaaatcaaccaaaagcattaaaatttgttttaagaaataattactattcgtgacagggtttttaagaaatcacaatctctaaatatgtttatgtgtttcgttatttttatttggtctcttttttttctagttttaactttttaatggaagtattccaatataaaatgatactattttgagtgactattattttaaagtttcagaaactttatctctagctaacatgtgtaagacaaatgtaattattttgccagtggacaacgtaacctgattgacttgaagtggaaatattgatttctatggaatacttcccaataacattgtgatctgggaactctaattacaaaactctcaatccacttacaaatatatttggagattggtctcttccaaattattgcctctggtaaacattctattttttcacattgacataaatatcacttaaaataattcacttttatatgaaaattcttgtgtcaatattaaacctattcgtaagtggtaaatagcaaatacgttattttctttcaaaatgaaaatgataaaccaaatccaaatgtttcatttatgattcatttcttttaaaaattaagatgaaagaccgtactcatttttgctgacagattttatcaattttactgatagatgaatctttttcattaggcgtaggaacagaggagtaagtttgaattggtattgtagcatcaaagtacagagtaagtggcagtagaaatgtggagagaaaacaacttagttttggtgattgagaagaaatcttgtgagagcattttcaattcagatggataaggactaaagtgagccacaagctaggctgttgtccatgaattgtctgtagggaaatgcacagcttcctgctctgttacaaaataagaaaaaagaaaatatctaaatctgctcagaaatcaaattgaaggacactggaggaattattataaagtaccaaacatttgcatctagtctgtcaggtaagagaaatctaaataatttagttcagagaaggaaataattaaaagtataatga

SEQ ID NO: 49571 - DNA, 1764 bp, Bovine  19866880468307
  misc_feature (1)..(1): n is a, c, g, or t
ntgtgcccatttgcttgagatagtgccagcatataattattaatacatcatttcactctcaaaactgtccatttagatgagctatatagtcatgctaattatgaggtctcataattcccacatctggaggatatgggaaatattaatgttaacattaacaccttggagaaaatgtcctggctccctatgaatccttcattcatgattggcctcagtcttcttcatcactcatgctcatttcttttctcaccattccccttcctcagcttcaagcaagctaatcctcaggctttcccttcctttccaaagcaacagtcacctatcatcccaaaatgttctcattgctgtgcttgaatttttacattttgccttcaatgcccagatttgcctcctcccggctcctcccttatgttggagtatgaatcgggccaacatcatcctaccatctgtcttaccgcctgtccatggtagagtctgtacctgcttatttaataacttatgttgctaaatgcagccatagagaagcacatttccataatggatgttacttcaggattatatacaatacctgtgagacacgtgtcacctacaccctcccccaagttatttttagtcccatagagcctatgtctgcaacctctaaatggattttttttaatgcagtcaaaattgcaattgaatccatgttagggtctgtgccaagtggtcattgagatttttttcattgcttatgactatacacatcctaacaccaccattctcgatcctgccagcctagcagatcttgacttcctaggctaattactgctgcttttcctttatggaaaaagaatttttattcagagtttcattttcccctaatttacccaaggctggcttattaaaatctttgaatttagattctatgaggtgtttactcttgaagctgggactatactgcataaccagaacattccgatgtgaattctagagaatcctcccagagtatggcataccaaattccaagaaataaatagaaggtttaaaactgtctaagggggatggacagttcttgacatgcaccactgtccctcaagactgcataaaatagatatgcagagaaataccttttctgcccctctcctttcaactgttaacttccctggtctcctgttacatatagtatttacttatttgcataaaaatacatcttcaagccttacctcagagtggcaaccagccatcccagttttacaagataatgtatttttccacttgatatttccccaattacattgaattgcagcatatccgcttttttttttaagctaatcaatttcatgttaatatgtttcctacatttttgaaatactcactggataaagcttgaactattttgtattttgcaacaatgtccccgagacacttagggttaagtcccttgatgatgaatatattcattgactatgttgctcaactcattattttagagaggatcaataactcccttgataaaaataaagtggcattcttacaaagtcaagattgcatgagggttttggaaatcccaaatgatattaatgtttacagggacttttttttgtgtatatctttaagtaagctttttgtttttgaccaccagacagaattttgtgccattgtgatggaatcctattaactaatgtgaaataatgtgtcatgtcatttaaaaggttaatgaaaatgtaaagtggaagctttaatactgtctcaatacaaataaaactgtttttgagagaaactcat

SEQ ID NO: 49572 - DNA, 1550 bp, Bovine  19866880492362
  misc_feature (1)..(1): n is a, c, g, or t
naatactgaagggggttgccattctcttctctaggggatcttccctacccaggcatcgaattcaggtcttgtgtgttgggatttgagtcctatgcttttccctgtgtgtatcgttgtgactagaaagatcattttctcaccaaccagacctgggatatggatctttcctgagggcagagcttaaccacgtggacaggattgggaaagaggatttcctgtcaaagggctggagaaatgaaaatgagacccatggtaaaaattcatgcattgggtttcactggactcactattctgaagacactgacccagaacagcacatgttacaaatgatgggtgatggttagcccgagtttacattctggctcagtggtatgtgaccttggtaagttacttaacttgcctgtactccagtttctttatttatggagattatgtgaagattaagtaagataatatgtataaaagttcagccatattacactctcaatgttgtttttaccccacccctagacttaaccagaaatttgaggaaatcctaaatataaaatgatgctttatttttgtctatccaactttcttctggcttgaactgcctttccagactggaaagtaagttaatatccttaggctcatgggtatgggcttccctgatagctcagttggtagagagtctgcctgcaatgcaggagaccctggtttgattccagggtcaggaaaatcggctggagaagggatacgctaccctctccagtattcttgggcttctcttgtggctcagcttgtaaagactccgcctgcaattcgggagatgtgggttcaatctctggtttgggaagatcccctggagaagggaaaggctcatggggcagtcaatgcaaggaaaagtcagcttccagggaggaggaaatccttacagttcttcagtttcatccaattcatttcaatcaaagaaccaaatggggtattctaaaaaagtccaatctgacttaaggttcaaagccaggggtgcagaaatgtgtggctgacagtaatgaagttgtcctgcaccccaggtctaagtaaaattccaagtccattgaggaaagaaggatagaagggagatctttaatgtttttatagctggtgtttcagaagcccatttgtacagcctgaagattgtaattggtctttaccctggaagagttgaggtcattgtttcctgttgttgagccctgctatcaattctgtgcacacagtgttctactgagctggccagttttgtaatacatggtgattgcaggcagtgtcccagcatgtggctattgataaaaggtaattgatttcattgatttaccttccagaagagctgtcctttctgtgaacttggcctccaaacaaattctgttttatgtttgggccatttcctgtctttggtgtcatgaaagataactttccagggttatagcatctctctccttgaaaggagatgggtctggaaggccgcagtgagaggtgtcccttccaaacagctgtcatctattaccatctttcttcacccacacagccttctg

SEQ ID NO: 49573 - DNA, 1149 bp, Bovine  19866880543652
  misc_feature (1)..(1): n is a, c, g, or t
nataaaattgagacctattaggggaaaaaatctactgatttgaaaataagttactctaagtaaatttgtattctattcactttagcctttaggttaagattatgccccaaactgtctcaatttctgttaaaactcagcagacattgacactgtagcttttagctgatcccatggaattagaatttgggtgatctagatacagaatgcagaaaggtcaaagcagacataattgaggtgtactaggaatgacaggtctagatatttgagtagacgaaagacgaagaatcctaaaaggattttactatatcgtcctaaaattaaaaaaaaaaaaaagaatttcacccagcctaagaatagcctgacatgggtcaataaatgacctgcttaactttggtataagactttctatctaatttcaggaagaaaattggaaactgtatcctacttctcaaatgtgcccagataggcctattaagtatctcaaagggagataatgctcaagaagcaattaataccagggtttcccaacttggacactattgacacggtggtccacgtaattctttgctgtaggaggatgtcttgtgtgtggcagtgtgtttagtagcatctctgtctctatacactacatacgagtagtacctctttttctttagctgtgacaccaaagtgtatctccagacattgccaaatgtcacctgtggggcaaaatcattcttgagaaccactgtcgtatgcagtcaagtgtcttccatcactactgtcacaatcttctaaatagcactgttctattcaataaagaaggcttaaattttaagaaaatacattttctactatgagatgcatgtaagttgcccatcacaacttttttcctgaaataatctcaatttttcaaaatattctgtgcagtataatttagatgaatcatttaatctatctaggcatctgcttcttcatccataaaattaaaaagtggaactaatttggcttttcccaaacccaccttagttatttggaatcttcatcacaaaatgtagattcctgggccccatgtcaaatatattgtaacagagtatccagggaagaagcctgagaatctatattttgaaaacaagttcctcaggagaatctgtcatcagacaagtttag

SEQ ID NO: 49574 - DNA, 850 bp, Bovine  19866880628320
  misc_feature (1)..(1): n is a, c, g, or t
nttgagagaaacaggaaatgattaggtaaacaagatgatttccgattgtgaggaaagatttctaaggatccctggtgttaatagtaaatgataactggacataacttttagattggtctggggtctatgcctctatgaagagtgatatttgaattagggtatgaataatgaggacctggttgtgtaggaggtctaggaagaatttctagcagagataacagcacaggggaagccctgaggaaagaagggatttggcatatttgagaaacagatgaagtctgtgtgttgggaggatggtgaatgaagattagaccaggagggtgtgaccctggagagcagggatttcaatgagaagaccacacaggacctcctagatcatgggaagggactaagattgatccagtgttagaagcaatacaagttgaggagttccttcaggttttttttcacctgtgaactcattttattcaattgtcaccccctcattctttcactattacttacagatctgacctttgtcatgaatgagagactgaaggagtagagttttctctcagagaagcaaaacaagccctggctgggggtgttccttgattttgctttgacccttattaatctttctccctccccaatgtcttctttgttttcaggcatacttacccctcaccttctggatcactttgttggacgccttttatcagagcctggtctgcttcttcgtgccttactatgtgagtccttgttcactcaaaggatttgttgttaatgaataaatggtgcctctttgttctctgtcactggtgtcagcatttagagtaggtatacgagggtagattgctcatggaattaa

SEQ ID NO: 49575 - DNA, 915 bp, Bovine  19866880639493
  misc_feature (1)..(1): n is a, c, g, or t
nctgaaatagcttgtttaacaaggactggatttttcctctcaatcacagttctaaagctatcagttattgaaaagctgattttcaaagcacacacaagaacagcttttctgtacagctgcaatgctatttaaatcttccatgaatatatccacaaatccaagaaaattctaagctaaaatattgctcttagagagggacatagtaaaataagaccctagggaagaataatccaggaagtgaaatttggtttttaattttaatgctgaaattataaaatcagccatatggcttcaactccttagagctaaaagaacacctgaaatcactatttagtatagtcagcctagaaggtttttcctgtgagactctttggtggacattagctgtctatttcatagtcattctttaataggtttcagaaatgtgaataaatgcacataaccttctgctgtgatgaggtagggagcgaatatagaattagcaggaaaggccacgttctggagatactggatagattaatgaaaagcaagatcatccttggaaagaacagactctggaatccaggtttctgttccacagtccttctctccagcaccactgtggacaaattcccaggagccccttggtgatcctggcagcatcgatgtcaggctttaatctcatgtcaccggtgtatcattctcctgcagtgatcaagcagtccactgcaacggtgttggctgcccctgcagcattctataatgttgataactctttgaatgtcatcaaggtggaaactacgactttagccagctatattgcaatctgaatttccttcatttaagacattcagtttcatcaaattacctaccaaatgaaattatattgagcatgagtcactatcataaatattttggagccatttacttggaagt

SEQ ID NO: 49576 - DNA, 2274 bp, Bovine  19866880688506
  misc_feature (1)..(1): n is a, c, g, or t
ntgtttctataaaagtaatgtgcctgctttgaataatcagaaaggtagagggagctgaagacagtctgtgatgaagtcagccatgaaaaggatgttgctggcaaaaattagaataaatacaaggaaatataaaatgcaataatgaaattaaaacagattttagacataataaaggtaagaattaattctagagtaaatcctatggtataagacaaatataaaaagctcatctgggaaaacagcaacagcagcaataatggttaatttttaccgagtggttcttctgcacctgacacttacctaacatgcttttaattaaccaactaccacaaccaatcctgggcttccctggtggctcagacagtaaagaatctgactgtaatgcaggagacctgggttcgacccctgagtcaggaagatcccctggagaagggaataacaactcactccagtattcttgcctgggaaatcccatggacagaggaccctggtggcctacagtccatggggtcacagagttggacacgactgagtgactcacacagccaatcctaaaggaaatcaaccctgaatattaattggaaggactgatgtggaagatgaaactccaatactttagccacctgatgcaaagagccagctcattggaaaagatcctcatgctgggaaagattgaaggcaggaggaaaagggagcgacagaggatgagttggttgaatggcatcaccgatttgatggacatgagtttgagcaaactctgggagatggtgagggacagggaagcctggcatgctataatccttggggttgcagagtcgaaaatgacttactgactgaacaacaaccacaaacacaaccatatgccaaagctatatgtaagaaaaacaatagccacaagtatttcaatgtccagaaaagatgtgaattatattttttaaaaagcgtctcatgtattaacatatcagttcactgatctctttctgaaacattccaactaccagtaaagtctagaaactggtaaccagggaaaagactggaggaactgttgtaatccaacctataggatgatattcacccttcactatgctatgaaaagacatacccagaatgttggctcacaattagaactttggcaactcagtttggctggcccactttctcaatataatggaatattaaaaagagttgtatctgtggaaatactggtctggcattatagtatcactctttttatttttttttatttaaatgacagtagccaaaggacttttttccacatttaaattagaagaaatgagacaatgaaagacaccaaactggggatagcagaaggcaacaaatgtcaaaaaaaggtaaagagtgaaacattaaaaagttgtaatcattgctatggactgaattatggcccctcaaaattcatatgttggaagcctaactcctcaaggtcctatactggagataggatctttaaggaagttatattaaatgaggtcataagaatgaagccctgatcagacagaactaatgtccttacgaaagagaaagagacaccagcaaaccctttctctgtgtcatctgaggacacagcaggaagacagtcgtctgcaaacagaaaaagagctctcatcagaaacctgaatggccagaaccttgatcttggattttctagtccttagaaatatgaaaataaatttctgttatttaattcaactgatctatgttatttggctatggcaacctcaggaatctaagataatcatctaactttaatacatttaagacatacatcttaatattttaaaataatgaatgttaactttttctcataggaaaaaaaaaaaacaaaacctaaacagttctctcttctcaggtattttgtttctagtttgttctctcttctccactgagtgagtatcctcttttgataaccccccaaatcctaggttgagttaagctatgtagagaaattgagatgcttttaacaggaattaagcatggatttctttgtaacatttttaattttgtccttaacgaatgaaaacacttccatatatccaccaggggggcatcgacatcatctttctaaactggtcaaagttgcttagatatgaattctccacgatatctcttgagttcctttcagttttccttaatcctaatcagaggacttgagtcaaccaggattttcatttaagcttctaatttggacttagctccaggtccttctttaactactcaatatttttcataaaatatttttattttcctttcaga

SEQ ID NO: 49577 - DNA, 1068 bp, Bovine  19866880817328
  misc_feature (1)..(1): n is a, c, g, or t
naggagcccagaagaagaaggaagattcctttccctctcctcttccccaggtccattgtaggagtccctgctccacagagaaagagggagagataggcaagctggaacccaggttatacaaactcagcctgccatcttcaccccacctttaagccggatattctgaaaaatgcttctttctcagacttccagggagattttaaaaattaacatgagaatccaacatggtagccattgggaacatttttcttctcttgttaagaatgagtttggggggcagtgattaattttgtaaactatttcaaatgagcagccctgaacttatttccttagcctggaatcacttgacctcatgccatgaagctatggcgtcacactgtcctagttcctccttcagagattaagagaaagggggctggggcaggtgagctttgaagaagggaatggtaagaatttttgcttgagaaaaatattgccctttccatgaggaaggcaagacttacatgctgtgaaaagggtgcctgggcagttacctgaactgccaaatctttaatcaaatagtatatatttatttcttagctttccagagagcagtatctaatggtgacaagctagttgcacagcgctagtttctcagctagcacagtatgcctctgctctctgagctctgcattccaacacatgaaatgaatgcgtcaggaaatgcacatatacccactttagtatcatttcccttcaaggccagatttctgttttaaagaaaaccttcaaaacagcaaaaccacagataacaacatcactgagccttcagacatttacaacagcccccaaatgacagcccttctctaccatcattactgcttctgccttatctctgctcatgggttactttgctcatcatagaaggagtattccctcaagagctcaacacacaattctaatcaaatccaaccaactacagttgagattcatctcatttatgtcaataaagcctcattatttttttgcagtgtgtgttcagcctgagtatgtatataagaattctatatattcatttccaagatgaat

SEQ ID NO: 49578 - DNA, 2916 bp, Bovine  19866880864384
  misc_feature (1)..(1): n is a, c, g, or t
naatttctctctttgtgtgtgtgtgtttgtaaacatggcaattaacaaagctctgaaagagccaataacctggaccacagtagactggaaaaaaatagttttcgtttctttttgaagtaaacatggtgcagtaataaaattgatatgcaagaccgaaaaccaattggatggctgaatctcttacctcaaaaagcacagcagtatcgctgctagggacctgtggggttaaaaaccaaaagaagaggaaagaagtcgtttaggaaccatgggacagaccttagtgtacatagtaaagccaataaacgacgttaaaaagagaaaaggtgatggggaagaacattcgggaccacttgtctatggaattcacgtcagtcaagtcggggattttgactttgagctgcgaggcgcgtctgcggatgcgccccttgctgtgcgcgccgtgccggtccagcgcgcgcccgtacccctcgcggctgctcattggcttgcggtactggatgctggcgctgtcgtaggagtacatggtggtcttggggtctcccacgcccgtgagcacttcagagccgctcgtctcgttcctgatctccagggtactgaggagaatgttgccgtgggcgtcgacctgaccgagaaaaaaagcctcaggcacagctgccacgacattcgcttgttttagttaacctgtaactgatgatactgcgtcgggctcattacactgtcttgctagacatctggttctgcatgtcccctgggtatctatctatctaagcttcccaggtggcgctgctgctgctgctgctgctaagtcgcgtcagtcgcgtccgactctgtgcgaccccagagaaggcagcccagcaggctccgccgtccctgggattctccaggcaagaacactggagtgggttaccatttccttctccaatgcacgaaagtgaaaagtaaaagtgaagtcgctcagtcacgtctgactggcgctagtagtatctatttatctatctatctaatcttcccaggtggcacgagtggtaacgaacccccctgctaatgcaagagccttaagagagacgagtttgatccctgggtcaggaagatctcctggaggagggcttggcaacccattccagtattcttcctggaaaatcccatgtacagaggagcctggtgggctatagtctaaggggtcctaaagagtcagacacagctgaagctatttatcgaatccatcatctatcaatcaatataatctacagtttgtctatgatccaccatgcctctatgattaatctaatccatccatccatccatccatcttttatctggactcacaaaacagtatgtgtgtatagaatatatattatatatacactatatataaattatgtaatttttgtttttcaaaactaccattcattgaatccatagaaatacactacatataaaacaaaaaatgccatatgtatgtgaaaaaataccatatatgtgtatatatacatggcatttttccttgttacaaaagtgatacatggaaacattcaaaactagaaagcaatcaagaaataaattaaaagctaaaaattcataatttcaccttcagtgtccattatttttaatatcttgctaaacctttagtctttttttttttaattcatttatgcttacagacacaagctcagccagtatattttgttttgtaatctacttttgtcagttaatagtataacctggtcatcttttcatgttaataaatatccctctgtgacataatgtattcatagcctatatggataaaccataactgaatcaatctatttttagatgttaaggcttgctttgctttcatactattaaataaacaaacctgaatagatagctagcgggaatctgctgtatagcacagggaactcaactcggtgctctgtgatgacctaagggttgggatagttgggggttgggagagagattcaggagccaggggatatatgtatacatttaactgattcacagtgttgtgcagcagaaaccaatacaacactgtaaagcagttatatgccaataaaacatgaataaataaaagtaagcctgcaaagaacaccttttagctaaatctttgttcatacccattgttatttcctcagactaaattgccagaagtagaatgaattcactggtcaaaaggacatgcttggctatactttacttttatctttccactgttgttcattgttgcttcctagcattccactgatacctcatccaggtttcctggtttttctctatgctatgcccagacacacacttttgaaactacaagaattgtgagtacctttggcctaacatgttgtggctttaactttaagctgatgtacttgaaaactaacttacctgaaggggacatggctcattcatgcagatgagtctaaagtacctccaaggacaatatagcaggtaaataaattaaataagtaaataaataaaaactctaaatttagagttattagcacagtgcctgacttacaatcagtgctctataaatgctctatcaatgacattgatctcaggaaacactgttgaaaggttttagtaggcaagcagcgaacctggtgatgaagaaagagatagagaaaaccttgggaagaggcagagacaaacaggagaaagaaaagtacagaaggtgagatgtgatccgtggtttatcacagacaagataactaagatttattgtgtccaccatgtgccgggagaaatatcaataacctaagatatgcagatgataccacccttacggcggaaagtgaagaggaactaaaaagcctcttgatgaaggtgaaagtggagagtgaaaaagttggcttaaagctcaacattcagaaaacgaagatcatggcatctggtcccatcacttcatgggaaatagat

SEQ ID NO: 49579 - DNA, 1679 bp, Bovine  19866880972873
  misc_feature (1)..(1): n is a, c, g, or t
naactgctctcattagctatcctcctggaagcaaagtagtgtagtagcatggatccatactccctgggttcaatcctatttcctcaataaactggtcctgtatccctgggcaagttacttaagcctacctgtaaaatgagtagtagagtaatagtacctaactcatggaactgttgggagtattaaacctattaataccaacaaatcgcttagaacatcataaattcagagtacaggttaagtgatgtataaatgttacctgttactattgttaatcacaatccatataagaccacggggcttcccaggtggcaaaagtggtaaagaacccacctgccaatgcaggttagatgtaaaaaaactccagttcgatccctgggtagggaaggtcccctggaggagggcatggcaacccactccagtattcttgcctggagaatccccatagacagaggagcctggcaggctacagtccatggagttgcaaagatttggacacgactgaagcaacttagcatgcatgcacagtaagagcacataacaaatatatttaaacccacagttctcttctggaaggtgacccttgtttgcattagtcttaccttttgccgtggctggttaggagcagaaaccactactgtgttgcaaattgccaatgcaataaagaagtcgatgatgtacagagtctccagtggtggatctgggatagtctcatccgttggggtgaagagcagaggtgtaatctgactaaacttgtccaaaagcctggtgtctggtaccacatctgtttcctgaatatccaatgagacaaagtgtggtcacaataagcatctaaaaatatgaattttaaatctacacaagaaggatgatttctaaccagaatctatgaaacatgagaccgtattctttaaaaataaaatttaatgtacatggtatcatgggaaatgaaaaaaaggaaaagacaaaaaattaaatgcaaaatctagaatgcatatatgaaaggagattaccttgactattaaagtaagagatagagacaatgcctttcaccaaattctaattgaatgagtcttgccttattttgaaatatacagtacagagctatattttactgtaggattctactttgggcatagattcatccaacagcaactgatgaatattaattcttttaaaactgagcatgttattcatactatgttattttaacaaaatattttatggctcaagtcactactattgtttaaaaaccaaccctgcaaaataaaaactactataagcaagttaacagagtttatctgtatttccctagtaataccttacaagccatgaacatccatgcttgctatgctaagttgcttcagatgtgtccaactctttgcgaccctatggactgtacccccttgttcatggttcttctgtccatgggattctggactggagtgcgttttcattctctcttccaggggatcttcccgacccagagacagaatcagcgatgaacattcaagggtccctctaagagatttctgattatcaaatatatctggcaactgtgacctatgcctttctcttttgtacaattccttttacaaattggctttaagaagtttgattattgggggaaaatacttcattctgtttaacacagtactttgcacacttatttagaagtacca

SEQ ID NO: 49580 - DNA, 2587 bp, Bovine  19866880981464
  misc_feature (1)..(1): n is a, c, g, or t
natgtagtttcggcaagtgtgctttccctagtaaagcagccccctcagtaaagaactccgagggagcatttgcttctcctcaacgaagagaatataaaagcatacagttatgacttcacttgactattaacaacgcggcaggcaaaggaggtatttgaatttctcatcttttgtaaagacatcataatttacaattctcaggaaaccctcagcctcacagcccactttcttttgacagtacttgctccaatcatgacaagcagtcttttgtccaagcctctatctgaattttgtgcctacaacactatccagtgcatacacatgaaaactggcagtcacacctccctcatcctctcctatcttctcttcgcatctccctatttaggatcttcaggtcttttattcaaatcctcagtagctctcagcatcaagtcatagttattgcagagataacacatatgttcttatgatttagatacgttatatttttaaaactgaacaagtgagttaaaattacacaggaaaataccataatactcacccagtaaatagtcactgagcgaatgaatggataaatgccctgtcactcacttctgagctagctgcagacagcctcactctaccacagagatgtgaccgtggagaaggctacctttggatgggaaggtcaagtttatggtattcgggtgtgcaacatctactcacctgcatgccttcttgcccagagatgccaatgccaatgtctgccacttgaatcatgctgacatcgttggcaccgtcaccttcgtgagacaggagaagagaaacagatgaggagcaaagaaaagatgcaaactacaaatcagtagcagcctctcaagccaacaaactaatccttcaaggtttatcccatgtctccaagctgcctggaagctggctaagcaggaattcaaggtggtatcccattgccatcagaagaattccaaatcagtactacttgaaaatcctttgcctgggctagcctcccctttgtctatgtcacttactctacttccaatttcccagatatactctgcttcttctagccctgcacctcgtgtttctctattcctataacactgccctcatcatccccgccccaccttgctagattttaattgctctctcagcttagatatcacttcctctgggaaatccttctcatattccttttaaataatacttatttatttgcttatttatggctatgctgggtctttgttgctatgtgtgggctttctctagttgcagtgagcaagggctactctctagttacgatgcgtgggcttctctttgcagtggcttctcttctggagtacaggctctactgagcatgggcttcaatggctgcagcacactggcttagctgccccacagcatatggaatcttcctgaaccagggattgaactcgtgtctcctgcattcgcaggtggactcttagccactggaccaccagggaagtcatcatgtttcttttagatatgatgccccttccttaggtttcaagtaccactgagtgtgtctctagtaaacctgtcacgtggtattattatggttgctatagatttccttgtctcaacacaggggaagcttcttaaggggagttattacattcccactggtaatgaacattggttgttcccaactgcccagcaaactttacttgttttctaatgaagtatcctaccttttcctggggactgagtccatgtgttttgttaggatgaacccaaatctccagatttgggatgggcaactgaagcaagcctgggaaattagcatcatctgttccctggcctcagtgattggttcagagatgggtacatgattcaacttaattgatacaattgacatgtccagggctctagcctcaggaacatacggattcagggccttgaacaattcactcatttatatgttctttcaataggacagttgaacagaattccaccctaaccctgatactttattccagcaacttgaaaacatgtactattatttctctcaggttgctaataggatgagatataaaggtgggaattttcagtggctagaacagcatcctgaggggagaggccacctgagactgaaaataatccaggtagaagcagagactataaggaaagactgagttctcattgtgctaatgtctgaattttggtatgtcacagaacttaatctcaccctgtttctcttttccacttatattcatttttggtgagcttatctaatatcaaggctttaaatatcatcactagacttacaattcccaaatttatgtctctagccaattcctcattgctaaaatctcagactttatctccagctgcctacctaacatcactgctgacagctaatggatttctcaaacttaatgtgtgtaagaccgaactcctgctttccctgactccatctcagtaaatggatgctccatcctttatactcttagagataaacccttgacctcccccttgacgcctactattcttcaacacatccaagccatcagcaaatttaaccagctctttcttcaaaccatgtccattatcgatcacatcccaccacctc

SEQ ID NO: 49581 - DNA, 794 bp, Bovine  19866881001095
  misc_feature (1)..(1): n is a, c, g, or t
ntgagtgactgaacaacaacaacagcccagtctctagcgtctaaaggtggttggttttattttccgacaagacaataaatgggcttttctcttgcaattctcaaccatttttgaatatcccatgttcttttggatttcctttaggatcaagttggatagctctagcaactaggaggccatgtgcttttgtggctcacaaactattatatgtttttgtataatttcttggcttttgaaatccttgtgaatagaatgttgaagagctgacagttcacagttgtttgtatctacaatttatctgtgctcattcccaagtgctagattggtgtcatggaggttattgtggcagacttgttgggcacattaatatctgtgttttaaaaattgcattttgtctgggcatgacgggggaaaaaaaaaaccctatcagattattactggttttgctggaattgatttttcactccctgtaacttggcagttacactgatgaaacatgtggctcactgccattttatttatgttgagggttttatttctgatgtccatgaaataaggagataggcaaatataaatttatctttgaagatgcttgacgtagaagtctgagaacagcagttaggaaagggcattgttctaatgttattgcctgatctcaggccagggaagaaaaatggtgagtatcatttcatttcagaggagggaaatgaaagtacagatttccatgacctggttgggaaagctgaatgtttccaagtttctatctgggaaaaggggccaataatctgcagtac

SEQ ID NO: 49582 - DNA, 883 bp, Bovine  19866881004827
  misc_feature (1)..(1): n is a, c, g, or t
ntctgactctttgcaaccccattgattgtagcctaccaggctcctctgtccctggggattctcgaggcaagaatactggagagggttgccatgtcctcctccaggggatcctcccaacatggatcgaacccaggtctcctgcactgcaggtggattctttaccatctgagccaccagggaagcccactatacaggaaatcaattataccttaatagaaaaatagaatttagaaattaaaaataagtcactgcattgaagagtggctaaaaaatctacaatggctttcccagactattaccagcctgttttgtttcttttatgaatgatagcattctttcatttaattcatttccttattatttattctttgactcccccaatagcatgttaagtgcctgaggcaggaaacttcagatttaccactgtaacaccagaacctagcatggaatggtgtacatcaggtggtcactcaataaatgttgaatgaatgggtgtccaaatgcaatttttctaccaattatatatttttaggctctcattcaatctcaaagacctttttgattgtgtaaagtaaatactgaataatgtcacaaataatcaaggttgtaattctgaacataaagcatttttcaagaatcattgaaaaagtaacaatgttatgtcagaatttgaaaagattggttatcatgggagtcattataactttaagaattagcataaacccacacaccttaaaataaatgtataaggaaaaatatgattggcttaatccctccctttcctacctttcctgcatgtcaatagaacacctgtggtattaatgttttacaggacacaattagctaaataaatactgttctaggaaacagaataaacattttc

SEQ ID NO: 49583 - DNA, 1269 bp, Bovine  19866881047443
  misc_feature (1)..(1): n is a, c, g, or t
natttatttcaagtgtagggctggaagggtaagaatgcaacaggaccaatgaagacagaagtcagctaggaattgctggactgggcggcgttttagtccccaggtttctgccttttacctgcccctcagtgccaattaccaacaaaccccccactgatcacacttttccatccctgctcgattcacacttgaaagaatttcttttcccatgtgatgccaattcatgataaatgttcacaaaggcatgacaatttcaattgccagaccatctggctactggatattttaccgtggtctttagagccaagagctttaccagttgccctgtttctaaggaaacagaagctatggtaacaattcgtgacttagatgaactgtctcattgctcattaaaaacggcctctgggggtcagcaagcacaagctgtactcctgttcctgcagccagaacactagatactatagtgctcgttttcattattcttctttgcatcttctttcctgaatcacttgcggaaccaagctgaagtgggatctgagcatagaaaagtccatattctacccactttttctgggatctttggttgggtggatgaatagatggatggaaggatggatggatggttcaatcattcattcagttagtcaacaaacaaatactaagcatttgagtatcaggtcacgtctatgcttaaacatttcagggtgaaaagtccaagtttcttagtttaataataaataaacaaaacccaatgtgggtcaaaatgcagccatacattgatgagtaatactaatttagtcggtgatgagaagcatttttacaaatgagtgaaataggctaggacagaatagagcaaagtgcattgtaagtattaagggtaaatgctgcttcatgaaacttttcttaaatatgttttgtgtgttttattgagttgaaaagtaaaatgcatttcttattagaaagtcaagttatgaaaaaattttaaagtcactgactacaaaagcccttttacctacctcccagtcccaactctaattggtacatcaaaattcattttctaatcatgctgcactgctccagttctctaaaagcacactttttttttctttcataaatatcttcaatgtccatcttaatagaatatggttgggttctcaaactgcttctgcttttttaaaagttatttatttgaattttaaaaatgtatttcattgaagtatcagttcagtgcagttcagtcactcagtcatgtccaactctgcgacccca

SEQ ID NO: 49584 - DNA, 1234 bp, Bovine  19866881101837
  misc_feature (1)..(1): n is a, c, g, or t
ngaagagtcagctaggcatttcaccccagatcatctaataagttactatagctatctcaaatgaagagaagcagagactcacgggtttataaattacgcactgtttataaattgcccaaagctggtaattgacaatatcagctgaaatcagttttgtccatgtagaacccacgtagggcacagaggccagtttaaaggtgcaaatggagggtcactgtcctgcctcatcttgaaggggacttttcctggctctgccagggaacactctgggtgtctgagctatgctatttatgactcattctaaatcccttagaacaagaaaacagttaagcctgagggatgagaggctcagaatcaggcagtgagagaagccccaaactaatcatagctaccattacaaaattctattttgtgccaagtgctatgctaaattcttctatgaattgtataaacggactctagggaaagattattgatatcagatctggttattcagtgcattaaaacatatcaagagagagagaacaggcatcagagatgttttggtatcttgcatttacttttatgggatgttgaccttgaaatgcagaaagagggaagtctagtttgaagacatatgtgaaaataggatcaggtttcagtggtgctaggttatactgataaccagttaaagatctagaaaacaaaaaacagcctccctgtatttgccttataaagccaaaaccacatattggcagaaacattcccacagaagactgaaatagaaatggcatgacatttcagtttaacacattctatttatttaagctgttattgatgtttgtccttgagacttttagtttaatttatcctccatgaaagaaaccttagttactttacattcatattgataacttactctaagaattccttttaattaaaaaataatcagttttaatttaaaggaatcaaactgtattccttttctttttttttttctcctttgcagctgataatttttatcctatgagacaatactttgttacagtccatattctgggcttgggagacaagagtgaattgactggagacctaaagcaggtggctggctgtgcagactctctattgaggtatatctctgatcagaaaataagatgaatagaggcctagagaaaatccagaacaattattgagtggtaagtagtaagaatgagcacagggcagcaagattcccaggggggatccaaaattccaa

SEQ ID NO: 49585 - DNA, 1519 bp, Bovine  19866881101893
  misc_feature (1)..(1): n is a, c, g, or t
nattgagttgtgaatccaaaatgactttctgattgttaaggagggtacatcaccaagtttatgaacactttcaacaatatatggctatgtggctgctttgcatttcttttttattgtctagagtacacttgatttaaaagtttgcagaacggtctttcagatattatggttcctattttatgacttgggaaaattaagaaagtaactggcataaacagttggctgagtgtttgaaattgccatccctttagacactaaaacgtttctctgtctggagttcaattctaagaaagaactagcacaacaggaatgggcttcttacacctgtgtctaggtgaaagcagttggttaaatggacaccaacaaaacagcaagcagacgtaacctctcagataagaagccatgctccttctgcatctaggaaggcagtatatctgtcaccacatctatcctgaaaatactttaataaccatggaacttttttgacaagttcagatattgatgccaggccccgtttttagaatgctgaatatgcaccatattggctggcccaggagctggaagaggacatttaaaagtaggctaagactatacacaggagtgaatttggggttagctactcctagaaaacgaactagtaatgatgtagatgtgccagctggcatttatgcagatttcatgttttactatactggaataattagaaaacttaagaggcatacatctttagtaatagacctttccagagaatttggcacatgctacttctcacatttacactaatttttattagtttttctttttgcgtgatctcgagtgacgtctcttactcagcaaattcttccttgagtaaagagaaaaatgagaattgggacagataaatgctagcccagaattatttctttttatttgaatctcatatgaaatagactgttcactccccactccccacatacttaaaacttaacttccttaagaaaataccattgaaaatctcaacaaacaattaaatagttactgttctggcacatcttaggtcttagaagacttcattattgggcataattttcctggtcaatccaaaccagtatcttggtgcctgagcacaatcagaagcaaatggaagagttcccacaaagtatgcagagcacacagccatacacatccactcagcagctctgaaatcatccacaagcttcccaggtccccagactgtctcccccaccccacccctaccacataaggacagaatggtagagtggacatgagggagttctcaaaggcaggcagaaattgtttggggtttatcacttcaatatatgattttatacaagtttcttaatctctttgtggctatatccttatccatataaaattactaatgcctaacttgctgagttattctgaagattaaataagatgatctctatcagtacatggcaaattttattatcattattattagtgttaccagggcttccgtctacgggctcgcacagtcggacacacgactgaagcg

SEQ ID NO: 49586 - DNA, 1404 bp, Bovine  19866881171528
  misc_feature (1)..(1): n is a, c, g, or t
ncaaatccttcatatcccttcaacccagtttcagacttttgcagttcagaaaactgttactttccttcttgtgttttagctctacagcattatttatggttttacagattatctttctagtgaaagggactgaaaaatctgtgtacagtgatttctggtggtgggtggcaacaacagagctttcatgttgaaaatgacatcttatttttcaaaagtaatttgggctaagagggaaagtgctaaaatgttgtaggatggcattggcattttcattccttttcccttccccttagagtgtgttaaccaatttaaaggattattgtgtgcttagtcctggctaatgagaggaatgttcaattgcacagtcttggccacaattctatgcaaggccacatatgttcccacctgactgtgaagtcagcagactggcacacgataggtatgatctcaccttgatgcacaccatctctcaggcttcttctttaatcttcattactgtaaagtatatttgtttaagagtacagaatctgaatccacacaagttctagcttcaaatcatggttccccgcttcccagcggtgtgattggaggcaaattatttaacctctttgtgcatcactgtgctcatatgtaaagtgaagatagtcattgtaaaactttctgaggttactgtgaggattaaatagtcaatgtatattgactatactaatatatactaagtgctatgaaagtgtttgctattattatttttttatgacattgtctttgagtttctccaagtgatttctaaaagtctccctttttaaattttcagtaaaaatagtatgtggacactgtaagcaatttgaacaataaagaaatatgcacaatttaaagcaaaggcaaccactggtaatagtttctcagatattcttccagagtgtttctatgctaccttttttcttcctttctgccttccttccctccttcctttcctccattcctacatctttcccttcctcactttttttttctccttctctgtttactgtacagtaatggagatagaagaagactgaaaggtggcgattttcatccttatgcacatgaggaatttaaaagggaaggaaattttattggctgtttttgtccacagagaactgcatttgtaatacatgagctctaattaaagcataaaccaatgaattttatgtatgaaagaacttgtcagatgaagaaactctggaatggcaaaccaagaaggtgactttgaaaacatagcttttttattattaaaaaaaaaatctctgtagagtaattgcggtaattaaactgcccatcctcaccattatcattgtcttttgggggaagcaatgtgcctcatcttcaaatttcatttccttagttttatttacaaatgttccc

SEQ ID NO: 49587 - DNA, 1067 bp, Bovine  19866881201674
  misc_feature (1)..(1): n is a, c, g, or t
ntaaagtttaaaaatggaagaaatatcttcattagcatttgttggacacccagtccttgctaagcactgtatgtgacaaagaattagtcatagtctaaacctcctgggcttaagagatagtcttattaatattcacttgtaaatagcttgtacttactaataaaatcccctgatgaagttcaggtcattcctcctacaattcctacactcagtatctcagaatgtgtacattctataacttccaagttaaggagctctacaagacagagccgtgccctgacatttatcacagaataagcagaaatgagccctcatcatgcccagctgataaacagcctttggtgagctgaactcatgttgctgatccgctaattgtccagctatattcatttgacgttgctgagcctctaaacaaattaaggttaattggaatcaggaatggatcagcaaccttggtactcaatctgtttagcagttctcctcaactcattacttttcttcttttagctcttgcatgaccaaagtgccactcattctacctgcctctattttgactggatcttattacaaaatgtttcaaaagggaattatctgggggacacgtggcaaatcacaactcagtagcatccagagactcaacgcctccaagagacaccttgtgaatgttgttttcatgtgtctttttcaagtaagtctctatctaatccttcagacgtttcattttctcatttgggtcctctttcggtagaacagaacctagtcctagaaaggacttcaacatatccatctgatctagctcctagtcagagattgtattaaatgcatttcatagattaagtaaagaaactctgaatgtgataagaaatttccccaaaatcctgtacatagggcattagtattttggttttctgcttcataatttagtgactttcaactgtgccatgttgcctctgtacttctaatagctaatattagacaatcactatgttccaagcaatggtggagtgctttacatgcattacattaatgaatccttacaagctttaatcccatttcagaagaaacac

SEQ ID NO: 49588 - DNA, 1992 bp, Bovine  19866881304888
  misc_feature (1)..(1): n is a, c, g, or t
ntcaaattaccttggagaatggcagtcccctcagaacctcatggaatagaggagtggtaaagtacaaagaagttggtactagtattagcaagattgatactcggtagacaaaaattgaacagtggattaaaaaacatactacactgcaaagtataaagtaccatataaatttagccttactctcacacccatccatgactactgaaaaagccatagctttgactatacagacctttattgacaatagatgtctctgctttttaatacactgttaagttttgtcatagctattcttccagggagcaagcgtcttttaattttgtggctgcagtcactgtccatgttgattttggaggccaagaaaatgaaatgtggaaggactgatgctgaagctgaaccccaatactttggccaccagatgagataagctgactcactggaaaaaaccctgatgctgggaaagattgaaatcaagaggagaagggggcaatagagaatgagatggttggatggcatcactgttgttgttgtgaacaacaacagccatataaattcaggcttaggtagtaaagatggttagaatcactaactcaatgggcatgaatctgaggaaactccaggagatagtggaggacagaggagctgctgtgctgcagtccatggagttgcaaagagtcagacacagcttagcaactgaacaacgacagtaaagactaaatagacttacacaaataaaacgagctatgtgaatcaagtgaatgacctatttctatatactaaaaaccaactggagtgaaattttcaactccaagatctacgttagatatataaggatcagttaggccatgacaggttgtaattctcatgactcaatgggtatcttatccatatgcattcccttctccaggggatcttcctgacctagggatcgaacccaggtctccggcattgcaggcagtttttttaccatctgagccaccagagaagcccaatataatatgcttatttaggtacatgaaaagaatttggcataaaattgtaaatataaaagaaatttaaaatattgcaatacattttcagaatctattactctgatttttaaaaatatatttcagtagcattaaaaatcatcagttaaggcacatattttatcactttatgtctcattgcttgtgcagctttttgattctccaattagtagagcttcacttacatgcccattagtggatgatacactgttaagcaaagttatagccatcactgaaatggaaaatactaccaaagatgtagaactaacacaatgctgctttcctgagaaatctatccccttgctgggaaacaaacatacatgaattccataaaatctaatgcagccatttgtgtggaaattcctccacagttaaatttttaaaaatcagatttcttcttcttactccatacttaaagtcccttcatcaccacattttatccaaattacagcaagtatgttaagataataatcatagagaaaggaaaaaagaaagccatgggtggagggttcttctttacttaatcacatggatggagcagaaggggggtggcctgtgagaaaagagcctgttactatacagcaaccctgccgagaaggaaacagggctttctcatctaccaatctgattaacacttcctcttctagaaacaaataaaggaaataaataggaaaaaattccattttataccaattcttaacactggggagaaaaatagaaataatgtatgtaaagtgcctaccaaagtgaccacacacaataaacacttactagatggaagcagttagatctttttgaaattcaaaattgttcattagttttattttcatggttaagagacaatacacattccttggagaaaaattttaaaatgcgagaacaaaaagaataaagccgaaaactgttgaattcccactaaatggactacttagtcataaccactggtataacatggggtatgtat

SEQ ID NO: 49589 - DNA, 877 bp, Bovine  19866881319229
  misc_feature (1)..(1): n is a, c, g, or t
nttgaatgataatttacaggagtgagggtgatttcagggggtgggtaagagttctgtttatgattcaaggatgaattattatgtttatatttggaatttctgtggttataggagggtactagaatataaaaaaaaaaacttagaacttaagatcaattttttcacacaatgaatatttcaaaagtaaaatgtgatgtcttaattctcatatttaattattaaaatgttcatgagtttaccaaaaagaaactgtttatagaaatttggcactgaacaaagctatcaccatcaaagaattttattatcctgtaaaattttatctcagtatataatttaatatttaccaaagcatatattactgatcattaactttaacttaaggagtttacggcttagtattcccaaattctacattcaggttcaccactgattccagatataaaaatggataagggcaaggaaaaaaataaattcacatttcttcagatagttacacatcatagtggtctggctggcatagcagtaaaagaagtcctatcaccatataatagaaaaatgaaaaaaaaaaagaaaaatgagatttaaaaaacagtatataaaaaaggtaacaaaggatattgtacaggacacagaattttaagttttatcttttaataacttataatggagtataatatacaaagattctgaatcactgtactgtataccttgaagttaagataatattaaaaatcaactatatgtatcaataaaagagtactcaataaaaatgttttaaaatgaaaaaggatagtgcccaaatttctcataagcatgattatacaatcacaccagggggcgctcttaacactgaaatgatggatggcattttaaaaca

SEQ ID NO: 49590 - DNA, 941 bp, Bovine  19866881427000
  misc_feature (1)..(1): n is a, c, g, or t
naataaagatctgcatttttccaaaagtaactagcttatatttttattatggcaaaagtaaatgatagcaactaactttgggaaaatcattatcttggcatagctttttattcctattacctaatcagggttcacatattaataagtaaacaaactcaaaagctgaccttttaaggaaaagaaagagaaaaaattcacaagttactgtaatgccatattaacatcaagttaatgggttgcctatgtagataaatgatctaaacttacatgggctttgtgcaaattgtgtcaggatgcaacaaattttggcatgtcctgtcaaaaaaattggtatattctagtgaattctaatcaactctactaaaaccttgttcctcctttccctatcaagaaagagttaggtttgagttcatctcaaagaatcataggttgctgggaagatggaaaatcaactcacagaagatgttgtcatggtggcttaatgccattcaggcttctgaatagaattttaaattccgaacactttttgttctgttgtaacctgagaagtacatgtatagaaattacaattcaataaactaaaatctattatcatagtgaactaaaaaaaaaaaaaaaaaaacaaatttcaaaattttctgtaaatgaaaatagattaaaattttttttaaattaaatctgaaacaagctgaattcaatggtccttagcactttagtgcaaagtaagtaaaaataaaaactttttgtttttcatgttttaagatacatggttaagtaatggaattttttgaagtgataactacaagtttataaagtaaaatttaactatattaatagtgttctcagtcttacataataattcatttgcctcctgaacgatgaattataaaacatagtctaaaccctgatcaatataacatataggtaaaacatgcatggga

SEQ ID NO: 49591 - DNA, 828 bp, Bovine  19866881934760
  misc_feature (1)..(1): n is a, c, g, or t
nagcaattgcttaaattgctaagaatggcattactttctttctgagattaaaaaatgtcgttcagtcactcagtcgtatccaactctttgtgactacgtggactgcaggcacgccaggcttccctgtcttttaccatatcccggagcttgctcaaactcatgtccactgagtcagtgatgccatccaacaatattgttgtctgtcctccccttctcctcctgccttcaatctttcccagaatcagggtcttttccaaagagttggctctttgcatcaagtggccaaagtattggagcttcagcctcatgtaggagtagaagtctaggtcacagtgggggttggggatcttgattgtttttggatatgttaaatttgagatgcacattagacttctatatggagatagcaagtggtagttgagtcaaaagtctggaattcatgcttaagatctctgactttgagagtccttagagtgaagttgatatttaaagctattagactaggtgaagtaggctgaaaagagcaaaaatctgaaaaatggcagataatgaataacaccaaagggaactgaaaagaagtagttgacagagtagggagaagcctaggttgagtgctatcctggaaggcaaagggacaaaatatttcaacaagaagagcaaatgcaatgttcttgctgaataagatgtcctggaacttatggttaggtacagcagggagggtgtttttcttgatctagatatgaattgtcttggaatagcagagtaatttcaacagcttaaaaagcaaatgtttggggagaaattggaggtagtgggtatagttaatat

SEQ ID NO: 49592 - DNA, 1287 bp, Bovine  19866880973424
  misc_feature (1)..(1): n is a, c, g, or t
ngaaaatactacaactgctgctactgctaccgctaagccacttcagtcgtgtccgactctgtgtgaccctatagacggcagcccaccaggctctcccatccctgagattctccaggcaagaacactggagtgggttgccatttccttctccaatgcatgaaagtgaaaagtgaaagtgaagtcgctcagtcatgtccaaccctcagcgaccccatggactgcagccttccaggctcctctgtccatgggattttccaggcgggggagtactggagtagggtgcccattgccttctcaaacaaatattatatctaacaaaatattataaatgctaagaaagcataaaacaagagatatggtggttaagtgtaggcataggtgtcaactacatagattcatagtgagtttcaatatatacaaagaatgtaatttggggtaacaatttttcttcatttatgtaacagggataataataataataactccctaatgaggttgttttgagaataaattgagatgacaaataatgtcatcatttacgcaaacaacttggcaaacttgaggaaataattgattttctgaaagtaaaattgattcaagaggcatacaacatcaagaagcaaataatctacttttcaaagatcagtctatttcccaccttattgataaagcttcccatagtatcttgcccacataatctctttctttttctctgaatcttcatttaggttttatgtctaaactatcttttcagcatttacagtaggaagaataatggtccccaaggatgtccatgaactaatccctgaaacctgtgaatatgttaccttacatagcaaaagggagtttaaaggttaagaacattgagaaagattatcttggatttttcaggtgagcccacatgagtccttaaaagtgaagaatccacagacttcttgagattctatggtattagagagaagaaggagaaagggtagaatataatactgtaagaggaacatcagatcaatcaaataaatactgaaccctctgatgtcagatgagatacaatggaggcggaagggtcagagagaaatctgatgttgttaacttggaagatagagtaacagagcttccagcagatgtatatggacagctttgaaagctagaaaaagcaaggaaacaaactctaacctggactttccaggaaggaatgaagccttggagatttctttattttagcctggtgagactttgaagctatagaactgaaagacaataaattagtggtggtttaagccactgctg

SEQ ID NO: 49593 - DNA, 835 bp, Bovine  19866881940796
  misc_feature (1)..(1): n is a, c, g, or t
ntgactgaactgaaatgaatcgagacatgctataaatatagaattaatggaggagaataaacaataattcctgatttctgatagagatcgccaatgtcatattattgagaaacaaattttgtcccatttgacttctctctggagtgcatagttttgctgctacccaccacagtccatgataaaatatttgcttcttgcttcagggatcaccaaggttagtaattttgaacatgttgaagggaagaaaccaattctgactctatgttggaactgtttctttgacttgcattcattgcttttgttattacaatcatatagaatggtttgcctcagagaatcctgctcctctgcctgactgttaaactaagtgcctttgttcagaaccctgtccatctgtggatgataggaaggaagaaattaacacatcccctgcctgaggtttgccattctggagatgtttgcaagatgaatgtcccttttactttgcttcctccgctcccctcatctctaatctataaaagaacctggcatccagacctcaacaagatggctattttgaatacagaacaatcagaatcctctttgttctgtttctctggagaaccctgattaatgcagacaattaggttaggagataaagattctggtgcccagagaagatgaagttaagtaaacaacaacctgtgcagaatcctgccttagcaaagtttttcttgtttttctcctgggaatgctgtgagctacacctacaaatgtaaacagtcagtcaatagcattgtaaacaaaggcagctgtgttttgtagttcatagaaattcaattagaaagaaatttca

SEQ ID NO: 49594 - DNA, 1414 bp, Bovine  19866880359904
  misc_feature (1)..(1): n is a, c, g, or t
nttcttgggctccaaatcattgcagatggtgactgcagccatgaaatcagaagacaattgcttcctgccaggaagtgaagtgaagtgatagtcgatcagtcatgtccagctctttgcaaacacatggactatacagaccatggaattctccaggccagaatactggagtgggtaacctttcccttctccaggggatcttcccaacccagggattgaacccagctctcctgcattgcaggaggattctttaccagctaagccacaaggaaagaaaaaaatacaaacctagacagtgtgttgaaagtctgagacattgctctgccgataaatatcctagggacaaggctatggtcttcttagacgcagcctggacaatatatttaaaagcagagacatttctttgccagcagaggtctgtgtagtcaaagctatggtttttccagtagtcatgtatggatgtgagagttctaccataagaaggctgagtgctgaggaactgatgctttggaactgtggtgttggagaagactattgagattcccttggacagcaaggagatcaaaccagtcaatgctgaaggaaatcaaccctgaatattcatttgaaggacagaggctgaagctgaaactccaatactttggccacctgatgctaagagctggctcattagaaaagaccctgatgctgggaaagattgaaggcagaagagggcagaggacgagttggttggatggcatcaccgactcaacggacatgagtttgagcaagttcagggattggtgaagcacagggaagcctggtatgctgcagtgcatggagtcacaaagagttggacatgattgagcaactgaactgaactgaactgaactgaatttggcagcaatgtcagtgtcaagacactggtaaggtcctttccatgactcttacttttgcaaaaacatcagaatgagacaataagtgtttataaatgacaaaagacttgaagtttatggttaaagatctgatgagagttaattgtactgatattgacaaagaatgttggttcttttttgtaacacacaacattttaagatgataattggaattatggctaataaaattatactaggacatacttgatttttaaaaatcttatacattttttataacactgatattaataacatacaaatataacctaaaaagtttaaacatcacttcttatttgacagtgattcctatgtcacttaacatatcaaataagcttaattagtttaacatttctctttttataaaaagagaggacaaatcatttgagatgttccaaggactctgaaaaatcccagttagttcaaggcaaaaagactttacttagaatttgatttggaagggagtttcacaaaaaaatctatgtaatcaaaataaaatttaaaga

SEQ ID NO: 49595 - DNA, 2465 bp, Bovine  19866880654072
  misc_feature (1)..(1): n is a, c, g, or t
natcggagtagactgtggatatgagccaatgctcaatgtataataaataaaattaagaaattttggcaccacagaggcctagcttctggacttattcccacttttattagctattttatcactgaataagttacttaatctttcaatgtcccatttttccaatctacaaagtagaaaaaaatgactgattcaacattattagggctgtggtaagaaaattaaaacagaaaatcctaaccaagtgcattggatgtgctgtttacaaagcaaatgctgaatagaattttctctctcattgtgtgtctcaggcgctcaatcctatctgactctttcgtgacccagtggattgaggccaccagcctcctctgtccatgtgattcccctggcaaggatgctggagtgggttaccatttccttctccagggcgtcttccccaaaattaaaactaagcaatgaaactcgtgtctcacgtctgctgctttggcaggcagattctttaccgctgagccacctgggaagcgccatagaggggaatggtactggcttagtctctaagttttgtcctactcttgcgaccccattgaatgtagccagccaggctcctctgtccatagaattttccagacaagaatactggagtgggttaccatttccttctccaagggatcttcctgacctgggattgaacctgggtctactgccctagcaggcagcatcttcaccgagtgagctatcagggaaggcaatagaggagaatactctctcttaaagatggtaagtaagaaagtggggatgagaaccaggctatagcttgagctagaaggggtcaaaaagtttagaagaggcttttactgccccctagtgttaaatctccaggttttgttttggttttgtttctaggtggtattttactaagcaattccaaagtttgaagcaagtaagttttgtttaaatgatccttcatattgggttacttccaaatccatatatacacagttactgtaagacagaaaagccttatacattaaagatataaagtttggttatttttactgaagagaagccaaaatagaaatgagaggggaggtgtatctagcataggtaatcaaattctgtatttaaatatgtccattaattgaagaaatcagatcattaggatacgtatattttagtaaagtatttaggcattagcaactctaactgaagcaatagaatgattgaatccagttaaactccttacctaggctatttttactggaaatgctgacatccttaatacagaggtttggatacttccattctagtagtatatatagcccacaggtaagtcttactaaaatgtgctgagttagcttctcaggtttgggactttattttacaagggcacggcattcaattcatgacattcaaatgttctaaataattgtagatagccactgaatgaaatgactgcttttattttgtagttattagtcacagggaaggagactcaaaattatagagattgggaattacttatgtaatttagtaaaaaaaattctgggtttttggctgattcaacaactttgtaaaagtggcaggtggaaatttaagctacttcagactatgtataactggtttaaataaaactgaaatagatcagcataaagaaatactttattggcttgatttcagcctgactaatatttctgtccatgtgtttttcttctttgaagaaaaaagccatgtttgatgcaaaaggtggtcttaccaaactttgaagtaagatgattgattgattaatatagaccttccagaatccaaagaaaaatacatttctactggtttttaaagtctgtttttgtatcctattgtttctctggtagggatcattctcaaatcttcattaaaaacttcagctctaaacctgtgagagaggggctgatgagttttcatttagagaattaggcaatgaattattattcatgatacattcaagtcttactgtatatcttccctataatttctcaccacaatcagttataatgaactgtacttacttggcatgctgactcctcttcaaaactcattcttgtgagacacctaatgtctttttaatctggctcttctagtaatacatcccttgattcaaatgcagaagaatttatggttgtgatcataattgatgagattctcctggctgttgagataagttagtaaagactgacattgaagtaattggtatacctgaaaaataccctttgtaagaatgttgacatatatactaaaaagagttatcaagaacaggtgcttagacttgtaaaagtccagttatatttttcctgtccttgtttacatatgtaacatttttgcttaattaatcaaacaggtaccatgatgattagccatgtgtattatgtaattttaggtgataacttctaaaataagatatcatgaaatattttcacagtcaataggatctacta

SEQ ID NO: 49596 - DNA, 3466 bp, Bovine  19866881296352
  misc_feature (1)..(1): n is a, c, g, or t
naggctttttagttcctattcactttctgccataagcgtggtatcatctgcatatctgaggttactgatatttctcccagcaatcttgattccagcttgtgcttcctgcaacccagcatttctcatgatgtactctgcatataagttaaataagcagggtgacaatatacagtcttgacatacttcttttcctatttggaaccagtctgttgttccatgtccagttctaactgttgcttcctgacctgcatacaaatttctcaagaggcaggtcaggtggtctggtatttccatctctttcagaattttccatagtttattgtgatccacacagtcaaaggctttggcatagtcaataaagcagaaatagatatttttctggaactctcttgctttttcgatgatctagctgaatgctggcaatttgatctctgatcattaaatagcaaatgctcaaaacattatataacaatatgagcttcaatttaagctctattttttattcaaaagagaggatagtatgagatgactttttgaatttaatatctgcaattgaaagagaaagtaaatcatagtggaaatgtcaacaaaaaagtatttagaatttcaaataaaatatatatttaaatagcttaatatatatacaatttggatttatttccaagctatttagatctctctcctcttcttgttgttgttcagtcgctcagtcatgtctgactctttgcaaccccatggactgcagcatgacaggcatccctgtcattcaccatctcctgaactgagtcaaatttatgtccattgagtccatgatgccatccaaccatctcattcactgttattctgctctcttcctgcattcagtctttcccagcatcagggtcttttccagtgagtcagttctttgcatcaggtggccaaagtattggagtttcaactttagcatcagttcttccaacaaacattcacgattgatttcctctaggatggactggatttccttgcagtccaagggattctcaggagtcttctccaacacatgtttcaacagcatcaatcctttggtgctcagccttttctttatggtccaactctcacatccatacataactactggaaaaaaccataactttgaatagatggacctttgtcagcaaagtaatgtctctgctgtttaatatgctgtctaggtttgccatagattttcttccaaggagcaagcatcttttaatttcatggctgcagtcaccatctgcaatgatttgggagcccaagaaaatgaagcctgtcactgtttctgttgtctccccatctattttccatgaagtgatgggactagatgccatgatcttcattttttgaacattgagttttaaggtgtctttttcactctcctctttcactttcatctagaggctctttagttcctctttgctttctgccataagggtgatgtcatctgcatatctgaggttattgatatttctcttggcagtcttgattccagctagtgcttcatccagcccagcattttgcaggggcttcccttgtggctcagctggtaaagaatccacctgcaatgcaggagacctgggtttgatccctgggttgggaagatcccctggagaatgaaaggctaccactccagtattctggcctggagaattccatggactgtatcgtccatggggtcgcaaagagttggacacaactgaatgactttcactttatttcactctgcgtataagttagataagtagagtagcaacatacaatcttgacatactccttttcccactttggaaccagtctgttcttccacgtctggttctaactgttccttcttgaccttcatacatgtttctcatgaggcagattaggtggtctggtattcccatctctttaagaattttccatagtttgatgtgatccacgcaaactttaatgtatagtcaatgaagcagaagtagatgtttttctggaactcttttgcttttttgatgatccaacggatgttggcgatttgatctctggttcctctgacttttctaaatccatcttgaatatctggaagttcttggttcatgtactgttgaagcctggcttggagaattttaaaaattactttggtaacatgaaatgagtgcaattgtgcagtggtttgaacattctttggcattgcccttctttggtattggaatgaaaactgactttttgcagtcctgcggccactgctgagttttccatatttgctggcatactgagtgcagcactttcacagcatcatcttttaggatttgaaatagctcagccgaaattctgtcacctccactagctttgttcatggaactttgtttctcctctcctgtcactatgtttttattttatttaacaaccatttaaatatcactttccatgtgccagacctgtttaaagtactttacccaaattaactcatttaatgagttctattcagctttctgttcaattattctacaattatctctttctttcttcatgattataaaatacagtaacaatctgcttcaaacgtatccttaactcaagtgtttgtttaccatggaatgcactttatgtccgattccttactatactattatctatgtacacgttggcatccaaggaacttctctgtggagtgctgactgcttggggcagtccccaaggacttcagtaagttcagtaccaagtctatagctgtaattcctccagtcctttcctcagttatactgaatagctttctactacccctgggtggccaaagccttaaataacattgcaagtgtatcaaataaatgtattcatatcagtatttgtctgtgtgcatcccataaaacacactaatcttgaattttctgatagacaaagaaaaaacactttaaaaatagcataagattagcaacaattttgtaaactagtctgttggaatatgcattttaaatgctctgagaaatctggctgtttcaaaaatatttgactaaaaaaatccacttcaccttcttttttaactaacacttctgcaaattctgagcaactagtgatctagagaagatctgtctagaaacagtgatctatatccaggttcagtgaaaaactctggtttgttatttatactttttttttttcacaacagcaacagtgatggttttatttttcaatattctattatcaagacttcctggtatatgagaagtcatatattttacctgataagaaatgcagctgcaaagttctaaataaatcagaaatgattctaaatacagctattaatgcatagcaaaaagtagtccagggtaaaatataactacttaagcattccatctggtttgtgttttgtctatatccatgtatatcccaaacacaaaaataaaatagaagttatttatgacactgtaagttcagcccctgtctagactgcatgcaatatagggaatcgaaatctcat

SEQ ID NO: 49597 - DNA, 1356 bp, Bovine  19866880350257
  misc_feature (1)..(1): n is a, c, g, or t
nttgcttcccgcgctggtgtactaagtgacccagagtaagaagacaaaactactgaatggaagaaaacgacctgctgtaagaacgctgtagataatccataaagcaattaatccacataagcaaaatcaagtaccactactgacccctgtagacagggagaaaatgaagtcattctgtaaaccagtgcaatacaggggataaattctgatttctgggcccagaaatgtcaaagagttgacttattttacacaggatctttaccaaattgcttgcataagccaaagtgttctaaataaatccaatgaaactaatttcacagcgtttttatctccattgtcaatgaaactcagaagtgtaaagaaatatagtcatgaaagctaactagcagaataaaactaaagaaacatttctaagcgtcttaaaaagaaagctattcaaatcatactgggatttgggagaagacccaaaccacttttatttctttcatttctgctcactccttccctctaatctagacattttaaacctagaatccatcgatgggaatcagaacagtggttctcacgggtgtggttcccagacaagcagcaacaacctctgatgctgggcacttgttagaaatgcaggttccaccttagctgctctgaaccaggaattctggaggcaggcatctctgttctgatgcatgttaacgtttgtgactcactgagctaatgaatgacttaagagatatatgagaatttctgaagtgtaagaatgtaggtgaaaaattatctaactttggcattgggattccatgggaagattcttgacaagccctcccaggatagtaaatatatgagggaataaattttgactgcctccaacaaccagagggtgtggaaaaccattctgtatgagaaaggaatagaattttgttattttacatttgaaatggagaaataggggagaaaaggtgaaaaggaagtttatattggagacagctcctgctgttgttgttgttcagtcgctaagtcatgtcagactctttgtaatcccatggactgcagcacgccacgcttccctgtccttcactatctccctgagtttgctcaaactcatgttcattgagtcagtgatgcaatctaaccatctcatcttctgccacctccttctctgcctgccctcaatcttttctagcatcatggtctttccaaatgagtcagctcttcgcattagttcaagttcagccacccagtcgtgtccgactctttgcgaccccataaattgcagcatgccaggcctcccctgtccatcaccaactcccagagctcactcaaactcacatccatcgagtcaggatgccatccagccat

SEQ ID NO: 49598 - DNA, 2706 bp, Bovine  19866880378703
  misc_feature (1)..(1): n is a, c, g, or t
nactactcaggccccacctggctaggactaagggagagcttcttactatccggacggttgggatactcctctctgagtgagctaagtcactttagtcgtgtccgactctgtgcgaccccataaacggcaacccaccaggctcccccgtccctgggattctccaggcaagaacactggagtgggttgccatttccttctccaatgcgtgaaagtgaaaagtgaaagtgaagtcgctcagtcgtgtccgactctttgcaaccccatggactgcagcctaccaggctcctctatccatgggattttccaggcaagagtactggagtggggtgccactgccttctccgtctctgagtgaacccaggcctaaattgtatcgtggtccataacggtgttcagatcacatgaggtggcaggccactccctcctagctagtcccatacttacctcagggccagtggctccgtcctctgcctccttgcagaacctttagcgtcaacgtgcagctgtgagccacagtctgtcctgagatcaacgctggcgataccgcagcagcgcctcaaagactgtactgctggcccagcccagcacgtgcttctgggacgacgtcggccaatggaaggcggggctccgtcggcactgctgattggtcctcaaatcccgcaggaacgcaactctcgcaggagcaaaaaaacctagcactgcagagttgttactgattgagtttaaatgtgacaaaatgtttatttctttaacttttacctaacttaagagttatctatgtatattcacagtaaataccagttcttgcttgaggtaggaactcaacattttatcaatgattcattagtgtttgactgtgggaatcaaatcacgtcaataaaagaataaggcaagtgcttattgggggcaagacgctgtgccaagcaacttggaaggacaaactctgaactgaagttccaattttcactgagggtataatccagctggggcaagattaaagtacattaaaagttaaatcattataaatgagctacatagaagtgcaataaataagaactgacagcaaagttgcaagctgcctgtttaatcgccaaaagaacaacagactagagcatgaatagaaacagagaatgcgtcctgaaggagcgagggagggagatataagggagaggactgagaaagctttaagaagacgagggtattgaaggcagacgggtgagaaagccaaagctgtgtttaggaaaacgtgagggggaaagtagttcacctgtggttacacgattacctcagtgagatgtgagtggtaaaggctattaacagagaaataaaaatattaaaataatttagcttattaaattttgtgttaggtaagtgcaagatttacccatattctctggagtgctgtccaatagaactttctactatgatggaaatattcagtgtggaccccgtctactagctgcaagtaactttgagcactttaagtgtgactcatgcgactaactgaaatttttattattttagagttaactttaattaatttcaaattaaatagccacaattaacagatggttgaatgaaactaagtggtacctatatgttctgtcctgtgagccacatatttaaaagatgtatgtcatcaaattgaatcaaaaagagagaaaaatctggtgttacatattatctcaaactcaaagacgaccaaactcaggaaataaaatgagactaccatttcttgagtgcataccacatgccaagttaggcacttgtgtacattatcagtagcctgtagacttatagatgggaaaatggagactctggaccatattcatgcagaacaatctgaaagttactaattgatcaccaataaatatcagtgaaaatattttaaaatccagtaaaaatttgcaaataaggcaaaacatttttacttaatcagatataatgtataattataattatatataattatgcatcccagacagtaaagaatctgcctggaatgcaggagacccaggttcaattcctgggtcgggaagatcccatggagaaaagcgtggcaacacattccagtattcttacctgaagaatcccatgaacagaggagcctgttcataaatatgtggtcattaccacagtccacagggtcgaaaagaatcagacatgactaaagcaacttagcacacaaagactaatatcaataaccaataagtcttattgtagttagatcatagtttagagaaattttggaaagcaatgacaataatttattattttatccttgcatttcaaaaataagttacaatatcaatatgatcacttttaaaaaagattagtaagaacttattaaaaatttcaaggcaaatctgaatttcatgtgaaattcagtgtctatcattctaataattgtgcattgtaggctacatgttttatttctcttaatctgcaatggcctagcataccttttctctaatataagacaaattagtaatcattctttcaaatctcagaattttcaactgttttacttccatgtgattcatggtcaaatgtgactttatatgatttgaacataaaaaaaatctgtcattactgagtgatggaaaatgttctacaactgtggagatggttgcacaactctgtgaatactaaaaagcaattaacttaattctttaaatggggtgaatcatatattttgaattatat

SEQ ID NO: 49599 - DNA, 1872 bp, Bovine  19866880419938
  misc_feature (1)..(1): n is a, c, g, or t
ncaggttcacagtctgtgcagatgtccagtgtctgagagacctgccttgtgtcttttgtccactttcatagttatttactgagggagcactgacctggatctgttactctttcatattggaaacagaagtcaattatttttgtattagagatgagaaaactgagggatgcaaacatttagcgacttgtccaaaatcgcacagcatttcaaacctaggtagtctgatttcagaactcctcacttaattactgtaccatgtggcttctcagaaaaatggttttatgtatatacaggtgtaaaatgttttgtctagtgtcaggaaacacagtaagtctgggtattttatcctttaaaattctaaaggtcagtataaatgttttcttagcacagtgtttagaagcaggaaagagtggataggacagaagcacctccacaggagttggtattcttgatgagtactaaacgttatcattgtcctaccactagtgaaaaaagggcatttacttaagtcctttactgctcaagcactatttatttacaggaaatattaaatccttactatgctttcttttggggcttccccggtgactcagttggtaaagaatccacctgcaatacaggagacccaggttcaattcctgggtggggaagatcccttggagaaggaaatggcaacccactccagtattcttggctggaaaatctcatggacaggggggcctggtgagatacagtccatggggtcacaaagagtcggacacaactgagcatctgagcagaggctttcttttgccattgaaaccaatctttattcattagaaatatagagcaaaaaataaaacgctccaagcaaccaggcttaggtgatactcctatcaatttctgaagttcaaatcaataaatactgtatagtaacacacccatctggccatgaaggagattgcagtggaatgaaggtacaagctcatgaataggaacacaaatatctgtaatagcatccagcaccgaatctactgtttaattcttaatgtttaatctaccctatgtgtgctctaacttttcatctaaaaaaatgtataatggagatgtcattaagcccgggcctttctttggttttagcccgtgtacttgaaaatagtttgcgtctgtcttgtgctattttttcccccctgagatacatgcaaattttttccaaatttcagttatatctactagcaaaaaaatgcaacaaacactttgcagttgtccattcactctgattagcacaggaaggagaactagcttattctgggcttctttccatggtgccccctcttgcctcagatcagacaagcccacaggcatacgcatccatcaactttgacctctctaaataggagctgccagatcttcactgcacattgttctccgtagatggttagaattggtaagttcgaacctaaacaaatttacaaagggaaatgcaaaaatcaggaaatggtagattaagtaaaataaatgtaagactaggtttattaacttcccacaagcccaaacttcccttttctgggatcagctttatctgtggtggaaaatcatcattatctcctatctgtcaatagttctcagatgtccagttagtaaaatgttcaagtaaactgtactttaatgcattaaatttattgtttctactctattaatattactctattagctctcatgtgctaagtcacttcagtcatgtccaaatttttgcgaccctatggagcctgccaggcttcctctgtccatgggattttccaggcaagaatactggagtgggttgccatttcctcctccagggtatcttcccgacctagggattgaacccgcatctccagtgtctcctgcatt

SEQ ID NO: 49600 - DNA, 731 bp, Bovine  19866880517340
  misc_feature (1)..(1): n is a, c, g, or t
ntggaaaatcccatggacggaggagcctggtaggctgcagtccatggggtcgcgaagagtcggacacgacttcactttcacttttcactttcctgcattggagaaggaaatggcaacccactccagtgttcttgcctggagaatcccagggatgggggagcccggtgggctgccgtctatggggtcgcacagagtcggacatgactgaagcttcttagcagcagcaggagcagcagccagttccagcaaacagtcgtgattgcagtaaggtgccttgtctatgtttatttctttgagttcttcatataaattcttaaaaaaataaaaaaggtataatagttctctgcctgccaaacacttcattggttttacagtgtgacttgagtcttgcgttttctctcccaattgcatgccttagcgaataatccttactttggcttccatgtgcatttaatcttaatcctctcagtcatttagccttgttgccactctcctgtctcttgcagttgatccctaaaagtttaaaaaccaaaatgtcacatttttcttaaaatgaggaaattctagaacctaaaaaataacatttaatagtctagtgcttatgtcttcacctaaatgtttacttctcaattgcacttttggtataagaataaaatgtatagacattttgataccatgcatacgtcggttactaaaattgccaacaaaatgtggtttttatgagttttttt

SEQ ID NO: 49601 - DNA, 1760 bp, Bovine  19866880552779
  misc_feature (1)..(1): n is a, c, g, or t
natgagaagagttgactcatttgaaaaggccctgatgctgggaaggattgagggcaggagcaggaggggatgacagaggatgagatggttggatggcatcaccaactcaatggacatgggtttgggtggactctgggagttggtgatggacagggaggcctggcgtgctgcggttcatggggtcaaaagagtcggacatgactgagcgactgaactgaacttgaacttgatattctaaaggcttttattttttaaaaacatctaacttctcattagggagctatgtcatcatatggtagaagacatgtaaaataaaatacaaagcttttagtgtgttacaggcaaactacaatcttagttgtgaaagaaaatagatgtttacacttaggaatgaaatataagactgcatgtgagattgccattggacatgtacagataatgcagcctgtttctcatggactttctcttctcattaaacttaaatatattttgggacttcccaaggtggtccagtggttaggattccatgcttccactgcagaggaaggggttccctcatacgggaactgagatccagcatgctccagcacagccaaaacaaacaagcaaacaaacatatttaaaacttgacacatgatgtaatttaaggctttgtactagagattcaatttctcaaatcttagaatcttctttatgttcaaaaatgctaatattttctgcaaattaagaaaactgatgaaaaaattctcttggaattcaagtgttaatatttatagaaaattaaatcctttggtaagtccactatcttagaatttaagaggcagccttagagtgaaacaaagagacaaatttatattagtttccaaatgtattagttaccttatgtctgttagaagaaagatatattttcactatgtttgaacaactactgtctccccacttcttgactttaactactgaccccttcttgcttaactttaggtttgagattttcctgaatgaatgtttgagggaaaggaaaggagcagggagggagagaaaaattggaaacagctctggcccacaattgccacattcaggggaaagtgtaacctgttttggaaccaccgaggcagaaagacacatttcagtctttgcatttatcccatgtgtgaaagcatagatgtaaacatatgtatgtactaggattaagagacctgagttctatttgggactctgctaagaactcactttgtgaccttattcaaatcttttctctctctttgggcctcaatttccacagagtaagataaaagagttcagttagttgctttctgaaatccccatcaacttcaaaatcattggttcttatttaaaggaataaatatttgtgcattgtcctgcttaatgttgatttatcaggagtcttcacttgtgagattacacaagagtatgaacataagttgatgagtcctggacgtgaaaaggaggtacatttaaaaagcagatagatatactttaaagtaaattgcatttttgttttaatataagaagtctgataatttaggtaatgtcttaccaattatttggtggttgctattccaaataggtacgcagagaactgatcttatgtgaaaaccagatatctggtcagcctaggacataagaaagcaattaattaaaattaaatatcatctacccatttctgatatatggcttaccacccttcataacaggtgtttaaaagtaacttttaaaaagacataattttaagcatatac

SEQ ID NO: 49602 - DNA, 2401 bp, Bovine  19866880563779
  misc_feature (1)..(1): n is a, c, g, or t
ntgtgaagaggactgtctctgcacaattgatgttcccaggtgatcttcattctctgggctcacacagcccatgttctattcaattcactagcagtttatcataaaatataaactatatttctaaacatgaaaaagcaggctgtctttatcctcaaaaaataataaagcatattcttagtattgaaagcaaaaaacgttaaacatctaatatgtttttccttttgtctttttttgaattacagtatgcttgctatatacatacatgtagctttgctttcgtattacctgaattgaagtaaaaattcaacttttaaaggcttattagatatttactcttttttttaccatttttctttttaccatttatatttggttttgcacattttatcgaaatatgagagcagagatacattgaccgatttttatttgaccacatcatgacttcctgagaatgaaatgaagagtattgacagatgccagaggtttgctttgaaatagtctagcaaacaaacgaaacagaacatgtgaggggataaatgaatcaaggcagcagaacgtggcttcctgctaaagttaggtaacgagtacttaggtattcaatacagtattctatttttcatatgtttttaactttacaaaatagataatttttttaattaggataacaagtaggttaaaattaagtcaaggaggtagttaaaattatttaataaaatgattaaagtcaattcattttttaaattcatgctacaaacagttactcaaacatgtatgcttgtaccagttttgagaggcttccctgatagctcagttggtaaagaatctgcctgcaatgcaggagaccccggtttgattcttggttcaggaagatccctggagaagggataggctacccattccagtattcttgggcttaccttgtggctcagctggtaaagaattcacctgcaatgtgggagacctgggttctatccatgggttggaagtatcccctggagaagggaaaggctacccactccagtattctggcctggagaattccatggactgtatagtccattgggtgcctggccattttgagtcttacatgagtaagcatttgctatgttatttgagattcagagagaagttgtgtccaaaacatgacttaaattttgcaatttgataataagtggcttcaagaagcttctggttataaaagtattcaagtatagactgtaaggtcttcccaactctgaacttgacaagcaaaggctcattgcagacttaaattagtatttaattaaggccaaatcaattattgactacattcatcttgaaaacgaagagaagcaaatttgatcaaaactgtcccacgccttgtacacctgaaactaacacaacactgtaaataaactatacaccaataacaaacaaacaaaaccccccaagctgtcctcccaggtaaacccaagctatactcccatggaaactagacaaactacaactggtttgtattgtatcacatgctttggtaaaggagccatgtaaacatggtgttggttggtggtcccctaaatggcaccccactccagtacccttgcctggaaaatcccatggacggaggagcccggtaggctgcagtccatggggtcgcgaagagtcagacacgactgagcgacttcactttcacttttcacttccatgcattggagaaggaaatggcaacccactccagtgttcttgcctggagaatcccagggacgggggagcctggtgggctgccatctatggagtcacacagagtcggacacgattgaagcgacttagcagcagcagcagcaacaactggaaaggttctggtttctggacctcgaaataggactgaagtgccatttcttcagcctggcagatccaattattggcagacaaacattactgtaaacaccgatctagatttagatgcaatctagatctaaatctagatgcaatagtttatctagcggggttgctttttcaatgatttgacttgtttacctgttggctgtgctgggtcttcatcgctacatgggcttttctctggttgcggcgatcggggcctcctctctagctgtggtgcatgggcttctcattgcggtggcttttcttggatagcagaacatgggttctagggcacacaggcttcagcagttgcagctcataggctccagagtacaggctcaatgattgtggtgcatgggcttagttgtttcgtagcatgtgggatattccagggattgaacccaagtctcctggattggcaagtgaattctttaccactgagccaccagggaagctctcaagtaaggttttctccccacaatggaagattgcgttgtgaatacctgttattctcccactgagctttcatcacccactgtct

SEQ ID NO: 49603 - DNA, 3314 bp, Bovine  19866880589525
  misc_feature (1)..(1): n is a, c, g, or t
nattccttgtaggcttttaagaggagagtcctaactagtcactctgcagctcactactttctctttctttttttctagattgaacacaaggcatgaaccatctggggaacattgagttgtttttgaagttcatttcttgatatccagaaaagctgtcttggtgtagcaccttacttttccagtttatcaattctaactccaggttctacaacttgaactatattttaaagattttttttcctcccttcttttcagaaagcatgttagtaattgcatcaggtggaatgcattttccaaaacaaccgtgacaaatgaaggcagaaaaaaagtcagaagttactataaccctaacttcagaagccctgcctgttgcacaaatgccttgacattctcacaaatcttgccaaaatcttcttttacaggagatcagtattccagctagaacctggccaggtcaagctctttttttgttgttgttgttgttgatcaaatactccaaaatcaagagccagtttgggataagctgaaaatctgattatgttcataacaaaaatgaactctctcaacccttaacacacagaagatttataatgatttatagcgcctcattgaaattctaggtgcactgaagtttgacttagttgagaatgaaaatgaagggcaaaagctttgcccgctattgcaaagacaggctcagtgtgatgctgctacatcaggttttctgtttatccctaaggctggtgcagcaatgacttcaaagtttgatggtgtctggggtttttttcctacgttcttttttttgttttgttttttctttctctaaagaagttgagcagcaggctaatggatccccagcagggtgcaaagacagcggaaagcgagggaatcagatgtcaatgtgttcctccgagataccctgctaggacagctaactaaccagggctttagtcttctcttggggaacacgctttgatggttccctgcccactcctggcttcctatatgcttcctgattaaaatgctgtcacagataaatcatgacttctgcgaccgttttcttttcttttttttttttaaggaaaagtttggaaacataagattaaaatgatgagcaagttctagagaattttatgtgcacatataaatgtgtatttaagcacatcacatctccctactgtagaaccatccatgggtctgggactattctctgcatgttccttcccgacccattactttatgaggtatgtttatatattttctttcagtcactttcagtcaatcactagattactctggaaagttcctgttgaacagattttgaggggttgggggggtttcattgttttccttcagcataagcacaagttgggaattgaagttgtctcagaggtaagagtttccactttagatgcaatggacattcaaaatctaccagtgtacttttgtgggttcccacctaggcacacaaaataaatagcccttcgggtaccacagagtattaataatttactctttgtttggagaagagacaaaactcagcaaactggagtggaagtggaaagtgcttcatctattttgaccaagcacaaccctcttaagctgattttacccagtagaagtcaatgaagtaaaaaagctgccctagaaccatatctgtatctattgccgggctgcatctccatcttcacctccacaagccccttcctgtctggggctgcacccagcagccttagccagacagtgcgtttgattggcttctctcttcatgggccctcatctttctaaattgctctgactgccaagaaggtttctgatcatgatgtacgtatctgtttgcttcaggctctatgtgaggtttcttgccactcaaacctgctctaccttggggtcagggctctggccatgaaaaggtctcagagctactcttccatatcattttgccctctgcccagactaactcagcaaagccacactgcattcttatgttccataatgaggaagatgatgtcatctctcacagtttggggttcctgtcagcttcatgctttcccgtttgcctttatcctctcagactctttattagtgctgctgctgctgctgctgctgctaagccacatcagttgtgtccgactctgtgtgaccccatagatggcagcccaccaggctcgcccgtccctggggttctccaggcaagaacactggagtgggttgccatttccttctccaatgcatgaaagtgaaaagtgaaagtgaagtcgctcagtcgtgtccggcttttagcaaccccatggaccacagcccaccaggctcctctatccatgggattttccaggcaagagtactgaagtgggctgccattgccttctccaacagctgtctcttcaagatagttattttgtatcacactatggtatttctattttcaaattattttggaatcttcatactgtttttcatagtggctacaccagattacattcttgccaacagtgtacaaggattctctgttctctgcaacctcaccagcatttatttctttctttttttttttttttgataatagacatcttaccaggtgttaggtgacatctccctgtggttttgatttgcatttctctgatgattagcaatgttgaacaccttttcatgtacccattggcaatttgtgtatcttcttacaagatgtctgttcatgtcctttgtccatctttgaattgcccattttttactttggagatgtgtggttctttgtgtatgttagatattaacctcttgtcagatacgtggtttgcaaatattttctcccattccatatgttgtctcttcttcattttgtttatggtttcctttactgtgcataatctttttaatttgaaatagtctcatttgtttatattttgttttgttgcatttggttttggtgtaaattaaaaaaaaaaaaaaattgccaaggccaatgccaaggagcataacctgtatgttttgttttgtttttagcagatctcgattgcaagtctttatttcattttgaggttattttgtgtttgtgtaagatagaggtctagtttcacttttttccatgtggatatctagttttcccaggactatttttttgagaaattattctttcctcattgcatattcttagctagtttgtcaaaaattaattggcctttttatgtatgggtttatttctgggctgtcgattatgtttcattgctatatgtgtcagttttcatgtcaataccatatagcttgatgactatatatagttttacaatatagtttgagatgaggaagtgtgatgcctccaa

SEQ ID NO: 49604 - DNA, 962 bp, Bovine  19866880591517
  misc_feature (1)..(1): n is a, c, g, or t
ntgtccgactcttagcgaccccatggactacagcccaccaggtcctccgtccatgggatcttccaggcaagagtactggagtggggtgccattgtcttctcccttaacagcggctagacatattatatttagttggagctggtatacttggtgacagtcttagtgcccttggacacggcgtgcttggccagctccccaggtagcagcaagcgcagggcggtctggatctccccggatgtgatagtcgagcgcttgttgtaatgcgcgatgcctcgcataagaacaaagggagggacattcccactggagtacactgggcagagtttgtccaaggaatccagtttagccgtccagtgacaaccaagtgtctctccttttgtgactgcccaacagaaatatatcacttctttttctcaaaaattttctaacattataatatcataaagtttaaaggttgggaatgaggagagaatgggtacttccccccattatccatccctaccagtttcctccgaccatgggattttccaggcaagaatactggagtgggttgccatttccttctccaattatccgtctagtgatagataaaaatttaggaattttttaatgacaggaccgtattgaaaaacacacaaaattgtccccactctgaaaaattaacacaaatagttcctattcaaaatgacattgcttttaaggatcttttccaatctatcccatactctctcactataaaaataaaagcctgcactattttgtggcaataaaacattcccccttcctttgacttgtacccagttctcagtgacctgatgacttgatttagtggcagttacctatatctgaagacagattttggccccaaggagttgcatgctatgaagtccaaataaatccgcttacaaatctcataaaagagggaaaatacctatttctcatcacagataaaggaaaagaaa

SEQ ID NO: 49605 - DNA, 1103 bp, Bovine  19866880595144
  misc_feature (1)..(1): n is a, c, g, or t
ncttagtatcaagcccataataataaatataatcacctataattacttatatagtatgcaggcaataattttacattattttgtgctcaggtttcattttctttataaaatttttcctaatctactagagaaaattgtcacttcaaatctaatagaaatcaatctaatagaaatattataatatttctatacatatgcatatatattgaacacacacctgcactatgtgtatttgtattgatcctgcacaatcttcgagggtggggactatgtcactttcaaagttatagtctgatatcacgggccacaaaatccattcagattgtttactgggcttatcattataaagacttaaagcctccattctacacattaagtacagtcaactatgcacacagtctgcctgaagataatcaccctcacaccagttatttgattttattatatttgcccaaagataattcaaaataacccaagtgatttgcagactggagttccctatctgttcatcagtcagctagagagaaagactgtacaaagttcaacattcccaagagaaaacctcctggttgtcctaaaaaaagacccaccaggctgctaatggtgctctagaggcctggagcattattaagctctgttctcccaggtgaagagttgtacattagaagtaggaatggaggcagcagtgtcattctttcaaagcaacgcctgataggttaggttgcgtacagttactctacctgccacctacctaatgtactacccattatcttcccaataacagatatttcagaaggcttcagcagcatttttaaaaactggtacccctccagaataccattgtttatgcagacctttacccgtatctcagattgcctataattaaattttccttgcgctgggcattcagcatgaatgttggtttcaattactgctcattcattgttacaagagggaagaaacagctggcagtaaccaaagatctactgccaggcctaccttcttccgccttgtgaatgcaattccctggtgtcgcaatctctgcacacatctagtggttactggagcaggcttacccaggctcaggagccaacagcacacac

SEQ ID NO: 49606 - DNA, 2235 bp, Bovine  19866880607588
  misc_feature (1)..(1): n is a, c, g, or t
ntctagattccagtttgtgattaatccagcccagcatttctcatgctgtactctgcatataagttaaataagcagagtgacaatatatagcctcgatgtactcctttttcaattttgaaccagttggttgttccatgtccaatgcttctttttttttctcctgtctcatttctcatgttctcttcagagataccaagtatccttattttggactttcttttactccatatttatcattctatcttatcttttaatactgttttattttccatttcacttctaattttatcctccatgcctctgaaaatatgttagaaattcttttcttctgtttttaatgtaatattcatttctgcatagttacatattttcttctatttctttctaagctctgccaactaagttttcttatctatttactgtttatcttttattccttgagtccttgtatctcttctttgaacacttttttcccctgagagatcacactatcttgaatttcatttcatggagaattggtagcaatttttctgctgtgtgtttctcaactggtgtttgtttttacattcttttcctccttttttccttttgatatctttccataagctccaggctggtggctttttgttttggctgatatagtggtaaagaatccacctgccaatgcgggagatgcaggttctatccctgggttgggaagatcccatggagatggaaatggcaatctactccagtatccttgcctggaaaactccatggacagaggagcctggtgggttacagtccatggggctacaaagagttggacattgagcacccacacacgccacatctttaagtaaataatggagaaggcatgacatcaggacagtgggtaaggttgatggcagttgaattttggtctttgagtgcttttgcaacaacacacttttccaggcaacccctgcctaacagaggccgcccttgcttactatgaagtcctaagtgacatagatatttttgtgtgatgaaagccttaaattctctccaggagaccaagattagcagctgcacagggtgacacaccactcacattgtcaactctcctgacagccttgtttccaagacagcttgtctgaaactgtcttgtcccaccccacttttcccgccactctatggcagcaaggaggagtccagaaacattcctaaagcctgcccaggcacccatccatactgctccaagcaggtgagccatgcacgccttgttgtgatgaacactgtactctgtcccagatgctggatgcaggccacctcagtcagctttctactgtaccccacccaatcttcaccatgctatgtgagctgtgtgtggggtgatgattggagtagagttatgaacgctttttcttctgtgaattatagttttatttcttgtccttggtgtttttaggttggtccttaactggcagaaggtaataaaaatccatttagcagatcctctctcatgacaccttgactttcaagttcactctcttactgcaaggtccagtacctgctccctttttccatgagatgataaattctaactctgcttgggaggataagatgcaagataacataactcaaagggagaaaattaagactccatcaatttaataattgtgaaaatataatctcatttatgtacccatattttgataaaaatcacttccttttacatttgttttttctcctttattacttaaaaatatatcaaggatactgttcctatacatatagataaacatcattattttaaaggatatatatatagcatttcattatataaaacttctgttgctatttgatttatattcttaaaactataaatattacagtaaaacttcttatatactgattttgctctcttactcttctccatctccttcactatgttaaattttaagaggagaaattgctgaatgcaaaggctatgctcttttaaaactgaaacgtattttaccaaacttatatccataaaggctaccccagtttaaaatctcatcatcagtaataagaatgtccattttcttatacccacacacatacttgctattataattctcttaaatctttaccagtccagtggctaaaaaatcatagaagtgttttaatgtgcttatattctctaaagaattgtgtgaatgttttagaaaacctttccccgccgaagactataaaacaatactcaccagtatttttaagttcttttttaca

SEQ ID NO: 49607 - DNA, 1105 bp, Bovine  19866880619286
  misc_feature (1)..(1): n is a, c, g, or t
nctctgtccgcgatctgcaggctgctcctcttccctgtaactaacgatgtagccgtcgattttagcgcctccgtcacgcaggggtggtaaccaggctaatacagcgctgttctttgtcatttcagtaacctcgagtttcctggggggatccggctcacctggaagaaaaatatgattaagaaaaaactgtccaggtcgccaaatccatccctttgtaatatacatcaatgttttcatatgccacctgcttcaaagttatgtgggaaaggtggttcgggctgttgaaagtaaaaagtactcgaggaggcagatcagaagtcttcagtgagtgagtgagatatttttttgtgctgtgtaggtttctacgagttaaagccctttagggttttggtatttggtaagtgtttgtgtcttgacttgattgaaatcggggactggggttaagaggggagaaaggatgtgacttacttagagggtctgtcgcaagcactggtttggggacatctgttgggacaccggggccatactcgttgacagcagtcactctgaagaaatactctgtcccagggacaagattggtgacgtggaagctcgttttcttcacttctggggtgactgtcgcccatgtctttctctcggcctcacgtttctccacgatataatgtgtcacctggctcccgccatcattctcgggaggggcccaggaaatgtggcacgatgttttagtgacatccgagacttttaaatcagacacgggcccaggggtatctgtaaagaaccacaagattagacatatgagttccctcagcctcctgattaactaaggagtttctgaaggggaggaagacagttgttcaccacccacctaatactctgacattcacaaacacggccttttctcccgctgggttcacaagcgtcaaggagtattttcctgagtcgtcacgtgtagaattggggatgacgaggaaggccatggtgtcaaccaaaatcgacctgtccctttctgaccacgttatcaatacccacttttctccaggtgaccttaggggctggtcgccctctcacgatggcaaatagtcggatggggcatcctgccctcacg

SEQ ID NO: 49608 - DNA, 838 bp, Bovine  19866880640741
  misc_feature (1)..(1): n is a, c, g, or t
ngctgtggaaatatttttgattctctaataaagagtaaataatacagtttatccaaaagagaatattcttaaaaattgtaattacctctgagaatagttttcctttataataatttgattacatggaaactttagattgaacccactttatggatccatataggagatctgtacaccagcccatctaagaaagagagtcaatggattatacatttatattctaaaaacaaatcaggtcatatttctcatcatgccagttactcttataaacacacaccaggtgagtaaagccctttttctgtcttatctcttcatgtcttactaaatgctgagatcattcagtgtgctcagtccctagccacagtatatgagcaattcttggaagagtcatgaactgcaaggtgaaggaaaaaagcttcttgttcttatctagagtgattggatataaactataggcatgagacagcagttatttttttattctttcagaggtcacaaaggataaatgattacaataacatttcacccactgactttagatttttactagtaaatcctgttattgactttaagagctgcaaatcttcaaatcaaatatttctgatcagaccataaatccttaaaattcaaatcttttttctgaatgaaagatctatgaaaacagatgatggatttcatgggctgtcaaaggaaaaatgttgcatttcacagtttgtcattgaatatgatataaaacacccgaaggtagattatttatattgataaaactattctttggcaacagaagctgctttcttggggaataaaaataaaatatcgaaatacctagaaatttttt

SEQ ID NO: 49609 - DNA, 1936 bp, Bovine  19866880713031
  misc_feature (1)..(1): n is a, c, g, or t
ngtagaccaactccgacagctgtatggagcaaaccggactctaaccttagcattcgggctgacatccacacaacagattccttcagcaccctcactgtggaaaattgcaacagaaccgacgcagggaaatatacccttactgtagaaaacaacagcggtagtaagtcaatcacattcactgtaaaggtgctggactctcctggcccacctggcccgattaccttcaaggatgtgacccggggctctgctacattgatgtgggatgcccctctccttgatggaggtgcccgaattcatcactacgtggtagagaaacgagaagccagtcgccgtagctggcaggtggtcagtgaaaaatgcattcgtcagatcctcagggtcagtgacctgctagaaggcgttccatactatttccgtgtttctgcagaaaatgagtatggtgttggtgaaccctatgaaatgccagaaccaatggtagccacagaacaacctgctccacctaggagacttgatattgttgacacaagcaagtcctctgtagtcttagcttggcttaaacctgaccatgacggaggcagccgaatcactggctacctgctcgaaatgagacaaaagggatctgacttctgggttgaagctggtcacaccaaacagatgactttcacagtggagcgcctcgttgagaacactgaatatgaattccgcgtgaaggccaagaatgacgccggctacagtgaacccagggaagccttctcttctgtcatcatcaaggagcctcaaattgagcccactgctgacctcactggaattaccaatcagctcataacttgcaaagcaggaagcacatttaccattgacgtgccaatcagtggtcgtcccgcccccaaggtaacatggaaacttgaagaaatgagacttaaggagacagatcgagtgagtatcacgacgacaaaagacagaaccaccttgtctgtaaaggacagcatgagaggtgactctggaaggtacttcttgaccctggaaaatacagctggtgttaaaacatttaccatcacagttgtggtcatcggaaggccaggtccagtaaccggccccattgaagtctcatctatctcagctgaatcatgtgtcctgtcatgggctgaacctcaagacaacggaggcactgatattaccaattacattgttgaaaagcgggaatcgggtacaacagcttggcagcttgtcaattccagtgtcaagcgcactcagattaaagtcactcatctcacaaaatatatggaatattctttccgtgtcagttcagagaacagatttggtgtcagcaagcctgtagaatcagcaccaatcgtggctgagcatccatttggtaagaaaattaaaatcatattaccaagtctctatgattaaacatttcccctgaatgttatttatattctgtatttgtattttgaaactcaatttatattttgatacctctgtttatatttagtcccaccaagtgcacctaccagacctgaggtttactatgtgtctgcaaatgccatgtctattcgctgggaagaaccctaccatgacggtggcagtaaagtcatcggctactgggttgagaagaaagaacgtaacaccattctttgggtcaaagaaaacaaagtaccatgcttagagtgcaactacaaagtgaccggtttggtagaaggactggaatatcagttcagaacatacgcactcaatgccgcaggcgttagcaaagccagcgaagcttcgagacctgtgatggctcaaaacccagtgggtaggtgtcaaaatttaagggtacatttgtttatcatcatcatcagtactagcagaattcagagttgtatttaacctcacgtttgcctcccttccagatgcaccaggaagaccagaggtaacagatgtcacccgatcgaca

SEQ ID NO: 49610 - DNA, 821 bp, Bovine  19866880784444
  misc_feature (1)..(1): n is a, c, g, or t
ntctttcctggaatgctacctccgttcactccgctaatttctaagcttggttatagatgaccacacagcattatgaatggaatttgggtattatcctacacctaacctattctgtctcttctctgagcccccagcctcttgaatcaaggcaggttgttttgactttaaatagtatttatgccaagtttaatatctgagattttcttttttcatcatcagtgaaagttattgaaccttcagcaggaaattgactgtgggggacacggctgagtcagcgtcttaaagggcacatcccactcctatggcagcagcctgagccaacggcctcgctgcttaggacaggaccataaatatgtgggtgccttgtgtttagatgtctgcgtgttcataaggggttctctttatgaactgtgtcttaattcaatgccacatcagagaaaagatggctatactttgtcactcttgggtattgaaaatattgggggagggaggtgatggaaggggaaggcagggctgcaggtccaggctgaccttttgtcctgctgaactaagcagctctgtatggagggctctgcaaggacccacctggtcaagaacatcctgtggtgaccctgacctcctctcagatcaccttaaatagccactgtctgtcacttctttccatttgaaaactgtctcccagaggacactgtgagcatctgcttttcctgggagaagattctcccatcttctctcctccacctatcgttcacacagtgggttcaactgcattccttacttgaagacccagggagtctgagcctgagagaatgtaatcaaag

SEQ ID NO: 49611 - DNA, 2452 bp, Bovine  19866880795855
  misc_feature (1)..(1): n is a, c, g, or t
ntatatgatggctcagatggtaaagaactcgcctgcaatgcaggagaccttggttccatcctgagtcaggaagatcacctggagaagggaatggctacccactccagtattcctgcctgggaaatcccatggacagaggagtctggcaggctacaatccacagggtcacgaagagtcggccacagctgaatgactaacactttcacttacatatatatatacttttctttctagaagggttttgaaactttttatcctaggtgagtttgcaacattctaacttaacaatggatattaatttaatagagacttcaaattcaaacccccaagcctcaatgagttaaaaaacagaaattactgttatgtatgtatctctcaatagactgtgagcacagataatgtatagcagagctttctttcaggattaagatctatttgtacatctttaagaagcaagaagacagcagatacactcctcatgctaccgatgcagaccatgaggcacaatgaggtaaagagattgccctgacctggcactgtcagcatagagccctgctgtctcctagggctgtgcttcctgaataaataatcccatctcccaggtgacacggtttcatatctaaatcaagaaaccacatctctcaaactgaactccatgccaattaccaacattttctgagttctaaaagaaatctaaactgagtactttggaaactagaaactttcttataggcttatcaactggattttgaagttataattgaaatacaaaccttgccaaaacacaaaattcttggattcacagtgacaggcagaaatgggtggatgatggctaacctgaaagttaaaaacaaaaaaagggcaatgacatcagtgttaaaacttccaacaatgatcatttttcgcaacatgtatttggctaaataaaagttactcaacttatccatctctgttattgcattattctcaagatgtgtaagtaaattaccaaatcttacaacttcatgcttaaaaacatttagaggatataattacataaataagctaagtgaattttctgttaactagtattataacccatctcaaccagatgtttacaaaaacaagctattttcatcatcaaacagccctcctacagtttctacacagaaacctgagtccagtggcacttacttgttctgagaaaaatcggaatcctttgtcctctctaatgcattcataagtctccccaaggacagggttgaatggcttacttcctgctctgaaataggtggagcaatatcctgaaactgcaaatgcagcaataagaacctgttaaaacatttaagaaaggaaaataatataggagagactacttccaggcctgtttgtcccttattcctctagattttatatacccacatcagtgggtgccgatttgatgacatctgcattttctattacttgcacagactcttcatatactcatggggaaaaaaaaaaaatgaaaatgcagttaaactctttgcatgggaaccagcaggcaactgagcccaaatattcttcattcatctgtccatccaatttcttgagtattacagagttcaaaggttctgaaagccaggttatgccatttacacaatcttagcaggaaagttgtgactgctggtgcttttcagagggcaggttaagttttccagagtcacgtggagtaaaagccagggcagggaacaaacaggaagttaccttctcagacccaagttcctaaacaaatgggcttccctggcattcagaaaaagctgataaaagcaaggccaggcatgtcttaaacctataaagaagtgtgatgcctttagattctgacttcagaactactcggacccaactgtaagtcacaaagagtgtatctttcaatagagctatctagagcttttttggccctgcctggtttatgcaaatggatttctcttacctatgcagttagagtattaggcaacaagcaaatacactaccctaatgaatcttccctagcccaggtctaaggttggcaaatccaaagggatttgctctgccatttattaccatgcgctcatagggactgtcagtttccgaagccttgtccaggagctcactgtattccatttcctcgcagagatgctgcagagtattgagtggctcgtttagctccacaggcatggagactttagacaggtctttaccaatgttgttcctcaatatattccacaggttaatgttactggtgtcgggacagggagctggcaggcatgttcgacgtccgtttcggaaggctcctcccgtaagctccccgttcaagactagaagaaggagaaagatgagaatcacagtgaaagatattttgcttttctgatttcccaaaacctgggagggaaagaaccctttcaaataattctgactgtgatacatttcttaagccttccttacactctcccaa

SEQ ID NO: 49612 - DNA, 1198 bp, Bovine  19866880809576
  misc_feature (1)..(1): n is a, c, g, or t
naaccttaggaggatcttagggtatgttcctgagcttctcttaatatctagggaagagaaaattagggagagaatcagaaagttgcaaaatccaaataacctgagaaaggcatcagtttcaagagactgctcctcactgacgtctctggcaaaaagggcactttttccgaactgagaagcaatacccaagtctggaccaccagcccacatggtcatggggttaatacagacctgtgcaggttatgtcaccaacggttactctgaaggtgaaagtgggcacgtgtatttgcacatcggatctttcacattcataaaccgggatgttcttggtcttcatgccgtattcgtgtaatacctgaattggtgtttttcctggcttagctgtaatcatcttccccaaactgcaaaaatcagaaaaagctgtgcgctgcatgtcaaagcggggagggaagcagaagcaagcagagactagttttaacagccatcaccggtgacgccggaggcaccgagcctctggtcggacagggttagagctggcgaggcgcgccagtctccgggccccgctgcggaggtcttaaagaagataacttgaatgcgggtaggagggattcgcaggggaatcgagaggtacggctgatgctgcaacctcccaggtccagcctgcaaatccctttccctccgcggcagccgctcaccacctccgtccagccggcgctgcccgaggccgcagggggggcggggtccccggccggctggcggcccagaggacggggtggagcgctcgctggtccgcccgcccgccttcttgctgccgctaggacgcgagcgccgggaaggggctttacccagaatgctgctggatagccggctcccccgccccctgctgcccaccactccgggccctgcccggctcggtcccgaccgctcagaaactgacctgaaggttccgctgtcctcgcgctccatcggcggagccgcggcgcgatgcctgctctgagacatggcgagaagggacagctttgcgggagcaagagcagtgcagagcgacgtcctcgcttccccggtgggctggtgcccgagaggagggatgcaacgccgacgccgctacctcctcccctctcctcactgcttgagttcctcccggggacgggcggggctggaggcggagcctcggtcggcagcgcaggtcccgctccca

SEQ ID NO: 49613 - DNA, 2112 bp, Bovine  19866880829725
  misc_feature (1)..(1): n is a, c, g, or t
ntttatcagttttcttattccttcacatgtatgtccttgagaggaactatgatcttaagctcttctaaaagcagtcagtaagactttatattattaagatgaactaaagtgataaatataaccaaaacccccccaaaacaagaacaaacttcacaattatgtgaacagctgtgacactgctatcaggtattaaaaataatgggatcatataagtgtggagtcatagagggctttggatttcatgcagaccaactcctttgttttccaaatgtgtaaactgagacttaaagttgactctcctatggtagttaacagagaaggcaatggcaccccactccagtactcttgcctggaaaatcccatggatggaagagcctggtaggctgtagtccatgggatcgctaggagtcggacacgactgagcgacttcactttcccttttccctttcatgcactggagaaggaaatggcaagccactccagtgttcttgcctggagaatcccagggacgggggagcctggtgggctgctgtctctggggtcgcacagagtcggacacgactgaagcgacttagcatagcatagcatagcatggtagttaatggctaccaggagtatttagttgagagataggacattgctgatatttgattgtttttaacttaagaaaaatctctctcctatggttcaaattaattatatctaaatgccctgattgtaaatccagcgttttttaagtaatagcaagtgaatactactaagagaacaattaaatcaagtatgtttgtcatacgagagaaaaaaccattaatctaaaagtaaaatgattagagataggtttggttcacttttttttttcttctcattttggctgaccaaaagtaaacaaatttactggcgaacacaagttagcaaccacataatcacagaccttggcgttttctcgggaaatttcacactcaaatcgggccatttctttttctttaactcgaaggtcagtgagtggtcttaagaattccacatgaggagctgtaagagaaggtcagaattcaaaatgaggtttctagaaattcattctgacattactatagtgcatattaagaaaaagtgagtcttttgcaggctttttcatattaggctaccactgatttgcaagtcacttggagctgccattcagttgtgatgctttgcattttacacatctctgtagtttttataaaattatgtagcatattatatgcccaactaattcttcctatcaccagcttagttcttctgaatgatagctggaaggaaaaatcttcattgatacttctccagagttgaaagttgatattgtcaaagaaaataccagtagcaaagaatcattatcttatttaaggcaggcagaataatctttgagaaattagaagaattcaattgtagtacagcttggagagctatggccagtcttgtctatagctaagaggcataagtctgcaattgaaatcatatacgttcagcttttttggtgtgtcagcttcaaataagtcaaatataaggcataaagttcattagtgcaactaagcaacaagctttgagtgggagggggtgattcttttatatatatatatttatttatttatagttttatttatctccagaattaagttggtggatttataggattgaagagctgccaacatgtccttcctttttccagggctctttgtgagtccttcccaagatgacctttcttgatcagtgagattctgggacacaagtgctggctaataggcttgaagatatgctcattgtagctgagccttcttggagtggagacaaagtagaggacagagaagaaggtgacccaagaagctattctgtcttaagtgaaagtagagcaaccacaatgtggaaagaatgaaactgactaagatgcacggaagcacaatcaaagccattacgagctgttaacagatgggaagcaactaaaccaaacagcaagtgtattgttttctaattccacacaagaattaaaaaatgggcttgattctttaaaaataaaactgttttccatgctagggcagggactaccctagtttgcagagtgcagaaagtaagcttgatgga

SEQ ID NO: 49614 - DNA, 1200 bp, Bovine  19866880837312
  misc_feature (1)..(1): n is a, c, g, or t
ncagcagctagttatgtcaacagaacagtgggttcaattttaactcttctgagtgaggctcctaggccccctggctcctcggttcctaccaggcccatcttaacagtcaaactcaagcctgaagctggcagggttctaggatcaagctgagatccctgctactgatacatatgtacaaagaagttggcttatatctttcctacttccaattgtgagtttgtgccttgccttaaattttaaatatatcagactgcccccgtttactcatttttcattgatcaaggaaggtatacaagatgccttttatacacagttcctgggtcatagccatcatagcctgtttctcattttatgtcttcacggatgtgactgccctaattaaaacccgagactacagtatagttaacgctgaagaatattctttctgaagttaagatattagcatcaacactatattcagcctctgtggttggggaaaaaaggtgttaaaatcaggcatatgaaggaaatgtggaatctggctccgtatttttatggtttaatgttctcaacactttctttgcccccaggtcatgcagatgtatcttccattttgtggaatcgccatatccaatgctcagctctttgctgcctcaaggaaagaatatgaaagaagcagggtgagtagaaagaagcattgctgacagccctcagagctctttgtctttcaagtatctgtgagtcattatgtcttttaaaaacagtagatgatctttgaatagtacagaaacatttgtttttaatctgtataatccttcaagtttctggttgatgatccctttaagcaataaacccaaatggaagtggatataaatcctctgatgttgtgtgggggaaatagcttcttttaaaaaggaaattaatttcacatctatactacaagacaatagatatattctagcttacctacagttttgaaataataacacaaattagtgatctttttacaatttagttcctttaagaagcaaggtatattatagatgatttcaccccaactcacaaattatgtttgtgaattgaaagttttcctggaagaggatgataatgctgcaaacaccagcttatagaattataaagaagcatagatatagggattactgtcatataccttcaccagttgtagggctaaaagtaaaaacaaaacaaaaacaaagaccg

SEQ ID NO: 49615 - DNA, 2458 bp, Bovine  19866880868565
  misc_feature (1)..(1): n is a, c, g, or t
ntggaatctgctttgctggcttgttgcccttctagggattctttgaggggacaatgtcgcctcctcctagactgcagtttaccaaagggcctgctcctcatgaacaaggtactcttactagctgatgatacatccctgctcaccaacaagagactgtccgtttcagaagaaatgtattactttacttttcagagcaaagtatgcactaagaaagctgtagttgaagagggctttaacctttctcagatttatttgatatttgtacagattaaggatgaaactggtagcatatgtataatgtgcttgtgtatgcacacacacacattgtgtttgtgtgtgcatgagtgtgtgcatttgcctcaaaacatccagtactgactcatggaaatgtgagtttatttgttctacagaacaataagtctggaacagggcagaccagggtcagcttcatttctctttccctttctgctctagatctgtaacaaggcatctattcacgcttatggccataacctcatagatgacagattttgctgaatgtctaggccttacagctgttttctagggaaaacaaagaaaggatacaggcagacccaacactcccacatatatttcatcaatcagaggaatgtcacacggccacccaacatgataacccctagtggcagggagcctgccaattgggtttttgattttcaaactctatcagtaagttatgatgcgatgataaagcacaaaagctgatttcttgctcatgtgacacagaatcagcagtgtgttggctatggctcagctccatgcatcttcttcacctggagacccaggctgagaggggcagcacctctcagggccatgcccgtcctgtggtggagggaagagagcatggcagaaccacatgatggctcttaaaggctgttctcaaaggtagcatcatcactttcctccaccatccattgactaaaataaatcatatactaaagctgatgtccatgaaacaggtacatatcatcctcttacaaaaaacattgcaggggacttcccttatagtccagcagttaggaatctgccttccagtgcaggggacatgggttcaattcctggtcaggaaactgagatcccacatgcaacagggtgaggccaattaaaaagaaaattgcagatgattgggaataacaatatatctttcctagagaacaaaagcaggcaaataagaatagaccagacatggaagttgagtcagcaaattacagtgtctgccacaggacacaccacagagacacacaaacacaaatatgcacatatatacgtgtgcacacatacatataccttttaatttatttgcatttcaaagcgtttcatgggagaaatagtcacaccttgggaactgttgtcttgagccacatcatgtcccttgggtaaaataactacttataaaaatatcctggtataatatacgtagcctttaacgtggactgtcattccattcctcattgtaatagatttctctgtagttgcacagaagataatctgtatcacagatggttactgggaattgctcatcatatattagcacccactattacgtcaaggtggtgtacttgaacaaagtttagttttgtgccaggagaatttcagaaaattaagtcatgtttagttattgaagtggtttttttttttccctttttttctgaaccaggtgctatcttatcatgcaacatgttcaaaagctgaagttgacaagtttaaggtaaggaagcaaatagtgcataaagttaaacttcccggggcttttggaccctttgtatcttgcctctaaactagtcctgccctctggatgctggggaaatagaactgggtaaggcccatttgcatatttcagttttagaggggaaaaggaatttacgtataactgaatggccccttcctaatcatttaaatgattcagtatttctttctttccttttttaagtatgcaggatatcagaaaaaagaaatctgtgtaatatgatgagaatcaggatgcctgattttggcatttgtcttacctctttctgttcacttaaaatcttagggtatatttcttcatctgtaaaaagaagtaaagagattagaatagtagctaccatttaccagctgcttactatggaccaggtacaatacaaagcattctatctgtattaatctgtctcatactcctatgaagtaggtactcttttacagatgagcaaactgaagcacaaagatattgagcagacaggccaatgtcaaacgattgtaagaggtacagtcaagcaatctggccttagaactggagtcccctaaccactgtgctacactgccacccagcaagacccccttccagctctgacatgagtctcagacattccgttccccttagtcaccctccttcccttcaaggcaggtcaggattcttgctcctctccctgcacttctgagt

SEQ ID NO: 49616 - DNA, 2406 bp, Bovine  19866880875985
  misc_feature (1)..(1): n is a, c, g, or t
naacatatccgtatctgttttttttttctgtctcttaaaaaaaaaagtgtttctgagtaattttacaaatcctttcatactgactcaattttttcacaatttcccagtggctttttttgttttgttttgtttagtataattgaagtttcttttaggtattttgtacacatttctactttcaaatacaggatgaggcttcaaaataagccttgaattattctcccccatcatgaagacagagaatcacaaccctcgaggaacctttaagtgtccattgctccttttcaatgtttgactaaatgtattttaaagtctcagcttagtagtttgacatgataccctcgtacactggataatcatggaacatgatggagggtttgcagttactattctcttaacctgtgagacagggtgacaggaatttttgtcttcttaagcctgaaggcaaattcatttttctctagatccaaaatgccagttgttttaagatttgatcccaatgtttatgacttgttactgtggatgtttccattgttttacaaactaaggacccatccagttatgaacaagaagactgtacaaatcatggcaaacttctaatctacacataaatttcttaagtaaaagaaaactggaaactaaactgcttagttctttcttgtcttcagattgttgccagggggaaaattatgcacagatcattgggttaaacaaggattattgttccccctgccgtacacaaagcaataagtcattctccttcttgaaattacatcttctctaggaccagtatataaaacacagttccatttgtgctggaagtacaaggtcacagccattcacttggaagatgatccttcacagatattcccagaaaaatactttggagaaatactctctgcccttcatggttcaatgatataaaatctttgtattgcacttgttatgggctctaaaggcagagtgcttatccaacagatagacctgtgtgtctggtgctatatttagaaaaatagtcattgactggaagatggtagaatacatgccaggtatatagtttgttacatttactatcttagaaagtatcaatcattataataatatcaaaatttatatttatagacactttaatcttcacccatgtattaactcatatgatcctgtcagtattcttatgagataggtaagattactgtgaaactttttattatagttgaggtaactgaagcctgtcttgtctagtaagaagttaatagtagaattgggaggtcagtgttgtttcctctccttttgcctggcttgtcattttttgtaaacagcaaattgactattcctactactaagaaagggcttccctcatagctcagtcggtaaagaatctgcctgcagtgcaggaaacctcggttcaattcctgggttgggaagatcccctggagaaggaaatggcaacccactccagtattcttgcctggagaatcccatggatagaggagcctggcaggctacagtccatggggtctcaagagtcggacacaacaattaaaccaccaccacaggcttcatcagacttttcagatggggtgggaagggcttcaactcatcctgtaaaagtatcagcacaagaagatatttatatcctgattgtgggggcatttgggtgaaatctaactggtagtcttcccttgggtatgtcccgtgattttgaactggcttgagtaaagaagtgaggaattgggtaagtctccgggttattatggacacataaatcacaggcaagcattacttgtttttactgttcttttaagctccttcgctgaaaaagccttttgcaccaagtcctacagtacatccctcccatagtgggtggcatcacgtaagctcttagtgagcttccgttgttgggcctcagggattagaaacttcagttcagttcagttcagtccctcagtcgtgtctgtctcttggcgaccccatggactgcagtacgccaggctgccctgtccatcaccaactcctagagcttgctcaaactcatatccattgagttggtgatgccatccaaccatctcatcctccgttgtccccttctcctgccttacatcattcccagcatcagggtcttttcgaatgaagtcagttctctgcatcaggtggccaaaccatttggagtttcagcttcatcaccagttcttcaaatgaatattcaggactgagttcttttagtatgaactggttagatttccttgcagtccaagggaccctcaaaagtcttctccaacaccacaattcaagacatcaattcttcggcactcagctttgtttatagtccaactctcacatccatacatgactactggaaaaaccaaagctttggcaaagtaacatctctgatttttaatatgctgg

SEQ ID NO: 49617 - DNA, 1144 bp, Bovine  19866880886221
  misc_feature (1)..(1): n is a, c, g, or t
ngggtgccattgccttctccaaaataaatcagcattgttacttaaaataatttgaaatggccaaggtaaataattattttctggtggtgatggtgaattatactaacatttattcctgtgcctttttcttccttcttattaaagagacagcatactatgattgaataggaaagattttgtgatttctgttaattatttttttcttcagaggagaagctttgaaagtctgtcagaacatatacttagacagtagtgaccatgatttccagtgaatgcaaatatggtattattattacaactccattaatagacttttgctttccaaagtctttactatttttccacgaaacatgtggggtagaaattacatattattctcagttaaggaacaggttgtgttccaagggtttatttgtaagtcagctgcttggaataagattttatttcccttatggaaatgaaatggtgaatggtagttagattctttagactgcatggaggagcccagctaatttgtagtgtggctgaaatgagatgaaacaatagtgttggatttctagtatttgattatattgaaaacattcattaatatagagttgtttgacttaatcagaacattaaacaggtttaagtagaggggaatgtgaagttcatgaacatggttgagattctagaaggaactgctgctcactttcagatctcaagaagttgttggcatctttttttcttaatgcccatttttcttacagaactaatctatttattgatgtagaacactactgtgtactcattatcattttgaatttatgttggggcaacaagtgaataaacaaaagaaggaaatggattgagtaggggaagggtatgggagaaagaaactttcctaggccaatttagtacatctttgaagtgataagaacaagagagagatggttaaagaggttaagtatggggaaaaaaatgtcacctgaggcaggttctatacattgcaatttacctctgcctttaaaaatacatgacccttttcatctagagcttatgaaagcagttttgtactgccttgtacttttttttttaaatgccatttctcttttttaagggtgtcaatttcatttgtgatagctaaattaattttttaagccag

SEQ ID NO: 49618 - DNA, 1071 bp, Bovine  19866880890193
  misc_feature (1)..(1): n is a, c, g, or t
nctgcgaaagagcccattctttagttccctgagaatcttggtctgctgtataaaatgtttagaaacactgatgagatgttagtgagatcaaaactaaatgaatatttagcaatgcattaactttgagaaatgcagactacgagacttaaataaataaccttatcttaaaacagtattttaaagactccatcagtttgacatactttctatgtgtgtttttcaaatattctgcaaatatatattttcatattcatgcatatctatgaaaatataaaatttcattctatatgttttaatatgtgcttaaatttatagtaatatataaaaattgcataaatgttataaatctcaaaacacacacacacacacacacaaagactgtattagtattgaaaagcctggggggatgaaactgaaacttcatccatacaaggacaagacttgtttcagctcatgactcctatgaggcagcttctgtggttttctttctttttcttttcacatttgtacattgatatttgggcgagggggttcttttacatttaatcgcaattacatacttcaggaggctgtgtgtgggtgaatgtgggggtgtggggagggagagttaattttgcagttggataaattccgtttagaattttataaatctccctctctccccagtctcacattaaaccctcagcacaggaatcacagcacacagtgctgctttccttccagcctccttctaagcagggatctaaagacagcaataaaattcctaaataagtaactgctatttgaacaataaccccacttttgtacaagttatgtactcaataaaccaaagttccaggataaatacgattataataaacaaaatgcactccctgagaagaaatgggggtgaatcatcatttacaagtttgatagaataaaagtgggctgttcactttgtcagcatacgtatgtgattcggcagttaatactttagatttctcattgcttaatttgaagctcattctttgaggtttaaattgatcaatgattatgttcaattcaacagctattttacaacatcattttata

SEQ ID NO: 49619 - DNA, 1492 bp, Bovine  19866880898206
  misc_feature (1)..(1): n is a, c, g, or t
nctctccaatctcactttttggtttagcaacttccaaccctaacatcattcttatatcctcctatcaaaaaataatagatgctggaccctgtgacgtgtcggtttcaccttaactccttccctatgaagaaattctcctcaaggggacaactggggtgctgaccttcacttgaccatcaccacattttcacccctttcatctggattttattgatagaaactctactgaaacggctctctctctctcttgagaaaaaaaaggtaaatcccacatataagaaaatacaagtgtgaaggagatgagagggcacacacagagtagttaacctaaagaaatgctcaaatattttaagggaacctctagtagcagagaactattagggagggtaaagggactatcacaccctaaatctcatgttttaccttaagcacacttgtatgctttcaatttattccatagtatctgtgttgtattatttatttagttagttattggcaggtgcgcagcttgtgggatcttagttcctggaccctcggcagtgaaaatgcagagtcctaaccactgaactgtcagggaatttcttgttttattatttaaaaatagggggcaagtctcctacgcgtcttattgattaatgatcaaataagctgtgagggcactatacccatccatttggggatgtgggtgaaatggagagagctgacatggaataatataaaggcaggttttccagtctgtgtatcccaatattttgaaaacttagactggcatatatatgtgaatatgaataataggcttttcactgctttctgagctatgacagggttactgctcagaagttgccagaaagcaatgttttcattaagtgtgctcttgttgagagattaggtcacaagtcatatgttggcaaaaaggatctctgcctcctggattcagtccttcagtttgtctcagaaatacttgttcattttcaatgaaagaagataaagatattcttaaatactactattaatgccataatttcaggatatggaaataaactggaatcatagcccccaccatcaattcttttcatatcactctcacactttattttcattgcaatttttctacgtgtataattttagctgggatttcttaggcatactgaaaagctagggcttcagtgaaagatgcaatcccagggcatcaagagtgaggaaaaaaacatgtgcagcaaggaagaagggagcaaatgcatggaggtgtattgccaacctggtctgtgcttcatgaccctgaggagatgcagccagttccttggccacgtgatgtgtctatgaacacttgagttcagttcaggtgctcagtcatgtccgcctctttgcaactccatggactgcagcataccaggactccctgtctgtcaccagctcccggagcttcctcaaactcatgtccatcgagtagataatgccacccaaccatctcatcttctgttgtccccttctc

SEQ ID NO: 49620 - DNA, 1179 bp, Bovine  19866880915649
  misc_feature (1)..(1): n is a, c, g, or t
ngagtcggacacgactgagcgactgatctgatctgatctgatctgaaaggcagtctatagtattagcattaatcataaggagtaagtaggaattaaggatctctgtacatacaaatttagttttactcaaatggccttgatcaagtaaccaatgttggtatctatgatactgatggcatctaacttggtcatagttgtttaacaaagacccttgagctcctcccgaaagtctgagtttaggcactgatcatatgagagcaaaaaagctcttattttttgtttcactcaaattatttctcctgctttaactgttttgatttgggctgctgctgctgctaagtcgtttcagtcgtgtccgactctgtgcgaccccatagacagcagcccaccaggctcctctgtctctgggattctccaggcaagaatactggagtgggttgccatttccctctccaatgcatgcatgcatgctaagtcgcttcagtcgtgtccaactccatgcaaccccatggacagcagcccaccaggatcctctgtccacaagattctccaggcaagaatactggagtgggttgccatttccttctctttgatttgggcaattatgctaattatagcagcagactatggtccatgggtcaaatcttgccctctgcttattttgcaatgaaagttttattgacctacggccatgcccatgtgtctgtgtagtacctatggctgctttcacacgacgacagcagagtggttggcaacagactgcatggctcacgaaatccttaatatatactatctgcctcttccgtaaactttgccaatccagttgtaaatgactaacattaatcccacatttaaaaaagagaaatgaagtgacagtattccaggctctacatcttttgggcaacaattttctaaaaatggatggtagctttccaatgcaggagttatttccagcataatcaagaactcagcctttgcaacctctcaagtgcccagggaacgtttttggtgtagtagctcatacagttaactgtagtttcaatggaacaccactcctcagtctcagatattcttaaggatccaaaggataaacacacaggcacagaagtatgagaaaacacatttcttcctgctcagagtccagcatttcaggagacgaaattacacagtataagcaca

SEQ ID NO: 49621 - DNA, 1154 bp, Bovine  19866880960823
  misc_feature (1)..(1): n is a, c, g, or t
natgtaaataggctagaaatgaatgtaccacatttaatttttaatttatcccaggcaaataacttaccaattctcatatggcaaaatgtgttggaattacaccaaacataacacagctgatagtctccagaagttgacattttaagatatcaggatatacaaatcacattatgctaaatgtgcaataaatttaccgctatgcatatgaatgatgacatagcagttatatgtataaactaaaataacaaatagagttcaaattttattcatttggattggagtagatggtgagatttcagctcattattgataagagctttacatctatcatctacttaactcctcacaacaaccccaggaggtcctgaggctaggaggaattggccttagcagaaggtcattctgctaatccgtgccaggcaaagacttgaaccagcctggaaggccatctgatctgtgcccctcaccaacagtgaacactgcacttttgcttccctcccttgtctccttacttgtaggcaacgatgaaaattttgctgctggagttgatactggtaaatgtgggaggaggttctctgaagcctgcctggcagactaaggaaaactaatttgagtttttaaatgtgaattgaacaaagttggcaggtgtctgtgaggagaggtatgggtatgctgctccctttataaatgggctcaatatatctgaaagctatttgataacttgaaataagagctataaaacttttcttgctctttgactcagtaatttcagtctctggaatacaccccaaggaaataacacaaaagaaaatggtaatttgttcaagatgttcattcaggagttatttgtattagtgaaaaactagaaacaacccaaatttccagtaataagaactaagcaagctagattatatagacaaagaagaaaattcataatccctaaaaatggcaaatgaaggctacatttgtatgtggacacatatgtaagaaataactttaaattagaaagtagaaaaaaaaaagaaagtagaatacaagttggtataagtataatcttgtacaatcaagtaaaacagtatgtgtataaacaatcatacaagaggactgtaaatttataaagaagtatagccctcattttgttgttgaaatttgga

SEQ ID NO: 49622 - DNA, 1462 bp, Bovine  19866881011542
  misc_feature (1)..(1): n is a, c, g, or t
nttggaagcttcgctgggttcgctgttaccgcagcgtttactgcagtcacccggaactggtaatcacagccttccatcaggccagtcaccttcagcctggtgtcgtacaccacgtggtccttgttgacacgcgtccagcgcaggctcttcttctcacgcttgtctaccaagtagttgctgatgtcgttgccaccgtcagattcaggtttcgtccactgaatgatgatatgctctttgccagccccaacttcttcaggtatgccaggttgtgatggaatcgctgtttatatttttatgagaataaaaggttgatcagaattgcacaaaatcactatttctatgactgtctgccccctgcccaccccatcctctgatcccatgacacttccactggcaagttaagtgttaatactcactgaaggagtttctggcaacaatgggctctgattcaacaggcacaccagggccatatttgtttactgcccgcactcggaatatgtattcgttgttcttgatgagtctagtaaccacatgggatagggtggggcattcgccttccacaatcacccagttgagcctgctcgtctcgcgtcgttccacgatgtagtgagtaatttctgctcctccatcttcctgaggaaggctccaggctaaagtgcacttctcctcagttactctgctgacggtgagctttccacatgggcccggggaatctaaaacagatgtaggaatgagcaatgaggaaggtccttctttctgcacacatttgagaaagctatggagatcaaaaatcgtttgaccctcttaccgagaaccttgaccaggacagacacagcctttgtcccgctggcattcttcactgttaaagtgtattttccactgtcacttctgtcacagaacttgatcacagcagttgctcgtttgcccgtatactgcagagagattttctcacacatatctagttctttgtcccctttggtccagataatcttgggttcaggtttgccaccaactgcagcatcaagaacaagatccgagcctgctctgatggtgaccagatcaccctgtaatctggcatccagttcggctttgggtggagctgtcatagacaaaatgtgaatgaatgcgtgatagtctgttgtcacagaaattgtgatcatttaaaaggagaacgtggattattattattatttttaccgtattcatctcggcaagtgatggggcctgtggattctgatcctttgctaattacgcctgctgcattcttggccaacacacggaattcgtaagtgtctccctcactgagagcagtaacggtgaagaaattgtcagatacgatggtgtagttgcacttgagccagcgaccgtctccaacttcgctgactggcttacgctctatgatgtagcccacgaccttgctgccgccatcatacaccggggcagaccagatcagtgacactgt

SEQ ID NO: 49623 - DNA, 1040 bp, Bovine  19866881012950
  misc_feature (1)..(1): n is a, c, g, or t
nagaatgttttgcaagtccttaatagatacttcttgaatgaatggctcatgatctagatactcaactgcttgtatactattccctgacttactccctcagatctaatcttatctctgtagccaccaaccttgcccagacagcataaacgctgccctttttcactcttacttttgagcttctctttcctccatggcaactgtttgcccttgtggccctggtcattttgacagtgacccaaactaggcctcgtcccttcttactcgttttactccaggggtagcttccagcaaaaccacactacttcaaacataaagttctctatggtgttcctgcacaatcaatgcaaataatcaaggtatttctgcccagatcaccaaccatggtagtcttgttgattatgcaaaaaccatgaggggagaggtacagaaaataaatatatattcaataacaagctgcttgaaatatggcattaagtgaaatcagatctggcattaagaaatgtcagttccaaatatttaaattatagatttgaaaaagccttgacacacattatagttgttttagaagcagaaataaccaatccaagttgttcagttagtccaaaagaatgctatgttctcttcttttgctattaacaaataagaaaacaagcaagcaatgagttcattagaaaaacacttgtgaaatattaatactcttaataacctacatgattaaaaaaacagcctcactttcacacataacgtggggagttatgcaattgtgagaaaggaacatttattttgaaacagttataaattatagtgtaatatgcatatatagagagctatattaaattacagtaagaattaatccaaaaaagacttttgaatttaaatgttaatggctgagatcttttatgagagacaactaaaaacttcttaaaaattagaattattgccacgtgcaactttttggaaagaaataggctatttctctcaccccaaggacattaaagtgattgaaattggtagctaagcagttcctaaaagctatggaa

SEQ ID NO: 49624 - DNA, 1046 bp, Bovine  19866881064791
  misc_feature (1)..(1): n is a, c, g, or t
ntttccaattaaagatgtatatactaaaaattttgcttagtctctgtcctcactgggtctttccagttaatggatataatttaagactatttacctcatggagccatcaaaatatactgtcatattttccagactctcaaaggcactcagaggcaatgttaaaagaattggtgataacataatattattcattactgtgcaatgtgttttccttccctagaacgatatgtgcaacttcaatagtaatctaaggtaatgttttgcccctcaaacaccaatctaccagtgggaaattctggctctaggacaagtgagggagatgttctgagtcagtcccctgacttctctgaaacaaagggacatttctttatgccaacctcatctgcacgtaggcttctagaacactgccaaaaaatgattccttaaattcctgacaaacgaactcctcaaaaataaccaacctttgggcttaaagcagaggcatcacatccaccactgaagcagcaaagtctgtttgacttagaactatgggaccccatacttacagcttccccattcaagtctcagtaaccctgctgactctgcttgccctcctggtcatctggaaatccagtatccattgtccagtcttccctaccaaaccctactctctggaaagtctctcgaactggtttacacttgagtttcagcgactgagagattaccgggagcaaatacaccttggcagattcacagagccctgtctcttaatggttccatttttgcacatttccttttgtaacagaagcataactgatagaccagaaggcgttataaaggatgaaaaaggagctgtcctgccgggctagcactcagcatcccagattgcagcagtgcttcgctgtgaagatctggcagatgaaaggagctttaatgctctaagtcaaaggatttcagagcctgaagccccattatccttaagtgctacatggcaaggggaagaactattgacttctctataacaggcttaaataaaaaaaaagaaagaaagaaagaactttacaggg

SEQ ID NO: 49625 - DNA, 1722 bp, Bovine  19866881068988
  misc_feature (1)..(1): n is a, c, g, or t
ncctggagcactgtttttggctggctccaaaaaacaaataatgtgataacaagtttattttggaaagatatgtcaagaataaacatcccatttagcatcctcctatatttggtatacggtctctagtagaaggaaatctctttgtctccttacaaattcaaatttctaaaagagtacttttagctgatatttttctgtctcacactttgttttcttcagtgtagaaacaaaactcttaatacaataagatgtttgtcagaagcactctggttttctactcctgtacctcatctggaaaaaagaaaaaaacctagtttatgagagccttcatctaataatattgttgtttagttgctaaatcatgtctgactcttgcaaccccctggactgtagcccaccaggctcctgtgtccgtgggatttcccaggcaagaatgcctggagtggggtgccacttccttctttgtcatctaataaaagctggatttaatttcttacggataaagtgtctttaggggatgacaggtcttcacaaggagatagaattttattaatagagctagacactatcaactgtttactttgttgcttttgtgagcacgttcaaacttttaatcttacctcagccatgatatttttgagctgcagaatacaaagaaatttagctcaccaaatacttgcattggctttcaaaatgtttatggcagcctctgcagctctatgtttcgccagcttcttacttgtaccttcacctgaattaaggttaaaaaaaaaacaacaaaaacaactctttacatgctgaaaaaatgtgaggcttgcatagaggtttgcatagtacaaaacaaagtcactacatgtattatatatacacactaggtatacacactgggtaataaaaacatacactgcatacagttatacattgaaataaaatatcataaaaattaatatattaaaaatccctttgattttaaaagtgctaagtatttaattctaagtatacttatataaaaatctttattatgtctactttgtacatgtttattacataaaatgataatacagtagactgtcactatgtatgctaatgaaatgcaacttacttccattattcctagagaggaaattcttctacaggaagaaattttctttaaaagaggcacttagagcaacattattgaacagcaaaatgtacacattttactctaacagcccctcctatactggatgaaacctctctgcttggctaagcagtcactggctacctgttggatacagcaggggaaggtgtatatagggaatgtgagagattacattgttacgtgtctttcatacaatctgtatcccttacatgagtagctaagggggtagaagagaccaggcctgactaataatcactgagactgacgcctaatatcagtaagcaaccacacaagtaaattataaattcagtctttttccttctgagttcaaagtaggtgttgagaacctgtccaaagttgtgtcagaaaggcaatattcattcctctgatgcagagtaaagaaaaggcacatggaacaaatgtcaggtgtggttctcaagcatcagagaacacagaaaccacactcatttatccattcacataggtattatggatactgtattcctttgaaaaatgtgggcattaggagcactgagctttgcactgaaatatatgggaattaggggcaccgaccctctgca

SEQ ID NO: 49626 - DNA, 1125 bp, Bovine  19866881104271
  misc_feature (1)..(1): n is a, c, g, or t
ntaaaaaataattttgttttctgatacatttgattatatattattaatgttgtgatattagtgtctttctatgttgttttatctttgtgacaacacagactctaggtattcaatctgctttctttttaattcccatatattctctgctttgttctaggtcatggagtggttcagtattttaatgtagcatcagctatttatgcaaaatacaagttacatggatttcagtaccctcctgggaatcggataggtgtttccttcattgatgatgggagtaatgcaacagagtaagtaccattccaggaactactctaaagccacacttcgggtgtgcatgccatgactgagagaataaaagtagagaacaatttacctctcaggtgaggacgttacgtgaagcaagttattgtgagagacttgagtatttctagttttctataaattacctgttcttatctccagtctccttagaaaaatggcaacgcagatggtcgctgcacagcttgcatcaattgtgtggaataacccaagtcagcagcaatttctggtaagtgaagaatttaaccttacagtacaccattagggtataaaataaatgtggcctctgtttattacctgtgtaagaaaatgttcagagatatagtaaaagaccacagaggtgccatgataacacgtctatttttagctcttgacttattataaaatccccaaagtgccgttttttctttttctcattttgaacctaattcttcaacagcaatttgcaggaagttctggatcacagctgcctcaaatccagacggatgttgcactaccatcatgcaaaaaaaaagctcctcctgacactcctgtgaaggaaagactttttatcgtttttaatccacatcctttgcctttagatgtactagaggatatattctggtaagatttcagttccatagagttacattttattttattttattatttaaaactttttaaatttttttggctacgaagcacttaggatcttagttccccaacaagggacttccccacaccttcattggaagtggagagtcatcccaggacttcctggtcgtccgctgatgctgtaatgcgggagaaggcaaggcaacccactcg

SEQ ID NO: 49627 - DNA, 940 bp, Bovine  19866881138896
  misc_feature (1)..(1): n is a, c, g, or t
ntcatcaaaaacgagaccagtcaataatacgcaagcacagatatacccgagtgtccacaagcgaaacaaaaatccatcatgtgagataaaattctgggccctgagtagtatcttaacaaccagcacaggaacacgttcattaagttaatctcactttctcataaatcttacccatctgttgttagaggctttattttttttatacaggttctcccaagtcatgtaacttttcatatgtgtatataaatcaatgttactgccatactacaatctacaattacttttactatataccatatatatacacacacatgtataaaatatttccaccatttagctaaatcttctaaccgtatttgtggagacattgaagcagagtagagtctgtgtatatgtgtatatgaatatgcacacatgcacacacaggttattccaagtctttctcagttttatttgttgaaagcacatatagagaatatattatggaaaaacagatattttggggggttcccagttaatcttctcaccgtgggccatcctcaggcacttgtgttagaactaacagtatagaattgattgtgattacaaaagtcctttgtaaaatgtaaagtatattataaaagttcacttctctagagtaaatgattagatatagagtgtaattctttttgtcctctgccttatgtcatttagatatcagatggaaaaacaagttctggggcaagtcaatggaaatcctgcccgtgggaaccctgaatgtcatgcttccaaagtaggttgctctcatcttccttttggtctcttatctgcgtttctaaatcataaatgggcatttgaaactcttgttgtttattactgttcagtcgctcagtcgtgcctctttgcgaccccatggattgcagcacaccaggcttcccggtcctttcaccatcttccgcag

SEQ ID NO: 49628 - DNA, 665 bp, Bovine  19866881139637
  misc_feature (1)..(1): n is a, c, g, or t
nttctgggctgacttttacataacgaagtcatacctttccatccacaactgaaacattagcagctggtgaggattcagctgtggaggttgaaggaaatatgtgaaaactagcatctcgtggtgatctcacaatttcattctgccgatacaatcgatgatggcgcagtttggagacccatgcatcaaaccagtcctgggatttcacctacaacaattgaaaaagaggaacaggtaatggtgaagccaatctcctgtctatccactagtctaggcaaatgatttccccagatattggcagagaaacctcgaaaggcatttttaccttcaaatgatagatgtgttcttctgtgtcaaggtctattctccgagctttctttttaattgacatgacagagagtcccacatcgatgcttccatggaccttccccttttggatctgaaatcaaaagactggttaaaaggctggaagggtatgtgatctgatgtgtttctgtactgaagtgagcttaatgtaaactctcatttacctacaggagatggaagatcacacctcctgaacagagaggaaatggataaggttctgaagttaaggtcctcaatttgaggacagctgaagttgcagtgacttcatgccaatttcaataagtaagactattcatctcatt

SEQ ID NO: 49629 - DNA, 1207 bp, Bovine  19866881148449
  misc_feature (1)..(1): n is a, c, g, or t
nccaggctcctctgcccatggaattctccaagcaagactactggagtgggttgccattcccttttccaggggatctttccaactcagggatcaaacccgggttgattttctatccactgagcccccaggtaagcttatttcccaggagacttctccatgtctaatgcatatggactcccagcaagtccaggctgccagacacagtgcagacatgggcccacagctcagacatttcttgagagtccctgtgatatcagttctccattttttcttctgttaattgctgcagttgtggtaccacggtaggataatctagggaggtattaaaatccccattttcaagaagaggaaaccagggcccagagagtaagacaccctactgggaagcagtgagttgggactggaaccagctccttaactctccccatgcttttctgagaggatgcagagcatccaccccattcatgaaacagggtctgtcacaggcagagcaagcccgagggggctgtgaaaaggctctgatccactgccagggatgctcctgcttgtcctctgctctgtccaagtacatggctccgccaggctgacactgcagcaagaggaaaagacatagctgaggagtaagggaagggagtcaacggtgtattagcctgaaatcctgagcttccaatgcagggggcccaggttggatccctggtcagggaactagatcccacatgctgcaaccaagaccccacacagccatataataaatatatcagttggaaggaaaaaaaaagagagtgtattggtctgatggtaggtgctgggacctcacttccctgaatatctcaacatggaagaggatgacggtgtacccccacccccagggacgtgatagtccagtgttagtattcttttattcctttccaggtctgtagttgcatgcaacagggtggggttaatcttattctagttttggacaagaaaaaaaatgaagactctgaaagttagagtctctttttccctttttatatttttcttgctaattgaaatagtttggcaatctcttgtttgagaaacttgtactagagcaaaaggtttttaatctaagatcatttggcttatgtttttttagataactacttctttttccaacataatgtctcaactttttaatttttttgtgggagaaggaaggatttatggatctttcccaaagcaatgt

SEQ ID NO: 49630 - DNA, 1347 bp, Bovine  19866881154948
  misc_feature (1)..(1): n is a, c, g, or t
ntcgatacttaagataaaaatttgaaaaaattaaaactttgttaaaggaatcaagcttttatttttctggaaaattcagttggtgaaatatttcatttcctgatagaattagatacaatactggactcctatgagcacataatagttcaatcaataacataatcatgagagggtaaaaaatagtgacaaaataataaggggtctcagcttttattcttttttttggtagccactcagtagacatttactgaaagaaagattcattaaattctataatactttacaaatttctaaagtttcacatacatgacttcatataatcctataataaccattttttgcctctaccccatattaatgtagagacataaatgctaatgtcactataatttcatcactttccaaagaaccaataagacaaccatagcaactcgaaagaatattacctgctaagataaacagcatgggatatcctggcaagatcaaaaaggtaaattttttacatgtgttgatatgaatatatactttaaaatatcaattgctttttctctcttttcagtaacagccttagctccaaataaaacagctcagaacaaatatatgattctataataaactatagtaaaataagcctaagtttgaagccttaatacattgaaaatggatttctattaaccgtcacttgttataatttacagcttaaaaaaagtatgatagctgccaagttgcttaccttactggcaattttattcactcattattgttctttactgactatctagtggggccaggctctatactaagcagtaagagaaacagtgatgagcaaatcagaacaagactctgcccatacagagtttatattccattttatgaaagacaaaaaaaatttccctaagtaggtagaattttgagagaatttggtcaaaagaaaaggttattttacctctctgtactgcaagaaccaggatggctgacagaacgcttcatctagaaattttaaaagaaaataagcttaatcacaggtcaagtagaacaagacagctctaatacatttttatggtgatgataattaacataaatttactcaaggaaaagatagctggccaaaaaatttgtttttttacagactcaagtaacattagcacaagataaagctttctccctagtaactaataactgaaatctttctcaaagcatacaaaaacatgctggattattttctcaatattaaaaaccaaattttattttatatatgtatctaggtggcatcagtggtaaagaacccgcctgccaatgcagcagacataacagacacgggttcaaccccggatcaggaaaattccc

SEQ ID NO: 49631 - DNA, 1284 bp, Bovine  19866881195349
  misc_feature (1)..(1): n is a, c, g, or t
naaaactaggatttgtgaatgatttctgtgttgtcttactactcgcaaagcacactgaaaaaggagaggtttttttggcactgaacatacctctgggtacacaaaattgtattcactgaatctgctttccaaaaacataagcgcaaggggctctcacagatcagatctggaaaaactggaaaatttacttatttattaaataaataatgtagtaatgtattataaagcatgaactgaaataagatttaatgaatctatgttgatcaataaatgaatgggaatgggggagaataagttctaacaggagaatgcccaccaaaaaatgtagggtaaaaaataggaaagtcatcatttggcaaacaacacaatgatgattgataaagccaggagttgtctgtgtgtgggtagagatttgatgaacagtggatactggcatagtctcagtattttccacaaaatactcattaattacaaagagggaaatggagactagatgcaacgtctggcagacaccaacttgtgcaggtgatcaaggttaacaccatcgatgatgggatgatctgacatcctttgcctcctgatgtgatgcgctgagaacagcatggcatcattttaaggttttttttttgccaggaatacaaagcccgaatccatgttcaccttgaatcttcacaatattttggagcagatgtttttatcctcgtattatagaatagaaaattgaagtgcagatgttgaacagtttacccaaaaccgaaaatagtaagtggcaaagcccagtttcaaaatccaaggtaaatttataaacttgcggtgcctcagtcctgctgtaaagcccatgggggttgttagttccatgacagttgggttctgcagatagtaccttacagtccaagggtgacgtttagaggagtatcactaaggagccacagacagcgaatcttacgttgcttataacactagtggtgaggggagggaaactgaattttatgtcagcatctgaacggctggttcttagcgagtaattatttatgatcagcgcgtgttgctgctgaaagccatcccgtcagacccctttccagcaagagtctcctgaaacaggaactgattatgcagtattaaatctgagacccatttcatattcagaggttccagtggtaaacctcatatgtcaggagcaattagtgaccttgtgacatgtccttttcaatatgctgaactgtggtcaataaatcctagcaggatggatgggaattaaaataactacctccaccatcaccctag

SEQ ID NO: 49632 - DNA, 1795 bp, Bovine  19866881258502
  misc_feature (1)..(1): n is a, c, g, or t
ntcgtgtctgactctttgagactcttggactctagcctaccaggttcctctgtccctggaattctccaagcaagaatacgagtgggttgccattcccttcccaggagatcttcctgattcaggtattaaacctgggtctcctgcattgcagacagattctttaccgtctgagccactggaactacacactcacagtaagtccaaatactgaatgttctcctatcctcttactgttttttcaaaaattcttctgaaaaatggaataataacagcacctacatcagagagttgttgggggtatcaaaagagataacacatgtaaagtgggttagcaataccaagcacatggtaagcattcacttgacacatgttaaccattcattattagcatcatcaccaggagctgtagcagcactaataatattttcttagcaaggtcaggtgacttctctccttagacagaacttttaaaacaaacctttagaaaactttaatttagcaccttctctgctaaaagtgtttgtttcaacatttcatggaccattaatgataatgaatatttcaaatgaagagtgacagaaaagtcacaagctggagtatacataaattaaataatcaatagcatgagatgaacacaggaataaataaaaatagacaaccgatcaccaacaataaatgatgtcaagctcatgtatatccttcactccaaagaacattgaactgtcagcaacacaagatttatgccgggaattgtattagtagtgaaagaaccttatgaaaataaataaaaatatgcagtaggtgtagatgctacaaagtaagtattctatatcttttaaaaatgaatcttacctcatcagggctaggaataatatttacactaacaacctgatcacaaataatagattctgaatgtattctgttcaaccggctccttagttcagcattctggttgagtgccttaaaataacaaaaaccgcacatgtaattgcaagttattgagcaaacataaagcagaaccagcacacaggcacactttagacaacaaagtctaggatgcttttagctgtaacttttggagccaccacaggccagatcccaccagtaagaaggaaagaaatggctcagagttaaggcattcattttttgcaatataagactactacttagtagattagtgggttgaaaagagtttaaggatttcataaaattgattcgtggaattttctctcctttatagtcaggcccactatatccaagcccagtctaccaccacatacatataacattttataccctaggataaaaactattgattcttttttttccctttttggttccagtttctaaagtttgggcgttgtttcaaagccagatgtcttataaattatttgtaaatggaatgaacaatgaactggctttatatttcatagagctgtattttgacctggtgaaagaaaacagttgttgtgtttccattttctaggagcacataattaatacttgtgacagtacagcagaactaattcaagtgtagaccaaagctgccttccctggacagtgtagacactgacaagcataataaagagcataccacagaaaggaaactaagctgtctgcatctcatgattcttaacacaccctaaatcagcagtgaaacaccatctgctgtaccccagtttagcgtgtgtggtggaaagggaacatatttacatgaacatgggctccctataggggccctggggacagaggctcgtggatcacatcagtgcatggaaatctgttccatatacag

SEQ ID NO: 49633 - DNA, 1368 bp, Bovine  19866881272874
  misc_feature (1)..(1): n is a, c, g, or t
ntgtagcatatatccgaatttctttcgtttttgaggctgaataatattccactgaatattttgtttatccatttaatttaatttaattaaattatccatttaatttaatccatccacattttgtttatccattcttatgccaatcgaccatttgggttattttcagtttttggctattttgactaatgctgctgtgaacatagttgtaacgatgagttactcatagtaactttgagagtctgctttcaatttttttgactatatacccagaagtgtatgatttatttttaccatatttttaccttaccatagccttcctttccatatgcaaatgaaggaggtataatcaattttcgcttctctccaggacacatatccatcatcccaatgtctaggccttttatgacttgtccaacaccaagaacaaaccatttggggtggccttcattttgtgtccggctgtaattaaaaacagcaaccaggtaagttgatttgaaggaaaataaaatcaaactttaaaatacagctgaatatttagttcctatgtaaaactggaaacctctctaaccatgtcttttcctatattaagactcattcggaatcccattgtggggtctttggctcaaacttccctcataatagccagacagaggtttgatttgcccaaagctagtcattaggagcggagaaggcaatggcaccccactccagtacttttgcctagaaaatcccatggacggaggagcctggtaggctgcagtccatggggtcgctagagtcagacaggactgagcgacttcactttcacttttcaatttcatgcattgaaggaggaggtggcaacccactccaatgttcttgcctggagaatcccagggacggggaagcctggtgggctgccgtctatggggtcgcacagagtcggacacaactgaagtgacttagcagcagcagcagtcattaggagtcatctcattttcttttttcttgtcatctttacaaaaaccactcaacagttaactttttaatgggtctcctgcccctaactgcatagtttgtccaaattacagatttaaccattctgtatttattccaaaaaaaaatggatggtccaggtttagcctcaaaaagtcatttgaatcacgattaaaatttgtatcttcttaataaatctctctattttcttctaaatggaaagaattaactttccccaatcttatttttatagggaagtagcacagaaggagaaaagacattctatctctgagtaataaaacatcaattaaatcagagtaagtagtggtgggacgaaggggcagggcacagagacacagggtctgaaaatcaccagagaaaagtcattgtagt

SEQ ID NO: 49634 - DNA, 1865 bp, Bovine  19866881286450
  misc_feature (1)..(1): n is a, c, g, or t
ntgttatcgcctttattatatatgaggaaataggtccagagagattataagaaacatgcccaaggtcacatggcagcgaagtttcaaaattcagattatggtcactgagcttcagcaaatgataactgaagtagcccatttgtaaatgtagacattttacttcttatgtatctatttaattgcaaacatgaaatattgaatactaaatttaatttggaagaatgccaagaaagaaattcagtaagaaggctgaagttccaccatctggtagcctgaaggcatcatttgtgtccacgaaaatctggagtccgctattttcattgaagtccctttaagaaaattttgaagcttttttgtctatgtggggcaggtggattgtagttagattctagctggaagtttctcatatgaatgacagactcaacattgcactactgctttagctggtctgtctttaagtattcagtgaaaattcaagaaaaagtagcattttccccctctcagtgtgttttatgtgaaagattaacaacctgtggcaactgcttagtccccctcctcttctcaggctggcctgtctttctatgcaagcttatctacctccatggtttcagatactatctaatggctaataattctgaaatctctgtctttagcccaggcgcagttacaaaacaatgcatcagcctgaatttgctagacatttttgcttggatgacccaaagacacctccatctctcattgtcccagactgaatccatcttctctctcaaatccatttcccctgcattccccagttcagtataggcaccaccatcattgatttgctcacagtggagattggagtttcaccttctggattccttctcttccctctttgtgctgtccattatgccaccagatcctacttctaaatatctcttgaatctgtctgcttctctcctcttcctgttgctattgtctgagccacttggaatatagctgcagtcttgtagctgctcttttagcttctgtcttgtggtatccattttccacacaaaaaaacagagtattttttctggcattcaaatctgttcatttgaagtattaaaactcttataatccattcagtggtgtttccatcaccctctggatgaatacaaatttcttaacatgactgacaaccttacttcacaaagtgtggtcaacagcagccttgctatcacccaggcacacctactcttagtatgtgttctaagaaaattcccaggcaagtcctaaagttagagaagcacagttgaggagactgttctttgaactctccttctgcccttcagctctctgaccttttatctcgaaggtccctccttcaagctcgtactgtcccagcaacttggggcttgagaacacgtgctctgtgttgcatctgagccttcacagtggctctttctctgcctccagtgctcttcctgtcccccagctctgcttacctcactgacttactggtctttcagatcctggtttagttatctcctccttcatgaaacctttctgagtccttagtaagtaggggagctaccccttctgtaggctacccaacaacctgcactgaggccgactgatgcttcatatttcagacatcgttcttatagacaaaatctcacacattaggctgtatgctctttaaggacagggactctgcttagttctctactacagttagctcttgaacaacacagtttgaattgcacaggtccacttagatgtcaatctttttcagtagtaagtactataagaccacacaatccacagtttgttgaatctacagataccgaggaagctagagatggaggaaccacagatatggacggctgactgtaaattatgca

SEQ ID NO: 49635 - DNA, 1383 bp, Bovine  19866881295847
  misc_feature (1)..(1): n is a, c, g, or t
naagtatgtaattcttctaaagtatctgtgaccagttgtggtaagcagtttaatgacattcgcaaagacagggatcacagtcgttactgcttcaaagttcaatgaaacagtattgtcaacaagcatatttacaacatagttcagaatcctctgagctaatggcttgcctcagcctctttccttttcctcactttcctttcctctctcgtttccttgtcttatgctctccatttcctcttttctgacaccccatacctgtcttttttgtgtgtaactgcttcccttttcccctctcacctttcctcctccttatcctgtcctcccctccccatccttcatattgcctttgtctctttttccttattctttattccctgttccatgtcttcttcttgtcctcactggtattactgacattaacataaaacagatataacatgaaaatagttttttgttatcatttccaaatcaagatttaaaatctcatagacctccctcagaaaacaactgtttcattttttacttctaagtgacctgtgattactatctttcctttgaattttaaagtcagatacatgaaatattggcctttctgttaagacacacagattttaattacatttcaaactgctaccccgtgagcccatgattataacttagttcctgcagatcaatgccttgaaatgtaaaagaccttgcctctgaagtacattataagtagaacaagcgatgggaaaattggtatttaaatacttggtatataacatcaaggcttttattaaagtgaaaacaatgataaatactattttttgacatatctcttagcctagtatccaccaggaattcttagcaacagcaacagaaaagttaccatgccagcaattctcaggctgacggattatttgtggttttgcctctgttaacctaaaattcctactggtgactgtcccctgcagggctgttttttttccccccttttgtacatcgagaagaaatattttccatcctcctgaacccaccaggaaacatctgggatttaatcacctctgttattatattgctactccctcagtatcaatgctctggaacttgcttagtcatttgtaaaattcagcccagcacttgcctctgcccttctgtgacaatccatcaaaggcaaagtccaccaaactctgtgagctgtgtggctctgtttcctagagctgatgttttctcttgactgaaaaccacgctgaacctcaacatctgcatcttgcttcattatttctagcagaatgtaacgtctggcttgtgtgtgtaagtgtgtgtgtgtgtgttttcttgtcattctagctttagaaagaattttttcccatcctgaaaaaggaatccattcattaggaa

SEQ ID NO: 49636 - DNA, 1219 bp, Bovine  19866881305590
  misc_feature (1)..(1): n is a, c, g, or t
ngctgtcaaaaggcatcggtaaatcttcaatactgaataaacacacaaacaagagctttttcttaccgaaatatatcacgatggtttttgatgttccaatcatattctcctttactgacaagttcgaagaattccgttctccttctgcatgaaatcaaatgaaaattctcagtctgtgtggtgatataaacacatttatgggaaaatatgaccacttcaaccaagtaatttaatatttgaaatcatgaggctaaaatgctatcaaaataaaccactttttaaaaaatgttgaggctttgacaaaaagccacaatcatttccaaatgtatttacaacagaagagattatcaagccataaaacagaaatcagtgtggtcccgcatttgggattacctgctgtgaagccctgtgactcttactgaaaaagtcagagaagggaggcaaggacacataaaaggtgggaacagttccagaatgttcttttatcattcaacatagaactgagctgtatgatcatccaagataatataaactccctggtagtaaattcaggacaaatacttttgtagaggttaaaaagtaaccatttcatcatttcagggccttaacacatcggctatggagtcagaaataactgtgtttaaaccatagctcagtcacctcctttctgtgcaactttggaaagtcacttaaacactctgaacctcaatttcctaatctctaacttgaaggtcctatttggtgactcagagttattgtgaggattaagtgagatgacatgcaacgtgtgtttattagtatcagcacattttaagtgtggctacacaagcatgtggaaatgcatgtagagatgtgtggatatggaaaagaaaagaagggaaccttcgcaatttgtgaaaataggatgccattcctattttcaaaacttttgtttaatctagttttatgatttttcatttttataatgagaaaggaaaaaaagacatcaccattttggctctttaagaatcatttcccaaggtctcacatttttggcacttcctaatgagaggctctttaaaggatcctgacacactgcttcccagtgtgcaccccacaaaatgctaggcttaggaggtgctgcatgtaaagggggtgctctggccaagtgggtttgagaaatgcttcctgtgatcctgaagattcaccacccacattagcctttgaaggctctacaaaa

SEQ ID NO: 49637 - DNA, 1764 bp, Bovine  19866881309824
  misc_feature (1)..(1): n is a, c, g, or t
ntgctgctctaattaccagcgcatctcagaaaaactcccctgatttttattttatgagtgacttttcaaatacagtaaatttgaaagggtcctctcctaagcttctttgtggagaatacttgatatgctataaggaatgttggaaatgagtaattgtgctacaactaaataatttaattgtaagtagcttttttccctccatgtaggagtacttggctaatactgtacttatgaaatgaacaattgctggcattttatgtctaagaacacataagaatctgtaggattcaggatttcaaagagaacaggaaagagcatatagactggcagtttacagtcactagtaatgtctctcattaaataaaggaagtgaatttctatgatagagttcccatttaaaagattgcccctaagacacattcacagattcatgtggaattttacgtattcacatttttctattttgtaccctaagcatttctagcattattagattttgtagccagtcctctgaaaaattacctaagagtttatttgtgtattatctttttctaaaggagatttctggcagtctgagtactcgccttctcactcttttgggaattttcatgagaattagtgggatttatgctcaactcatgttcactcctgggatagattcaccaagggttcatttaatcacagtttccttcaagatcatgagaaagcatgcctgagaatgataaatcagcttcaacatcatttagcggggtgggaaatggggaatggaattatagaataattcaaatatgatgaagatatttttgaagtagcagcttgtactcaacattaatgaaaaaaattggaactgattactttcctagtattaatgctttagtgttctctgtaaacattcagaaggatatcatgtaacttgtatgatattaatttttcttaacctccttctagctaaaggattgctcacttgtctcctagtaaatgtatataaacaaagtgattttatgtttgaaatgaagaatgtatataaattatatttatgcttttaatctttacataagattgcttaattttaggaacctcaacaggaggctttgtggtaatattactcttctttctgatgggctttagtatcagaaatcttttttcttggtggaggctacagtgttagctattacaaagaaaacaggtgctaacaagtattactgaagatatgcagaaatcggaacctgtgtgtactgttggtaggattgtaaatggtgcagtgattatgaaaagcattatgttagttcttcaaaaaaattaaaaataggactactatatgatctagcatttccacttctggctatgtatccaaaagaattggaagcagagttttgaagggatatttgcacacccatgtttatagtaacattattcacaatagccaagaagtagaagcaatttaaatgtcaccaacagatgaacagaaaataaaacatgctatatacatatagtggaatgttatccagcctgaaaaatgaaggaaaatcctattacatgctacagtgtgatgaaccttgaagacattatgctaatgaaataagcaagtcacaaacaccatatgattctacttatgtgagatacctggaatagtcagattcatagaaacagaaagtagaatggtggttgtagggctggggaaggaggaaaagaggagttgtttgatgggtaaagaacttcagttttgcaggatgaaaaaattctggacatctgtttcacaacaaa

SEQ ID NO: 49638 - DNA, 858 bp, Bovine  19866881334035
  misc_feature (1)..(1): n is a, c, g, or t
naaatttggggatgctcttctcaaatcttttgtggactggatctccgtgtatgcctccaggggacacacacgactctcttcttcatatatttctccagaaactgctcttgaactcaagaatgtagttgaaaactatcgatacttctcaaaatagctgaaaatggtcataggcttgggactttctctgcatctacgagtgtcagcaagggtttacgacggggcccaggatgatctttacactggtatgatttaaccatggatcaatcaacctattaggggaaaaagacaaggtcaataaggatgggtcttggtgaaccagaggccatcctacatttttcaacctaatgttcttatttcctttccattaacatttcacaatgaaaaaatgcctatattctttaatttttaaggtaattaagggaatttagtgcttttgaaggatagaggatttataatggcatcagggaaggcactataaataacccgcgagacaagggccacctggaaagcagcagtgcagtctccatcatcatttctgcttcttggcgacaggctgtaagagggtcatctcccttggccagtgcagaaccaagctcctctccttagaccagaaagacctgcttgttctgggacagggcttctaccctcttgggaagtggttttccagctgtatttgagtttgaacaaattataacaaacacagaacattctaagtacatgcattctctgtatgcaaagccctgaaatgtgtgatggaagtagacagtcattctggagcttctctaagggaaagaaacatgccatctgcctctgagatcgttacagcctaatgaggtcaggagacacaagggaacgtac

SEQ ID NO: 49639 - DNA, 818 bp, Bovine  19866881341488
  misc_feature (1)..(1): n is a, c, g, or t
naaatgggttgcctttccttctccggaagtgagtgaaagggtgggaatgactccttcaaaggaggctggacaacctttacctgatgtagctactaacctagatcttaagaatgaaatgccacatgtgttacacttctgtttcatattatcccagcatttacttaacatttctacctggagataccacagatatctttaactttttaacagtttggtcaaaaccagccttactcattggctaagcctgtgcctctgtcctcgtgtgagatagctccccattcagttagttgctccagtcagaaaccagggatcttgtttgctgcctcaatcgctcactgctctcctgcacccttattgagcaatcctatccattcatctccgaaatatatcccaagctcatcttcttctcccatttccattaccatagcttccccatttcttatccttctccatccattcttttaaaaatacaagtcccattctgtctgtaccctgtttgaagcctttcactgccttctgttgcactaggaagtgaaaacgacaaagcaaaatgcagatcctttgtttggctctgaatatttggttcctacctaggagcgtcacttcatttcactccctcctgtcctggcatactctgctcaagctccactggtctcttttcgggtctgtagtatgcccagctctttcttgcctcagaacctttgcacatgctgttcttttagctagagtttcccctcccactttgacccttcagtttttagcttaaattgctaattcctccaagaagccatcttctcctctcgagttgaattcagtcc

SEQ ID NO: 49640 - DNA, 1446 bp, Bovine  19866881351664
  misc_feature (1)..(1): n is a, c, g, or t
natgagtgatggtttgtagcatgttccccacgaagttctgattctgtgattatgtcagggagcacccctaagctgcagctttatcagatactatcttgacttctagggaattgatgctggtgatgtcattttaatctcttgtccatccatttacctaaaatccatagatgtctaaggatcttctatattctaatttgtagagactcacacattacaaagagatttaataatcttggcctaaagcaagtttgctgaaaaaaaaaatcttgatatgcttgtaaggtaattacaattcattttgacattttaaaactaaatgttatgggaggtagtatttttcatgccagaaaaataatttaagatagactctcccccaagaaataaaaatcactcataatcccactgtccaaacttggcgttaaatactcagataacatttgatgtttaaatacccatattttcttccctaagatttatattcctatattatttatttatttaaaaaaatagacacatggtactttgtaaaccctttccttaccccttgctccaaccagagaaaatatttgaactgctgttccatactggtgactatatttacatcatcacttagaatggctgtgaagatttgctggatgtaggttgtgtcctgattttttgctgttataagcaatcccatgatgaacatctttgtatacatgattgggcgcttgcttgattatatactgaagataaactcttaaatacagaatttattagatcaaagcagagcctacattgaaggcttaggagacttgttactagattactttcctaaaagtttattctgcttcattagtaatctgtcatgtgaaaagtggtttcttattgttttaaatttcatctttgtttttcaagctgagtgtttctcagtattgtattggccatttgaattttgtggtcaattgactagtttgctttatccattttctataggagtattcctgtttttggcttattattttgagagcacttcacatattagggatatggatttcttctctgcattcactccacttgattggaattttgattgtgatttagtcaaatgtaacattaatttggtggatatgagcatgtttttcaatgttgtgtcttggtatttgagaataatgttttaaatacttctgatctcaggaaattataaaaagtaaaaggtacagagttacttttttcagacccttccatttattgccttgcctcggggtagaactgttcctaaatcatttgagaaaacccaagtagctaaagtgttttcaccagctaagtgatcgaattccatctggttggttttttaagtgttcattttgatgattttagcacacgcacctattggtccttctctaagctagtatctttggctctctgaaatagtctgttcgtatgggtcctcatggctttgggagt

SEQ ID NO: 49641 - DNA, 3076 bp, Bovine  19866881504907
  misc_feature (1)..(1): n is a, c, g, or t
ntttgctataaaaatataaatatttttgtgtggctaaattttagagtgtttatggttgttttgacatatttccgtcgtttcatttcataacacagtcttgaattataaaatataacttgagaatagtgccagtccatgtgtgtgtgtgcgtgtgtgtgcgtgtgtgtgtgtgtgtgtgtgtgtgtgtgtgtgtgcttaggtcgctcggtcgctcattcatgtccaactctttatgatcccatggacagtagcccaccagtccatataatcccacataaattcctcatatatctatatgactatgttccatacagttaatgactacatggtctcatataatcattaccgacaggcttttctgcttctacagtagtttttctgcaatgttttaaaaaaacatgactgggtttaaaaatcaacattttatgaataccaaatactcgattctctccaaggcacatttatttcagaaaattacaaagcatctcttcctcaccatctggaagaaatagcttcatggtcaaactaaagacttattttcactaatatatatctctcacagaactattaaagaattatagtagtggatgctagttaagtttcaaaaccttcaaatatatatatatatatatataaaacccctattaatccctctacacaagaaatttgtccaggagaatatttaaatgccattatacatctcaaaaagaaaacatcattaaaaatttattaaacaataaaataaaaagcataaaaattaaagaaaaagcttaaattctaacttgaaaactgtatactcatttaaaaatgaaattgtgataacatgtcattttattcagctaagatagcttgcaatttatacactgaaataatatttatttagaatttttaattacatggatacatttagagattgaagaacagtgagccatttacaggtagtagatactttgcctctatcagagcacaatcagaaaattacacagccagtgaactggccagaggatgctttattcaatagaattcaatatgatgtctccaatctgacctgtcacaaaaggatttcatgggttttcaaattcacatctattctgataggtggtgttgactaattttcaactttggtaatgtatttgatttgtcctgaaaccatttgaaacatgagaatttcttctttgagtcaattcaggtagaaaagtatttgaatgagctaagggatccatgaaatgagtctacttccctgagcaactcaaagcagacccaaaatcttggacagcgttttctctaaagagagcttgtgactacggctaagggctatgcattgctctatgattcccaaacaaagagaaacactacgagttttaagtgtattctgtccgtttggcatttgggcagcaaatcgctgtaagaggtcaatgtgtggtaatttcatgtgcaaatataatattaaaaatgaggcaactgtctgcataattaccaacaaaatcccttgttattaagggaggggacattatttccttaatcatccagactagttcttcagatggatcatattaactgaacaattatttaacttttcaatttgttgtgactgcatggatggggcctctgggacccatatacaggaacatttatctcagaggaaaaactaattgtgccttgagttttgtactgacaaatcgcattatagtaattttattgtttctaattaaaaattgctgctttactaacaagtgataaaagtttcacaaataacaatgcagactggctccaaataaaaaagagaagaaaatctaggatgacacgcaatactacacacacggaagctttgcacacagttgaacactccctgtttctcaatgtcatttgcatgtccccagctccttcttcagaccttctttggctcctggactcatccttggaccttttcccttctcttatccagatatttttcccacctgtaccctagttttaaataccatctatatgctgctgctgctgctaagtcacatcagtcgtgtccgactctgtgtgaccccatagatggcagcccaccaggctccctcatccctgggattctccaggcaagaacactggagtgggttgccatttccttctccagtgcatgaaagtgaaaagtgaaagtgaagttgctcagtcgtgtccgactcctagcgaccccttggactgcagcctaccaggctcctccatccatgggattttccaggcaagagtactggagtggggtgccatcgccttctccgatctatatgctgatggttcccaaataataatctcgagtcttcacttctctccaaaactctagactcccatatccaactgtttacttgccacctgtacaagcctaaagttgttttcattcattacccatatcagtaggtcttgtgtttcactgataaattttttgaagactctctcacttctcactgtccagctacattatttctccccactctcagctttattgagatataattgacataaaactttgtatgagtttaaggtgtacaatttgatgatttaatacacctatacattgcaaaatgattactacactaaggttacttacatccgtcaccttacatatttacatttttttgtgttaagaacattaagatttattttctcagcaatgttcgagtacataacacagtgtcattaactatagtcatcacactgaatactagatctccagaacttactcatcttatatctagaagtctgtatactttgacaaacatctctcctttttctagacactccaagctactggaaaccaccatactacactctgcttctttgagtaccactttcatagatccaatatatatgtgaaataatacaggctggatcatcgaaaaagcaagagagtgccagaaaaacatctatttctgatttattgactatgtcaaagactttgactgtgtggatcacaataaactgtggaaaattctgaaagagatgggaataccagaccacctgacctgcctcttgagaaacgtgtatggaggtcaggaagcaacagttagaacggacaggaacaaataggttccaa

SEQ ID NO: 49642 - DNA, 786 bp, Bovine  19866881548768
  misc_feature (1)..(1): n is a, c, g, or t
natttattaaattttactcaaaaccgaaagttaaccagtggcaagtaaactttaattagaaactataaaggatcttgttttacgttgcacataaactgcatacggggcagaagttcaaaggctctaagcttacaaagttcaagtctgattactccttgtgacagtacacactgaagtttaattcctaaaaccctcattaaaaataaactcagagaagggaaaatgtagtttctttttaaaactataggcaaaatcgatggtttaaaagaaaacattatatctgctttttatcaaaatacactaaaggaatcatgttctagcttaatgatagcctctgcagtttgacacccacctgctcagctcttaataaattaatagttggaaaggttggaaaggctgatttgaacaaagtcttttatgctagacagtacttgagtaggtgtctctgcaaaatctcatcaggggagttgagtggtgtggcaaaggttccttctgaatggctcattcaggaaccaaatgatccattatctttgcaacagaatttttcctgtaaattatgtgactaatcctcctacagcctgaattttgcccgccagacaccatgttcttgtctggcacagtccccacacagtctactcacgtcttattcaagcccctctactaagcacatgatgtattctaccaaggactagactgtccctttagcactaagtcagtgcagagaaaggagaggcaactccatcactctgtaaaatactaaagaaaagattcttaaaacagtaaagg

SEQ ID NO: 49643 - DNA, 1210 bp, Bovine  19866881671319
  misc_feature (1)..(1): n is a, c, g, or t
ntatggtctgcaagcagatcacgggggcactactcctatgcaccttcaatggaatgcccactgtgtgctgaggaaatctgggaatacacagaatcagaagccagaatgtgacaacaggcttggccaggacttaagaactaagttctgttgtgctaattgactatctcagattaatgggaagtatgtaagttggaaaatgagtcaacttctaactggaatttgatatctgtttctaaaatatatttcatattcttattttatagagaaaagaaatgaaaccgtatttttagaagtaaaatgtgatgtcgcagaagcatcatcagttgagttgcatacacagccggactgtctcttgtagttcggcttctgttgctgacatcaggattgtctcctgaaatgggattttcctgtcgattttggattttttgcatgttgcctagacactccatgggaaaatgcagttacaggaagttgctagtgtgcggctgagcagtgaaagcatctgaaaagattgctcttgtgggatcactggattgtgtccattaagccaagttcttgcccccagaatgctggttctgttatgggcttagctcagaggtaattgactcttgagccccctgaggcaagtcaaggactccctgtggtaaagaacctctttgtctcccctgcattctggggcttggttgtttctactagactgttcacatcggctgtaaattctaaccaccataaaacaagcctctggaaggcccacttgtgcacagccaagagattgccacttaccaaatgcctaaaaatgaagagaaaaaagaaaagaagaggaaatataaacctgaacaaaaataaaaataaagaacttgagcagcattggtgaaatttaggtgggcctggggtattgccagctattttagtgttgggtagaagcatcactcggaaatacctaataagcacacctaataagcttattataagcatattaggtgctacttgaaggaactgcattgtaaagtgaatacataacctcttaataagtgagtctgtcattattgaatgaacctgacggaaggcaccctgtgtgggtagatgaggctgtgagcatgctgttttggaaaagtaagttctaagattatgtagtcctaaacctatttgttggttatgcacagaagtgtgtgtttgtgttatgaaattttcaccaggtaataaactccta

SEQ ID NO: 49644 - DNA, 1186 bp, Bovine  19866881822086
  misc_feature (1)..(1): n is a, c, g, or t
ntcaccagttggaaaatgtaaagggagtgtctgtgccctgggagtagcattgaaattctcatctctcaacttgcttcacaagaaaacaaatcttactgcgtatctttttaaccgtagcctttttttcagcaaagtttgtctgagttcatgtttgtccatttgatttctgtgatcagtcacattgaactttagcacattctagcatacttcttgtatgctttagcaaaatagtagatgtaccatggtgcagtcgggcttacagaaatggagcaggtgtggatgttgctctcagaatgcatccattctgggaaatgaaagacacatgtgtcaaaaactgatcaaaatggactgaggaaagtccaggaggtactgagcaaggattataaaacttagaaacctgaaaaattacttctagctgaccataggaagtaattccatgtcacctgcacagggttgaaaaggtagaaagggttttagactttggaagtgtaaggggaagactgttttctttagaggaaacacataaaataggcaaagagtgggtatatttgggggaattgcaaggagttgtgtctgttagatttcaaggagcctatcgtggaagataaagttggacagttggttggagttagatcatggaagacctttaatactggaataaggaatttgagctttattttctttccttagtttcaaatattaactcaaatggtttaccttagatgtgattattaggtatgattatgcatgagtaccatcatccttttggcagtttgcttgggaacgaaaaaatactgttacacaactgcaacatgggtggtctgggtcaaatggctctttttggctgaaaattttctgcagagggggtgccaaagatatcacataatgctatcactcagacatcagtcatctacatcactacatgcacttatttcctatcactcagatatcagtcatctacatcactacatgcacttattttgattcctccctaggttcagtgatgttaggatttctattccccagctgtttgtttgtttgtttgacccagtgggttgttctgtaatgcctaatactccatgtgcctggcagacgagctagtttgaaagctgagtcattaaggtccttcatctttcttctcaatttcctacttagcattttcccttcatagtgggcactttgtaag

SEQ ID NO: 49645 - DNA, 699 bp, Bovine  19866882189925
  misc_feature (1)..(1): n is a, c, g, or t
ntagaactgggtattgagagtctagtggttcattatattaatacaatattgtggatatagacttttagtatatttagaacagttagataaacagataaagaatatgtgtacatatatacatggagagttttatatatttacaaaaaatattcccgattaaaatttacacgggattggtgatttctcactttacatataaaagatgccttgcagataaattataaaccagaaagattttcaatgtggtcatgggtgactggtagccaatcattaggattatttttgagggtaactttagcatttctgttcaaatgatgcttttaaaaactattactactaccactacttttaaagactactatttttctgagtggaacctatgtcaggagagcaggataaaagcctattaaaaacatattataaaaataataatattgtgtatatatttggattcatttattattttgtttaattttatgtatgtttgaaatgctccatcataaaaactttaaaattaaaaggaagtaacaatgaaagttacaaaacatttagaactgaacaagaattaaaacattttatgtcaaaatacctgatttatttgtttaaatatctagtacacatggaagtacattttataaaacctaaacattatatgaattaaaaaatcaagaaaggttgttatatgaatgaaatgagcta

SEQ ID NO: 49646 - DNA, 1588 bp, Bovine  19866880194292
  misc_feature (1)..(1): n is a, c, g, or t
ntcatgcaaagatgggctcgataaaggacagaaatggtatggacctaacagaagcagaagatattaagaagagatggcaagaatacacagaagaactgtacaaaaaagatcttcatgacccagataatcacgatggtatgaccactgacctagagccagacatactggaatatgaagtcaagtgggccttagaaagcatcactacgaacaaagctagtggaggtgatggaattccagttgagctatttcaaatcctgaaagatgatgctatgaaagtgctacactcaatatgccagcaaatttggaaaactcagcagtggccacaggactggaaaaggtcagttttaattccaatcccaaagaaaggcaatgccaaagaatgctgaaactaccacacaattgcactcatctcacacgctagtaaagtaatgctcaaaattctccaatccaggcttcagcaatatgtgaaccatgaacttcctgatgttcaagctggttttagaaaaggcagaggaaccagagatcaaattgccaacatccactggatcatggaaaaagcaagagagttccagaaaaacgtccttttcctaggttttaatggcgaaaataaaatgttgcaaaatgtgtgttttgcaaccacatcctggtctgatcttcacaggtacaacctgacatgcacagatgtgtatttgattgtgattggattttgagtgtataagccatgcaatgggggagcagggttgcattctgcactttagctggtgtttgtatatctgttatttcttccccaacacaagcttccagagaggaggcagtactctccatgattttattctgcctctggagtctaatctagggcttatcatacagtagatgacccacaattttagaactgaaatgtgttttcatgtgtaaagtcagttctcaagctacacacctcctttaaagcttctgttgtttgccccagcttctcctagcctcctgacgcacacctactctctcacagaacaggtgcagttcagtagaatgtaagcaaatcagctacgaatgtcaaaacaggatttaatcaattattaatttgggagaaccaggagaacaaaaagtaaataccccaatgaggtcatgctatgaaaaatgtgaaagtctcttagacctaatatttaatttagatttactgtctgagttacttcccagcttcccagatgcaagccagaggccatcaggcaagacttgtgatgatactcagcagccatagaggcccaatgtaaaggccaaagaggaaccactccccttgggacaagttcccagagggcagaggctgcaaagcttctccaaagagaccaattagctcaagtgtaggaaccaaagatcctgagccctgacatctggataagtcagcctgccaagtcagggcttggtctgattctgtaggaggctgggctttgaaccagcatcagcatcagactcgtactgctccattctctccaggccagccagaaggggtaggaagcatgggctgaggcgagagggctgaggctgtaacagtatttaggtgtcagggccacagcgaatgccaaaggggagaggg

SEQ ID NO: 49647 - DNA, 2221 bp, Bovine  19866880668327
  misc_feature (1)..(1): n is a, c, g, or t
nctgtggactgtagcccgccaaactcctctgtccatgtgatttcccaggcaagaatactgtggtgggttgccatttccttctccaggggatcttccttgatcccaggagttgaatcgtgtttcctgcttggcaggcagattctttagcattgagccacctgggaagcctatgtcatgcattacgaagtcctaaacttatttttggatagtcttctgtttttctccagcatgactctcctctgttagcagaaatagtgtcaagtgctatgtgtatctgcatgtacatgtctctctctcttttctttctcaccacacaaacatactcacagacaaatttcaaaaagcataagtgttaattaatggggatagagcattgttcaagctgtcacaatgtgtgatgaaggtaccgaaaatgctgtaaaccatcagcgttaattccattctccaggagagatggaaaattcttgcatgcaggggagcttgattactttacttcagtctcagttgcacaccaggttttgtgagctgtggcagggttgggtagtcccagcttgctgaagctgcccccatgtatcaaatgagataatgcaggtatacttggtgtcttttaaagtgctgaataagggttatcctttcaccctagtttcccttaatattttgaatttgttatatatgaattcatctaaggtattatagaaacttccctggtggctcatatggtaaagaatctgcctgaaatgcaggagatctggttcaatccctgggtcagaaagatcccctgaagaaggaaatggcaacccactccagtattcttgcctggagaattccatggccagaggagctttggtgggctatagtctacggggtcacaaagagtaggtatgagtgggtagtagcattctgaatggtctagacatttcttgatctgcccagaatcaatcagcaatgctaaagtgaggggtgggcatgaataatagtgatcccagaagcaatatattaaaatatacacagagatcatggtggataattcccaggagcatgccaggagaatctctgcctccttgtgagagttgtctatccataaatcgagagtgacattgtttggtggcctctatggctcagccacactgcaaagctgatgactaagatttgccttcaccaggttccttaatctttgaggaagggcaataccatttgaagcccagttctgcttcccagctcatcactcgatttgaaagtcgtccttctgagctctcattccatttgtgatcacatgtcatccagactccctctattcccttttctttatttactattccttggtcttccccaatctttgaaaactgagggaatggttgagttgccctggcaacctcctacccccaccacttctctgtttctcaacgatttttctacattttaataaaatcactatttatggtgtgcaaagcttcattcccctccactgcaactcttcaagggaggtttcctttcttaccagaatactgctgctactgctgctaagtcacttcagtcgtgtccgactctgtgtgaccccatagatggcagcccaccaggcttccccgtacctgggattctccaggcaagaacacttggaggtgggttgccatttctttctccaacacatgaaagtgaaaagtgaaagcgaagtcgctcagtcgtatctgactcttagcgaccccatggactgcagcctaccaggctcctccatccatgggattttctaggcaagagtactggagtggggtgccattaccttcgccggaccagaatactaatgatgactaaaacctggctttccagtgaggctgcaaggaggccctacagagtgatcagatttgtgtttgtgttcaggatcatttgtgttcaggatcagggtttgacttgtaaacatgaaggatcacagttgacagggctgcaaacccatccttggaaaatataccacgctggaaacgtataaaatacacattggatatggctggaggggaggaggcatgaagtgaggtgttcttacctttgttatcttgacagagggaactgaactcctgggccagcctgttaggaagagccgggaggtagcatgaactgaggggagaacacaagggcttcatcacatcctagtctatgcgatcttggtgttctcacactatgtacgctgtagagctgttgtgaggggcagagaatacatacacctggcgtt

SEQ ID NO: 49648 - DNA, 2870 bp, Bovine  19866881001211
  misc_feature (1)..(1): n is a, c, g, or t
natgtgcccttgtgtcctttacctttgtataccactctttcaaatgtagcatttcatttgaaactgaagttcaatacctctaaaatacctacatattttatcttcttttaacaataggagaaattgaggctcagagaggctcaccaaatagcatgctgcttggacccagatgggtctgattctgtgagccccactttctccacaacacacccaattccctgacgagggtttcaggtgcaaaactcggggctcagagcactctcacattctacatctctctgtgcctcacgctggcagcccagcgtgcattgctatttccctttggcagatgagaaaactggggcccagagacaaagaaacttgccgaggtcatgcagctgtttggatggagagctgaactggaagcagagctactcaaagcgcttgtacacctgctgtgtcacaccctcctggaggcaggaaggggactcaccaagacctcatgtgctccctgacctgccaaggccactgagcagcaggttacagagccaggattggaaccaggtcttggtcttggggttagagggatttgatcaggcagccttgctgctgagcgtaatgcaggccccaacctgatcagaaagtaaaatggggtgtcttttacatgctaagcattgcgctgggtgctttatatacactgcgtacagtcttgggagacagcatcacttccttttcacaaatgagactgaagttcagagagagtaggtaacttgctcagagtgacacagcaagaagtgctgagatgggaactggagctgccgctcaggcttcatcactggcatccttcggttctcagcttagatggtgccatcacaggcaggtctttcccaaacagccccatctaagccatgctccttatattcttcgtgtctgcactctatcttcttctgagcatttttcataatcagcagttcatttcatttatttgtccccctgtttattttctgactctcccactagaatgtaagctccagaagggctgagacgatgtctgtctagtttcttgtagaaccctagaacagagcctggcccacaacagacgctcatacatgctggttgaatgaatgaatgaagactctcagcactggcccaagtacagtgagcctggctgagttaggcgtgtgtacaggaagctccactggcccagcatggttgggggagcatggattctagtgtcagtcagacctgggttctaacctcaatatttacttgctgtgtgactttgggcaagctatagtccttggtttcctcattggttaaatggacacagccacccttgctttcaaagactgctgtcagcatgaaataagatcagaaagactgaggatccacaaaggatcctggcacatcccagctccagcacatagcacctcccatccccctccctgctaacaacagaccctaggactccaggctgggaatcatccaaaacctcacttgcattaagatgcagcctcagagcctgttactgctcccctcactccccccaccccaccctctatgcatgcagcagccaatttcaaactatgtaaatatgccaggctgcctcctcagcaagggaacagctatacttagtgcaatttgcatgtattttaagctgacttgttccaggcaaagaagccgattcatgaatttaataacattcatagattcccagaatgtcagcactgtgagagacgtcagagatcatctagcccagcccctcatttggcagaggaggatggccagggcagtggtatgtccaaggtcacaacttggcttggagcccaactccagggttcttttcaggcccatctgtagttcactctactcgcctcccaggcgctcatctaagtgtgaatttgcagcctgcagtccctcatgccgcctggaacacctcagctccaggggagacatctgccctcccaggcagccttgaaggcagaggtgagggtatggatgtgggtctggggcaagatggggatcagctgcatgcagaggacaaaacagcccagtgggtacccagtgatgaatctttccctgcctggtcacagacagacccgtagaacaaaatcccgctccccttaacagcccattaaagtgatgcattaggtcatccagggatttacctagagcagagttttaactctaattgacagcgattgcatctgcctgcccggcgagccttctcccttctggtaactgcacaattctttgctttatgggaataggcccccacctccaagggctcatgggggctgtcagtcaggggaccctcaggccctgccacagggctgggcatgtgacccaaacccaatctggttagaggtccaagggtggtcatgtgacccaaatagtcctttggaaaaatgtgatgcttgctcagggagaggcttgtcgctcttctctctgaagcaagcggcgggatgagaacagcagctagctttgccaccaggaggaggaagcctgcctgagaaagaagccacagaatgagaaagagggcccaagacgagagacactatgctgatgccattgttgacaagtgcctgggtgcacacatgcctgaagcccagcacaaccccctgggcttccttttcttctcaagctgatttgggttgcatttcttcactggcatctgaaataatcgtgtcttagtcactaatctgcagcatctctgataataaaccccatgaggtgaatcctgtcacgtaaaattgtacttctttgagggaagggtcctaaacctaccttcttaagctttatgagagtgtctccattcacattaaaggttttggagcctttctgtgcccagatgctcttacataaagtcattcagttaccctaacaatttt

SEQ ID NO: 49649 - DNA, 1043 bp, Bovine  19866881104290
  misc_feature (1)..(1): n is a, c, g, or t
ntttcacttttcactttcatgcattggagaaggaaatggcaacccactccagtgttcttgcctggagaatcccagggatggggtagcctattgggctgccgtctgtggggttgcacagagttgaacacgactgaagcgacttatcagcagcagcctcaaaaggtagctctgatgttcaggtcaatttccccattcataggatagaacctcaacttatctcaaaaagcaactacgatatttggcaaaactaatacaattatgtaaagtttaaaaataaaataaaatttaaaagaaaaaaaaagagaaaaaaaaaaagcaactatgcatataatccattatcatagtttttacatgaaaaaaaaaagtgaatgctaaaatttattagtatttttttctggttgtccaattttcaagagatgtaacaaacatattttaaacaaccattgatttaactatggccttggtttttacttttgtaacaatatctcttctcacattctatgttgattgttatgctaaatgtttggcagtttactcatcatataaattggtcttcatgtagctagccaaaattatttctgacagccttttatatcaagcagaactacaatagtctgtttttggagtccaaggctcattcaggaaaatagataaatatagcaatttacaagggtccaacatatttattgtgaaattttttattcttagcacataccatattaatacttttaagctatacagatttatattagaaagaactggaaatatttaatcagggtttttaatctcatgagcatcttttaaaacatcatgcagaaatttgatggcaatgagctttaaaaatgactatcagcagtgaggattattataatattaattgaagtcccactccttcagcttaatacagttctaagggcaaaaaaaagaccaaagtcagaccacaaaagaaaagaaatcactgcttggtaatattatttcataagccagataaagatagacctaaaagacacgttcatctcctgccaaagacagcttcttcggcc

SEQ ID NO: 49650 - DNA, 1220 bp, Bovine  19866881128277
  misc_feature (1)..(1): n is a, c, g, or t
naaatgacagaactcagtgatagactgaatatattcacttctctttgaattactacattaatagatattgatacactgagactacttggcaataaatcttccttttaaaaggctttaaaaaaattaaaatgatttataaatgtttatgctgcacatatgaatgaaaacaaatattttggaaattcattaattgtcagaaaatgaattagactttagatctacagataaaaagcatatacagataaaaatcatataggacaggatataacttatgaaaaggtgaagtgtgtgcatgtaataaattaatcccatgggcttctctttcaaattaaatgctttaatttaaggaaatgtttaaatgtataaaaataagaaccttaagattcttaaaggaaaggagtttaaaataaacaacagaaaacaactgaaagagctgtgctgatggccctataacacacaggcgcaatgctgactttcattctaaagaggtaatggggaatcgccatagagattccccagagcctttatactctcaaggaagaggtgaggggaggttgggggctcatcagaagggaaaaagtatctctccatttcctaccagcaccatgggggctatgatccctgaatctgcaaagtcagagccctgcatacacagatttattcctaacattctttagataggatgaaatgtgatcttttgtccacttgaatgctatctgactaacaatcagaaatcccaagatttattttttggacaagagttcctattctgcactgtttaggttgcagcaataataaaatggctcccaagaaaatgatggagcctctttttcagatcacttctttaaagcatttgatggttaatagtgcaaaatctgaaatataagaaaaaacacatccacgaccaaaaaaaaaagagaagagaaaaaccacagaaaagtttttttttgcaaaatgctttttctttacaatgtcaaagacaaaattcattcatagcatcactgaaaacaaagacaaatatctgaaatgctctaacctgtctaaatcatttaaagaatactattatctagtatatggcaattgccattttcatgcaggaggcttagggctgagtcacaaccatacggtttgggctctgcgtggttttctctcctttctgtcttctcgatttgctttctctcaaagactatcaaccatttacagcaggtattttaaaaaaa

SEQ ID NO: 49651 - DNA, 4317 bp, Bovine  19866881229633
  misc_feature (1)..(1): n is a, c, g, or t
nctgtccgtggctagcttggaacttgcctaattagtgagcttgccttccattttaggttctggagttctagaaccaagtagaaagaatttcctacttcttgtggtcctgcaaccatggcttgttatactccagtctcatttgcttactctcatttccaacatgcctgggtgttcacatttctttaagtttgcatattctgtttgaaatgctgttacccctagtccccataccaaattcatccttccctgaaaatgaacctgagcaatcatctctcccagggagtcttgggcacactcctaaactcctcctacattttgtgcacaggactgttccattatagaaaagattatattgtattgctgtgtatattgctgtgactgtcctcatgctactctacaaataccacatcagttatccttgtgtctcctgtgcttagcacatgcctagctcctggtctgttgcaaggtaggattgaggaaggtgaacagacttcacatgctagtctgaagccccctggacagtcaaaaatcaatctgaagtcgtaagaagctaaagaccaacagagtgaggtttccagtgtgtgcctcttgtccattaccaagtgtgaggtcacttcggtagtagtagatgtgaaaggtgaaaggctgggctttgactaattccttgctggtttaaatgtgtcaaatccttttatttcaaggctaaatactcttaattggcccacagaggaaatcatgctacagttcagcctctgctctaatttaaccacagtttcgaaacagtgcagattctagtggagattgagaaagcaaaactttgtttagccagcagctacgattctgttttgttcagttctgttccctggcaagcatatctgatatttcttatctcccaagggagttccttaagggcaagactgtttgcaggacaaatacttccctttctattatccccccacacccccacctcccacccttaccaggcatagtacctggccctgctgctgctgctaagtcgcttcagtcatgtccaactctgtgcaaccccacagacggcagcctactaggctctgccatccctgggattctccaggcaagaacactggagtgggttgccatttccttctccaatgcatgaaagtgaaagtgaagtcactcagtcgtgtctgactctccgtgacctcatggaccgcagcctaccttcgtccatgggactttccaggccctaggatgtgcttaacatctgattattaaatgaattcattacaaagtctgatctttattttgaaattcaaaggtcaatagcccctgagatgcttatagaatctatagccctttgccccattcccgtgtctcattattaggtggatgagtgtggttctacagaaatttcctttccattccctgtatgattcttgcagatcttggaaggagaaagctttcatctagagttccttgtggtaatctgaaccccaacgactatagtggttacagaaagccaggaccaaagcttggctatcactttctgagtccataatactgcagttattagttatggggcccaaattagaaatccttgcaatattgttttgttttccaagtcatccagatttggtacatgtcatattatatttatcaatattcttgttttgaatactaagggaaagtgttagttgctcagtcatgtccgactctttgagactccatggactgtagcctgccaggctcctctgtccatggaattctccaggcaagaacactggagtgggtagccattcccttctccaggggatcttcctgaccaagggatcaaacccaggtttctcacactgcaggtagattctttactgtctgagtcaccagggaagcccattgaatactaaggataagtttatttgggggaatcctgaggatcacagtgctcttcctgctcttttaaaacaactaatctatgcagctcttagcaatgtctatcttttacctctttttttttttgtataataaagtttcattaaagtataaaggagatagagaaagcttctgacataggcatcagaagggggtagaaagagtacccctatcttttacctcttgaaacacaggttctgaacatgtcctgtgtccttgactctgagctgggtgttaagattaatcacagtccttctgtttagtgtctctgaggagtcactaactttacttttgaaaatttctcaaattaagaagatctgcatctcccagttgccttttagaatagttctagctgttggttctctgctcactttaaaattacaagaccaatcttctaaaaaccagatcaagtaggaaatcttccagtttcatttcacataaatggctctggtcatcggtaatggccagacagagaagttcaagttctgaagcaatttaagcacatgaaaaccatgacccatcaaataattggaacccagttaactgaaactctttctgggcagattgccttttaaaggccactagaatcttgcttataattttactacctgcagtaaacatttgcaaaagcttcaggaaagtttacagtctactagagagatacacagagactcctaagaagataccttagcccacataatatggttcagttctctgctttcaagccaaattaaaatgtcaccaatcttacctttaagcaggcacttttcctctcacctttagacagaattggtgattatcaatgaagcgccaaaacaagactggtaacacagatgtcagggctatttgtgtaaaaggagaagtgaagggggaataaatgtgatcacactctgacgacaggaagcccagatgaggagagggaggaagtgaggctgggcccaccctctttaaccacagaaatgcaatccttcccctgtggcttttcagacacctatctcacaactcacccaaatatctacaccagtttccatgaaaaacaggaaaactcgaagaccaagttgattcaggcaggaatctgtgagaattggtgggttgtggagtgatctgacattgatttttgcctagaaaaggacaacgtttcttaatcaaaatgacatctcagaattacctgtggatctgatcaagaataaatatacctgaccccaccatactgattcagtcccagttaggtagatagacaggaatggaacccaagaatcaatattttgagaagtttctaggaatgaaaattaggaatgtctcctaagccacttcaccttctcctcattcttcctctggccaccttctggaagctttgtagtctccagtttgattgagtcactactttcagacttccatgtctcagaagctagactgcccttacggaagtgtattgtcaggggcagactccaaggcacagtccaagggcactagtagaattgatttgattagtagagagagccccagattcagagtcccaagatctgggtttcagtcccagctttattagtgttaactgtgagatactgaggaaatctcaacctctctacttcagcttattaacagtaacatccaataattactgtcttccttcaccctaagactttaaaattctagtataacttctgagcggggttggcttatggggaaaactgagttagaagaaaagaagaaaagattctttactgcagactgtgtcttatcagtctttaatattctgtgtgtgtacatgtgcttagacccgtgtgtctgattctttgtgaccccaaggagcccaccagcctcctctgtccatagggattctgcaggaaagaacagtggactgcgttgctataccctccttcaggggatcttcccaacccagggattgagcccaggtctcctgcattgcaggtggattctttaccatctgagccaccagggaagcccaagaatgctggagttggtagcctatccattctccaggggatctccccaacccaggaatcaaactggggtctcctccattgcaggcagattctttaccagctgagctaccatggaagcccaatattctcttaacattctctaaatatgtagatttccccaaatttgcttgatcatataacagtgtgtgtgtatgtgggagagagaaagagggagagagagatttctcaggaaactgtttttcagtgtaactatacttcaggaaatgctgttacaaactttcctctcttcagctggcatcgctctgagaaatcactgcccctcacctgggactgctgtcatactgacaggccactgtagtggagtaattgaggaaagacctcttgatggctttcattactatctctctgggtcaaagatgcacatccctatgtacaacctggt

SEQ ID NO: 49652 - DNA, 774 bp, Bovine  19866881463825
  misc_feature (1)..(1): n is a, c, g, or t
ntttttatcatcctttgaatgtatttttcttcaagtccttaagattttaaatcacatatttgggacatttgccagatgcctttctgaagctctttgacatttattttggttactgtttgcatatttgattctgttgttttataattaatctgcaggacattcaaagatacttttgtaaatacgtggattaatgtcagctctttagttttttggaagcttcatggtcttacatatctgatgatatttttattgtacaaaagcattttttataagcttaaaattatatgattttctatggatacttggatttttcttgagttacctctttcctgctgtaaaagctttcagtaatgtaatacagaatgttgattgctttaaaagtgtttcttttaattcatcagggtataaaatgtaaaagccaaacttaatcttataatacaaaggagaaatctggaagatatctgtgatagtaggcattaagtttatttagatttgaactttatatgtaaagagaaaaccaggagtcagaatggtacagttgaggtacaaagaccttgatagagttagagaaagaagatagttacagagacctaggttcatgttctagttcatcacttagtatagttaaaacatttggttaaaagctgttcactgagtgcctatggtgtgactgactttactaaatggagagactgattaaagaataggctatggaccatgcccatgaaaaacattaacatctaggggggaattataatacacttgttaataata

SEQ ID NO: 49653 - DNA, 1295 bp, Bovine  19866881517747
  misc_feature (1)..(1): n is a, c, g, or t
nttagtcaatttggcttctttggggttccacagactgttgctgtgctcctccataaatgtacatatccgagacattcttttatcaccagagtctggttttgctttgggcaggctgacttctgaagctgaaggctacggtggcatttgggcatatccaggaaagatctgacaaacagatagatgtttttgaccccacagagtcccacagaaacttgcttccacagagaggatggcccaggctggatattctcaaacttctctccactcagcatatcaactattcatcctgtccttaaatactcctctgtgatgaaatgctaagtgacacattgaatattcatcacaatgcacctagcacagggccaagggtagaattaagcagaacaaatgtgatttctgattatatctgtttaattctaggcactgaacaccctcaggcagctaggactccatcccattctaaaaggaagccaggaaagtaggttccacaacattcctttatgtgctgccaaactgtcatgagagtcctggcaagaaattctttccctttttgctttcttttttaacttttaaagactggagtattatttacatgcatagttgtatgcacccaagtaaccaccacttgactcaagatacagaacattctagccagcccagaagatttcttcatccttttttccagtcaatactactactctctgataccattagtttgacaagtaaccattttttcgtaacattaacttagagtcttctttctgtcatttctgttcacttcctctcatttttaatttgaaggcaaaggccaaggagttatctactgttcattgacctgaagttcactagattggaagcagaggaaacaaaaagctcttggacaggttggaagagagatggtgctggtttggttggaagcaggaggctggaaagtagaaaaggaggagagagacttgtggaatgtatttgggaggtagaggtgacaggattggatgtgacagcaagagaaagggtggaatcaggcataatctatgggtttttacatgactttcctgttggagggtgattccatttgttgaagcaaggaagatggcaaaggagcagagtgatatcaagagctctgtttggacttgatatcttgagacacatgctaggtatccaaatgtaaagacaaagtatctagcattcagggggagagatcaggcctggagagagaggtgtatctgacaatcatcagcttgttgatggatttcaaagcctgggatagcatagaattacccaggtgaacagagcaa

SEQ ID NO: 49654 - DNA, 1778 bp, Bovine  19866880716151
  misc_feature (1)..(1): n is a, c, g, or t
natgaatatgtaggccagaaattcagacaaaagcacttcaagggtcttagaacacagctgtccaggagaacttttgttaggataggaatgtgctcctccgtccagtctggtggccacagtcatatatgtaccagtcacagtcagccgtttaaaattttcattgtaattatttttcattttaataaccaccagtggctaatggcttggacagcacaggacaagaaaacaatagattttgacccattttcatgtgtcagaaaaaaaaaaaaaaaaaaaaacagccaaagatcacgagatgttgtggatggctgatttggaactaagagaatgtctgaagagctcttttgtggaatacaatcagatttataccttgttgttccaaaggaaaaaaataagaccacttgagagtaattgcagggcaacgcatttaggcacagcataaaatacttccttacagttagttatatgaaattataatcagatgtcttaaaatgtaaggacatcccccagctctgagagtactcaaggtcaggtttggtgacagtgtgacagggacctacagtttccttgtcaataaaatgaagatgataatacttgtcccaccctcctccccacaggccagtaggtgcactaagaattagatgaaatactgtttttataagtgctctgaaactaccaagacattttattaagcatgactaatactaggttaaagacagcgattaaaggattttatgtacttggagtcaccttaaggctgcttgttcggaaacaagcaagaagattctctttaggatcctgtaccaaaacctcacagttttgacagtaaatgtgcctcccccgtgattatggtaaatggcatctatcattcagttgttgatcttaaattcttcagtgattatttcacccagaaaggatgctgaatttggcactgctgcctttccaaagacccagaaaattcctgaaaataagcaaatggatgccctcacagtacttttttcatggtaaatgccctcatcacagaaacacctggttcaggcttgtagcatccatcagccttataccctgctggttcctcctattggatgtaacagattcatggaaaaaggagccttgtacctaggtaatgtcacagcagtggcctgaaattgcaaagaatttctaccagccttgtgaaccagggcctggcctggaatgcattggccctgcttatccttccacggagacgtgggaggggcagaaccgggatgtggagctcagccgcccagtggtggggatcagcctcccataaagaattcccacgaaattcattagccgcattttagcaccagagctggcacctcttgcatcacaggagtgatggttcagaaagataatgatggccctcaggtcattattgatagaccctgctttcttttttaagcaggaggacatttccttgtccttttctcttgttaaaatggtaagagcacgtcactctcattaggatgtagccccccccagccttcaaggacatgaggggttttccttccttttctgctctcattttccaggtcatctcattcctacatcttgagcagacaattatgtactaataaaagctacgaataaggaaagctagacaactcccaacttacaccctggcattaggtccttctcttctgtatccttctctggagagtaatgatacccacctggacacaagccagggaattaaacttcagccccgattcacagacggctgccttcgttcatggcgtgtggagcacgtaaacatt

SEQ ID NO: 49655 - DNA, 1375 bp, Bovine  19866880785330
  misc_feature (1)..(1): n is a, c, g, or t
nctatttctttcgagctgaatcatgactactgtctgatgaaccttcagagggacacagaacagcacaaaagccatctaaacattgattaaaatcagttgtgtgtttggtacatatatgtatatacactaacacattctcacccttctctctctctctctcttttttttaagggaaactaattatggaagcctggctcgaggctgtaattttgtagaagatgccagcatagttgttttcaagttaaaaaaaagttgcacttttgtactcagagacctcttgttttaatttatgcaaagcttaaaacattttgttaggcctgagtgagaccatctgtgcaagaaataaaggatgcctaagggtaaaataggcaagaatagtaatgctgaatgtgtggagggcggcaggcagcctacaggctttgcaactactgctgtgacctttactactttagagaagaaacaagagtaatttccatatattggctcctctagaaaaagcctggcaatcctcccctcttgctctttctctttttcctcattccttaataataagaagttggcaaggcagaccttacaaagaaaactacagccagtttgagaatcatgctttcacacacacacacacacacacacacacacacacacacacacacacacacacgagtgagacaatctgaggggaaagagactagggataagaaatcaggatgtatgagatgaactcagaaggaacatgataactatctcaattactggaggagttataaagtagaaggaaggaatgaagaaaggtattacatgagggaatactggtatgtcaggcacttccaaagggcatccatatttaattttctttaatgtgaaaatgttgcctgattttataaccccagaaagtaaaagagggacaaacagaaaagacatgagacagaaggggaagtacggatagaaggaggtcggtatggaagtgcagtagaggagaaagggaaccaaagacagaactggtgacctccgaagacaacagactggcagaccctggcaatgctctagtcctgactggatgactacttgccttggagcctgtctgaaagaatggggtacgagtttcacactcttcccaactgcaaaatcttggtctatgaagtgaggaggtttacagggtgggtgagaaccactggcgccatctgtggtggaaatcggggcagtgggggctgtgtcgggtctctttaaccaaagacacctgcagcacctacacttacactgtgtctgccacgactcccctcctaagtgccagcctcgggagagaagaagggtgctgtccttgctgagctaccctgaggctccagaccaacaggtctagactaagggctgtacagca

SEQ ID NO: 49656 - DNA, 1094 bp, Bovine  19866880812994
  misc_feature (1)..(1): n is a, c, g, or t
nttctaaaatattctgaagcacaacacatgcacacatgctgaagtgtttctggagatctttgctggcagatgagtttctcctgtcattcgttctttaaaaaaaaaaaaaaatactgagtgcctccaaagggctgggaaatacaccaggctaagagaacacagagacaggagcatgaaacagttcctgcccgcaaggacattcctgtctacatggaggaagagccgagtaaatgcacacatacaaagctctggggatgataagctctataccctgcttggccaaggataccaggagtgaggagggtacgtgagcccttatgaaggtgatcaggcaattaatcagatcatgggtgagtaagaacttgccagaggaagcttgttacagaaggcaggaagcgccgggtggagccccacatggctgggaggaacagggacccagtgaggagccctcagggactggcaagggagggagggggcacaggtggctggagaaaatctgagtggcagtacaatatacatggaagacttccctagtgatcccagtggttaagaatctgccttccaattcagggtacgtgggtttgatccctgggcagggaacttaagagcccacatgcatgtaactactgacctcaaggactctggagcctgcagcctgtgtgccacaagtagggagtccactgcacaactaagacctgacacagccaaataaatatttaaaataaacgagtattcacggcaagtagatggggaaaggtggaaacagtgacaggctttattttcttgggctctaagatcactgcggacggtgactgcagccacaaaattaaaagagtcatagtttttcctgatccctggaagaaaagctatgacagacctagacagcatattaaaaagcagagacatcactttacaacaaaggtccataaagtcaaagctatggtttttccagtagtcatctatggatgtgagaattggaccataaagaaggctgagtgccaaagaacagatgccttcaaattgtggtgttggagaagactcttgagagtcccttggactacaaggagataaaatcagtcctaaagaaaatcaac

SEQ ID NO: 49657 - DNA, 1681 bp, Bovine  19866880827819
  misc_feature (1)..(1): n is a, c, g, or t
ncttacgagtaatgggggcccaaatgattttggaaagttcagacgtactggactccctgcagaaatgaattcagccctgaacatattgatgcagaacctgaaatgaggctgctccggtgggactaagagaattgtgatctctgcaagaaatgagtgggtagtagaattaaagatcagatagatgttcggctcaagggcagtctcaactctgaagttcatcacagcaatttaatcaggctccaatgagtgttgcccagaaaagaatcagccttgtgtgtgacaggaaatagagtgtatttaagagtcttttatttctgctaattctgtgtgcagaggcttcccagatatatacgaagatgagggaatggctacatttgattggtgatggcactttggtttaccttggttcagaaaatgaaatctggagaagatttacacaaggtcatggtcttgtccagaaggagcatgccacatcaaaagtttcagttttaaaattttcacagattaaactggccaaggaccatctttggctggagccatctgttgcctgctctcctgttttgaaactgtttttatgtaaaatatttgtgtatcttcagagagagctgtatagcatagtggtaaagaacttgagctttggaggaaggcacacctggccttgaataccatctcttccacttgctagctgtgtgaccttgagcaagttacatcaactgtcagaccggagtttctttccctgtgaaatgagaatgataactcccacttcacaaaattatggtgagacataaattaaatgaagcaatatatattaattgctttatcatagtgctgcacataatacgtgctcgataaatggtagttccttgaagctgaaggattctcatcatcttcttcctccttcatttccctcttaggtaccctctttgtgagccagagagatcactgttttaggcaccatcaagaaaaccttttatgggatgtgtggattcagaaatggggaaagagagcagagtataaagcctctggaggcttgggcagctgattgattgtcaagagcccaaaggaaaactcaccctccccctaactcctggaagtgcgttatattgacacataattagccaagaaacatttggggagtcatgttatggttttatacatatgacaagaagaatctgtttttcttctgtgttactcaccagctcttaactttgtttactcggtaatgcatacgtatttttgtctgactgataaaatttgaaaataatatattaaatatattaggacttttcttctccactttaggggtctgtcagagtgtgtctctgtgtcttaatattcctatctgtattcttatatttatatatctgtgtatatatgtgtgtgcgtgtaaagagagaaagaggcagagagaatgaatgagtgaatgaatgagaactgagagccagattatcagctttattgatgtctgagtaaacacccaataatttataaaaggcagggcactcaggtgaaaactggattggagaaggctaccaagtatcctcttaaagtgaagcctcctaagcttctatcttgggacccacagggacgtgcctgcacctgcagtccatttactagccagctgcaggatccaggagcacacaccagcctcaactgtgccgcacctgcagtccagagacat

SEQ ID NO: 49658 - DNA, 2196 bp, Bovine  19866880889902
  misc_feature (1)..(1): n is a, c, g, or t
naaagctgctgtggtgagagcaaggctgattcctttaaaaaaggtaatatggaaaggctgtcttttaatagaaattttgggtttgctgatttaaagcagcaacatagttgcattctagagattttagaaaatgtcaaagaaaaaattgcacttataatacaactgagaggtgatcactcttaccattttaggatataagcactttagtcttccttctctctgcatctcacataaactttcaaggtcattaaaaattttccatagcttgatttttaatgactgcacagtatcctgttatattgataatgtcattatttgtctaacttgtttttaagtatttgagttatttattattatgaaaaatgttgtagtgattatgtttttgaatacatatctccttgtgaaattgttcagtaaaagacgaggcactcttttcaaacggtgctcctggttgtcacgtttcacttcagtgtcccagtttatgttgccatcagtgacaaaggaaggtgcccactgaagagtcagtgctttccctgtgtttaaaagacatctcaccatataacagtcagtccttatgtatgacttataacaatgttcatccacatctttgcattcataaaaataatgaatttggattctctccaattttcatcttagtaaaaaggcacaggttccataagaaagtctgcttggaattgtattgagtagagaaatattctttaatttcttcagtttgtgacacacaaacattaaaaattggttaaaatttttaataatgcagagatttgggtagtataacttaaaaatcaagccacctatgctcatcttcttagagatgaccctctgcaagaaagacagactttaacctatactgtgcaaacatagagcaagtttctagttttctaccttttcatactgctaaaacctcagaaaatatgttgtaagtccactggacatattgtcagattttgggatattcgtaataaaagagtcacagtgtaagtgtaaaaccagtaagcagaagagcactgactacataatgaaggattcaggatggagaaaataattctatcagacaacctaggcccaaagaagcaaatgagcacgaaacttaggctaagtttcttacagcttgtacaaaacatgggaattcatggtttatttttcccctttatagcttgcattgtatcatgtactgaaagaagatactaaagtttatcagaaccaagaaatgtttctttgtcactaaacattgagaagaagttgtaaggagacttaaaacaacagacaacagatagtataattcacaggacttgcagagagaaagagagctagggaaggaagaaagaaaggaaggaggcggagagagagatgggtgatccttgttcactattttgtctgtcaatgtgagctcaaggcttaaagttagacactaggttgtgggtatttgaagacattgctcagagtagctggacctaccaggtgtgtatgtctgtggaggtttgattagatatgagatagagcctggaaaaatctaccgcatgatcctgagactggtgatgctcaaacctacgtccatcagggacttccttggtggtccagtggctgactctgtgctcccagtaaaaggggtccaggttcaatccctggtcagggaactagatcccaggctctgctagtaagagtttgcttgccaccactaaagatctcgcatgcctcaactaagacccagcacagccaaataaataagtagaaaatatatatgtgtgtatatatatatataaacacttacctctatcaaaacatgtacctccatcaaaacacacttttcctatgagctaagactgagctatttcaccatcaaatgactgctgccatttttccactgaaagattggggaaaaaaagaacaagtaaatgagtaaaattattttaggtatgtgtttttctaatacatatttatggtaagccatgacttcttacgtaatcaggtaacaaataccaaacgaaacaactgttaactctggattaaaaaaaaaaaagaagaagcacttgttttgaggaagacactatctttcatttgctttttaaaatatgtaatataatcatgtattttctgagtaaaattgttccaatttaaataacaaacatattaggtgttaagaatattccataaccataaacgcagaggagcaca

SEQ ID NO: 49659 - DNA, 1879 bp, Bovine  19866881018899
  misc_feature (1)..(1): n is a, c, g, or t
ntatactctgtttgatattaagacaacataaccgtcaacatcttgttaattcttagaaacataagagggaaaaaaaattaagatcaaagaacagaaacagaagtctgtaactatcccttatcctctcccagaaataccttctggcttttccttacccctggtactggtacttgcaatgtagatagtaagccattcctctgacacctgttccatctctgtatctttatcctctaacatgtagacacattcctcctaaaatggtcaactgctcaaggaaaagaaaatattctctcacattgctcacattttcatgtatagatccttctcttctgtggtggggctttaaataagtcccacagccaaaaacttttgtataaagaaacattttggaaaactggccaatcttagtaaaaagcacaaataagatggcattaaaaaaaaaacaaaaaacacccatgagaacaacgataacaacaacaaaaagtaagtctattctgatcagcagcaagaatgcaaacattcacaagtgaaccagaggttcaaacacaaagagggaacatctccaggaagagttttttgtcacaatatcttatgaatgcttctccccttccaacataatagaatttgggacaagagacagcaccattgccaactgcatcaaattactagtggaaaaaggcaagtagatgtgtctttggttctacacagttttgaaaacttcaagacaagaataaattgcatgaccccctggtaacttccactagaacttataggaacaaattgtttgcctcaagctgggtggaatatacattcaaattcaggctcttgaaggaaattattaagtagagtcatattagctttctctgaagcatactcgttttcagtattgccactatatagaccaattatgatacctttccatgctgagaaatgattgttctgctaacacagttctggtaagaatcaaaagcactacatttttaaccttgggggatttttgttattgttgctcccttgccagttccttcaaatggaaaacatcttccattaatctaaatgcaaaatttgtttcggctttccaaagttacttgaaaaatgttaagcacaaagcaataaagtttttatgctcttaagaccactaatgctttgagcttcatattcattttgaagaaatgaacattttatggttcacagaggaatagctacatgaataatatctgcgattataatgcatctagcagaaaaagattaagtttatgtaaactatttaatcagacgtgaaattttctctagaggataaaaattctgaccttatttaagtttactttaaaaataccagtatcatgtttctaccaagaggacccaccaatttttccatttgtgtaatataaatattcattacagaaaaaaacttaacaagatgtactgtagtgacccaaggatgttacaataaacagtccaatataagacagagatcaaacgagaagaactccaacatgctatgtggcccaaaatactcagttgttaaactctaactgatggacaaccattttaaggtggctaccactgctgaagagtaaacggctgcatatgtcatgataaaatctttatgatgtatttttattaaatatggaactaatcttttttaatgcagtttatgtatatttgtcaagttaatttatatggaagattccaaacttgataaatttaataaatcatctatccttatgatacatgtccacagacataaatatcacagtagggtacatggaccccacatctgaccctcagtgaccaagaattgtcctcattataaatgcaggggctaacactgtaacactgtagatggggaaagaatggaaacagtgacatactattt

SEQ ID NO: 49660 - DNA, 1768 bp, Bovine  19866881229331
  misc_feature (1)..(1): n is a, c, g, or t
ncctccatttttcagttttgagtattttaaggcgacaatgtgttggctctatttgtagtgaaaggtgatgccgtgttagcctctcagggtgccttctgagacagaccgctggccctaggtccccacgcggccaccgccacaactgaggctggccagcgtcaggagtggccagtttttatgacagccatttcaagaaccacagcttacagcaccacaaatagaatctctttgtaattctctacttcctgggttgatacaaacaccctttctctccattgtcgctcactcaatttgtttttgtttagttaagatgtgccaactgcggggcaccctggaggtggctccagaacacaccatcctattttcacagcattagatcatgaaatcaggcagaatgtctggaactttgggggaagccaggaccccaaagcactataatgatttataacaccttatatttggctgtgctgggcccaaaatgtgtacagaagggttatgagctgatcagaaacctgggggtagcctatcatagtaaaactccctcagtctctcttgtctggtgtgcatgtatgtgtgtatgctcagtcgctcagttgtgtccgactctttgggaccccatggactgtagcccgctaggctcctgtctgtggagtttcccaggcaagaataatttccccctccagggatcaaattcacatcccctgcattacctgcattggcaggtggattctttaccactgggccacctgggaagccctctctttgtctgctacatcagctcaaagacactagagtttagaaaggagatttttaaacgtgtgtgtctgtggaggactgatccctttacatgagcctgccacgtggccccaggggacagaactgccccgtgcacttgaccacgcctgtaggagctggtggagcaagagctctgtccgcctgtgagcaggtctcccccggctccgagctctccgggctgcagggagacagcagggtccttgcgcctctccaccagctcttctttgacctccacctgctcgtgaccactaaacagaagctttctctctgggtccctttattctctctgcagtgtcagctgtctcctctgacctccttggggtggcctttctcaagtgcatctgtaggggagctcctgcccccccagctcccggggctgctccccgccctgctgtcagctccagccctgtccttccacgtggggctcacccctgcccctccctcctggtctcaccacgccccctgcagtaccatcactctcaccgtcacagagcctcagtctgcagggtcacctggaggagcttctgtccccccaactccacgtgagccgcccagggcgagggggtgctgatctgccccctccctgctctgcctcaggggctgagagagaggagaagggtgtgggaggtgaggctggaagggggagcaggtgtgtgtaatctgagttggggcccctggggactctgttaccgctcccctcgagccgtagagaacgcggctctcaaccttggcattatttgttaagtcccatttctctctcacgctcctcatcaaattggctacccagtccttgctgactgcctctcaaaaatacctcccctgtctgatgcctcccttccgatcccacagcccccaacctcattatctcctgccgggagagctgttgcaatcgcttgctagcaggtctgcgaacctccaggctctctcggctccaatccatcttgcgcactgctgccagattaaccttccaaag

SEQ ID NO: 49661 - DNA, 725 bp, Bovine  19866881292325
  misc_feature (1)..(1): n is a, c, g, or t
naaaaatgtacaggtagcaactgcttcatttaaatttctccacatggtccggtgccattcatttcccaacttctccatgagaatgtctcacttattatcatctctagtgatgaccatcattgtcatcatctccagtgatcttgcctacagttaatcttttctttaagaaatacagaaatattttcagtaatagctccatcagatgtttgttcacaaacattaatttgactggcgtatttctgtattgattgaaaagttataaaacgcagcatcctcatctgcccagagtcaacacaaatgtttcctctgcacttgattcaactcagaagccaacgctctacatggtgtttcaaaagctactggctagtcttcataatgttcatgtccattttcagactggtcataactaagaaaggcaaggcctcttcccttggtcaccagccaaacccaagtatcagcaaacagcccctctttcgtccagagtgggagggcgaggcttgtctctattcctatcaccctgtgccatcccccataattgtgcaatttccccactttgtagcgtattttctcccttatgttttgagctagaagtggtggcagagaaaaagactgtccattttattgaatcacctatatttaattgggaaaatgggtggttgtaactctgtcaacaggacacgttccatttcatcgtggaaccgtttttcttcagaaagctttaccat

SEQ ID NO: 49662 - DNA, 771 bp, Bovine  19866881566035
  misc_feature (1)..(1): n is a, c, g, or t
ntttttttttcttcctgatttttatgctagtgctgtcggccgcctgtgtttcttagccttcagggttcttttctctgggttgctcacctctgattggagatttattaggtgctcttcagtaagaggggaggaaggccaaaggagaaggaacacggtgaagcaggaagaaactgaaagaagaccgcggagggaggaacgggggagggtggagataaagagggataaatgaagacgaatgaagagcgatgagacagggaggccggaaggggagtcatgtactaaaaccaagctggtgcgaatacatgtaaaataaggtcttgtggaagatttccagcaaaaatggtgtaaatcagtgatgagtaaattaatagggcaattgtgcaaatgggactcactcacttaaactaagctaatacatcttggatgacttagaaataatgcaacccgcagggcataccttttaatctactcaagacccagtaaaaaatgttgtcacttcaagggtaaaaaggcagaaaggatcagaacattgggtgtgtctctctattttaaaagtgttaataagacagattctgagcaatgtgcaaattaaccagattcagaagcttctttgtgatatataaattcaaatggagccttatgtattccaagcttctttccaccgacccaaaatatttctttcagtagtgttttaaagtcctcatttgaataggttaacatgttcaattgccttaaattgaactgaaagtaaaatgagtcactgcacgtgtg

SEQ ID NO: 49663 - DNA, 1787 bp, Bovine  19866880392712
  misc_feature (1)..(1): n is a, c, g, or t
nggggaccctaggggtttactgtacccactaacctcctttgtgataggagcattgttaaagacacagatctcaacgcatggcataggcaaaaggcaagatgtctaaaaaaagtaattggccttcgaaagaaaataacgagagaaaagaacaaaatgaactcctggcttccttggttaagggcttcttcagacacgctgagcaggaaccacagtgcaaaattgctgcaatttaacagggcgtctaattaaaaggagcaacacggagggccttttcttcctactctgggtgttgcttctttctgtgcagggttcaaaagtctgacaactcgaggacaaagagttatgtccccaaacagtaaaaagcagcatattggctactgaatgactggtttttatatccttctgtccaacaaatgttgcagagccttgctatgtgccagctgctgtgccaggcactggggtcacagagaggaaagagatgctagcagagttggagggggcaggagagagtgtcgaccactgaaatacagtgtgggcgaacgcactggggcacatggcctcctgggagcagagggtcacccaagtatgaggccctttttctacctaccacattggcatactgcaccttccaagaggccctcctactaccctaactttaaaaaagttaacacattcagggagtcggggatgggagtgcccacccactgggcctgggtttccttctgggtgatgagaatgttctggttctggaagaggtgacggtcgcaaagccttgtgactgctctgaacgctgctgagttgtgtgcgcctgaaaatgatggattttatgcttatggatattttagcacaatttttaaacagtaatgctttctgaggtcaaattcaatttaagctctgtttacaacttcaagggttactgaacaatccatgaggtggggcatggaggggtatcctgaaagaagtgtggggaacccctagacaacgatgccgtcccaggggcttgactcccaccagcaagcaagcgacacaatcctggctcctggtatccgagatcagaagaatctgtcataccacatcacagcctccctctgaaaggccaccgagaagccgctcccggcagcatcttccctggagctttgcctggtctaactgtaatctctcctgaggcagagccagtaaagtggtcttcctccttcaagaggaattggccagtgcgtacaagtttacttctcggaacgtgtatggtaggctgggtacagcctcgttcctgttaccccgagatgcctcccgactccggccttctgtttccagttacaagtggtcctttcctcttggtgagggagtttgctgaggcacagatctggggaaaccaccaggggtggggggagaaatgggagaaggtggaaatggagcttcctcaggtttgacagagaccccccagacagatgcttctcttcggtttgaactaaccacccagcattgaactcatcatccgagcctcccctcctcctgtgactgtgcaaatatttacttcaccttcatgcagccagcagtccatctgttaatatgctggccagacaggggcctggtgacacagaactgacctagaagtaggtataatcctctcttctaaatgtgcttaataccattgataatcttgtcacataaatctctcggttagcagtgagctgcagccaccaccagactccaagaatctttcagtaacagattccacctcctatcttctttctatacggatttcagctgccatgttgctgagggcttgg

SEQ ID NO: 49664 - DNA, 2809 bp, Bovine  19866880545506
  misc_feature (1)..(1): n is a, c, g, or t
ntttaaagatttgtaaatactaggtatgtcttaaattccttggttacaaggatatcattttgacacaatgtttagttactaagtcatgtctgactctttgtgatcccaaggactgtagcctgcccggttcctctgtccatgggatttcccagacaagaacactggagtgggttgccatttccttctccaatgcatggttacattttaagtgattaattttggggaacattgattcaagagactttttaagcacctatataattgtataggcagaccaacccttgaaataccaatattatctttttacatccgagtatttcatattctatctcctttttttttctttctcctttttataaagagaaatgataatggtacagtgatgacaataagctatgattgaaagttaatgggattgattgaagaagttttcttttttcgcccaccttaaatcagatctttcattagcaatgaaataaaagcaagtaagcactgtcttctttagaggaacaaaaattgttactgtgttttcatcctagtgatgttattttttcaacggagttttagatttcttatgtagaatgattttagggttagcatcttttcttttgaataatttatgtgaaattccaaccatttggtcttacatacagctaaaattcatttgaagccaagaattgtgaattaactgatgtccctgagttaatattatgttgggtccaaagccaaaatgtatttatgctttttctctgtggttttaagtggattttaagaatgattctaggaaattccacatgtataatgtgttaaggaataacctaataacatcaattttactactttatagtcaagctcataaaccaggagaattgtataataaagattctaaaaatgaaatactttccaagaagtagtattttagaacaagatggttgtgttgttttcctggggaaaggagggatggacttttttgtttttgtgttcttgatagtcggaaggtatgtaatagtttttgtttatatcatgtggtcattctgtctgtgacttttactagacagggacatttataattaatatttatgacattaatatatataattaacataaagcatgctagagtaaccaaaaatgttagaatattttagttaaaaaatgttgtgcaaaccacatagataagcagaagaaagtcatatatactattttttgaatgtcgtctctctcccctttttaatatttggaaataataattgttgggtattttaaaaaaataagtttatgttgacagctcttttattatgtaacaatttttagtttttgtttttgaattttaattatagtaaggtatactgcaactttcttccataaattttcatattttgatgacactttaagtatctttctagtgactgaacatttctgtccctccaccaaaagggagagtggtacaatgacttttgagagattaactaagttttcatgtattagtttagaatgtgtaatataatactttgaagaaattattaaaccttgttggtattcaagtacttttttcttcttacaatttattgcttgaataactttgtttgaatcttaggttgtcaatggaaacaagtagtaaagatctgtgaccattgctatttatggcattagttaactttacggtacatacagagcttaagcctttccattggattttaatttatagagttgaagacagagtgagttcagtttataacttgttattaaagcttttcttgaagtaatgaaatgacttttcactaatgtattttattaatttgtatattatcaatcttaaggtaaaaaaatgttttctttccttttaaaaaagtaatattgcattagtgacatttaaagattaacgtgattccaccagtattgcatttttgtttctttaaatgaatgttgatgtgtttgcatattaaatataattgtgttctaggttaacttctcagcctggtgctacattaccaaacggacatagtagcttatgtgagtattctgttatgaaactggttagtattgaaatacttataatgttgttagagttctaaagtggggtaaaatagtgtaatttactagtatgctcagcatacagttggaagtgactggattacagtcatggtaaatatgtatataattgttaaacattgagaaattagtacaattgaaataatttaagttatcatggcagattgtaaacagttttagaaattttacattattggatattaaagccatttaagaggttatagtaagctccttatagtctttttaaagtaatttttgatttttttctttctttttatactctgtactttgaaatggaaatttctctcttcttgtagcccttcgaagccatccccatcgaggggaaaagaaaggagatggggaactttcttgtataaatggtgacatggaagtcagaaaaagctgtcgttccaggaaaaacagatttgaaagtgtgaaccagagtttgttatttgatcaactggtaaataggtatgaatgtttttgcagtaagccgtttcatgtaattgttttttttttttaagccagttgtgttttaaaaagtaacttaggcactgacttagcaatcagtacaattatttaaaaacttaatttgaattaaccttggttagctctagtcactttactagatttaatgcaatttatgtgatagcatatttttttccctcatactttttaagctcttgtgcatacttagataatacaaaaaataattttattttaacttcactagtatagtcctttaatatttgctctttta

SEQ ID NO: 49665 - DNA, 2119 bp, Bovine  19866880572776
  misc_feature (1)..(1): n is a, c, g, or t
ntaataggtatagttttacttagtcaagattctgaattgaaagtcttttgagactgcaccatgttggatatagcctagctgactcctcccctcagcatctacgtgccaatgaaactgtattcttctcaaataataatcattcctacttaatccttgtaatagcctggagaagggagatgactgtaattcctatttgaaaggagaggaaattatattttattgtggtagcgtcaaatttgagtattagttattatttgttaagcacctagatcagtatctgaacacatagtaagtgccgtgtgtgtttaaaatgtcaatgtcagtatgtattttgtggatgtcagtttcctctaatttctaaatatatctgcccttggagtgggaggtgggagaggtttaagaggaaggggacataggtatacctatggctgatttatgttgatgtatggcagaaaccagcacaatattgtaaagcaattatccttcaattaaaaataagtaaattaaaaaaaaaagtatcagttcagttaaccttatgctggctttaaactttttacaaattctttattctatacaatttttaacaccatcttcaaataaaaagattcgaattagttttttttttttttttgtaccatggatctgatagtcagttatttgtagtagtattatgaatttaaatatttgaagctgagtaaacaaaggtcttctatttgtaagttttattttaatatatcatgacagaagatgttctgtttctgtctttcttttcttttttggccatgctgcatggcttgtgggatcttagttccctgaccagggtttgaacccagaccccagcagtgaaatcactgagtcctaaccactggactgccagggcattccctgtttccttctgtttttgaggcagtatcttctaatggatgctagttcagaagaagatattaactgggatattaggtacagttagaaattagatggcttaattattctttgatggtgagctcttttacctgtatgatatacagtttgatcctgcaattgtctaaaccctagttttattatgtaattgtagtactgctgaagctgtactacaggaaatggacaacataaacattagacggaatcgtcgatcaggagaagtagaacggcttcgaatgtggacagatacagaatttgtgagtatgttaatcttaacaactgtccctggtggctcaaagggtaaagaatctgcctgcaatatgggagaccgaggtttgatatctgggtcaggaagatctcctggaggaggaaatggtaacccactccagtattcttgcctgggaaatcccatggacagaggagcctggtgggctacagttcatggggttgcaaagagtcggacatgactgagcggctaacacaacaacaacagcaacaacaacaaccgttgcaagtagtttttattttgatcgaggaattcaaaagagagcagcatttggattttcttgaattaaccagaattgttcctttttcgtttccaatttaatctgagattttattgttttcttttttcttttatccataccttgcttgccacaagcttcctcaaaagaccctctacccttttgccagagagatctcctggagaaggaaatggcaacctactccagattcttgattgagaaatcccatggacagaggagcctggtgggctacagtccatgtggtggctaaagagttggatgcagcttagtgactaaacaacaacatcttaaagtacaactctgattctgttgttaactattaaggttttttttttttgctgcactgtgtggcatgtgagatcttagttccccaaccagggattgaacctatatcccttgcattaggagtatggagtcttaaccactgaaccaccagggaagtccctttaatggttttttaatgtgtgctgaattaattaaaatcaccttagatagccagtgggaatttgctatatgacacagggacctcaaacccagcgctctgtgacgacctagaggggtgggacggagtaggaggaaggctcaggaggaaggggatatatgtatacctatggctgattcatgttgatgtatggcagaaaccagtacaacat

SEQ ID NO: 49666 - DNA, 815 bp, Bovine  19866880580978
  misc_feature (1)..(1): n is a, c, g, or t
ntaagcaaaactggtatagcgtgtttcttttgcggggggaaaggggccagaggagttagtacaatttcagctcatttttctccccttggcattagattggctttctccttaagacctaaactgttcagagtggcagatcctatcatactgaggttgcctcctatttctcttatctctatcaaggttaaaattaaaaaacttgatcttttggaagcattttaatgctgaacataaataaatttcccttgtcaaactcactgatggctaaaaccttaacctgtacaaatttagtaacttactaagaacatgtgcattttttttccattcacaagtgctgctgttacttgaacagaatgcttctgaattagagtaactggaataaatatttaaagaaaaatagtgcagcaagaacctgagacttgcaaaaaacccttttaccagaaacttgctacaaaaaatctgctacatcttatttcatcaaatctttaaattctgtaacaatttccatcaaaatacaaaatgctaatgtattagacagtaaaatagcttgaactggtatgatggtaataaatactaaagaaagcatgaaaatcctcccaataatcaaattagaggtttcaaatgacctcccctttaaaattggttcatcgttaatcgcacttgcccagcttaaaaatacagtgtgtctacacgggtagcatcttgaattatatgactaactgaatatcatgaaaagttcataggtataaagaaaacaagtggcattattttaaaattaaacctagagttagaaagcgtaaaatgttcatgtaaat

SEQ ID NO: 49667 - DNA, 1933 bp, Bovine  19866880593091
  misc_feature (1)..(1): n is a, c, g, or t
ntcgtgtctgattctttgcaccccatggactgcagcactccaggcttccctgtccatcaacaattcccagagtttactcaaactcatgtccattgagttggtgatgccatccaaccaatgatggcatctcatcctctgtcatccccttctcctcccgccttctatctttcccagcatcagggtcttttcaaatgaatcagcttttcgcatcaggtggccaaagtattggagtttcagcttcaacatcagtccttccaatgaatattcaggactgatttcctttaagatggactggttgtatctccttgcagtccatgggactctcaagagttcgttcaggggctccataagatcttacgagaagcccaaacaaacactttggccattgtaatatatccttactgtgtgcttttctcttgccagcactactttcccccaaagccagaaccttgccccatccccgcctggtttcagatcttgcaccgagtcatgcattatggcgcaagaggcagttagtacttttggtatgacctgacaaggaaaggtcaggacaagtgtgcatccagggcatgcccagggggttgcttggaagggaaaatgggggcagagccctgacccatgatggagccccagaagaggaagccagctgcctcttaatttcccagggaggggttctggataaagaagagccctcccccccagagatggagacgagagagcagcaggctcatgccaacaccggtgaaggcgccacaaatcctgccgctgaagtggctgttggttgtatattcactctggacagggattttaatgtccccagccctcggagcaattctgcagccatcagcccagacactacttactcactgaaataaaaaagcagtcgagtctctcccaaggaagataatatcctgtcacaggcagtatgatctgccggccatgtgacggccgttccctaatgtttccaaatagacttttgaatagactcttgtctagaagaaagcaaattgcaagagcatttttggcagccaaatagagagcgtgtattcgtctttcttctgtgcaactctagctgctggtctggctccaggcaccgaggaggattcatccatcaacttgggtcactgatgaacaccatttgctgtgaagagagatctcgtcgaattagtcagttctgcaagattcggaataatgaggcgtgccagaggcagtctgcgagagagcgggaggcctgcttggagaagggaggtaactgtgaagtctagctcccaagtctgcgagtgtgtgtctgcaggatggtgggaaagcaggctccagaccgtggtgttgcccttctcagtggagccacccagcgcaggaagtcagaaggaaccagagatggttacttgtctgggtaatggtcctctaggacatcaaaccatacccgctgccacagctgcctcgtcaatcctaatgtttatgagcccctaacttatacacgcctcccttcttccctccgtttatgctgatattatgctgccaactgtcatttccaatatcttttttatttttcattatcaccattataatgatttacaccaagagcaatagcacaaatgcctagtcaattagtcccatgagaaaagtctctgaatcatgtgcgccttttcaaaaaaaaaaaaaaaaattactgcatcaaaacagccaaaatgtctcaaagcaaaggtgcacacgagcagggacagaaatgggagccttgttcttttaatatcgtttatcgttcctctaacgcatatgctagataccacctttccgaggaagggagattgctttttgcaccagaaattgtgcccagaaaaggaatcagtggcattttttctggaaatctatcatcacaaaagcattttgagacatttgtctttttaggtcgtgtattaagcttcccaggggcatt

SEQ ID NO: 49668 - DNA, 1249 bp, Bovine  19866880602457
  misc_feature (1)..(1): n is a, c, g, or t
ntaatttccacttgctacacaacagaccctgaggttgtttttctaatacataccaagttgttctgttgctaagaaagaaaacagggctcttgactaaagatatgaaaaaaatctgaacagagccgaaatcatgcttttgaattatatgatactttttgcatctaaaacagtaaaggaataaagttacaagtctaccatgtcaattctgtaagacagagccatatcctttgattatacaactacattctatactaaaaggttattatgcaccagaaatcaatgcttctttcatgaaagtaatattattttgatgtgattataattaagttacacagaagagggggaaaggatctggaccgatcctttctactggctttttctaaccactcaaattcatttatcactagcagtccttagatttgttccaaaatagaatttaattttaaatgtggtccagggaatacagtaaagggtcattctaaagtaaatgtataggtacccactaaggaaacaattatgacaaattaaggtgatttaaataataatgataacaaaaacaaatatatgaactactaacctttatggaacacttatcacatcctaggcactatgctaacatattcaagttgaaccacatgaaaatgacaatttcataaggtagggcctaatatattttctcatctaatccttacaactaccccaagagaagagtagttttccataattgcagataaggaaactaaaatttagaggacttaactttatttcctaaagaactaggaaataaaatggggactgaagcctaggtgcacatccaaagcccagggtctcattacctactgcacaatgtcagtaacctccatgtcttgaaaacctaacagaatgagagtgtaggtgctcaagtactctcacacactgcttaaggccattatagacacttgtgcagttgtaccttcacccagaacccagcaagggaatcaaaggagactgacatccagcccattctttactaggcaaactgtggccctgttacagatgccatctacactgcaaaggagattcactcagtcacacaaaactgctatattggttaacaagtgcccctgatgctgctagatgattttttaaattgtgagaaagttttaacaacacagatttaaagccctaaaagagattatacactctttgatacagaagtttgaccttaaggaatttatcttaaggaaataattaaggacatacacaaagt

SEQ ID NO: 49669 - DNA, 1309 bp, Bovine  19866880659346
  misc_feature (1)..(1): n is a, c, g, or t
nggacagttttaagaatcagtgtgtgtgatcccccaaacgctcttttgctctgcaaccatggccagcagtgcccaggtgaggggcagcactctacctgtgtcttgaagaagaaagacacggagcaaggtccccaagtgaccagtggtgaacaggtggtatgaatgaaaggctcgtaattgtagttaaaccactgagactgactgttaagtacattcaagtcatgtccgactctttgtgaccccatggacgatagcccaccaggctcttctgtccatggaattctccagacaagaatagtggagtgagttaccactcccttctccaggggatcttcctgacccagggactgaatgcgggtctcccacattgcaggcagactctttacctactgagccaccaaggaagaccacaaaccactgagactgggggctgtttattatcgtagcctaactcacctagctaggtggatgcaaacatcatttttctaagtagcccaaatagaaaactaaaccctgagagactcttcagagactcctctctgagtctgtaacccttccctcattggagccaccttgcccaaggaatggcaggcctggattacagttccatctctgccctgacactctatcctcaggtaacaccattgtccaagggggtggctgacccagagtgaccgtgagagtccaacattgtagggatacagtcttcagggacctgggggttaaggaacagccaacagacagcctgcatccatcagcttctcagccttgtgccctgagggtcactgtgaaggtcaaacccagagttagacacgggacaaacccaagggagggtgagggaacatggtggtctttgctgctggggggcatggggccaagggtcccaggctgccggacggggtggaagtgacagcctagaagccaagtgtccctgcttggttaatctaaaaataaacagaaaggcaacaaaaaaatccatgtttcaattactgcacacaagctgttcaaacagccagctctgcactggagatgtgaacttgtcaacagagcctgcctcgtttgcatgctcgggtggtgataaaacacaaaacctcgcaacaggctgccctctggtctgggtaggttttttcctttttaattaaattaaattaaaaatacagacatagaataaagagtgaaaatctgaagcaagtgcatcaagatagatgtgctcagtcatgtctgactctgcagccccatggactgtggcccaccaggcttcctctgtccatggggattctctaggcaagaagactgcagtgggttgcat

SEQ ID NO: 49670 - DNA, 3723 bp, Bovine  19866880672892
  misc_feature (1)..(1): n is a, c, g, or t
ntgaaagttttctgcggtgtcaacccttcttgtaaagtgtgtcagctcctgccggtgtctaactccagcttactcgcagactgtttgggggtggttcaagttggtgaggaagtgagcggagagctccagttggcagccaggcagggatgctgaaaaaagtttgtagctgctctgacagcaactttaaaaacaaaatcaacactatcgcctctccaggcaggagcgatcaaacgtgatgtttagagtcagccagcccgctaaccagggttctagaaggaactcagtagagttttctagtagagtcttcaggtcgcaaaaggggcacgtcgaaagaaacatgtcgaatattattggtagtaggcactatcatctccagattgtttggtttcttgaatgtcttcgtctgggtagtagaatagtttataaaagatgagttaacaacaccgttgtcccattactgcgaaagtgacatttgaagaacaccggtgatgatttagtattttttttttaaagtggtagatacctaaatttattacaaggtaaagctctaagctaatacgtatgttttatcactttaaaggaatcggtaaggttgtgttatgagattggttatgaacttaaaaaagagagtgttgcttctgtctagagagaggctaattttctaagagtaatttgactggacattgttcatttaaagtaactcatttaaatccacaccattttgttattcgtaggggaggaaagcaatattttatataagggtttacaagattatgtttgtgtatgctttttttctgtatctgacactaatcagaatgaactaaggtaaatacaatagacacattttattttacttttctgaaatatgctgtatctttgaaaatatgtttggcctttactttgctaaaaatctggaaaatattttttaaattgccctatgagtagactattttgggtcttaccgctctcttaggttgaaataagaaagctaagtctgaaagttgtgcatactattcagaataattattctcaactttctgtcaaaattattccaaacacatacaagtttacagactttctgaagctaacatctattttaaaataaaaggaagacaggttttccctgtacccttaagtacaaataaaatatttagagtgtaaccatttaattgtatcatgttatgaatgcctcgtctattctggagcagtgtctcaatctaaagcaattagctcatctgtcactgatcattttgtggtcccatttttgaattcatggatattatgctgtccttacccccctgaggaatgaggtgaggtaatttgtcaagcagctgttatggagatgttaaaaggcaaggaatcaataatctaaggtggaaatgaacatgtggtagcttttaaattgctagaagaatgaaagatgttagagctctttccagagagatactaatgaaactgtttcaaagatcctttcaaaatggttttaaaagaccatgaacaacaggccaatgaatatttactttgaatttttttttcctgctttaagaagatttgtattctgatccgagtagatgatggaatgatctaattgctttcactgagaaatttaagatatttactaatcctgtattgtcctttagaagaggataagttataattctaaatttaagtttatagactgtatatttatgaagcatgcagtagatttctttgctgtatatttctttttttttttttttttgctgtatatttctgaaatgggttgatttgggtttggtaagctcttcctttcaagtttgttttcagttgcaagaatttagcattcctgactcaccctttcttgtgtacttaaaaggcaccctttatgtctgtgtgtcttagacacttgctaatatctataaagacttacttggtggaaaatggggttgcttgtgttgttgctttaggagacttatttttgtggtaagagatgtattcctcttgatatgatatgaaatgaaaagattccctcttttctatttttgtgtgatgttctttacaggtgatgctgatttcaccccctcccccaccccatttgtcctctctcatttttagactatttgatccactgtgtctggagacattttatttgctctgaaaagccttaggaccatgagctgtcatagctttgccttttccccaagtgtgtgtagggtagtgaaataaacatgatacctattgtaggttattggaatgattttttttgtgcgtacactattttaatgtcaagttgacttgtgctctgcagtttttgtgtaataatttctcctatatacttggctttgtttgcttatttaacgtgtataaaacttgacctcttttaggtcagttaattagcatttatttgctaagagtcacttgcagcaaagtcatgctgtagtcagaaatggaaagcagttaaaaaaaattttcaactccttgttttttttttaatctcttttaggcctgtttgttggtacttttggcttgtcactacttttttgtgctttttgaatcttagttgagagaatcaaaatacatatcttgagtaactttataggtaaatctgcttgatttttattttttaggaaaaaatctctcaggccttctttaataggctcttttatcattctgtactttttctttttcaacattcattcatttgccagtgtaatagaagctgcatggtggaagttgagggttaaacatggaaaagaagcctgagagggaaatataaccatatatataactctcagataagtagagaagaatacaagttcctcagagtagagcaaatttttccttatgttagattcacatggagcaccatataggtggtattgcgtaatgttgtaaaacaatttcccctgtcacagttttgaactaaaagcagctataaagttcataggcttatctccaggattgaactgataatgaaactttaaaaaaattcatttgttggccatttctgtagtccagatatatagacttgcagttttttaggtcatggatgaaatttacacttgtagaagtgaatgcatactagttcttcaagtcatttggcagataatctttttaaccatccttggatacacccttgattgcatgtcttctaaatactgattataggtaaacctgtaacctctgaaagctcagtggacaggtggtaggattaacatttgttatgagaagtaaggagcccaaccagtgtctgcacctgagtggggagtgatcctgtctctttaaggttgcacgttaggaaagtgccgcattattttgagttatgtgtttggcatttctttttggacacacataatgaggtttcatttgtgtacgttcctgagtggtttcttgatatttgggtttttgatcttgtattaggaatgttttatgtttctgttatgtgtctgttctgggggagaattttgtgaaaaatgagtcattgagtaaaaagttctatggaagtacaaaggtagggggaaaaccctatgtaaaatgtgctaactttatttaaatatgcattagacaatttttagagaggcaagtgttgtaagtggcttatgtcaaacaatagaaaagctgtgttaaaattaataggtcgtgatttgtttcagcttttagatattttaagtatatgctataagattctaaacttcagatgctttgagctataagatttggcataagattttttaattttcattt

SEQ ID NO: 49671 - DNA, 2178 bp, Bovine  19866880682120
  misc_feature (1)..(1): n is a, c, g, or t
ntctggcattatcatagatttttttaagttattgtgacagttttcttgtaggtggcaggcaagggtcttgagaaaagggtatctttaaaaatttcgcataaagttgctaaatcggctgctggtgcgggggtgttctaaagtcattcacagtcgagtgggggagacaggcttgaaaataaaccatcaagatgctcgctggtgagccgggtgagtgaagtatgccatgcatgggggtcggctgaggagaggatctgttggtcctgagttcccctgcttcttgctgaggctggtgcctcagaccctggtgctttgaagactgggtgttataggaaccccagcttcatgggaggcctggggctgcgggcggccttgttcccaggccctctgactgaccgtcctgtccagacgttcctgccacaggcgaggccgcggggctgcggctccagctctgagaggcccaactccctcttctctgcctcagaaccgtaaatgttcctctcctgacgcattcaattctgctgtggcaaaggcagacgaacgcaaaataaataaccaggaagacctctgcgccctgggctcccctggctttgcggtgattcctgactagctcataattcacctcccacagtcctccaggtggccctcccgcctggcccacctcccttgctcccaacccagggaaaaccgagcccctagcctctgtactgtagagaggatccatggcctgtgctgagaacgcggtgtgtgtgtgtggtggggtgtggccctccctgacctctgttgccccctctaatcagccatcagctgacccctcacccccagacatagcatcttcttgtgctgacggggggcatcttccccatcctcatgagcaggggtgaggggtaatttctgaaagaggagcaggctttcctcacagacccttaaggctgagctggggttcagctctggtggcacaggctgtggagccctggaagacagagaccctcgcccctgtgctggcctttgtgggggcagtgtgggaccctcagggagagtcagctgcgtaggaggatccaagtgtgaagggccagagaaagggggactgtaggccctgttccagggttgatgctgtttctataaaccttctcagggctcctcacgggccttttacctcagaggcctgatgatccctgagggcttctgtcaggcagctaagaggccaggggagaaaaatgcatcttcagtctctgactccagaagcaggtgaccaaccagctcgggagaggctgctctggctggggcccacccccctcctcagtgctccaggggagccccaggcttggggttggggggcgcgggaaaaggagaggccagcccggcctgcagctctgtcctcgaggcttcacagtgttccaaactccctcccagagagggccagagaatttttccggctgtgctgagctccttcaaagatatcagcacatggttaatcttccctccattcagaaatgcagagtaatttgcccgagtggggatttctgcatatttatactaatgtctgtgtttaaagcttatgagacagagaattgctgagagatgtccattagcaatatatacagactgcaattatttctttatggtgtgtcgtctgactgcagaatactttatttcaatggaagtagcaggctctgcctactgtgttttcttatgtgcccgaaaaaatcaataagaacagaaaagatgtaaaaggaggcaagaataaaaggagggtgacctttcaggattctgggagccttgaatatgctattccaggaactgccttcatccttggaatctaaatgtgtgtgcccaagtcggggtagcggaggggaattcagtaagtttgagaccgtggatgagaacttgtgaatcttctccatctcggaggcgaagctctcaattcatttatcccgatgagctgctgggggtgctccttcagagacaagcaggaagagaacaaggagtgtcctcagaggaccccacttctgacctccagctcctttctccccatgcccaccccagggacagactctcagaaggaaagcaggttttgatctgaaacaaaagaagcctcaagctggaggtgcacagaccaaggctttctggaatcagattggaatctggtagaaacccaactttttcctggggtggggagga

SEQ ID NO: 49672 - DNA, 1151 bp, Bovine  19866880781734
  misc_feature (1)..(1): n is a, c, g, or t
ngaccctatgggctggagtgcacccaggactctgcctgcagtgtgagggacaggtgtacagggcacatggctggtagacagggcaccacgcgtgggcccacctgaggcagaaccgggaactctctcctccctagtggccatggtgtctcccaggtgtgacacctcagctagctcgggcaccctaaggcagacctgaccctctggccctgcaactggcacctgctcacctggagggcactgccccactttcttcttttaggtttatttcctaattttcctagaatgatggtggcaattaaagaccatttgcaatagaagaaactgaactatggcttaggctttcacctcccctgagatgacagggttgaggtgttgccccagacctgaacctggccaggccctcgggacgggtgagcacagatggagacccaggggcagatggccacagagggacacccttgcaacaaaattgtacaggacatacttggggcagagaggggtccccatccccctacacacacacacaaacacacacacacgcacacacatgtgcgtgtgtactcactcctcccctgcctcctcgccccaagtcctccatggctgtgaattctcttctcctgtgatgtgattcacagagctctgagctgccattagcccctggcatctggggttttccgtttcatttccttctttacctgggtaactgaactgattgtgctcccagctccggttcactaattctcacaaatccttttaaactattgatttatttgctggaaccgtggctctcagaattcttgggagatactgggttttgctaaagcatgtgagggagggctgtgtgtccctttctcctgaccggtgccccatccttcccagtacctccgcccaccccttctctgtgccatcctgtcccttcctcgggcgggtggccaactatccaaagcccaagctggctggaccttcctgatgaatcgcctccaggaagcttacagccgagtgaggttctctgggatgtccccacacatgataatgtaggccttgggactgttgtctggtggttgggctctacagtccttatttgagatctcatttcctcacttgggtccactcttctgtttgcaaatcatgccctcccctagggtctgcgg

SEQ ID NO: 49673 - DNA, 1441 bp, Bovine  19866880791279
  misc_feature (1)..(1): n is a, c, g, or t
nagttgcagagacacggagggagctctccgctgggacctgggactcctccctgccagctatgctcctcccttggcccacgtgcacacacagctgtgaggctgcctcctttctcgacaaaagtccatctctctccagttgggattctggaaccaggccctttgccccgaatgctcctggatttgcagaggcctgcagcgaccaacgaacaacctccctgccttgccccttctcctggggcagagggtggggtgggtgacattggggacacacctcctccagccctacatcacattctgacccccaaaccacaggttccccacccagcccctccaggctgccccacatcttggaagctcatcactgtcacgtttcagtcttgaaagaaatgttttagcctcgaaagcaagcacaatatggcttttgacacaggaaccagacgaagtccagccttggccgtgtggatcccctgatggcctgctcaccagggcctcgctctggacccaggagcaggaagccggcagggcgcagagggtgtgtggcctccgcctcccacgcgcctccattctgctgcaagcgaagcgcattgcaaacgagagtattttttctccttgtcagtgagccgttgctgtctgtgtattccaggaggaggccattacggggagttaatagagttttaaatttgtttttaaattttataacgcaattcatcaaattcagcatctgagcacagcattcatgttcagaccaggcaacatatgccaaactggcccgagctttcctctaccctttccaccaccctcaccctcaaatgagaaaaggtgaactctttagggtaactgccaggcactgtccccaaatggggtgggtagaaaggcagcaggttgggctctgggctgccagggtcattctggaactagcccatggaaaggctagcgacttattgaggtgctctgggcacctttcatggtcaagcatgatcgaggctgccctaggccgtagtcaccaggctgaggtgcctacctgggtgtcacggtgacgtggttctttcagacccacgtctgtgacggggcaggtgtcaggagaacggggccacatgcagggcacagatgtggaaagtaaatggtgaagtctgctggacaggacagatgggagcttattcctgctatttttcacccagaagggtttccttcaagggtgtgttcggctggacttcggatcactgttgtaactgggaaatctgttgctgctgagctggaaataaatgagactgaagggagcacggttttgtaaagaacatctcggatttcaggatttgcagcagatcttctgtatcatgaaccacagccaattttgtcttttattaagtgttaataagtgacttggttctagggaaaattctgagatacatgttgcggcaagtaaaccttgtggtctcagaac

SEQ ID NO: 49674 - DNA, 1567 bp, Bovine  19866880834487
  misc_feature (1)..(1): n is a, c, g, or t
nataagtggtagaataagaaggaagtaaccaaactacctgcctctgacgcccaccccattccaacacaccgcaccttgaagcttcgggttgcaacctgtacggtcactaggtatgtttggagtcagggatgggcaagtcccacagtggctgtcttacgtctctacgagtcatgcgtctgatatttctcaatatagactgatgattcttgggttctttcctcatctccaaaagtgtcatgtaatggatgggtgactggacaagtggacttaagtcccaaagttaatcctcacgacacatgggcattttaggggagccacagacagggcattcgctgaccaccacagaagcgactggaacttgggagtcaggcagactttcctgttgctacatctcccacgccttatacaaagtattgccagtgcaataaagttaatggagcccatcatcctatgaaagaaccaattctggccaaagatgatacatctttgaagttaacgaggtctattaattgagcttatgcccttttaaatgagcaaaatttttgaaatctactaaatagccacacatccatctagacgtagttactgacacctcatacctctgtccctggtggttcagacagtaaagaatctacctgcactgcaggagacctgggttcaatctctgggtctggaagattccctggagaagggaatggcaacccattctagtattcttccctggagaattccatggacagaggagcatcgtgggctacagtctacggagtcgcagagttggacactattgagtggctaacacttttcatatctctgtcaccaatggagccaccagggtgcagctctgggaactggctttcagccaacatctagcacagccaccagctccttgggagctcaacagatatgtctgaccagccattctggcctgaatcagccagtacaaccttggggaccggacaaccatatggtaaatcgcgcaaagaaaaaagcgatcaaactgaagcatgctcttttaaagagcaccccaccccaacccacaacctctgaaccctttagtcctggtctcaggattaggtgggagagctgcacaggactcagctagtcagccagcccttcaaaaacaaccaccgcacaggtggctctagggctgggtggtcctcgggctcagggaaggggagcagacaccgctcccaggaagtcgagacctggaactggccgagcataaggatgaggtccagaccaaagagggcccatcatgccagggccccggggcccctgaacacacattgacgctctgcccaatttcagtctcccctcagctaccacagctcgcagttgctgaagagcacaaagtgatacttgttgtgcccacagaacatctgctgaaggcaaaacttgtgtttatagttcttcacttcaaaagactggccatgttataaaaagaaagggaccatctgtcccgcttctggaccccagcgcctcttggaaaagatttctgtgcaagaagacagtgagaagtcaacactgacttcaggaaactattttgaggccggaaaagagtggt

SEQ ID NO: 49675 - DNA, 1899 bp, Bovine  19866880878462
  misc_feature (1)..(1): n is a, c, g, or t
nccaaattgtttactatggccattcccagtatttataaatcataatatgtataataaccaaccaaaaaaatccaaaagacacattggagagcctcgtactgggacgtgacgggtgagtctcaacagagagagttccaggaggactgaccagagcttgtacgagggtagccagagcccagccaggttgggggtaaagtgtgacgtggggtttgagcagacagtcacccactggggacagtcacaggaggccaaaggggcctccaagggacacctgcaggcctctctcaagtgaggccaccgcgctctggactcctgctggaagctgactcagtgacccagctggcggggtggaaggaggcagcgcccccttgtgggcatctctgagcagcgaggctttcctcgccaggaagccgcgaagagtccaggcaggtgggagggtggacggacttagctgggctctgatgcctaatgcagatgacaaacagcgcctgcatcagggcctgctgggaggagcggagcgcatcctattaggaccgtaggctgcgctgagctaattgcattaggcagcactttatctctgggctgcgtttcagatgcttcgcttctgtgaacagcgcaggaaacaaaggaaaagagtgaatctcccgagggagaaacaattctgcggacaagcttccttatcagagggaggcctctgccccatttctgtctgcgggacagatgggagcttagggtaggctaggggcttcgggatttagccgccctcaccaatagtcttagggaatttaggaaacaatagcttggcatctgcagcgtctttgcatagacggctttcccgcgtgtcctgtctgcagcaccctatttccaggctctgggggtgccgtgggctcagaggtgcagaggttgcttccctcatagtaagaggcatctggaccggggcgaggggaaggcgccagtgtgatgtcctgttgggggccctgttttggggttgaaatttgaatgtggagtcccctggccttctctccagtcccctccttcactggcaatacaacaaccctttctgtcagtagggggcgccacagcccctctgtgaggtctggaattcctggaggcctcccaggctagaggcaggtttggttttccaggtcctcctgcagccgccctttgtcttccaatgaatcagtatccatggccccagcctggttaactcgacgggacggggaagggctttgtggacctggagccccgcacctggtccttagaggcttccaccgctgccaggaggggtggctggggtctcctccttaagagtgggtaagtgaaaaagtaaaagtcactcagtcagttctttgcaaccccagaggccctcctgggttctctgtccttggaattctccaggcaagaatagtgcaatgggttgctattcccttctccaaaagatcttcccgagccagggatcaaacctggttctcctgcattgcaggcagattctctaccatctgagccaccagggagtgggcaaccagactgtaaagcttcaggagttcctgctggtctcttgtgcctttgctggtcatctggtttgctcttcagttaactgggctcctgctctgtggtcgaccctgcccaaggcaccagggacacgctgtggctgagactcagccctaccctcgggggtctgctccccgctacaccatctgtgacccaagacacactccagaaggaagctgggggtgtggggcgggcccagggcactggcacaattgagctgtggctacaacaggtctgctgtctgcctgtgtctttcatgactctcacaagcgagttcttacctacaagaaagaggttgtgctggagaaggaaaacagcctatttttttttcttttctttaggaaagac

SEQ ID NO: 49676 - DNA, 735 bp, Bovine  19866880970973
  misc_feature (1)..(1): n is a, c, g, or t
ntgtcaatggaacaaaaattattccgaattatataatatagacctctaaagtcaaaaatcacccatccagcaatatactatatatatatatatatacacacacacacacacacatatatatatatatagtttgtatatgtttttctttcctcccacctgaactttgtagcatttatttcataaaggtgctttacaaaccttcttcttcaccctcagtagagacttcatgatgattttgtataccataactatttcttctcagtgactttcttcgccttttcactcttgaatacatatccatgttttccttttaaagagagaaatctgtcaaatattaacatgaaatttattcccagccatcagtatcattagcccaatgggacatgcccacttgataaaatttactgaggatctatttgcaaggcacagatcaatgaaaatggaccttactgaatttaataaatgtatgaaacaagaagaaaaataaaactcataagatacttgaaaattgggcagggagaggggaaatgtgcctaagggaatgagggaggaagcacttgaaatgagccttgaaacaaagacagaactgcattaagtcctcaaccagaagtattaacaagagtaaaagataggaaagtaagaatgatgtgtttgtatttggacaatgatgtgtgagaagataaagtttgaaaccacattatgccagttgaggtgatttggggtttttttcattta

SEQ ID NO: 49677 - DNA, 1086 bp, Bovine  19866881027575
  misc_feature (1)..(1): n is a, c, g, or t
ntgccctgatggacgggcttctgctgcagctcagggcaccgtgacagacaccaggtccagggcccaagggtggcctggagggggggaccagaggataccaggttcaggttcagccctgctggccgggccgtgtctccataattcggtgtcatgtctgcttgctggataccagagcagcgtcttgtcccacagacttgcctcgacatgaataattcatgaataaataatcaatcattgtgaatgtcacagtcctttgctttgtgttgtccatgcgggactggggcccaggggccactgtcgaaggagcccacggcaccggcccctgagactcctgtgctcgccgacctgcgctctgtgcacccccaaactcacggcaggacagtggtgctctgtgtcctgggatgtgctctgtgtccccaactattgacacacctggtgtgcacactggccccaagatcacaggtgactaatgacccttccctccttcctatcattaaggcatgcagaggagtgggcgccggctgtgagggcccgaaggcacgattaatccacaggacggtggggagcccgcgctgcctccagacagggggctgaagaatgagccgcggcccgtccagctcgatcggaaaatgtatgattgcctcgtttgggggagacgtgctgccaagtcggttggaacagtccctgcccatctttcttattttcgtttccctctctgcatctttagtgtttcttctggagcaaaataataaacggcagccggaacaccatcttggcaaatgcagcacaaaggaattctctgggtgcttctggggaagccggcctggtcctgtaacttggcaccaatgtcagcaggagctggggatgccgctgggaaatgcctccctgggggtgcctcggctcccaggaccccctgtctccaccagagccccaccgactcagacaacttggttctggttgagtctggggggctgggcccactccagccctcctgcaggaggcctcctccaaccagccctcccttctccgagctcacagaggccggctgacgacccaggaatgggctgggacattctactcccccgg

SEQ ID NO: 49678 - DNA, 2957 bp, Bovine  19866881367501
  misc_feature (1)..(1): n is a, c, g, or t
naaaaaaatgaataaagatcttttaatggataaagatgcataatgtatcaacagcacatagtgtgtttacatacttttttcacccttttatctttaatccttactaagtcttataaagacaccaaggtaagatatatgacaaattgtcataaatgttacttttctttctgatctaagaataaatctaccaaaggtttctaaaatcatttccaaaattcaacttatttagtgacttggctcaaaatttattttgccctcaaaactgtactatcattgcaatcatctctccattcgttcccccccccccatttctatttttacaatttacagttacagggtaattggagaagaaatttctatattagtctactttcaaaagcacaggctaaagtgatgagcattcataagcattccattacttatatgaaagattaacccagtccatattaaaagtgaaagaaaagtattcagcttgctctttctctaaaatgtagaactgttaggcttttctacctgaccagtcactcctgacattgtgtccttgcttattctccaacaaccaaagtgacaagaggttcccttttcctttccttactaggtcatgtagcactaaagccaggaggctggaccctgctcgatcaagagccagctcaattatttgataacgtactcgtaccctaagcaaaagctaggaacttttctgaagtttacttctaatgctttcatcccagacaagagaaaatgttcttatttgtggggaggtcaaactagaggtattttccccatctttttataatcacttctaatgcttagtgagattttggtcaaataagagaaattggttatatatgtgccacaagaatcaagatttttgtttcagtcactgttctatcacctttttcaggggtactttttgtgaaaagcccatttagaggcacagtctttaaaatcaagttttatagcatctctgagcttgttcccaaaactaagaccttaggaaagcaactcttccatagggagatttagacatactaatttaagtaacataatgtaaaatagtcaaatgatgagtcacatatgccatctactggtcagagaaaacaaaactcacatttgtagattaaaaaacattttaacacttatagaaaattaaaactgttgaagcaatgttcaatatattttagtgggtaaatatttttatcagttgcagagaatgtaaggatttcaacatttaaattagagtgttatgttagataatccaggtcacgattcaaggtacaaccaggacaaatagcttaatcagcttcctaggacgaaatgcaccattaactccttcaaattttctcacacatgaatgccatttatcacaaagaggacaagattaaaaaaaaaaaaaaaaaactgagtctggttcattcattcaacttcaatgccactggtggaagaacttattatggccatctttactgacagccggagcagaattaccacctttatatcagaagaatagcatacacaatccgaagatggccatctttagtgaaacataaagattacattaggaagatgctgtgtttattaccatttgtcttttagaaatttttacagatcaccatgaataaggaaaagtgaggaaaacatagaacactgaattttccccttctaaatacacctcacttacaaaacaaacaaaagaaaacaaacaaaaaagaacaaaacaaacagaggaaaaataaataaatacatctcacttaaacaaaaccagaaaaagaaagctgaatagatttttctcagaaaaatcaacttcctgctgttaattcaggcactctcttacagcacagtttccatttcccaccataaagagagcaccctgcataatatacagcaaggggttgaaggtggggtggataatattctactggctgcatatctctttccaaaacccaaagtctaaagctgaaaatatttaaatctagttcaactacaacagcaagcactgaacagagatagaaaaaaagcaaataaggttaaagaaatatactgattcagcatcttaccccacaagctcctggcagcccctttggtgtatgtgcccaattcctaacacttctgcctcattcacagttgttcccactgctggataacaagatctcaaaatactcacatgcacatttatttgcagaactgtgccagacatccattggatttctttgtttgtgccgaaatgcctcttcaactctagtttctgtctttcgagctccagtaccatgaggatttatttgttctgctgttaccgataagcctgcaagcagaagataagcgatacctatttaaatatccccagctaaataaaccaacaaggttaaaaaaaaaagtctgaaatactgagttttaaagtcattaattatacttggacagtttgtaatttggatgaaaatagtaccttttgtcttaagatgggaaagaaactagatatcatatcataaaaataaaatggtaggccatgcttatttacacttaatccccaaagggccccatgttgactaactttattttgcaaagggatacatttcacatttttatgactgtaagacaataagattatatattgccaaaaagtcatgatttctgccatcttagaaagtataagcatatactgggccactaaaccccattcatataaaccatttccatctgatataagctggctgttacagcacactgtgtaagtttggtttttctgcattgatcttcataaaaataactgttccatctcaattttctttacagatctctttcttctatgctgtctttagtgttaccatccaagtttctaaggactatctctggaatcccttttcttctcacttcaatctacatcttccaccacaagtatcattcatgccttcagcttctactgacattatataattattcccaaatcacattttaatcca

SEQ ID NO: 49679 - DNA, 1079 bp, Bovine  19866881470266
  misc_feature (1)..(1): n is a, c, g, or t
ntgaaagcttgccgggcattataataagatccaccatagaactccttgagatctagctcattaaagtcccacgatttttcctactattgcttgacgtgacaacctggtctctcgcggagctgagtaattacgaaaagatcccctccatgaagaacaggtcttgccagccaaaaggatgggccactggtatttttagacttcattagtgccctgattttaaatttcacattttgtttcttgtaattatcttcccatcgactgagttgaaatttcagttggggctctgttactgcgccttcccagaaagggtgttggggctttcatttaaaacttaaccagttgaaaaatacaggtggtgtggaaatgctttttgatttgcaataggtcaagcgattgtctctcatctctgactagagaagccagtttgcatgcagctccctgtaatgaatgttatttcaatgcattgtgtgcctatagattttttcttaagaaacttgagataaacctttctttctcgaagaacaatttggggtgggaggaatctgtaggatttcttttctttttttttaagattatatattgaaagctaattaaattttatatgtgcaaagtgataagggggggatgaagatttagttctactcgaatcctgttaggaaatccctgagccgtttgttggtcttgctgcgttgcacccctgagctgatccgcgggcagaggtggtgaccagcatcagaccttgtgaatccggaaagtccggtgtccctgcacccgtaccatgtgaacccagctatgtgtgtgtcaccgcagaggtgcaggctactgctgtcattctttctagcccctaccttcttccatgaaggacttctggtggccaggagggtgaccagagacccctgaaagccccaaacactgggcctagtggcgagctgcagaaaggctattgtaatttcatctgcatgtccgcagagagagaagccaggctgcaactgtcccctctggcttctggaccaaaaagcaaagtccaagtgaccagaagtgaagaggcttatctctttgactttagatttcataggccc

SEQ ID NO: 49680 - DNA, 1200 bp, Bovine  19866881673475
  misc_feature (1)..(1): n is a, c, g, or t
nctaacactatatactcccacaatttagagagcacaatacaatttcaagataatcgagtgcaagactagttacctgtttaggaaggaaatgcacagtgaacagggtaggtctgtctcttaatacaccccacccctccacgggctaaagaatcatgataaatagcaaagcagggccagaaaccctcaactcccccatccactgcttcttcaggaatcacatatccaagggaagtcaggagtgggcagagagctctgactcagcaacaatcaagtcactttgacagtgaggattctgctgctttcttccaccactggtttataaagcaacagtgtctctagattaacacccctcagattcaactgacaatgactgcctggcatgaatataccttaggatgtgccaggtaccaggagaggcaattaacatacaagacttatttaatccctgcagtgataccaccctgaagtttaattcagaagatggaaagacgcagaaccagaaaatacaagcaactaactcagaatcacatgattataataaacaacagtggaaatataatgtgggtttatatgactctgatataccatactgccatagcatccaagtcttctcacctacctctcaccccatcccaataatccttctgtcagaaatcccatcctcttaacaactgtggatttattcagctttcagtcataaatccattaggaaagggacaataatcagacaggagcatgaagaggaagcagccaggaaagcaatgccttctggacagtaaaccctctaaaacatacaccaaaatttattatgtgtgtgtacacttttctaggaaaaggggtgaaaactgcaacaaattctcaaaggggtataattattcatcaactattgctactggggaccagataaaatatgcatgtaattaactctgcagtttaaaacctcaggaaaaattttaaaacattagcctctaccttctttatccagttctgcatctttaacctctacatcagggccaggctctaacttctcgttagtgctacattccagtgcctctagtttctcaggatcatctccatgattttcatttgaagtttctggtttttcttttgactggtcctccaggagagtcttttgttcagaactacatttatctccactgccacagcaagaaactacttcagctttgccattctgacact

SEQ ID NO: 49681 - DNA, 1685 bp, Bovine  19866881741050
  misc_feature (1)..(1): n is a, c, g, or t
ngattaaagggatggaaataaaacagagcaaagcagaacaccgcctggccttggttgagcttttcaggctccttagtgctgctgcccaaggccaccagcatggcgacattattgacaacacacggcccacaccccaaccactcccaggggtgctaattacttgccaggattaattcttcagtttactagacacttcccgcagccgtgccagaaacaagagctctggatggaaggtacacctactgtttcccaggagctggacttcgggccaaaacccacacctccttttgcacaaggaaaaaaacccccagctctgctgctatctgctgggagcaccaattctgtgaattttttttggcttggactttcttagaaaaacacattgtataggaaaaactctgatttttttttccaagtagaggtaaacccagttcttccctactgtgtgtctttatcctgtgggtctcctgtacttttacatagagtccttacttctgacactgctggtcaccaaatgtgtggggtttttttcccctacaagtctccaacagcagccaggtgtcttattgttcaactcagttccaacactttctaccttgagatagacttaagtctcataggttaagagtttggtcctacaagactgaccctccccacccccagttcagatgccagctgcaagtacaggtcatcacctgtgcttctgactgatcagcaatggatggagtttcccatgacttcctcaggcttgattaattttctagagcattgaccttagggaaacactcatttctactcaccagtttattcaaggacacgataaaggctatagatgaacagccacatggagagacacacagggggaggtctgggaggttccccatggagctggggtgcagtccccttccagcggggatgtgtttaccacctgaaagctccccaaaccctgtattattggggttttatggaggcttcatcatataagcatgatcaattattatctcctcttccttcttaagggaatgaggggtagggctgaaaattctaagcttctattcatgtagctccatctttccactgaccagtcctcatccaggagctcacccagagttgccctctagaacagaagacactcctatgacccaggaaattacaagggtttcaggagtcctgtgttgggaacagaggtcaatgacctgtattagaacaagagatgctcccagtgttcttacctcttaggaaattccaagggtttcaggagctctgtgccaggaactgggggcagagaccaatacacaccttgtgtaagaaaggtgagaccaggattccggggagagttgccgcctcagacgctggaataaccctgcatgactggccagctcctatcttattctccctctaaaacagaagatgcgctgatggctgtcagacttacagcccctctgccagccctggccggcactcagcactctgccaggggctgtgaggggtacagagatgctctcaagaagcccccatctgtaggggttggaccagttctcaaggggatcttagaccagcagacagagagtggtgcttctgccgggcatgggtgtgaaacctgttgagttccaggacgcggtactgtcccctggcctttcacacagcgttagctaatcatgtatgtatcaatccatccatccatc

SEQ ID NO: 49682 - DNA, 2938 bp, Bovine  19866880467826
  misc_feature (1)..(1): n is a, c, g, or t
ntgttttctactagctagacaataatccacagtgtgaaactacatttagttcctttacatcacgctttatgtagtggacatacagtcatatttcactttgtatccaggtttcttccactcaattttctacagtcatttcccattgtcattataaaatgactgtcacatctctcctcctctgagtcagttgtgagatagagacagggttcgcataaccccagaatatcaggtatactgttgggagaagctgatccagagagcacacatggatccgtctctaccatgttcctcctgagctgactgatgcagggacagctgagcggcaaggagctgcaggcctccctggcagggcagccggtgccatggggggaagcataaattcacaggacgtgtgggcagcataagagttcctacttgggcctgccccatgtcccctctcctggccaccctagaagtgaaatattggtaagcagttccatcttacagataacaaaactgaggctttgaaaagagattggtgggaggtgccctagactgcttacctgcccttagaggactctcctcctggttaatcatcccatttcataggaggtatccatctttcccacagtggactccgtaacctttagaatcacacttctcatgtatcagtctctagggtgtcttaccactaagaaaatccacaggtttcttaccctcttctcctttcatataacatcttgaatacttctctctcagactccaaaggagaaaactgctaagaagattaaagctattagagaatatcaattattttataatgagggaaatctataaatcttttggtggctatctggcaagaacacagcatgcaggagttgatatgtttatgggatattttgtgcatcttaaaaaaaatacacaggattttatgaatcaagcactgtataaatgatttactgggatagcaaaaaaaaaaaaaaaatcaaataaatagctctgcttgcctctgaagcatcaaaagctctgatgtttggtaaagaatggttcctgtagtggaaaatagctatgttatattttcagaaaggtgatgcttctattgaggtgggcaaggcttctacattttaaaaactcacctcagcaaaactgtgcaaaattgctgatattctcctgattctcttgtgaggattaacatctaaccttttccactgttttggtgttcccttaaaaatgtaatgggggagaagcaaaacccaacaaagcaggtgactggaggtccttggaataagatctccaagcagagagccacagagctgcccccttctatcataatctgtcttcagaaagcttctgggcctctccgccagcttaggtctgacatgaattgttatttgctcagagtctaaagggagatgagatttgaggctgaaataaaagtaagaggttccttagtacctaacttgatcaagtgcaaaccaaccaagtccttttcctgtcagcttctttcagctcagtaagttgggggctgaaagggctggttttgtccgccttataaaggggaagaagcaatagcatcagtagtgaccatgctgtttacacctgaacagcactcacgtgtgccagacactgtggtaagcaatttaaacatagtatctctaatttcactgggagcctcttagaagccaacatttatttgcctaatgggaaaattcagctttagtagaaaatgtaaatccaagtacaaggaattcacctcctctccatatcccaccccctaaataaaacaacttttagctaaaatcaacatcttcttggtaaagatatgaagtgctcagtcatgacatttgatacacattcatatgtctaagaagtatgttctgctgttttcattcacaataaatgtaactggacaggtctgatatgcagctctagttcctctgcttgctactcaaaaggtcaatacgcaggagacaagtgctggtagaaaaagaaaaattgctttattcaacctgagaaggtgatagactaatgtcctaagactacctttcaagttgatagttgtgagataaaagttttgaaggcagtatgagggagggaactgcagggtacatggtcagctcatggtcagctcatggtacaattctcgggtgggttggcatcaagatgaagcttcaagcatcaaccctcttctggtttcatccgatctggttgcacttgcagtcagcagttttctggtggggatctgtctcctgtaaaaacaacttgggaatgtgtgtcaggcgtttatctatatctttcagggaactgggagttcagtgactgtgtggttggtttatagtctaaagtgttatcagtttcttggcccagcaagtattcttactttctgctgctgttgctgctgctaagtcgcttcagtcgtgtccgactctgtgtgaccccatagacggcagcccatcaggcttccctgtccctggggttctccaggcaagaacactggagtgggttgccatttccttctccaatgcatgaaagtgaaaagtgaaagtgaactcgctcagtcgtgtccaactagcgaccccatggactgcagcccaccaggctcctccgtccaggggattttccaggcaaaagtactggagtggggtgccattgccttctccgattcttactttctacatcttcataagtcctaatcattaactcctgagccagccttttgggactcgggaagcgtgggagaccgtaacgtttctatgaataagaggcaggtggaagacatggtggggtgtagggggtctgtcctgggaaggccccatagcgtcctgcttggctccataaatattagccagctcctctaaataatgttgattctggactcttgagagtcccttggactgcaaggagatccaaccagtccatcctaaaggagatcagtcctgggtgttcattggaagcactg

SEQ ID NO: 49683 - DNA, 4418 bp, Bovine  19866880500531
  misc_feature (1)..(1): n is a, c, g, or t
nacacaactgctgcctttccccctctgagagcacaatgggtataagcacagactccatcagcaccagtatcatccagtgggttgggtggggatgaagcaagagaggccagaagtgacagttccagaagctgagtgatgggtccttggggcttcttttttctgttctactttttaaaatatgtttgcaatggtacttaatttttttaaaagttcaacaaggaagcctacatacagactctcgaaccagattgcccaggttaaaatctgagacctgccacttactgtgtagacccgggcaaagttactaaacctgtcagcacccatgagtcctcatcagtaaaacagggatactagccacgacctgccttgtagagtgtttgtgaagattccatgagtaaatacatgcagggggcttgggttggtgcctggcaaggtgcatactaaacatgtggggatcattagttacagaaataatggtcccaaaggtcattgtgttgctgatccaaagtcatcaccttcaagggatcacaccatcagccttgcaaatcctctaactcagcggggcggtccccaaactttttagcaccagggaccagttttgtggaagacagtttttccacagaccagggtcagagtggcagggtgatggtttggggatgattctcataaggaacacgcaacctcaatccctcgcatgtgaggttcacagtaggatttgaggtcctatgagaatctaatgccaccaccactgatctgacaggagacagagctcaggccgtaatgcgagcgagggggactagctgtaaatatagatgaagcttcacttactcacccactacttacctcccgctgtgtggcctggttcctagcaggccatggactggtgctggggtttgtggaaccctgttttagctcatacctgccacttggactctgtcttggtttgggtttcctgaagcatatcgtgagatgggctgtgagtgcaagtggttaatttgagagaggctttcaggaaacaccagcaagagagcagggaagtgagaagaggaagtgggaggcagctaggaagggcgcctatgacaggcaccaagactggcaaccacggtgaccccacagggagcctacacagagcacatgctcagagttatcccacctgaggggcgagggggctggggtggttgtctacacacactgtggtccttggctgaggtacaccatgtaggcatagaaccccaggcagcatcaagtgccggcaggtgggaggcaggcacggagagaacaaaatgctgaagaggtatgggcaaagcacgcagaacccacttgtgggcactctgacccatgctctgcaaacacctgctgaaggccttgcactgatgggggctcaccttaggatcaacctcaccccttgttggatagctctgacttatccttatattaggaattgttgttcagtcactcagtcgtgtccgactctttgcaagcccatggacagcagcacgccaggcttccctgtccttcaccatctcccagagtttgctcaaattcatgtccattgagttggtaatgccatctaaccatctcatcctctgttatacccttctcctgccttcagtctttcccagcatcagggtcttttctagtgagttggctcttcacatcaggtggccgaagtactgaagcttcagcttcagcatctgtccttccaatgagtattcagggttgatttcctttaggattgataataagggcaaactcaattctgttttgctttacaatcagagcagcccctggaatgggcacggtgcttctgtggtacagggcagctgccaccttgctgcttcaggccagacatctctcagccctggcattttcacactgagccacgatctggcctcagagtctttcttaacactgctttagctacccattacaaacctatgagtacaggcatttccgtgacgcctgtttgccgtccttgccctagggtttatgaaactggggggagccagagagtggaagactcactatatgattctgggcaaggcatttaacttgccctagctgttcctctctgcgtagaacagaggagttaacagaatggaggcagagatgggctttgatgtggctggaagagccagctctcttacagtcaggggtgggttttagatcttggcctcatcatttataaactgtgttctttgggtaggtcacaccacccattctgagcttcacggtgtcttttcatacaagacaggaccgtagtatccccatttgtagtggtgttgtaagcaacggagattatatatagagagagagctccatgtgtgagcagagcctcagtaattgttccctgtaattgttatcatcataactatcatcatcctcatctaaagtcccttccagctcgaaaattctatgactttatgagatgtcctcatccaagaagacggcatggtaaaataaggcaacagtcctgattttgtgtaaatgttctttctaatacggacaggaggaacataattgcccctaaataattgcaccgactttgccacaagctgtcagaaggccttaattggtccatctgtaatgactgcggccatctgcgtgcagggtgatttagcggtgggtctctgccggagcggggccctcatgattagagccggacggggccatatatctccctctgatgggagtagtggtgtgtggtatagaagattagctcatcctcatgttaacgaccgaccagttgaacctagccaagaagaagcgctggtcacaagacaatgactatggatttttttttttttttaaggtagtgttcctgccctaacagcagcctatctggagcgtgatcgtgcctcatgctatcatgtctcgcttcccaagaaagtctcttttggaaagatttagtccctcaattagggcgaattgatttctgctctctacagagccactgttccaaagagaagtggggaagggcaggaggagccatattaatctttgtgagcaagcgagaggcgacctggagtgtttttcagccttgcagcctggggttgtatctggagttaatctttcctctgtgtatcttttaattgttccgatttgcgaggtgccagacaacacagcacaaaacacacctcatctctagtccttacgtttctgaagacttaaatcaagtgtttccccaagtgcaccagcacgaaagtgattttaagtggtacctaagatgatctcaggtggctctgagactttgcattaagtaatgttgactcataaggagagtacattttctctcttcagatctctctttcatttcctctgattacctccaatggaaggtctcggctggttacccttatctcccttctttaaaaagagggaatcaagatctggctgaaacctagtaacattactttatccttattactttggcttttttaattcattagctctttatcacaaatggtactgattttccacttatagtgtttaatgtttccttttaaaataaaattaattaagtaaaattattagcttgaaaaaaaagtgagttgatttaaaaaagaaaatcttaaggaagttgttgtaaggtaggtggaagtggcaaaaatcatgcaggtaatatgatgatgagagattgggaaaacacagctagagagggggaaagcctcctgtttctacggcgaaccaagcagtttcctggctgtattacctggggcaagtttctaagcttctctaaggatcagttttctcatctgtcagatgggaagacttgtgatgcagagtcagttcagttcagttcagtcactcagtcgtgtccaactctttgagaccccatgaaccgcagcacaccaggcctgcctgtccatcaccaactcccggagtccacccaaacccatgtccactgagtcagtgatgccatccaaccatatcatcctctgttgttcccttcttctcctgcccccaatccctcccagcatcagggtcttttcaaatgagtcagctctttggatcaggtggccaaagtacgggagtttcagcttcagcctcagtccttccaaagaaatcccagggctgatctccttcgaaatggactggttggatctccttgcagtccaagggaccctcaagagtcttctccaacaccacagttcaaaagcatcaattcttcggcgctcagccttcttcacagtccaactcacatccatacatgaccactggaaaaaccatagccttgactagacggacctttgttggcaaagtaatgtctctgcttttgaatatgctatctaggttggtcataactttccttccaatgagtaagtgtcttttaatttcatggctgcaatcaccatctgcagtgattttggagcccagaaaaataaagtctgacactgtttccacggtttccccatcta

SEQ ID NO: 49684 - DNA, 1184 bp, Bovine  19866880504055
  misc_feature (1)..(1): n is a, c, g, or t
nactgcaaggagatccaaccagtccatcctaaaggagatcagtcctgggtgttcattggaagcactgatgttgaagctgaaactccaatactttggccacctgatgagaagagctgactcatttgaaaagatcttggtgctgggaaagattgagggcaggaggagaaggggacaacagaggatgagatggttggatggcatcaccgactcaatggacatgggtttgggtggactccgggagttggtgatgggcagggaggcctggcatgctacagttcatagggtcacaaagagtcggacatgactgagtgactgaacttgactgagcaggttaatgaagcaaatcacccaaaaagttagcattaactctaacctgctgcccaaccagacccgtggtcagcagtgaaatagactcattgccaaaagatacttaaagcatttcttcccaacttccttgcagaacgtacagcctccaaaggttcagtcatatctttatcaggcagtcacagttccagagccaattttggcttgatttgaatccagaggcaccttcagatctgtaaacaccggaggcttaaaatgttaccaattttcatagcccaaaataggcaatgcttgacagttctgaagatcaggaaggccagatccacacatttgtatgtctcttatttattccaaaaattaaaagattgcagcaccgtcgatcaatatcacgtttgtgggcattgaaggcttcatttctcttttttctcgttttattctcctgctttcctatctcaaatagaagaatctcatgaaaatttaattttcacatcattgtatagaataaagaaacaggcataggaagaccatagtgacattctttcctcttgtgctacttaggaatgttgattcttgtaaagtatttacagatgcagactgcctttttcaacctttgggatccttgtatacacttaggttctttctataaaagaccacactagttgctcctcccagaatgataaaaagaaataaatctatttgtttgctttgtaaatgcagacctcttcagagatgcccacattgtttatgagcagccaggaatctcaaaacaactaataactcctactgtctattggagtcctctgttgatgtgtctgttaatgaatggaatttactgggcattgctagtaatatgtagtaag

SEQ ID NO: 49685 - DNA, 2997 bp, Bovine  19866880573396
  misc_feature (1)..(1): n is a, c, g, or t
ngctgctctctagttgtgctatgcaggcttctcatacgtggtggcttctcttcttgtggcgcacagactctagggtgcacgggcttcagtagatgcggtttctggactctagggcacaggctcagtagttgtggcacacgagcttaggtgctctgtggcatgtgggatcttccctgatcagggatcaaacccatgtctcctgcattggcaggcagattcttgaccactgagccaaccagggaagtcctcaatacattttttctttttttaaaatattaatttacctcaatacattttttaaaaaggaaaagaaaaagaaatgtctggcctcagtttcctcatttataaaataagtcatgggggaggtgttcccatccagcaatgccaagatgggattttaaatataatacctaaggggaaatcagctggggctgcacacactgaacacggtgggtgctgcctcagtgatgaagctggcttggtcttggattcaggtaataatagtcatcggttcgtttaattcaaaatctctgatccccaaaccaagatgcttcctggctttgggtagatcatagagcctgaacacgttagattgtgaaggactctttgagactgaaacttgtaagtttctttttgtccttcccttctatctggactcaagtttattttatgaacttattttataaccctcagtcctggactacttcccctttctttctggaagcagcactatcatttggagattcacctcccaaaccttcctcagcaccttttcatgtatctatccacctgtagccagatatccagatttattctgcaggaggtagggatttatatcaaaggaatcagcctacccagatttgagtaccatttctaccattcagccctgtggccaggggacccatctatgctgggacataaagattcatctcattacacctaactggggttcagctcacggctgggtggtccagtctttcagaaaagctctaagagggcagagacttggtctatccttttctctggtgattcccagtgtctacaacagggcctggcaggtattactcaatagctatgaatgaaagaagagatgaatacaagcctgatctcacgcatgtagcccatcctctgctggcaattacttccaacttctcaccaacacaagtggtgtgtgatgagcatccctgaacatgtcctcccacccctgtgttcacttttgagaaacagtaaattgtgggggggctctccctgtgccccaaagagcacagtttgaaatcctttgattgggccaaagctttcattctgagcatagggagcccagagagggctgaccaccggccccaaggtcacctagtactttaagaattgagtagagtctcaggggtagtttgaacttctctgccatcttggactctcttagtatctacactgtctctcaccccccaactccagcctatctccctcaggagggtgactttagggacggaagttctgattcactgaagacacagagaaggcatctgcctccagaatcaggggatttcatcctggggttctcagtcccaatattgacttgttgaaggatctgcgtaagttatacttcctccctgggtctcagtttctctaatctgtaacgctggctaacaattcttgcctaactcttgaagtggggataacaaaagagtttatgaaatagagaagagacataggaatctaagagagggctagtttagttttacaatatagaatttttaaaaacaattttcagattaaaggatgtaacaggtttccacttttataaaaagaaattatagatatacatatatatatatttgaataaatttgtataaatccagaaaactaacagcagttacccagaaaatgttatttatcagtggcttcctctggagttcataattacagaggaagtaaaatggctattaacattgtcttgctacactgagttttgtttgattctgtaaaagcttgacaaaacaaaagatatatttacacattaagggcatgtattcatgcattctcagtcatgtctgaccctttgcaaccctgtggaccgtagcccactaggctcctctgtctgtggaattttccaggcaagaacactagagtgggttggcattcccttctgcaggggatcttcctgactcaggggtcgaacctttgtatcctgcattggcaggcagactctttaccactgagccatctgggaagcccatatattaagcggtggtggtttagtcgctaagttgtgtccaacgcttgcaaccccacggactgtagcccactagattcctctgtccatgggattttccagggaagaacactggagtaggttgccatttccttctccaggggatctttctgaccaagggattgaacctgggtctcctgtactgcaggcagattctttactgactgagtaaccagggaagcccacatattaagtatgtaacctcagaaaatcaaaagagaaaagataaatattcctaataggaaaaaaaagtaaagcaaaagctgcaaataatccatttacaaaaggtaaaactacaaggtagttaaataagaaaaagcccagatctttttcttgatcaaatagatacaaattaaagtaacagtgaaatgtctttttttttttttgtctatcaaattgtgaagagtgatgtgacagaaacaaccgacaaggttttattcctgtctagggagaggataatcataaaggggattagcaggaaggtggggacacccacacccctcacagcgatgacatgtccgtcctgtcctgctccccagtgttctgatagagccatcctgaggacagagggagatgacaggacagagtcaccacttccttcagcttccccctcctccagctgttggcgtcttctgactcactgcccctagccagggacactcctcccgcatcagatctaaatcccctttctcctgatgaaagagttctggatcctgtgacaaaaccag

SEQ ID NO: 49686 - DNA, 2666 bp, Bovine  19866880670009
  misc_feature (1)..(1): n is a, c, g, or t
nttctgggatgacctaaccttggacggggtttaaatggcccaacacctctccctggcgtcttacccatcggatcttaccagcaattcttccgggactaacgcctcttgattctgattggctagaccgaggtcacatgctcattcctgaccaatccctatgtccccactatctatattcccattggccaggctgggtcacatggctttccatcagccatctaaaataaaaggcaggggtgggtccccaaattcagtgggaggcaatctccaggaaggaaggggcacaagatggtcaagaaaaccagcagcagtgtatttactcaaccgtaagctatagagcccttaaaatgttgatttaaaaaatggaaatactgaaggtttaaaaacagtccggctacagtccttaatagaacataaaataagaaaggttgacctcaacctcacagaccctttgcaccccctgccctccttgaccctacggagagcctgacccttgcacctgccggtctccttcagaaccttaagcgagtggcggaggtgtggatggacgagtacgcagagcacatctaccagcgccgtcccggagtaccgccacctctccgctggggacgtgactgcccagaaaaagctccgtagctccctgaactgcaagagtttcaagtggtttatgaccaagatcgcctgggatctgccccaattctacccacccgtggagcccccgggctgcagcctggggtgaggtgagtgtgaaggctagggcccgccacataagtaggtctcaagtcaaaatgcacgtgcagggtccacaatttagagaaaaagtggtggtaacacaacactgtaaatcaactacatttcaataaaaattaataataaataaaaaaaaagcttagcatcatctagaaagtgccagtagaggtataacatataaaactttctcctttccttcgctggtctctcttagccttggggtggtggtttttgtttgttcactatttaatgttacaagtagaaaaaaattaaaactttaaattattagcatgaattttactattcatctttatgttctgctgtgccagttttaaaggcaaagagaacattcaatttgtgcacaactggtgaaatttcacaatccatgtttcagacctcacccatgcatatgtatttcttaccagagctgtagaaacacagcacagaactaactcagctgtatttattacacttcttgataatgtacacatcctatcaacatcttactgatgagtgagaaagagctgaaggaaaaggaactctaggttgccccctccttccccttgtttctgtgctatttgctgctgaagtagttgggtcatccagggaattaacgcaagaaagaaaggacatagacttccctgtgggtccagtggttaagaatctgcctgccagtggcggggactcggttttgatccctggtctgggaaggttccacaattgcagggcaactaagaccccgtgacccaactactgcagcccaggcgccctagagcctgtgctcggcaacaagagaagccggcacagcgagaggcctgcacaccgcagcgaagacccagtgcagccggaacgaaaggacacgatagggtttcccagtccctcctgtgtctcggacacattcctttgtgaagctgaagccggttctggttggaaaggagggtgtagcctctgggacaggccagcacccccgcttagtcacagctgtgacaccctcagcccctactcgctttgagtgttgctgagttcccatgcctgtgggggacccagggactctgctgcagggactcagaggtgctgtgtgtgagctcagcagagaggaacagcaggtgctcatggagtccgtgtcacgtctgcccatgtgcatgctctgttatcccatgaggtttcacttacaggtccaaaggtaaaatagtaggactttaagacagtgacagcagagctttaaaccaaacatggactctgagtaaggagccctgtgccgctgcccttctcacacacccaagaagctggtcccgctggaggaggcagatagtccatcaccacatcttggctcctgagatggctgtggcttcaactgtgaacacctggatccagggggttcaaataacgtcagtctctttttgtcctacttaactgtgcttccttgtgtgttgtcctcatgccaaaagtagcaagatagctcccggaaacctcaggctgagagagccccagcttggccaacctagcagaaagtaaacacctctttcccagtagagtcagcaaaggtccaggattgaagtcttactcttagatccgcatgaatcactgtggcctttggagaaagaggggacaagggtggggtggatgttctggccacgggatgggccacagcacccaggagagaagtgtgttgggctgcagacacactaggtgtcacttgttcagccaattagagggacctttccccactaagccctctgcctggccccacctgacaccagcgagagttttctagatgaggtgcctcttggtttccctcgtgaagctcctcatttctttgccacctcattggctttctcccccatgttagttcaggtcctccaggaagcaggcaccaagaggggattaggccagcaagagacttactggggcttcgc

SEQ ID NO: 49687 - DNA, 2990 bp, Bovine  19866880915557
  misc_feature (1)..(1): n is a, c, g, or t
ncccccttctggtggtcctgggttcaaatcctgactcaatcactatccagctttgtgacttggatgatggcacctaacttctctgaggctcagtttcctcatctgtaaaggatgaaatgaggtaggctcaggggatgaggtcttttgggtgaggagcttaccacaagacctggcacctagtcagagcggtgtgagatactgcaatgatgggttcatacatttggctaatatttgtggagtccctgctacatgttaaacactgtgctgggcacgtacagcagtgagtaagctggccaaggcccctgctctcacggaggcggagtgtggtggccagccttggagatgccccccagtgacccctgtgtcccagcatttgcgcccttaggcagttccttcccaaaagagccgaatgcagactgacctgtgtaaccaacaagatgctacagaaacgatggccatgaaggacactgtggcttccaccttgctccctgggatcacttgctttggggcagccagcagccacattgtgaggaccctcaaacagccccgtggagaggcataggttgtgaggggcctgaggtctcctgctaagagtcctgacttgcccaccacatgaataagccagcttagaagtggatcctccagccccaggcaagccttcagatggccgcagccctggctgacacaactgcgtgacagacccaggcagaaccatctcacttagctactcccaaatccctgaccctccaagactttgagataataactgtctactgctgctttgagattattttttcctgtggcagcagatacccaatacagggactttcagacggtgatgtgcactctacagaagccaaagcaaggtaactggacggactcatcagacagacagatgggatatgctgcattaccccacctgtcagggaaagcctccctgggaaggaagtagtcatatcccatgaggggataggcgcatatggggctgcaattagtggaaatgctgcttggagaaatgcaattatattctgatcttgggggagaaaaaaaaaatcgagcaagtcaatagaacagaacattggtctcgagataatgggctcctgatggtagattaatgtcaaggccaagccaagaagtttattttcaaagcaggagatattgatcaggcgccagcatcctataacaataactcttcctttatacagagtgactgatgtggaagtgatgcttttgtctggcggatactggccgggtcgctgggccgcccctgccttgtgggaggcggagcagcacggagcaggtggggcatgccttcccctgttctattttgaatgtcttctgggcagttgactaggctggcatccagctctctcaactccatattaaacttgcattagctaacgaggctgtgtctccggctttgcctggcaaggagccttcctttatgcagatggatttccagatccttctctgtgctgtgacctcgggattctttggccctgaccatgctggccatcagcctgaaggttcctgagggtgaccttgatctactgagaggtctgaggcagccaaaatgccctcagattcccaggatatccggagcccaggaggagtcctggttttggacgatggcttccctaccctagacctgactcactgacagctgagtcagaatgcaaactgccttccgagagatgcatacctgttcagtgaaagctgctgccaactgtcgagttccctgggagcacctgagcggtctgagtagctctgggtacatccaacccctcagaactccctctggagcttccctggtgggtccagtggttaagaatccaccttgcaatgcaagggacactggtctgatccctggtccaggaagatcccatgtgctgcaggacaactaagactgagcactacagctactgagccagagcccgagagcccaaacgactgagcccgtgtgctacaaatactgaagcccacatgcctacagcctgtgctctgcagcaagagaagccacttccatggcgtggctctgccaccaaggttctgccaccaagtcagaaaaacgacatcatctctttgagcttcactttctccatttgggaaatcgggccacaggatatatgaagacaaaaaacacgacagtgttgggtgaaagggcaaatactgtatggtttcaaggcaactgtatttctcatcctttcgcaaagagaaatgagtagcccctgcttgccataattagagcaaggccacacgcagcaatgaagacccaccacagccaaaaattaaaataaataaatcctaaaaaccccaaacaaaccacactctggccactcagaacacatcttaacgcagcagcaccaccctgctgtggtggtcactggttatctggcaggatcccgagactgcaggggactttccatctagggacatgataaaagttagaggcatcgacttatgtcctgacttgctctgggccggggagatggactccaggttcagctcctggcccagggcacctacctgtgtacctccaggccccccacctccctccctttacagcagaggacagcagccacccaaggcccacaagaaccacagcaagggggtggtatgagcagacactcttttctaatgccagtgccaccagtgcagccacgtgacctgggtgataagcatcactgccaccttgcaaggctgccgagacggcctgagacaagccgtgaagagcactcagcttgatgcctggccacagcaaacctgattagtgttacttacttctctttgcgaaaggatgagaaataccactgccttgaaatgatacaccccaaaccattggttttttaaaaaatatcctatggcccgatttcccaaatggagaaagtgaagctcaaaggagatgatgttgtttttctgactgacttggtggcagtacctgaaactgaccaggagaatgacagggccaggcgagtggggcatagtcactg

SEQ ID NO: 49688 - DNA, 1465 bp, Bovine  19866880969470
  misc_feature (1)..(1): n is a, c, g, or t
natggagatgtcggctgggaagggcaggatgaagaaagtatatcagacaggaattgatgccactaacaggtatttaaaacacctatgatgggccaggaactagggtacagagatgaacaagactccctccctgccttcagggagctcagagtgtagttggggagacaggtcaatctttgggtcatgtcagtgggaggaaatcagagacatgctgggagcgacactgggctggcccttaatcacggggagctcaggtaaggctaagaggagacataagataggctgagcccaggaggatgagtgtgggttggccagactaaggaagggtgtttcaggaagaacgaatagtgcatgcccctaaagatggcaaagcctgagagcctgaggcttgtgagcatcccatatggctgggtaaggtggacctctgtggtttgccctgtaccacctcttctgcacacagtgcccagactttcctttggggaaccagctcatcccaccttcctgattctgggatgggcatgtgaccaactagattcagacagcatctgaccaatcagaatactcctcagggatgagcgaggaacccagaaggtcaatgagacttgacttggggacctactataggaatgatgggaaacagaaactcttcccactgggctgctgggtatttccatgaaagaaagcttgcttgagagggaagccaactcagataaaagcagagctgagggactaagggagatggagcctaaataagatgggttagtctctggatctagctggacctggaggatctaccctggaatttcagttgtgtgggccaatcaattctgacctttttttgcttaagccagattgaccaggatattggttatctgttactaagagtccagactaatgcactggggaggagggtggagagaaagcaaggaatggtcagcagctcgtggaggtgggtgcaggccaggctacagggttaaagaattatctgaccatcagaactgggaagagtgtaactgccaggcaggagaactctcataatgtgactgtgccttttagaaacaaaaggtgttgactaagagagaaaagaagaagaagagttaatgactcctccagaaatttcagagccttcggaacatcttttgtagggttttcccatcaggatagatggcctggtctgaaattggagccaaattattaatccatcagccctgatggcatgtatcaatttatcttaatttctgaaaatacactcatgcctttcagaccggtctctcttctctgtcaccaaaaagaaaagggggcccagcagagatttatcagaggccatttggccctttgtaaatgccctgctctggctgaaactgaacacccggcatttcaggcagaccactgggcccccctgtgccctcagtgctgtgggcaagcctgcctgagagacagcatgctggcagaggggctgctgcca

SEQ ID NO: 49689 - DNA, 1897 bp, Bovine  19866881056922
  misc_feature (1)..(1): n is a, c, g, or t
ntttagtatctttgccatactaaagattacacacatatatataatttaatatatattatttataatgttacattatatataaaaatatcctatggtatatcacattttatttatccatttatcatcgaggaacatttgggttgtatagattttatatgtactacataatcttatatatgtcttatatacatatctctcacatatcaaatatatatgacatatgtgatcatatatatagtcaaatttaatttttaaataatacctcttttcttttataacttcttcattttcagccttgaaaggagaggtcttcccatttttcctctaaaaggccaagtagtatgtatatgtttcagattttgtccgattctgttgcaattactcggttgcaactactcaacactgccattgtagcaagaatgcaaccatagacaatatagcaacaaacgtgttccaatgaaatattatttacaaaaacaagcagtggtaattctgctcctaggtatctgcccaagagaaacaaaagcataggtcccaccaaaaatatgtacctgaattttatagcagcattaatcataatagccagcatgtagaaataactcaattgtctatcagctgataaatggataaatagtcacgccatggaatagtattctgctataaaagtcctgatccgtgctgcaacatgagtgaaccttgggagcagtgcgctaagtgaaatcagttagacaccaaaggccacatactgtataattccatttctatgaaatatccagaataggctaatctatcaacagaaagtaaactggtggttgctaagggctgggagaggataggtgataggaggttgataactaatggttatagagtttctttttttaggttatgaaaattttcttaaattgtctttggcaacggttgttcatatctaaaaaaatactaaaaaccattcaattgtacacttcatttttggggggaatcaactgagaatatgtttatttaaaagcaattttaaatattaaaaaggtagaaattaacacataccatactaaaaaactgtcacattaaatgaaatgatgagtgtactgatgtttgagtgtaacatgcaaaattcaaaatttaattcatgatgctatggggttcctatacaatatgtttaatttctaggaaataaaaaataaatagcaagtgcttttcaacagtaaaataaaactcacactatttgcggaacataacgttcccctctgggggaaaaataactagttagctattttttccaaaataagtgaattctatggtatgtgaattacatttcaataaacctgttattaaaacaaaagggaaaggcagcatggattcgatccatgggcagcagttagctgacccctgctctactttgcacatgcagtctcctggaatctcttacaatattttgtattattttcattcttacgttaaattttttgacacacttgaaatgcaggtggtgtaagatgggcggttgtttttatttatctcagtgggctacataatttgtgaaataagccatccctttttccagtgaaacgagatacctcttttgtccagtattgacacctgtatcctggagtctaaatctggattatttaccatgtcccatggatctatttgtctatgcctttcctgatatcagactgatctgattttagtgactttattgcatgttctggtttctgtaaaggaagtcccccctcatgttcttttctttaacacttgacttgtagccagtgagcttatcaaaatggatatcacgcccctgcttaaaagcctttaatggatttccactgctcttacgattatagcccaaatcctaactatgtcttgagtgctgcacacttggcactgcctagctctgcag

SEQ ID NO: 49690 - DNA, 1497 bp, Bovine  19866882105255
  misc_feature (1)..(1): n is a, c, g, or t
naatcaaagtattgttgccaggaaaatgagggaatgggtccaagccagacataaatcacagctgctaactctgtcatacagaagttctctctgtgttgcaagtctggcactaacactggccctctttaaacttcactttccccctttgcagtacacaggtggtgcttcctgcccttgttggccccatctgagagacccagtaagacagtgtaccagaaatctgtctaaactgtaaagtgcagtgcacacttaaagaaggggggtcacaagaatgattactcagcaattgttcttacccacctgtccatcttttctctactctctgtcttgcagaacacctgaagaaaccacttgaagactacatggcccttttccccagcgtgaggattctccgaaccaagaaacgggaaggactgatcaggacccgaatgctgggagcctcagctgcaactggggatgtcatcacattcttggactcacactgtgaagccaatgtcaactggctcccccccttgctaggtaagggaggcttgcaaggtgaagtaggcagcctggagtgtgccagtggccaccggccccaccttttgcagggagtcacctactgggcttcccttgcctgcctgagatgcacccagcactgtgccgggtgccacgagggtgtcagatcttcaagggtgctcaaagtgaccttacgaatccatgcagtcctgccccttcattttacagaggaggaagctgggactttgataggggaagtgacttgcccagtgtcataaagcacgttagtgttagtgatatgactgcttctcccaagttacttcaggtgttattggaaagcaagccaagactgcctacttacaagaactaaatcttagcagtaggcatcttgatttgatgatgtaagggacatcatcgaatcaactcagaacagtggttgttcattgcattgctactgtgagccaaaaaagctgtaagctttatctccaggcctcacaaaaccacaccaggtccaaagtatcccctttttatattagaagagactgaagttctgagataatgagtgactcgctagttcccttgggcaaaaagtgtcaaagtccccatctgtctgactccagagtgtatcctctttcaggattccatactgtctgcctaagttcatttgctcctcagggagtttctgacagctgtcagggaagaggtccagacaggggcagcgtgatccaagagtccattcacgcaaccttgtgggcaggagggagacctgaagccaggctgccaggcagtgaggtgcctcatggctggttgaagaaccagatctgaatccagagctttgaggaaggcagtaagctgctcccaataggtagatgctgaagaggaaatcccctagtggggctggtggtcaggtgaggaacagggatggaggcagattggggaacatcttgtcagtccagagagaaaagtgaaagcctcaataatagaatgagtatgggaatt

SEQ ID NO: 49691 - DNA, 2414 bp, Bovine  19866880214648
  misc_feature (1)..(1): n is a, c, g, or t
ntaagttcaatacaactaactccaaagttattttctgatgggtgtaacagtggtcatgtatggatgtgagagttggactgtgaagacagctgagtcccaaagaattgatgcttttgaactgtgatgttggagaagactcctgagagtcccttggactgcaaggagatccaactagtccattctgaaggagatcagccctgggatttctttggaaggaatgatgctaaaactgaaactccagtactttggccacctcatgcaaagagttgactcattggaaaagactctgatgctggaagggattgggggcaggaggagaaggggatgacagaggatgagatggctggatggcatcactgactggatggacatgagtctgagtgaactctgggagttggtgatggacagggaggcctggcgtgctgtgattcatggggttgcaaagagtcggcacgactgagcgactgaactgaacatcttaatcccttaatatcactaagcttgagtctaaaatagtgaagctttaattcatttttaattattaaacacactaattgtgagccttgtatgtgacagacaccctgcaggattctaaagtttaattcattttaaagaccttagatacttcctgctgtcacagaattcatagtcaagtaattgtcacccatttaagatttttgtacttccactatgtgtgagacacaatggagataaaatggccaaaaagatacatgtattgaaaaaagtgaattgactgaattaatgctataaatgcctggagtaatgtactcccagaattgaccatcagtatgtttaatctagtctcctctgacatctatgctggtgcgtactcctagattcagtctccacccgtggttacctttaatttgggtaatcttatcaagtaagattttgagtctgcacagtttgaatcacaccttaatgctcctataaataggcaacttctgtgaatggtcctctatcaccatcccatgctgtattaaaaatggttatatttgaagtatctccccaaagctttgtatcctctcttaaacaagctgagtgtgccactaatgtcagtgctcaaggacacactcaaacccatctaaatatttctaagaggtgttttccatattatttccatctgatggtcaacctctaagaagggaggagggaaggagaaataagggttatgttgtctcacctgtctgttcatatgtgtgtgctaagtaacctcagtcatgtctgactgtttgcgacccccatggactgtagatggttggatggcatcactgactcaatgggcatgaatttgagcaagctctgggagttggtgatggacagggaagcctggcgtgctgcagtcctttaggttgcaaagaagcagacacaattgagcgactgaactgaactggacctgccaggctgtgaggttctccagacaagaatactggagtgggttatcatgccttcctccaggggaatcttcctgggccagggattgaacccatgtctctgtgtctcctgcactggcaggagggttaccactagcaccacgtggaatgcccattttacctgtttaatctccttaaacatgcccttgttcctttcttccaaaaagtcttaaggtagtacatcatgtgtgccatagactattctaggtatggctggttttatccttgtggtataatttcacatgttcctccatccccatatatttcgattagctgaaagttacatctagaggcttaatttaattctgtttttgttttgtgttttctgagggttatttttttctgttttttccctcctatcatatcaggaggcccgtaatgtggaagttttcttctattagtgatgttaacatagttgtgagcacttaggctaataaaggctaaattattagcctaaatcttccattaaatttttctatatcattctttcttctaatattttagcatctactgatattcataaaccagctccattgtttcattaggtaaaagtcttatttattaagtgccaaagatgagtctatattgacttacttgaaggaaatttttaggtgggtttctaaggactatgtatgcaggcgagcactgcagtgtttaattaatagccaacctcccaagtcctggcctaatggaattttattcttttgttaatgtaatggagtttgagttactttttaatgaccttacatgattgactcttcccattagagagcaacagtttttgctgtgcattatttttatgcatctataatacaatttgtgttttggaagcacttcagattttgcctttcattatctagctattattttgcaattctgctttcatacaaggcaaagcatacaatcagataaatgaacaaatcagaaagtagcccacacttcagttgagaaagacacaaa

SEQ ID NO: 49692 - DNA, 893 bp, Bovine  19866880351383
  misc_feature (1)..(1): n is a, c, g, or t
nccatttaaagtaagtctacaatataatactttccagcaatattaactattcacatgaaatgttacaggagtatctaagggaacacagagactagcaatggttacggaagaacctcaggcatcttctatgctttaaactgagtggatagtttcctacccactaagtattatattgtatgatttgaagacagactacatgtcatttttattatactctgtcaatctataatatattagaccaatgctttatctaaaatgctttgattttgtgtatcttgacaaattttactaccgtatgtaataaacgtgtatttttgtacttggagaaacttgctaaattttaaagttgtttggttttaaaggcattgataagggatatgtatgaagtccatactgtctttcaaataaaacactacccttcagaaaaaataaataaataaaataagtctaaaccattctctgcatgcaaataccagatgcccataacagcctttcaatgctggttttatttgcacttcagaggaaactgaggctcagaaagtgcctgagaacacaaagctggcttgagccatgatctcagactcaagtctggccagctacacattccgggctctgtatttattggtacattcattcaacaagcactcaagtgcctaccaaacgccaggcactgcactggccctgtcacatacctcagaacagctggatggctgaccccgggtctctggggaagctgaggaacaactatattattaactgagctgtcacttaagctcagctctgggagggcctgccttcactatgccacctccctctctgatccaaggggaaaaaaattaacgagccatccaccttatttttaaaaaactgacgtaggtttaagaaggattcta

SEQ ID NO: 49693 - DNA, 1645 bp, Bovine  19866880482718
  misc_feature (1)..(1): n is a, c, g, or t
nttttaggatttgaaacagctaattggaattcctcacctccactagctttgttcacagtgatgcttcctaaggcccacttgactttgcattccaggatgtctgactctaggtgaatgatcacaccattgtgattatctgcatcgtgaacatctcttttgtatagttcgtctgtgtattctttccacatcttcttaatatcttctgtttctgttaggttatttctgtcctttattgtgcccatcttttcatgaaaagttcccttattatctctaatttccttgaagagatctttagtctttcccattctgttgttttcttccatttctttgcattgtcactgaggaaggctttcttatttctccttgctattctttggaactctgcattcaaatgggcatatctttccttttctcttttgccttttgcttctcttcttttcatagctgtttggaaggcctcctcagacaaccattttgtcttttttgcatttctttttcttggggatggtattgaatactgcctcctgtgcaatgtcacgaacctgcatccatagttcttaggcactgtgtttatcagatctaatcccttgaatctctttgtcacttccactatataatcataagggatttgatttagttcatacctggatggtctagtggtttttcctactttcttgaacttaaatctgaatttggcaataaggagttcatgatctgagccacagtcagctcccagtcttgtttttgctgactgtatagagcttctccatctttggctgcaaagaatgtaatcaatctgatttcagtgttgatcatctgctgatgtccatgtgtagagtcttctcttgtgttgttggaagagggtgtttgctatgaccagtgtgttctcttggcaaaacacatacaggaagagaattcaacattgatattgatgctgcaaaaatatttaagtgctgaatttttcacatagacacaaaattagtaacatcaactgggaatatatcctaaaggagttttaagatggaaattcctgactttctacttagaagtagtagcacatataaacacatttaaagactgtgggaaagggaaaagcaatagcaatttgctatcaggatttagagatgtttgttcatactaagatacaaacctatgtcaacataactattgttgcacttttttttaaagcaacatttaagtccttcctatgtgtctgatcttttaaaaatagaatttctattcttcattattaccaagtaatatatatgcaggtcgaataaaggctcagcaagatgaagctgtccattagagaaccccaaaggtcagtgtctcagaagatgtttcagtgcaggctgctaatggcaagtagatcttgctcgcatatgttaagtcaatttaaatcagtaaataattgagcattgctccatgaaataatctgcacaaagactcgaaaagattatgtctaggtcatctttcctgatctccctaaggagactaatttcagagacattctctgtgtggggagttaaagaacaatcaagtaggactgagtgtcaaaatgttagagcagtgattgtctacaacattggttaaccaagtacagataatccttgagccgcatctggcctccttcctgtttatataa

SEQ ID NO: 49694 - DNA, 1334 bp, Bovine  19866880510412
  misc_feature (1)..(1): n is a, c, g, or t
ntcagtgtggtgttcaggcttctcattgcagtggcttctcttgttgaggagcaggggctctaggtcaagtgggcttcagtggttgcagcacatgggctcaacagttgtggtgcacagactcagttgccctgaggtatatgggatcttcctggaccagggatcaaatccgtgtcccctgtattggaaggcggattctggatcactggaccaccttagctagtttatttttcaggtgttttcagtatactttattcctcacaatagcacttcagggtagataccactaatttcattgtatgagtaagaaaaactaaggataagactgttaaataattacttagtcttagaaaagtgaagaagtgagcttgaaatccaggtctaactctaaagttaattacctttttccatgtgaatgtctcaaaaaaaaaaaagtttgataaatgaatatataatgaaaagcaatcacaggagacttcttttacttctgatccatgatccaagaatataactctccataaaggatatttcttaaagtttctttgccctttttcccttcaggagggcgtaaggccaaaaatatcagctagatattataaaagactaaatgcacgtctacaaataaactgagcatttataggaaggggcactaatttggacattgagaaacaagtgttaaaatttccgttcacttaccattattgaaacagcccaaaggggaggggagtacataactgcaaactgctgatgtgaattttgcaaaaaaaaaaaaaacaaactaatttctgactttatgagttgttacacaacacactgagttgcttaagtaatctttcccttttactgagatcattcagttgccggctgacttagattgctttaaacgcaatgtgctcagaagcagagagtggggctaagattgcctcaccagggccatgaaagggtcacctcattcaaccctcatcagtctctgctgccagaacccagctctaatttttcagccaagttcctccaaaatgcacacttcgtacttgagattccaatgacacagcactgttaagccaagggtccgttgaaagtctgcaccctcccgagttcccagtttggatttaccataaagcactgggtgccaggaaagggcatttagagctcactgtttccttccgcccacgcttttcagctccaccctcatcactgctggtggttttactcccctgctgtgccccttaacagaccggagaaagaagatacgacaggctagctttactactactaccagaggtacttgtacagtaaaccgcacgtttcctctgcctgcgtgtgttgcgtgtgtaatt

SEQ ID NO: 49695 - DNA, 883 bp, Bovine  19866880521485
  misc_feature (1)..(1): n is a, c, g, or t
nctgtttatgaaatttcccaagcaagaatactggagtgggttgccatttcctcctccagggatcttcctgacccagggattgaactcacctctcctgcatctcctgcattggcaggtggattctttaccactgcaccatctaaattgagacctttgtgggaaatacttaaaaagaaaactcactgagctactagagcaatttgttatagtaggcaatccaatttggagatttttttttccccctagtttgaaaatgtatagaacagagttacaagacagaataaagcttccacaactcttgactaaggatacttgggagataaaccatctacaagggtaaatttaaattggaagaatgtcaacgcttttctttttatctaaagtaggagagagagagaggcatgccaagacaatgtacacatttaaatataaaatattaaaatgcctttcttattatttgcaaacccaagcacgagataaagcaaatagtgtatgtatttccagatacttgcctgacaagttcttaaaatggattttttgccaaagtgacaacagagagattattaaattagaagttgaaaaggggtaaaggaccattgaatattgatggaaaaaaatgttgtgtatcgtgttaatcacgaataaagcataattgattctcattagaaagataatttcagtactaaagtcagaaggcaggaggaggaggaacaacagaagatgaaacagttggatggcatcaccaactcagtggacatgagtttgaacgggctctgggagatagtgaaggacagggaagcctggcatgcctgcagtccatgggattacaaagagtaggacatgacggagcgactgaccacaaagagtgttatgtaagtggaaa

SEQ ID NO: 49696 - DNA, 1644 bp, Bovine  19866880561898
  misc_feature (1)..(1): n is a, c, g, or t
ngaagggaaggaactaaaccattagcaacttaaatttctgagctgcaagtgccctttatgaccacttgattgctttgatttaacacaatttattgaaaaatgtattgtttgccaagtaataataagtgccatggaatatactactagggaggaggagagaacagaaaaagctacaggaatggaataattatccttgaacttttaattctataaaatcatggagaatgtctattttattcaccaacataccttacattgaacttagtgcctagcacactggcagtgcctaacagagatctggtgagtgaatgaatgaataagaaacaaggtcaggagggactgggaatgtttggataactcagacaagggtcaagcattgagtcacatgctactcaccaacctgaaagctctaagaaataaataacaaagaaagtcattacatatttaaataaggctcaaacatgcccttgccagtgaattgagggcaatgaaactggcagttgaaaattagtacatttgtgggtgaaaaggacatttacacttcttccttccagttcctgggaaaggtactaagtgattccaagagccaggcttcataggtagtctcctgaatgaggtcaggaagaaaaacctacatttttaagcatgcacaccagaaaactgttaccaccaactttgtcatgcctgcatcctcttggagattttaatcccaaaatagtttcattaatttctacaaattggtttctaatttgacagtttcctcagtggttatttctcccaaccctagtgagtccgggaatagcttgagaggtttaaattgtggggtttcagatacatggctctaagattttgctatttgcacagtggaaaggattttaaattggtggcctccatcaaacttcctgcttgtatttcttctgggtagattatggataatatttttacatccttacctcctctgggttttttgtttgtttgttttttcttatttgcactgctgcaacttagaatgtccatctcacatttgtgcatgactactggaaaaaccacaactttgactatacagacctttgtcagcaaagtgatgtctctgctttttaatacagtctttaggtttgtcatagcttttcttccaaggagcaaacatcttttagtttcatagttgcagtcagatccacagtgattctggagcccaagaaaataaagtctgtcactatttccattttttctccatccatttgtcttgaagtgatgggactggatgccatgatcttagttttctgaacgttgagttttaagccagtttttttactctcctctttcacctacatcaagaggctctttagttcctctttgctttctgccattagttgggtgtcatctgcatatccgaggttattaatatttctctcagcaatcttgattctagcttgtgagacatccagcctggtattttgcatgatatactctgcatataagttaaataaacagggtgacaatatacagtctttgatgtactcctttccaaattttgaaccagtctgttgttccacatccagttctaactgttgcttctttacctgcatacagatttctcagggggcaggtaagggaggtcaggcattaccatctctttaagaattt

SEQ ID NO: 49697 - DNA, 1520 bp, Bovine  19866880655785
  misc_feature (1)..(1): n is a, c, g, or t
nagtgggttgccatttccttctcccaatgcataaagtgaaaagtgaaagtgaagtcactcagtcgtgtccgactcctagcaaccccatggactgcagcctaccaggctcctccgtccatgggattttccaggcaagagtattggagtgggttgccattgccttctccgatattatgggagtgggtctgaaaaaagtatacaaggccttgataagactagctaggggagcattctctggcctccttctgatgtctgtgtcagaaactttctctgtctcttttcactttaataaaactctactgtacaaaagctcttgagtgatcaagcctggtccctggtcctgaagttaaatcttcttcttctttggagatcacgaatccaacactgttcatcataagctttcaataatagatattccaaatactggtataaaagacatctttgggctcataaaaaataggatgattaaaaatcatcatatacatatataatcaaattgcaagactccccataaaaatatctttacattctcacttggtaaactatttcattttggaataattttaagaaaattttgtttccttctttctcaaatataaatctatatacttaatcgtgattaatctgattataggtttatttagccctgtgtgtttttacatattaataaggtgaaagtatatgtaactcctttcttccttccttcagtctatagttatattatctcctctaagtagacaaagactggaaaatgtcacaatataagatacttagataccacttatggttttatgtggagcctaggagagttgccacctacacacatgagctcagaatatagcagtcaagattcagagatgaccttttggtccagctgtccagaacagataagatcaatgtcttaggtctgaaacttaccttgctttagatccattgtaatgtttactatagagctctgctcatttgagaactatttatttatttacttaataaagcaatatattctgttggacagctgatagctttgcaaacagcccaagtttttttccttttttcttcctcagtgagaacatgctggagtcagggaattctctctccattaaagaaaaggactaaccaaagataacagggatgcatctcagttattggactctgagaggactattgctagcatgttctgattgtaaaagggactgtaacacacattcagttgcctcttaacctcttaaccagactaaatgagcctcattgtccatggatatctggctctttccactgaccattagaatcaagacagacagaagcagaggatatgagggtcagatataccagcaaagccacagagtaaagaaatcagtaagaaatcacaagtcagggaaacaggggaagctgtaaaatcagtgaagcataataagcaaaaactatgagatcagcagcagggataagggaaatcataatcaggatgaaagttgagactaggttaaagtcacttaaccagacacactgggataagaaacata

SEQ ID NO: 49698 - DNA, 3111 bp, Bovine  19866880682323
  misc_feature (1)..(1): n is a, c, g, or t
nagaatattctagcctcaggcctcagatagggaactcgggtggtattatacaattttcactaacactagctgaaggagagttctaaagaggtagtttcattcctgaagagcatcagctacactagaatttgggaaatcacaataggtaaggaacaatctttcagctgaatcccatcctttcctcaaatgaatttacatttaggcttgtcctcacaaggaagaaggaaggaaggaaaagatggaaggagggaggaaggaagggaatcactcctcatattcccatccctcattgtataccattcaataaaaatttaaaaggaaataatacttcaaagcactagaattcactctgtgtgtgtacctaccaagacactcttgaagcacttgtaatgtgtacagtgtatattgggatacctggagttgtgccctgtacaacctacaaggtcatttacatgcagacctgaagtaacagttaagaacatgcactcaagagctggcagatctggaatcaagtgatcctaaccctgtgactgtgggcaaattaaagaaactggctaagtttattttccacatccatgaaatggagataacaatatgaaccaccacctaaggttactggaacaataaatgcaaataaaacacacaggacactgcctggcacatatgagtgagctctaacactcgtttaatttattatcacagggcaaattttgtggtaagtgtcacaaaagtatatggagctatatgcttgaatatgattgaatatgaggaccctggaattttaggcttcaaaccccattgctaaacattaattagccatatcacttgtatctaacctttaccatgaaaacacatataatatgacatgcctttgtgatctcatactaactgataaggttagtagtctgctagggtctaagtatctgtaaccttagtaaccacactgcacaaactgcacatccccaagtgtcacagcttccccagagcccaagaaaatagaatagagaagggcagggtagaactgatcatagcaaatataagcacagtgatgtattaaccaagaagacagcctagttttataaaaagaaaataaagtacaagcacgctgtagattttttttttttttgagcatttgtacaaggaccaggaaaacatagttggaagtctcatcatatcgaccccaagactgacagcaaagttattattcttcagtgcagccgaggcctagaagtcaggtagattattaacagcaggatggatccttcacctttaggtaactttcatacaaacccttgtctcttcctaatgccaatgcctatcagcccattaatcacagcagcctcttcccacagctctctcttcaaatcttactccccaagtgtgtctcagcccaaattccatctgtatttagttgctacctttcagttgaattccatcacactgctggctgctcctcttgccattttacaaatgaaaaagaaatatgctgttattccagtaaaactgcagtggttcttaacctgggtggttttgtttccccaaggatgtctggcaatatgtggagacttatttggctgtcacagctgggagggagctactggcttccagtggacagaggcagtgccaggactgtgacaggcatgggaggttcccagagctccaaatttaaggaggcacttactcactcttaggttatccacactcaagattaaagttcacatgaccgcaagagtgattgcctccttaaacaccatggcctacctgcctcccttgcctccctctaatcctagacctgggttaaggccagggctgcttctaaacatccccaaaaaaggaattacccagtccaaaatatcaataatattgagaccaagaaacctagatcagtttaaagaatctaaagaaaatcagggttggaaacaggattccctcccttttctactttaagttacaaatttaaatgcacactctgttaaatctaacatctctaatagtgaaataataccaaattctaacatttagcttcaatctgttttattcccagggcttcccaggtggtgctggtggtaaagaatccctgctgatgcctgagacatgggttccatccctgggttgggaagattcccctggaggagggcatggcatcccactctagtattcctgcccagagaatcctctggacagaggagcctggtaggctacagtccatggggtcgcaaagagtcagacatgactgagaaatagcacgcacactcgaattttactccaatccatataaactacaacggaggtgaattaattcaaccttctcttccctggcctatgtacttaggcctcagtcttctctctgctagtgtatctttcactcaactcatttacctctaaggctcagatgcaaagctaccttcccatcaacatgcgactcctcccttctcagatctgtttctctttcttgtgtatctttctttgtacttatattccactataatcatttttttttaattctccctatccctgacccaacctcccccaccaacccacacgcacacacacacatataaacatgcaaacacacacacacacacacacacacactcatttaatctccttactatcatgaatcagattttctttacttatatatatatctccagaaaaacctctatgtagtagagtgctttgagtaaagtacttaatgtatgtttgaaatgaattagcgaggaatttacatacaataatattaataatacagcatgaaccataatatttcctgttgattatctgaatcttaatataactgcattactaggccttgttaaatccgataccaattttcttctcctggcagatgtcaccgtctatttatttatttattttttggttgtgctgggtcttcattgctgcacaagctttttttcagttgtagtgagcgggagctactctttgatctggtgcctaggctcaaagcactctactacacagaggtttttgtggagagagatatatatatatatatatatatataaaggaaatctgattcatgatcctaagcaggttaaatgagtttgtgtgtgtgtgtgtgtgtgtgtgtgtgcttatctgcatagacat

SEQ ID NO: 49699 - DNA, 1661 bp, Bovine  19866880715545
  misc_feature (1)..(1): n is a, c, g, or t
nataaaatttgcagtaacatacatgtgagggccatattggtcaaactagaaggtcaagaaagatgtattctgaagcattggcttgagacaaagcataaatttgtaatatcaggttatttattaaggaaaaatcctccagacaaccaaagacaactaccaacacccaagatactggctcaaccactaagccacagctcagtgaacaaaagcattcaggagagagatgtatgtcttctcaataatcatctaaatacacaactgaatatcagtatgtgtgtatgcttttttaacttagacactgagtactatattccagacagtggacatagtgcacaaaagttgcattggccattatttaaactcacagttgtgggggagaccaacaaaaaccaagtaagcaactaatataaaattgctagtcgttgattattgtcatatagaaattaaataagatgttttgatagaaaatacagtctggctatttattttaatttggtggccagcaaattccacctgataggattaccctggagccaagacttgaagaagcaggaatttatagctgtacaaaaactggtgtctgtgtgatagtatatgtgaatgtgtttaatgggggtgaaatagaaggggaggcaaaatgtgctattactcaacctgctagtctgcaggagatagatcaaagcatttcattaagaaagctttgctaaagggaaagcaaaacaaacaaacatcagctgagcctagtaaagtgacttacattcaaagtacttaactgtttgctgctctttgacatactatttgctgactagtaagcagcccactggggaagggaatggcaatccactccagtattcttgcctggagaattccatggacagaggagcctggtgggctgtggtccatggggttgcaaaagagtcagacattactgagcaactaacactcaagcagcccattccacttgtctacagtacaccagatctagaaaataaaatatgaaaaagcccttgaaaaatttttcatgctcctcgggaatggacaatgaatcactgtatctggtgtgtagcaagattgctgggacagcgtatgaaattatgaagggataagatttctcaagacttagttggatagatcaaaaagtctggaattgttattatacataaccaaaaaggcacaaatgacttttcagagggaaaatatgtattgcagtttatactttttgggtattaaagaagtaataaggtttgtttatacaggcttttctgttcaaattccctatctctgacaataagggtgtccttttacctccgtatgctaggagtgcacttttcacgtgagagatttattttctactttcacgggacagagaggagggtcagacatcctttttacactctccattcttaagtaaattcaactcaaaataatcagtatggctactgaggcacatgttggggtggcttaccttggaacccaacacatttatgcttttattcctgttttattaaagtattactctgaatacttttatatttatgtgttatatctttaggcattattttaattttaaacagcttctttaacaatgaagaaatgttagaggaatgttagagaattcaaagcttaaagaataagttcaaaggattttgggataatagaca

SEQ ID NO: 49700 - DNA, 1280 bp, Bovine  19866880830855
  misc_feature (1)..(1): n is a, c, g, or t
ntcagtgttttcagactgttcggcttgattacactgctgtggtaccacttatctagagctattttaagcatcttcttgggttacagtaagctatattgtaaatctaattacatttgcccacaggaaagtaggttcatgtgaatcctgctctgtaatctacttaacaaaaggcactgtatttttcttcatagcatttatcaaaattgttattacatagttatttatatttctaaatgcctttctcttccactataaatttcaaaagggcattgagcatgttgtatacacagtactttttgctcagtgcctagagggttaatgaatgtttgatgaatcaatgaatgaatgagtgatcacataagagataactgaattatatacatttatgcttgacattttaaactcatgctgaaaatgtatacatacttcaggcactcattgggatatattacagtatagtgcaacaaagcacaaattttcaactcaaatggaatggatttgggacttccctggtagtctagtggttaagatccccacactcacactgcatgaggcccaggttcagtccctggtaagggaactagacccttgtgtgctgtaatgaagacccccacaactaaagacctggcacagtcaaaaaaaaaaaagaatggaagaataaaacaaatgaaaaaaattttaatggaatgaatttaatgtcagatctggcatttcataaattgtgtgatcaaagacaagtgaaatgagctctctaaccttctgtttactcatctgtaaaatgtgaacaattgcagtggattaaatattaaagataatgcattcaaaaatatgaagcacactcatggcatggagcaaagtcttaatgtggtgggtattatcacttattaatatttaatatagctttttaagtgaattatataaatctaaattatctaagggcttttaaaaattgacaacagaaatctagtttgagcatatgctagcagtaataactcatcgataatttacaataataaaatgaattttccaacactttcgtgtctatttttccaattttaaacaagttattttcaattaaatttcatcattttttactctgtacactccttacaaattcttcacaatcactcaagaatccttctctattggtcttcataacaacaatttgaattcatcagttcaagtctctcacctagattgaatactcttccctaagcaactctcatttcattattgtccctgtattgtccctgtatttcataacttcaaccattatcaca

SEQ ID NO: 49701 - DNA, 2212 bp, Bovine  19866881017490
  misc_feature (1)..(1): n is a, c, g, or t
ncctagaaaatgatacccacatagaacatctcaaaaaatggcttcccagcatgaaagcaatacctcgccttgtcactttggaatctgatgttccaagtcaaatcctttgacttttcctagtgcatttccctcagtattatcaagggcttcccttgtggctcagctggtaaagaatccacctgcaatgtgggagaccgggtttgatcctggagttgggaagattcactggagaaggaaaaaactacccactccagtattctggcctgaagaattccatgaactgtatagtccatggggtagcaaagtgtcaaagacgactgagtgactttcactttcattattaagataaggttaggttattaccaagataagtctatattatcaaatagccatttactgcatccacagcaaaagaaaagcatcagtttatttcctcttcaaattatggggcttcccaggtgactcagatggtaaagcatctgcctgcagtgcaggagacctaggttcgatccccaggtctcctgcattcgagccatatgtcaaatgatggacattaagacagccaagaatttctgaaacaattactgcttttctcagatttagacgatgggataccaggccacccaactagtcatactgcaaatccacctgaactggcttcatgaaagatcaggagccatctctgagaggaataccattgaggaacacagccttagcttttcagaggagacaaatagccccctttcccagagaatgctttatgctaagctgctaagtcacttcagtcatgtccgactctgtgcgaccccatggatggcagcccaccaggctcccccatccttgggattctccaggcaagaatactggagtgggttgccatttccttctccaatgcttgaaagtgaaaagtgaaagtgaagttgctcagttgtgtccgactcttagcgaccgcatggactgcagcctaccaggctcctccatccatgggattttccaggcaagagtactggagtggggtgccattgctttctccaaatgctttatagaaagtatttaaagataaatcaaccttaactgctcatacgtgtttttgatctctaatccatgatgccttgccaaaatctagaaacaggagatagaattattcacatcacccaaatctaccccagatatgaaaattttctttcttatatttaggaacacagagttaaggtttgacttacatctcctcacctaggcgcagggtcattttctggatctgaactaacagatgcagacaggagagaatctctctttgcgtctaaggggtttagggtcaacattacataatgacctgcttatacaggttgcaggggtattccttctatcttaaaattagtccagtttctagtcagtaagttttattgcttctgatggtgatgataatatattccttgatcaccctccccaacccaacagtgcagcagaggttcatgttccctctaacttttgctgctcgatttgatcttctagttccgtctgaagctattaaggaagttatttctgaaagccctagagtaagcaatgggaagtcttcctgggaaaccatgattcagaggcctggagacagttgggtggtaccgatacccttcaaaagccttgatcagattgaagcaacaatggttgtctgccctaccagctgccaggaaataaatttgtaggaaatattgttactggagtataactgagttttactcctctgtatagaattcgaaactcagcctctcacatttcagaaaaatagagcttaacactaaaactgcctcagtatgttttgtgctaaaaactccacaaggcagtacaaggcaaaaggagtaagactacgatatgctcaaaggggatgacctacaggttaaataagatagccaggagtagtgactgcacaaagtctgcaatagcataagacaacaaagaagcctattgaaggatgtcctgggcttttatttttacaatagctccctgtatcgatatagctctctacagattatagaacccttcaaacacattataaccaccacctcacctccatcctctaaaatcccagcaggaaaaccaaggagaagagtgaaaaggaaacctaactgtggctgcacatgtcttatttctagaaaggcattttgcaatttctgtcagtttcattttgtgctaaaaggtaagagagtgctccaagttt

SEQ ID NO: 49702 - DNA, 1258 bp, Bovine  19866881107671
  misc_feature (1)..(1): n is a, c, g, or t
nctttgaaagttcttcctaagtaaattcttcggcattaagaataattatttgaggattttaaactcatggagccctgcagtgagtttgtttcacaatattgttttcacttaaaaacaattttggctttctcttcccaaagtatttcaacagtatgtgttagtgaattaaaaaaatgataataataacttcggttattccgagacacactgtggggctatagaccaaatttgccttttctatgttattcttcaactgactttggcttgatttattgtagctcaacttaatctttatcttatcaactttgtgatcccgtttcatggtttttataaaacaaagtcatatttccaaggagtctaaagggtaactacaatgtcattggttaaactcattgtcatcaatagctgaggaatgcttttcccactttggggtataaattctgaggatggatgaatttttcagggactgactttctttgaaaagcactaacatcatggtttttccatttctgtcattaaataaaggaaaggacatagctatgtgttgatgtgtatgtattaactatgtatacatgtgtatgttatcatgctttattacctccagcccagggagttaaaaagtattctgagaagctctacaaggtggaaagagaatgtggactgtgcatttggtccatatgtaaatatggtcttcatttgggctgagatcaatgtgccggcatggtcaggttttggtgagggtcctcctccgagttcacagacatctgccttattactgtatcttcacaaggcaagggaagggaggtcatctctctgtatctcttataagaacactaagcccattcatgaggggttcaccttcatgacctaattgcctaccaaaaccctacctccaaatacaataacattgaggactagggctttaacatatgaattttagggggacacaagctttcagtcatagcatgtgtgtgtatgtgtatgtaaaagtcaatttatgtaatctcaccaattaggagctattattatatgaggaaactaaggaagaggttaagttctttcagttcaaaaattattttcagccaaggaaaatgttgtcccaaataagatcatcagtatcaatgttctccctactgatgggttctcaagctctgtgtcatttgcctaacagtaatttgaagtcaggtggttgaacatcagagtcctttagcttaagcaccaatcttactttgcccctggctggtaaagaacccacctg

SEQ ID NO: 49703 - DNA, 720 bp, Bovine  19866881196418
  misc_feature (1)..(1): n is a, c, g, or t
nttcctattgatatattccgatcttgatattataaatgtattccttccttaagcatgtaacaagttctatattaatataaccattatactccaataggaaaacagatattaaccttttgagagcattactttaaagttttgacttatttttaaaaaacaagagaaatttgtttaccaatgataaagtgatattttatttttatatttttaacaatacaagttgatataggtaaaaatctgcaagtcatgctaattatcagtctaatttaaattctcaagttcataataccaggctataaatgaaatttttgtctaaaatagactaattaggaaatttaaaatatataataaggctaaaattaacacatctacagtcttttagggtattagttgtctattattacaaaccacatttacactacaaagaaagtctcagctaatggatattaattttatgctattttctttctttgatgataaatattcttaccagcaagaggaggaccaaggaggacaggacagcactccacaactgtgacgagtcccacagcactggaaaatctttgagcaccaacaaggtccatgagcgtttcaaagaggacactgctaacactcccaaatccaagaccaaaaaatacagcatacaccaccaggcttgtgtagtcctcagccaacgcacataagagatgacagattccagtgaacatcactgcgaaactg

SEQ ID NO: 49704 - DNA, 2096 bp, Bovine  19866881342722
  misc_feature (1)..(1): n is a, c, g, or t
ntacaatggtaagtccaagagaccatgtgtagaaatcctaactgatagcctagtattaatagaacttccaaactaacagccagtttcaactctcagccatgtgaatgagccctcttaagtatccaacccagtcaaactctaagaccactgaagtcccagctgacacgtgactgcagcactgagaaatcacactcagctaagcctaggaatcctacaaaatccacagccatgagaggtcatgtactctgttgtttaaccactgtattttacaattgttatgcagtaacagaggtcattgaaagaagagaatttcacaaatgcaggaaaagtttgtagatttgggacaggagaggtggagggagagagggagaggcggaggaagagagagtgagaggaaggagggaaatgggggagaaatggaagaagaggacaaggaagagaaatcaactacagatttacaaattttgcttcttttttcattcatcccattgaacaggacatgataatagcttcttaaagcactaatgtttctaaagtgataagatttatactagacgctctcttttgctttcttgactaaatcatagtaatgcttttcatgttgagttgagtgtgtgttcagtcatgtctgactctgcaagcccatggattgtagcctgccaggctcctctgtctatgggattttccagggaagaatactggagtgggttgtcattgtaaatcattgcgattttttgaagtatgcaactgttttaaaagataaaagactaaagttttgaggagaatagataattatcataggattacatagttaattgttgccagaagggaattctgaactcaagtctttatgaatcccaaagcaaagtttaacttagtagattgccaagtttgcctattttttgttcttttatttggtaacatgaaactgatttggtaaagtttgcttagttatttcaaagaaaaaacgtagcagttcagaactggttgtttagaattgcccatgtgattttgggaagatgacaacaacagtacttggtgatgtatattgcaaattatatgtctagtttcatggaaaagctccctgaagttctttacttgaaattatcatactttttggaaatacacttgactaattactgcttctatcaatacatgccttcagaaccattctgtagacacacaaagacccacttatccgtaggctgtgcccaccaatttaaggacttagatataagcataacagtgactggtggggtaatggcagatacattgcttatgcttggtacttatttataaaaattaagtagtgtattgggagagttattgggcctttttagctggcttgtcaaactgaatgattatggggtcacacagtaagatacttactaaaataaattagtctatttgtaatgaatctttgtttaggccttcctgctagccagttgttgcaataggacagttataacaatggatatctgcaagtacattattccctaatagcttgctaaattagactcaaaacaggcctacaccagcatgtgtcaaagtttaacggcaatttaataaacactgacatattttctgatctaccttctcaaattacttaaacagtttgttaaaaattgtgacagtcagaaatggtgctaagaatgaggattcaaagggtattaatatttaaaaaattcatatagatagttaataagaaatcttacaatcaaaagggaatatgaaagtatgtatctttgagcttgcctaacatttattatttatgaaatatgtattgttaaagttaaaaaattggataaactttctagaaataaaaaatacatcttcagtgttaatttatactgaatatattgtgaacacacattaaaataaagtgattaatgaagcttaatatgacagactcattattgtagaggataacttggctattggcacattgaatatgcaatttctccaaatttacaaataacttcttcatatcttacctccttatctagttactgctctacatttttttttttttgtatcagcaccaccttctgttggaaaatcactgtctctttgatctcttactgtctatttttcct

SEQ ID NO: 49705 - DNA, 1192 bp, Bovine  19866881399410
  misc_feature (1)..(1): n is a, c, g, or t
natgaaagtaggatcaggctggtttaattcctggcaatgaaattaatgagactgtgttttgaattgatattccatctattaggctgatcaaaccttgtttcaactaatttgataattgatatgcagttttaggaagattctgaaaagggtataagaatgaggaaactatactctgatattaaggcaaaacttgctcttgtctgttatctgaggaggcaagtcttgattttttatcatgaagcaattcatgaggatatggtacttaatggtgatagggaaaatcttgattgattatcatgaagtgattcatgaggatatggtacctaatgggtgatagtaaagagatctccctgcttttgtgtacactgttttcctcatattaagatgtacttccctctttccatctgctaaaatcttacttctgaccagatgctaaactggtaattggttcagaaatatgcatgtgatctccactctctgatctctaattcctctgaggtttctgtggccattattttgaattaggcagctaagcctaagtcaactcagagaccactggcattgtttaactccaaaattctcttatttttattctttcttttgcacttagagagtttcctgttatttttaaaactactctggagttggtaaaaattagaccaggcagtcttccaaagcattgagtcttatatcgcagcatgaatttaatgcctgttcccctcctggttccaatgtgacaactaccccttggatcagtggatgctttatagccagctgtccatataggaaagggcctcaagatccaagaaagtgcagtgccatttccaaaatacttctcattcaatttgggtgttagtacatgttgatctgataagcacttattgacacatattttgaagagctgagttaattagcaagatacttctcaaagctttgcgctaaacacggttttggataataagctttcaccttctcctaacaccacatttaccctctacaaggcagagttcatcgtatctttgacttctaattttatagtctctacttataatccagcataaactacttgaccatctcaaatctgaagtaagaaaggctagaagaaagaactattggtttatttcttttggggatcacacactagtccaacttgactctttttatttgttacaaatcttttatgatcttagtg

SEQ ID NO: 49706 - DNA, 724 bp, Bovine  19866881691035
  misc_feature (1)..(1): n is a, c, g, or t
nctaaattacattttttgacacgatcttttcatacaccacacacacataacttctgaacaccatttctaaaggaaagagtgcttatgaacacatttgtaataatgtgtgtgatttctggcctatattttaaaatttctggaagttatttgatagaaaaatcaaagtggtaccccagatgactgactctgtagtggtggacagtcagaacctcattaagccaataaagaaatgtccagagaactagactctttcctgcatccttcaaatcatatcctattagaaaaggtgattacaataagcagaggcaataaaatattaaagagcatgtgcttcggagtcagacaggttcaggtttggatccaagacgctcattacttacaaggtggagactttggacagatctaatctttccaagtcttagttttctcactgggaaaataaatttagaaaatcaacttctgtagcttgttatgtagattagaaataatacatgtaaaacatctagcatataggtaaaaattaacatgatagatattgtgtatacacaatgaataaaaggtcagtatttgaaggaagcctttaagtaatatatgtttgaggattattcatggctctagaaacatgcttgattcaacgtttaagatagtcttgccatatggtttattgttttccctattcaaagtaaaaatgccaaatgatgctgtaaataggattagcaaacaa

SEQ ID NO: 49707 - DNA, 871 bp, Bovine  19866881942592
  misc_feature (1)..(1): n is a, c, g, or t
nacatgacttagtgactgaataagaacaaatgcaccaagaaaggcaatgtaagcacacagtgaagaagcagttttctgcaaatcaaggaaaaggctttcagtggaacctgactacactggcatcctgattacagcttctagcctctagaagtgtgagaaaataaattgtttaagccatccaatctgccacccaatatatgatactgtgttatggcagccctcatagactaatacacacagcaagtcacatggccaagcccccagtaaatgtgaagaactatttaaagaggtagataccatagaaagggggaataatttctggccaatttggctaatttttcaatctaccataattgcatcatagtctttaaataaatatgatgcatgtaggtatcataaactagtgaattatgcttctttgggtataatttttttaaaaatgctactactttagaataaatgacctggagccaagtattctgatgttattcagtgcttacacattatgcatgtactctttaagggcactccaggactattatgtgttttactagttttgcagactagttcatatttcctagtggttatatacatgagtcccaatgacaatgcaagtgaaatactcattaaatccgccttcacataatctgttcagaacttataatttctattatttcattgcctattgaccttcaggcaaattgtcaagaaatttatgagggtagcagcatgaatatgtgttgccaaatgtctcttgggtaaaatatgactcatggttttcttggtcctgaaatgattaagcctcaaacctgaagttgacagcatagtcattgtacagattgatgttctcaatgactaatatttgacagag

SEQ ID NO: 49708 - DNA, 1045 bp, Bovine  19866880149519
  misc_feature (1)..(1): n is a, c, g, or t
ncatggcttagtttcatcgagttagacaaggctgtggtccatgtgatcagattggctagttttctgtaattatggtttcagtgtgtctgccctctgatgccctctcgcaacacctaccgtcttacttgggtttctctaaccttggatgtggggtatctcttcaggctgcttcagcaaagcacagcccccatatttttgaaagaaatgatattttggcagagcagtggtcacactgggatctaagtaacaaagtttaacagatgagattagttctcttctcccaggctcagaccccagagtaacagcacccacacacagctcagtcaactgtcagacatcaagtgctgagcccataaatacaacaggagaaactctatcacttggcagaacaggcttctcatgaagggctcctgcagttgtggctgacatttggcagatcagtcttggggtttgacttgtagggtcaccaatcattctggttttcccatgacttttccaggcttggcactgaaaatccttcattcctagaaaacccttcagttccaggaaaggcaaggcagctagctggtcaccccacttgggaaacagactacttgtgatctcgtttttagggaaactatgctctgagtgctctactatgtaaagtgagcatctcaaccgtccatctgcatttacacacctgaacacaaatgcttaactgcatgctgttttcctaattgactttcctaattgactctttggtgagagtacagcattctctctagatcattataaaacgtgatttcaaaatattcccatgatagaaaagaacatcagctgttaagatattgagaatgttttataatttctagactagccacttccttattctaacattatgagcacattggttctgtgaatgcataaatatttaatttcatggataattaagtctttataagaaaaattatttcaacttgaaagcttaaatggctatttgccttctgaaattacaagttttgcaggttttgttttttgtgacaagaaataggagagagatctaaca

SEQ ID NO: 49709 - DNA, 1427 bp, Bovine  19866880354225
  misc_feature (1)..(1): n is a, c, g, or t
ntggcagtgtcccgatctgggccttctgataggtgtagagtgatatctcattgttgttttaatttgcatttccctgatgacatatgatgtggaggagcatttttccatatgcttatttgccatctgtatatcttctttcatgaggtgtctgttgaggtctttggcccattttttcaactgagttgttggtttccttatccttgtattcagtcgtgtccaactctgtgtgaccctatggactgtagcctgctagtctcttctgtccatagcattctctaggcaagaatattggagtgggttgccatgccctcctccagggaatcttcccgaccttgagttgtacataatttttgattgcctgactaccttgacttcaaatattctcaaatcttaaatataagatgcgtggctttagagttggctttcttacctctagaagctgccgttaaagaagactaattaggcatttgcaaaatgtggacagccacagaacttaaaaataacagaaagggagaataaaaagatagatgagaaaagaactttttagagtctagaaagtgcttgaacctctaaagttgcaaggtatcaatatttagtgggtattcatgtgcacttatcttgagaaatagactatagttttgcatcagagtcttatgggatttttcaaatcacaaaagattaaataaacccattgttggcaagagaaataaataccattttatttccagatgatagaattaacaataatttattgaacacattttgagattggcactgttctaagcacttttgtgggaattatcgtttaattttcaaagcaacaattattactgtctttaactgacaaatttggagactgctagtggctctaggtcatgtgcctagtcagtggcagagagagagatatgcccaaagctgccctcttaaccactatgccatattcccttcagtccttaacttaattttactttacccctctccgtcttccttaataattttggttaaaaaaaatagtttttaaatttagctccctggcagtcacacactggccagctctcagatttctgacagggtgacccagtttgcacatcacaaatataactgaagacataactagatacttagatacattttcatcattgtgcaatcttactaatgggttggcctcagacttcaagtggaaagttgtggtgcttcttctaatgggcaggcatttcccaagttctgttcaactactgaattctgctcattaggttaatgaaaagcaaatttgcagtccccttgctattgtaaagcattccagcaacgataaattcatatggaaacgataattcatatggaaatttatcagtttaagtagctggaaacctccagaaattgtcctgttgtatgatgagaattcacttgctgaggataactctgaaaat

SEQ ID NO: 49710 - DNA, 916 bp, Bovine  19866880360120
  misc_feature (1)..(1): n is a, c, g, or t
nactgaactgaacccctttatttgtttagctatctttctctttaagtatctgagggttggggcctgatttgttctcctattccttgcaaggacttagtataggtgctgaatgggtgaatgaattaatgactgacccagcaattcaagatggaaaatgcaggaagaggattgagtttgttgaaagtaatgagttcagtatcaacctcataggctaaatatgttctgagtcctgtcctggtagtggagctgtcatattttgatacactgagagttaatgtgttctgagttctatactaccaactctttttgaaaggggctaaaatcccatggactgaggagcctggtaggctgcagtccatggggtcactaagagtcaggcatgactgagcgacttcactttcatgcactagagaaggaaatggcaacccactccagtgttcttgcctggagaatcccagggatgggggagcctggtgggctgccgtctatggggttgcatagagtcggacacgactgaagtgactcagcagcagccataaaccttaaatagtatgtaaactttacatagatacttttagagaaggtttaggttcacagcaaaattgaatagaaggtaccaaaatttcccatacactcctcacatgtattcttgcctaatctcccttacttatcaacatccctgcccccaccagaacggtacagtggttacagtagatctacatttacacatctacctacatttacacagcattatctccccaagtccatagattacttttgggttcatatttggtgttgtatattctaacatttggataaatgtatgatatatgtccaccattatagtatcatgttattgtttagttgttaaatcatgtccaactcttttgcaaccccatggactgcagcacaccag

SEQ ID NO: 49711 - DNA, 796 bp, Bovine  19866880379887
  misc_feature (1)..(1): n is a, c, g, or t
nccaccaaattggctgttccttgaatcacaggttactctccattctagagggaacattttttcttcctaagtgagaactgttgcatctgtaggtatagtcttgatgcatctgtgtagagacatgcactccatgtctacctactcctctgccatcttgactcctctttttctttttgcatgcatgtgtgcttagtcgcttagtcatgtccagctctctgtgaccccatggactgtagcctgccaggctctgtccatgggattttccacgcaagaaaactggagtgggttgccatttccttctccaagggttcttcctgacccagagatcgaactcgcatctcctgcctctcctgcattgtcaggtggactctttaccattgaaccacttatcttcttaagtgattttaattcataatagtgcacaaacaaaataaatcacaggagatagccaggaggtgtcaaaatctttgggacaaacagataaacacaaacaggaaagatttcgtgtcctcttccattgaataggcagattgtctgtcacctgccactcacaagagacaagattgttggaccatgtaatcaaaaccaggcttccaatgaaagtcatacaaaatggtgaccagcataaactcactcagaaaaaaaaaatcaaaaaagaaacagaaaaacaaaaagagtatgagtgagactgaaagcagtattgtggcacaagattctctgcaggagctggaaaagacttcccttcccataaggcttccatatgaggtgcacttatcctgcagtgcagtttatttgg

SEQ ID NO: 49712 - DNA, 2129 bp, Bovine  19866880411704
  misc_feature (1)..(1): n is a, c, g, or t
ntagttctttggcccattttttgattgggtcatttatttttctggagttgagctgtaggagttgcttatatatttttgagattagttgtttgtcagttgcttcatttgctattattttctcccattctgaaggctgtcttttcaccttgctaatagtttcctttgaagtgcagaagcttttaaggttaattaggtcccatttgtttatttttgcttttatttccaatattctgggaggtgggtcatagaggatcctgctgtgatgtatgtcagagagtgttttgcctatgttctcctctaggagttttatagtttctggtcttatgtttagatctttaatccattttgagtttatttttgtgtatggtgttagaaagtgttctagtttcattcttttacaagtggttgaccagatttcccagcaccacttgttaaagagattgtctttaatccattgtatattcttgcctaaaaggaagctagatgttttgacacgtgctttgacataaggaggaatggtcctatggaagcccttcaacgtaccaaggaggccttttctggaatgcataaagctcttctctgcacgttttggtaggagagattttcctcaagcataagaatttaagatgaatcaggaactcttttatcatatttttaaataaaccttcatgggattggcctgttttatttaccacagtatgttcccaccaacagtgcactaggattcctttttctccataccatgaaaggcccttgtgaatatgtgctcaatgaaacacatttgttatcagatttgtgcaaatgtgacatggctattgcaaaagtataaaaataaagaagaaaacagttgttcccagtatattgccatagaaagtgatctccactttgccaatgaataaaagcatggaatcgtggggtttacttcttccaaattgtataggaccttgaacatagggttacaaggtaaaatacaatcatattaaattaaaaccttgacagctatctctcattgtcaggttaagtatctgcactcctgtgaaatgcaccagtctttaatcccagagaagccaagagtcagtacatttctcactttgtttcgaggtgaaatcagtgattgatgttgcctgcttcttcatcagtaaagcatgtacatcccatcattctacggatccctgtacattcatgctttccccaaaccctatatttccttgtaatgtaatcgccaatgtagtggatatgaacttgggcaaactccaggagatggtgaggagcatgggggcctggtgtgctatagtccatggggtggcgaagagtcagacacagctggcaactgaacaacaatgctggttaatccaaaaatagtcccctaaggagagagaccactttaaatactgctctgttcccaatagttgttttgttgttgttattgttttaattaaacctcatttgtacaggggaataattttctagatggaaagcaatagacacaacttgcatttatttttaatgtcagcatcaaaaggttcaaagtctcctgctgagatggtagggtactgaaatagtctcctccaagctatttgtagactcattaattgagaaattagagaaataagggtacatatgcctatgtaattaaactgcccatttcgcctttcttcactaaagcagtttcccaggatgttaattgactggacaacttctctgtgtctggtatatcttgataagctttacattaaaaaaagcactgctcccaccctcaaactgtcaggaggcattaaaaaaaatagacttagcactttgaagagttaattacaaatctaaggaatatttctgtttggtgtacctcttggcatattggatactaacagccccttcctgccattaaatgataaaaacttcctattgcattttctggtttgctctgggcttggaggagaggctttcctgagagcattcaccagactgctgctttgttttcaataaaccattaatttccttgctgttttgctttataaggaaactgtatttgatttctgtgtctgccatcctcccttcattcgggtgcctgtcgttcatcatcccatcagcccgacgcgtctgcagatgcattgtcctttttcatgaggatt

SEQ ID NO: 49713 - DNA, 1426 bp, Bovine  19866880556842
  misc_feature (1)..(1): n is a, c, g, or t
ncctcttctttggtaagtgggactatggctcactctcttctatatcccaggctccctctaggggccccatcatttgctgctctctgaggttggtgaatggttcatcaacaattacattttgctcttgagaattatcatttatctgcctgaggagctgatgtcaacgttttaggggccatagctattagctttcacataggagcagacgcttttagagcctagatcttgtttctctttgcccagcatccttcttcactctaagctccgaggtttctaaatggttctacccccactcgtgaggaagctgtctgtctgccaacccattctgctcctgccaaagctgcctgacaagttcaacatgaacagtttgaaatagatttttcatcaatataacgtattaaactcttaacccacagaggcacagagcagtttctcatacatttctttttctttttttttaagaaagggtaatatcccaaacatcaagctttaggattttcttgtgcacaaatattgaataactccgcttcaactctactcttggtcacagtccttcttcctgcagcaggaaacacaaagctgtattaaattaaaagttctggggattctaggctaggatcatgaaaacccagtttagctttttgtgttactaaggcagagcctctctaggagtctttcttggcttcacaatgacctctctgatgtgagtcagcacttcgctgtttgtttaacttctaaggttactgaagcaccagggggacacagtttgtccaaagtcacgctgcaggatcgtggcaggcaaaaatcaggctgcgagcttgtttccactaggctgtactccttgaacctttgtgtgtctaccagacacagctatgctgataccagtcctggacttctgtctttaaataggtgcccagcaaacatgattgtaagtccctttgtgatattagttcaggccctgtgtgaagatcagactctggtttgaagggattctgacagtttcagctaaataggatgcttagatccaggagtgaaaaaaatgatgccaggtggcaagaatagcaaggcagactgaaacaggacagttcttctgcttttcaacaggcaggcgtacctcttactcttttcttgctctgggaaattcttctaaatccaaattcactttttttcttgaaacaattaagattgggtgttcagaatgcaagcatatcctttgcactattcttaacagtctccagaaattctcctacggtgtgcaaggggtgtagggctgcgaaaagatgagcggtttcagattaatagcattctaaattcatcacgcattttcttagaacgtaattttgaagagacaggaatccagtatagcgcatgtggtcttttgttgcttatagcttgttactttccttcacattaaaaaatggtagag

SEQ ID NO: 49714 - DNA, 734 bp, Bovine  19866880942105
  misc_feature (1)..(1): n is a, c, g, or t
nagttgctccgtcgtgtccgactctttgcaacccatagactgtagcctaccaggctcctccgtccatgggattttccagacaagagtactggagtgggttgccattacagtaggaggattttatttttaacccagataacaggacccgagccaggtatgtatgtatgaaatagtaacccagccctcagaaagagaagcacactattgacaaacaatgcctaactctaaatgaaaatttggactcacatggtctttggctgcatgaggaaagcacttaggttcagtaatttacagaattaaatgagtgtcatattcaagagcttttagtaggaatggtacaattaaatgaccaatatttcaacaaagcatttaaaattcttatccttaattcaatttgaccatttaaggagatttattaagcagataaatattatcctgaaacctgagacagaactgtgtttgagtgtctcttctagaagtacaggtcagcagtggactgttgcataagcaggggctctgggtgcagcagacttgggtttggcataagccctcttggaggaagtcgccattaaccccaccatagagctgccagaacttacattggactgggaaatagactcttggagggcacaaacagaaccttgtgtgcaccaggacccaggagaaagggagcagtgaccccataagagactgacccactcttgcccaggagtgtccaggagtctcccttggag

SEQ ID NO: 49715 - DNA, 2328 bp, Bovine  19866881045583
  misc_feature (1)..(1): n is a, c, g, or t
naaatgtaggcctattcagctgctctgtgttggccttggactatgattttaaaagttttccaccctaaaagagagagctcaagatttttactttaaggatgaaattacatttcattcaaatttagcgtcgtgcttcataatacatccagtttgtttcatttaaaatatctgaaattgtttaccactgtgtaagatggattacattctccatgctattctacagcttgtgtgcccaccggtgctcctcatgggggcttctggagtgttgtttaggcaagtgtgggaacacagtgttagcaagcaggattagcagactgctaagatggagtaacagagacaatttgttagcgtgtgttcagaagaggggtaggttggctaattgacaccaacatgccatctgcttggcaggtgtgtctcgtcagtgaaaaatctcaaggcgaggattaaatgagatataaagtattgagtacaaagtctgacatgaagtaagctctcaataaatgctagctgttattattaccaaagagagttctcacacccagatgttactaccacttacatgatcagactaattactgttactctgattcaaggtgcaccaagccatgttctcatccaactacccaggcatatttttccctccaggaggggatgatcaaaataacttcatgcagccatatatctctttgcacattgatatgtgaatcagtcaaaagatactggacatctctttgtgggcagcacaacaaattcttttgcccatggaatggtaaaatagaccttggatgtggtgattttatcaaggtatggctatctcttgaagcaaatttggaccatgggtcttttctaatcaacaatttagcttatttccctaactaccattagcaggagtataattttcaagtaggtctcaaattccctaaagcacatttcatagccgacagaaaaaaatgcatttcataatgtgatccagaacatatattgaaagtttcatgaaacaatacctacccgtattttattaattatctaaaattagaattctgggccaacagtcactgtcctgggatccacatatgaaaactgactgtacttcctgcttagtctatattttcttccctctctgttcattccattgctcagtctgaactgccatggtctatgctttactcatatcctcctccattcgtgactcctggccagccttgagctctcaacaacaatatgagctcacctacttcttatgtctacagtaacagttagtcttgcttggatttttcaggatactttgaatattttattctatgacccttggctttggatcatatatgttaatcggtctaagtcctctagtttgccctggcctcctcaattctgacctcaacttcacacagaggatgtgtagtgactgaagaaactttcgtccatattaaatgtcctcattcactcacttgtgccaggcactgttctgcaggccaccaacttcaatttgcctacaatttgtccattccagtctgcctccattttccaagaatagtctctattttaagacagaataagtcctttttgcttagttcttagtgtgtgtatgtgctattttatgaatgactaaggctttctgggcagtcgcagactatccctctgatatggttctcttttcagcctgatgattgctttattgtagacacagggaaataattcctggagtcagagaactatggactcaaatccttgtgccacctgatttgtaacctaatcaaagttttgcaaagattaaatacaataaataaaaattatactgtactatctgaatgcttagtgagtcatctagcatataataggtggtaagtaaatgttaattcattctccttacttttttctagttagtaatgcatgaagataaaatagagtatggtagcatggtaatgttagcagattttaaacccttacactgtgctaaatacatcttgtgccttatctgagctaattttagaacaactcaacaggattccttatcattttacagatgaggaaagttgaagtgcaaagagattaaagagatggctgagttcaaaaaattagtaaggtgcagagctgtatgtgaattctcaaactagaaagacattcagacttctgaccccatttatgcaatgagatccattgggggtcagaattccctatagattaaaatcagattgcttattgcatacataatgatatttcttgcctctccccaagattctcatctagacttcttcccattatcccccaccctccattagcttaggaccaagtctggaaaagtcttgggcatgatgtagttggaagcag

SEQ ID NO: 49716 - DNA, 1803 bp, Bovine  19866881060528
  misc_feature (1)..(1): n is a, c, g, or t
nacagactggagacaacaggagggagacctgatcccaaacagaagagagtaaatcaggaaactagaagacagctgcgctatagacagaaaactcagacagggtgacaaatgagtgatctgagaggaagaaaatgaatccagtaagagggggaaaaaggcagaaaaggaagcacataggtggtttcatatggatgacgggatgcagaatttgacagagggggaaacatacaaaagatattgaacacagaaaataagatagagagcatatatacatattttttctccttaataaaaagaacatatataacatagagcattaaaaatcctgtataatttccacctacatagcttccttcaaaataaccactgctaatagtccggtgaatgttctgccaggttttccttgtttctggcacagttggaagtgtagggaggaatagatgaagggaagagagagtggggagagcacggtggggaggaattttgatgggcttatgtggccaaagctgccagggcctcgccaggtccgcagagcaccccgatggccatcctgggcaggctgacagctctggctctagggcgcagagcacagggcgctctcttcagagagcctgttggaggctcccggggcaagatggaagcacaggagagctaatgccccaggagcaaccttcatcaactcaggatgggcaaaggagcatagttatttggcgtcttccccatagtttgtcaaagtgtgctctgtgggattcgactctgatacccccagtggtaacctgctcatcaatacaccttttactattttctttctcccttgtctcactttccaactaccaaaacaaaacaaagcccaaactgaacaaagaaaaaccatggaactatgtgtatacaaatctttgcttcagggtctgctttggagaaaaccaaagctgatatggaacagaagccaccagaagtgggatggggcaggtggacagactgtgatccatttaggaggcagcctggacacgattcacccagcaaagggcaaggagagggctgaggaagagaggatgccacagtcggctgagaaataagtctcacccttaacgcttttttaaaaagtataattcatgacatcactttatggctattctacagatggtgtgaataaaaagctgagagaatggatagtagaatgcagagataggtggagaaggaatttaggctcaagattgcagagaaagaaagtataaaatgagcaaacagcaaaaaggtacatgagaattaattgcaggaagaagcaaatgggagaaaagtgacatgaatgagtgaagtaatgggaaaatgagacaaaaaaatggatgaggagtgaggaaatgtaacaaatgagatggggaacaaagtagtgaaggagagaaaagattccacagtaaattagaaatgttcattttatgggcaaggaaatgaggaaatggaagggaatattaagaaaattaatcctggtaaccaaagctgtgggaaaatgtataatgaatgaataaattagcagaaagaatggatgaaggaatgtgaaactgaaaaaaaaaaaagaccccaaatgactgggtgattgagaccgtgaaaatgaccatagagaggaaacaggcaccctaaaaatggacataaaattaaggaacgaaggaatatccaatgagaaattagtagaaggataaaaaataaaaatagaggtcttctgtgaaggaatgaacacttccttccaaactttaatcaaaacctcttgtaaggttctaaagttttcccctggatctgcctgctgttttt

SEQ ID NO: 49717 - DNA, 1643 bp, Bovine  19866881089017
  misc_feature (1)..(1): n is a, c, g, or t
nggagtatttatacccttccccaccttccggcctctcctagagctgctgggagcttctgtcacacctctttgaaacctactcaaatgtcaacacatcactcagcaaaacaaacccccatgttttctaagcctgtagtatcgttatatccagagaactggagccacaagaaaacttagcttttccatgaatggtttaagggcattaattatcatggaaaactacatgcagactgttcagagacaaaatgatacccctccctatgtgtttcaagagaatagcatattgtcatctgaaagagtaatttatttccacataattggctccataaagggcattttcagtgtctaattccctaaataacttggggcctaccattgccaagagaactgtaattaattaactcatttatgattaatgcattccagttttcctttgctgccactttttgaggagaaaattggccagtctcgtgactctattttcatgtacctaattcatttaaaataaataaagaaatttggatgacaagcccaagaagttgattgttaatggaagacccttggaggctgcacctttctgttgtgttctgtccatctcagaagactgagattgggactttgcttagctgtcagcaataagattcttaatacacagctgtagatactggtttgaagggtggggagggatggttagtttcctggtttgtttagcaactgtgatacctaatggaggtaggagaggaagaagggaggaagtagagagggcacaaaaggcagaaaagaagatccataaaagcattttaagcagctctacctctccacgtagtatgaagactacctatcttggatcacacccaatcaatgtgatttaatgagcaatgactatgatataacatatgctgccaacatttttttccagattatttgttaacatcctatcatgtacttttaatttctctcacttgagctcaaattcatgagaaagagtaactgaataacttggaaacctatacgtagctcttcattcatccaacaccatttttaaagcaaggctagatgcctcactatcatttccccaaccccatttctctaccaaaaactgaattgttctctgtgtcccattctttcagtcttgctagacaattgaatccatttttagataattgtgctgctcacacctccagtggatgaattatagtcaccattattccaatgaggcatatattggtgtccttaacagagtaccctgataaatcgtctattattaccatattatcctatttccagcctcatcattctattcacttgtcacctctgactttcttaggcctatggtaactgggatgaacttttatcttacacatcccagacaatcccagtatgaactcagattctccagaagcagtagacaggcctatcaatgtaaagattagagctagaacctcctagaataatgataacacccaaacaaaaaccaccaaagacaactagttcacacacaagttgatacctactgtaacctggtgacaaaaatatcagaggggtgaagactagggtagggggaaaggggcatgattcataacttgctttaagaagtttatttagatgaattattatttacattttacagatgtgaaaattgg

SEQ ID NO: 49718 - DNA, 1375 bp, Bovine  19866881089517
  misc_feature (1)..(1): n is a, c, g, or t
ntattaaaactctattaaatataaaaattagtttgggaatgtttggcaactctagattccctttcacaacatgggatatgactggcttataagtttttgtttagatttcatatattaaaaaatcagtaacaacttataaagatcttcaaaataaccaaggatatatttcacagtctctgccacttttctttctgtttaattaagcataaaatacaaaaatttaaacatctcaagaaccaatataaaagatatattaaaacaaaatcttctatacaactggcagttttaacaccagctagatgtttgatgatattaaggaattattgttattttattagatgtgctaacagtattgttacattatttaaaaaaaaagagtcctgatcttttacacataaacactcaaatatggtatttgggatttgcctcaaagttaacgtaggacagaaagtatataggagtatgaaacaaaattggccatgagttgctaattgttagagctgataattattgggtttgctgtagtatcttttttggatatgtttgggaattttccataataaaaataaaggcaaatgtagaatgtcgaaaaaaaaaagtcctcataaaaaaaaatacttatgaaaagtagagctgactacatttatagccacagggtaaaaatactaatacttctgaagattgttggttctgttgttccctgcccagagtacactttggacctcaagcaaaattatgaagtagactttgcttatattctttatttcctagtgtcgacttcatcttagctccatatcagttttctttctgcttgttgtaaatgcacatttttctcccattcacctctttacttcccaaattgtaacttacttcttcctactgagtcggagacctaaagatgaacctgtcccaattaaagtgcaagagaagactactcaggatagagtttacgaaggtagaagttggtagtagttctgtttgagcatttggaaaaattactgatagaaatgtgagaagtttgttggaatattgtggggagaaacttgtaggagtcctatatgaaaagcactaactgttgattttatttaaaaattgccagtctgcagagagggaaaagtaaacgctttactagtacgattagctgctgctgatgatgctaagtcgcttcagtcgtgtccgactctgtgcgaccccatagacggcagcccaccaggctcccctgtccctgggattctgtaggcaagaacactggagtgggttgccattgccttctccaatgcaggaaagtgaaaagtgaaagtgaagtcgctgagtcttgtccgattcttagcaaccccatggactgcggcccaccaggctcctccacctatgggat

SEQ ID NO: 49719 - DNA, 1486 bp, Bovine  19866881107702
  misc_feature (1)..(1): n is a, c, g, or t
naatacacataaaaacccactgcgtgctagctgcttggccaggtgcctccaggctatgggggtgttctggttgcagagcacacacacctctgccttcaggatgctagaagcttgtctgggagctatatcactaaaaaaaatcacctgctatgggagaagactctggaaaagactctgaagtttccttgaacccttgtacccttggcctggcattcccccagcactgtgctctggaatcccaaacaaggtagatccctcccttgattgggtttcctacctgttggtatggtcagtctctcctgctttgtgagtccctgtaaggtgggagcccatacatatacctctccaggtccttaaagcccacttcatgatgtgtagtgggcacctgatgaacactgtttgaatggacagatggttaagatgctccccagagtgggactcctagaggcagcaagaggagaataggtgcctaggagggaagaagaagggctcctagcagtggacagtgactgctaaaggctctggaggagctggaggaaataaagagttccaggctcttgtcgtcttaattaggtggtctaaacaggaatgggtttccctgtcaacctctctccaggaactgggtccctccctaaaacccagaactgatcactttcacctagaataccaggcaaatagagtccaggcaaaactacccatgtctgtcccagctcagtgggttttccagggtcatcacggctcactctctggggacattaagattaaatacagtaaatacacatgaggtcaagtttatgacacagtgtatgaaataccaagaaatggagattactagtcagagatttgcctactgcactctgcccgaatagattcttaacctgaccatgtccagacacaacctccgattttcaaatgtggcaacataaagcatttaccaggaagaaaaacatgtcttcaagctttgagtcttccttagttataaatcactttttggggtcaattttaaaagtaccttgtgatgatttgcctctggtctgcaatgcaagagacctgggtttgatccctggtttgggaagatccattggagaagggaaaggctacccactccagttttctggcctggagaattccatggactgtacagtccatggggtcatataagagttggacatgactgagcaactttcactttttcctattcacagcagcacctggcaatggacaattctcccagctcagtcatcaaagcaaaccctacactcagagatggttcctgccctataagcatttatatattcgactttgcttgtcatgtcgattcacagagagagaggccagccaatgggggatgatctcctctctgttttaattactataggcccagagatgaatgaaagtccttggccagtggacacaaagggccagggtcaccaaagaaagggtgcctgaactgtcagctttgtctctggacttgataagcctcagg

SEQ ID NO: 49720 - DNA, 1507 bp, Bovine  19866881144120
  misc_feature (1)..(1): n is a, c, g, or t
ntagcacctctccgcttctcttggtctccacacactgccaaacatgcccggggcaacaacatcacccctggtggagaaccactaatgttgacaataatggattatggtctagagacttcagagttgggcaggagcttgtgactcacaaaatccaaatttggactctactggttggttcatgtggcaaaaaaggtataagggaagcaaacaaatctgaaacctgaaaggctgaagaatgaaatcaatggataatgtggaaggagtgagttcaagaggaaagaaagaaaccaatgttcaaatccattgtggctgctcagtggtggtaccatcttgagcaagtcacttaattgactaaatctctattttaccatctgtcaaagtgggatagtaatcatatctacattacaggggtggatatgattaggtgaggtagtgtactaaagtgcttcttacagttctgggatcagagcaagtacaatgaatgttagctacagttattgggctttgaaaaaatgatgggagagagacagaattaagtacggaaatttcaaagttctaatcaaaaattagaatgcttaggttaaaaaatgaaattaactcagtctaaacaaatctaaataagtttaacacagcttagtcaattattagagggaaaatacactggcataaaaatcacatagctataaacattgatgtgtgaggaaagggtttccaaaatgaatgatgcattgaatacatgacttctcctttcccagttctgatctagaatttagatctgtaggttccagacattccaggaaacatgctgtttggacgtgctttgattttcaaggtagttcaacacccggtaaatttcttaggatcactgaagccaattagaaaaaggttgtgtaatgatgctgctggggatgccagtcttctgagttctgagagggtgtgctggtatctcagcatcactgagcctcccccagcccttagcacacatacctccctacatgaggtagcgctgtaaatgtttgtggaattgaattcaattgccttaatgaacttcaaacaagacttcaggtgactgcaggtgactgaattagaccaaactagttcttccaacctcttgtggctcatcaccaataagagaacactgcacatctgctctggaaaaaaaaaaaaaaaggctcctggcttaaacacaagtcaggttttgtgcttcagtaacaagttaaaaatccatctcgcaatagtcccgtaattcatttgctccactctttttttttacatgaattttgtagttgtgatttgcattattgtgggctatttcaaggtagaacaaagaatgccatgatgtgattaactacatacaggatggcaaaatacaaaactcaaactctcgagtgatggactgtgtttttaggatttgttttaaagaattgttgaaatcctctcctctctaaggagccaaaaataccaagctgagatttttatcacagcattttttgaatcaattcaaact

SEQ ID NO: 49721 - DNA, 1806 bp, Bovine  19866881206543
  misc_feature (1)..(1): n is a, c, g, or t
nttttaaaaactttttttttaatggaaaatttcaaacatgtgaaaaagtagaaagaatggtaaactgtacttcagaatacctgtcacttagcttcaacagttgtcaacttgtaacttgtcactgtatttcacctacatctctacccacagtatgtactctggattattttgaagcaaatctcacatatcatgtactttcatctgctaatacttcagagtgtatctctcaaaaaataagtactcttttcaaaggtaaagcctttaatacaattttcacataaaatttttaacaattcctcattatcataaattacagtgttcatattaccccaattatgttaaaaatttttaaacagcttacttgtttgaattggaatccaaataaagttcttacatagcaatcagttcatgtgtctctcaagtccccttttatctgtatgttatctgtcttttccttaaaatttccttgaagaaactgtatttttttcctttgagttttctaaattttcagtcttttgcttattgcatctctgtgggttggtttaacattgtctttggactcctgaatttcatgtaaattggtagtgggaattagatgcttgattagatctagattcaatatttttttcttttggtcagcactaagtgctgtgttttcccattgtgcagtccttaatttctggttgtctttttcatgattattattgactagatctataaattcattcaaagttgcacgatgaagatattccagttctagtattctttcttcatctatgaactaaaacagttccatgaaaactaatgtcctctcattaattatttcattttcctgaggtacagttcttatagaaaggtacagataaatgcttaattagtttcccttatttatcagttttccaagcaatgagttttctccctagcaccttccaaaagtggccaataagatttttcttcttttagtataatttcaaagtcattgatttcatacttgaaatgtttgaactcattgcacttattttccttacttaagatggcccctgacaccttttgctatgaccccaatggtcattgatagattcagagttacctgttctggaaagatattctgggctcattttgtattttcagttctaggcctggaatgagcctttatctccaaagaatcttgcatcctttattggaaaatgatatttaaagacaatctgagtaatagggatgctcttggctactggattagttattttcagtggacagaggtagccaatgggatttttattttaaagataaaatattatcattagctcatattgatacttgtaattcagtttcaggactacagcacttttacataaccccatgaatcttttatgtatatcttcttttacttaatgccaaaaataattgagtctcaattacacaaggataatttctgtttttttttttcttactttataatatacatacaaccatctcagaacaggaataccaagactatcaccaataataataattctgaaaacagtttaaaatttttttcctgctgtcatttttgttacttgggtatattccactagggatgtatataataaattactaatttaaaaaccagctagaaatgcttttctttatatggttatgccaccaattagatatacagttaaattcactgttttattttacttgtatttatgtatgttaaaaattattttataattatgcaaaacatttacatggtccaaaaatcaaatcaaaggaagacatatatatatttaaaagtttagcttttatccccattatttctac

SEQ ID NO: 49722 - DNA, 1337 bp, Bovine  19866881260433
  misc_feature (1)..(1): n is a, c, g, or t
ntgacgtgcccttcttattgcatcatatctgggaacatgatgtcctcatgatttcttggttaatgtgaccttgatcatgaccaattttctccactataaacttacttttccactttccatcctctcttattggaaacgagtcactaagtccagctcatactgaagggagggaattaaagtccacctcctagagtgggatgtatatatacctgttattggctgcccattctcttcctggtgcccagtctttctcagtgaggatctggtaaggttcatggagaaaactctgcaggaacaatatactcccactatgattgcacctcgtatggatcctagtccatacttggcatggcaactgtctagtttatctgaattcttcttattcacttgtgtgaccctggcatctcttccagtcacactctgcacagctgagccaggactttcctcccatctcttcttggaacaccctgtctttttttagatttcaggcactttaggtacccacaacctcagatctctaatgatttcaggaagaattataactttgttgtttatcaaagttttacctgctgaaaagggtgatggtctcttcagttttctatatccagggtggaagcagaacttgatgtaatgaatatgaaaagcaatcctctctcctccccatagaaagtgagatctaaaggcttcatacttgctgagacctcagagagcatccatgattatgtgactctcaacgagggcaaccattggcaggtattcccttgcacatcaagacccatgactgtcctgggaatgactggagtcattccaagaatgaatgatcagggccaagtccaagcacatgtttccagagcctctccgtctagtagcatcccttactcatgcctcacttgcccaaggcgccctccaggtagcccatgtcttaggtctgccatggctcccaccaactgggtttatgtactcccttaacagcacctggggacacctcagcccctcctgaaccaatgagaaatgtgagcacaggctagtatttgatggcggcagtagtgggagccctgccatccttcccctagaacacaggaattctaacctcacacactcaggtctctgaaaattttgttccttttttgttcattcaacaactagcaaatatggtagcaattatgtggcagaaattatgctgcgcactggatgtgcatccagccacccccgtaagaacaacttaacatttattcgtctacataaggacaggctaagcaacacagatctttgcatttcaagtatacagaataacctttgtagtgactgcacctggtatgtgaatgaaccattatgaa

SEQ ID NO: 49723 - DNA, 1749 bp, Bovine  19866881314123
  misc_feature (1)..(1): n is a, c, g, or t
ngggcgtgggggaggcattgtgtcgacccactcaaaagcagttgtgcaaatcaatttccttccacagtaatttgtggagctattgttgagggtatttgtgtttgaataagagcttgtctgtctcatcacactgcttctctcgcccagagcctagagtgagagcacaaactttcacctgaactattgtagctggtagtcatggaaactgccagaggcacccagttcaatagtaagacttcactgcaggaacacaggcaggaggacgaagagccagcgggtttaaataagagactcgctaattaatggagcaccaggggacagcttaaagagaaaattgctcagtagataaatccaggttttcaggcctctctaaaggaatgatggcagtccctggagggctgtggaagtgaatgttttctctctcctctgtgatctggtttgtttggagtctttggaggccagtttgccctggctgtctgcagcgaggagtaaagacagcaggtacttggacttcccagccagttgaaatcaagatgtgaagtggcacggctgagactctaagacatggctttcccagcccctctgtcagccctgtccctgggtctctggctgtttgtgttctggttcttggtgagagccttttcagggaggtggctcccctgcccttacagggcttctctctcactcttcccctttcaccaatggcaaatggatacctctctttggtctccctccccattcctttgttcctggccaactttcaagactgtcccttttttaaaaaaaattttattgaactatagttgatttacaatgttatgttagtttctgctaactgaagtgaatcatgtaaacatatacatatatccctcttttttggatttttgcttcccacgcaggttaccacagagtgttgagtagaggtccctgtgctaaacagtgggttcttattagttatctattttatatatagttgcatatatgtgtcaatcccaattgcccaattcatcccaccctctactttccccacttggtgttcatacatgtgttctctacgcctgtgtctctatttctgctttgcaaaaaggttcatcagtatcctttttctagattccacatacatatggacctagagactgtcatacgcagtgaaataagtcagaaagagaaaaacaggtatcatgtattgacacatatctctgaaatcaaggctgtctcttgatcaggtaacaaaaacacaagagcatcaggtctagcagagtctgtgtgtataaaatttgaaaacactactgtatgcctatcagtccacaaatatcagctgcttggagaggaataggaaaatcattatctcaccagtcacccatttgaaaacacttcacaacaaatgaaagattgatttggtcatttaaagtatatcagatttcattccccaaatgctttctgagagccgtttactgaactgggtgctgcaaaggttattcgagtaaatcaggcagattcctcctgccagttcatctccctcaggtgaaagaaataagcttgagatgcttgatgaacagaatctaaatagtgtgccagcctcctcctctgtcagaggtgacgtcaccctgagatgaggcttactgtccatggctttgtgcattcctacagaacaagtttagtccagtttaactcctgaaggtgctgggggtcactctgctggaggcaagttctgctgagttgatgcctggacattagcatggagagtga

SEQ ID NO: 49724 - DNA, 1482 bp, Bovine  19866881502395
  misc_feature (1)..(1): n is a, c, g, or t
ntagccccatctgggttttgtttgagttctttccttattttcctaagaaatccaattccactgttggaaaactcattattaaaaataacatttcaaaaaagctacctctcagctcttctcattgattctatatctgctgtttaccctcctgaccactttcatcaaatactggaaggaagatataaaatataaacatactaatttttcccatgacagaactatggaagtgagagcaaacactacaaatgaaagagaaaattcaaagctaacaaggtgagatgtaactgcaatgcatgtaaaatcctgcatttagattcaaaacatcagctactgaataggcgagaactcacttggtaggagttcctgtgaaaaagtcctgagagttgaaatgaattcttaacctaacatgagctgacaatgtgatgtgacggataaaaaagctagttgtcttagcccacacatctaggacagtgtcaagatcatagaagtaatagcaccaatatatttatattgccttgatcagattatatttgtatggcgtgttcaattttgtatgctatattttaagaggtttcctgatacaaacattatcatcctcatacctgtcaggaaggacacacatgtcataaacttcaatacagaaaaccttttttccccccttatgtctactaagaatactttttcaaagtttagaattgactgatccaatgggaattttgggaaagggacacatgtggaactagattctacctaagcctcacctagaggatgctaggctaagagcatgacgggctagtgggtatgagacgggtatttgtcagaagagaatcatagcctctgtctggaagccagagaaagatctgggctgctctgcttactgttggctttttcaaatcccccaaagtgggtgtctaggcagctgggcttcccagctaatggcgatcctttgaggagggatttaggaaacactcagagctgcctcagttggaaaagcgaggctgtgtatcaggtaattcgtctgctggactccctgaaatggtagtgaccaggtccatccctacctagtacctgtcctgggctcctgggctcaggaccagcttgtaccacctgcttccccagtagatctgtgccaccattaggagagagcaccactctgttagccttggatttcaaggcaaatccacaggatggttatggatcatcaggtggaaacctgtgctgggcctgagccaagcttgtcatacaactttaaaatatttagacatatggtgaatggcctccatttatatttgtttactcagcctgtgtcaggatacagacaagtcattataatgcacctagtttagaggaagaaaactctattagggtgatactaatttccccatatatccctaaccacctgcctttttttggttgttgttaaagaaatggagtcagtctatgtaaagtacctggaacagaggctcacagttactgctcaat

SEQ ID NO: 49725 - DNA, 1394 bp, Bovine  19866881656485
  misc_feature (1)..(1): n is a, c, g, or t
ncattaacagagcctggcatgcatagtaagtgcttggtaaatgttggccaaggtcccttggccagagttctgttggtgaataagatgaataacagtatcaagagaattttcttattttatattttgctctcctacttctgaggacaaaaatctttcaaagttaaatattttggtctatgaatacatacaaaatttatttattttttccttttggtcaatgaataaggaaacacagaaaaaatcaatctatatcctctttcaaattcccatgatgttatcagggtcagaaatgtcatatttcaacaggatagctcagatgggacacaacagtttgaataaaaacttccactaggaaaactgccctctgacttctggttcctacagcacaagcaggataagtcaggtggtgactgcctcctaacaaatataaatgacacaattgtttacttggtgcaattttaattcagccttaaagctctctacagccaattttggtactgatctcctctaatggaagattaagtgccttgaggcaaagaaaaataattgttttgacattatgagatcaataagtcctggaaaccattaaactgtatagtgaaaggccctgagcgtatttaaaagtacagttttagatttcagtacaaagactattgggcttcccaggtaaagaacctgcctgccaatgcaggagacaaaaaaaagacacacaagttctatccttgggtcaggagatcccctggaggagggcatggcaacccactccagtattccttcctgaagaatcccactggcacaggagcctggggggccaaagtccatagggtcccaaagcgttggacacgactgaagcgactgagcatgcatgcacaaatctgttgcttggtttaaaacatacaaaggaagttaatattagcaagtgagagatcccaattgagattttattttattcttttgtctttcaggttttagttcagtccagtcgctcagtcctgtctgactctttgcgaccccatggattacagcacgccaggcttccctgtccatcaccaactcccagagattacccaaactcatgtccattgatttggtgatgccatccagccgtctcatcctctgtcatctgcttctcccaccttcatctttcccagcatcagggtcttatcaaatgagtcaattcttcacataaggtgaccaaagtatttggattttcagcttcagcatcagtccttccaatgaatattcaggactgatttcctttagaatggactgattgtatctccctgcagtccaagagactctcaagagtcttctccaacaccacagtgcaaaagcatcaattcttccatgctcagctttctttacagtccagctctcacatccatacatgacta

SEQ ID NO: 49726 - DNA, 1418 bp, Bovine  19866880245912
  misc_feature (1)..(1): n is a, c, g, or t
naactccgggagttggtgttggacagggaggcctggtgtgctgtgattcatggggtcgcaaagagtcagacacgactgagcgactgatctgatctgatgaaaattacagggaaagatgctccatagcacttgacaaagtctgcttaattctgggaagtgacttgggatgagagtggaggcagatttcttgcttccaccttataacaaaaccatgtgttccttttatactgaaagacatactgagagaagaaaggagggagggcgggagacagaaggagaaagaaggcactcaggtgcagttggcggtcccctggtatgcacagggggtggggtccgggagcccctggaaccagccagagattctttttttttgtttttgagccaatgaactcccgcttgaagatcaaggtgggctggaaaacaaatttacttaaaatgtaaacttcagtcaaaactgaacgacaacctgagagcgaaaaaagaaaaagaggaaaaaggaaggaggaatgcaacaaaaagaccaaaaaaaaaaaaaaaaacagagagatgtatgcttggctgttggggttttttagttggttaattctcggtttggttgcttttttttttccttaaaaaacaaaaatgccctcctacttttggatgcaaaacccacaagtctggagggtagactgtgtagtgaaagaagagaagcgacagcttgagaggcgccattcgacccctgcaaactcaccatcaacgtccgggctacgttacaacccaaggtgccggctccaagcagcagacacttggcagacacaaccttgtctaagtccagagtagggaccaatctccaacacatcagcttgaggttgagatcaaccgatgactcagctaacctagaaagggagagaatcatttatttatgtagccagtcacccgcttatgcccccaatcttgtccttttttagaaagaaagtagcttgtatgagaagataagaaacaagtaacagagggaatcaggatcaaaggaaaagcaacacgaggctggagggtaggcgaggacagcggttactacagagtgctgcgtgccgccataatcctcggcaactgtaccgtgacaggcccccatttgatcctgagctcccaggggcccagatgaaatggaaagcctgactggttacgggggttattacgtccaggactaaaacaacaccagccgcttaagaggaaacctcttcctaacactggatacagagaaatttctgtcccctcagtagagggagtacttacatcatcccttcagtacaaaactggtttctgtgaagtatttcttaccatggccttccctgtaggctaatgggacacaagtcaagggagacgaataaaggacaaaaaggtggaaggaggtgcacaggtctgaaagggcgggcttgaag

SEQ ID NO: 49727 - DNA, 1126 bp, Bovine  19866880354665
  misc_feature (1)..(1): n is a, c, g, or t
ntctgtgctttcaacacacaggcgtgcgtgtcttcccacaagtgttctggggtttaagaggatattttatggcctttagtttcagttatcctaaataactaactctgaaatcctccttagtgtctagcaagtatgtgtattcattttgaaaggaacaggagaagggagcctggatctttaatgaaggctttggttcagggaggtggagcctaagaagtgcttctggtggggctgccttggccctgccctgggggtggggtggggtttgctgcctgcctggggtggaagcaaaggtggttttcccgctgctctgcaggcccttaaaggcacagctgtgtgctgcctgcgagtgttttgctaatgaagtgtggtacctttaaagaaaggtcacaggcctgacctgtgttgtgtgggtttcttgtttgtcaggctggaggcattttctcattttcacagttcagccgaaaacaaagacctccttatccgagccggggagccgtgctcttaagagctgacatcagccttttcccagcaggcagcgtttctgccttaagagtctttgccgagagctgggcaggccgacggccgccctgccctgggtttcttctggccggatgacacgcagggtgaagaaatgtcaagcgtgccagcagtcagggcagcagaacccagcgctctcgtcacgggtcccttcttgtctgttccgcggacctctgggcgcctccatttcacagagcttgtgaacgttgggccgaggaccttgagaaaggaggactggtttcctagagaggcgctgaaagggcctttggggcctgttggggaagcctcattagcatgtgtgaagacactgtttaaagacgaccctaaagttggggatggggaagtgttttttggtggatggattaagtcagaggcgtttgttgagaagttgaggaaacaaaaccacacagggtttggttccccctcctgccttgactctccgggttttccgggcgctgtttgcgtgaagatgcttctgagctggggacaccgacagcagccctgtgtccacgcggtcggaccatctgccttgctgctctgaggacgcagagccagcctgtcatgaggtcagggcctggcactcctg

SEQ ID NO: 49728 - DNA, 2338 bp, Bovine  19866880455917
  misc_feature (1)..(1): n is a, c, g, or t
ncccattaaggaagagagggaccagccagggaggcccggagcagtgccagctgctgccccagaccctggagctgtttgagggagggaggggatgggatcccagggctccacaccagtgagctctgaggctcctcagcccttggccagaaaggcaggcgggccggctcctggggaaaaggtagaggagaagccttgtgaaaatcccaggactctgctggtggcaggaatggtgggcagggacgggggcagtcacatgaatgcaggcaagggaagagggcagggggatgcccagagggagagacgaggtcgggggatgaagaaggggccgaaggacgaaacctaactccaggcccaaccacagctctgacccaggaggctggtggggggtcacatggtgcagaccccgcaggggcagtggtaggacagacagccacaaggagaacggagcccaggaaccatcagccaggcacctccagccagcctgctgaggaggaaggagaggcagagccgagagcgcgagcagatggcccggaggagccctgccgtctgcagggccaaggaccaggctggtctccacgggagggaacctctcacaagcctcatggtttccaggataaacttgctttaaagaagggagtgacgagtggaaagtcttcaggagaatccaagatcaacagcaggtctgcacgcccaggaggcatgcaaaggatcccgggagaggtgcggccaggccaggcagaaacccccagagctcacctgacccagctgtccccacgggggagacccaggagggctgggaagagcccaggtcactcggtgggaccagggcagaggggggcctgccgcccaggagtcctgagtaggccgggacgttttcttctctgacacagcttcgctgtctgcaaacccaccagctcgggaagccggggaggatgggcaagggaggggcttcaggtggcttggagacagacagactggcctgatgcagggcacggacaggtcggttcagaggctgacggaggaggcagacgtcgctcctacccgctcaccccatagcccgaggataaaaaattccggtcctatggtacgacttcttcctaaccccagggaatgctggttacaccctcctctcatgagaagtccctgtatagggttatctcttcgcatcgttactctcacagcagttggggggatgggacgaagaaggggcatgacttgaaaccagagtgggcacggccaccttaaaattaacttgttaataaatcctgtgcaaaaaaacaaaacaaaaacaaaacagaaacgagcaagcctctaccattaggtgaagtacgcggttcaggtgttcatttgtacacacggcggtggacggcagggggcgaggagcaggaggagggacatcgaggtggcaggggcgctcagaagtgcgtctccttctctgtaattgccgcaacggtcccatcgcccttgagtttggcgtcacagtcattaaccgccaccgtccgtgggcctgccccaagcatgccccgcattttcaggtcggcgctggggatcatcaacttgcggaatctctacacggttggagaggaaaagagctgtctgagaaggctgttggagtccctggggggccctgcctcagcgcctcccaactgcacggcggacaccttggggggcaggggggcatggaaacggcaggccaggcttggagttctgccctgggcgatgcgtcgacctggagatctatttcctgcccccaccccgggacatggggaccacagggtaccagcgctgggtgacgaaggagatgatgaacggagttgactgccctgtacctggcccgctgcaggtgaccaggacgcaggagctgtacccaggcctcatccttccttcctgggcagactgaggctggggtctgagtccctgcttggcctcgctgtgtgtggggccagtcacctaacatcactgagctgcgctgtcccacctgtgagatgggccagctgttcctcctggggactctgctgtgagggtgagctacagcacctccagggccgtttatacagtggtctctacataaatggcagagaaggcaatggcaccccactccagcactcttgcctggaaaataccatggatggaggagcctggtgggccgcagtccatggggtcgctaagaatccgacacaactgagcgacttcactttcactttccactttcatgcattggcgaaggaaatggcaacccactccagtgttcttgcctggagaatcccaggggcagcctcatgggctgctgtctatggggtcacacagagtcggacacgactgaagcgacttagcagct

SEQ ID NO: 49729 - DNA, 1553 bp, Bovine  19866880845244
  misc_feature (1)..(1): n is a, c, g, or t
nttttgccaacagaggtctgtctagtcaaggctatggtttttccagtggtcatgtatgggtgtgagagttggactgtgaagaaagctgagcgccaaagaattgatgcttttgaactgtggtgttggagaagactcttgagaggcccttggactgcaaggagatccaaccagtccatcctaaaggaaatcagtcctgggtgttcattggaaggactgatgctgaagctgaaactccaatagtttggccacctcatgcaaagagttgactcattggaaaagactctgatgctgggagggattgggggcaggaggagaaggggacgacagaggatgagatggctggatggcatcaccgactcgatgcagatgagtttgagtgaacttcgggagtgggtgatggacagggaggtcacaaagagtcagacatgactgagtgactgaactgaactgaactgaaagggctttgtggtttgagagtctctatttccccccagacaagtgcctgcattcctgggctgctgtgttcacgtcttgaaggtgaaaaagccagtgtttcgagtgagagatcctgccaggctgacctggtgcagtgtcagctggggggctttggttcacaggtcatttgggggcctgcagtccacagggcagactctgaagtcgcagtgcgaaactggttttgtgcttattttaaccaggtgactttcggatggtggttggagaggataaggcaaaagtgttgaatatcgtgaagcccaacatggcccacttccgggagctgtacggcagcattctgcaggagagcccccaggtggtgtataaggcccagcagggcagcctggaggtgagcggtcggtgggacatcacgggtccgtcctgaggcaggagcccgtttaaggggaaaagtcgagtgcgcagtatgaccagtgtggtaactattcatagaaagtgcgttttgcgtgtaaacgtgttctctgtgtgtttgaaataaggctaaaaggtcgcataagaaactagtgacagacaggaggctgcctctggagaagggccaggggctgacatgagccgggtgggggccggtcttcaccgtgtgtaccttttttgccatttgaacttcttgctacatatattaattattaatcagaaacaaatagaagcaaactctgaaattaccttctcttcgcctccaaacccatctgcctcccagaggtagtcttattcacaggttggtgtgttcgcttccagatctcattgcgtgtgcttctgtgtgtacgtgtatagacatgtaggaagtggcttggtctttttcattttttttttacataaatgtattcatatatgttattctgaagcttgtttctcccccactcgttatatgtattgtgtcttgggacttttcttttgacatagcggacaaggctttctttcaaggtatttatcaaaaaaatactaagttttttgaaaataaaagtcaaagaacctttgaaaaatgtaatttggatataagattttttaaactataggatttgggttttttaatctttacgataacacca

SEQ ID NO: 49730 - DNA, 1620 bp, Bovine  19866880847261
  misc_feature (1)..(1): n is a, c, g, or t
ngttgatttcctttaggattgactggtccaaccccaccctagacctaattaatcacagactctgggggtggaccccagctctgtgttttaccaagccctccaggggattctcacgcaggctccagattgagaatctctgctctgtagtttttgtgctttgtgatttattttgaagaatgtctttagaaagttatactttgttatattaagtttttcatgtattgtaagtcttggaatcctccaaatgatcctttaaagaatatatccaggatgttagaatcaggtaaaacacacacacatttggtttaaaaagataactgagaaagaaaaatgacatccctaaaaattctgttttaaagtgagatttgtatgacaaaagatgcagttacacccccctttgtgccgttttcctccgctcctcatatgctgaaatagatgcatttttcagggatattttttactgttaaagactttgggggaaggtagtaagagagaagtagttgagaggatttttgtcagtttttgaaatggtaggcatttcagcttgtttgtgttcagaagaaaatgttgaaaaaggatagttcttgtccgattcctctgtttagatattgaaggataaaaagtcatttaagaaatacaacttgtacctaatgtaaacttttaacttatatatttttaaatattttttccacttgtaagttacttgcttttaattgggggaaaaaaaatcttcctttgctaagtgaagtgacagttactcagtcatgtctgactctttgcaaccaggccaaaatactggagtggagtagccagtcccttcttcaggggatcttcccaacccagggatccaacccaggtcttctgcattgcaggcagattctttagcagctgagccacaagggaagcccaagaatactggagtgggaagcctatcccttctccagcagatcttcctgacccaggaattgaaccagggtctcctgcattacaggtgaattctttaccagctaagctaccagggaagccccagctgcaccctggaggatgctaaaatgcagggctcagggtagcaggagcacccaggatccagagacaggcgttaagcatgggagaggagcacccgagaatgcaacataccaggaaggctcacgaggaaagctcctcgcctcccccagcacttggctaaatgtggcttcaaagagcttttgttagaaataataggacaaaatgaggtttgtaaacctgatggcagtctggttccagattctaaacaataaaaattttaaaacagcaataaaggctattttgaggacaacaggaaaatggattaaacagtattacagacttgaattattttcttagctgtgatgatggtgttgtggttatgcggaaggaagtcctcagtcctacaaaatgatagcagagggatgtaggtgaaatgcaacactgaatacaacttgatttccaagagttcagccaaaaaaagtaggtaaatggatggatggacgggtggacagatagggtgagcaagtgaatatggtaaaatgttgaatccaagtggttcacacagcagtccactttacttttcaccttctctgtaataataaagttctctaagtc

SEQ ID NO: 49731 - DNA, 996 bp, Bovine  19866880867959
  misc_feature (1)..(1): n is a, c, g, or t
ncatcatcttctcttccctcccattttgtagttgtgaattcctgtagcaattctctacgaactcaaaagggagatatttaatattaaaacagctcctgggatctttcatgatctcgatgtggaaatgaattttcatatttgtatatttttcttcccttccagactttttatttttaaaagaaaaatggctgcatcttttcttcatcttttgttttcttaaagatttatgtagcatacttacaaaatgcttgttgacttggcattttatgtggatataatttgtagaagcaatacatatggatttacactcttagagaaatcgaatccagtttgaaaaatcaaactgttacctcctcagtggcttttcgatctattgtaactgcttttttattggatcacgctcttgattccttctaaatgaaatgagtaaatcttcgcatttgaaatctggggaagttagcatttctttctctaggactgcttttctcatcacattttttacatacgttcgtttttttcccctgtgcaaaatactgcttaaatgtcccttcttttatggagcttaacttgtttaactaggctataatcagtttttattaatgaactagacaaggcataaatctgttttttttttcttcttccaccaataagtaggagttgagaacgatgattttttttttcagttcccagcaaagtgttagctttagggtgctctgaataaaattaaattacataggaatgtttcattttggaattcaggaggatcaactaggtttttggagtaaaatggtagcctgaacacatgtatcaggctcctctctcaccaaaaactctgtaagatgatgacaaaatagacattaagaaaaatctctaccactgctggaaaactagctggaaaacaaaccttcataacgccaaaagttataaggaattccgggaaaactgaaaacaggtgggagtagattgacaaaaggaagcaaaaacaaaaataaaaat

SEQ ID NO: 49732 - DNA, 728 bp, Bovine  19866880907025
  misc_feature (1)..(1): n is a, c, g, or t
ncatattttaagctccacagctttgtagagtctcttacctcaggaggcaaaagaacagagcgattcagtcgtcgtaatttttgctaaaactaacaaaccaacaaccaccagctctgcaacaaacgtgttgctggcgtcatgctgtgctcatagagtagcttttgttctgagaggtgattttactgggtacgtctggacaggcctgctgttatacgtacatgtaaacatttataagcacaaagaacatgggcacgaatattcacaacctcccttcttttagtcctgacttgagctgcttcctggaattggcacggtttggctcagtggacagaatggaatttaacccctttctcttccgttcccgaaccgcgtctgttggctttcatcccaggccagaattagtttcatcttcagccttgggatctgcatttaatggaggagtcaccatctcatgggtaactgccagaattctagaagaatctttcgaattccttttaaattcttcttttcccttctaggctccaaccaggaatggagaccccattggatgtcttgtcaagggccgcatcgctggtacacgctgatgacgaaaaacgtaagtcaggaatccattctaagtgctttgctcctctccccccttgcctcctgcaacgtcgtaacatcaaggtgtttctccacatggtttcggggctgacgctgtgagcctggcttgttttcttcagagataa

SEQ ID NO: 49733 - DNA, 2583 bp, Bovine  19866880958415
  misc_feature (1)..(1): n is a, c, g, or t
ncaagggacaaaaagacatttctaaattccagtgacttgggacatctcagctactgagctcatagccaagtgcgggaacagcgtctttatgtgcaggcaagaagccgcctgatgctgtgctttactgaaaactgctctcagcatatgctggaaaggcaggggagcagccactgcttggatggtggcccggaggggcctcactgtcagtcatcctgaccatcgccccaccaccttgctttgtggaggtgaaagcaaggcccagagacctatcaacaggacaaagcattggcctggaggtgagaagaagagtgggattcaaacctctgccctgcctcctcctggctgtgtgaccttgggcaagtcacgttccctttctgtcccgcaggttcctcacctctgaactggggggttagaacagtacctgctgcacaaggtcactgcaggaatcacaagctggggacccggcagctttcaatactccgtccccacctccccaaatagacgagaacttacccaaggtcacctgtggaaagaggccgcagccctgctcaaagcccattcttcccgggttcgttcctggctgtggtctcagaggctgtatttcatggccttcctgctcagtgatacagggaggcccacgctcacactgtcctcaccttccatccgtgctggctttattctaagatccttactgagcgcctgcaacgtcctgggcgactgcattggagtcacagcattggagctccaggttgccatgcacgtgagaaccagggacagacggagcaactgtgcttctttcagctttgagggacctgctccttccttgtcttgaccctctgcatttcctcctccttggcctctagaagccccctgccagccccatcctgagatcctagggggccctgcttctcaccgagcctccagccaggactgaacaggcagagtgtcagcagagacggttcctgtttcccccctgcagctgccgcctctctcctgtaattctcaaggctcgcgccacgctacagatgccctgccagacaagctgggtttcctcccgctgccggggactcacggttcgtcctctaaggactggccattgagccagtgcttggctgggtagagagcagtttctttgtttgcagcctgcctaacagtttcttcctgaggctcaagggaggctcagccattttgccccattgccctgggaaaaggtccctctcacttgtccagggacctgcagcctcctctgcctttggggtggggagtctggggctgctctgccaggacaagggcaggggctgggtcaactcttcactgagacagccaagaggcagaggacacatgcctgcggttcccactgacatcctttgttctggaatttcggagttggggtactgcatttcacgctatcttatgaatgcgtttcctccaaagttcccaatgagagaatctaggccatatccaacacccaacagccccctctctcaccgaacacccatcaggattgacccgagtcggctcacttagcctgacagagtctctgatatgggggtgtcaccaaagctcaggagccattttattcagtgccccctccccagttcttcatgaagagaaggctgagcttcctgggacaggacagagagctccagccccatatcaggcagacactgggcattataactgggcttttaaaaccctaattttctccccggggattcacgtctgtttggagaggagatcagctcagagcctccgtgtggggctgccggatctgggttccttagccgaaaagcaagctaagctagagcacagcatctgtagatgccagccatggggacatgggggtacaagaggacccacctatggagacctgctgatcattgtcccggggggtggcagggtctcctctttttccagtgtccagaaaataaatgtcagaatgtaaggcaagaagacagacacagtcttcaaacctcagggacgcccccccttcccccaatcctacactgctcggagagcgcggctcggacttatgtgcgctcagctcaagcccaagctgcggtgtgctttctagccaacgtttcttgagagcttaagctgccgaagacagaaaggaagtgtcccattccccagtcgcctggtccccggagcccgcagggaacagaagaggggcccagctcgacctcggcgcagctgaccccacaaggagaagtggcgcacggctcgccaaacgctatcattctttcccgggtctcccgccgtcccctggggggtgaaccgggcgcttcgacggctccagcagaattcagagtcagctgggggtggggtggggggctcaaggggcccgcgacctcttggaaaaaagccggagattttggtgaccctcgtgggtgctcccccggccccctcgcgcatcccagagggacagcccgggtgcgcgtcgactcggagcggcgcctcgggctccttcctgtgggcccgaggccgggcgaggcgcgggggtgtggaaactcggcgagcccgaccccatcccgcccggcccgcagcagtagctctgggcgcccggcctcgctgtccggttgt

SEQ ID NO: 49734 - DNA, 1671 bp, Bovine  19866880965361
  misc_feature (1)..(1): n is a, c, g, or t
ntgtctttcggggcatctctgaccttgaatgtccctctggccagaacgcagttgtctccagagctggcaggcgacaccgatcttgcagacaccatgcagctgacaggtgggcagagctgcagatcactgtccgaagcagccactaactcgtgcaccctccagcccggcctgcctgccacgatgccatcaggccccagaagctggggacccccttctgcagccaggagggcccctggcaccctaatgtggccggttccacctagctgcacaaccccctgcctgcacagggctccagccaattgctccgcaagacctggcctccttgtaatttccaatttgtaagaaaggtaaaaatagaaggccattcgctgcaggcagctcgcatcaaatcgcatgccactttggtgtcatgtcagatcacggtaaacagagctgatggcttcctcagctgctcccggggacttccagagcagcaagaaggtggtgacaagttggggttggggggagcacctgagagtcagggcaatgtggctgggtgcacgatatcaacaccagctttaagtgaatctaaagcacagttcacaaatatgctgtatattacgggggcacctgggcatgaaccccagttctgccacttagcagccaagggaccttgggtacaaattcatctctctgtacctcaacctccccagctagcaaagagcagcgatcacactaccagcttcctgagctggggcaaagctcaattgatgggatgaactgcaaggtgcttcctaatgggcagctccttaaacagggtgtcatggtcctggccacgcagtcagggtcagggccttctccgtggcaggggcgtcagtaccacgtggctgcacctgggctcccgggccagctcctagcccagtggtcttgcagctggtgccttcacctctctctgtctcagtttcctcatcggtccagggaccattccactatggagctcacgaggttttgtggaaacgagacacagttctatcaggaaggcacacagcacagccccctggcatatcactaactcttagccgtgactgtttattgatgagattatcactggaaccacatttcgtggagtttctttttttctcctgtttatgactgaatccaagtctgtgctgaaatatcacagcttgcattcacacctacggtccgtgccaggcaaccctgtctccgctattagccggctccccgctcattccatctctacctctgctctggaggccctcaggtgagctcagagtaaagatgttggatgttcgtaaggctcacaaaggcacatttcccgggaagccctatcttggggtccacatggggcttcccagcatttcctcaagtaccatgccctttcccaccaccttccagagaatgggtggcaccaagtgcacccccccagcccaccccggtcctgggctcacttggggaactggcaccggggatgccacagagcagcagctgagcatctgatgttcttgctgggggcctggggggacttgcaggggctttttgcagttgctttcatcattggcaggcatgctctgcctgccgttcaagcagcttggcctggctgaatgaagggggcagtcctgacacaggcaaagggcagcacacactttctctgtccccacctggggctcaggt

SEQ ID NO: 49735 - DNA, 1122 bp, Bovine  19866881107975
  misc_feature (1)..(1): n is a, c, g, or t
ncaatttaaagagtacgtggtgagcatgtcaagggctccgtgacttggaagtcttgtgtttcatcaactttagggtcatttcctctggttccaactgggatcaacagtcagctaggagccatgggggactggggtccatctttaaatatgcgagaccattcacaacagggtcttgaaagtaaaggtcagaactctgtgcaaaattccctgttcagagagcaacattttaagagggtaaaaagctaagtggggcctcccagagtgtacttaccaagagctaaactggctataaagaatctagcgatctctgcctaagaccctttccttatgaaaaatttatgaggtgggtgttttaagtttttcaatctacaacttgagataaaattagttcatcaccacatatttttcatgtaagtatttttactgcatccttggtctatagcttctcttcactgtactaaatgaaacaggaggactttatctgctaaaccaagctaccggttctgttctttttctccaagctgtatctccaccctgtctctaataccatctagtcattttcacttatttattccactacctcaaaatcatcacagcccaagataaactgacctccgtgactctggcaccccctcccccaactgccagccccctttttgcaccttgctcctcagccctcttccaacagacccaacctggcgatctgtctgttcctctccacagcactatcattaaacagtacaaaggcagtcatttttggatactcgatgatgggagggaggtgagtgcagaaaactccatgggtcaatctcactaaacgtggttgattctgtcttgaatctctctctcaacccattctctctgtgcccctttcaatgaaaataaagggatctataatctctagtgggatcagttttgcattcctccttcataaaggggccatatctggggagagagaccacagatgttaagggagatgaaaaagtttaataacaatgaaacattttctttctttaaactgaaaggaattaacctgctacaaaatggatgaacctagaaaacatcatgctaagtaacagacatcagacacaaaggccttaacttttggtttcaggctcttga

SEQ ID NO: 49736 - DNA, 1022 bp, Bovine  19866881153566
  misc_feature (1)..(1): n is a, c, g, or t
ncatacaatgggctggaggctttttaaaaagcacaaacccataagcctattttctcaccttcaaatggtttcttcacggttttcaaatgcagtaagaggttttgggtttttttccccccaggctgggtatcactgaatttcagggccttcatgaagccttttcctgcacttggccaatctctggatgagccaaatcctgcctgtgggcccacagacagagagactaagtcacccccaggcctcccaggtctgatgctggggaaagcagagacacgagagcaggaagagaagcaagcttctccagattatacaaccgactggctagtgggtgggtggccttgggattctccgctcgaggaccatcgcttttctactatatgtcattccacaggggccaattaataaacgctctcctctggggaatggagaaaaccgagcccgggaggccctgggctgccctctgtatacagagcacacaaaggggctggggagttcctctccaacaggaagtcgtttgtctgggagagccaggaagtgggggctggggtgctgagtctgcactgcacacagcccagtgttttcatggaaatgacagtctcctagtcaaagcacggttgcatacatggactcactccacttcaaaaagaaaaaaaaacaaagagggaagaaatttaaagcctctaaatagggaccacacaaccctgaataatcgtaaagttctttctccactgtcttttttagaaagtggctaaaaataaaggcttgacacttgaaataatgtaagcaagcagtcacccgcacgcactgggcctttcccttatatggctgcgttacccttcagcctttgaaaaggccaaatgaagagatggccaaaaaccaaaataatccttcagacgtttgaaaacgaggagaaagaagtagaagagtgggtgactgacaaacaatcaccaggctccatgggggtgagtaacactgagaaggattagttgccatagtacttgaaaaacatgggcacgcatttt

SEQ ID NO: 49737 - DNA, 2034 bp, Bovine  19866881254499
  misc_feature (1)..(1): n is a, c, g, or t
nctacagagtgggataaatgatgctgaaaggcaagcagactcagagagcagcatctccattttccaggcacttcatgaagactggagttgaaaattcacctgcaaccaccagctaataaaggcagcgcaaggactttcctgtcacctgtccagtgtgggcctccctgctctgtctctagaggctaacgctgcagggttaggaactgtgcagatatgagggaaccttcaaggagcagtctttttctaaattaattttgtggatgcagcttgtgaccccacaatataaatacatacagtaatacttttaaagatgatcttcaaagggcacgcgtacggtgatacccagcaattacaactgtgaagtcatgctttccagaaatgatgactaaattgggtcgcatttctttattttttattgaatccaccaggtgactgctataaacatctaaactagctctgaggtcattttcagataatgtgcctttccaagacagtactttctgttcaaaacaaaataattgatagagcatcctataaaatgaaaggttttatatggacctttcctggggcataattttagggagaaaaatccttgcctataacctaccaggcctgtacctagccctgaggtcatgcggggtcccagcttcaggaagctcatggtacagaagacaagcagtgagaaatggaaagaagtcaagggagattataggaatgtataaaagtgtcttaatccagtgcttctcaaactttaattgcacatgaatcacttggtaaaatacagattctccaggcttctatggtgcgccagtgttaagaattcaccttgaaatacaggagacacaggatcgatccctagtcagagaaccaagaacccacatgactcagggtaatgaagcctgtgtgccacagctagacagagtctgtgcacctcaatgaacaatcttgcaacaaagatcccacatgctgtcactgagacccaaggcagccaaataaacaaataaaaatttaaaaatgagttagactttaaaaacaaaaatacagattctcagtgagtaggactggggtcgattccaagattttgcatttttaaccagctccccacatgatgttgatgctgccggtccgtggaccacactttgagtagctgaatggctgcttgtgatttgggatataattccctataacagcatcatatttccaaaggggtagcgtctcaaacataatacatgggttgatagcatcaccgactcaaaggacatgaatctgagcaaactctaggagatagcagaggacagaggagcctggtgtgctacagtccacggggtcacagagcatcagacatgacttagtgcctgaacagtaacaacaacaacgaaaatcaaaagctctgaaaggcttggagggatgacatgatgaggctcaagctgctgttcctgaggtgtaccgactgtgtgctaggagaggaaacagacacgtttccatcctgcaggcgtgagcagctgaatggagggagacaagtaaaaatcaaagactcctcatacatacaaatgtaaacgcacatctgggacaaagcttgtgagagtctgtaagggggagcatgacctggctggggaggttggggatggggaaaggagagaagagcaaaggcctggcggaggaccaaggggacccggatgaggctgggcagagggatgaggccacgcaggacttcgagaagtttcacgtccatgctaagagtgtgaggggctcctgaagtgtgttacccaggagaaagaatataatcagatttgcattgtgaaaacccaaagctggctctggctgcagcggaggatgggcttggaggggccagagagtgtccctcccctgggaggcacagggcctgacagagaccgtgtttagtctctctctggctggcagaaaactctcaagctacggatggccgctttctgccccatggatgctggaagcaggacagtcggtctgctcagacacatgggaatgaatcggacacccaggaagtactgggggaaa

SEQ ID NO: 49738 - DNA, 1374 bp, Bovine  19866881312827
  misc_feature (1)..(1): n is a, c, g, or t
ntgtttggtttgtgtctgctttgcatgaaaatcgttgcttgttaattcttgcttggctaatgatttgattttaatagagcgaattccagaatttaatggcctgatgcagatgtgtgctgccaagctctggagcgctgtttacactgcccccactccagctggacccagcccgccgcttccccgagaacagctgatgagtgcccatctctggatgttcgcctcctcccctctctggaaacaagcacatctttcccttaggtggcggcccgattaaagtgacaagggacgaacctaaatttccatttcattgtccgcagctttctcctgtacccctgtcctctccctttcttacagcgtgtgtccttttcagctgttgtttttccgatgagccactgataaaaacgattggctgaccccgcagagaacccttgttttatttccctgatgaaaagcactgacctctttgtcattgcttacaatcacccaggagagtgactcgggcagcttcttaaaggaatatgtaatagctgtgccaggcttgacgttctcttgagcggagggtaagagggacggaaaatagcagttgttctccgtctaaaacctatgtgaggttttcgagccccaccctgcagaactcccaactgggaacagttaaaaccaggtactggagatgatggtagaaccctttttctgttagaggctttatatcaataaagagggggagaaagaaagaggggaaaaggagcggagtgaaatagaatcccaggatgagcagaaaagacaccaagtataactcctggtgtccaatattaaatacaacacattacttatatatacgtgtgtgtgtgtataaaacatgagtgaaagtcactcagtagtgtccaactctttttgagaccccatggactgtagctcaccagtctcctctgtccgtgggattctccaggcaagaatactgaagtgggtagccattctctactccaggggatcttccccacccaggactcccgcattgcaggcagattctttaccgctgagccaccagggaaggctaggtaaaacactacataaatacataaaatccacacacacacatgtgtgatagtgtatgtggttttatattgtgtctaacagaatgggagagagctttcctgtagaggtggaggaatccttagacaccatttaaagagaaagcagagagaccaacatgactccttggccttcccacctgcaggctcttcaggatccaactccagccctctgttgctgctcacaagtccccaccttctggcctccgggacgtctcagtgatggggtgtctttcctgggtccccttccttccttcctcttctgggtctccctctttgtcatctg

SEQ ID NO: 49739 - DNA, 1256 bp, Bovine  19866881323246
  misc_feature (1)..(1): n is a, c, g, or t
ngtgtcagcaaagctttgttctctctgagtctctgaacagaatcagttctttgcctcttgctagcttctggttgttgttgttatcattcatttgctaagttgtgtccaactctttgtgaccctatggactgcagcacaccaggcttccctgtcctttattatctccctgagtttgctcaaactcatgtccattgagccagtaatgccgtccagccatctcatcctctgtcacccgcttctcctcctgccttcaatcttttccagcatcagagtcttccaatgaatcgactcttcacatcaaaagtattggagctttagcttcagcatcagttatttaaatgaatattcagggttgatttcctttaggatggactgacttgatctccttgcagtccaagggactctcaagagtcttctccagcaacacagtttgaaagcatcagttcttcagtgctcagtcttctttttggtccaactctctcatccttacacgactactggaaaaaccatagcgtttactagacggacctttgtcggtaaagtgatgtctctgctttttaatatgctgtctagacatgtcactgcttttcttccaaggagcaagcatcttttaatttcatggctgcagtcaccatccacagtgatactggagctgaagaaaataaattctgtcactgtttccatttttttccctatctattttccatgaagcgatgggactggatgctgtgatcttagtttttttgaatgttgagttttaagccagctttttcactctcctccttcacttttatcaagaggctctttggttcctttaggaccataacaaaatcatcttacctcccattatctcccgcgaggtttattgtggtttatcaagtggttacatgcattaatgtgctggctcttttgctaatggaggagttccttgcatggaggggggtgtggttaaggtaatagcaccatttctgaaaacaaaacacaaagccttgtttctctacgggagatgttttcttaggtcaaagagaggcttctcagtcttactagagcttcagagaagctggtggaaggaattctgttgtccagggagacagagtctgttctgagcagctgaaggcatcagggcggaggcccgggtgaggtgtggggaacagactcaggcatggcctttcctcctgagcccctcactccttgcagtggcagattgctactgttgtttggtcactcatggactgcagcccaccaagatcctccat

SEQ ID NO: 49740 - DNA, 1141 bp, Bovine  19866881403243
  misc_feature (1)..(1): n is a, c, g, or t
nacaaaagactatttttaaatggttatgtttactctaataagagacacatttactgtgggctccttaatggcatgtgctccacatctgctgtctcatttaaggctgccaagtctgacaaggaaggtgctgattatcctcagtctcacggacgaggacaaggagcaacaacctgcccaaggcccggccacgtcccaggatcagggcagtgacatttcaggtgctaacttcacttcactctgtaattctcccctgtaatttcccccctttccctcacttctgtaatgctggctcactacctctagcgctctgaagtaagttcacagatgcacagacatgctgtcccagcaaatgtgaatggagaggcagctgggttgactttgaattgtgtatataccctcatgctttcattcagagcctataaatgttttctacttctccctgaagggatgaaatgtcgtctaactctgagtctcacacagctggctcagaattgaagcatcagcgcaccactgttgagatctaaatatttatgccacctccttacctcctgtacatttaacaaacaaaagctcttacattttagacagtaattttctgagagagggactatattttaccaaaatttaaaggcagacgatccaaaccctccccaaacaacaactgccggccacgatgaaaggagctgggaaacattaaggactttgtgcaaacagggaccaaagcgtattcgtccctgtgaccccggctccacgcccgctgcctggcacatgaaggcagatccataaatgtctgctgaattggatttctcccactgctgtgcagcagaaccagctcagccatggggaacagcaagcaaatgggcttatcacccgctgcttcagaacaaaatgaataaaattgtggacacagcatgaaccagcatctgatcctaagaatcaatttttcttacctccacagatacgctcacaacaaaatacagagattgaggaaaaactgactgctgacttgtattttacgggagtttaactcttaactacccaagccagagaacagcctgtctaatgcgatggctagacaaaagggtaatctctccttgaccctgaagtaagacaaattcagaggcttgtagtccatttggag

SEQ ID NO: 49741 - DNA, 1189 bp, Bovine  19866881407907
  misc_feature (1)..(1): n is a, c, g, or t
nttgctgtcatcaaaaagtctacaagaaacaagtgttggcggggatgcggagaaaagggaacccttgtacactgttggtgagaatgtaaattagtgcagccactaggggaaacagtgtggaggttccttagaaaactaaacacaaaaaaaaaaaaaaaagaaagaaagaaaactaaacacagaactaccatatgacccagcaattcccctgctgggcatgtatctaaaaataaacacacacacacatgcccacacactaattctaaaagctacatgcaccccagtgttcatagcagcattgttcacaacagccaagatatggaagcaacccaggtgtccatcagcagatgaatgggtaaagaagatgtaataagcaatgaaatattctttagccataaagaagaatttactgttgtaagtcaactgctgctgctactgctaagtcgcgtcagtcatgtccaactctgtgcgaccccatagatggcagcccaccaggctcccccatccctgggattctccaggcaagaacactggagtgggttgccatttccttctccatagtaagtcaactattcctcaataaaagataataaaataaaatattttaaaagatactaattatacaaagtaaatggaatgaaaaatataataactgttataagagacaccctgaatggtctcaagagtagagtggagatgacagagaccctagattcagtgaaattaaaaactgtattaacctgaacaacaaagataaaaagacttttttaaaaagagcctcatttcctgtgggacagtagcaaaagatccaacattcatatcatccaagtcccagaaggatagaaagactgtgggactgaaaaagtgttcaaagaaataatggttgaaaacttcccaagtttcatacaaaacacaaatctatagagtcaagaaactgagaaaattcctaaatagataaatagaaatcaaaccaaaacacatatttctgaaaactaaacaaagaaaaaaatattttaaaatagtgaggaataccaattcaaaagactgggatttgtcatctgaaaccatgttgagcaacaggaaatggcacaatactttttaagtgctgaaagaaaagaactgtcaacctcaaattctacacacagtgaaactatctttgaggaatgaagtagaaataaaggcattctca

SEQ ID NO: 49742 - DNA, 2798 bp, Bovine  19866880240341
  misc_feature (1)..(1): n is a, c, g, or t
nctcaatggacatgggtttgggtgaactccggggagttggtgatggacagggaggcctggcgtgctgcgattcatggggtggcaaagagtcggacacgactgagcgacttaactgaactgaactgaactgaggtgggcgctgaggtgaaaacaagctgcagtgagagagaaggcccttaggtgtggccgtgttctgagatgaagagaggccactggaaaggggtcaggaggtggaagaccatgaggcaggggaagggtgctaagcagaggtgactgacgtggtgacaggtgacgtgcagaatacttatcttaatcaggatactcgggttaggaggtcgaatatggcgggggcaggggtgtgtggttctccctactcaaggcttttcttttcactccaagtttttcatatctggcttcataatctgtacctaatacctcagtcagtgttcctaatttctctttctctgtgactctcttactatttaccactctagtctgtgagtgagacacccaaggcccattcaggatggagagtaatatttcttcctcttaacttgaaattttaagtagccaacagaagccaaacatattttggtccagcttttaaatagaaattttaggccagccttcatgccagcagagctgtctctggcagcatcatactcctccccttaaatggagactgactgttgaggagtcatgaaacatttcaaagagcatctgttgaggtagaggctgtgaggtgtcttggatgagtatctgtacaaatagttctttgggttcaagacctagtacagggtgaccctttttcttcagtgtctgaatcattctttgctggaataaatagcaaaaaaattccacaatagcagttggcattttgtaggactacccccctcaacccctgccccgacccaggtggtctgtttaaagtgccaacaaatgactgccatatttcttcaaaatctgttattttccagaaacaacctgttcagtttaaatggaaactaatgcccattttttagatgaactggatggtcataatgggctttcaccttgggcctcacctaaaataattatagtaacttttgagcagcttgttagatggagacatcaactgtacagaagagctgcaaagagcacagcaagatcgtttagggaaatataacatatgtagtttggtgtagtgacagctgggagagagaaatgttcataatatttgaaggttgtgtgcagtacacttaaactaaaatgaacttggtaatgacaaattggtgaagtgagtataaaaatcttgtttgaataggatattgatggctttttacaactaaaaaattatttttaaaaaatccaaaaccctggggtggttaaaaagtacacttgaaaatcttttcactcaaatcaggacaaaaaaacaaacaaacaaacaaaaaaagactagtctttaatatcttacaaaaattctgaatataatgaaggtggtatttcaaatttgtgaggaaatgaattcagtgaatggtgttggaacaaactaggtagtcatctggaagaaaaataaaattggaaccatatttcacaccttatactaaaataaattccaaatggatcaagaaattaagtctgaaaaataaaagtgctagaagaaagcatgagaaaaaatgttactatctcagagtaagaaaagtctttttaagtatgacataaaacttagaagccataaaaaacttataagaattactaaatccttcatggcagaatgctactttcctatcctagatacaaagcatggcaaaccaaggctttgtgtcaattagtaaccaaacagtaattgtgtcaattagcttttccagtttctcaaataagtttagcaagtctgggagctctccataaaattttaaaaatttgtgtcattttatgatactctaagaaatagaacagagagtggaattacagggcaacctgaattttaaaccattacactgtactgcccctctgtggacaaccaccttataatcaaataaagttatataatttcaccatgtacggttaagtttctccaaactggtgcctctagatttgtgtattcttggtttcaagagctcaaatttgaaaaatgtttcagtaaagaactaaagaatgaagggtcattacaaaaagagaatgtcattgggtatatctccttttaaattagcatttattttaaaaaatgtttattgaatccctactatttgacaagggcttcgcaggtggctcagcagtagagaatccgcctgccaacgcaggagatgtggattcgatccctggattgggaagatcccctggagaaggaaatgcaacccactggagtattcttgcctgggaaatcccatggacagaggagcctggtgggctacagttcatggggtcgcaaagagttggacactactgagtaactaagcgcatgcacgcgtgcacacacacacacacacacactatttgtcagacactgtgctaggtgctgggtgccagaaattcaataacaaacaaaataaaaactctagtgtggattatagataagtttataggcaattacagtagcatatatacacatacatacatatcagtcatttgaggctttctcatttatttagatttctctccaaatttgaaaagcttccaactttggcgcacagctgcccagagaggcatgcttgtgaccatttatttaactaatatttattaaacacagcttggacccatctctctgctggatatgaagataaagacaggtctttgctctcaaggagaaagagtctagtagg

SEQ ID NO: 49743 - DNA, 1744 bp, Bovine  19866880344321
  misc_feature (1)..(1): n is a, c, g, or t
ntgtgcttcttccgcccagcatttctcatgatgtactctgcatagaagttaaataagcagggtgacaatatacagccttgacgtactccttttcctatttggaaccagtctgttgttccatgtccagttctaactgttgcttcctgacctgtatacagatttctcaaggggcaggtcaggtggtctggtattcccatctctttcagaattttccacagtttattgtgatccacacagtcaaaggctttggtatagtcaataaagcagaaatagatgtttttctggaactctcttgctttttccatgacccagcggatgttgggaatttgatctctggttcctctgccttttctaaaaccagcttgaacatcaggaagttcatggttcacgtagtgctgaagcctggcttggagaattttgagcattacctttactagcatgtgagatgagtgcaattgtgccggtagtttaatggtgagcaatttctccagaacaaaaaaactgatcaaaacctttggagttggatgacttcttgttccagattcctagctgtgtttgtacagatttggttgcaaacaggaacaagaaagttgtctcttaactctcaagtagatccttggaactgaaggctctttggaactccgtctcttgctaactaaactttgtgttttcagaccgctaaacctgggtatgttatcttctcaactcaaatggctgctcttgcttgcttgctgcctgggacgagtcgccgtggccagcattattagagtttgactaatccctaacttcaagcttttcagtcttttggaagaagaattcaagacagtagaacgggtattgatagtgttttgagttggagttttccacagctgatgacactggaagaatctcccataggaagctaccttagcagacactagagtttcgcctttcagtttacaaatgtggtgaggtacttttggcttctgtttgagctggttgcctcattttggtcgtgtaattgctttctccgcagagacaatgaatggggaattctccctaaggtcagcatttaattaattgccgcgctccggctgctatagtactccaggcatcgatcttattaaaattgcctggagattgccagcaggttgaaaatccgtcttctgtgacagcctggagtccttgagttgagtgggaggtgccttgctcaatttacaatctccgtgggcgcgggacttatccgaagactggattgggcctttctcctgtctatcatcggaaggctctccgcccccgacaatcctactgcaggatttggaagctgagcaccgcctctgaaatcttggggagtgatgggcggtaagggtaaacgcggtgtgaatttctctccttattggttggctgatgtgtcagtcgtacaccgctctgctcccattggcgggaagactccaggccggtagcgtggacactgtactgcccacttgaaagctacgatccaggcgcgtgacgtcccagacttttgttgttgggctttgggcctcattaattattcattaggtacttgaacgagctgtagcgattggtggccgagagggccggtcgattgtttcttagctagagatacgtgtcaccctctacgcggcgggagaattttcgcataaattattctgataaggtttgggggcgtggccgctcatagattaggcaaataagctgagagggaggggaggccggctacaaattagcctaagttattaaagat

SEQ ID NO: 49744 - DNA, 1869 bp, Bovine  19866880528400
  misc_feature (1)..(1): n is a, c, g, or t
ntattatttctatctatgtacctgatgcgaagaaccaactcattagaaaagaccctgatgctgggaaagattaaaggtgggaggagaaggggatgacagaggatgagatggttggatggcatcactgacacaatggacatgagtttgagcatgctctgggagttggtgatgaacagggaagcctgacgtgctgcagtccatgggatcccaaagagtcggacacgactgagagactgaactgaactgaaacttgatctatgtgtctttctatccatccaagataaacacacactcttggctgaacaaatggcttcccacctgcttagatcaccggttatactgtgtatgggtaggaggatcgacaaaacaatctataagtcctgctgttcccactcctgtctaccaacaggaaatgagctatgcaggccttatatttcattattctttagaattgaactgaggtttgaataaatggttttagttattaattgggttcttcatactgtgctgggactatgtttctaaaagtcaaccaaatatccaaattttttaaagtactgagaaacatgaaaaatagatattaggagaatccagtgattgtcaccatgattgacgtatctcacacaagccaaattctatgaagaacatgtcagaatagaaaatattcaaagatgtgataggtactgctagcagttagaaaaataactgtcagattttgacagcatgtacttaattggtaactcagtgatttagtgcatttgatatatattcctgatatgaaaagacctaaagttaaataatctcattcattcatttaatgcaacaaatattaactatagtaattgccctaagatctggtaggagcactttaaacatctttgtagtttatattagcatggcttttgggacatggtcacaaaccagacagagctctaagagatatggataatttaacagatgtacatttacatagtttgagagtaacttaaatgtaacttgaagcagtgttggaagttggccacaaattgagagctgtggacttcaatgagaaaaagaaaaaaatctagatactgacccgcataaactgaatctaaaggacatgctggagagaccactccatttgaaaggcatatttagagattctatatttagaatttatttagatttttatttagagattctataagtctaccaattattaaagggaggttttacttgtccttcttcatcttgagaaaaaccaccctaaaactttggcttagagaaattttagagaaatggctatagccctggaaaatctaagacaaaatttctggtggatattctgaaaaaatgaacccccaattcaactgaaagtgtacccaaaattgcttgggatagcataactaactgttcccttgggaaactgaggaaaatttagtattaggaatagaaatggtgcttttaaatcttgaaagattttaaaatagagacaaaaatcaagctcatagattactattttcatattaaatttgggaataaactgtgcatatttggtacttgaaaactctcatagtttgagaatttgacatttttataacataacacattagcctgtaattgattaaatgatataaagctgcagcttctaagttgatagctaactttatacacagtatttgaacatttaagagtgtctaagactcactatacttatgtttaatttattaaatttataggggcttccttggtggctcagatcataaagaatctgcctgcaatacattaaatttataagacattcaagtaattgaaaagattttagtaattatacaagcaaagttctgaggagaaatacaataaatttataaatataagttaaaatattca

SEQ ID NO: 49745 - DNA, 2253 bp, Bovine  19866880540882
  misc_feature (1)..(1): n is a, c, g, or t
naaaccttttctttcttttttttttttttttacaattagaagttctttagaatacttggggctctcttcctcacagaactggctactgttggcagtaacatatgaggatgagcaaaagttcagattggaaatttaactggaaagattgagaggtaaccaaacgtggagtgccccaagaacaagacgactagattgtgttcaggactgccaagggtataaataacaaggttactgcctggcagagaacatgtggccccaagactggcatctgcagttttgctagcatttcattttctctcatctaccctttttttcctgtaggaagtttctaaaacatcatttgcgaggaaagaactgtgaactcctgctggtggtaccagaagaggtggaggcccatcagagctggagggctgacgtgtgatgcagtcctacccagcctccggcacctcagccccctggaatcctccgtgatgtgctgcggcctctgccgtgggtccgcccttgccacttccccaaacatctcatcgggttttttccctctgatttgacagtgcaataggacagacacgtggactgttagaagaaccaaccagcgttactcgctcctggaaaaggaaggcaggagctctgtgtgcttagggcgagctgtggagaccttggttttattttaaagagaaggaaggtgggtctcagctgcctctcccggcttctgtgagggcttggcagaggctctgctggagttcactgctgctctgacccccgcgggacgctgcctccccatccccttccctggcagctggtgaatctgaacacagtccagacaaagcccatgggactggcttgaaggcctcagagcaggaaggcctctcaggaaaccatctccagagctgcagcagccgcacagcaggctgagtccagccctcaatgccaccctgaccccatttttaggagtggtttatggtcgtccttgaagtttgataatgaaaagttctctaatatttcatgccaggtggttgaatcctgcaatattctaacatgacagggtgagctagatacctaagaggatgtggccagagccaggctggggacaggcacggacagcctgtctgcctcactccagctttgtccccgccacttcactgcactggtttagaaggtttggggacacaagacaggccaaagggcagttttcccagctgacccaccccggcaaaatcagaaaaaaataagactgcctttaccatcaaattctactagtttgagacagtgttgggcaagggaagtattgtgaagctaagccctcagagatttggagcagctcaaattagtagaagtcttaggcttggagtcactctggtgaccagaagcagggccctcacgttgggtagatatgtgcattctgcttaggacctgggtttgtcatctctctggagtttcctttacagatcaactgagaattgaccccccctacctctttaaagagctgtaggccacttttctcctggtaactttggaaaacaggagaagtgttagactacaccgcctgtcaccaaaggggccgtggtggtctcaaggcaggggggcaggcaggggtggcctgttcagcccttcacagatcagtggtcttggcaggtctgagagctgccccactggccagactcctctccagcagcagagccagcctggggcttgcatgtccagcctgagcaagcttaacgggatgaagctgaggctttctccccactgtgactggagtgcatgtttacaccagcaccttttctgcacatgtatcttcaatcccacaaggccatttttttaacgctgagtaacagaggccaccaagcaactactgcgtttcaccctctcagcaagtggccgcagtctcttctgcaccattttctacaccagacctgcttggcaccacagggagctcgtcacccctgcacaatgacattccaaccaccaccagccagaagttacagccaaccttgctgactgtcacaagcaggaccttgggtccattggcacggtcagtgatgtaagccatctcctgggaggaggaggaaactcctcaccaccagtctgcttgggcctgtgcagacagcacttcaaaggagtcctcatgcactttgggagtccataagccaatgggatatgcaaagatgcttaaccatttcagggctggttcctctgttcatatccaatttctggtgcttaggaacagggacctatgctgatgcccaagggcagaaa

SEQ ID NO: 49746 - DNA, 1944 bp, Bovine  19866880551432
  misc_feature (1)..(1): n is a, c, g, or t
ntgttgttggagaagactcttgagagtcccttggactgcaagaagatccaaccagtccattctaaaggagatcagccctgggatttctttggaaggaataatgctaaagcctaaactccagtactttggccatctcatgcgaagagttgactcattggaaaagactctgatgctgggagggattgggggcaggaggaaaaggggagacagaggatgagatggctggatggcatcaccgactcgatggacgtgagtctgggtgaaccctgagagttggtgatggacagggaggcctggcgtgctgcaattcatggggtcgcaaagagtcggacacaactgagcaactgaactgaactgactgactgatgctccagtctggctcataactagagaaagatacacacacacacacacaatgtgtatacttacaaccctttcttccactgaaactcagttctagaaactaaaattgtattggtcagtggacaccaaacactttgtatagcatttgtcatgtttcaaggactcttccaagtgctgtacatatgatattaactaatttactcctcaaaataatcctatgaggtggataccattattctatttcactgttgagaatactgggtctctatccaaacaagggagatgctgaagctgagatgaacaacacgttaagttctacattcatcagatgtcccgcatctcttcccggtaccaagtgagatccatcatgtgatgtaagttgacttaacaaaagtacggacaaagaagctgaagatctgcagtcaggtgtcaatatgagtctcaaagaatggaaacacgtacattgccttctgaaatattgtgctgtgaaattatgtgcccccagagaaaggctaactatttttagaaggagagcagtagagacttttggaaatatgcctgaatagagtcataattgggcaagggatacggggaacgccaattttggcagaaggatcttttggaaaagcagctctgacccagtcattcctccttttaagacttttcaacactggaagaagctaaaatatcaacagggagaaccccctctcagtggctcatcgctgtctctagaagtcagcaagaactctttctcatggcaaaggggcccctcccgagggttttcacttccctgcccccaccctgcacaaccccctcctttgatctcatcaaaccacctgctgtcttctgaatggtccctgctttttcacactttcgtgtcttcagttcatctgggaagcacctacatatctttcaaaacacaatcctgatttatcctcctgtatgaaactgtctctgttcccccaggtagaactggctagacgtccttggccccatgtgagtgcctgcagagttctcagagcacagaagagttctgtttggttacttgctatcacttcctataaagcatgacctccccgagggccaaactgcacacccccctcccttccctgacactgggcagccaaccaactcacattactgagtgccacccatgtacccagcactattctaggtgctggaggtgcgacagagaaaagacagatagatccctgccctccggaagattgttatgaaggcagctgcagaggtggaacacacaagacaagggcatgattttcaggcctgtgaagcgccaggctgactgaagcccaagctggaatccagactgccgggagaaacattaataacctcagatatgcagatgacaccatcttaatggccaaaagcagaagaggaattaaagagcctcttgatgaaggtgaaagaggagagtgaaaaagttgttttaaaattcaacattcaaaaaactaagatcatggcatccagtcccaccacttcatggcaaatagatggggaaacaatggaaatagtgacacactttattttcttgggctccaaaatcactgcagatggtgactg

SEQ ID NO: 49747 - DNA, 1037 bp, Bovine  19866880553090
  misc_feature (1)..(1): n is a, c, g, or t
naaatagcggtgcctgtcccagcacaacaggatgggcctggatctatggcatcgatttataggtattatgatggtttggggaggggggaattcctttcccgagcgagtcacccgtctggaaaaataaagaaggaaaaagctgaaattttttccttccatcaaaacaggaaggagctgggagaggtgggggatggacggagagatgaagggtggaggccgagatgcaccctccaccctgtggtggtcttctgggaggggagacccctgccgggcacctgcacacagggccccaggggcgctaggaatggcgccgcgtctcccctgtgtgggccatccctgctgccccaggcatttttgtcctctctgacccccgggcccatgtgccttcatggacatagcacacagatgctgatatgcacaagacccgtgtccctctggtcccctctcacacccgagtcagatgcccatccccgcaatcccctccaaatcccacgggagaaaaggtcttcctctgggtgaatgggacttggggaagggtctgcctttctgacctttgctgttccctccccttgaggactgccctggaagtcctgtgatttcagttcagatctggcttcgctccaactccaaggggcagggcgagctaagggaagtcaatttccctctctgagcctcagttttctcatctgtaaggagggtatggtcttctccgtggtgcttccctctggggcaaatttctgggaccaagttttccaagtcagggggctgataaccacagcccccgtttactcggcatgctctcggtgctaagcacctacatccagtcactagattaacccccctgaccaaataaggtatgttccagaatcaccctcatctatggcccagagggcagggaccacctgagggccacacggctgggatgtggtggaggttggttgtgaactctgggttcctcagcatggttcatatccaaggaaaatgaaggagcaccccaaagaggagggggaggaggggagggagaggggggaggagtg

SEQ ID NO: 49748 - DNA, 1403 bp, Bovine  19866880562403
  misc_feature (1)..(1): n is a, c, g, or t
ntcaggctccacagtgtcagccaactccccaggattccccggctgtaaccccaccccagcttcctttccagctgagcgtcagatcccttcaagtcaagcctggttcgattacctgcgcttgtcccaccaaacagcttcatagcctttggtctgaagtgctgccataatgacgttcacatcgtagttcccatttcccagcatgctcttcttgtggggggtcaccatggtgtttggcgacaacctgcaaatgcgacaggagggaagctgagattggctggccagcccaagccctcctggctccacactggcagggacagaagacactttacaccactgcccctggaagcccgttgccgtccactcaagttaacgtaaccagttttttactaaagtattttgtagtctgagctcctgctgtcctagggatttatcttttgatgcaaaacggtaattcagcagtggtggcgcctatctgcctgccatttagaaagtgcgtctatagtgaattcaatggatataaagaaagaaatctctcatttatgaaatccccagatttcccttttctgaaattttctttgctgatcttcctgctttgatacagcctttttttttttaacattagaaaatagtatttgatattttgatttgcatgggtagtatctgtcattagttttattttttacaatttaaatgctttctatttaaggcctgcgtacttggtaattattaattattaaataaaggcctacacacaggtaacatcaatgtatcaactggggccccagggaaagcaattaaaaacagtattaacctgaaatgcatgaaccacctaaaggtattccaaatatacatgtgtgtgaaatactggaatttgaaagaaaatacgccaactgaaaaaatatttttgccaccagacaagcaaaactcaactgcagtctggttcgcctgctggctttaagccatctttgggtcaggcctctttagccactcctccatcttcagataaggtcagttctggaggcatttccaatcctattaatttgctttcgcaggccgcacaggccaggacctgcggaaaggcaggggcagcacacctctcaccccaaggaagcgtcgtgagttcctcaggaatacaggtggagagcggctatctaggaggctgctaactgccatctccagaagagaatcagatcttgcagtcaactctaaaaacttaagagatcttagactctacacacagcaaccatactggtattttcccaacatactcttgccactgcttaaagccttcaaggctcccaaagcacttaaatagatctaaatgacattggcaggtctgtaagacccttaggattctgctgacctcatcactacctcgcagcacaaagaccttctgtctacta

SEQ ID NO: 49749 - DNA, 1361 bp, Bovine  19866880648080
  misc_feature (1)..(1): n is a, c, g, or t
nacgcagagagggctctggggtgggacaggggatcggagccagtcccccgtgaggagccagatgtcctgggttccacagggaacccaaagaatagcagctgtgcctcatctaggcctgtctggtgggggtggctcatcccagcctgggtggggaacagggactgtgaaggactctggaatccggacccccgaagggagagcagggtcaaggccaggggcgagaggaacccgagcagtccctgtgcccctgtctgtgcgagggccgtgtcctcttggcacctgtctgggggtgaggagtgctggcccaggaagtgtggcttccagcccatccttgctctctgtcctctgcaggagtccgtgcccggccaggcattgtttgcgggtataaaaataaaggcctcttggcctgggccctgctggcagagggaaggagggggcagccctggcccaggcctgaagggcatctggctggaaaaggagcctcacccagctccaccatcagcaaagcaaagctgggcatgtggggggtccccagagaatctccagccccttggcttctcttgccacaagaggcacaggagcgtgtgcgggtgtctgggtgctggctgccttctccccactccagtcactcaagtctgtctctgaccttcaccagaggcttccaacaacctgagcccactggggtataccagattccccaagactctctttcccctacccgctggtaacagtgacagccatagctcggtaacctggttggggaaggcaccgctatggtttattaccattggataagtaaggcaatcgaggctcagagagtttagtaacttggaaaaggccacacagctggtcagtggaggagccagggctcaactgagttctgtctgactcctgagccaggaccctaaccagggaccgcactgcactgccccttgccgctcccgagctccacctctcctggtctctggtcccgtcacagcagagaagcttcctagttccccacagtggccagggaaagcggggatagggcagctgatcaggagcggggagctgggggggggatccaacagacaaggagcgctggagggtgccaggcactggaagtggggtgaaataaaagtcactcagtcgcgtctgactctttgcaaccccatggactgtacagaattctccaggccagaatactgaagtgcgtagcctttcccttctccagggaatcttccccacccagggatggaacccaggtctcccgctttgcaggcagattctttaccagctgagccacaagggaagtccaggagttgggtggtgggttccttattacattctcacacgaagtccttgtgcagggggaatcatgt

SEQ ID NO: 49750 - DNA, 1179 bp, Bovine  19866880826432
  misc_feature (1)..(1): n is a, c, g, or t
ncctgccatgccggagacttaaggagacatgggttcgatccctgggttgggaagatcccctggaggaaggcatggcaacccactccagtattcttgcctggagaatcccatggacggaggagtctgatgagctaccgtccatagggtcacaaagagtcggacatgactgaagcgacttacacacaggcgcgcacacacacacattggttagtgaaagggctctatattatagacattgactgagaacgttactttcatagtatatgcttttttggctgtgccatgcagcttgtgggatcttagttctctgaccagggattgaacacaggcctcggcagtgaaagcatggcatcttaaccattggactgccagggaactcccctaaatgcacttttaaaagaagaagagggaggggggttcaggatgggagacacatgtacacatggctgattcatgtcaatgtatggcaaaaatcacaacaatattataaagtaattagccttcaattaattaatttttaaaaaagaagtgctaaatgctgtaaagaaataaaacagggatcgagagagatggggcaggggaggcctttctgaaacctgagggtatatcggatccaacctcgtggagctctaagggctgaacatgccccactcaaagagaccagtgggcacataggccctgaggtgggaacgaggctttggggctcagatctgagctctcaaaggaagcaactctccaggggaagtctggagagtgagtgagcatatagtagatgctcaataaacgttccctgcatctctgggactcatcaatgcttgggttcatctgggtgtcccatatgggggtccccaggcctttccgtggacccgcagtgggcggaacagcagtccgggcctcctgagatccgtgtctgagcgtgtcacggagagcggtctccaagtgcccccggaggtctgtgcttcctgtcaccagaaccccatacaggcctctctggaatcctgcggtgacaaaacaaggagcctcattccattcctcctgaaaaaaagaataaagaaaatacttgctggaaatttctgagcaagtgagaacatggagacggcagaagccaccatcgccttaaaaggcagagccagcgactttgtggagctcacctggagacgggcttgggtgggaggtgct

SEQ ID NO: 49751 - DNA, 716 bp, Bovine  19866880893109
  misc_feature (1)..(1): n is a, c, g, or t
ntgtgccgcgccctcggcgccgcctcggcttcagcatcgtcgggccccggggccggggctcagagcgcaagggtccggggacccatggcgctggcgtcccccgcgcccccgcttcgggcgccttcccttcgccgcccccaccgttctctcgctgtcccctccgcgcagtcgcccgccttgcgctccgatccctgccccgcggcgctggcctccagcccctagacccccgcggccggccgacccgggctccgccgccacctccccgccgcgcgctggtctctgtccctcccgatctctgccgccccctgggtctctctccccgcgggtcccggtctccgtctccgtcgccctcccagtctgctccctgccgtcctccacccctgcccggtccctcccttgcgtgtctctctctctctgtctcgctcggggtctctgtctgtgtgtctctctccctcccactcttgctgcggccccccgcgctctcggacccaggcccccgtcacctgcgccccagtccccggcccgcccgcccgggagcccgagctcccgccgcccgcggcgcgccgagaactcccaactcgcggcacccgctccgctttgcgagactttcgcccctcctcacacgtgacccgcgccccactgcggaggccgcgccccccaccctcccagccccggagccccgggcggcccgcggggcccggcccagcccctttccc

SEQ ID NO: 49752 - DNA, 917 bp, Bovine  19866880896921
  misc_feature (1)..(1): n is a, c, g, or t
ntgctgaaggagcccagtgcgggttcccccacctcaaaaaggaactgactgacccaggcagggaactgagactccacctaggaaccaaaacaaggtctcactctgggaggctcaccaggaaggtggaagatgccaccgcaggggcctggagtggggggttgggggcggcacctggcttgcgtcgagaggccaggcagtgagtacaggcccctctgtagtcactccagtgaaaggagggccggcacgtgcctgctcaggccacaggggggaaggaggaacaaccctccatattattatcagtgacaaaacgggaagaccttccatcaaagaaagccagcatctgtgcccagagcaggggtaggaggcactctgcctcgcagactcccaggaccagtgcagaggaggggtattcctggggaacccagagggttccaactcacatcgtcccgcacggcctggagctgctggggcagcagccccacctggtcctccaccaagctctgcttcagggtcagggctgccagctcctgccgcaggcctgccagctggccgtccagccgccccagctccttcatggcattctcctggaaggactcctgggtcatcctactcccaaacagaagagtaagctgtgggtctccagtgaggggtaaggctatgctgaggcaaatgagaggatcccctagttggcacctgatatacgtgagtgtgaggcctgctctcggggattctaaactgaggctgtagaacacagctctggtgcctactcttggcctgcatatcccaaggagctagttattatcctgcttccctcctaagcccagatccagaattcactgcctcagctctcacatcctccaccaagtatggacgtctgggacacgaggaggcagccagcatgaggcagcacagaaaag

SEQ ID NO: 49753 - DNA, 743 bp, Bovine  19866881019735
  misc_feature (1)..(1): n is a, c, g, or t
nccaagtagtagccacttcattcctgcccaatacccccagggtagccccacctttgcaagaagagcctcagagtaaacatcacgtttattttggacattcaaatttacaaaaacaaaaagtaacaaaaaccatgacatagcatacacacacgcgcgcgcgcacacacatacacacacatgttgcatctcatgtcactttatgtacaaaatcaggcgggatcagggaggcgggttgccagtaggatgcactaatttcacagagtctgacagcttgacatgctcattcactgctcagcctgggcccacgtgagcctcttccccacccagcagggtcaggggccagggggacgggtttggagtggcaggcaattgggacaaagacggttaagagaatgattccatcttttgggggtgggctgtgtcccttccccggtttgctcagagcaaggatgctgggaaacacagtgaagaggggacccatttgaggggggggctaggaccgctgcatcatggagcgagcactgaatgcagagtcagaatgctgggttcaggtctcccagtattccggctgggtaaccccaaagactgctcatcctccctgggccctggcatcttcatctgtaaaaagagggcttcggagcccttcctgtccacgcctgcggtcccaggtcttgcacagatgtggcaaggtgatcggcctcttgggatgttggttaaggggcgccatgtgccacaaggtggga

SEQ ID NO: 49754 - DNA, 809 bp, Bovine  19866881028602
  misc_feature (1)..(1): n is a, c, g, or t
natggaagacggtcactgtctgctcctctggcctgtgagctgagacctgtgtcactctccttcatgtccccagctgactcaggctggcaggcagcaggtcagtaaatgctgttggagtgacgtgctcggctcccaacgttctatttccctcgaactcctgtctgcttccctctgcttcccagcagtccctcaagccactcagaactggactaaggaatcaagcacctcctgtgtgtgaaggctcacactaaacacttgctggaaacatcaaaacaagggaactggccacaggctgctcagggcctcgtggagcctggccatcggagcccagcatgtccagaaccacccccagcctggctcgggtaccatggtggcccagcagcgacctccagccagacatgggtgctctcccaagctgtcagggcaccctccccggcttcccataggcccgggaacctggcggagcatctccccgagcctggggaaggaggacgtcgcctacctacgtagtcatcctcggaggagtagcccgaggaggacccgaggaagtcctcggagagcttgttctccgggagcccgttgggcttgctgctgtcggtgccgcctgtgcctctcctcctcctcacccgcaggtcctcacctgcggagggaagaactcggggttctcctggggcagatgctccaaggagggaggtggtgtgcttggggacaccctgatgagcatctctgatgggcagatggaatctactctgagcccctcctgagctcccttgagtccaaggatgggtaaccaggacccagccctgtct

SEQ ID NO: 49755 - DNA, 1102 bp, Bovine  19866881082718
  misc_feature (1)..(1): n is a, c, g, or t
ncttctgtgtctcccacatggcccctatgttactctggcttgtgatattgtccctgaagtcctcccctcctgtgcagactcagctcattttaggaccggatccgtatcccccggtgtccagaacaaggcctggcatcaagtaggcctcagagaacattgtaataaattgtgatctcagagaacctaggagatgaaagagccctttgggagccccaaatccacaagcagcaagtacctttcatctcacaggccaactccaatcaatcagcagtgccttccaaaagcactgcgatgagaaagattccgagggtgagtctaggctcatgattgattagccatgtctgccttgggtggagtaggaggcagaggtggctgcatatttgccatcctttgcccaagcccctgactttatggatgaggagactgaggcccagggaggaaagaacaacctccccagggtcccacagggcgttgtggttgacagtgctcggcctccaagtacaaggcttgttccatcattcccagcacttcttgagcccagctgtgtgctgggcactatgtgagatattcagggaagggaggcttgtgagatacaactcccacccagcgtgaccttacaggcctgtcagagagtgaataaactacctagaaacaaccaaaacccaacactgagtagtcccttgtgatctgagtgaagtgcctgatgatattgctacattgtggggaaagaggaaagagtggctggaaagacactgggcagggaggacaggcagggtcagatcttgggtcagaccctggaaggagggtcactggtctccccatcccccatcccactgcttcagccttggggcttgtggcacctctgacccggggctgggggacctgtttccaggtggcccagttgcccctgagcctgaaggacaatggctggcaccacatctgcatcgcctggactacaagggatggcctgtggtctgcctaccaggatggagagctgcggggctctggtgagaacctggctgcctggcaccccatcaagcctcatgggatccttatcctgggccaggagcaggtaagggtcagggtggatgcaactagatat
